United States Patent Application Publication US 2009/0123928 A1 - sequence listing, part 3

SEQ ID NO: 65527 - DNA, 41 bp, Artificial Sequence
  primer
gtaaaacgacggccagttctgacattgatggttaagacagc

SEQ ID NO: 65528 - DNA, 38 bp, Artificial Sequence
  primer
gtaaaacgacggccagtacatggtcggtgctctgtaac

SEQ ID NO: 65529 - DNA, 21 bp, Artificial Sequence
  primer
atcgctatgcaactttgaggg

SEQ ID NO: 65530 - DNA, 38 bp, Artificial Sequence
  primer
gtaaaacgacggccagtagaagccctagccttgaactg

SEQ ID NO: 65531 - DNA, 21 bp, Artificial Sequence
  primer
caagatctggaccctgcaaac

SEQ ID NO: 65532 - DNA, 23 bp, Artificial Sequence
  primer
gcaaccaccaagggatattagtc

SEQ ID NO: 65533 - DNA, 38 bp, Artificial Sequence
  primer
gtaaaacgacggccagtaccacaggatttacagctccc

SEQ ID NO: 65534 - DNA, 21 bp, Artificial Sequence
  primer
gactcatctcacccaatgtgc

SEQ ID NO: 65535 - DNA, 21 bp, Artificial Sequence
  primer
tatggctgcttctgtcactgg

SEQ ID NO: 65536 - DNA, 21 bp, Artificial Sequence
  primer
tgcgtctcataaactgcaagg

SEQ ID NO: 65537 - DNA, 37 bp, Artificial Sequence
  primer
gtaaaacgacggccagtggtgacttggaggaagggag

SEQ ID NO: 65538 - DNA, 21 bp, Artificial Sequence
  primer
tcaggatgaatgtggtcatgc

SEQ ID NO: 65539 - DNA, 21 bp, Artificial Sequence
  primer
aaagttggtattggaccctgg

SEQ ID NO: 65540 - DNA, 35 bp, Artificial Sequence
  primer
gtaaaacgacggccagtgacgcccaaggaaagagg

SEQ ID NO: 65541 - DNA, 36 bp, Artificial Sequence
  primer
gtaaaacgacggccagtgagacccagcgctaaccag

SEQ ID NO: 65542 - DNA, 21 bp, Artificial Sequence
  primer
acccatccactttgaggacac

SEQ ID NO: 65543 - DNA, 21 bp, Artificial Sequence
  primer
cttctcactgactacgcgagg

SEQ ID NO: 65544 - DNA, 37 bp, Artificial Sequence
  primer
gtaaaacgacggccagtagagtccctgggtagatggg

SEQ ID NO: 65545 - DNA, 39 bp, Artificial Sequence
  primer
gtaaaacgacggccagtcccaaacttacatgagacaggg

SEQ ID NO: 65546 - DNA, 21 bp, Artificial Sequence
  primer
aactgaacccgatgtctttcc

SEQ ID NO: 65547 - DNA, 21 bp, Artificial Sequence
  primer
catacaagacgccaatgatgc

SEQ ID NO: 65548 - DNA, 21 bp, Artificial Sequence
  primer
aaacacagtgtcaatgcccag

SEQ ID NO: 65549 - DNA, 38 bp, Artificial Sequence
  primer
gtaaaacgacggccagtttgcccaaagaaatcattcag

SEQ ID NO: 65550 - DNA, 38 bp, Artificial Sequence
  primer
gtaaaacgacggccagtcccaatcctgacggatctaac

SEQ ID NO: 65551 - DNA, 38 bp, Artificial Sequence
  primer
gtaaaacgacggccagtagtcaagaccatcatgcgctc

SEQ ID NO: 65552 - DNA, 38 bp, Artificial Sequence
  primer
gtaaaacgacggccagttacagggatagccacctcacc

SEQ ID NO: 65553 - DNA, 21 bp, Artificial Sequence
  primer
acgttcaccatgggacctaac

SEQ ID NO: 65554 - DNA, 21 bp, Artificial Sequence
  primer
ttaacgggaagtgagaggacg

SEQ ID NO: 65555 - DNA, 21 bp, Artificial Sequence
  primer
aaactcctacagccagcaacc

SEQ ID NO: 65556 - DNA, 22 bp, Artificial Sequence
  primer
tgtcgtcttatatggcagagcc

SEQ ID NO: 65557 - DNA, 38 bp, Artificial Sequence
  primer
gtaaaacgacggccagtctcggaaagcttcctttctcc

SEQ ID NO: 65558 - DNA, 24 bp, Artificial Sequence
  primer
ccttaggaaggctttgcatattag

SEQ ID NO: 65559 - DNA, 38 bp, Artificial Sequence
  primer
gtaaaacgacggccagttgcagttcttaccaacctccc

SEQ ID NO: 65560 - DNA, 21 bp, Artificial Sequence
  primer
ccaaagtaggcctgtaggctg

SEQ ID NO: 65561 - DNA, 21 bp, Artificial Sequence
  primer
tcttcctctccctggtcttcc

SEQ ID NO: 65562 - DNA, 38 bp, Artificial Sequence
  primer
gtaaaacgacggccagtgggagtttgaaggcttctcct

SEQ ID NO: 65563 - DNA, 21 bp, Artificial Sequence
  primer
catgggaaatggaaagactcc

SEQ ID NO: 65564 - DNA, 19 bp, Artificial Sequence
  primer
tttgtgttgccactgctcc

SEQ ID NO: 65565 - DNA, 21 bp, Artificial Sequence
  primer
tctgaaacactcacaatgggc

SEQ ID NO: 65566 - DNA, 21 bp, Artificial Sequence
  primer
gactgccttccagtcaattcc

SEQ ID NO: 65567 - DNA, 41 bp, Artificial Sequence
  primer
gtaaaacgacggccagtgtgacttgtacaatgctgtttcaa

SEQ ID NO: 65568 - DNA, 22 bp, Artificial Sequence
  primer
ccttcaatcggtttctaattgc

SEQ ID NO: 65569 - DNA, 27 bp, Artificial Sequence
  primer
tctaaagagcttcatgattacttgctc

SEQ ID NO: 65570 - DNA, 43 bp, Artificial Sequence
  primer
gtaaaacgacggccagtccaaagaatttattcattcatgtgac

SEQ ID NO: 65571 - DNA, 38 bp, Artificial Sequence
  primer
gtaaaacgacggccagtctgccactaccttgctgaatg

SEQ ID NO: 65572 - DNA, 21 bp, Artificial Sequence
  primer
ttccttaccaatgaaagccca

SEQ ID NO: 65573 - DNA, 38 bp, Artificial Sequence
  primer
gtaaaacgacggccagtcctcaactaggacatgaaggc

SEQ ID NO: 65574 - DNA, 22 bp, Artificial Sequence
  primer
cagcctaacacatgtacctcca

SEQ ID NO: 65575 - DNA, 40 bp, Artificial Sequence
  primer
gtaaaacgacggccagtcaatgtgagctaatggatgtgtt

SEQ ID NO: 65576 - DNA, 38 bp, Artificial Sequence
  primer
gtaaaacgacggccagttgctttatggtgcaatttggt

SEQ ID NO: 65577 - DNA, 38 bp, Artificial Sequence
  primer
gtaaaacgacggccagtaaatcgcagcatctagtggtc

SEQ ID NO: 65578 - DNA, 29 bp, Artificial Sequence
  primer
cagaaagtaaatcaagagagagataggac

SEQ ID NO: 65579 - DNA, 21 bp, Artificial Sequence
  primer
aatgcattgatggtgcttcag

SEQ ID NO: 65580 - DNA, 22 bp, Artificial Sequence
  primer
caagcccaaagaagaagagaag

SEQ ID NO: 65581 - DNA, 41 bp, Artificial Sequence
  primer
gtaaaacgacggccagtggaggttggagagtggatagtttc

SEQ ID NO: 65582 - DNA, 25 bp, Artificial Sequence
  primer
tctgattaccttgctaatcttggtg

SEQ ID NO: 65583 - DNA, 38 bp, Artificial Sequence
  primer
gtaaaacgacggccagttcctctgaggctttcccttag

SEQ ID NO: 65584 - DNA, 38 bp, Artificial Sequence
  primer
gtaaaacgacggccagtgcactggcattgcatagaaag

SEQ ID NO: 65585 - DNA, 21 bp, Artificial Sequence
  primer
cacaggaggtaggagtgaggg

SEQ ID NO: 65586 - DNA, 20 bp, Artificial Sequence
  primer
tttggccctctttgactttg

SEQ ID NO: 65587 - DNA, 21 bp, Artificial Sequence
  primer
gtccacgtccctaaccctttc

SEQ ID NO: 65588 - DNA, 22 bp, Artificial Sequence
  primer
tcctggatggacaatgtaaacc

SEQ ID NO: 65589 - DNA, 20 bp, Artificial Sequence
  primer
gcaggaacctgctgacaatc

SEQ ID NO: 65590 - DNA, 42 bp, Artificial Sequence
  primer
gtaaaacgacggccagtttctcaaatttctagcatggaagtg

SEQ ID NO: 65591 - DNA, 39 bp, Artificial Sequence
  primer
gtaaaacgacggccagtcccaacacatctcctaaacctg

SEQ ID NO: 65592 - DNA, 38 bp, Artificial Sequence
  primer
gtaaaacgacggccagttgaggtttgacagagtcagcg

SEQ ID NO: 65593 - DNA, 38 bp, Artificial Sequence
  primer
gtaaaacgacggccagtttgaatgaacaggaaacaggg

SEQ ID NO: 65594 - DNA, 21 bp, Artificial Sequence
  primer
agcacatgaacaggaagttgg

SEQ ID NO: 65595 - DNA, 38 bp, Artificial Sequence
  primer
gtaaaacgacggccagtaacaatgaagtccgtgtccag

SEQ ID NO: 65596 - DNA, 38 bp, Artificial Sequence
  primer
gtaaaacgacggccagtgatccagccgttgtagtggtc

SEQ ID NO: 65597 - DNA, 38 bp, Artificial Sequence
  primer
gtaaaacgacggccagtcacacgtggacagcataggtg

SEQ ID NO: 65598 - DNA, 37 bp, Artificial Sequence
  primer
gtaaaacgacggccagtctcccacagctcctcaacag

SEQ ID NO: 65599 - DNA, 38 bp, Artificial Sequence
  primer
gtaaaacgacggccagttctccgacctgagtccttacc

SEQ ID NO: 65600 - DNA, 21 bp, Artificial Sequence
  primer
tgcagggcataagagacattg

SEQ ID NO: 65601 - DNA, 38 bp, Artificial Sequence
  primer
gtaaaacgacggccagtgcagcagcaaacgagtgttag

SEQ ID NO: 65602 - DNA, 38 bp, Artificial Sequence
  primer
gtaaaacgacggccagtctgacatttgagaggcaaccc

SEQ ID NO: 65603 - DNA, 38 bp, Artificial Sequence
  primer
gtaaaacgacggccagtctccagtcttaccaacccagc

SEQ ID NO: 65604 - DNA, 21 bp, Artificial Sequence
  primer
taagaggagccagtgtgatgc

SEQ ID NO: 65605 - DNA, 21 bp, Artificial Sequence
  primer
gagattcaatgcaatccctgt

SEQ ID NO: 65606 - DNA, 38 bp, Artificial Sequence
  primer
gtaaaacgacggccagtacgttcagcaagggaggtaag

SEQ ID NO: 65607 - DNA, 21 bp, Artificial Sequence
  primer
ggtctaatcctggacacctcg

SEQ ID NO: 65608 - DNA, 38 bp, Artificial Sequence
  primer
gtaaaacgacggccagtccatccaagcaattaaacagg

SEQ ID NO: 65609 - DNA, 22 bp, Artificial Sequence
  primer
aattgccaacctggtcactaac

SEQ ID NO: 65610 - DNA, 20 bp, Artificial Sequence
  primer
tgtggatcagaagtccaggc

SEQ ID NO: 65611 - DNA, 21 bp, Artificial Sequence
  primer
cacgacacaaacatctcccac

SEQ ID NO: 65612 - DNA, 21 bp, Artificial Sequence
  primer
cctgtcacactgcctcctttc

SEQ ID NO: 65613 - DNA, 21 bp, Artificial Sequence
  primer
tccatagtgttcctgggaagg

SEQ ID NO: 65614 - DNA, 21 bp, Artificial Sequence
  primer
cacccactctgggttatttgg

SEQ ID NO: 65615 - DNA, 21 bp, Artificial Sequence
  primer
agctggaccactcctaccctc

SEQ ID NO: 65616 - DNA, 21 bp, Artificial Sequence
  primer
atccctaccctagcccagaag

SEQ ID NO: 65617 - DNA, 21 bp, Artificial Sequence
  primer
catccagttatggagcttccc

SEQ ID NO: 65618 - DNA, 21 bp, Artificial Sequence
  primer
ctcctttcagacgtcctcacc

SEQ ID NO: 65619 - DNA, 21 bp, Artificial Sequence
  primer
ctcacgagtctgatggcaaag

SEQ ID NO: 65620 - DNA, 38 bp, Artificial Sequence
  primer
gtaaaacgacggccagtccttgacagagcttccaggag

SEQ ID NO: 65621 - DNA, 21 bp, Artificial Sequence
  primer
aagtagaggtggccaggtttg

SEQ ID NO: 65622 - DNA, 21 bp, Artificial Sequence
  primer
aagaaacaggcctctcactgg

SEQ ID NO: 65623 - DNA, 38 bp, Artificial Sequence
  primer
gtaaaacgacggccagtcataagcacagccagacgttc

SEQ ID NO: 65624 - DNA, 21 bp, Artificial Sequence
  primer
gaaatggatccagggataggg

SEQ ID NO: 65625 - DNA, 21 bp, Artificial Sequence
  primer
agtgggatgtgggtttgtttg

SEQ ID NO: 65626 - DNA, 21 bp, Artificial Sequence
  primer
ttgacaaagtacagcgggatg

SEQ ID NO: 65627 - DNA, 21 bp, Artificial Sequence
  primer
tgacagaacagggccttaacc

SEQ ID NO: 65628 - DNA, 20 bp, Artificial Sequence
  primer
ccagaagcgtgaaactagcc

SEQ ID NO: 65629 - DNA, 38 bp, Artificial Sequence
  primer
gtaaaacgacggccagttaacaggctgcaaagttctcg

SEQ ID NO: 65630 - DNA, 38 bp, Artificial Sequence
  primer
gtaaaacgacggccagttctctccaaatatgtggcacc

SEQ ID NO: 65631 - DNA, 21 bp, Artificial Sequence
  primer
agtccaagtcccacaaggttc

SEQ ID NO: 65632 - DNA, 21 bp, Artificial Sequence
  primer
agaaccagacgcaagtccttc

SEQ ID NO: 65633 - DNA, 21 bp, Artificial Sequence
  primer
ctacccagattgactcctggc

SEQ ID NO: 65634 - DNA, 39 bp, Artificial Sequence
  primer
gtaaaacgacggccagtgaagatccagaggcctacttcc

SEQ ID NO: 65635 - DNA, 38 bp, Artificial Sequence
  primer
gtaaaacgacggccagttttgacaactccaacactgcc

SEQ ID NO: 65636 - DNA, 37 bp, Artificial Sequence
  primer
gtaaaacgacggccagtgaagcccttaacatgtgcca

SEQ ID NO: 65637 - DNA, 38 bp, Artificial Sequence
  primer
gtaaaacgacggccagtgtttcaccttctgcttctggc

SEQ ID NO: 65638 - DNA, 38 bp, Artificial Sequence
  primer
gtaaaacgacggccagttcactcgcaagcaggaaatag

SEQ ID NO: 65639 - DNA, 21 bp, Artificial Sequence
  primer
agaagggactgtgcgtattgg

SEQ ID NO: 65640 - DNA, 21 bp, Artificial Sequence
  primer
gtgttaaaccaagctggaggg

SEQ ID NO: 65641 - DNA, 38 bp, Artificial Sequence
  primer
gtaaaacgacggccagtataagcagcttctccaagccc

SEQ ID NO: 65642 - DNA, 21 bp, Artificial Sequence
  primer
gagcagacaatgcttcctcag

SEQ ID NO: 65643 - DNA, 38 bp, Artificial Sequence
  primer
gtaaaacgacggccagttgtcacaccagagaacaaggg

SEQ ID NO: 65644 - DNA, 39 bp, Artificial Sequence
  primer
gtaaaacgacggccagtgatatataaagcaccggcaagc

SEQ ID NO: 65645 - DNA, 38 bp, Artificial Sequence
  primer
gtaaaacgacggccagttacagaacacttggtgcgagc

SEQ ID NO: 65646 - DNA, 21 bp, Artificial Sequence
  primer
acacattgtcaaaggccacag

SEQ ID NO: 65647 - DNA, 22 bp, Artificial Sequence
  primer
cgaagggcatgtgtacctactg

SEQ ID NO: 65648 - DNA, 18 bp, Artificial Sequence
  primer
tgtggtgactcgtgcctg

SEQ ID NO: 65649 - DNA, 39 bp, Artificial Sequence
  primer
gtaaaacgacggccagttctatgacagaagcagggattg

SEQ ID NO: 65650 - DNA, 21 bp, Artificial Sequence
  primer
ctgccctcacatctaggaacc

SEQ ID NO: 65651 - DNA, 41 bp, Artificial Sequence
  primer
gtaaaacgacggccagtccatcctcaacatggttatgagtc

SEQ ID NO: 65652 - DNA, 43 bp, Artificial Sequence
  primer
gtaaaacgacggccagtagaccattctaagaaagaccaatttc

SEQ ID NO: 65653 - DNA, 19 bp, Artificial Sequence
  primer
aaagcgacagcctcaatgc

SEQ ID NO: 65654 - DNA, 39 bp, Artificial Sequence
  primer
gtaaaacgacggccagttttcccactaagaaagccaaac

SEQ ID NO: 65655 - DNA, 38 bp, Artificial Sequence
  primer
gtaaaacgacggccagttctctttgccaacttgagacc

SEQ ID NO: 65656 - DNA, 37 bp, Artificial Sequence
  primer
gtaaaacgacggccagtatggagggtgtgttggtctg

SEQ ID NO: 65657 - DNA, 37 bp, Artificial Sequence
  primer
gtaaaacgacggccagtactgcctggtctgcaatgag

SEQ ID NO: 65658 - DNA, 21 bp, Artificial Sequence
  primer
ccaaagcaggtgtaggaggtc

SEQ ID NO: 65659 - DNA, 21 bp, Artificial Sequence
  primer
tttcagcccgagttctttgag

SEQ ID NO: 65660 - DNA, 21 bp, Artificial Sequence
  primer
caaatgggtcaatggctttag

SEQ ID NO: 65661 - DNA, 38 bp, Artificial Sequence
  primer
gtaaaacgacggccagttgtggttaagtgcgagaggac

SEQ ID NO: 65662 - DNA, 25 bp, Artificial Sequence
  primer
tcctttaagattatcctgcttatgg

SEQ ID NO: 65663 - DNA, 38 bp, Artificial Sequence
  primer
gtaaaacgacggccagtggagcttgcatagtgctcttc

SEQ ID NO: 65664 - DNA, 38 bp, Artificial Sequence
  primer
gtaaaacgacggccagttcagcagtcagcctaataccc

SEQ ID NO: 65665 - DNA, 21 bp, Artificial Sequence
  primer
cgaaatgtgccctttcatacc

SEQ ID NO: 65666 - DNA, 20 bp, Artificial Sequence
  primer
tgtctgcaaagaaggcaaac

SEQ ID NO: 65667 - DNA, 40 bp, Artificial Sequence
  primer
gtaaaacgacggccagtttgtctctcctttccgaggatac

SEQ ID NO: 65668 - DNA, 21 bp, Artificial Sequence
  primer
aggtctgtgcccaggtttatc

SEQ ID NO: 65669 - DNA, 21 bp, Artificial Sequence
  primer
ccctcagccactacgctaatc

SEQ ID NO: 65670 - DNA, 43 bp, Artificial Sequence
  primer
gtaaaacgacggccagtcatgactggtcaacaaatatctgaat

SEQ ID NO: 65671 - DNA, 38 bp, Artificial Sequence
  primer
gtaaaacgacggccagttgatcgtagcttactgcagcc

SEQ ID NO: 65672 - DNA, 38 bp, Artificial Sequence
  primer
gtaaaacgacggccagttcaaagcccattcatacatgc

SEQ ID NO: 65673 - DNA, 38 bp, Artificial Sequence
  primer
gtaaaacgacggccagtctgtaccatctcagggaaggg

SEQ ID NO: 65674 - DNA, 38 bp, Artificial Sequence
  primer
gtaaaacgacggccagtaaacaccaaaccttcccaaac

SEQ ID NO: 65675 - DNA, 22 bp, Artificial Sequence
  primer
cccacagtatctactccatccc

SEQ ID NO: 65676 - DNA, 37 bp, Artificial Sequence
  primer
gtaaaacgacggccagtcccaccctgaccttctcatc

SEQ ID NO: 65677 - DNA, 38 bp, Artificial Sequence
  primer
gtaaaacgacggccagtatggtacagtagccaccatgc

SEQ ID NO: 65678 - DNA, 41 bp, Artificial Sequence
  primer
gtaaaacgacggccagttcctggaatctaatccctttatcc

SEQ ID NO: 65679 - DNA, 39 bp, Artificial Sequence
  primer
gtaaaacgacggccagtcccagtagataaagcaagggac

SEQ ID NO: 65680 - DNA, 20 bp, Artificial Sequence
  primer
ctttcctgatctgtgcagcc

SEQ ID NO: 65681 - DNA, 21 bp, Artificial Sequence
  primer
caatcctaaagcaaaccaggc

SEQ ID NO: 65682 - DNA, 39 bp, Artificial Sequence
  primer
gtaaaacgacggccagttctctgggaagacacctttacc

SEQ ID NO: 65683 - DNA, 20 bp, Artificial Sequence
  primer
atcagctgctgccatctttc

SEQ ID NO: 65684 - DNA, 41 bp, Artificial Sequence
  primer
gtaaaacgacggccagttgcaaagaatcacacactaacagc

SEQ ID NO: 65685 - DNA, 38 bp, Artificial Sequence
  primer
gtaaaacgacggccagttacgtttccacatgcataccc

SEQ ID NO: 65686 - DNA, 38 bp, Artificial Sequence
  primer
gtaaaacgacggccagtcaggatttggatttcactggc

SEQ ID NO: 65687 - DNA, 39 bp, Artificial Sequence
  primer
gtaaaacgacggccagtaaggcagaactttctacaaggc

SEQ ID NO: 65688 - DNA, 39 bp, Artificial Sequence
  primer
gtaaaacgacggccagtctttccacattcctcctcattc

SEQ ID NO: 65689 - DNA, 38 bp, Artificial Sequence
  primer
gtaaaacgacggccagtatcggtaggaatgaccagtcg

SEQ ID NO: 65690 - DNA, 38 bp, Artificial Sequence
  primer
gtaaaacgacggccagtcatcttgcccatctctgtgtc

SEQ ID NO: 65691 - DNA, 38 bp, Artificial Sequence
  primer
gtaaaacgacggccagtctaagtggctgttggatgcac

SEQ ID NO: 65692 - DNA, 38 bp, Artificial Sequence
  primer
gtaaaacgacggccagtataaaggcagaactggcctcc

SEQ ID NO: 65693 - DNA, 20 bp, Artificial Sequence
  primer
gtcagcactgcaaacagcag

SEQ ID NO: 65694 - DNA, 37 bp, Artificial Sequence
  primer
gtaaaacgacggccagtagctcaggcttcgtcctacc

SEQ ID NO: 65695 - DNA, 21 bp, Artificial Sequence
  primer
gggtgcttgatggagagaaag

SEQ ID NO: 65696 - DNA, 38 bp, Artificial Sequence
  primer
gtaaaacgacggccagtaagagtctgcgtagccaggtc

SEQ ID NO: 65697 - DNA, 21 bp, Artificial Sequence
  primer
tcccaattctcaaagagggac

SEQ ID NO: 65698 - DNA, 38 bp, Artificial Sequence
  primer
gtaaaacgacggccagttcctgccttaggaatcccttc

SEQ ID NO: 65699 - DNA, 21 bp, Artificial Sequence
  primer
gaagaggctggaaagtcatcc

SEQ ID NO: 65700 - DNA, 21 bp, Artificial Sequence
  primer
ggagactaagggtctcctccc

SEQ ID NO: 65701 - DNA, 37 bp, Artificial Sequence
  primer
gtaaaacgacggccagtctggaggaagaaatcccagc

SEQ ID NO: 65702 - DNA, 38 bp, Artificial Sequence
  primer
gtaaaacgacggccagtaactgctgtctccatgctcag

SEQ ID NO: 65703 - DNA, 38 bp, Artificial Sequence
  primer
gtaaaacgacggccagtcacacagggagtgacagaacc

SEQ ID NO: 65704 - DNA, 38 bp, Artificial Sequence
  primer
gtaaaacgacggccagttagaacccagttcccagtgtg

SEQ ID NO: 65705 - DNA, 42 bp, Artificial Sequence
  primer
gtaaaacgacggccagttctaaagataattactctgtcgccc

SEQ ID NO: 65706 - DNA, 21 bp, Artificial Sequence
  primer
agctacacagctccgagttcc

SEQ ID NO: 65707 - DNA, 20 bp, Artificial Sequence
  primer
gaaatgggtacccttggctg

SEQ ID NO: 65708 - DNA, 22 bp, Artificial Sequence
  primer
ggcaacagagcaacactcaatc

SEQ ID NO: 65709 - DNA, 22 bp, Artificial Sequence
  primer
tgcttaacagtatgccctctcc

SEQ ID NO: 65710 - DNA, 40 bp, Artificial Sequence
  primer
gtaaaacgacggccagtcacagtcagtctgtcagaaaggg

SEQ ID NO: 65711 - DNA, 38 bp, Artificial Sequence
  primer
gtaaaacgacggccagttggaaggaaactcatgctcag

SEQ ID NO: 65712 - DNA, 23 bp, Artificial Sequence
  primer
tctgctggagagctaatcttgag

SEQ ID NO: 65713 - DNA, 20 bp, Artificial Sequence
  primer
gtgtcaggtctgctcccaag

SEQ ID NO: 65714 - DNA, 36 bp, Artificial Sequence
  primer
gtaaaacgacggccagtggcccaacagtgacaggac

SEQ ID NO: 65715 - DNA, 21 bp, Artificial Sequence
  primer
agagcaccgcactgctaagac

SEQ ID NO: 65716 - DNA, 21 bp, Artificial Sequence
  primer
cagacaagagttggtccagcc

SEQ ID NO: 65717 - DNA, 38 bp, Artificial Sequence
  primer
gtaaaacgacggccagtgcccagcctgtactttcactc

SEQ ID NO: 65718 - DNA, 38 bp, Artificial Sequence
  primer
gtaaaacgacggccagtaaccagggcctgactgactac

SEQ ID NO: 65719 - DNA, 20 bp, Artificial Sequence
  primer
ccagaacagcagctcagacc

SEQ ID NO: 65720 - DNA, 21 bp, Artificial Sequence
  primer
ctgctcctcccaatctcaatc

SEQ ID NO: 65721 - DNA, 21 bp, Artificial Sequence
  primer
atgcaggctgtacacacacag

SEQ ID NO: 65722 - DNA, 21 bp, Artificial Sequence
  primer
tgtgttccagttactgctggg

SEQ ID NO: 65723 - DNA, 20 bp, Artificial Sequence
  primer
agctacgaactccgcctctc

SEQ ID NO: 65724 - DNA, 38 bp, Artificial Sequence
  primer
gtaaaacgacggccagtcaactagcactttgcctccac

SEQ ID NO: 65725 - DNA, 38 bp, Artificial Sequence
  primer
gtaaaacgacggccagttctgaggattggtgctggtag

SEQ ID NO: 65726 - DNA, 38 bp, Artificial Sequence
  primer
gtaaaacgacggccagtgagaattgtgcctgacacacg

SEQ ID NO: 65727 - DNA, 38 bp, Artificial Sequence
  primer
gtaaaacgacggccagtgtgtcttgcttgacgtcttgg

SEQ ID NO: 65728 - DNA, 20 bp, Artificial Sequence
  primer
agacccacctctcctgttcc

SEQ ID NO: 65729 - DNA, 21 bp, Artificial Sequence
  primer
ctgggctcgatatttagggtg

SEQ ID NO: 65730 - DNA, 21 bp, Artificial Sequence
  primer
gaagaagtggagctgggtctc

SEQ ID NO: 65731 - DNA, 38 bp, Artificial Sequence
  primer
gtaaaacgacggccagtgaacattgggaagaggtcagg

SEQ ID NO: 65732 - DNA, 38 bp, Artificial Sequence
  primer
gtaaaacgacggccagtgggacagatcctatctcagcc

SEQ ID NO: 65733 - DNA, 37 bp, Artificial Sequence
  primer
gtaaaacgacggccagtggctagcagcaaccatcttg

SEQ ID NO: 65734 - DNA, 21 bp, Artificial Sequence
  primer
agtggtcaaggtgcctgtagc

SEQ ID NO: 65735 - DNA, 21 bp, Artificial Sequence
  primer
tagacgccaggcctgaaatac

SEQ ID NO: 65736 - DNA, 20 bp, Artificial Sequence
  primer
agggtcccatagtgattggg

SEQ ID NO: 65737 - DNA, 21 bp, Artificial Sequence
  primer
cagggtctgggtaaacctgag

SEQ ID NO: 65738 - DNA, 21 bp, Artificial Sequence
  primer
gggcatgacagtagagaaggg

SEQ ID NO: 65739 - DNA, 21 bp, Artificial Sequence
  primer
tatgaacactggctctgctgc

SEQ ID NO: 65740 - DNA, 20 bp, Artificial Sequence
  primer
tctgaaggagtccagggagg

SEQ ID NO: 65741 - DNA, 21 bp, Artificial Sequence
  primer
cttgcacagcctctgactcac

SEQ ID NO: 65742 - DNA, 21 bp, Artificial Sequence
  primer
cacgaaagacagatggtgagc

SEQ ID NO: 65743 - DNA, 21 bp, Artificial Sequence
  primer
ccctttgggaggaattaaagg

SEQ ID NO: 65744 - DNA, 37 bp, Artificial Sequence
  primer
gtaaaacgacggccagtcagcatgtgggaaggttctg

SEQ ID NO: 65745 - DNA, 25 bp, Artificial Sequence
  primer
gggaaatgcaaacttctttagtctc

SEQ ID NO: 65746 - DNA, 21 bp, Artificial Sequence
  primer
aatccagatgggagaaggaag

SEQ ID NO: 65747 - DNA, 38 bp, Artificial Sequence
  primer
gtaaaacgacggccagtgtgctgggattacaggcataa

SEQ ID NO: 65748 - DNA, 38 bp, Artificial Sequence
  primer
gtaaaacgacggccagtagtcacatcctgaggagacgg

SEQ ID NO: 65749 - DNA, 22 bp, Artificial Sequence
  primer
gtaaggaaggttctggattccc

SEQ ID NO: 65750 - DNA, 28 bp, Artificial Sequence
  primer
aaatatgaaggtccaagttacagtctct

SEQ ID NO: 65751 - DNA, 42 bp, Artificial Sequence
  primer
gtaaaacgacggccagttgtcaggtgtaaataatagagaccc

SEQ ID NO: 65752 - DNA, 45 bp, Artificial Sequence
  primer
gtaaaacgacggccagtaagagggtctatcacaataaatgctagt

SEQ ID NO: 65753 - DNA, 43 bp, Artificial Sequence
  primer
gtaaaacgacggccagtccaacttgttaggataatagcagtcc

SEQ ID NO: 65754 - DNA, 22 bp, Artificial Sequence
  primer
tgattaatgtcgctgagtttcc

SEQ ID NO: 65755 - DNA, 38 bp, Artificial Sequence
  primer
gtaaaacgacggccagtagtgggtattacaaccagcgg

SEQ ID NO: 65756 - DNA, 39 bp, Artificial Sequence
  primer
gtaaaacgacggccagtcccaccacaataaagtttccac

SEQ ID NO: 65757 - DNA, 39 bp, Artificial Sequence
  primer
gtaaaacgacggccagtggcccacaatattaatcagcac

SEQ ID NO: 65758 - DNA, 36 bp, Artificial Sequence
  primer
gtaaaacgacggccagtgttcacgcaatcctcccac

SEQ ID NO: 65759 - DNA, 40 bp, Artificial Sequence
  primer
gtaaaacgacggccagtgaattccagtttggtgtatgtgg

SEQ ID NO: 65760 - DNA, 21 bp, Artificial Sequence
  primer
agttgtcaccatctgctttgc

SEQ ID NO: 65761 - DNA, 22 bp, Artificial Sequence
  primer
gacaagtttccgtttcttagcc

SEQ ID NO: 65762 - DNA, 19 bp, Artificial Sequence
  primer
agtgtcgggtctccacagc

SEQ ID NO: 65763 - DNA, 39 bp, Artificial Sequence
  primer
gtaaaacgacggccagtacatctcctggcctgagattac

SEQ ID NO: 65764 - DNA, 39 bp, Artificial Sequence
  primer
gtaaaacgacggccagtgcactgtttggacactactggg

SEQ ID NO: 65765 - DNA, 38 bp, Artificial Sequence
  primer
gtaaaacgacggccagtttcagttgcgtccaaattcag

SEQ ID NO: 65766 - DNA, 35 bp, Artificial Sequence
  primer
gtaaaacgacggccagtaggtgtgagccaccatgc

SEQ ID NO: 65767 - DNA, 22 bp, Artificial Sequence
  primer
ccagtgagctatcttgaaccag

SEQ ID NO: 65768 - DNA, 22 bp, Artificial Sequence
  primer
cagctggagtaagcatagggtg

SEQ ID NO: 65769 - DNA, 26 bp, Artificial Sequence
  primer
aaaggaatgcaatgtttctcttaaac

SEQ ID NO: 65770 - DNA, 41 bp, Artificial Sequence
  primer
gtaaaacgacggccagtcatggaaataaacactcctatccc

SEQ ID NO: 65771 - DNA, 21 bp, Artificial Sequence
  primer
tgcacagcctgactgctattc

SEQ ID NO: 65772 - DNA, 38 bp, Artificial Sequence
  primer
gtaaaacgacggccagtccagtccatttgaaataccca

SEQ ID NO: 65773 - DNA, 21 bp, Artificial Sequence
  primer
gatgacgacttaacaccgtcc

SEQ ID NO: 65774 - DNA, 21 bp, Artificial Sequence
  primer
gatagctccaaaggccaaatc

SEQ ID NO: 65775 - DNA, 23 bp, Artificial Sequence
  primer
ttgagtactgccaagaggtcaag

SEQ ID NO: 65776 - DNA, 21 bp, Artificial Sequence
  primer
tccttcttcagcaacccatct

SEQ ID NO: 65777 - DNA, 21 bp, Artificial Sequence
  primer
agtatttcagggaagggctgg

SEQ ID NO: 65778 - DNA, 21 bp, Artificial Sequence
  primer
accgttggatgtaatcactgc

SEQ ID NO: 65779 - DNA, 38 bp, Artificial Sequence
  primer
gtaaaacgacggccagtttcagccagccacttagtttg

SEQ ID NO: 65780 - DNA, 42 bp, Artificial Sequence
  primer
gtaaaacgacggccagtcaatttgattcttcatgtcagatcc

SEQ ID NO: 65781 - DNA, 21 bp, Artificial Sequence
  primer
gtgcaccttctggacccatac

SEQ ID NO: 65782 - DNA, 21 bp, Artificial Sequence
  primer
ctttgggtacaaattgggctc

SEQ ID NO: 65783 - DNA, 20 bp, Artificial Sequence
  primer
gagattgtgccgttgcactc

SEQ ID NO: 65784 - DNA, 37 bp, Artificial Sequence
  primer
gtaaaacgacggccagttaaagggtttgggatcaggg

SEQ ID NO: 65785 - DNA, 38 bp, Artificial Sequence
  primer
gtaaaacgacggccagtctcactaagcctgaagccctg

SEQ ID NO: 65786 - DNA, 38 bp, Artificial Sequence
  primer
gtaaaacgacggccagtcacaacagtgaagggaaaggg

SEQ ID NO: 65787 - DNA, 40 bp, Artificial Sequence
  primer
gtaaaacgacggccagtggcacatggtaatctctctaccc

SEQ ID NO: 65788 - DNA, 20 bp, Artificial Sequence
  primer
acatcttcccattcctgctg

SEQ ID NO: 65789 - DNA, 38 bp, Artificial Sequence
  primer
gtaaaacgacggccagtaatgcctgtgttacgctcaag

SEQ ID NO: 65790 - DNA, 21 bp, Artificial Sequence
  primer
agtggcttgcatctcctgttc

SEQ ID NO: 65791 - DNA, 20 bp, Artificial Sequence
  primer
ccaagtttcgagtgcgtgtg

SEQ ID NO: 65792 - DNA, 21 bp, Artificial Sequence
  primer
ggcaacaagagccaaactctg

SEQ ID NO: 65793 - DNA, 21 bp, Artificial Sequence
  primer
accacaccatcatcctcactg

SEQ ID NO: 65794 - DNA, 38 bp, Artificial Sequence
  primer
gtaaaacgacggccagtatagggctttaggcttctggg

SEQ ID NO: 65795 - DNA, 21 bp, Artificial Sequence
  primer
ctcaagctcccagtccacttc

SEQ ID NO: 65796 - DNA, 21 bp, Artificial Sequence
  primer
tcaccaacttatgtgccatcc

SEQ ID NO: 65797 - DNA, 26 bp, Artificial Sequence
  primer
aatgattaccattacatcgtgacaac

SEQ ID NO: 65798 - DNA, 41 bp, Artificial Sequence
  primer
gtaaaacgacggccagtttgctttcctttctctcactaacc

SEQ ID NO: 65799 - DNA, 43 bp, Artificial Sequence
  primer
gtaaaacgacggccagtgggagttctaactcactgtctgactc

SEQ ID NO: 65800 - DNA, 22 bp, Artificial Sequence
  primer
ataggaccaatcattgctttgc

SEQ ID NO: 65801 - DNA, 25 bp, Artificial Sequence
  primer
tgacataacagccagaatgtaagag

SEQ ID NO: 65802 - DNA, 21 bp, Artificial Sequence
  primer
taagaagaaatggagagggcg

SEQ ID NO: 65803 - DNA, 38 bp, Artificial Sequence
  primer
gtaaaacgacggccagtgtcactggtttcctccatctg

SEQ ID NO: 65804 - DNA, 22 bp, Artificial Sequence
  primer
ggacagtcccagaaacactcac

SEQ ID NO: 65805 - DNA, 22 bp, Artificial Sequence
  primer
gctgacaatcaatacaggtccc

SEQ ID NO: 65806 - DNA, 41 bp, Artificial Sequence
  primer
gtaaaacgacggccagtaagagccagaacagattaagcatc

SEQ ID NO: 65807 - DNA, 38 bp, Artificial Sequence
  primer
gtaaaacgacggccagtaagtgtcaggcaacactctgg

SEQ ID NO: 65808 - DNA, 38 bp, Artificial Sequence
  primer
gtaaaacgacggccagtccaaagtctgcccagtgattc

SEQ ID NO: 65809 - DNA, 21 bp, Artificial Sequence
  primer
ctgcacacaaagaatcccttc

SEQ ID NO: 65810 - DNA, 21 bp, Artificial Sequence
  primer
aaagtaccatccagcagtggc

SEQ ID NO: 65811 - DNA, 21 bp, Artificial Sequence
  primer
taattgaggacagtgccagcc

SEQ ID NO: 65812 - DNA, 21 bp, Artificial Sequence
  primer
agtgggattgtgtgcaatcag

SEQ ID NO: 65813 - DNA, 19 bp, Artificial Sequence
  primer
gcctctgtgtccctgcttc

SEQ ID NO: 65814 - DNA, 36 bp, Artificial Sequence
  primer
gtaaaacgacggccagtaagctccaaggcagaggtg

SEQ ID NO: 65815 - DNA, 38 bp, Artificial Sequence
  primer
gtaaaacgacggccagtagctcctcgatggtgagaaag

SEQ ID NO: 65816 - DNA, 37 bp, Artificial Sequence
  primer
gtaaaacgacggccagtccgttacgaactgctggaac

SEQ ID NO: 65817 - DNA, 21 bp, Artificial Sequence
  primer
tcagacctgtgtaccacctgc

SEQ ID NO: 65818 - DNA, 38 bp, Artificial Sequence
  primer
gtaaaacgacggccagtccttcactgtgcattcacctc

SEQ ID NO: 65819 - DNA, 37 bp, Artificial Sequence
  primer
gtaaaacgacggccagtgaagatcagggaaaggcagg

SEQ ID NO: 65820 - DNA, 40 bp, Artificial Sequence
  primer
gtaaaacgacggccagttgaaccaaacagaaaggcatact

SEQ ID NO: 65821 - DNA, 38 bp, Artificial Sequence
  primer
gtaaaacgacggccagtatacatgaggaaacaaggccc

SEQ ID NO: 65822 - DNA, 38 bp, Artificial Sequence
  primer
gtaaaacgacggccagtcttcaggcacagggaactacc

SEQ ID NO: 65823 - DNA, 23 bp, Artificial Sequence
  primer
gctaatggtgcaaattaaactcg

SEQ ID NO: 65824 - DNA, 21 bp, Artificial Sequence
  primer
cctaccgattcccttcctaag

SEQ ID NO: 65825 - DNA, 44 bp, Artificial Sequence
  primer
gtaaaacgacggccagtttagggtagtagtgatgcaaatcatag

SEQ ID NO: 65826 - DNA, 38 bp, Artificial Sequence
  primer
gtaaaacgacggccagtaaatcacatgcagcattcagg

SEQ ID NO: 65827 - DNA, 38 bp, Artificial Sequence
  primer
gtaaaacgacggccagtaagtcggaacttgggtcagtg

SEQ ID NO: 65828 - DNA, 25 bp, Artificial Sequence
  primer
cagacgagtaggtacagacttccaa

SEQ ID NO: 65829 - DNA, 21 bp, Artificial Sequence
  primer
tcacttccactgggacttgag

SEQ ID NO: 65830 - DNA, 21 bp, Artificial Sequence
  primer
tctcctacctgtaaggcctcc

SEQ ID NO: 65831 - DNA, 37 bp, Artificial Sequence
  primer
gtaaaacgacggccagttacctgctcgctcctcacag

SEQ ID NO: 65832 - DNA, 38 bp, Artificial Sequence
  primer
gtaaaacgacggccagtttgaaggacatgtggcagaag

SEQ ID NO: 65833 - DNA, 25 bp, Artificial Sequence
  primer
tgacactggaagaaaccatatcatc

SEQ ID NO: 65834 - DNA, 21 bp, Artificial Sequence
  primer
caagcttcttctacccttgcc

SEQ ID NO: 65835 - DNA, 20 bp, Artificial Sequence
  primer
ttaccatccaatgcaggagc

SEQ ID NO: 65836 - DNA, 38 bp, Artificial Sequence
  primer
gtaaaacgacggccagtaatatgcgggaactactgctg

SEQ ID NO: 65837 - DNA, 38 bp, Artificial Sequence
  primer
gtaaaacgacggccagtggaacatcaagccacactgaa

SEQ ID NO: 65838 - DNA, 25 bp, Artificial Sequence
  primer
aggtaatgatgtatttcaatgtccc

SEQ ID NO: 65839 - DNA, 38 bp, Artificial Sequence
  primer
gtaaaacgacggccagtttaagggccattctgaccatc

SEQ ID NO: 65840 - DNA, 38 bp, Artificial Sequence
  primer
gtaaaacgacggccagtagtgaacggattgtttctgcc

SEQ ID NO: 65841 - DNA, 21 bp, Artificial Sequence
  primer
aaaccaacacagcttccttcc

SEQ ID NO: 65842 - DNA, 22 bp, Artificial Sequence
  primer
caatttagcccacgttaattgc

SEQ ID NO: 65843 - DNA, 20 bp, Artificial Sequence
  primer
tctcccttccctcattctgc

SEQ ID NO: 65844 - DNA, 21 bp, Artificial Sequence
  primer
acctgggctactctctttccc

SEQ ID NO: 65845 - DNA, 38 bp, Artificial Sequence
  primer
gtaaaacgacggccagtcccttcaccaccattacaagg

SEQ ID NO: 65846 - DNA, 38 bp, Artificial Sequence
  primer
gtaaaacgacggccagtacaaagtcatgctgtccaagg

SEQ ID NO: 65847 - DNA, 21 bp, Artificial Sequence
  primer
aggacctcttgccagactcag

SEQ ID NO: 65848 - DNA, 21 bp, Artificial Sequence
  primer
cagagggaggagatgacacag

SEQ ID NO: 65849 - DNA, 20 bp, Artificial Sequence
  primer
cgcacacctctgaagctacc

SEQ ID NO: 65850 - DNA, 21 bp, Artificial Sequence
  primer
cctgggaaagtgaccagaaac

SEQ ID NO: 65851 - DNA, 21 bp, Artificial Sequence
  primer
cctcctgcctgaaccttattg

SEQ ID NO: 65852 - DNA, 21 bp, Artificial Sequence
  primer
ccttccagcaagtcatgtacc

SEQ ID NO: 65853 - DNA, 39 bp, Artificial Sequence
  primer
gtaaaacgacggccagttttccagatcattcacacatgc

SEQ ID NO: 65854 - DNA, 21 bp, Artificial Sequence
  primer
cccttctctaccagaggcttg

SEQ ID NO: 65855 - DNA, 21 bp, Artificial Sequence
  primer
ttgcccttacccttaaagagc

SEQ ID NO: 65856 - DNA, 41 bp, Artificial Sequence
  primer
gtaaaacgacggccagtcactgcagagattctagcacaaag

SEQ ID NO: 65857 - DNA, 21 bp, Artificial Sequence
  primer
ccctggagtggtttcacagtc

SEQ ID NO: 65858 - DNA, 39 bp, Artificial Sequence
  primer
gtaaaacgacggccagtgggatcagcatggtttcctaag

SEQ ID NO: 65859 - DNA, 22 bp, Artificial Sequence
  primer
aatgcttaagtcccactcctcc

SEQ ID NO: 65860 - DNA, 21 bp, Artificial Sequence
  primer
gtttctgttaccaaccgcacc

SEQ ID NO: 65861 - DNA, 21 bp, Artificial Sequence
  primer
agccatgagatacagccacac

SEQ ID NO: 65862 - DNA, 39 bp, Artificial Sequence
  primer
gtaaaacgacggccagtgatggagaaatcattcacagcc

SEQ ID NO: 65863 - DNA, 38 bp, Artificial Sequence
  primer
gtaaaacgacggccagtcagcagcaaaccttgagtcag

SEQ ID NO: 65864 - DNA, 20 bp, Artificial Sequence
  primer
aatgcaggctactggtctgg

SEQ ID NO: 65865 - DNA, 38 bp, Artificial Sequence
  primer
gtaaaacgacggccagttgaaggcacaaggaaagaatc

SEQ ID NO: 65866 - DNA, 22 bp, Artificial Sequence
  primer
tgtagggatctatcaccttggc

SEQ ID NO: 65867 - DNA, 38 bp, Artificial Sequence
  primer
gtaaaacgacggccagtggcatccatatcttgaccagg

SEQ ID NO: 65868 - DNA, 21 bp, Artificial Sequence
  primer
ttctgaagtccattcccttgg

SEQ ID NO: 65869 - DNA, 38 bp, Artificial Sequence
  primer
gtaaaacgacggccagttaattcaaagggcaaatgctg

SEQ ID NO: 65870 - DNA, 21 bp, Artificial Sequence
  primer
actgaaacagaccctcccaac

SEQ ID NO: 65871 - DNA, 21 bp, Artificial Sequence
  primer
caggccataatctggcatttc

SEQ ID NO: 65872 - DNA, 21 bp, Artificial Sequence
  primer
gttcacagggcttctgtcctc

SEQ ID NO: 65873 - DNA, 21 bp, Artificial Sequence
  primer
aatcgctaaatgccaaagacg

SEQ ID NO: 65874 - DNA, 21 bp, Artificial Sequence
  primer
tacaccgtactgcctcactgg

SEQ ID NO: 65875 - DNA, 21 bp, Artificial Sequence
  primer
taacggtctctgcagctgttc

SEQ ID NO: 65876 - DNA, 38 bp, Artificial Sequence
  primer
gtaaaacgacggccagtaaagtgatcacctgcctctgg

SEQ ID NO: 65877 - DNA, 37 bp, Artificial Sequence
  primer
gtaaaacgacggccagtctgccctccttctgacactg

SEQ ID NO: 65878 - DNA, 21 bp, Artificial Sequence
  primer
tgaagacaggacaaggcagtc

SEQ ID NO: 65879 - DNA, 39 bp, Artificial Sequence
  primer
gtaaaacgacggccagtcctgtgcttagtcacctgcttc

SEQ ID NO: 65880 - DNA, 21 bp, Artificial Sequence
  primer
ctacttgccacagtctccagg

SEQ ID NO: 65881 - DNA, 20 bp, Artificial Sequence
  primer
caagtcagcaaactgctggg

SEQ ID NO: 65882 - DNA, 38 bp, Artificial Sequence
  primer
gtaaaacgacggccagttacagggtccctctcttctcg

SEQ ID NO: 65883 - DNA, 28 bp, Artificial Sequence
  primer
tgcttctttaccctttactatatttcaa

SEQ ID NO: 65884 - DNA, 21 bp, Artificial Sequence
  primer
accaccgttacaggtttccac

SEQ ID NO: 65885 - DNA, 21 bp, Artificial Sequence
  primer
caagccaatcatacaacagcc

SEQ ID NO: 65886 - DNA, 39 bp, Artificial Sequence
  primer
gtaaaacgacggccagtcacctaaatgcactgacttgga

SEQ ID NO: 65887 - DNA, 38 bp, Artificial Sequence
  primer
gtaaaacgacggccagtcaaagccctcattctttccac

SEQ ID NO: 65888 - DNA, 39 bp, Artificial Sequence
  primer
gtaaaacgacggccagtcaaactgctcttggacctatgg

SEQ ID NO: 65889 - DNA, 38 bp, Artificial Sequence
  primer
gtaaaacgacggccagtccacaacacttcacatggtgc

SEQ ID NO: 65890 - DNA, 21 bp, Artificial Sequence
  primer
acccttagcttcacaccaacc

SEQ ID NO: 65891 - DNA, 25 bp, Artificial Sequence
  primer
tgatgattaagttcagagggaaatg

SEQ ID NO: 65892 - DNA, 38 bp, Artificial Sequence
  primer
gtaaaacgacggccagtctctgaggatgacaggcaaag

SEQ ID NO: 65893 - DNA, 21 bp, Artificial Sequence
  primer
aaacttgtgagtgcgtccaat

SEQ ID NO: 65894 - DNA, 21 bp, Artificial Sequence
  primer
aaaccagcgagcataggtttc

SEQ ID NO: 65895 - DNA, 21 bp, Artificial Sequence
  primer
acaaatgatctgcctgctttg

SEQ ID NO: 65896 - DNA, 25 bp, Artificial Sequence
  primer
aaatggtgaatgagaggaatttagg

SEQ ID NO: 65897 - DNA, 20 bp, Artificial Sequence
  primer
ggctgaggctagcagatcac

SEQ ID NO: 65898 - DNA, 37 bp, Artificial Sequence
  primer
gtaaaacgacggccagttgtgtccacagcaatgcaaa

SEQ ID NO: 65899 - DNA, 43 bp, Artificial Sequence
  primer
gtaaaacgacggccagtaaaggatttagtctagaacttcgttg

SEQ ID NO: 65900 - DNA, 38 bp, Artificial Sequence
  primer
gtaaaacgacggccagtgtcctccaccagatccctaac

SEQ ID NO: 65901 - DNA, 21 bp, Artificial Sequence
  primer
gggcttctgcaaataaactgc

SEQ ID NO: 65902 - DNA, 42 bp, Artificial Sequence
  primer
gtaaaacgacggccagtaaccaagaaaggaaatgttaatgag

SEQ ID NO: 65903 - DNA, 21 bp, Artificial Sequence
  primer
ttgacaaagagtgcaaatcgg

SEQ ID NO: 65904 - DNA, 38 bp, Artificial Sequence
  primer
gtaaaacgacggccagtattgcaaagagatgtgcctgt

SEQ ID NO: 65905 - DNA, 38 bp, Artificial Sequence
  primer
gtaaaacgacggccagtgcttctagcacatgaggcagt

SEQ ID NO: 65906 - DNA, 22 bp, Artificial Sequence
  primer
gagcaagctggatagacaccat

SEQ ID NO: 65907 - DNA, 40 bp, Artificial Sequence
  primer
gtaaaacgacggccagttgtgacaaagaaagtttcaagcc

SEQ ID NO: 65908 - DNA, 21 bp, Artificial Sequence
  primer
tgaagacacaaaggcaaggag

SEQ ID NO: 65909 - DNA, 21 bp, Artificial Sequence
  primer
gatttcccttacagctgtggc

SEQ ID NO: 65910 - DNA, 41 bp, Artificial Sequence
  primer
gtaaaacgacggccagtgataatcaggtcataaagctgcct

SEQ ID NO: 65911 - DNA, 22 bp, Artificial Sequence
  primer
gaaacctcaaagaacaaatggg

SEQ ID NO: 65912 - DNA, 38 bp, Artificial Sequence
  primer
gtaaaacgacggccagttatttctgcatggattgaccc

SEQ ID NO: 65913 - DNA, 25 bp, Artificial Sequence
  primer
tggcataccttgaataagatttcac

SEQ ID NO: 65914 - DNA, 23 bp, Artificial Sequence
  primer
cacaacaggaggattacttgagg

SEQ ID NO: 65915 - DNA, 21 bp, Artificial Sequence
  primer
actgatgaatgaggagctgga

SEQ ID NO: 65916 - DNA, 21 bp, Artificial Sequence
  primer
atccaagactgggtttcttgc

SEQ ID NO: 65917 - DNA, 22 bp, Artificial Sequence
  primer
tgtaacaccacctgcacaagac

SEQ ID NO: 65918 - DNA, 43 bp, Artificial Sequence
  primer
gtaaaacgacggccagttgatttggttcttattcaggtatttg

SEQ ID NO: 65919 - DNA, 37 bp, Artificial Sequence
  primer
gtaaaacgacggccagtagctgcaatgcaaggaacag

SEQ ID NO: 65920 - DNA, 22 bp, Artificial Sequence
  primer
tgtgcacatcaaaggttaatgg

SEQ ID NO: 65921 - DNA, 22 bp, Artificial Sequence
  primer
tcctcggttctcactgtagagg

SEQ ID NO: 65922 - DNA, 38 bp, Artificial Sequence
  primer
gtaaaacgacggccagttccactctgcctttctcttcc

SEQ ID NO: 65923 - DNA, 21 bp, Artificial Sequence
  primer
cagcacaggaagaatcaggtg

SEQ ID NO: 65924 - DNA, 38 bp, Artificial Sequence
  primer
gtaaaacgacggccagtcagggtgtgtctgaaagatgg

SEQ ID NO: 65925 - DNA, 43 bp, Artificial Sequence
  primer
gtaaaacgacggccagtccctatatttccttgtttccttcatc

SEQ ID NO: 65926 - DNA, 38 bp, Artificial Sequence
  primer
gtaaaacgacggccagtggactatgccctttcctctgc

SEQ ID NO: 65927 - DNA, 21 bp, Artificial Sequence
  primer
tttgtcccagtggccattatc

SEQ ID NO: 65928 - DNA, 19 bp, Artificial Sequence
  primer
acggcatccagccataaac

SEQ ID NO: 65929 - DNA, 38 bp, Artificial Sequence
  primer
gtaaaacgacggccagtattcatttgcagtgcctgttc

SEQ ID NO: 65930 - DNA, 38 bp, Artificial Sequence
  primer
gtaaaacgacggccagtcagatagcaaagcgagtttgg

SEQ ID NO: 65931 - DNA, 21 bp, Artificial Sequence
  primer
tgaggcctccaggtttatcac

SEQ ID NO: 65932 - DNA, 25 bp, Artificial Sequence
  primer
tgcaataaatgatctctaaggttgc

SEQ ID NO: 65933 - DNA, 28 bp, Artificial Sequence
  primer
agagtatccttacagtttccataattcc

SEQ ID NO: 65934 - DNA, 21 bp, Artificial Sequence
  primer
cctccttgtactccacttccc

SEQ ID NO: 65935 - DNA, 22 bp, Artificial Sequence
  primer
catatccagggcagaagttgag

SEQ ID NO: 65936 - DNA, 23 bp, Artificial Sequence
  primer
cctgtctcagaccttctctctgg

SEQ ID NO: 65937 - DNA, 25 bp, Artificial Sequence
  primer
aaactaactacagacactgggcatc

SEQ ID NO: 65938 - DNA, 40 bp, Artificial Sequence
  primer
gtaaaacgacggccagtggttgcctacatgaaaggttctc

SEQ ID NO: 65939 - DNA, 26 bp, Artificial Sequence
  primer
tgtaatacatctgaatgaatggactg

SEQ ID NO: 65940 - DNA, 41 bp, Artificial Sequence
  primer
gtaaaacgacggccagtacaagggataagttaggctttctg

SEQ ID NO: 65941 - DNA, 42 bp, Artificial Sequence
  primer
gtaaaacgacggccagtggacattaagcttactttgctttca

SEQ ID NO: 65942 - DNA, 21 bp, Artificial Sequence
  primer
aaatgaggtggtgtcatcctg

SEQ ID NO: 65943 - DNA, 26 bp, Artificial Sequence
  primer
gggagactccatctcaatacatacat

SEQ ID NO: 65944 - DNA, 22 bp, Artificial Sequence
  primer
gagtccaaagacgcatgtgtag

SEQ ID NO: 65945 - DNA, 21 bp, Artificial Sequence
  primer
tcttcctccatctgggaaatg

SEQ ID NO: 65946 - DNA, 39 bp, Artificial Sequence
  primer
gtaaaacgacggccagtaccagaactttaccaaccaagc

SEQ ID NO: 65947 - DNA, 38 bp, Artificial Sequence
  primer
gtaaaacgacggccagtcaagcaatcctcctgtcttgg

SEQ ID NO: 65948 - DNA, 21 bp, Artificial Sequence
  primer
ccaggatttcgatgctcactc

SEQ ID NO: 65949 - DNA, 21 bp, Artificial Sequence
  primer
gatacgtgctgtctagctggg

SEQ ID NO: 65950 - DNA, 26 bp, Artificial Sequence
  primer
gctatcaagagagttctttcacattc

SEQ ID NO: 65951 - DNA, 38 bp, Artificial Sequence
  primer
gtaaaacgacggccagtggccttcattcaggtacaacc

SEQ ID NO: 65952 - DNA, 22 bp, Artificial Sequence
  primer
tccaggcaaataacagacacac

SEQ ID NO: 65953 - DNA, 21 bp, Artificial Sequence
  primer
cctttggaaattggtcctgag

SEQ ID NO: 65954 - DNA, 21 bp, Artificial Sequence
  primer
aaattccctttggcttcaagg

SEQ ID NO: 65955 - DNA, 38 bp, Artificial Sequence
  primer
gtaaaacgacggccagtggttatgcacaatgccaaatc

SEQ ID NO: 65956 - DNA, 20 bp, Artificial Sequence
  primer
tgccacctgtgaagaaacag

SEQ ID NO: 65957 - DNA, 38 bp, Artificial Sequence
  primer
gtaaaacgacggccagtcccttgcagaaacttcctttg

SEQ ID NO: 65958 - DNA, 39 bp, Artificial Sequence
  primer
gtaaaacgacggccagtccactggatgaagataagcctg

SEQ ID NO: 65959 - DNA, 39 bp, Artificial Sequence
  primer
gtaaaacgacggccagttcactcatgtcaaatgaaaccc

SEQ ID NO: 65960 - DNA, 24 bp, Artificial Sequence
  primer
tcaagccctatcaggtgtcaatag

SEQ ID NO: 65961 - DNA, 25 bp, Artificial Sequence
  primer
gccaaacatttccatattaccaatg

SEQ ID NO: 65962 - DNA, 41 bp, Artificial Sequence
  primer
gtaaaacgacggccagtcactgtacctggccaataattaag

SEQ ID NO: 65963 - DNA, 22 bp, Artificial Sequence
  primer
tccacccaccttaatagctttg

SEQ ID NO: 65964 - DNA, 35 bp, Artificial Sequence
  primer
gtaaaacgacggccagtgggacagtgggtgtggtg

SEQ ID NO: 65965 - DNA, 43 bp, Artificial Sequence
  primer
gtaaaacgacggccagtgcacaatagctagcacatagtgagac

SEQ ID NO: 65966 - DNA, 21 bp, Artificial Sequence
  primer
ttgattgaactgtgggcattc

SEQ ID NO: 65967 - DNA, 40 bp, Artificial Sequence
  primer
gtaaaacgacggccagtttaggctgctgagataatccttg

SEQ ID NO: 65968 - DNA, 18 bp, Artificial Sequence
  primer
caagtgattgcccgcctc

SEQ ID NO: 65969 - DNA, 24 bp, Artificial Sequence
  primer
tgagaaattgattaggctctttgc

SEQ ID NO: 65970 - DNA, 38 bp, Artificial Sequence
  primer
gtaaaacgacggccagtgcggaagtgtatcttctgtgg

SEQ ID NO: 65971 - DNA, 20 bp, Artificial Sequence
  primer
ggcatgttaagactcgctcc

SEQ ID NO: 65972 - DNA, 26 bp, Artificial Sequence
  primer
cacaaattgttcatattaatccttcc

SEQ ID NO: 65973 - DNA, 21 bp, Artificial Sequence
  primer
atctaagcttgcatggcttcc

SEQ ID NO: 65974 - DNA, 21 bp, Artificial Sequence
  primer
taattgcaccgccatactcag

SEQ ID NO: 65975 - DNA, 38 bp, Artificial Sequence
  primer
gtaaaacgacggccagtaggaaaggtgctccaaacatc

SEQ ID NO: 65976 - DNA, 38 bp, Artificial Sequence
  primer
gtaaaacgacggccagtcagcatttcccagtctacacg

SEQ ID NO: 65977 - DNA, 26 bp, Artificial Sequence
  primer
ttatttgctctgtgtttaaataaccc

SEQ ID NO: 65978 - DNA, 23 bp, Artificial Sequence
  primer
tgattactttcattgcactctgc

SEQ ID NO: 65979 - DNA, 38 bp, Artificial Sequence; identical to SEQ ID NO: 65926
  primer

SEQ ID NO: 65980 - DNA, 40 bp, Artificial Sequence
  primer
gtaaaacgacggccagtgacctatcccaaattattgaggc

SEQ ID NO: 65981 - DNA, 22 bp, Artificial Sequence
  primer
tctcatagcctccacagctctc

SEQ ID NO: 65982 - DNA, 20 bp, Artificial Sequence
  primer
gacccagagccttgcttcag

SEQ ID NO: 65983 - DNA, 21 bp, Artificial Sequence
  primer
gaggtgcagaagctcctcttg

SEQ ID NO: 65984 - DNA, 22 bp, Artificial Sequence
  primer
gactgcagaatgtcaacagtgg

SEQ ID NO: 65985 - DNA, 37 bp, Artificial Sequence
  primer
gtaaaacgacggccagtgaccgaactctcctgtctgg

SEQ ID NO: 65986 - DNA, 21 bp, Artificial Sequence
  primer
tccaacagtaaacatggcagg

SEQ ID NO: 65987 - DNA, 21 bp, Artificial Sequence
  primer
aagcctctgatttcccatttg

SEQ ID NO: 65988 - DNA, 38 bp, Artificial Sequence
  primer
gtaaaacgacggccagtgtgtcaggcagtttcaagtcc

SEQ ID NO: 65989 - DNA, 21 bp, Artificial Sequence
  primer
tgggctcaagaactgcaaata

SEQ ID NO: 65990 - DNA, 43 bp, Artificial Sequence
  primer
gtaaaacgacggccagttccaggttaaatattagcatctttgg

SEQ ID NO: 65991 - DNA, 24 bp, Artificial Sequence
  primer
ttagatgctttccaacagtaccag

SEQ ID NO: 65992 - DNA, 40 bp, Artificial Sequence
  primer
gtaaaacgacggccagtccgctttgttaaataggatggac

SEQ ID NO: 65993 - DNA, 42 bp, Artificial Sequence
  primer
gtaaaacgacggccagttgaacagctcatatgaaagattgtg

SEQ ID NO: 65994 - DNA, 40 bp, Artificial Sequence
  primer
gtaaaacgacggccagttccttccttatccagtgacttcc

SEQ ID NO: 65995 - DNA, 38 bp, Artificial Sequence
  primer
gtaaaacgacggccagttcagatgcattcctgatagcg

SEQ ID NO: 65996 - DNA, 21 bp, Artificial Sequence
  primer
gctgaatccttgtcctggaag

SEQ ID NO: 65997 - DNA, 21 bp, Artificial Sequence
  primer
ggatcacttccagttcttggc

SEQ ID NO: 65998 - DNA, 38 bp, Artificial Sequence
  primer
gtaaaacgacggccagttggtttcccagatttcagtcc

SEQ ID NO: 65999 - DNA, 38 bp, Artificial Sequence
  primer
gtaaaacgacggccagtagcaacattatgggtgggaag

SEQ ID NO: 66000 - DNA, 22 bp, Artificial Sequence
  primer
tgcttgtactttcgttgaatgg

SEQ ID NO: 66001 - DNA, 41 bp, Artificial Sequence
  primer
gtaaaacgacggccagtcatcctttcagactgctaattgtg

SEQ ID NO: 66002 - DNA, 23 bp, Artificial Sequence
  primer
aaccatacaatgcatcctttcag

SEQ ID NO: 66003 - DNA, 44 bp, Artificial Sequence
  primer
gtaaaacgacggccagtctgttgttaagttgttgatactcatcc

SEQ ID NO: 66004 - DNA, 22 bp, Artificial Sequence
  primer
caagcttctgaaattccttccc

SEQ ID NO: 66005 - DNA, 42 bp, Artificial Sequence
  primer
gtaaaacgacggccagtcctgtagctttcattatttcaggtg

SEQ ID NO: 66006 - DNA, 43 bp, Artificial Sequence
  primer
gtaaaacgacggccagtttaaggagttgaacacatcccttatc

SEQ ID NO: 66007 - DNA, 22 bp, Artificial Sequence
  primer
tgaccactaaattgccagttcc

SEQ ID NO: 66008 - DNA, 21 bp, Artificial Sequence
  primer
tactccctgcaggagccttac

SEQ ID NO: 66009 - DNA, 39 bp, Artificial Sequence
  primer
gtaaaacgacggccagttccagaatttgtgtgattccag

SEQ ID NO: 66010 - DNA, 22 bp, Artificial Sequence
  primer
gcaacttgctttatggaaccac

SEQ ID NO: 66011 - DNA, 38 bp, Artificial Sequence
  primer
gtaaaacgacggccagtgtgacatttgcattctggagc

SEQ ID NO: 66012 - DNA, 21 bp, Artificial Sequence
  primer
agttccaagctgcttcctgag

SEQ ID NO: 66013 - DNA, 42 bp, Artificial Sequence
  primer
gtaaaacgacggccagttgactgcatatggttcaagataagg

SEQ ID NO: 66014 - DNA, 21 bp, Artificial Sequence
  primer
tgattaattaccctgggctgg

SEQ ID NO: 66015 - DNA, 25 bp, Artificial Sequence
  primer
ggcattaaataaatcttgcatgaac

SEQ ID NO: 66016 - DNA, 21 bp, Artificial Sequence
  primer
ccagaagtcttgccatctctg

SEQ ID NO: 66017 - DNA, 39 bp, Artificial Sequence
  primer
gtaaaacgacggccagtttcacactgtccttggtattgg

SEQ ID NO: 66018 - DNA, 21 bp, Artificial Sequence
  primer
agcaacccagaatttcttccc

SEQ ID NO: 66019 - DNA, 38 bp, Artificial Sequence
  primer
gtaaaacgacggccagtggccactatgagtggaaattg

SEQ ID NO: 66020 - DNA, 22 bp, Artificial Sequence
  primer
ggctgaaacaaagttcttgtgg

SEQ ID NO: 66021 - DNA, 22 bp, Artificial Sequence
  primer
cctcccaggtatttctccaaac

SEQ ID NO: 66022 - DNA, 38 bp, Artificial Sequence
  primer
gtaaaacgacggccagtccgattcactgtaattcctgc

SEQ ID NO: 66023 - DNA, 38 bp, Artificial Sequence
  primer
gtaaaacgacggccagttggttgccagactaagacagc

SEQ ID NO: 66024 - DNA, 38 bp, Artificial Sequence
  primer
gtaaaacgacggccagttgaataactggactgccttgc

SEQ ID NO: 66025 - DNA, 21 bp, Artificial Sequence
  primer
gccttctgattaatgctgctg

SEQ ID NO: 66026 - DNA, 21 bp, Artificial Sequence
  primer
gacatcaattgcttgtccgag

SEQ ID NO: 66027 - DNA, 21 bp, Artificial Sequence
  primer
ggacaacacagtgccagtgac

SEQ ID NO: 66028 - DNA, 21 bp, Artificial Sequence
  primer
tggattcagcaaacaggtgac

SEQ ID NO: 66029 - DNA, 22 bp, Artificial Sequence
  primer
tgctgttgcttccagagatatg

SEQ ID NO: 66030 - DNA, 23 bp, Artificial Sequence
  primer
ggaagcagaagattctatgccag

SEQ ID NO: 66031 - DNA, 39 bp, Artificial Sequence
  primer
gtaaaacgacggccagtgccttctacataatccaaggcg

SEQ ID NO: 66032 - DNA, 23 bp, Artificial Sequence
  primer
agaaccactatgcctgatgtgac

SEQ ID NO: 66033 - DNA, 21 bp, Artificial Sequence
  primer
gctggaagtcacctagcaatg

SEQ ID NO: 66034 - DNA, 39 bp, Artificial Sequence
  primer
gtaaaacgacggccagtcaaggcaaatatttctgcttca

SEQ ID NO: 66035 - DNA, 25 bp, Artificial Sequence
  primer
tcttctacctgaagagtacaagcat

SEQ ID NO: 66036 - DNA, 38 bp, Artificial Sequence
  primer
gtaaaacgacggccagtaaacagagaggctcaggttgg

SEQ ID NO: 66037 - DNA, 21 bp, Artificial Sequence
  primer
aagcagatatcagaaagccca

SEQ ID NO: 66038 - DNA, 21 bp, Artificial Sequence
  primer
ctggtgctaccagatagtggg

SEQ ID NO: 66039 - DNA, 22 bp, Artificial Sequence
  primer
gacttccctttctggatcttcc

SEQ ID NO: 66040 - DNA, 21 bp, Artificial Sequence
  primer
cagcccaagacagcctaaatg

SEQ ID NO: 66041 - DNA, 39 bp, Artificial Sequence
  primer
gtaaaacgacggccagtcctttcacccgtgtctctaaac

SEQ ID NO: 66042 - DNA, 21 bp, Artificial Sequence
  primer
ctcagtgttggtggctgtgtc

SEQ ID NO: 66043 - DNA, 43 bp, Artificial Sequence
  primer
gtaaaacgacggccagtctcactgggatacaacttgattctac

SEQ ID NO: 66044 - DNA, 20 bp, Artificial Sequence
  primer
cagaaggcctccactgagac

SEQ ID NO: 66045 - DNA, 38 bp, Artificial Sequence
  primer
gtaaaacgacggccagtccctttacccacatctcttca

SEQ ID NO: 66046 - DNA, 41 bp, Artificial Sequence
  primer
gtaaaacgacggccagttcctcactaacttcagaaccttgc

SEQ ID NO: 66047 - DNA, 37 bp, Artificial Sequence
  primer
gtaaaacgacggccagtctcgtgaattcagacctcgg

SEQ ID NO: 66048 - DNA, 21 bp, Artificial Sequence
  primer
tgatacccataaggcccattc

SEQ ID NO: 66049 - DNA, 39 bp, Artificial Sequence
  primer
gtaaaacgacggccagtttcccagaaacagctaatccag

SEQ ID NO: 66050 - DNA, 39 bp, Artificial Sequence
  primer
gtaaaacgacggccagttgagcaccaaggtcagtcttag

SEQ ID NO: 66051 - DNA, 20 bp, Artificial Sequence
  primer
tctggtccttctgaaccctg

SEQ ID NO: 66052 - DNA, 37 bp, Artificial Sequence
  primer
gtaaaacgacggccagtttagacacggattggttgcc

SEQ ID NO: 66053 - DNA, 21 bp, Artificial Sequence
  primer
ctgtgggcatttcctgctaac

SEQ ID NO: 66054 - DNA, 20 bp, Artificial Sequence
  primer
ccctccatccctccatacac

SEQ ID NO: 66055 - DNA, 38 bp, Artificial Sequence
  primer
gtaaaacgacggccagtagtcgacagcaggttcaaagc

SEQ ID NO: 66056 - DNA, 23 bp, Artificial Sequence
  primer
catttccattgaattccagtcag

SEQ ID NO: 66057 - DNA, 38 bp, Artificial Sequence
  primer
gtaaaacgacggccagtgggtgactgacaccaatcaat

SEQ ID NO: 66058 - DNA, 44 bp, Artificial Sequence
  primer
gtaaaacgacggccagtttcaaatattctgagactaacacaagc

SEQ ID NO: 66059 - DNA, 20 bp, Artificial Sequence
  primer
tttattccacgggactgagg

SEQ ID NO: 66060 - DNA, 36 bp, Artificial Sequence
  primer
gtaaaacgacggccagtcttggagccagaggtggtc

SEQ ID NO: 66061 - DNA, 38 bp, Artificial Sequence
  primer
gtaaaacgacggccagtatgacatttgggaaatgctgg

SEQ ID NO: 66062 - DNA, 21 bp, Artificial Sequence
  primer
atccctcatggcttcagtctc

SEQ ID NO: 66063 - DNA, 21 bp, Artificial Sequence
  primer
atgccagcaggtaattggaac

SEQ ID NO: 66064 - DNA, 21 bp, Artificial Sequence
  primer
gcctatactttgcaatgtggc

SEQ ID NO: 66065 - DNA, 41 bp, Artificial Sequence
  primer
gtaaaacgacggccagtttgaataaagtggtgaattgaagc

SEQ ID NO: 66066 - DNA, 39 bp, Artificial Sequence
  primer
gtaaaacgacggccagtgagagtgtgttccagctccttg

SEQ ID NO: 66067 - DNA, 18 bp, Artificial Sequence
  primer
actccgggagcaggacac

SEQ ID NO: 66068 - DNA, 37 bp, Artificial Sequence
  primer
gtaaaacgacggccagtaacaggttgccttcctccac

SEQ ID NO: 66069 - DNA, 20 bp, Artificial Sequence
  primer
gaactcagtgcaggtggagg

SEQ ID NO: 66070 - DNA, 36 bp, Artificial Sequence
  primer
gtaaaacgacggccagtaggatggctcagcaaccag

SEQ ID NO: 66071 - DNA, 37 bp, Artificial Sequence
  primer
gtaaaacgacggccagtaggaggagctccaagtcacc

SEQ ID NO: 66072 - DNA, 18 bp, Artificial Sequence
  primer
gagctctccaagcggtcc

SEQ ID NO: 66073 - DNA, 20 bp, Artificial Sequence
  primer
cctagattcagggctcacgc

SEQ ID NO: 66074 - DNA, 36 bp, Artificial Sequence
  primer
gtaaaacgacggccagtgacctccagagccagagcc

SEQ ID NO: 66075 - DNA, 20 bp, Artificial Sequence
  primer
gtgtcaattctgccgacacc

SEQ ID NO: 66076 - DNA, 21 bp, Artificial Sequence
  primer
cagtgacaggttcagtgcctc

SEQ ID NO: 66077 - DNA, 38 bp, Artificial Sequence
  primer
gtaaaacgacggccagtagatgtccacgctcacctagc

SEQ ID NO: 66078 - DNA, 18 bp, Artificial Sequence
  primer
aggagtgggagggcacag

SEQ ID NO: 66079 - DNA, 37 bp, Artificial Sequence
  primer
gtaaaacgacggccagtctccatcatgtctgtgggtg

SEQ ID NO: 66080 - DNA, 38 bp, Artificial Sequence
  primer
gtaaaacgacggccagtgctcaatgacaaacaggaagc

SEQ ID NO: 66081 - DNA, 37 bp, Artificial Sequence
  primer
gtaaaacgacggccagtcccatggtcttcatcacctg

SEQ ID NO: 66082 - DNA, 19 bp, Artificial Sequence
  primer
ggctctgagaggatgtggg

SEQ ID NO: 66083 - DNA, 21 bp, Artificial Sequence
  primer
gactgagaaggcagtggtgtc

SEQ ID NO: 66084 - DNA, 20 bp, Artificial Sequence
  primer
gagtggacacagactgctgg

SEQ ID NO: 66085 - DNA, 20 bp, Artificial Sequence
  primer
cagacaaccagaggcaggtg

SEQ ID NO: 66086 - DNA, 20 bp, Artificial Sequence
  primer
aggatggacctgggtaggtg

SEQ ID NO: 66087 - DNA, 20 bp, Artificial Sequence
  primer
gatcatcctgggacagggag

SEQ ID NO: 66088 - DNA, 20 bp, Artificial Sequence
  primer
atgtggtgggtggacagaag

SEQ ID NO: 66089 - DNA, 21 bp, Artificial Sequence
  primer
gacccagcctctccaagatac

SEQ ID NO: 66090 - DNA, 20 bp, Artificial Sequence
  primer
acttcctccagggtcgtgtc

SEQ ID NO: 66091 - DNA, 37 bp, Artificial Sequence
  primer
gtaaaacgacggccagtacaccaggcaggagtgacag

SEQ ID NO: 66092 - DNA, 21 bp, Artificial Sequence
  primer
cacgctaccctctccctactg

SEQ ID NO: 66093 - DNA, 19 bp, Artificial Sequence
  primer
aggagtgggcatcatcagg

SEQ ID NO: 66094 - DNA, 19 bp, Artificial Sequence
  primer
accgacagtgtgaggtggg

SEQ ID NO: 66095 - DNA, 19 bp, Artificial Sequence
  primer
gtccacatttctgtgggca

SEQ ID NO: 66096 - DNA, 38 bp, Artificial Sequence
  primer
gtaaaacgacggccagtaggacgtttccaaaggtgatg

SEQ ID NO: 66097 - DNA, 21 bp, Artificial Sequence
  primer
cctgcagaaggaagaggacac

SEQ ID NO: 66098 - DNA, 36 bp, Artificial Sequence
  primer
gtaaaacgacggccagtgtggttggtgacggtgatg

SEQ ID NO: 66099 - DNA, 21 bp, Artificial Sequence
  primer
aaggaagccctcagtcctcac

SEQ ID NO: 66100 - DNA, 20 bp, Artificial Sequence
  primer
caggtagttgagctgcaggg

SEQ ID NO: 66101 - DNA, 38 bp, Artificial Sequence
  primer
gtaaaacgacggccagtatgccgatgaagagattgatg

SEQ ID NO: 66102 - DNA, 38 bp, Artificial Sequence
  primer
gtaaaacgacggccagtctgttgacaaccttcaggtcc

SEQ ID NO: 66103 - DNA, 20 bp, Artificial Sequence
  primer
atcttgtcaaactggcctgc

SEQ ID NO: 66104 - DNA, 21 bp, Artificial Sequence
  primer
ctggctgtggcatgtaagaag

SEQ ID NO: 66105 - DNA, 21 bp, Artificial Sequence
  primer
cttccgggacttgtagacctg

SEQ ID NO: 66106 - DNA, 18 bp, Artificial Sequence
  primer
agcagctccttcagcacg

SEQ ID NO: 66107 - DNA, 38 bp, Artificial Sequence
  primer
gtaaaacgacggccagtcttggtcagctccagcttctc

SEQ ID NO: 66108 - DNA, 21 bp, Artificial Sequence
  primer
aggtcaaggatgaggttccag

SEQ ID NO: 66109 - DNA, 37 bp, Artificial Sequence
  primer
gtaaaacgacggccagtgttcttcaggtgctggatgc

SEQ ID NO: 66110 - DNA, 18 bp, Artificial Sequence
  primer
catagcctcccacagccc

SEQ ID NO: 66111 - DNA, 21 bp, Artificial Sequence
  primer
cgacttgagctggtactgcac

SEQ ID NO: 66112 - DNA, 38 bp, Artificial Sequence
  primer
gtaaaacgacggccagtcttggcaaagttcacgaacac

SEQ ID NO: 66113 - DNA, 21 bp, Artificial Sequence
  primer
acgtctctccaggcctatctg

SEQ ID NO: 66114 - DNA, 21 bp, Artificial Sequence
  primer
cttggtcctgaacctccactc

SEQ ID NO: 66115 - DNA, 18 bp, Artificial Sequence
  primer
ccaagccttcactgtccc

SEQ ID NO: 66116 - DNA, 38 bp, Artificial Sequence
  primer
gtaaaacgacggccagtgaagagttccaggaccgtcac

SEQ ID NO: 66117 - DNA, 20 bp, Artificial Sequence
  primer
ctgcacagggtgaactcctc

SEQ ID NO: 66118 - DNA, 37 bp, Artificial Sequence
  primer
gtaaaacgacggccagtttgaactagtgacgcgggag

SEQ ID NO: 66119 - DNA, 37 bp, Artificial Sequence
  primer
gtaaaacgacggccagtccaagccaaatgtcctgaaa

SEQ ID NO: 66120 - DNA, 19 bp, Artificial Sequence
  primer
accaagcctttggacatgg

SEQ ID NO: 66121 - DNA, 38 bp, Artificial Sequence
  primer
gtaaaacgacggccagtacaaagttcttcccaagaggg

SEQ ID NO: 66122 - DNA, 21 bp, Artificial Sequence
  primer
cacagcctctgggttatttcc

SEQ ID NO: 66123 - DNA, 37 bp, Artificial Sequence
  primer
gtaaaacgacggccagtctatccagcccacactcagc

SEQ ID NO: 66124 - DNA, 37 bp, Artificial Sequence
  primer
gtaaaacgacggccagtggtccctgagcaggtactgg

SEQ ID NO: 66125 - DNA, 21 bp, Artificial Sequence
  primer
gcatttcctgagaagctggag

SEQ ID NO: 66126 - DNA, 18 bp, Artificial Sequence
  primer
attgagggagtgaggcgg

SEQ ID NO: 66127 - DNA, 38 bp, Artificial Sequence
  primer
gtaaaacgacggccagtcccttcctccagtttagctcc

SEQ ID NO: 66128 - DNA, 38 bp, Artificial Sequence
  primer
gtaaaacgacggccagtctcgtccagtatcagcacctg

SEQ ID NO: 66129 - DNA, 38 bp, Artificial Sequence
  primer
gtaaaacgacggccagtcatgaaggtagcagccattcc

SEQ ID NO: 66130 - DNA, 21 bp, Artificial Sequence
  primer
agggtctaagagtgccgactg

SEQ ID NO: 66131 - DNA, 38 bp, Artificial Sequence
  primer
gtaaaacgacggccagtgaatctcttgaacccaggagg

SEQ ID NO: 66132 - DNA, 37 bp, Artificial Sequence
  primer
gtaaaacgacggccagttctgcatgggcttacatgag

SEQ ID NO: 66133 - DNA, 20 bp, Artificial Sequence
  primer
agtcaggaaggcgaactctg

SEQ ID NO: 66134 - DNA, 38 bp, Artificial Sequence
  primer
gtaaaacgacggccagtgggcagacacaatgctctatc

SEQ ID NO: 66135 - DNA, 20 bp, Artificial Sequence
  primer
gattccagctgtcctccctg

SEQ ID NO: 66136 - DNA, 18 bp, Artificial Sequence
  primer
ctggtgcctccctgtctg

SEQ ID NO: 66137 - DNA, 19 bp, Artificial Sequence
  primer
actcagacgcagaggagcc

SEQ ID NO: 66138 - DNA, 19 bp, Artificial Sequence
  primer
ctgcctggtggagaaggag

SEQ ID NO: 66139 - DNA, 19 bp, Artificial Sequence
  primer
ctcgtacacctgcaggcac

SEQ ID NO: 66140 - DNA, 21 bp, Artificial Sequence
  primer
catttcaagccacagatgcag

SEQ ID NO: 66141 - DNA, 21 bp, Artificial Sequence
  primer
ctcccagctctatgctatggg

SEQ ID NO: 66142 - DNA, 20 bp, Artificial Sequence
  primer
atacccatgctcagtgtggc

SEQ ID NO: 66143 - DNA, 21 bp, Artificial Sequence
  primer
ctcagcactggagtcctcgtc

SEQ ID NO: 66144 - DNA, 21 bp, Artificial Sequence
  primer
gaaagagcctgcagtcaccac

SEQ ID NO: 66145 - DNA, 21 bp, Artificial Sequence
  primer
gtccattctgtgcatactgcc

SEQ ID NO: 66146 - DNA, 21 bp, Artificial Sequence
  primer
cactgcttcagtgctaatcgg

SEQ ID NO: 66147 - DNA, 38 bp, Artificial Sequence
  primer
gtaaaacgacggccagttgtgccatggtcctaacactg

SEQ ID NO: 66148 - DNA, 21 bp, Artificial Sequence
  primer
tgttccagagaggaaacctgc

SEQ ID NO: 66149 - DNA, 38 bp, Artificial Sequence
  primer
gtaaaacgacggccagtctaccttccaggcttctgtgg

SEQ ID NO: 66150 - DNA, 23 bp, Artificial Sequence
  primer
ccatgatctctaaggttccttcc

SEQ ID NO: 66151 - DNA, 21 bp, Artificial Sequence
  primer
aggtcaattcgtgaggctctg

SEQ ID NO: 66152 - DNA, 38 bp, Artificial Sequence
  primer
gtaaaacgacggccagtgatgtgaaatcagaagggtgg

SEQ ID NO: 66153 - DNA, 22 bp, Artificial Sequence
  primer
ctcagcaagacaagacagatgc

SEQ ID NO: 66154 - DNA, 21 bp, Artificial Sequence
  primer
gctaccaggaaggcacatctc

SEQ ID NO: 66155 - DNA, 38 bp, Artificial Sequence
  primer
gtaaaacgacggccagttggtgactgcttggaatgaag

SEQ ID NO: 66156 - DNA, 22 bp, Artificial Sequence
  primer
accacttgacttgctaagggag

SEQ ID NO: 66157 - DNA, 41 bp, Artificial Sequence
  primer
gtaaaacgacggccagtcaatccctttctctctaccaaatg

SEQ ID NO: 66158 - DNA, 20 bp, Artificial Sequence
  primer
agacatggaagccttgaggg

SEQ ID NO: 66159 - DNA, 38 bp, Artificial Sequence
  primer
gtaaaacgacggccagtgggaagctagatgtcacgctc

SEQ ID NO: 66160 - DNA, 22 bp, Artificial Sequence
  primer
ttaggtcaaaggcaaagtggac

SEQ ID NO: 66161 - DNA, 21 bp, Artificial Sequence
  primer
agccagtaggatttgctggtg

SEQ ID NO: 66162 - DNA, 21 bp, Artificial Sequence
  primer
accgtttacatagagggccac

SEQ ID NO: 66163 - DNA, 21 bp, Artificial Sequence
  primer
ctaggcttctttccacccttg

SEQ ID NO: 66164 - DNA, 38 bp, Artificial Sequence
  primer
gtaaaacgacggccagtagtagacagccgctgataggg

SEQ ID NO: 66165 - DNA, 21 bp, Artificial Sequence
  primer
gctctagagaagtgtgctggg

SEQ ID NO: 66166 - DNA, 21 bp, Artificial Sequence
  primer
cacccttagaagctctcctgc

SEQ ID NO: 66167 - DNA, 21 bp, Artificial Sequence
  primer
aaatggcaggtgagagagtgg

SEQ ID NO: 66168 - DNA, 37 bp, Artificial Sequence
  primer
gtaaaacgacggccagtacactgattctggtggcgag

SEQ ID NO: 66169 - DNA, 22 bp, Artificial Sequence
  primer
cctgcagaagtacccagtgttc

SEQ ID NO: 66170 - DNA, 38 bp, Artificial Sequence
  primer
gtaaaacgacggccagttagttgctatgcttgggtggg

SEQ ID NO: 66171 - DNA, 37 bp, Artificial Sequence
  primer
gtaaaacgacggccagtgctggtctcgaactcaggtg

SEQ ID NO: 66172 - DNA, 38 bp, Artificial Sequence
  primer
gtaaaacgacggccagtggaacactcaggagaggaggg

SEQ ID NO: 66173 - DNA, 38 bp, Artificial Sequence
  primer
gtaaaacgacggccagttctctcattggtgaaggtccc

SEQ ID NO: 66174 - DNA, 21 bp, Artificial Sequence
  primer
gagtgctggtcagagacatgg

SEQ ID NO: 66175 - DNA, 21 bp, Artificial Sequence
  primer
ggtgcagggagtttggtttag

SEQ ID NO: 66176 - DNA, 24 bp, Artificial Sequence
  primer
actgccctgatcatacataaattg

SEQ ID NO: 66177 - DNA, 21 bp, Artificial Sequence
  primer
tcttgtgacttcctgagcacc

SEQ ID NO: 66178 - DNA, 24 bp, Artificial Sequence
  primer
catgtaaacaaacaaacaagacgg

SEQ ID NO: 66179 - DNA, 39 bp, Artificial Sequence
  primer
gtaaaacgacggccagttgctagatttcagcaggaggag

SEQ ID NO: 66180 - DNA, 20 bp, Artificial Sequence
  primer
acttcgcggtggtgagaatc

SEQ ID NO: 66181 - DNA, 21 bp, Artificial Sequence
  primer
cttggtctggtccttcagagc

SEQ ID NO: 66182 - DNA, 21 bp, Artificial Sequence
  primer
ggaagctaaacttgtgggtgc

SEQ ID NO: 66183 - DNA, 21 bp, Artificial Sequence
  primer
ctacatgtacgatgcttgccc

SEQ ID NO: 66184 - DNA, 21 bp, Artificial Sequence
  primer
aggcaccctaatcctctccag

SEQ ID NO: 66185 - DNA, 21 bp, Artificial Sequence
  primer
ggaaagaaatgaccatgtggg

SEQ ID NO: 66186 - DNA, 21 bp, Artificial Sequence
  primer
ccgagatgaatagcagggaac

SEQ ID NO: 66187 - DNA, 22 bp, Artificial Sequence
  primer
tttctcatgtggctagtggaag

SEQ ID NO: 66188 - DNA, 38 bp, Artificial Sequence
  primer
gtaaaacgacggccagtagggtctgatgatcacccttc

SEQ ID NO: 66189 - DNA, 39 bp, Artificial Sequence
  primer
gtaaaacgacggccagtcacgcttcagtttctcatctcc

SEQ ID NO: 66190 - DNA, 20 bp, Artificial Sequence
  primer
gccgacccagaacctatttc

SEQ ID NO: 66191 - DNA, 38 bp, Artificial Sequence
  primer
gtaaaacgacggccagtcacagtgcctcacattcttcc

SEQ ID NO: 66192 - DNA, 38 bp, Artificial Sequence
  primer
gtaaaacgacggccagtcatctgctgctggagaatgag

SEQ ID NO: 66193 - DNA, 38 bp, Artificial Sequence
  primer
gtaaaacgacggccagtccctcttatggcaattccaac

SEQ ID NO: 66194 - DNA, 38 bp, Artificial Sequence
  primer
gtaaaacgacggccagtaggcatatctgagccttggag

SEQ ID NO: 66195 - DNA, 21 bp, Artificial Sequence
  primer
acctctttctgaattcgctgc

SEQ ID NO: 66196 - DNA, 20 bp, Artificial Sequence
  primer
tctgtggctaacatggcaag

SEQ ID NO: 66197 - DNA, 21 bp, Artificial Sequence
  primer
tttggtggaggaacacatctc

SEQ ID NO: 66198 - DNA, 27 bp, Artificial Sequence
  primer
cctattggaacaagtaagaatagttga

SEQ ID NO: 66199 - DNA, 44 bp, Artificial Sequence
  primer
gtaaaacgacggccagttcatctactgttatctagcccagacac

SEQ ID NO: 66200 - DNA, 38 bp, Artificial Sequence
  primer
gtaaaacgacggccagttgtgcccatgattcaaataaa

SEQ ID NO: 66201 - DNA, 44 bp, Artificial Sequence
  primer
gtaaaacgacggccagttctttcatggcaaattgactataagta

SEQ ID NO: 66202 - DNA, 44 bp, Artificial Sequence
  primer
gtaaaacgacggccagtttggtaaatcaaaggtagtattcatgg

SEQ ID NO: 66203 - DNA, 25 bp, Artificial Sequence
  primer
aaagaaggaccaaggtaagatcaac

SEQ ID NO: 66204 - DNA, 43 bp, Artificial Sequence
  primer
gtaaaacgacggccagtcctagcaccaactttattctaaatgg

SEQ ID NO: 66205 - DNA, 38 bp, Artificial Sequence
  primer
gtaaaacgacggccagtcccacctactcaggaggctaa

SEQ ID NO: 66206 - DNA, 23 bp, Artificial Sequence
  primer
agatacagaagttggtcccattg

SEQ ID NO: 66207 - DNA, 38 bp, Artificial Sequence
  primer
gtaaaacgacggccagtgtttgctggctcagaacaagt

SEQ ID NO: 66208 - DNA, 41 bp, Artificial Sequence
  primer
gtaaaacgacggccagtcatgtacagtactcaggagatggg

SEQ ID NO: 66209 - DNA, 41 bp, Artificial Sequence
  primer
gtaaaacgacggccagtttgtgaaggaaacataccactagg

SEQ ID NO: 66210 - DNA, 40 bp, Artificial Sequence
  primer
gtaaaacgacggccagtaaagcatataacagcaagcctcc

SEQ ID NO: 66211 - DNA, 22 bp, Artificial Sequence
  primer
ggagcatggcaatactacatgg

SEQ ID NO: 66212 - DNA, 21 bp, Artificial Sequence
  primer
agttcgctgccttctaagacc

SEQ ID NO: 66213 - DNA, 26 bp, Artificial Sequence
  primer
tgtgaaattacagtggtaatctttcg

SEQ ID NO: 66214 - DNA, 37 bp, Artificial Sequence
  primer
gtaaaacgacggccagtttcatgcagacagaccatgc

SEQ ID NO: 66215 - DNA, 25 bp, Artificial Sequence
  primer
caatctggtttggaatgtacagata

SEQ ID NO: 66216 - DNA, 26 bp, Artificial Sequence
  primer
ccttaatgtaaaccgtttctcacttg

SEQ ID NO: 66217 - DNA, 38 bp, Artificial Sequence
  primer
gtaaaacgacggccagtgccttgcaatcaagcaaatag

SEQ ID NO: 66218 - DNA, 43 bp, Artificial Sequence
  primer
gtaaaacgacggccagtccaaattatgcaataagtcaactgtc

SEQ ID NO: 66219 - DNA, 40 bp, Artificial Sequence
  primer
gtaaaacgacggccagtaaagaagctgccaattacctatc

SEQ ID NO: 66220 - DNA, 41 bp, Artificial Sequence
  primer
gtaaaacgacggccagtaaatcaagtagtagccattagccc

SEQ ID NO: 66221 - DNA, 43 bp, Artificial Sequence
  primer
gtaaaacgacggccagtcactgaaatacagattagctagcgtt

SEQ ID NO: 66222 - DNA, 21 bp, Artificial Sequence
  primer
cctaagactgggagctatggg

SEQ ID NO: 66223 - DNA, 38 bp, Artificial Sequence
  primer
gtaaaacgacggccagttgaaatgacaggctgcacata

SEQ ID NO: 66224 - DNA, 20 bp, Artificial Sequence
  primer
ccatttggacccaatagtcc

SEQ ID NO: 66225 - DNA, 41 bp, Artificial Sequence
  primer
gtaaaacgacggccagttgcgtgtgtctacatgtgtctatg

SEQ ID NO: 66226 - DNA, 23 bp, Artificial Sequence
  primer
tccacagaaatgcttgttatgaa

SEQ ID NO: 66227 - DNA, 40 bp, Artificial Sequence
  primer
gtaaaacgacggccagtagcaaagtaatctgaggattccc

SEQ ID NO: 66228 - DNA, 24 bp, Artificial Sequence
  primer
gactcatgcttatttctgtttcgg

SEQ ID NO: 66229 - DNA, 44 bp, Artificial Sequence
  primer
gtaaaacgacggccagttcaaattcaaagtagacagccatattt

SEQ ID NO: 66230 - DNA, 38 bp, Artificial Sequence
  primer
gtaaaacgacggccagtcaccagccatcagacttcatt

SEQ ID NO: 66231 - DNA, 26 bp, Artificial Sequence
  primer
ccctatgacattagtgtttacctgtg

SEQ ID NO: 66232 - DNA, 42 bp, Artificial Sequence
  primer
gtaaaacgacggccagttgtcactggtttacgatatctctcc

SEQ ID NO: 66233 - DNA, 39 bp, Artificial Sequence
  primer
gtaaaacgacggccagtttggttctccagttaccattcc

SEQ ID NO: 66234 - DNA, 27 bp, Artificial Sequence
  primer
tgttattcttcagtctctcaattcaac

SEQ ID NO: 66235 - DNA, 26 bp, Artificial Sequence
  primer
ttgtgagagaaagcaataatctaacc

SEQ ID NO: 66236 - DNA, 36 bp, Artificial Sequence
  primer
gtaaaacgacggccagttgcccaacctcctctgttc

SEQ ID NO: 66237 - DNA, 20 bp, Artificial Sequence
  primer
taccagtctttgagcctgcc

SEQ ID NO: 66238 - DNA, 24 bp, Artificial Sequence
  primer
tcaagtttaaaccatgatgctctg

SEQ ID NO: 66239 - DNA, 24 bp, Artificial Sequence
  primer
tggacatgaaagtagtgattgcag

SEQ ID NO: 66240 - DNA, 39 bp, Artificial Sequence
  primer
gtaaaacgacggccagtgagtagtgctgatcctacagcg

SEQ ID NO: 66241 - DNA, 38 bp, Artificial Sequence
  primer
gtaaaacgacggccagtgaacatcacacaccagggact

SEQ ID NO: 66242 - DNA, 25 bp, Artificial Sequence
  primer
tgattaatgtccaagtgatagcgtt

SEQ ID NO: 66243 - DNA, 44 bp, Artificial Sequence
  primer
gtaaaacgacggccagtcctgaaatatcacacaatggaataaag

SEQ ID NO: 66244 - DNA, 41 bp, Artificial Sequence
  primer
gtaaaacgacggccagtcagggcaaataaatcattgaagag

SEQ ID NO: 66245 - DNA, 40 bp, Artificial Sequence
  primer
gtaaaacgacggccagtcatagcaggttctctcttgatgc

SEQ ID NO: 66246 - DNA, 38 bp, Artificial Sequence
  primer
gtaaaacgacggccagtttaccctgggaatagacctcg

SEQ ID NO: 66247 - DNA, 22 bp, Artificial Sequence
  primer
ggcacatgaagtagtcttgctg

SEQ ID NO: 66248 - DNA, 21 bp, Artificial Sequence
  primer
tgagttctgcttctcaggtgg

SEQ ID NO: 66249 - DNA, 38 bp, Artificial Sequence
  primer
gtaaaacgacggccagtagcccatctcaaacagcagag

SEQ ID NO: 66250 - DNA, 21 bp, Artificial Sequence
  primer
aaatgctgaatttatccaccc

SEQ ID NO: 66251 - DNA, 21 bp, Artificial Sequence
  primer
ctcttgtcctcatcatccctg

SEQ ID NO: 66252 - DNA, 44 bp, Artificial Sequence
  primer
gtaaaacgacggccagtcaattaaatttagatcctttcaaatgt

SEQ ID NO: 66253 - DNA, 24 bp, Artificial Sequence
  primer
tttgtttgctataacccattgaaa

SEQ ID NO: 66254 - DNA, 44 bp, Artificial Sequence
  primer
gtaaaacgacggccagtgaaggtttagactaattggagtctctg

SEQ ID NO: 66255 - DNA, 24 bp, Artificial Sequence
  primer
ccaggagtaactataacctgagca

SEQ ID NO: 66256 - DNA, 21 bp, Artificial Sequence
  primer
atgcccatttgctgttactcc

SEQ ID NO: 66257 - DNA, 38 bp, Artificial Sequence
  primer
gtaaaacgacggccagtaaatggcacactttggacaag

SEQ ID NO: 66258 - DNA, 21 bp, Artificial Sequence
  primer
tgacaatcaacatgtgcttcc

SEQ ID NO: 66259 - DNA, 39 bp, Artificial Sequence
  primer
gtaaaacgacggccagtcccagtgtatcaaatcctgctc

SEQ ID NO: 66260 - DNA, 38 bp, Artificial Sequence
  primer
gtaaaacgacggccagtatgaatgaatgcttcagcgag

SEQ ID NO: 66261 - DNA, 24 bp, Artificial Sequence
  primer
tggtttctggtaagattccaagtc

SEQ ID NO: 66262 - DNA, 38 bp, Artificial Sequence
  primer
gtaaaacgacggccagttgacactctggaaaggtggag

SEQ ID NO: 66263 - DNA, 21 bp, Artificial Sequence
  primer
aatgatgctcaccacatttgc

SEQ ID NO: 66264 - DNA, 23 bp, Artificial Sequence
  primer
aacctgaataccacgtgaacatc

SEQ ID NO: 66265 - DNA, 35 bp, Artificial Sequence
  primer
gtaaaacgacggccagtggctccagccacacacag

SEQ ID NO: 66266 - DNA, 38 bp, Artificial Sequence
  primer
gtaaaacgacggccagtacacagcttcctgggtaggtc

SEQ ID NO: 66267 - DNA, 19 bp, Artificial Sequence
  primer
aaatcatgccctacagccc

SEQ ID NO: 66268 - DNA, 21 bp, Artificial Sequence
  primer
gagggaggagtttccatctca

SEQ ID NO: 66269 - DNA, 21 bp, Artificial Sequence
  primer
tacccagtgcctgactctttg

SEQ ID NO: 66270 - DNA, 37 bp, Artificial Sequence
  primer
gtaaaacgacggccagtggagaataggtgggagacgg

SEQ ID NO: 66271 - DNA, 19 bp, Artificial Sequence
  primer
aaggctccctgacatgcac

SEQ ID NO: 66272 - DNA, 20 bp, Artificial Sequence
  primer
gacagagagagggcaggagg

SEQ ID NO: 66273 - DNA, 38 bp, Artificial Sequence
  primer
gtaaaacgacggccagtagactgcttggttggttgagg

SEQ ID NO: 66274 - DNA, 39 bp, Artificial Sequence
  primer
gtaaaacgacggccagttcactgggtcagacacactctg

SEQ ID NO: 66275 - DNA, 21 bp, Artificial Sequence
  primer
ctccctctcgctgtctaatcc

SEQ ID NO: 66276 - DNA, 37 bp, Artificial Sequence
  primer
gtaaaacgacggccagtgaggatcagaggcttcaggc

SEQ ID NO: 66277 - DNA, 37 bp, Artificial Sequence
  primer
gtaaaacgacggccagtatagtttccgtgaccctccg

SEQ ID NO: 66278 - DNA, 18 bp, Artificial Sequence
  primer
gagcccaccttcccatcc

SEQ ID NO: 66279 - DNA, 37 bp, Artificial Sequence
  primer
gtaaaacgacggccagtacaccagggtgggaacacta

SEQ ID NO: 66280 - DNA, 21 bp, Artificial Sequence
  primer
ggtctccaataggctgaatgc

SEQ ID NO: 66281 - DNA, 18 bp, Artificial Sequence
  primer
cgcaggaaggttcccaac

SEQ ID NO: 66282 - DNA, 20 bp, Artificial Sequence
  primer
agcttagggtgcagctcctg

SEQ ID NO: 66283 - DNA, 20 bp, Artificial Sequence
  primer
ctgaagacgtctgccgtagg

SEQ ID NO: 66284 - DNA, 38 bp, Artificial Sequence
  primer
gtaaaacgacggccagtctctccaagggaataagccac

SEQ ID NO: 66285 - DNA, 38 bp, Artificial Sequence
  primer
gtaaaacgacggccagtggtcattgtcattggcatctg

SEQ ID NO: 66286 - DNA, 34 bp, Artificial Sequence
  primer
gtaaaacgacggccagtctcacggggtgggagtg

SEQ ID NO: 66287 - DNA, 38 bp, Artificial Sequence
  primer
gtaaaacgacggccagtcagtgcacagagcagagtgac

SEQ ID NO: 66288 - DNA, 21 bp, Artificial Sequence
  primer
gttgcatcccacctggtagag

SEQ ID NO: 66289 - DNA, 37 bp, Artificial Sequence
  primer
gtaaaacgacggccagtatgccatagcaacaagtggg

SEQ ID NO: 66290 - DNA, 21 bp, Artificial Sequence
  primer
actgccctccatgtcagtgtc

SEQ ID NO: 66291 - DNA, 35 bp, Artificial Sequence
  primer
gtaaaacgacggccagtgcctcaacctcctctgcc

SEQ ID NO: 66292 - DNA, 38 bp, Artificial Sequence
  primer
gtaaaacgacggccagttccttgctgctcataaacacg

SEQ ID NO: 66293 - DNA, 37 bp, Artificial Sequence
  primer
gtaaaacgacggccagtgtaaaggctatgccttgggc

SEQ ID NO: 66294 - DNA, 20 bp, Artificial Sequence
  primer
cagctgtgagggatgagagg

SEQ ID NO: 66295 - DNA, 38 bp, Artificial Sequence
  primer
gtaaaacgacggccagtataaatgtgctttgggttggg

SEQ ID NO: 66296 - DNA, 20 bp, Artificial Sequence
  primer
aaggtccaggccaacaagac

SEQ ID NO: 66297 - DNA, 38 bp, Artificial Sequence
  primer
gtaaaacgacggccagtgtcaaggtgaaggtctgtggg

SEQ ID NO: 66298 - DNA, 20 bp, Artificial Sequence
  primer
acttcctcctccaggaccac

SEQ ID NO: 66299 - DNA, 38 bp, Artificial Sequence
  primer
gtaaaacgacggccagtgggtcaaggtcatagggtcag

SEQ ID NO: 66300 - DNA, 38 bp, Artificial Sequence
  primer
gtaaaacgacggccagtgcttagggagcagaggaacag

SEQ ID NO: 66301 - DNA, 21 bp, Artificial Sequence
  primer
tcctcaagactttacccaggc

SEQ ID NO: 66302 - DNA, 21 bp, Artificial Sequence
  primer
cctccatatcctctccttggg

SEQ ID NO: 66303 - DNA, 21 bp, Artificial Sequence
  primer
agacctgtttcaagatccggc

SEQ ID NO: 66304 - DNA, 21 bp, Artificial Sequence
  primer
cacctaagaaccctggctgtc

SEQ ID NO: 66305 - DNA, 21 bp, Artificial Sequence
  primer
caagttcctcagcaccaacac

SEQ ID NO: 66306 - DNA, 22 bp, Artificial Sequence
  primer
tgttcagtaaaggatgatgggc

SEQ ID NO: 66307 - DNA, 40 bp, Artificial Sequence
  primer
gtaaaacgacggccagtggagcacaaatattggcatacag

SEQ ID NO: 66308 - DNA, 38 bp, Artificial Sequence
  primer
gtaaaacgacggccagtgtccattcactggaggtggag

SEQ ID NO: 66309 - DNA, 21 bp, Artificial Sequence
  primer
tagccacatccctattggacc

SEQ ID NO: 66310 - DNA, 21 bp, Artificial Sequence
  primer
gagcacggaagatcccataag

SEQ ID NO: 66311 - DNA, 22 bp, Artificial Sequence
  primer
cacctctgtgtgtccttacacc

SEQ ID NO: 66312 - DNA, 20 bp, Artificial Sequence
  primer
ctttcctcacccggctctac

SEQ ID NO: 66313 - DNA, 36 bp, Artificial Sequence
  primer
gtaaaacgacggccagtgacaagagggacggtcagc

SEQ ID NO: 66314 - DNA, 20 bp, Artificial Sequence
  primer
acacacatgcacacggtttc

SEQ ID NO: 66315 - DNA, 38 bp, Artificial Sequence
  primer
gtaaaacgacggccagttggcatagataactcccaggc

SEQ ID NO: 66316 - DNA, 38 bp, Artificial Sequence
  primer
gtaaaacgacggccagtgggaagacacattcccaattc

SEQ ID NO: 66317 - DNA, 27 bp, Artificial Sequence
  primer
ctaatttggcatactaacctctattcc

SEQ ID NO: 66318 - DNA, 42 bp, Artificial Sequence
  primer
gtaaaacgacggccagtgagcaaaggaaataacaaggctatc

SEQ ID NO: 66319 - DNA, 20 bp, Artificial Sequence
  primer
gaatggcgtgaacctgtgag

SEQ ID NO: 66320 - DNA, 24 bp, Artificial Sequence
  primer
ggaggcatacagagtaatcagtcg

SEQ ID NO: 66321 - DNA, 38 bp, Artificial Sequence
  primer
gtaaaacgacggccagtcaactttacaacagccttcgc

SEQ ID NO: 66322 - DNA, 21 bp, Artificial Sequence
  primer
agcgacgactttgttcctctc

SEQ ID NO: 66323 - DNA, 38 bp, Artificial Sequence
  primer
gtaaaacgacggccagtcagcataggtgaggacaggtg

SEQ ID NO: 66324 - DNA, 27 bp, Artificial Sequence
  primer
aaacccagaatatccttagactacctc

SEQ ID NO: 66325 - DNA, 38 bp, Artificial Sequence
  primer
gtaaaacgacggccagttgttaaatgacgcgttaatgg

SEQ ID NO: 66326 - DNA, 21 bp, Artificial Sequence
  primer
gatatgcttggcgcattgtaa

SEQ ID NO: 66327 - DNA, 44 bp, Artificial Sequence
  primer
gtaaaacgacggccagtccagatacagctagattaccgaattac

SEQ ID NO: 66328 - DNA, 20 bp, Artificial Sequence
  primer
ggagaatggagtgaacccag

SEQ ID NO: 66329 - DNA, 38 bp, Artificial Sequence
  primer
gtaaaacgacggccagttgcccaggcattacaatacaa

SEQ ID NO: 66330 - DNA, 37 bp, Artificial Sequence
  primer
gtaaaacgacggccagtgacagggatgcgtttcattt

SEQ ID NO: 66331 - DNA, 21 bp, Artificial Sequence
  primer
ctctctcctgtgcttcttcca

SEQ ID NO: 66332 - DNA, 38 bp, Artificial Sequence
  primer
gtaaaacgacggccagtatgccaccagatgtttctcct

SEQ ID NO: 66333 - DNA, 22 bp, Artificial Sequence
  primer
ttgtgccagtagacaatgatgg

SEQ ID NO: 66334 - DNA, 25 bp, Artificial Sequence
  primer
cacagaactagaatgagtccaaatg

SEQ ID NO: 66335 - DNA, 42 bp, Artificial Sequence
  primer
gtaaaacgacggccagtgaatttatgtctgaattggctgttc

SEQ ID NO: 66336 - DNA, 25 bp, Artificial Sequence
  primer
aaatcaacaggaatgtgaagcttag

SEQ ID NO: 66337 - DNA, 40 bp, Artificial Sequence
  primer
gtaaaacgacggccagtattatcatcctacagagggcaaa

SEQ ID NO: 66338 - DNA, 21 bp, Artificial Sequence
  primer
tcaggcagaaatctttgaacc

SEQ ID NO: 66339 - DNA, 39 bp, Artificial Sequence
  primer
gtaaaacgacggccagtcaagcattatatctccttgggc

SEQ ID NO: 66340 - DNA, 37 bp, Artificial Sequence
  primer
gtaaaacgacggccagttatcctagcacaacggcacc

SEQ ID NO: 66341 - DNA, 23 bp, Artificial Sequence
  primer
tgtctgctgcttagctcagattc

SEQ ID NO: 66342 - DNA, 38 bp, Artificial Sequence
  primer
gtaaaacgacggccagtgaaccaagaggtggtttccag

SEQ ID NO: 66343 - DNA, 24 bp, Artificial Sequence
  primer
aaggattctgtgacaacctttcag

SEQ ID NO: 66344 - DNA, 21 bp, Artificial Sequence
  primer
cctgaatttcctgtgagggtc

SEQ ID NO: 66345 - DNA, 21 bp, Artificial Sequence
  primer
tcatccagaagcaccactgac

SEQ ID NO: 66346 - DNA, 21 bp, Artificial Sequence
  primer
gacctatgggccctaacaatg

SEQ ID NO: 66347 - DNA, 21 bp, Artificial Sequence
  primer
agacctgggcacagtcatttc

SEQ ID NO: 66348 - DNA, 40 bp, Artificial Sequence
  primer
gtaaaacgacggccagtcctgcagaatccaacaaataatc

SEQ ID NO: 66349 - DNA, 38 bp, Artificial Sequence
  primer
gtaaaacgacggccagtcctctatctccttggtttggg

SEQ ID NO: 66350 - DNA, 37 bp, Artificial Sequence
  primer
gtaaaacgacggccagtgagaggagaacaatgccgtg

SEQ ID NO: 66351 - DNA, 21 bp, Artificial Sequence
  primer
caccacacggagaaccatttc

SEQ ID NO: 66352 - DNA, 21 bp, Artificial Sequence
  primer
ctgaacaaatagcaaagccca

SEQ ID NO: 66353 - DNA, 43 bp, Artificial Sequence
  primer
gtaaaacgacggccagtcttggaaggaatatacgttaatgttg

SEQ ID NO: 66354 - DNA, 21 bp, Artificial Sequence
  primer
cctctgctatcaggtatgccc

SEQ ID NO: 66355 - DNA, 39 bp, Artificial Sequence
  primer
gtaaaacgacggccagtccctataccagtatccctggag

SEQ ID NO: 66356 - DNA, 21 bp, Artificial Sequence
  primer
ccctggtctaaggagtcaacc

SEQ ID NO: 66357 - DNA, 45 bp, Artificial Sequence
  primer
gtaaaacgacggccagtaagaggtgagaccagaattagtgataaa

SEQ ID NO: 66358 - DNA, 38 bp, Artificial Sequence
  primer
gtaaaacgacggccagtaatgttctctgggacaaccaa

SEQ ID NO: 66359 - DNA, 26 bp, Artificial Sequence
  primer
cagagccaagtcttagaaagtgattc

SEQ ID NO: 66360 - DNA, 21 bp, Artificial Sequence
  primer
aggcgatctttgctcctagtg

SEQ ID NO: 66361 - DNA, 42 bp, Artificial Sequence
  primer
gtaaaacgacggccagtggaatatctgtgcttaatccctacc

SEQ ID NO: 66362 - DNA, 38 bp, Artificial Sequence
  primer
gtaaaacgacggccagtagtgctgggattacaggtgtg

SEQ ID NO: 66363 - DNA, 43 bp, Artificial Sequence
  primer
gtaaaacgacggccagtgcctgaaatttagatgaggaattatg

SEQ ID NO: 66364 - DNA, 38 bp, Artificial Sequence
  primer
gtaaaacgacggccagtaaagtaattccaccctttcgg

SEQ ID NO: 66365 - DNA, 21 bp, Artificial Sequence
  primer
agctgtggagcatacctgttc

SEQ ID NO: 66366 - DNA, 38 bp, Artificial Sequence
  primer
gtaaaacgacggccagtattgatgctgataccacctgc

SEQ ID NO: 66367 - DNA, 38 bp, Artificial Sequence
  primer
gtaaaacgacggccagtgcattgtgccattcatctagc

SEQ ID NO: 66368 - DNA, 22 bp, Artificial Sequence
  primer
cctgaatcatagcaccaacaaa

SEQ ID NO: 66369 - DNA, 21 bp, Artificial Sequence
  primer
aacaatcccaacccgtatctg

SEQ ID NO: 66370 - DNA, 24 bp, Artificial Sequence
  primer
aacaaactctcccatgtcgtattt

SEQ ID NO: 66371 - DNA, 21 bp, Artificial Sequence
  primer
gaaattggcctttcattcagc

SEQ ID NO: 66372 - DNA, 39 bp, Artificial Sequence
  primer
gtaaaacgacggccagttgtgtgttataatgttgcgtgg

SEQ ID NO: 66373 - DNA, 27 bp, Artificial Sequence
  primer
ttgcatgtaaatttatagtcgtaaggg

SEQ ID NO: 66374 - DNA, 42 bp, Artificial Sequence
  primer
gtaaaacgacggccagtagcacaggtaatttgaagttctttg

SEQ ID NO: 66375 - DNA, 23 bp, Artificial Sequence
  primer
gcaataataatttgccactctgc

SEQ ID NO: 66376 - DNA, 21 bp, Artificial Sequence
  primer
cataaaccaaagctggcttcc

SEQ ID NO: 66377 - DNA, 21 bp, Artificial Sequence
  primer
tgtgcatgtgtgtgttgcttc

SEQ ID NO: 66378 - DNA, 23 bp, Artificial Sequence
  primer
gtgtctcgtgtgtgctaatatgg

SEQ ID NO: 66379 - DNA, 21 bp, Artificial Sequence
  primer
ccttgcatacctgctgaagtc

SEQ ID NO: 66380 - DNA, 20 bp, Artificial Sequence
  primer
cttagcctgctgcgtttgtc

SEQ ID NO: 66381 - DNA, 22 bp, Artificial Sequence
  primer
agcccttctcagaaacaaactg

SEQ ID NO: 66382 - DNA, 22 bp, Artificial Sequence
  primer
gggtcatcaattacaacctccc

SEQ ID NO: 66383 - DNA, 21 bp, Artificial Sequence
  primer
tcatccagaagcaccactgac

SEQ ID NO: 66384 - DNA, 22 bp, Artificial Sequence
  primer
tgttccatgtaggcacagacac

SEQ ID NO: 66385 - DNA, 21 bp, Artificial Sequence
  primer
aagcaaccatgctagctcctc

SEQ ID NO: 66386 - DNA, 21 bp, Artificial Sequence
  primer
gcccttggaattgaatttctc

SEQ ID NO: 66387 - DNA, 21 bp, Artificial Sequence
  primer
cccaaatcttcccagacattg

SEQ ID NO: 66388 - DNA, 38 bp, Artificial Sequence
  primer
gtaaaacgacggccagtgaacaatgccatactgcctcc

SEQ ID NO: 66389 - DNA, 38 bp, Artificial Sequence
  primer
gtaaaacgacggccagtactgacatcgcctgttgtctc

SEQ ID NO: 66390 - DNA, 21 bp, Artificial Sequence
  primer
aagcaaccatgctagctcctc

SEQ ID NO: 66391 - DNA, 38 bp, Artificial Sequence
  primer
gtaaaacgacggccagtagggatattgattccaaaggc

SEQ ID NO: 66392 - DNA, 40 bp, Artificial Sequence
  primer
gtaaaacgacggccagttttgcatctccattaacataccc

SEQ ID NO: 66393 - DNA, 41 bp, Artificial Sequence
  primer
gtaaaacgacggccagttcagttgtgtgttgtaatgcttgt

SEQ ID NO: 66394 - DNA, 44 bp, Artificial Sequence
  primer
gtaaaacgacggccagtttgtatactttatgcagccaattcttt

SEQ ID NO: 66395 - DNA, 38 bp, Artificial Sequence
  primer
gtaaaacgacggccagtcacgacattgttgctgcttag

SEQ ID NO: 66396 - DNA, 21 bp, Artificial Sequence
  primer
agacctttccgtagggtgaga

SEQ ID NO: 66397 - DNA, 38 bp, Artificial Sequence
  primer
gtaaaacgacggccagtcactgtcaatctgaagggcat

SEQ ID NO: 66398 - DNA, 25 bp, Artificial Sequence
  primer
tctaaagtcaagccaacattactgg

SEQ ID NO: 66399 - DNA, 37 bp, Artificial Sequence
  primer
gtaaaacgacggccagtctggtttgtgcccactcttc

SEQ ID NO: 66400 - DNA, 22 bp, Artificial Sequence
  primer
cttcaaggcaattcacagacac

SEQ ID NO: 66401 - DNA, 40 bp, Artificial Sequence
  primer
gtaaaacgacggccagtacatttgtaattgaaagggcaac

SEQ ID NO: 66402 - DNA, 23 bp, Artificial Sequence
  primer
ttcccttcttaggatttcccttc

SEQ ID NO: 66403 - DNA, 38 bp, Artificial Sequence
  primer
gtaaaacgacggccagtagatttcaaagaggcccaatg

SEQ ID NO: 66404 - DNA, 39 bp, Artificial Sequence
  primer
gtaaaacgacggccagtacactggtctcatcctgaatcc

SEQ ID NO: 66405 - DNA, 37 bp, Artificial Sequence
  primer
gtaaaacgacggccagtgtagccctagcccaccaaac

SEQ ID NO: 66406 - DNA, 40 bp, Artificial Sequence
  primer
gtaaaacgacggccagtttcagacacaagcactttattcg

SEQ ID NO: 66407 - DNA, 21 bp, Artificial Sequence
  primer
ggaggtaagggtggagaggag

SEQ ID NO: 66408 - DNA, 21 bp, Artificial Sequence
  primer
tctctgacgtgagactgaggg

SEQ ID NO: 66409 - DNA, 25 bp, Artificial Sequence
  primer
gatgataactaacacccgtaaggag

SEQ ID NO: 66410 - DNA, 27 bp, Artificial Sequence
  primer
gagcatagtaagcagtagggagtaaca

SEQ ID NO: 66411 - DNA, 21 bp, Artificial Sequence
  primer
tttctccacttgctccctacc

SEQ ID NO: 66412 - DNA, 38 bp, Artificial Sequence
  primer
gtaaaacgacggccagttgccgatttaggaatcaccag

SEQ ID NO: 66413 - DNA, 43 bp, Artificial Sequence
  primer
gtaaaacgacggccagtcctatttccctataacctttgctacg

SEQ ID NO: 66414 - DNA, 21 bp, Artificial Sequence
  primer
aagttggctgggacagatgac

SEQ ID NO: 66415 - DNA, 24 bp, Artificial Sequence
  primer
tgctaatttctcttcacttctggg

SEQ ID NO: 66416 - DNA, 42 bp, Artificial Sequence
  primer
gtaaaacgacggccagtaagtaactgtcaataatctggctgc

SEQ ID NO: 66417 - DNA, 24 bp, Artificial Sequence
  primer
tgaagactctgaacttgactgagg

SEQ ID NO: 66418 - DNA, 18 bp, Artificial Sequence
  primer
gccagtgaacggcgatag

SEQ ID NO: 66419 - DNA, 36 bp, Artificial Sequence
  primer
gtaaaacgacggccagtgaccctacctgccagcctc

SEQ ID NO: 66420 - DNA, 35 bp, Artificial Sequence
  primer
gtaaaacgacggccagtggttaggagtggcccagg

SEQ ID NO: 66421 - DNA, 21 bp, Artificial Sequence
  primer
gagatttgagcccgaacaaac

SEQ ID NO: 66422 - DNA, 21 bp, Artificial Sequence
  primer
cagcttgagctcgtctcacac

SEQ ID NO: 66423 - DNA, 38 bp, Artificial Sequence
  primer
gtaaaacgacggccagttacatcccttaggatctgccc

SEQ ID NO: 66424 - DNA, 24 bp, Artificial Sequence
  primer
ttctacttatgctgagcaccacag

SEQ ID NO: 66425 - DNA, 21 bp, Artificial Sequence
  primer
accaaggagctgtttgctcac

SEQ ID NO: 66426 - DNA, 37 bp, Artificial Sequence
  primer
gtaaaacgacggccagtcctcactcccttgcagacag

SEQ ID NO: 66427 - DNA, 39 bp, Artificial Sequence
  primer
gtaaaacgacggccagtaaggtatttgcatggtttgagc

SEQ ID NO: 66428 - DNA, 21 bp, Artificial Sequence
  primer
ttgcaaacctaaacaacctgc

SEQ ID NO: 66429 - DNA, 22 bp, Artificial Sequence
  primer
gagcaagactcaagactccgtc

SEQ ID NO: 66430 - DNA, 21 bp, Artificial Sequence
  primer
cctccaacaaccttagcacag

SEQ ID NO: 66431 - DNA, 21 bp, Artificial Sequence
  primer
atggcaaccatgtctgaagtg

SEQ ID NO: 66432 - DNA, 24 bp, Artificial Sequence
  primer
aaagatcttgagaacaggtacgtt

SEQ ID NO: 66433 - DNA, 21 bp, Artificial Sequence
  primer
ctagggagagccacacagttg

SEQ ID NO: 66434 - DNA, 38 bp, Artificial Sequence
  primer
gtaaaacgacggccagtgaagtgcaatgtgcatgaaag

SEQ ID NO: 66435 - DNA, 26 bp, Artificial Sequence
  primer
ggataggatttgtatgctttatgagc

SEQ ID NO: 66436 - DNA, 21 bp, Artificial Sequence
  primer
agataccactccagctcagcc

SEQ ID NO: 66437 - DNA, 38 bp, Artificial Sequence
  primer
gtaaaacgacggccagtagtggcaacacattgcatctc

SEQ ID NO: 66438 - DNA, 21 bp, Artificial Sequence
  primer
aagccatgccacatatgaaag

SEQ ID NO: 66439 - DNA, 42 bp, Artificial Sequence
  primer
gtaaaacgacggccagttcattaatccctattcgatgaaatg

SEQ ID NO: 66440 - DNA, 19 bp, Artificial Sequence
  primer
ccgctttgcacaaactgag

SEQ ID NO: 66441 - DNA, 24 bp, Artificial Sequence
  primer
cctgaaggcaccaaagtaataaac

SEQ ID NO: 66442 - DNA, 38 bp, Artificial Sequence
  primer
gtaaaacgacggccagtattggcaccagcacatgatag

SEQ ID NO: 66443 - DNA, 21 bp, Artificial Sequence
  primer
gagaaagacacctccattccc

SEQ ID NO: 66444 - DNA, 21 bp, Artificial Sequence
  primer
tatgcatgccaggacagtctc

SEQ ID NO: 66445 - DNA, 41 bp, Artificial Sequence
  primer
gtaaaacgacggccagtgggaatcatacgagaagaaatgtg

SEQ ID NO: 66446 - DNA, 20 bp, Artificial Sequence
  primer
caactactcccatccctccc

SEQ ID NO: 66447 - DNA, 38 bp, Artificial Sequence
  primer
gtaaaacgacggccagtccagagttgttgggagaacag

SEQ ID NO: 66448 - DNA, 41 bp, Artificial Sequence
  primer
gtaaaacgacggccagtcagagtttccttgttgtacctgag

SEQ ID NO: 66449 - DNA, 21 bp, Artificial Sequence
  primer
caggcttaaagggtacccaac

SEQ ID NO: 66450 - DNA, 38 bp, Artificial Sequence
  primer
gtaaaacgacggccagtttaccctctgtgtgatggagg

SEQ ID NO: 66451 - DNA, 40 bp, Artificial Sequence
  primer
gtaaaacgacggccagtcccagatttagcaaaggcatatc

SEQ ID NO: 66452 - DNA, 38 bp, Artificial Sequence
  primer
gtaaaacgacggccagtaatcccactggtccctattcc

SEQ ID NO: 66453 - DNA, 38 bp, Artificial Sequence
  primer
gtaaaacgacggccagtcagcttccttcagtctcttcg

SEQ ID NO: 66454 - DNA, 19 bp, Artificial Sequence
  primer
caagcttgggatggtttgc

SEQ ID NO: 66455 - DNA, 38 bp, Artificial Sequence
  primer
gtaaaacgacggccagtttgctgagaatgatggtttcc

SEQ ID NO: 66456 - DNA, 38 bp, Artificial Sequence
  primer
gtaaaacgacggccagtgaagcagcaaatgactgggac

SEQ ID NO: 66457 - DNA, 23 bp, Artificial Sequence
  primer
tgctcaacctgtacactctggtc

SEQ ID NO: 66458 - DNA, 42 bp, Artificial Sequence
  primer
gtaaaacgacggccagttgccaatttctactgttaacgaatc

SEQ ID NO: 66459 - DNA, 20 bp, Artificial Sequence
  primer
aacaatcccagcaatccctc

SEQ ID NO: 66460 - DNA, 21 bp, Artificial Sequence
  primer
aggtcttcaaaggcatcaacc

SEQ ID NO: 66461 - DNA, 37 bp, Artificial Sequence
  primer
gtaaaacgacggccagtaaccctcccacctcagtctc

SEQ ID NO: 66462 - DNA, 40 bp, Artificial Sequence
  primer
gtaaaacgacggccagttctggagtcaaccagatatccaa

SEQ ID NO: 66463 - DNA, 21 bp, Artificial Sequence
  primer
tttaaattgggatttgggagc

SEQ ID NO: 66464 - DNA, 38 bp, Artificial Sequence
  primer
gtaaaacgacggccagttagacatggctgccagatgat

SEQ ID NO: 66465 - DNA, 24 bp, Artificial Sequence
  primer
cctgaacaggtacaagtacgagac

SEQ ID NO: 66466 - DNA, 24 bp, Artificial Sequence
  primer
tgcttataatttatgcgagaaggg

SEQ ID NO: 66467 - DNA, 38 bp, Artificial Sequence
  primer
gtaaaacgacggccagttggacagtggaaagattcacc

SEQ ID NO: 66468 - DNA, 38 bp, Artificial Sequence
  primer
gtaaaacgacggccagtgaaacgtctttgctctgcact

SEQ ID NO: 66469 - DNA, 19 bp, Artificial Sequence
  primer
cttcaggttgaggcccttc

SEQ ID NO: 66470 - DNA, 40 bp, Artificial Sequence
  primer
gtaaaacgacggccagtggattcacacgcaaatttgttac

SEQ ID NO: 66471 - DNA, 43 bp, Artificial Sequence
  primer
gtaaaacgacggccagtaaacctttgaagaataaactcagtcc

SEQ ID NO: 66472 - DNA, 39 bp, Artificial Sequence
  primer
gtaaaacgacggccagttgaggtagctccatttgctatg

SEQ ID NO: 66473 - DNA, 23 bp, Artificial Sequence
  primer
tgctcagtatagcattcactgga

SEQ ID NO: 66474 - DNA, 44 bp, Artificial Sequence
  primer
gtaaaacgacggccagtcaaagagtatggctcatagtagcagtc

SEQ ID NO: 66475 - DNA, 20 bp, Artificial Sequence
  primer
gagccagtcagtgaggttgg

SEQ ID NO: 66476 - DNA, 23 bp, Artificial Sequence
  primer
tgataaggagtctaccctccagc

SEQ ID NO: 66477 - DNA, 21 bp, Artificial Sequence
  primer
aaggaccaggacaatttgcag

SEQ ID NO: 66478 - DNA, 21 bp, Artificial Sequence
  primer
aatgagggaacctggattctg

SEQ ID NO: 66479 - DNA, 40 bp, Artificial Sequence
  primer
gtaaaacgacggccagtaagtgctttctataggctcaacg

SEQ ID NO: 66480 - DNA, 22 bp, Artificial Sequence
  primer
tcatatcattgtttggagcagc

SEQ ID NO: 66481 - DNA, 21 bp, Artificial Sequence
  primer
tccctgacctcatctttggac

SEQ ID NO: 66482 - DNA, 43 bp, Artificial Sequence
  primer
gtaaaacgacggccagtcaaattaaatgaaacacatgttggtg

SEQ ID NO: 66483 - DNA, 25 bp, Artificial Sequence
  primer
caggattctaggtctacatttgtcc

SEQ ID NO: 66484 - DNA, 38 bp, Artificial Sequence
  primer
gtaaaacgacggccagtagcttggtatcctgaagtgcc

SEQ ID NO: 66485 - DNA, 21 bp, Artificial Sequence
  primer
tacagcctaggcaacaacgag

SEQ ID NO: 66486 - DNA, 24 bp, Artificial Sequence
  primer
ccaaattgggtcttctaaattgat

SEQ ID NO: 66487 - DNA, 38 bp, Artificial Sequence; identical to SEQ ID NO: 66484
  primer

SEQ ID NO: 66488 - DNA, 41 bp, Artificial Sequence
  primer
gtaaaacgacggccagtacaatccagaatttaatcacaccc

SEQ ID NO: 66489 - DNA, 21 bp, Artificial Sequence
  primer
tcagtggattaacatcctgcc

SEQ ID NO: 66490 - DNA, 24 bp, Artificial Sequence
  primer
tgaggatttgaaacactccatttc

SEQ ID NO: 66491 - DNA, 39 bp, Artificial Sequence
  primer
gtaaaacgacggccagttgatgctagagtgaaatttggg

SEQ ID NO: 66492 - DNA, 38 bp, Artificial Sequence
  primer
gtaaaacgacggccagtccttcctatcacggactccac

SEQ ID NO: 66493 - DNA, 37 bp, Artificial Sequence
  primer
gtaaaacgacggccagtggctttgaaggccaagtgtc

SEQ ID NO: 66494 - DNA, 26 bp, Artificial Sequence
  primer
gagtgtgctttcaaagaaagattatg

SEQ ID NO: 66495 - DNA, 22 bp, Artificial Sequence
  primer
ttaaccgtgagacttacctggc

SEQ ID NO: 66496 - DNA, 45 bp, Artificial Sequence
  primer
gtaaaacgacggccagtactttacagatccctaagagatgaagtt

SEQ ID NO: 66497 - DNA, 20 bp, Artificial Sequence
  primer
tagcaggcaaaccactggag

SEQ ID NO: 66498 - DNA, 35 bp, Artificial Sequence
  primer
gtaaaacgacggccagttacaggagcctgccacca

SEQ ID NO: 66499 - DNA, 20 bp, Artificial Sequence
  primer
tgcgtaatgctgatgtttgg

SEQ ID NO: 66500 - DNA, 21 bp, Artificial Sequence
  primer
tttgtgatggtttgcttgtcc

SEQ ID NO: 66501 - DNA, 38 bp, Artificial Sequence
  primer
gtaaaacgacggccagtcaactgcataggcccagtagc

SEQ ID NO: 66502 - DNA, 38 bp, Artificial Sequence
  primer
gtaaaacgacggccagtacaattctttccaggcctttg

SEQ ID NO: 66503 - DNA, 39 bp, Artificial Sequence
  primer
gtaaaacgacggccagttctgaaggtcagatggtgtgtg

SEQ ID NO: 66504 - DNA, 20 bp, Artificial Sequence
  primer
gcagcacgtagggagagatg

SEQ ID NO: 66505 - DNA, 20 bp, Artificial Sequence
  primer
acagagtccctcacctgctg

SEQ ID NO: 66506 - DNA, 21 bp, Artificial Sequence
  primer
ctggaagcagtgtgactggac

SEQ ID NO: 66507 - DNA, 21 bp, Artificial Sequence
  primer
gtgtcatgcacctgtagtccc

SEQ ID NO: 66508 - DNA, 21 bp, Artificial Sequence
  primer
ccacctccctaggtaaggacc

SEQ ID NO: 66509 - DNA, 21 bp, Artificial Sequence
  primer
caccaggatgtgaaaggtctg

SEQ ID NO: 66510 - DNA, 20 bp, Artificial Sequence
  primer
gggtctgttctcttcctccc

SEQ ID NO: 66511 - DNA, 21 bp, Artificial Sequence
  primer
ctcccataggtgggtcacttg

SEQ ID NO: 66512 - DNA, 21 bp, Artificial Sequence
  primer
aaatttatttggcatgggcac

SEQ ID NO: 66513 - DNA, 38 bp, Artificial Sequence
  primer
gtaaaacgacggccagtctcgactatcactcttggccc

SEQ ID NO: 66514 - DNA, 21 bp, Artificial Sequence
  primer
cacttcctaccgaagagcctg

SEQ ID NO: 66515 - DNA, 38 bp, Artificial Sequence
  primer
gtaaaacgacggccagtaaccctactcctctcccttcg

SEQ ID NO: 66516 - DNA, 21 bp, Artificial Sequence
  primer
ttctcaaactcaatacggccc

SEQ ID NO: 66517 - DNA, 38 bp, Artificial Sequence
  primer
gtaaaacgacggccagtaagtgtctgtccaggcatcac

SEQ ID NO: 66518 - DNA, 21 bp, Artificial Sequence
  primer
aggttccctctccaagaggtc

SEQ ID NO: 66519 - DNA, 23 bp, Artificial Sequence
  primer
atggcaccatacaaatccttaac

SEQ ID NO: 66520 - DNA, 38 bp, Artificial Sequence
  primer
gtaaaacgacggccagtcttacgaaacggagggaacag

SEQ ID NO: 66521 - DNA, 21 bp, Artificial Sequence
  primer
gggcttgagaactggaaagtg

SEQ ID NO: 66522 - DNA, 38 bp, Artificial Sequence
  primer
gtaaaacgacggccagtgaccacagttgagagcctgag

SEQ ID NO: 66523 - DNA, 20 bp, Artificial Sequence
  primer
gctgccacatgtcagcatac

SEQ ID NO: 66524 - DNA, 38 bp, Artificial Sequence
  primer
gtaaaacgacggccagttaagccagggaaaggagacac

SEQ ID NO: 66525 - DNA, 21 bp, Artificial Sequence
  primer
ccttcacttactgctgctccc

SEQ ID NO: 66526 - DNA, 41 bp, Artificial Sequence
  primer
gtaaaacgacggccagtttccagaagcagaaacataccttc

SEQ ID NO: 66527 - DNA, 27 bp, Artificial Sequence
  primer
tcattagagaacatgcagttagatgag

SEQ ID NO: 66528 - DNA, 37 bp, Artificial Sequence
  primer
gtaaaacgacggccagtccaggcccaggattcataac

SEQ ID NO: 66529 - DNA, 25 bp, Artificial Sequence
  primer
aaacgctaagttgtgtttgtagtga

SEQ ID NO: 66530 - DNA, 38 bp, Artificial Sequence
  primer
gtaaaacgacggccagtagcagtccattgaagcttgtg

SEQ ID NO: 66531 - DNA, 23 bp, Artificial Sequence
  primer
gcagcattacctgcatcattatc

SEQ ID NO: 66532 - DNA, 23 bp, Artificial Sequence
  primer
catcacgcctagagatcatatcc

SEQ ID NO: 66533 - DNA, 39 bp, Artificial Sequence
  primer
gtaaaacgacggccagtaagcatgcacattcctttcatt

SEQ ID NO: 66534 - DNA, 44 bp, Artificial Sequence
  primer
gtaaaacgacggccagtagctctaacaacctcttaatacaggtg

SEQ ID NO: 66535 - DNA, 42 bp, Artificial Sequence
  primer
gtaaaacgacggccagtagctcctattaatgttaggaaaccc

SEQ ID NO: 66536 - DNA, 23 bp, Artificial Sequence
  primer
tgttgatcccttgattcaaactg

SEQ ID NO: 66537 - DNA, 40 bp, Artificial Sequence
  primer
gtaaaacgacggccagttgactcaacgagcactacatttg

SEQ ID NO: 66538 - DNA, 39 bp, Artificial Sequence
  primer
gtaaaacgacggccagtgcaaatggacttaacactgtgg

SEQ ID NO: 66539 - DNA, 40 bp, Artificial Sequence
  primer
gtaaaacgacggccagtaacaggattcagtctcaaccaaa

SEQ ID NO: 66540 - DNA, 23 bp, Artificial Sequence
  primer
gggataaatacagatgccacatt

SEQ ID NO: 66541 - DNA, 21 bp, Artificial Sequence
  primer
aaataattgaggccaacaccc

SEQ ID NO: 66542 - DNA, 35 bp, Artificial Sequence
  primer
gtaaaacgacggccagtggaatgccatccctttgc

SEQ ID NO: 66543 - DNA, 19 bp, Artificial Sequence
  primer
agcagtccctgcgaaagag

SEQ ID NO: 66544 - DNA, 21 bp, Artificial Sequence
  primer
gtgatgtcttgtctggcatgg

SEQ ID NO: 66545 - DNA, 21 bp, Artificial Sequence
  primer
ctgtcctgaccttggacactg

SEQ ID NO: 66546 - DNA, 21 bp, Artificial Sequence
  primer
agtccaggaaacaggacaagg

SEQ ID NO: 66547 - DNA, 22 bp, Artificial Sequence
  primer
ggtgagagagaccagtgcattc

SEQ ID NO: 66548 - DNA, 38 bp, Artificial Sequence
  primer
gtaaaacgacggccagtccctccctttacctgcaagag

SEQ ID NO: 66549 - DNA, 21 bp, Artificial Sequence
  primer
ggaaggctgaagatgacaagc

SEQ ID NO: 66550 - DNA, 38 bp, Artificial Sequence
  primer
gtaaaacgacggccagtagggccatgtactcaaagacc

SEQ ID NO: 66551 - DNA, 21 bp, Artificial Sequence
  primer
tctgagagggcctgtttatgg

SEQ ID NO: 66552 - DNA, 38 bp, Artificial Sequence
  primer
gtaaaacgacggccagtggattgtcccaggaaagaagg

SEQ ID NO: 66553 - DNA, 21 bp, Artificial Sequence
  primer
ctcacccagacaacagctgag

SEQ ID NO: 66554 - DNA, 21 bp, Artificial Sequence
  primer
gtggttctcgtcttccctgac

SEQ ID NO: 66555 - DNA, 37 bp, Artificial Sequence
  primer
gtaaaacgacggccagtactcattgcagcattgtgcc

SEQ ID NO: 66556 - DNA, 39 bp, Artificial Sequence
  primer
gtaaaacgacggccagtgctttattgtgagcaggagcag

SEQ ID NO: 66557 - DNA, 38 bp, Artificial Sequence
  primer
gtaaaacgacggccagtatgtacgtccacacgaacagg

SEQ ID NO: 66558 - DNA, 22 bp, Artificial Sequence
  primer
cctaatttgatgttctggtggc

SEQ ID NO: 66559 - DNA, 38 bp, Artificial Sequence
  primer
gtaaaacgacggccagtgatatgagccactatgcctgg

SEQ ID NO: 66560 - DNA, 38 bp, Artificial Sequence
  primer
gtaaaacgacggccagttctaagacagtgtggaagccg

SEQ ID NO: 66561 - DNA, 38 bp, Artificial Sequence
  primer
gtaaaacgacggccagtatttcattcctcagtgccagg

SEQ ID NO: 66562 - DNA, 38 bp, Artificial Sequence
  primer
gtaaaacgacggccagtgaatgcaaacacagcctcaag

SEQ ID NO: 66563 - DNA, 37 bp, Artificial Sequence
  primer
gtaaaacgacggccagtgtcctagatcgagggcttcc

SEQ ID NO: 66564 - DNA, 21 bp, Artificial Sequence
  primer
ctgccacagcctggtgtatag

SEQ ID NO: 66565 - DNA, 38 bp, Artificial Sequence
  primer
gtaaaacgacggccagtatctctagtgccctcttccgc

SEQ ID NO: 66566 - DNA, 38 bp, Artificial Sequence
  primer
gtaaaacgacggccagtggcagtgcttaactcagaggg

SEQ ID NO: 66567 - DNA, 21 bp, Artificial Sequence
  primer
aggaggctgatagtctgggag

SEQ ID NO: 66568 - DNA, 20 bp, Artificial Sequence
  primer
gacatggcaggtcgtctttc

SEQ ID NO: 66569 - DNA, 21 bp, Artificial Sequence
  primer
attgtcagagtccctggagcc

SEQ ID NO: 66570 - DNA, 21 bp, Artificial Sequence
  primer
ttatcaccaaccaccactccc

SEQ ID NO: 66571 - DNA, 21 bp, Artificial Sequence
  primer
ggctgcagtgaactatgatgg

SEQ ID NO: 66572 - DNA, 38 bp, Artificial Sequence
  primer
gtaaaacgacggccagttctacacaagccagagggacc

SEQ ID NO: 66573 - DNA, 19 bp, Artificial Sequence
  primer
ggaacgagatcctggatgg

SEQ ID NO: 66574 - DNA, 21 bp, Artificial Sequence
  primer
cagcacaggcagattcaagac

SEQ ID NO: 66575 - DNA, 21 bp, Artificial Sequence
  primer
aggagaagtgaggcatcttgc

SEQ ID NO: 66576 - DNA, 37 bp, Artificial Sequence
  primer
gtaaaacgacggccagtcccagggttatgactgatgc

SEQ ID NO: 66577 - DNA, 38 bp, Artificial Sequence
  primer
gtaaaacgacggccagtcggaagctaccctcatcctac

SEQ ID NO: 66578 - DNA, 21 bp, Artificial Sequence
  primer
atgccattaccatcaacaccc

SEQ ID NO: 66579 - DNA, 38 bp, Artificial Sequence
  primer
gtaaaacgacggccagtgggacagagcagaaggaactg

SEQ ID NO: 66580 - DNA, 37 bp, Artificial Sequence
  primer
gtaaaacgacggccagtttaccaagcatgagccactg

SEQ ID NO: 66581 - DNA, 21 bp, Artificial Sequence
  primer
accgggagtgtgatctagagg

SEQ ID NO: 66582 - DNA, 21 bp, Artificial Sequence
  primer
ctgggcagagtcaaacctgag

SEQ ID NO: 66583 - DNA, 21 bp, Artificial Sequence
  primer
tgttcaaggtcacagagaggg

SEQ ID NO: 66584 - DNA, 38 bp, Artificial Sequence
  primer
gtaaaacgacggccagtaaagagacgttgctgctttcg

SEQ ID NO: 66585 - DNA, 38 bp, Artificial Sequence
  primer
gtaaaacgacggccagtggcttccaagacaagcatgag

SEQ ID NO: 66586 - DNA, 37 bp, Artificial Sequence
  primer
gtaaaacgacggccagtcaacctcaaagaggccaatg

SEQ ID NO: 66587 - DNA, 21 bp, Artificial Sequence
  primer
agtgccacattccttctttgg

SEQ ID NO: 66588 - DNA, 21 bp, Artificial Sequence
  primer
ttcacaggtgtgttgtgatgg

SEQ ID NO: 66589 - DNA, 19 bp, Artificial Sequence
  primer
ctgggtttggcttggtttg

SEQ ID NO: 66590 - DNA, 41 bp, Artificial Sequence
  primer
gtaaaacgacggccagtaaacaaggctttaggtaacactgg

SEQ ID NO: 66591 - DNA, 21 bp, Artificial Sequence
  primer
ggctttatacccagctcaagg

SEQ ID NO: 66592 - DNA, 38 bp, Artificial Sequence
  primer
gtaaaacgacggccagtatccaaagccaaggacaactg

SEQ ID NO: 66593 - DNA, 38 bp, Artificial Sequence
  primer
gtaaaacgacggccagtagaggtgcacaggatagggtc

SEQ ID NO: 66594 - DNA, 38 bp, Artificial Sequence
  primer
gtaaaacgacggccagtcattcaagcaaaggtgtggag

SEQ ID NO: 66595 - DNA, 21 bp, Artificial Sequence
  primer
acgatgaagtagggccaaatg

SEQ ID NO: 66596 - DNA, 38 bp, Artificial Sequence
  primer
gtaaaacgacggccagtggacaaatggtcatctgggac

SEQ ID NO: 66597 - DNA, 38 bp, Artificial Sequence
  primer
gtaaaacgacggccagtgaagagaggatccacccactg

SEQ ID NO: 66598 - DNA, 21 bp, Artificial Sequence
  primer
gtggctgctgctttgaatatg

SEQ ID NO: 66599 - DNA, 38 bp, Artificial Sequence
  primer
gtaaaacgacggccagtacagcccactgagattgtgag

SEQ ID NO: 66600 - DNA, 20 bp, Artificial Sequence
  primer
gaatgtgccaacacccacag

SEQ ID NO: 66601 - DNA, 21 bp, Artificial Sequence
  primer
cacaacacggtcagcactagg

SEQ ID NO: 66602 - DNA, 21 bp, Artificial Sequence
  primer
agacacgagccaggtaggttg

SEQ ID NO: 66603 - DNA, 36 bp, Artificial Sequence
  primer
gtaaaacgacggccagtcccagagcatagagcaggc

SEQ ID NO: 66604 - DNA, 21 bp, Artificial Sequence
  primer
tgtagcatttcctggttgctg

SEQ ID NO: 66605 - DNA, 38 bp, Artificial Sequence
  primer
gtaaaacgacggccagttagtgtgcatgggaagacctg

SEQ ID NO: 66606 - DNA, 21 bp, Artificial Sequence
  primer
ttgagagatgaggcagtcagg

SEQ ID NO: 66607 - DNA, 21 bp, Artificial Sequence
  primer
tggattccgctctctctaagc

SEQ ID NO: 66608 - DNA, 21 bp, Artificial Sequence
  primer
agcaattagagctgcagagcc

SEQ ID NO: 66609 - DNA, 37 bp, Artificial Sequence
  primer
gtaaaacgacggccagtctttcttggccacctccttc

SEQ ID NO: 66610 - DNA, 38 bp, Artificial Sequence
  primer
gtaaaacgacggccagtaagcaaagctcctggtttgag

SEQ ID NO: 66611 - DNA, 21 bp, Artificial Sequence
  primer
tacctcaggaacatgcaaggg

SEQ ID NO: 66612 - DNA, 20 bp, Artificial Sequence
  primer
acaccagttctgtgaaggcg

SEQ ID NO: 66613 - DNA, 21 bp, Artificial Sequence
  primer
tctgtactgactgggctgtgg

SEQ ID NO: 66614 - DNA, 20 bp, Artificial Sequence
  primer
tggtgagtctctgggctttg

SEQ ID NO: 66615 - DNA, 21 bp, Artificial Sequence
  primer
gtcacagcatctggaataccg

SEQ ID NO: 66616 - DNA, 37 bp, Artificial Sequence
  primer
gtaaaacgacggccagtcccgagtattgggaggacac

SEQ ID NO: 66617 - DNA, 21 bp, Artificial Sequence
  primer
ccctgcatattcctcttcttg

SEQ ID NO: 66618 - DNA, 19 bp, Artificial Sequence
  primer
gtgcagggagagatctggg

SEQ ID NO: 66619 - DNA, 39 bp, Artificial Sequence
  primer
gtaaaacgacggccagtttatgggagctgagaaagatgg

SEQ ID NO: 66620 - DNA, 38 bp, Artificial Sequence
  primer
gtaaaacgacggccagtctggctatgccctcctctaag

SEQ ID NO: 66621 - DNA, 21 bp, Artificial Sequence
  primer
acctgcaaggaaagcatcttc

SEQ ID NO: 66622 - DNA, 22 bp, Artificial Sequence
  primer
gggataagaaggaaggagaggc

SEQ ID NO: 66623 - DNA, 21 bp, Artificial Sequence
  primer
gaaggaggagctgagatctgg

SEQ ID NO: 66624 - DNA, 21 bp, Artificial Sequence
  primer
atgtaaacaagcagccagcac

SEQ ID NO: 66625 - DNA, 23 bp, Artificial Sequence
  primer
tgacgtaatttatgaccgtggag

SEQ ID NO: 66626 - DNA, 21 bp, Artificial Sequence
  primer
tgagaggtctagttgggaggg

SEQ ID NO: 66627 - DNA, 37 bp, Artificial Sequence
  primer
gtaaaacgacggccagtccctaccacccttaggcatc

SEQ ID NO: 66628 - DNA, 21 bp, Artificial Sequence
  primer
actcctggcatggacttgaac

SEQ ID NO: 66629 - DNA, 21 bp, Artificial Sequence
  primer
ctgctttcatgacacacaggc

SEQ ID NO: 66630 - DNA, 21 bp, Artificial Sequence
  primer
agctatcccagattccagagc

SEQ ID NO: 66631 - DNA, 39 bp, Artificial Sequence
  primer
gtaaaacgacggccagtaaatcctcaagaggtgagaggg

SEQ ID NO: 66632 - DNA, 39 bp, Artificial Sequence
  primer
gtaaaacgacggccagtccatttacaaagccttcagacc

SEQ ID NO: 66633 - DNA, 20 bp, Artificial Sequence
  primer
ttctggaggaacatcatggg

SEQ ID NO: 66634 - DNA, 38 bp, Artificial Sequence
  primer
gtaaaacgacggccagttttaaccaaggaaatggtggg

SEQ ID NO: 66635 - DNA, 38 bp, Artificial Sequence
  primer
gtaaaacgacggccagtccacaaggtgaagagagaggg

SEQ ID NO: 66636 - DNA, 21 bp, Artificial Sequence
  primer
gttaccgtttgaagctggagg

SEQ ID NO: 66637 - DNA, 21 bp, Artificial Sequence
  primer
gtgcctctataagctgagccc

SEQ ID NO: 66638 - DNA, 38 bp, Artificial Sequence
  primer
gtaaaacgacggccagtacactctgaaatggcaaaggc

SEQ ID NO: 66639 - DNA, 20 bp, Artificial Sequence
  primer
ctgtgtcctgcaacatgtcc

SEQ ID NO: 66640 - DNA, 38 bp, Artificial Sequence
  primer
gtaaaacgacggccagttcaagacactgagggacatgg

SEQ ID NO: 66641 - DNA, 21 bp, Artificial Sequence
  primer
gccaataaataccatggctcc

SEQ ID NO: 66642 - DNA, 21 bp, Artificial Sequence
  primer
ggttctctctggaacaccagc

SEQ ID NO: 66643 - DNA, 20 bp, Artificial Sequence
  primer
agtggagattgtgccactgc

SEQ ID NO: 66644 - DNA, 38 bp, Artificial Sequence
  primer
gtaaaacgacggccagttgcatggacagtggaggtaag

SEQ ID NO: 66645 - DNA, 37 bp, Artificial Sequence
  primer
gtaaaacgacggccagtgctccattctttccctgctc

SEQ ID NO: 66646 - DNA, 21 bp, Artificial Sequence
  primer
agaaggccaagcacatagctc

SEQ ID NO: 66647 - DNA, 21 bp, Artificial Sequence
  primer
aagagcttcagcgagatggtc

SEQ ID NO: 66648 - DNA, 39 bp, Artificial Sequence
  primer
gtaaaacgacggccagtcagtgtttgtctagcacagggc

SEQ ID NO: 66649 - DNA, 37 bp, Artificial Sequence
  primer
gtaaaacgacggccagtagctcactataggcagcccg

SEQ ID NO: 66650 - DNA, 21 bp, Artificial Sequence
  primer
gtgccatcagccttgacttag

SEQ ID NO: 66651 - DNA, 21 bp, Artificial Sequence
  primer
tacaccacagagcccagtgtc

SEQ ID NO: 66652 - DNA, 21 bp, Artificial Sequence
  primer
cttggaggactcaaaggcatc

SEQ ID NO: 66653 - DNA, 21 bp, Artificial Sequence
  primer
tattccagggtttccatccag

SEQ ID NO: 66654 - DNA, 21 bp, Artificial Sequence
  primer
aatgaatgaacgtgtgcatgg

SEQ ID NO: 66655 - DNA, 38 bp, Artificial Sequence
  primer
gtaaaacgacggccagtggacaattcctctgcacacac

SEQ ID NO: 66656 - DNA, 38 bp, Artificial Sequence
  primer
gtaaaacgacggccagttgacaatgcactaaacccacc

SEQ ID NO: 66657 - DNA, 21 bp, Artificial Sequence
  primer
cacttagccaggagatgggac

SEQ ID NO: 66658 - DNA, 21 bp, Artificial Sequence
  primer
accactactctgtgccaaagg

SEQ ID NO: 66659 - DNA, 37 bp, Artificial Sequence
  primer
gtaaaacgacggccagttctttgacctgcagagcagc

SEQ ID NO: 66660 - DNA, 37 bp, Artificial Sequence
  primer
gtaaaacgacggccagtaagtcacatcctgtggcctg

SEQ ID NO: 66661 - DNA, 20 bp, Artificial Sequence
  primer
ctccagcagcttggtacagc

SEQ ID NO: 66662 - DNA, 38 bp, Artificial Sequence
  primer
gtaaaacgacggccagttaaccaccgtcttctccacac

SEQ ID NO: 66663 - DNA, 21 bp, Artificial Sequence
  primer
caatagacctcctcattggca

SEQ ID NO: 66664 - DNA, 22 bp, Artificial Sequence
  primer
caacagcatcagcatctgtagg

SEQ ID NO: 66665 - DNA, 21 bp, Artificial Sequence
  primer
attcagaatgggtggaacctg

SEQ ID NO: 66666 - DNA, 38 bp, Artificial Sequence
  primer
gtaaaacgacggccagttaggcagaagaggaggctctg

SEQ ID NO: 66667 - DNA, 21 bp, Artificial Sequence
  primer
accattgctgcattgtaaagg

SEQ ID NO: 66668 - DNA, 21 bp, Artificial Sequence
  primer
tctttctcatttcctggagcc

SEQ ID NO: 66669 - DNA, 38 bp, Artificial Sequence
  primer
gtaaaacgacggccagtcctagaccatccaattctggc

SEQ ID NO: 66670 - DNA, 38 bp, Artificial Sequence
  primer
gtaaaacgacggccagtgcattgataaatggccctagc

SEQ ID NO: 66671 - DNA, 38 bp, Artificial Sequence
  primer
gtaaaacgacggccagtgcatctgactcccacttcttg

SEQ ID NO: 66672 - DNA, 21 bp, Artificial Sequence
  primer
gctccctggaatctaccttca

SEQ ID NO: 66673 - DNA, 20 bp, Artificial Sequence
  primer
gcaaagcacctggcatttac

SEQ ID NO: 66674 - DNA, 22 bp, Artificial Sequence
  primer
tcctgattcttccagctctttg

SEQ ID NO: 66675 - DNA, 38 bp, Artificial Sequence
  primer
gtaaaacgacggccagttgagccactaagctccctttc

SEQ ID NO: 66676 - DNA, 18 bp, Artificial Sequence
  primer
agctgggattaccaccgc

SEQ ID NO: 66677 - DNA, 22 bp, Artificial Sequence
  primer
ttgagggaaataacagccaatc

SEQ ID NO: 66678 - DNA, 21 bp, Artificial Sequence
  primer
ctgggatactgcttccctcag

SEQ ID NO: 66679 - DNA, 21 bp, Artificial Sequence
  primer
taaacctggctaagtgctggc

SEQ ID NO: 66680 - DNA, 38 bp, Artificial Sequence
  primer
gtaaaacgacggccagtgctgaaagacatacacgtggc

SEQ ID NO: 66681 - DNA, 38 bp, Artificial Sequence
  primer
gtaaaacgacggccagtggcttgtcaaactcaatcacc

SEQ ID NO: 66682 - DNA, 38 bp, Artificial Sequence
  primer
gtaaaacgacggccagtaaacacatgaggaacccttgg

SEQ ID NO: 66683 - DNA, 38 bp, Artificial Sequence; identical to SEQ ID NO: 66656
  primer

SEQ ID NO: 66684 - DNA, 38 bp, Artificial Sequence
  primer
gtaaaacgacggccagtggatccacatctcacatgcac

SEQ ID NO: 66685 - DNA, 21 bp, Artificial Sequence
  primer
tctttctcatttcctggagcc

SEQ ID NO: 66686 - DNA, 21 bp, Artificial Sequence
  primer
gactaagcccaactttgcacc

SEQ ID NO: 66687 - DNA, 21 bp, Artificial Sequence
  primer
gttggctactgaaacaagggc

SEQ ID NO: 66688 - DNA, 42 bp, Artificial Sequence
  primer
gtaaaacgacggccagttttgagattaaaggaaattcaggtg

SEQ ID NO: 66689 - DNA, 23 bp, Artificial Sequence
  primer
gctgcaatagcaacaaattatgc

SEQ ID NO: 66690 - DNA, 22 bp, Artificial Sequence
  primer
gcagtgcttagtacagggttga

SEQ ID NO: 66691 - DNA, 38 bp, Artificial Sequence
  primer
gtaaaacgacggccagtatgcaaccagtatcgatgagc

SEQ ID NO: 66692 - DNA, 39 bp, Artificial Sequence
  primer
gtaaaacgacggccagtgcgagatggtgattgttaactc

SEQ ID NO: 66693 - DNA, 21 bp, Artificial Sequence
  primer
atgataatttgcctgcacgtc

SEQ ID NO: 66694 - DNA, 23 bp, Artificial Sequence
  primer
gagctttagaccaattgcacatc

SEQ ID NO: 66695 - DNA, 21 bp, Artificial Sequence
  primer
tacctgagacaatggcacctg

SEQ ID NO: 66696 - DNA, 21 bp, Artificial Sequence
  primer
ccaagctttgcctcactatgg

SEQ ID NO: 66697 - DNA, 21 bp, Artificial Sequence
  primer
caaaggaagtctacatggccc

SEQ ID NO: 66698 - DNA, 37 bp, Artificial Sequence
  primer
gtaaaacgacggccagtctccgtgagacccagacatc

SEQ ID NO: 66699 - DNA, 20 bp, Artificial Sequence
  primer
ttagctgggcatggtagctc

SEQ ID NO: 66700 - DNA, 19 bp, Artificial Sequence
  primer
gacagaatcgccatgatgc

SEQ ID NO: 66701 - DNA, 38 bp, Artificial Sequence
  primer
gtaaaacgacggccagttcctgcttgcatacacagtgg

SEQ ID NO: 66702 - DNA, 38 bp, Artificial Sequence
  primer
gtaaaacgacggccagtcctcaaccttggaatcaatgc

SEQ ID NO: 66703 - DNA, 21 bp, Artificial Sequence
  primer
cttgcccaaactcccattaag

SEQ ID NO: 66704 - DNA, 38 bp, Artificial Sequence
  primer
gtaaaacgacggccagtgttcaacggaggacctgagag

SEQ ID NO: 66705 - DNA, 39 bp, Artificial Sequence
  primer
gtaaaacgacggccagtggcctagagatgccagctagtc

SEQ ID NO: 66706 - DNA, 22 bp, Artificial Sequence
  primer
gggatgtgatagccagtcattc

SEQ ID NO: 66707 - DNA, 21 bp, Artificial Sequence
  primer
atgcaagcataggctcaagac

SEQ ID NO: 66708 - DNA, 38 bp, Artificial Sequence
  primer
gtaaaacgacggccagtccgaagacatgcacatagctc

SEQ ID NO: 66709 - DNA, 21 bp, Artificial Sequence
  primer
ctagccctcagtgccttctcc

SEQ ID NO: 66710 - DNA, 22 bp, Artificial Sequence
  primer
ccctgtgtagttcttcaccacc

SEQ ID NO: 66711 - DNA, 22 bp, Artificial Sequence
  primer
tccaccatcttccctgtcttac

SEQ ID NO: 66712 - DNA, 23 bp, Artificial Sequence
  primer
gaatctctgggtagtttgcttcc

SEQ ID NO: 66713 - DNA, 22 bp, Artificial Sequence
  primer
aaaggaagagcttggagtgtcc

SEQ ID NO: 66714 - DNA, 38 bp, Artificial Sequence
  primer
gtaaaacgacggccagtacttggtagaaagcccacagc

SEQ ID NO: 66715 - DNA, 21 bp, Artificial Sequence
  primer
caaatgcattcctgagtccag

SEQ ID NO: 66716 - DNA, 21 bp, Artificial Sequence
  primer
gggagctcacagcaggtactc

SEQ ID NO: 66717 - DNA, 21 bp, Artificial Sequence
  primer
gattctcaggaaagaggctgg

SEQ ID NO: 66718 - DNA, 21 bp, Artificial Sequence
  primer
tagcatgacagtgtgtgtggc

SEQ ID NO: 66719 - DNA, 37 bp, Artificial Sequence
  primer
gtaaaacgacggccagtaaagatggagccagggtttg

SEQ ID NO: 66720 - DNA, 38 bp, Artificial Sequence
  primer
gtaaaacgacggccagttatgttgcaagacccgacatc

SEQ ID NO: 66721 - DNA, 21 bp, Artificial Sequence
  primer
caaatgatgaaggcttagggc

SEQ ID NO: 66722 - DNA, 21 bp, Artificial Sequence
  primer
tctggaaatgacgtgtccatc

SEQ ID NO: 66723 - DNA, 21 bp, Artificial Sequence
  primer
tcacctaacacgaggaacacg

SEQ ID NO: 66724 - DNA, 37 bp, Artificial Sequence
  primer
gtaaaacgacggccagtttcccggctgacactgttac

SEQ ID NO: 66725 - DNA, 21 bp, Artificial Sequence
  primer
cctgggtagtaggttcatggg

SEQ ID NO: 66726 - DNA, 21 bp, Artificial Sequence
  primer
gacaaggaccctgaacaccag

SEQ ID NO: 66727 - DNA, 21 bp, Artificial Sequence
  primer
tccttgagaacagaccctgtg

SEQ ID NO: 66728 - DNA, 21 bp, Artificial Sequence
  primer
tgttgagggagagagagccac

SEQ ID NO: 66729 - DNA, 19 bp, Artificial Sequence
  primer
cgaacaaacatgtggctgg

SEQ ID NO: 66730 - DNA, 20 bp, Artificial Sequence
  primer
ctgcttcctgctgtctgtcc

SEQ ID NO: 66731 - DNA, 21 bp, Artificial Sequence
  primer
tgtcattggtgtcaggtttcc

SEQ ID NO: 66732 - DNA, 21 bp, Artificial Sequence
  primer
ataaccctaatctgccctgcc

SEQ ID NO: 66733 - DNA, 38 bp, Artificial Sequence
  primer
gtaaaacgacggccagttgctatcaagtccattctgcg

SEQ ID NO: 66734 - DNA, 18 bp, Artificial Sequence
  primer
ctccgtcccgggatacct

SEQ ID NO: 66735 - DNA, 18 bp, Artificial Sequence
  primer
ccagaaggcagaggttgc

SEQ ID NO: 66736 - DNA, 38 bp, Artificial Sequence
  primer
gtaaaacgacggccagttatgtccagccctctcctcag

SEQ ID NO: 66737 - DNA, 38 bp, Artificial Sequence
  primer
gtaaaacgacggccagtcagcagtgactttgaaccctg

SEQ ID NO: 66738 - DNA, 21 bp, Artificial Sequence
  primer
tcccactttgaaaggaactgg

SEQ ID NO: 66739 - DNA, 38 bp, Artificial Sequence
  primer
gtaaaacgacggccagtcacttccctaccctcatctgc

SEQ ID NO: 66740 - DNA, 38 bp, Artificial Sequence
  primer
gtaaaacgacggccagtagaaatcacctggtcctgctc

SEQ ID NO: 66741 - DNA, 21 bp, Artificial Sequence
  primer
tacgttgttccttcctctggg

SEQ ID NO: 66742 - DNA, 38 bp, Artificial Sequence
  primer
gtaaaacgacggccagtacagtagtgggtggacttggc

SEQ ID NO: 66743 - DNA, 21 bp, Artificial Sequence
  primer
gctggagtgtggtggctattc

SEQ ID NO: 66744 - DNA, 38 bp, Artificial Sequence
  primer
gtaaaacgacggccagtgctatggtttctgcaaatggc

SEQ ID NO: 66745 - DNA, 21 bp, Artificial Sequence
  primer
ggtagagtccaatgagccctg

SEQ ID NO: 66746 - DNA, 21 bp, Artificial Sequence
  primer
tatcccttgccctaagtgacc

SEQ ID NO: 66747 - DNA, 21 bp, Artificial Sequence
  primer
tcgaagcagatgtgaacagag

SEQ ID NO: 66748 - DNA, 38 bp, Artificial Sequence
  primer
gtaaaacgacggccagtaagctcttcctgcattcttgg

SEQ ID NO: 66749 - DNA, 21 bp, Artificial Sequence
  primer
acaggagaaatttacctcggg

SEQ ID NO: 66750 - DNA, 38 bp, Artificial Sequence
  primer
gtaaaacgacggccagtgaatatatggacctgggctgg

SEQ ID NO: 66751 - DNA, 20 bp, Artificial Sequence
  primer
cacaggtttctcctgatgcc

SEQ ID NO: 66752 - DNA, 20 bp, Artificial Sequence
  primer
ctgcctggcacaacactagg

SEQ ID NO: 66753 - DNA, 38 bp, Artificial Sequence
  primer
gtaaaacgacggccagtctgggagtgtcagggagaaac

SEQ ID NO: 66754 - DNA, 38 bp, Artificial Sequence
  primer
gtaaaacgacggccagtcagaacacactgagctccacc

SEQ ID NO: 66755 - DNA, 21 bp, Artificial Sequence
  primer
gttgaccagagtgggttaggg

SEQ ID NO: 66756 - DNA, 37 bp, Artificial Sequence
  primer
gtaaaacgacggccagttgttggtggcctgaagtgtc

SEQ ID NO: 66757 - DNA, 21 bp, Artificial Sequence
  primer
ggcaaatagtgcagcaaagag

SEQ ID NO: 66758 - DNA, 38 bp, Artificial Sequence; identical to SEQ ID NO: 66740
  primer

SEQ ID NO: 66759 - DNA, 21 bp, Artificial Sequence
  primer
ggtagagtccaatgagccctg

SEQ ID NO: 66760 - DNA, 20 bp, Artificial Sequence
  primer
cagggcctccagtagcaaag

SEQ ID NO: 66761 - DNA, 21 bp, Artificial Sequence
  primer
ctccaaccacaacacttccac

SEQ ID NO: 66762 - DNA, 21 bp, Artificial Sequence
  primer
ccatccattacagcaccagtc

SEQ ID NO: 66763 - DNA, 39 bp, Artificial Sequence
  primer
gtaaaacgacggccagtggagtgcagtggctatttatgc

SEQ ID NO: 66764 - DNA, 38 bp, Artificial Sequence
  primer
gtaaaacgacggccagtccagtgtgaacagagtgagcc

SEQ ID NO: 66765 - DNA, 21 bp, Artificial Sequence
  primer
gctgcaacatatgcaaggaag

SEQ ID NO: 66766 - DNA, 21 bp, Artificial Sequence
  primer
ggactgggatggattgtactg

SEQ ID NO: 66767 - DNA, 27 bp, Artificial Sequence
  primer
taagatagggaagtacacacaacattc

SEQ ID NO: 66768 - DNA, 27 bp, Artificial Sequence
  primer
aacatagtttcagtaaataagcaagcc

SEQ ID NO: 66769 - DNA, 38 bp, Artificial Sequence
  primer
gtaaaacgacggccagttgtgttacacgtagccttggg

SEQ ID NO: 66770 - DNA, 21 bp, Artificial Sequence
  primer
tttatttactgggaggaccgc

SEQ ID NO: 66771 - DNA, 38 bp, Artificial Sequence
  primer
gtaaaacgacggccagtaggtcctatgtgctcaccacc

SEQ ID NO: 66772 - DNA, 21 bp, Artificial Sequence
  primer
aatggatcttcagggaagcag

SEQ ID NO: 66773 - DNA, 22 bp, Artificial Sequence
  primer
catgaatcccagctctgagaag

SEQ ID NO: 66774 - DNA, 38 bp, Artificial Sequence
  primer
gtaaaacgacggccagtccacagaatccactttgggac

SEQ ID NO: 66775 - DNA, 38 bp, Artificial Sequence
  primer
gtaaaacgacggccagtttgtaacggacatggaacacc

SEQ ID NO: 66776 - DNA, 21 bp, Artificial Sequence
  primer
ggatcaacaaacacctccctc

SEQ ID NO: 66777 - DNA, 38 bp, Artificial Sequence
  primer
gtaaaacgacggccagtactgaatgactcctggaagcc

SEQ ID NO: 66778 - DNA, 25 bp, Artificial Sequence
  primer
caaagatggaaatgtaatcagatcc

SEQ ID NO: 66779 - DNA, 21 bp, Artificial Sequence
  primer
ctcatgccaacttagcctctg

SEQ ID NO: 66780 - DNA, 38 bp, Artificial Sequence
  primer
gtaaaacgacggccagtcacgttgcaggctatcaattc

SEQ ID NO: 66781 - DNA, 38 bp, Artificial Sequence
  primer
gtaaaacgacggccagtctgccaacaagctcatctgac

SEQ ID NO: 66782 - DNA, 38 bp, Artificial Sequence
  primer
gtaaaacgacggccagtactgctgaatcctacccaacc

SEQ ID NO: 66783 - DNA, 21 bp, Artificial Sequence
  primer
aaacctgctgacagagcaacc

SEQ ID NO: 66784 - DNA, 21 bp, Artificial Sequence
  primer
tccacaaggaagacaacaagc

SEQ ID NO: 66785 - DNA, 40 bp, Artificial Sequence
  primer
gtaaaacgacggccagttgaacaaagctggatatctgatg

SEQ ID NO: 66786 - DNA, 38 bp, Artificial Sequence
  primer
gtaaaacgacggccagtatgatctcctgggtggtgaac

SEQ ID NO: 66787 - DNA, 39 bp, Artificial Sequence
  primer
gtaaaacgacggccagttcagaatcattccatgtttccc

SEQ ID NO: 66788 - DNA, 40 bp, Artificial Sequence
  primer
gtaaaacgacggccagtgcatatgaattactgctgggaag

SEQ ID NO: 66789 - DNA, 21 bp, Artificial Sequence
  primer
ttgttaccatacccatggtgc

SEQ ID NO: 66790 - DNA, 39 bp, Artificial Sequence
  primer
gtaaaacgacggccagtggagatccttggataagttggg

SEQ ID NO: 66791 - DNA, 38 bp, Artificial Sequence
  primer
gtaaaacgacggccagttagctgtctggctgtggaaag

SEQ ID NO: 66792 - DNA, 18 bp, Artificial Sequence
  primer
gcctcgcaagtatctggg

SEQ ID NO: 66793 - DNA, 19 bp, Artificial Sequence
  primer
agatcatgccactggcgac

SEQ ID NO: 66794 - DNA, 40 bp, Artificial Sequence
  primer
gtaaaacgacggccagttgtggacttcacactcctagctc

SEQ ID NO: 66795 - DNA, 38 bp, Artificial Sequence
  primer
gtaaaacgacggccagtaaagctgagcacaacctctgc

SEQ ID NO: 66796 - DNA, 38 bp, Artificial Sequence
  primer
gtaaaacgacggccagtcaaggacacggttcatttgtc

SEQ ID NO: 66797 - DNA, 21 bp, Artificial Sequence
  primer
tgagacctcagcaatgcctac

SEQ ID NO: 66798 - DNA, 22 bp, Artificial Sequence
  primer
tgtgctcagaaagcaaagtgtg

SEQ ID NO: 66799 - DNA, 21 bp, Artificial Sequence
  primer
gaggaccacagcatcatctcc

SEQ ID NO: 66800 - DNA, 20 bp, Artificial Sequence
  primer
agccaagcttaagcccagtg

SEQ ID NO: 66801 - DNA, 39 bp, Artificial Sequence
  primer
gtaaaacgacggccagtaaatcactcctagccacaaagc

SEQ ID NO: 66802 - DNA, 38 bp, Artificial Sequence
  primer
gtaaaacgacggccagtccacctttcctgactctccag

SEQ ID NO: 66803 - DNA, 38 bp, Artificial Sequence
  primer
gtaaaacgacggccagtacacaaagagacagcgtcagg

SEQ ID NO: 66804 - DNA, 21 bp, Artificial Sequence
  primer
acagcctaactccctgtgagg

SEQ ID NO: 66805 - DNA, 20 bp, Artificial Sequence
  primer
ggagcaaacctacctccctg

SEQ ID NO: 66806 - DNA, 21 bp, Artificial Sequence
  primer
gtctctccatcactcactccg

SEQ ID NO: 66807 - DNA, 37 bp, Artificial Sequence
  primer
gtaaaacgacggccagtagaaggtgcctcgtggtctc

SEQ ID NO: 66808 - DNA, 21 bp, Artificial Sequence
  primer
tctggtgaggctacattaggg

SEQ ID NO: 66809 - DNA, 21 bp, Artificial Sequence
  primer
atgaactgagagacgccacac

SEQ ID NO: 66810 - DNA, 21 bp, Artificial Sequence
  primer
agcagtcactgtgctctcagg

SEQ ID NO: 66811 - DNA, 38 bp, Artificial Sequence
  primer
gtaaaacgacggccagtgtgggagaggaaaggtgactg

SEQ ID NO: 66812 - DNA, 37 bp, Artificial Sequence
  primer
gtaaaacgacggccagtccatctctggccttgaagag

SEQ ID NO: 66813 - DNA, 38 bp, Artificial Sequence
  primer
gtaaaacgacggccagtaggtgaaataatggctcaggg

SEQ ID NO: 66814 - DNA, 21 bp, Artificial Sequence
  primer
tctctttcccattccaagcac

SEQ ID NO: 66815 - DNA, 22 bp, Artificial Sequence
  primer
aaacaaggatccggtttaaagg

SEQ ID NO: 66816 - DNA, 37 bp, Artificial Sequence
  primer
gtaaaacgacggccagtattgtgagtggtgctgcctc

SEQ ID NO: 66817 - DNA, 38 bp, Artificial Sequence
  primer
gtaaaacgacggccagtcaaggccaatatgaccgtagg

SEQ ID NO: 66818 - DNA, 21 bp, Artificial Sequence
  primer
cagagccaggaatacctttgg

SEQ ID NO: 66819 - DNA, 38 bp, Artificial Sequence
  primer
gtaaaacgacggccagtcagaaccctacaaagatggca

SEQ ID NO: 66820 - DNA, 21 bp, Artificial Sequence
  primer
aaggcaaggtttcggtaggag

SEQ ID NO: 66821 - DNA, 21 bp, Artificial Sequence
  primer
tgcaaagaagagtcaaagccc

SEQ ID NO: 66822 - DNA, 21 bp, Artificial Sequence
  primer
tgtgatgtgggcctgtaagac

SEQ ID NO: 66823 - DNA, 21 bp, Artificial Sequence
  primer
tggcatcgagtagaaatgtgg

SEQ ID NO: 66824 - DNA, 38 bp, Artificial Sequence
  primer
gtaaaacgacggccagtctccagtgagtgaatgggaac

SEQ ID NO: 66825 - DNA, 35 bp, Artificial Sequence
  primer
gtaaaacgacggccagtgaccttgtgatccgcctg

SEQ ID NO: 66826 - DNA, 38 bp, Artificial Sequence
  primer
gtaaaacgacggccagtttcccttcctcagtgtccttc

SEQ ID NO: 66827 - DNA, 21 bp, Artificial Sequence
  primer
tgctgataacattactgcccg

SEQ ID NO: 66828 - DNA, 38 bp, Artificial Sequence
  primer
gtaaaacgacggccagtcctcttccagcctcttgaatg

SEQ ID NO: 66829 - DNA, 21 bp, Artificial Sequence
  primer
gacaagaacaaagccagaccc

SEQ ID NO: 66830 - DNA, 21 bp, Artificial Sequence
  primer
ttgtagaagacagcagggacc

SEQ ID NO: 66831 - DNA, 38 bp, Artificial Sequence
  primer
gtaaaacgacggccagttctgtcttccctctcctctgc

SEQ ID NO: 66832 - DNA, 21 bp, Artificial Sequence
  primer
atctgcacgtgtcatccattg

SEQ ID NO: 66833 - DNA, 38 bp, Artificial Sequence
  primer
gtaaaacgacggccagtctggtctatgctgtgcaggtc

SEQ ID NO: 66834 - DNA, 21 bp, Artificial Sequence
  primer
aaagtgaacttggctgggatg

SEQ ID NO: 66835 - DNA, 38 bp, Artificial Sequence
  primer
gtaaaacgacggccagtatactgcccatgatgagtcgg

SEQ ID NO: 66836 - DNA, 38 bp, Artificial Sequence
  primer
gtaaaacgacggccagtacttgggttaggactggatgc

SEQ ID NO: 66837 - DNA, 38 bp, Artificial Sequence
  primer
gtaaaacgacggccagtgcactccattcatgccagtag

SEQ ID NO: 66838 - DNA, 21 bp, Artificial Sequence
  primer
gcccacttgaagacatccatc

SEQ ID NO: 66839 - DNA, 38 bp, Artificial Sequence
  primer
gtaaaacgacggccagtacatttggtgggaagacttgg

SEQ ID NO: 66840 - DNA, 35 bp, Artificial Sequence
  primer
gtaaaacgacggccagtacagggtgacccagggag

SEQ ID NO: 66841 - DNA, 21 bp, Artificial Sequence
  primer
agatgtccagctgggtgaaac

SEQ ID NO: 66842 - DNA, 38 bp, Artificial Sequence
  primer
gtaaaacgacggccagtgtccctgactctctgggtgac

SEQ ID NO: 66843 - DNA, 38 bp, Artificial Sequence
  primer
gtaaaacgacggccagtaccatgttggtttggacacag

SEQ ID NO: 66844 - DNA, 21 bp, Artificial Sequence
  primer
ctggctccaaaccttatgctc

SEQ ID NO: 66845 - DNA, 21 bp, Artificial Sequence
  primer
aagtcaccagatggaagcagg

SEQ ID NO: 66846 - DNA, 19 bp, Artificial Sequence
  primer
ctgcccagatagcctcgtc

SEQ ID NO: 66847 - DNA, 36 bp, Artificial Sequence
  primer
gtaaaacgacggccagtatttcctgaaggcccttgg

SEQ ID NO: 66848 - DNA, 37 bp, Artificial Sequence
  primer
gtaaaacgacggccagtcctccagctctaacccgaag

SEQ ID NO: 66849 - DNA, 38 bp, Artificial Sequence
  primer
gtaaaacgacggccagtttcctcccagagagcaaacac

SEQ ID NO: 66850 - DNA, 18 bp, Artificial Sequence
  primer
tgagctggtgtgcgagtg

SEQ ID NO: 66851 - DNA, 38 bp, Artificial Sequence
  primer
gtaaaacgacggccagtaagacactgagctgctggatg

SEQ ID NO: 66852 - DNA, 39 bp, Artificial Sequence
  primer
gtaaaacgacggccagttgtttagagcaatagctggcac

SEQ ID NO: 66853 - DNA, 38 bp, Artificial Sequence
  primer
gtaaaacgacggccagtgatcccttctcagtttggctg

SEQ ID NO: 66854 - DNA, 21 bp, Artificial Sequence
  primer
cctttgaggtccctctctgtg

SEQ ID NO: 66855 - DNA, 38 bp, Artificial Sequence
  primer
gtaaaacgacggccagtctcacacacattggcctgttg

SEQ ID NO: 66856 - DNA, 20 bp, Artificial Sequence
  primer
ttccactatcccacactgcc

SEQ ID NO: 66857 - DNA, 21 bp, Artificial Sequence
  primer
aggagggacccagaggtacag

SEQ ID NO: 66858 - DNA, 22 bp, Artificial Sequence
  primer
agtcaatgacagtgtgggtgtg

SEQ ID NO: 66859 - DNA, 21 bp, Artificial Sequence
  primer
gataatctcaaggcctcctgc

SEQ ID NO: 66860 - DNA, 21 bp, Artificial Sequence
  primer
ctgtggagcctgtcttctgag

SEQ ID NO: 66861 - DNA, 21 bp, Artificial Sequence
  primer
accaaccaggaccagctacag

SEQ ID NO: 66862 - DNA, 38 bp, Artificial Sequence
  primer
gtaaaacgacggccagtaaaggcagaagtccgacacag

SEQ ID NO: 66863 - DNA, 38 bp, Artificial Sequence
  primer
gtaaaacgacggccagttttctggactcctatggaccg

SEQ ID NO: 66864 - DNA, 21 bp, Artificial Sequence
  primer
atacccagggcatacaccaag

SEQ ID NO: 66865 - DNA, 21 bp, Artificial Sequence
  primer
cctcactgaacacagagtggg

SEQ ID NO: 66866 - DNA, 21 bp, Artificial Sequence
  primer
agcattacccacccacaagtc

SEQ ID NO: 66867 - DNA, 21 bp, Artificial Sequence
  primer
atggatgcacagaaacagcag

SEQ ID NO: 66868 - DNA, 37 bp, Artificial Sequence
  primer
gtaaaacgacggccagtgctggagtgcaggtaagcac

SEQ ID NO: 66869 - DNA, 21 bp, Artificial Sequence
  primer
tactgcaggcaactcttcagc

SEQ ID NO: 66870 - DNA, 21 bp, Artificial Sequence
  primer
agggagattgttggatgatgg

SEQ ID NO: 66871 - DNA, 38 bp, Artificial Sequence
  primer
gtaaaacgacggccagttgctaccaagacaacggattg

SEQ ID NO: 66872 - DNA, 21 bp, Artificial Sequence
  primer
tcctctggtaggagccagttc

SEQ ID NO: 66873 - DNA, 38 bp, Artificial Sequence
  primer
gtaaaacgacggccagtacactactgcaccacacccag

SEQ ID NO: 66874 - DNA, 38 bp, Artificial Sequence
  primer
gtaaaacgacggccagtgagtgatttggagttccaggg

SEQ ID NO: 66875 - DNA, 21 bp, Artificial Sequence
  primer
ccagtttctccctgcttcttg

SEQ ID NO: 66876 - DNA, 21 bp, Artificial Sequence
  primer
gctaaagggatctggtttccc

SEQ ID NO: 66877 - DNA, 39 bp, Artificial Sequence
  primer
gtaaaacgacggccagtggagggaacacgaccctattac

SEQ ID NO: 66878 - DNA, 38 bp, Artificial Sequence
  primer
gtaaaacgacggccagtcttcccaagtggagtcctgag

SEQ ID NO: 66879 - DNA, 21 bp, Artificial Sequence
  primer
gacactaggaggaccaccagg

SEQ ID NO: 66880 - DNA, 38 bp, Artificial Sequence
  primer
gtaaaacgacggccagttcatgtctccagtgacgaagg

SEQ ID NO: 66881 - DNA, 21 bp, Artificial Sequence
  primer
tagtatccgaaagtgccaccc

SEQ ID NO: 66882 - DNA, 21 bp, Artificial Sequence
  primer
agaaggagaggaaagatgggc

SEQ ID NO: 66883 - DNA, 38 bp, Artificial Sequence
  primer
gtaaaacgacggccagtcctcctgtcatgtctgaccac

SEQ ID NO: 66884 - DNA, 21 bp, Artificial Sequence
  primer
catgagcaggaaacacctctg

SEQ ID NO: 66885 - DNA, 21 bp, Artificial Sequence
  primer
aagacacctgacctctctggg

SEQ ID NO: 66886 - DNA, 38 bp, Artificial Sequence
  primer
gtaaaacgacggccagttcgtgcaaatttctccctagc

SEQ ID NO: 66887 - DNA, 20 bp, Artificial Sequence
  primer
gcctgcttcagggttctttc

SEQ ID NO: 66888 - DNA, 21 bp, Artificial Sequence
  primer
ggcctcatttcacaggtaagg

SEQ ID NO: 66889 - DNA, 39 bp, Artificial Sequence
  primer
gtaaaacgacggccagtgcattagccatgccttactgag

SEQ ID NO: 66890 - DNA, 21 bp, Artificial Sequence
  primer
tcacctacggaagatcacctg

SEQ ID NO: 66891 - DNA, 38 bp, Artificial Sequence
  primer
gtaaaacgacggccagtaagcacatttatgggcacaag

SEQ ID NO: 66892 - DNA, 38 bp, Artificial Sequence
  primer
gtaaaacgacggccagttttactgggcagctacaggag

SEQ ID NO: 66893 - DNA, 42 bp, Artificial Sequence
  primer
gtaaaacgacggccagttcaaatacatgtgttcatccttgtc

SEQ ID NO: 66894 - DNA, 18 bp, Artificial Sequence
  primer
caagctctgcctcccagg

SEQ ID NO: 66895 - DNA, 37 bp, Artificial Sequence
  primer
gtaaaacgacggccagttttggtggccagattcattc

SEQ ID NO: 66896 - DNA, 41 bp, Artificial Sequence
  primer
gtaaaacgacggccagtaaactgaagctaccgctattcttt

SEQ ID NO: 66897 - DNA, 44 bp, Artificial Sequence
  primer
gtaaaacgacggccagtaacctatgctataacatttctgagtcc

SEQ ID NO: 66898 - DNA, 41 bp, Artificial Sequence
  primer
gtaaaacgacggccagtaatacacatttgctgctgaagaac

SEQ ID NO: 66899 - DNA, 23 bp, Artificial Sequence
  primer
gctattggacagcacgtgtttag

SEQ ID NO: 66900 - DNA, 21 bp, Artificial Sequence
  primer
ctgccaaacgtcctaacacag

SEQ ID NO: 66901 - DNA, 21 bp, Artificial Sequence
  primer
taacaatggttgtctcctggc

SEQ ID NO: 66902 - DNA, 39 bp, Artificial Sequence
  primer
gtaaaacgacggccagtggttgtagagaagcaagtcgtg

SEQ ID NO: 66903 - DNA, 40 bp, Artificial Sequence
  primer
gtaaaacgacggccagtgggacactttcacagaacttcac

SEQ ID NO: 66904 - DNA, 37 bp, Artificial Sequence
  primer
gtaaaacgacggccagtatttccagccattcccacag

SEQ ID NO: 66905 - DNA, 38 bp, Artificial Sequence
  primer
gtaaaacgacggccagttgtgcttatttctgcgtggtc

SEQ ID NO: 66906 - DNA, 21 bp, Artificial Sequence
  primer
acaaggagccactttgtttgg

SEQ ID NO: 66907 - DNA, 37 bp, Artificial Sequence
  primer
gtaaaacgacggccagttgttcattcccaaacacacg

SEQ ID NO: 66908 - DNA, 43 bp, Artificial Sequence
  primer
gtaaaacgacggccagttcctaagctctcaaatttcatgattc

SEQ ID NO: 66909 - DNA, 21 bp, Artificial Sequence
  primer
caatctggatcctcccaactc

SEQ ID NO: 66910 - DNA, 21 bp, Artificial Sequence
  primer
gcggatattcccagaaatgtg

SEQ ID NO: 66911 - DNA, 24 bp, Artificial Sequence
  primer
tgctttggatttcagataaagacc

SEQ ID NO: 66912 - DNA, 21 bp, Artificial Sequence
  primer
catccacctttccttgactcc

SEQ ID NO: 66913 - DNA, 39 bp, Artificial Sequence
  primer
gtaaaacgacggccagttggcatttgggatataagcatc

SEQ ID NO: 66914 - DNA, 21 bp, Artificial Sequence
  primer
tccctattcatttgctcaagg

SEQ ID NO: 66915 - DNA, 43 bp, Artificial Sequence
  primer
gtaaaacgacggccagtcattctttacttcatgatggttctcc

SEQ ID NO: 66916 - DNA, 21 bp, Artificial Sequence
  primer
tgatctgttgttggcagaacc

SEQ ID NO: 66917 - DNA, 38 bp, Artificial Sequence
  primer
gtaaaacgacggccagttacaccatcaggcacacaatg

SEQ ID NO: 66918 - DNA, 39 bp, Artificial Sequence
  primer
gtaaaacgacggccagtaatgtgaagctagtgccgaatc

SEQ ID NO: 66919 - DNA, 38 bp, Artificial Sequence
  primer
gtaaaacgacggccagtgccctggtatgtgtaattccc

SEQ ID NO: 66920 - DNA, 38 bp, Artificial Sequence
  primer
gtaaaacgacggccagtacaacaatgtgcccaacaaac

SEQ ID NO: 66921 - DNA, 38 bp, Artificial Sequence
  primer
gtaaaacgacggccagttggctgggaagtatgaagagc

SEQ ID NO: 66922 - DNA, 21 bp, Artificial Sequence
  primer
gccttgaaccatgtgtagagc

SEQ ID NO: 66923 - DNA, 37 bp, Artificial Sequence
  primer
gtaaaacgacggccagtcaagcatcaccgttctcaag

SEQ ID NO: 66924 - DNA, 21 bp, Artificial Sequence
  primer
tttgttatcgggttcaccctc

SEQ ID NO: 66925 - DNA, 21 bp, Artificial Sequence
  primer
aggattcagaacccaatcagg

SEQ ID NO: 66926 - DNA, 42 bp, Artificial Sequence
  primer
gtaaaacgacggccagtgggaagtcagttaggtagagcagac

SEQ ID NO: 66927 - DNA, 38 bp, Artificial Sequence
  primer
gtaaaacgacggccagtcagaggtcaagctgatgatcc

SEQ ID NO: 66928 - DNA, 21 bp, Artificial Sequence
  primer
tggcactgttgacgaaggtag

SEQ ID NO: 66929 - DNA, 21 bp, Artificial Sequence
  primer
ggcttggtcaggttggagtag

SEQ ID NO: 66930 - DNA, 19 bp, Artificial Sequence
  primer
acacgcgagtgcatgtagc

SEQ ID NO: 66931 - DNA, 36 bp, Artificial Sequence
  primer
gtaaaacgacggccagtccttcctgcctctccactg

SEQ ID NO: 66932 - DNA, 38 bp, Artificial Sequence
  primer
gtaaaacgacggccagtaacctctgaaagcatcaaggc

SEQ ID NO: 66933 - DNA, 22 bp, Artificial Sequence
  primer
aaatacctggaacatctcgtgc

SEQ ID NO: 66934 - DNA, 36 bp, Artificial Sequence
  primer
gtaaaacgacggccagtgggaataggaggagctggg

SEQ ID NO: 66935 - DNA, 20 bp, Artificial Sequence
  primer
ctagggacaatggctgttgc

SEQ ID NO: 66936 - DNA, 22 bp, Artificial Sequence
  primer
tctcctgaggtgctgactcttc

SEQ ID NO: 66937 - DNA, 21 bp, Artificial Sequence
  primer
catctgtgtggtgttggtcct

SEQ ID NO: 66938 - DNA, 38 bp, Artificial Sequence
  primer
gtaaaacgacggccagtgagaggagagtctgtgcaccc

SEQ ID NO: 66939 - DNA, 21 bp, Artificial Sequence
  primer
gtgtgtgtggtatttcctggc

SEQ ID NO: 66940 - DNA, 37 bp, Artificial Sequence
  primer
gtaaaacgacggccagtacatctactttcccgagggc

SEQ ID NO: 66941 - DNA, 22 bp, Artificial Sequence
  primer
gattagagccactgagtgcagg

SEQ ID NO: 66942 - DNA, 38 bp, Artificial Sequence
  primer
gtaaaacgacggccagtaagtgagccacagattgggag

SEQ ID NO: 66943 - DNA, 38 bp, Artificial Sequence
  primer
gtaaaacgacggccagtctgcagtggcaacttgaacag

SEQ ID NO: 66944 - DNA, 39 bp, Artificial Sequence
  primer
gtaaaacgacggccagtcaacagatggtatctggcactg

SEQ ID NO: 66945 - DNA, 38 bp, Artificial Sequence
  primer
gtaaaacgacggccagtaagtctgccattgtttcggac

SEQ ID NO: 66946 - DNA, 38 bp, Artificial Sequence
  primer
gtaaaacgacggccagttacacttgtgaattgctgccc

SEQ ID NO: 66947 - DNA, 43 bp, Artificial Sequence
  primer
gtaaaacgacggccagtaaagctaccttcttaaactttggttc

SEQ ID NO: 66948 - DNA, 23 bp, Artificial Sequence
  primer
tgtgcatacctttcttgatttcc

SEQ ID NO: 66949 - DNA, 40 bp, Artificial Sequence
  primer
gtaaaacgacggccagttgaggaacttgaggaatcaagac

SEQ ID NO: 66950 - DNA, 23 bp, Artificial Sequence
  primer
tgcattaaacacaacacaagcag

SEQ ID NO: 66951 - DNA, 18 bp, Artificial Sequence
  primer
agaattgcttgggcctgg

SEQ ID NO: 66952 - DNA, 25 bp, Artificial Sequence
  primer
gtgaaataccctaccctctactgtg

SEQ ID NO: 66953 - DNA, 43 bp, Artificial Sequence
  primer
gtaaaacgacggccagttgtgcttagcttaacatacttcatgc

SEQ ID NO: 66954 - DNA, 21 bp, Artificial Sequence
  primer
accctgacattgaagtcccac

SEQ ID NO: 66955 - DNA, 38 bp, Artificial Sequence
  primer
gtaaaacgacggccagtaatgcagttaatgctgcctcc

SEQ ID NO: 66956 - DNA, 38 bp, Artificial Sequence
  primer
gtaaaacgacggccagtgaagtggaggagatgctgtgc

SEQ ID NO: 66957 - DNA, 42 bp, Artificial Sequence
  primer
gtaaaacgacggccagtgaacaaacacataatttgacttggg

SEQ ID NO: 66958 - DNA, 43 bp, Artificial Sequence
  primer
gtaaaacgacggccagttgaaattaaaccaaacataatccctt

SEQ ID NO: 66959 - DNA, 38 bp, Artificial Sequence
  primer
gtaaaacgacggccagttcaattaatggaagagccagg

SEQ ID NO: 66960 - DNA, 27 bp, Artificial Sequence
  primer
aagacactaaattatcagttctttgcc

SEQ ID NO: 66961 - DNA, 38 bp, Artificial Sequence
  primer
gtaaaacgacggccagtacaggccatcaagctattcac

SEQ ID NO: 66962 - DNA, 42 bp, Artificial Sequence
  primer
gtaaaacgacggccagtcaggtgaatcaggaatactacatgg

SEQ ID NO: 66963 - DNA, 21 bp, Artificial Sequence
  primer
tgtatgtgtgtcggccatagg

SEQ ID NO: 66964 - DNA, 37 bp, Artificial Sequence
  primer
gtaaaacgacggccagtaaccaacaacagtggcaagg

SEQ ID NO: 66965 - DNA, 21 bp, Artificial Sequence
  primer
acccagagcttgagacattcg

SEQ ID NO: 66966 - DNA, 21 bp, Artificial Sequence
  primer
ctgggctaggaaatgttgacc

SEQ ID NO: 66967 - DNA, 38 bp, Artificial Sequence
  primer
gtaaaacgacggccagtaatgatttctccagcaccagg

SEQ ID NO: 66968 - DNA, 27 bp, Artificial Sequence
  primer
ttaggtcaatgatacctctaagctgtt

SEQ ID NO: 66969 - DNA, 40 bp, Artificial Sequence
  primer
gtaaaacgacggccagtggattcagagactaagtcgagcc

SEQ ID NO: 66970 - DNA, 41 bp, Artificial Sequence
  primer
gtaaaacgacggccagtttcaggtttagttagacgtcctcc

SEQ ID NO: 66971 - DNA, 38 bp, Artificial Sequence
  primer
gtaaaacgacggccagttgttccaagggtcatgtaagg

SEQ ID NO: 66972 - DNA, 40 bp, Artificial Sequence
  primer
gtaaaacgacggccagttcacaatttacagctttggaagg

SEQ ID NO: 66973 - DNA, 27 bp, Artificial Sequence
  primer
ggattattggtatatagtcggatctgc

SEQ ID NO: 66974 - DNA, 39 bp, Artificial Sequence
  primer
gtaaaacgacggccagttgacctggaatcttctctttgg

SEQ ID NO: 66975 - DNA, 44 bp, Artificial Sequence
  primer
gtaaaacgacggccagtagacatatgtttaagggaatacaaacc

SEQ ID NO: 66976 - DNA, 22 bp, Artificial Sequence
  primer
caggttacagtgattgaagccc

SEQ ID NO: 66977 - DNA, 21 bp, Artificial Sequence
  primer
cccttcgagagctcctctttc

SEQ ID NO: 66978 - DNA, 21 bp, Artificial Sequence
  primer
cctgggcaacaagagagaaac

SEQ ID NO: 66979 - DNA, 21 bp, Artificial Sequence
  primer
atctgaggaatcagtcccacg

SEQ ID NO: 66980 - DNA, 21 bp, Artificial Sequence
  primer
cgactgcagatgatctccttg

SEQ ID NO: 66981 - DNA, 38 bp, Artificial Sequence
  primer
gtaaaacgacggccagttggtaaggtacggtgggagag

SEQ ID NO: 66982 - DNA, 38 bp, Artificial Sequence
  primer
gtaaaacgacggccagtaatcctctcagtaggcaacgg

SEQ ID NO: 66983 - DNA, 21 bp, Artificial Sequence
  primer
aagtgtgacaacactcagccc

SEQ ID NO: 66984 - DNA, 38 bp, Artificial Sequence
  primer
gtaaaacgacggccagttcatggcacatttatccttgc

SEQ ID NO: 66985 - DNA, 21 bp, Artificial Sequence
  primer
acaggatgggaagaggtcaag

SEQ ID NO: 66986 - DNA, 21 bp, Artificial Sequence
  primer
gagccaggtgaaggtgaactc

SEQ ID NO: 66987 - DNA, 21 bp, Artificial Sequence
  primer
acttacatgtgcctggcattc

SEQ ID NO: 66988 - DNA, 38 bp, Artificial Sequence
  primer
gtaaaacgacggccagtatggattctaccacaccgtcc

SEQ ID NO: 66989 - DNA, 38 bp, Artificial Sequence
  primer
gtaaaacgacggccagtttgccctgactctaggacctg

SEQ ID NO: 66990 - DNA, 38 bp, Artificial Sequence
  primer
gtaaaacgacggccagtaggaaggcatcactttccttg

SEQ ID NO: 66991 - DNA, 21 bp, Artificial Sequence
  primer
ccaggttcagacttccagtcc

SEQ ID NO: 66992 - DNA, 38 bp, Artificial Sequence
  primer
gtaaaacgacggccagttctgttcccaagggcataaac

SEQ ID NO: 66993 - DNA, 38 bp, Artificial Sequence
  primer
gtaaaacgacggccagtgttaactctgacgatgccagg

SEQ ID NO: 66994 - DNA, 20 bp, Artificial Sequence
  primer
accaccacatggagatcagg

SEQ ID NO: 66995 - DNA, 38 bp, Artificial Sequence
  primer
gtaaaacgacggccagtgatcttcgctgtcagtcctcc

SEQ ID NO: 66996 - DNA, 38 bp, Artificial Sequence
  primer
gtaaaacgacggccagtagcttctcttggaccttgacc

SEQ ID NO: 66997 - DNA, 22 bp, Artificial Sequence
  primer
tgatccttcagtcacaaagcaa

SEQ ID NO: 66998 - DNA, 26 bp, Artificial Sequence
  primer
aaacatgtaatgtgatggtaatgtcc

SEQ ID NO: 66999 - DNA, 26 bp, Artificial Sequence
  primer
tttagtgactggttaatagcatttcc

SEQ ID NO: 67000 - DNA, 22 bp, Artificial Sequence
  primer
gaattctgcttcagatcaaggc

SEQ ID NO: 67001 - DNA, 38 bp, Artificial Sequence
  primer
gtaaaacgacggccagtagctgctgacatacaattgcc

SEQ ID NO: 67002 - DNA, 20 bp, Artificial Sequence
  primer
cagaggttgcatcattgcac

SEQ ID NO: 67003 - DNA, 23 bp, Artificial Sequence
  primer
aactgcttcaacatcttacctcg

SEQ ID NO: 67004 - DNA, 40 bp, Artificial Sequence
  primer
gtaaaacgacggccagtttgacagtcccagtgtttaatcc

SEQ ID NO: 67005 - DNA, 40 bp, Artificial Sequence
  primer
gtaaaacgacggccagttgctcagtgattaaattccaagg

SEQ ID NO: 67006 - DNA, 23 bp, Artificial Sequence
  primer
gaaattgaattacacaatgccaa

SEQ ID NO: 67007 - DNA, 40 bp, Artificial Sequence
  primer
gtaaaacgacggccagtagaactggtacttctcctgcaaa

SEQ ID NO: 67008 - DNA, 21 bp, Artificial Sequence
  primer
cggccaaagatgacaaatatc

SEQ ID NO: 67009 - DNA, 21 bp, Artificial Sequence
  primer
ccaccagataatgtctgcacc

SEQ ID NO: 67010 - DNA, 21 bp, Artificial Sequence
  primer
cccaataccaatgatctcagg

SEQ ID NO: 67011 - DNA, 38 bp, Artificial Sequence
  primer
gtaaaacgacggccagtgtgcccagccatatgttattg

SEQ ID NO: 67012 - DNA, 22 bp, Artificial Sequence
  primer
ttcaagttccagagtatgtggg

SEQ ID NO: 67013 - DNA, 21 bp, Artificial Sequence
  primer
caaagtgaaacagcccatgtc

SEQ ID NO: 67014 - DNA, 19 bp, Artificial Sequence
  primer
cacgcatgcgcagtaactc

SEQ ID NO: 67015 - DNA, 21 bp, Artificial Sequence
  primer
gggcttaagctatcctcccac

SEQ ID NO: 67016 - DNA, 20 bp, Artificial Sequence
  primer
tcatccacatccttcttccg

SEQ ID NO: 67017 - DNA, 37 bp, Artificial Sequence
  primer
gtaaaacgacggccagtgcgggtactgaaatgacagg

SEQ ID NO: 67018 - DNA, 38 bp, Artificial Sequence
  primer
gtaaaacgacggccagtcctagagaatgaaagggccac

SEQ ID NO: 67019 - DNA, 38 bp, Artificial Sequence
  primer
gtaaaacgacggccagtaaagcgggaaattactccacc

SEQ ID NO: 67020 - DNA, 38 bp, Artificial Sequence
  primer
gtaaaacgacggccagttttaccgtgttaccaggatgg

SEQ ID NO: 67021 - DNA, 41 bp, Artificial Sequence
  primer
gtaaaacgacggccagtcccagattctaactctcccataag

SEQ ID NO: 67022 - DNA, 38 bp, Artificial Sequence
  primer
gtaaaacgacggccagtgccactcagggaagatgagag

SEQ ID NO: 67023 - DNA, 21 bp, Artificial Sequence
  primer
ctattaggacctggccaccac

SEQ ID NO: 67024 - DNA, 38 bp, Artificial Sequence
  primer
gtaaaacgacggccagtcttctattcttggctggctgg

SEQ ID NO: 67025 - DNA, 21 bp, Artificial Sequence
  primer
gaagaggacacacgtctgagg

SEQ ID NO: 67026 - DNA, 38 bp, Artificial Sequence
  primer
gtaaaacgacggccagtagggagaggtaagccttgagc

SEQ ID NO: 67027 - DNA, 38 bp, Artificial Sequence
  primer
gtaaaacgacggccagttagagctccactcacaggcac

SEQ ID NO: 67028 - DNA, 38 bp, Artificial Sequence
  primer
gtaaaacgacggccagttaaataggccctcccactcag

SEQ ID NO: 67029 - DNA, 20 bp, Artificial Sequence
  primer
tgaaatgtaggccagcgttc

SEQ ID NO: 67030 - DNA, 38 bp, Artificial Sequence
  primer
gtaaaacgacggccagtttggtggagaatttagggtgc

SEQ ID NO: 67031 - DNA, 21 bp, Artificial Sequence
  primer
gacaggtggtcaaagaggtcc

SEQ ID NO: 67032 - DNA, 20 bp, Artificial Sequence
  primer
gagaggctccctgattccag

SEQ ID NO: 67033 - DNA, 37 bp, Artificial Sequence
  primer
gtaaaacgacggccagtagaagagagggaggtggtcg

SEQ ID NO: 67034 - DNA, 38 bp, Artificial Sequence
  primer
gtaaaacgacggccagtaagatgtgccagtttgtgagc

SEQ ID NO: 67035 - DNA, 21 bp, Artificial Sequence
  primer
ggaggaattccatgactgagc

SEQ ID NO: 67036 - DNA, 21 bp, Artificial Sequence
  primer
atagcaacaacagagggcagg

SEQ ID NO: 67037 - DNA, 21 bp, Artificial Sequence
  primer
tcaaggtcacactccaccttc

SEQ ID NO: 67038 - DNA, 21 bp, Artificial Sequence
  primer
tcaagattccaactctggctg

SEQ ID NO: 67039 - DNA, 21 bp, Artificial Sequence
  primer
tgctctgaacacagttgatgc

SEQ ID NO: 67040 - DNA, 37 bp, Artificial Sequence
  primer
gtaaaacgacggccagttccgctgtggacagtgtatg

SEQ ID NO: 67041 - DNA, 21 bp, Artificial Sequence
  primer
ccactgactcctgttccaaac

SEQ ID NO: 67042 - DNA, 21 bp, Artificial Sequence
  primer
ccttcagttcctttctcaccg

SEQ ID NO: 67043 - DNA, 18 bp, Artificial Sequence
  primer
tcaagtgacccacccacc

SEQ ID NO: 67044 - DNA, 21 bp, Artificial Sequence
  primer
cctccatcactaccgcttctc

SEQ ID NO: 67045 - DNA, 38 bp, Artificial Sequence
  primer
gtaaaacgacggccagtttggctcctttcttatccacc

SEQ ID NO: 67046 - DNA, 21 bp, Artificial Sequence
  primer
gtggtcagcacagaacaggag

SEQ ID NO: 67047 - DNA, 37 bp, Artificial Sequence
  primer
gtaaaacgacggccagtgtactcaggccctcccaaag

SEQ ID NO: 67048 - DNA, 38 bp, Artificial Sequence
  primer
gtaaaacgacggccagtttcaagaagcaggtaggagcc

SEQ ID NO: 67049 - DNA, 38 bp, Artificial Sequence
  primer
gtaaaacgacggccagtatggaggagactctggtttgg

SEQ ID NO: 67050 - DNA, 38 bp, Artificial Sequence
  primer
gtaaaacgacggccagttattatgcaccctccacatgc

SEQ ID NO: 67051 - DNA, 36 bp, Artificial Sequence
  primer
gtaaaacgacggccagtgagcggctggtcaggttag

SEQ ID NO: 67052 - DNA, 38 bp, Artificial Sequence
  primer
gtaaaacgacggccagtgctggtgtacttggtgacagc

SEQ ID NO: 67053 - DNA, 38 bp, Artificial Sequence
  primer
gtaaaacgacggccagttgcagcaatgcaggagtgtag

SEQ ID NO: 67054 - DNA, 38 bp, Artificial Sequence
  primer
gtaaaacgacggccagtggacaagaggtcatgcagagg

SEQ ID NO: 67055 - DNA, 38 bp, Artificial Sequence
  primer
gtaaaacgacggccagtatggccatcagatcttcctcc

SEQ ID NO: 67056 - DNA, 21 bp, Artificial Sequence
  primer
gccctcggtaaagacatcaac

SEQ ID NO: 67057 - DNA, 21 bp, Artificial Sequence
  primer
acacatcgacttcactctcgg

SEQ ID NO: 67058 - DNA, 38 bp, Artificial Sequence
  primer
gtaaaacgacggccagtaaccgactctcctttctgctg

SEQ ID NO: 67059 - DNA, 38 bp, Artificial Sequence
  primer
gtaaaacgacggccagtctctgcaggagtggagaaagg

SEQ ID NO: 67060 - DNA, 21 bp, Artificial Sequence
  primer
ttatggattgttccaggacgg

SEQ ID NO: 67061 - DNA, 21 bp, Artificial Sequence
  primer
agaatggcaagggtcactcac

SEQ ID NO: 67062 - DNA, 21 bp, Artificial Sequence
  primer
ttatgggtgggtgttcatcag

SEQ ID NO: 67063 - DNA, 21 bp, Artificial Sequence
  primer
taggtcagcaactcatgccac

SEQ ID NO: 67064 - DNA, 21 bp, Artificial Sequence
  primer
ttgaagggctggagaactagg

SEQ ID NO: 67065 - DNA, 38 bp, Artificial Sequence
  primer
gtaaaacgacggccagtagacgactaggatggtggagg

SEQ ID NO: 67066 - DNA, 38 bp, Artificial Sequence
  primer
gtaaaacgacggccagtggaggagtgtaggcattggtc

SEQ ID NO: 67067 - DNA, 21 bp, Artificial Sequence
  primer
tagaatggtagggcaagggtg

SEQ ID NO: 67068 - DNA, 38 bp, Artificial Sequence
  primer
gtaaaacgacggccagtttctcaaacccatcagggaac

SEQ ID NO: 67069 - DNA, 21 bp, Artificial Sequence
  primer
ccacagacctcgtccctttac

SEQ ID NO: 67070 - DNA, 38 bp, Artificial Sequence
  primer
gtaaaacgacggccagtacatggtgctggctgaaatag

SEQ ID NO: 67071 - DNA, 21 bp, Artificial Sequence
  primer
tgtccttccatctaggcttgg

SEQ ID NO: 67072 - DNA, 21 bp, Artificial Sequence
  primer
aatggtctccatgtccaggtg

SEQ ID NO: 67073 - DNA, 38 bp, Artificial Sequence
  primer
gtaaaacgacggccagttcacaccaccctgaaagacag

SEQ ID NO: 67074 - DNA, 21 bp, Artificial Sequence
  primer
catttgggaataaggctgtcc

SEQ ID NO: 67075 - DNA, 38 bp, Artificial Sequence
  primer
gtaaaacgacggccagtgagcttgcgagtctttgtgtg

SEQ ID NO: 67076 - DNA, 37 bp, Artificial Sequence
  primer
gtaaaacgacggccagtccttcttgctcggaaagagc

SEQ ID NO: 67077 - DNA, 38 bp, Artificial Sequence
  primer
gtaaaacgacggccagtacagatacacggcgtggaata

SEQ ID NO: 67078 - DNA, 38 bp, Artificial Sequence
  primer
gtaaaacgacggccagtcaggaccagcttagtcccaac

SEQ ID NO: 67079 - DNA, 37 bp, Artificial Sequence
  primer
gtaaaacgacggccagtttgggaagagaagctcagcc

SEQ ID NO: 67080 - DNA, 21 bp, Artificial Sequence
  primer
atggaaggagctccactgttc

SEQ ID NO: 67081 - DNA, 21 bp, Artificial Sequence
  primer
aactccgctagagggaggttg

SEQ ID NO: 67082 - DNA, 21 bp, Artificial Sequence
  primer
tccgactcctgaatctgagaa

SEQ ID NO: 67083 - DNA, 38 bp, Artificial Sequence
  primer
gtaaaacgacggccagtgatgtcagggtcacctggaag

SEQ ID NO: 67084 - DNA, 21 bp, Artificial Sequence
  primer
gagctaacagaaggctgtggg

SEQ ID NO: 67085 - DNA, 21 bp, Artificial Sequence
  primer
aggagagaggcagagacaggc

SEQ ID NO: 67086 - DNA, 20 bp, Artificial Sequence
  primer
ccttcttgctcggaaagagc

SEQ ID NO: 67087 - DNA, 38 bp, Artificial Sequence
  primer
gtaaaacgacggccagtagaatgaacgaacacattccg

SEQ ID NO: 67088 - DNA, 37 bp, Artificial Sequence
  primer
gtaaaacgacggccagtgttggtcaaggcgtgacttc

SEQ ID NO: 67089 - DNA, 38 bp, Artificial Sequence
  primer
gtaaaacgacggccagtatccctggcaggtcctcttac

SEQ ID NO: 67090 - DNA, 36 bp, Artificial Sequence
  primer
gtaaaacgacggccagtccctagctcaggccaaggt

SEQ ID NO: 67091 - DNA, 39 bp, Artificial Sequence
  primer
gtaaaacgacggccagtaactagcaggaagatggaaggc

SEQ ID NO: 67092 - DNA, 21 bp, Artificial Sequence
  primer
gaagagtctctgtgtcgtcgg

SEQ ID NO: 67093 - DNA, 22 bp, Artificial Sequence
  primer
agccagtttcttggaaatagcc

SEQ ID NO: 67094 - DNA, 22 bp, Artificial Sequence
  primer
tgctcaataaatacctgctcgc

SEQ ID NO: 67095 - DNA, 38 bp, Artificial Sequence
  primer
gtaaaacgacggccagtatattccagattctccctgcc

SEQ ID NO: 67096 - DNA, 23 bp, Artificial Sequence
  primer
tctcattgttatggaaagcaacc

SEQ ID NO: 67097 - DNA, 40 bp, Artificial Sequence
  primer
gtaaaacgacggccagttccttccctacattcttacctgc

SEQ ID NO: 67098 - DNA, 20 bp, Artificial Sequence
  primer
aaacagcactcctgcagacc

SEQ ID NO: 67099 - DNA, 22 bp, Artificial Sequence
  primer
aacaccaacagcactcacagac

SEQ ID NO: 67100 - DNA, 38 bp, Artificial Sequence
  primer
gtaaaacgacggccagtacaaataattggaagggtggg

SEQ ID NO: 67101 - DNA, 39 bp, Artificial Sequence
  primer
gtaaaacgacggccagttctgtagtcgaggctacttggg

SEQ ID NO: 67102 - DNA, 37 bp, Artificial Sequence
  primer
gtaaaacgacggccagtgtaatcctccggatcccatc

SEQ ID NO: 67103 - DNA, 25 bp, Artificial Sequence
  primer
cagtgaacaactgtttcagagagtg

SEQ ID NO: 67104 - DNA, 21 bp, Artificial Sequence
  primer
ttggataagggcaaagaggaa

SEQ ID NO: 67105 - DNA, 40 bp, Artificial Sequence
  primer
gtaaaacgacggccagtggctaacaggaaattctcattcc

SEQ ID NO: 67106 - DNA, 20 bp, Artificial Sequence
  primer
cgcgcacaactcactttatg

SEQ ID NO: 67107 - DNA, 21 bp, Artificial Sequence
  primer
acagtgtgatggcaagggaac

SEQ ID NO: 67108 - DNA, 21 bp, Artificial Sequence
  primer
gactttccgaacatgggacac

SEQ ID NO: 67109 - DNA, 21 bp, Artificial Sequence
  primer
ttccattaaccaggatctgcc

SEQ ID NO: 67110 - DNA, 21 bp, Artificial Sequence
  primer
acctcctgcttctcactcagc

SEQ ID NO: 67111 - DNA, 38 bp, Artificial Sequence
  primer
gtaaaacgacggccagttcccttaagtgcattgtctcg

SEQ ID NO: 67112 - DNA, 21 bp, Artificial Sequence
  primer
aggctctggatcatggagaag

SEQ ID NO: 67113 - DNA, 38 bp, Artificial Sequence
  primer
gtaaaacgacggccagtaagggtaaggaaggaacagcg

SEQ ID NO: 67114 - DNA, 21 bp, Artificial Sequence
  primer
taggaggcctgagtgcaagac

SEQ ID NO: 67115 - DNA, 36 bp, Artificial Sequence
  primer
gtaaaacgacggccagtgaacagcctctttggcagg

SEQ ID NO: 67116 - DNA, 21 bp, Artificial Sequence
  primer
cttggagtaggaactcggagc

SEQ ID NO: 67117 - DNA, 21 bp, Artificial Sequence
  primer
tgaagaccgccatctctaagg

SEQ ID NO: 67118 - DNA, 21 bp, Artificial Sequence
  primer
gacaagtttgagggaggcaag

SEQ ID NO: 67119 - DNA, 37 bp, Artificial Sequence
  primer
gtaaaacgacggccagtgagctccaccctaacccttg

SEQ ID NO: 67120 - DNA, 21 bp, Artificial Sequence
  primer
agatgggatacagcacacagg

SEQ ID NO: 67121 - DNA, 40 bp, Artificial Sequence
  primer
gtaaaacgacggccagtaaccagtgcccaagtctataagg

SEQ ID NO: 67122 - DNA, 21 bp, Artificial Sequence
  primer
tccacccgatccactaaagag

SEQ ID NO: 67123 - DNA, 21 bp, Artificial Sequence
  primer
atcaaacctgtggctttcttg

SEQ ID NO: 67124 - DNA, 21 bp, Artificial Sequence
  primer
gagactcgggcgtcagtgtag

SEQ ID NO: 67125 - DNA, 37 bp, Artificial Sequence
  primer
gtaaaacgacggccagtgaaggaatgggcaagcgtag

SEQ ID NO: 67126 - DNA, 21 bp, Artificial Sequence
  primer
tttgtttggatgatggaatcg

SEQ ID NO: 67127 - DNA, 21 bp, Artificial Sequence
  primer
ccactggtacaaatcttgccc

SEQ ID NO: 67128 - DNA, 38 bp, Artificial Sequence
  primer
gtaaaacgacggccagttcatccaggcagaagtctgag

SEQ ID NO: 67129 - DNA, 42 bp, Artificial Sequence
  primer
gtaaaacgacggccagttctcaccaagtttcttgtcactctc

SEQ ID NO: 67130 - DNA, 37 bp, Artificial Sequence
  primer
gtaaaacgacggccagtctggagagggctgggtttag

SEQ ID NO: 67131 - DNA, 21 bp, Artificial Sequence
  primer
gcagagaacttcaccctggag

SEQ ID NO: 67132 - DNA, 38 bp, Artificial Sequence
  primer
gtaaaacgacggccagtaaggcaatgattaacgagcag

SEQ ID NO: 67133 - DNA, 42 bp, Artificial Sequence
  primer
gtaaaacgacggccagttgacctttgacaggagactaacttg

SEQ ID NO: 67134 - DNA, 38 bp, Artificial Sequence
  primer
gtaaaacgacggccagtatccaagaggcacaaatggag

SEQ ID NO: 67135 - DNA, 38 bp, Artificial Sequence
  primer
gtaaaacgacggccagtaaggctcctgagggaagagag

SEQ ID NO: 67136 - DNA, 38 bp, Artificial Sequence
  primer
gtaaaacgacggccagtaggcatcaatgtggactggac

SEQ ID NO: 67137 - DNA, 38 bp, Artificial Sequence
  primer
gtaaaacgacggccagtgtgttctcagccattctgctg

SEQ ID NO: 67138 - DNA, 22 bp, Artificial Sequence
  primer
gagttgttcaaactcgacctgc

SEQ ID NO: 67139 - DNA, 21 bp, Artificial Sequence
  primer
cagagaggagcctggtgagtc

SEQ ID NO: 67140 - DNA, 37 bp, Artificial Sequence
  primer
gtaaaacgacggccagtaagcttgggcagggtttaag

SEQ ID NO: 67141 - DNA, 21 bp, Artificial Sequence
  primer
aggcagttggtgtctagtggg

SEQ ID NO: 67142 - DNA, 21 bp, Artificial Sequence
  primer
ttacaggcataagccaccaac

SEQ ID NO: 67143 - DNA, 21 bp, Artificial Sequence
  primer
acaatgaaatcaaacccgctc

SEQ ID NO: 67144 - DNA, 38 bp, Artificial Sequence
  primer
gtaaaacgacggccagtatcggtgacttcacatgaccc

SEQ ID NO: 67145 - DNA, 21 bp, Artificial Sequence
  primer
tccatctccagatgaaagcag

SEQ ID NO: 67146 - DNA, 21 bp, Artificial Sequence
  primer
gagacacagacatgcagtggg

SEQ ID NO: 67147 - DNA, 38 bp, Artificial Sequence
  primer
gtaaaacgacggccagtggtcattgtcctcactgtccc

SEQ ID NO: 67148 - DNA, 21 bp, Artificial Sequence
  primer
gactctccattcggtggtagc

SEQ ID NO: 67149 - DNA, 39 bp, Artificial Sequence
  primer
gtaaaacgacggccagtaacatccattgtcattgaaccc

SEQ ID NO: 67150 - DNA, 38 bp, Artificial Sequence
  primer
gtaaaacgacggccagtagtgtccggattgacttctcc

SEQ ID NO: 67151 - DNA, 38 bp, Artificial Sequence
  primer
gtaaaacgacggccagtggataggtaggaggtgagccc

SEQ ID NO: 67152 - DNA, 21 bp, Artificial Sequence
  primer
ggaccatgaaagaagggtttg

SEQ ID NO: 67153 - DNA, 38 bp, Artificial Sequence
  primer
gtaaaacgacggccagtaagcactaggagagcctggag

SEQ ID NO: 67154 - DNA, 38 bp, Artificial Sequence
  primer
gtaaaacgacggccagtgtgtagcgctcatcaaactgg

SEQ ID NO: 67155 - DNA, 21 bp, Artificial Sequence
  primer
agaaacactggccttcactgg

SEQ ID NO: 67156 - DNA, 21 bp, Artificial Sequence
  primer
aatgaacctcagcccattagg

SEQ ID NO: 67157 - DNA, 20 bp, Artificial Sequence
  primer
gggccaaagtgtcctgaatc

SEQ ID NO: 67158 - DNA, 37 bp, Artificial Sequence
  primer
gtaaaacgacggccagtgcacaggcacggtaactgac

SEQ ID NO: 67159 - DNA, 41 bp, Artificial Sequence
  primer
gtaaaacgacggccagtccctaaatcacaagatgcaagttt

SEQ ID NO: 67160 - DNA, 35 bp, Artificial Sequence
  primer
gtaaaacgacggccagtgctgggtgacagcacgag

SEQ ID NO: 67161 - DNA, 21 bp, Artificial Sequence
  primer
ccttccctcaaagaaagaggg

SEQ ID NO: 67162 - DNA, 41 bp, Artificial Sequence
  primer
gtaaaacgacggccagttcaggatctttcatttcttatccc

SEQ ID NO: 67163 - DNA, 21 bp, Artificial Sequence
  primer
ggaaggatcgaggtcagagtc

SEQ ID NO: 67164 - DNA, 21 bp, Artificial Sequence
  primer
tctggaagtgagcgtgagaag

SEQ ID NO: 67165 - DNA, 21 bp, Artificial Sequence
  primer
atccaacgatcatgtgagtcc

SEQ ID NO: 67166 - DNA, 37 bp, Artificial Sequence
  primer
gtaaaacgacggccagtgcccgtctacctctaccagg

SEQ ID NO: 67167 - DNA, 21 bp, Artificial Sequence
  primer
tatttctggcctctcagccac

SEQ ID NO: 67168 - DNA, 37 bp, Artificial Sequence
  primer
gtaaaacgacggccagtaagtcatcctcccgccttag

SEQ ID NO: 67169 - DNA, 21 bp, Artificial Sequence
  primer
agtgggcatgggaacataaag

SEQ ID NO: 67170 - DNA, 21 bp, Artificial Sequence
  primer
caaatgaatagccactgctcc

SEQ ID NO: 67171 - DNA, 22 bp, Artificial Sequence
  primer
ttcaggagaatggctctttacg

SEQ ID NO: 67172 - DNA, 39 bp, Artificial Sequence
  primer
gtaaaacgacggccagttcgtaaaggagcagtgaagtcc

SEQ ID NO: 67173 - DNA, 21 bp, Artificial Sequence
  primer
tgatgccttaaggacacgatg

SEQ ID NO: 67174 - DNA, 21 bp, Artificial Sequence
  primer
tggcacaagtattcacactgc

SEQ ID NO: 67175 - DNA, 21 bp, Artificial Sequence
  primer
tcaatgcccagtacaagttgg

SEQ ID NO: 67176 - DNA, 38 bp, Artificial Sequence
  primer
gtaaaacgacggccagtcagaacagtgtgttgtgcgtc

SEQ ID NO: 67177 - DNA, 22 bp, Artificial Sequence
  primer
ggcagcagagagtctgtaccac

SEQ ID NO: 67178 - DNA, 20 bp, Artificial Sequence
  primer
aatgcagaatgagtggtcgg

SEQ ID NO: 67179 - DNA, 38 bp, Artificial Sequence
  primer
gtaaaacgacggccagtagattccagctgagcttccac

SEQ ID NO: 67180 - DNA, 21 bp, Artificial Sequence
  primer
tccctaaagagggtggtctcc

SEQ ID NO: 67181 - DNA, 38 bp, Artificial Sequence
  primer
gtaaaacgacggccagtgggagatgggagacctgaaac

SEQ ID NO: 67182 - DNA, 19 bp, Artificial Sequence
  primer
agaagtcagccgggttcag

SEQ ID NO: 67183 - DNA, 21 bp, Artificial Sequence
  primer
actgggaataagcaagcaagc

SEQ ID NO: 67184 - DNA, 27 bp, Artificial Sequence
  primer
actatgctaagtgacatttcttgtgag

SEQ ID NO: 67185 - DNA, 26 bp, Artificial Sequence
  primer
ccttggttatacaattatcggtcttg

SEQ ID NO: 67186 - DNA, 21 bp, Artificial Sequence
  primer
aaatccgcagtcacagagacc

SEQ ID NO: 67187 - DNA, 37 bp, Artificial Sequence
  primer
gtaaaacgacggccagtctcccaaagtgctgggatta

SEQ ID NO: 67188 - DNA, 21 bp, Artificial Sequence
  primer
taggactcggactggcatcag

SEQ ID NO: 67189 - DNA, 24 bp, Artificial Sequence
  primer
gtgagtcataatttgttctgagcc

SEQ ID NO: 67190 - DNA, 38 bp, Artificial Sequence
  primer
gtaaaacgacggccagtacccatctgctggcttatttg

SEQ ID NO: 67191 - DNA, 21 bp, Artificial Sequence
  primer
gaagagcgggaaggtgtctac

SEQ ID NO: 67192 - DNA, 21 bp, Artificial Sequence
  primer
actgacatcctttcctcccac

SEQ ID NO: 67193 - DNA, 38 bp, Artificial Sequence
  primer
gtaaaacgacggccagtcttaaatcgcctgggaatgag

SEQ ID NO: 67194 - DNA, 21 bp, Artificial Sequence
  primer
aagtgggaaagacactgtggg

SEQ ID NO: 67195 - DNA, 21 bp, Artificial Sequence
  primer
taaagcccagaactccagcag

SEQ ID NO: 67196 - DNA, 21 bp, Artificial Sequence
  primer
cctctttctccttgatcaccc

SEQ ID NO: 67197 - DNA, 38 bp, Artificial Sequence
  primer
gtaaaacgacggccagtggaaaggacagagtgggtgag

SEQ ID NO: 67198 - DNA, 18 bp, Artificial Sequence
  primer
gactccttggtgctgccc

SEQ ID NO: 67199 - DNA, 38 bp, Artificial Sequence
  primer
gtaaaacgacggccagttcttacctccagtttcagggc

SEQ ID NO: 67200 - DNA, 38 bp, Artificial Sequence
  primer
gtaaaacgacggccagtaccttgatgggtacttcagcg

SEQ ID NO: 67201 - DNA, 38 bp, Artificial Sequence
  primer
gtaaaacgacggccagtacaaccaccaaagatgggaac

SEQ ID NO: 67202 - DNA, 37 bp, Artificial Sequence
  primer
gtaaaacgacggccagtcgtctttgtgcaagacatgg

SEQ ID NO: 67203 - DNA, 19 bp, Artificial Sequence
  primer
ggtgacaagagcgaaaccc

SEQ ID NO: 67204 - DNA, 20 bp, Artificial Sequence
  primer
acctgcaacacgaggatgac

SEQ ID NO: 67205 - DNA, 36 bp, Artificial Sequence
  primer
gtaaaacgacggccagtaaggctgcctggttgtgtg

SEQ ID NO: 67206 - DNA, 24 bp, Artificial Sequence
  primer
ttccaaacaggatgagtacctttc

SEQ ID NO: 67207 - DNA, 21 bp, Artificial Sequence
  primer
actcctggactcaagcaatcc

SEQ ID NO: 67208 - DNA, 38 bp, Artificial Sequence
  primer
gtaaaacgacggccagtaggtagcacaggactcccttc

SEQ ID NO: 67209 - DNA, 21 bp, Artificial Sequence
  primer
ttcttggtgtaacaaggctgg

SEQ ID NO: 67210 - DNA, 37 bp, Artificial Sequence
  primer
gtaaaacgacggccagtgaatacgtgcaggaagctgg

SEQ ID NO: 67211 - DNA, 21 bp, Artificial Sequence
  primer
ccgcagaatcaagggatagtc

SEQ ID NO: 67212 - DNA, 38 bp, Artificial Sequence
  primer
gtaaaacgacggccagtaactctgcccactgtcaacac

SEQ ID NO: 67213 - DNA, 20 bp, Artificial Sequence
  primer
caggatccctgagagtggtg

SEQ ID NO: 67214 - DNA, 36 bp, Artificial Sequence
  primer
gtaaaacgacggccagtagcgtctcggaaggagaag

SEQ ID NO: 67215 - DNA, 37 bp, Artificial Sequence
  primer
gtaaaacgacggccagtttggcaccttgatcctgaac

SEQ ID NO: 67216 - DNA, 38 bp, Artificial Sequence
  primer
gtaaaacgacggccagttggaatatgcatcctcccaag

SEQ ID NO: 67217 - DNA, 43 bp, Artificial Sequence
  primer
gtaaaacgacggccagttcatgtgctatcatggtttagtcatt

SEQ ID NO: 67218 - DNA, 41 bp, Artificial Sequence
  primer
gtaaaacgacggccagtaaatttgaagaacagccaggtatt

SEQ ID NO: 67219 - DNA, 42 bp, Artificial Sequence
  primer
gtaaaacgacggccagtttgagtctttggataagtggtgaac

SEQ ID NO: 67220 - DNA, 26 bp, Artificial Sequence
  primer
tttcaataccatttgtcaggatattt

SEQ ID NO: 67221 - DNA, 39 bp, Artificial Sequence
  primer
gtaaaacgacggccagttgcgcttctcacagtcaatatg

SEQ ID NO: 67222 - DNA, 38 bp, Artificial Sequence
  primer
gtaaaacgacggccagtacatgccagggttcacttacc

SEQ ID NO: 67223 - DNA, 37 bp, Artificial Sequence
  primer
gtaaaacgacggccagtactgttcccgaactcccaac

SEQ ID NO: 67224 - DNA, 21 bp, Artificial Sequence
  primer
ctagtcccagcggtacagtcc

SEQ ID NO: 67225 - DNA, 22 bp, Artificial Sequence
  primer
gatacagcaactagaggccacg

SEQ ID NO: 67226 - DNA, 35 bp, Artificial Sequence
  primer
gtaaaacgacggccagtagcggagagcggaatgtc

SEQ ID NO: 67227 - DNA, 37 bp, Artificial Sequence
  primer
gtaaaacgacggccagtctctctcccgaggcttgaac

SEQ ID NO: 67228 - DNA, 38 bp, Artificial Sequence
  primer
gtaaaacgacggccagtttgtcccgatctatacagccc

SEQ ID NO: 67229 - DNA, 21 bp, Artificial Sequence
  primer
gggaagtaggttccagcaagg

SEQ ID NO: 67230 - DNA, 20 bp, Artificial Sequence
  primer
gaagggacctgggttgattg

SEQ ID NO: 67231 - DNA, 38 bp, Artificial Sequence
  primer
gtaaaacgacggccagtacacagcaggactctggcttc

SEQ ID NO: 67232 - DNA, 21 bp, Artificial Sequence
  primer
gacagacaggcagaaggatgg

SEQ ID NO: 67233 - DNA, 21 bp, Artificial Sequence
  primer
ccaggcacacacagataatgg

SEQ ID NO: 67234 - DNA, 20 bp, Artificial Sequence
  primer
agccacttcctgtatcgcag

SEQ ID NO: 67235 - DNA, 39 bp, Artificial Sequence
  primer
gtaaaacgacggccagtgcaggctatttacttctttggc

SEQ ID NO: 67236 - DNA, 43 bp, Artificial Sequence
  primer
gtaaaacgacggccagtaaattataatgccagctgctaaagag

SEQ ID NO: 67237 - DNA, 39 bp, Artificial Sequence
  primer
gtaaaacgacggccagtaacacagccaagctaaatgttg

SEQ ID NO: 67238 - DNA, 38 bp, Artificial Sequence
  primer
gtaaaacgacggccagtagagagggtagtgtggcatgg

SEQ ID NO: 67239 - DNA, 21 bp, Artificial Sequence
  primer
ggcacctcacctttactcagc

SEQ ID NO: 67240 - DNA, 39 bp, Artificial Sequence
  primer
gtaaaacgacggccagtggagaaacagctggtgaaatcc

SEQ ID NO: 67241 - DNA, 38 bp, Artificial Sequence
  primer
gtaaaacgacggccagtgcagaagcctttcaccagaag

SEQ ID NO: 67242 - DNA, 27 bp, Artificial Sequence
  primer
tctatcactggcaagaataacagtttc

SEQ ID NO: 67243 - DNA, 38 bp, Artificial Sequence
  primer
gtaaaacgacggccagtgaccgtgctcttcagtttcag

SEQ ID NO: 67244 - DNA, 24 bp, Artificial Sequence
  primer
ggctgagaaacattggattagatg

SEQ ID NO: 67245 - DNA, 26 bp, Artificial Sequence
  primer
aaactgcctcaaagatttatgcttac

SEQ ID NO: 67246 - DNA, 20 bp, Artificial Sequence
  primer
agaattcccacccattcacc

SEQ ID NO: 67247 - DNA, 38 bp, Artificial Sequence
  primer
gtaaaacgacggccagtgctgccagcattacagatagc

SEQ ID NO: 67248 - DNA, 38 bp, Artificial Sequence
  primer
gtaaaacgacggccagtatcttcacaaccacaactggg

SEQ ID NO: 67249 - DNA, 21 bp, Artificial Sequence
  primer
tgtgtttcccaagagaagagg

SEQ ID NO: 67250 - DNA, 22 bp, Artificial Sequence
  primer
ttggagagaagtctgcactttg

SEQ ID NO: 67251 - DNA, 38 bp, Artificial Sequence
  primer
gtaaaacgacggccagttgattacgaagaaagcccacc

SEQ ID NO: 67252 - DNA, 23 bp, Artificial Sequence
  primer
aaccacctaccatgcactatttg

SEQ ID NO: 67253 - DNA, 39 bp, Artificial Sequence
  primer
gtaaaacgacggccagtccactagccagacagtgatttg

SEQ ID NO: 67254 - DNA, 23 bp, Artificial Sequence
  primer
tctcttcagtaccgcaaatttca

SEQ ID NO: 67255 - DNA, 22 bp, Artificial Sequence
  primer
tgttcagactcagcttgctttg

SEQ ID NO: 67256 - DNA, 21 bp, Artificial Sequence
  primer
aggacaagcactgtcaggatg

SEQ ID NO: 67257 - DNA, 38 bp, Artificial Sequence
  primer
gtaaaacgacggccagtgacatggaggaaagcaggaag

SEQ ID NO: 67258 - DNA, 38 bp, Artificial Sequence
  primer
gtaaaacgacggccagtaaagaaaggagtggcaagtgg

SEQ ID NO: 67259 - DNA, 21 bp, Artificial Sequence
  primer
gcagggagtgggtattaggag

SEQ ID NO: 67260 - DNA, 21 bp, Artificial Sequence
  primer
tcaagcccaggagtcactatg

SEQ ID NO: 67261 - DNA, 20 bp, Artificial Sequence
  primer
cttggaggaggcattcactg

SEQ ID NO: 67262 - DNA, 19 bp, Artificial Sequence
  primer
cttgcaagccttcaggacc

SEQ ID NO: 67263 - DNA, 36 bp, Artificial Sequence
  primer
gtaaaacgacggccagtcagctgtgactggagctgg

SEQ ID NO: 67264 - DNA, 24 bp, Artificial Sequence
  primer
cacatttgaactttgaatctctgc

SEQ ID NO: 67265 - DNA, 26 bp, Artificial Sequence
  primer
tcaagatttgtaggtcatgttacacc

SEQ ID NO: 67266 - DNA, 22 bp, Artificial Sequence
  primer
ccaccaggctgtgttacttctc

SEQ ID NO: 67267 - DNA, 20 bp, Artificial Sequence
  primer
ccctcacacctagaacaggc

SEQ ID NO: 67268 - DNA, 20 bp, Artificial Sequence
  primer
acaacgacatcaatggaggc

SEQ ID NO: 67269 - DNA, 26 bp, Artificial Sequence
  primer
ttctccactgtttcatagctagtcag

SEQ ID NO: 67270 - DNA, 21 bp, Artificial Sequence
  primer
agcccaaagcttggtgtattg

SEQ ID NO: 67271 - DNA, 21 bp, Artificial Sequence
  primer
acacgagccaggatgctaaac

SEQ ID NO: 67272 - DNA, 39 bp, Artificial Sequence
  primer
gtaaaacgacggccagtcctcaaacagctcattagcaag

SEQ ID NO: 67273 - DNA, 22 bp, Artificial Sequence
  primer
gcaccaaacttgtggtatgatg

SEQ ID NO: 67274 - DNA, 21 bp, Artificial Sequence
  primer
tttgcccagaagttcagtcac

SEQ ID NO: 67275 - DNA, 38 bp, Artificial Sequence
  primer
gtaaaacgacggccagtttcatgttctggccacatttc

SEQ ID NO: 67276 - DNA, 39 bp, Artificial Sequence
  primer
gtaaaacgacggccagtcatgcagagctccagaggatac

SEQ ID NO: 67277 - DNA, 21 bp, Artificial Sequence
  primer
atggtcatttggaagaaaggc

SEQ ID NO: 67278 - DNA, 25 bp, Artificial Sequence
  primer
tggaagaatttcatggtagagactg

SEQ ID NO: 67279 - DNA, 21 bp, Artificial Sequence
  primer
acttctgggctcaagaagcac

SEQ ID NO: 67280 - DNA, 38 bp, Artificial Sequence
  primer
gtaaaacgacggccagtaccacaatagccatggagctg

SEQ ID NO: 67281 - DNA, 23 bp, Artificial Sequence
  primer
ttgctccaaataattgcaaagaa

SEQ ID NO: 67282 - DNA, 22 bp, Artificial Sequence
  primer
tgtggaataagctcttccaatg

SEQ ID NO: 67283 - DNA, 38 bp, Artificial Sequence
  primer
gtaaaacgacggccagtacccttggcataattctctgc

SEQ ID NO: 67284 - DNA, 24 bp, Artificial Sequence
  primer
tcaaccagatgattcaatttaccc

SEQ ID NO: 67285 - DNA, 22 bp, Artificial Sequence
  primer
tcaccagagccaatttaacaca

SEQ ID NO: 67286 - DNA, 21 bp, Artificial Sequence
  primer
cgaggcaaatgaaggtcaaat

SEQ ID NO: 67287 - DNA, 23 bp, Artificial Sequence
  primer
tggattcatcaatacctttccac

SEQ ID NO: 67288 - DNA, 21 bp, Artificial Sequence
  primer
tgcactgtgtgtgtggttctg

SEQ ID NO: 67289 - DNA, 36 bp, Artificial Sequence
  primer
gtaaaacgacggccagtctgttgctagcacgccaag

SEQ ID NO: 67290 - DNA, 21 bp, Artificial Sequence
  primer
aaactgagactcacccatccc

SEQ ID NO: 67291 - DNA, 38 bp, Artificial Sequence
  primer
gtaaaacgacggccagtacccagttgacttgcagacac

SEQ ID NO: 67292 - DNA, 38 bp, Artificial Sequence
  primer
gtaaaacgacggccagtgggagaccataacaaggacaa

SEQ ID NO: 67293 - DNA, 38 bp, Artificial Sequence
  primer
gtaaaacgacggccagtgaagctagagccaccctcaag

SEQ ID NO: 67294 - DNA, 40 bp, Artificial Sequence
  primer
gtaaaacgacggccagtgggtttcaaacaaacttcctacg

SEQ ID NO: 67295 - DNA, 21 bp, Artificial Sequence
  primer
atgattcagattctgccatgc

SEQ ID NO: 67296 - DNA, 36 bp, Artificial Sequence
  primer
gtaaaacgacggccagtacccattcgtgcctgaaac

SEQ ID NO: 67297 - DNA, 21 bp, Artificial Sequence
  primer
aaattgcttgctttcctcagc

SEQ ID NO: 67298 - DNA, 38 bp, Artificial Sequence
  primer
gtaaaacgacggccagttaccatgaatagggagccagc

SEQ ID NO: 67299 - DNA, 35 bp, Artificial Sequence
  primer
gtaaaacgacggccagtctaggaagggcccagcag

SEQ ID NO: 67300 - DNA, 21 bp, Artificial Sequence
  primer
tggaattggaaggaactgtcg

SEQ ID NO: 67301 - DNA, 38 bp, Artificial Sequence
  primer
gtaaaacgacggccagtgcaaagggtggtaggtcaaac

SEQ ID NO: 67302 - DNA, 21 bp, Artificial Sequence
  primer
ttatcaatccgacagcaggac

SEQ ID NO: 67303 - DNA, 19 bp, Artificial Sequence
  primer
agatgcatcgcctaatgcc

SEQ ID NO: 67304 - DNA, 39 bp, Artificial Sequence
  primer
gtaaaacgacggccagtggcagagcacaaatattccaac

SEQ ID NO: 67305 - DNA, 21 bp, Artificial Sequence
  primer
tgttgccagcactgaggttag

SEQ ID NO: 67306 - DNA, 21 bp, Artificial Sequence
  primer
agggaagagcaagaaagaggc

SEQ ID NO: 67307 - DNA, 21 bp, Artificial Sequence
  primer
gcatctgaagaactggaatgg

SEQ ID NO: 67308 - DNA, 21 bp, Artificial Sequence
  primer
caatactccacacctctgccc

SEQ ID NO: 67309 - DNA, 22 bp, Artificial Sequence
  primer
gcctatgatggcctgaatgtag

SEQ ID NO: 67310 - DNA, 21 bp, Artificial Sequence
  primer
aaactgtcttcccgtggactg

SEQ ID NO: 67311 - DNA, 21 bp, Artificial Sequence
  primer
aagacctcatcagcagcttcc

SEQ ID NO: 67312 - DNA, 21 bp, Artificial Sequence
  primer
cgactcagaggagtgcttgtg

SEQ ID NO: 67313 - DNA, 21 bp, Artificial Sequence
  primer
ctcacgcagaacgtgtagagg

SEQ ID NO: 67314 - DNA, 38 bp, Artificial Sequence
  primer
gtaaaacgacggccagtagtcccttgtcagccactgtc

SEQ ID NO: 67315 - DNA, 23 bp, Artificial Sequence
  primer
aagcacacaaactttcactgacc

SEQ ID NO: 67316 - DNA, 20 bp, Artificial Sequence
  primer
cactctcaggcaccttccac

SEQ ID NO: 67317 - DNA, 38 bp, Artificial Sequence
  primer
gtaaaacgacggccagtaacccttgaatttgtggttcc

SEQ ID NO: 67318 - DNA, 35 bp, Artificial Sequence; identical to SEQ ID NO: 17530
  primer

SEQ ID NO: 67319 - DNA, 20 bp, Artificial Sequence
  primer
aaagcccaaactcacaaagc

SEQ ID NO: 67320 - DNA, 38 bp, Artificial Sequence
  primer
gtaaaacgacggccagtgaagggcatgctgatatttcc

SEQ ID NO: 67321 - DNA, 21 bp, Artificial Sequence
  primer
gcggaagtatcacgtcaacag

SEQ ID NO: 67322 - DNA, 40 bp, Artificial Sequence
  primer
gtaaaacgacggccagtttataatgggccctgtgaaatac

SEQ ID NO: 67323 - DNA, 25 bp, Artificial Sequence
  primer
aagagaagctctaaagaatcaaggc

SEQ ID NO: 67324 - DNA, 42 bp, Artificial Sequence
  primer
gtaaaacgacggccagttctaacaacactgagaggagaaatg

SEQ ID NO: 67325 - DNA, 41 bp, Artificial Sequence
  primer
gtaaaacgacggccagtttgaaacagagtctcaaactccac

SEQ ID NO: 67326 - DNA, 38 bp, Artificial Sequence
  primer
gtaaaacgacggccagtatgttggatggatagccaagg

SEQ ID NO: 67327 - DNA, 38 bp, Artificial Sequence
  primer
gtaaaacgacggccagtaagtgtcatcactggctgtgg

SEQ ID NO: 67328 - DNA, 38 bp, Artificial Sequence
  primer
gtaaaacgacggccagtctcctctgggcaataacttgg

SEQ ID NO: 67329 - DNA, 21 bp, Artificial Sequence
  primer
ggtccttgtctccagaggatg

SEQ ID NO: 67330 - DNA, 21 bp, Artificial Sequence
  primer
tgcactggacagtaggtcagc

SEQ ID NO: 67331 - DNA, 21 bp, Artificial Sequence
  primer
accaggctaacagtggctacc

SEQ ID NO: 67332 - DNA, 38 bp, Artificial Sequence
  primer
gtaaaacgacggccagtaccctgtccactactgccttg

SEQ ID NO: 67333 - DNA, 27 bp, Artificial Sequence
  primer
cacattacagaagaatgatctggatag

SEQ ID NO: 67334 - DNA, 38 bp, Artificial Sequence
  primer
gtaaaacgacggccagtttcgcttatcatccagtgacc

SEQ ID NO: 67335 - DNA, 38 bp, Artificial Sequence
  primer
gtaaaacgacggccagtccaacctttaacagcccaaac

SEQ ID NO: 67336 - DNA, 38 bp, Artificial Sequence
  primer
gtaaaacgacggccagttctcatttccagctaacagcg

SEQ ID NO: 67337 - DNA, 38 bp, Artificial Sequence
  primer
gtaaaacgacggccagttggcaggatgtgaacaatttc

SEQ ID NO: 67338 - DNA, 21 bp, Artificial Sequence
  primer
atttccacgtgagcctttgag

SEQ ID NO: 67339 - DNA, 38 bp, Artificial Sequence
  primer
gtaaaacgacggccagttggatttgggtagcctcacag

SEQ ID NO: 67340 - DNA, 22 bp, Artificial Sequence
  primer
gccaaatggcctttgaacttag

SEQ ID NO: 67341 - DNA, 22 bp, Artificial Sequence
  primer
gagacggagtcttaggtgcaag

SEQ ID NO: 67342 - DNA, 21 bp, Artificial Sequence
  primer
tgaatacctcaaagcacctgg

SEQ ID NO: 67343 - DNA, 37 bp, Artificial Sequence
  primer
gtaaaacgacggccagtatcccagtctagggaagggc

SEQ ID NO: 67344 - DNA, 22 bp, Artificial Sequence
  primer
gagggatggaaatgtttagtcg

SEQ ID NO: 67345 - DNA, 39 bp, Artificial Sequence
  primer
gtaaaacgacggccagtagacaagacgaggttacaaggc

SEQ ID NO: 67346 - DNA, 38 bp, Artificial Sequence
  primer
gtaaaacgacggccagtatgggctcagcaacaggttag

SEQ ID NO: 67347 - DNA, 23 bp, Artificial Sequence
  primer
tggttagaacaagactctggtgg

SEQ ID NO: 67348 - DNA, 21 bp, Artificial Sequence
  primer
cttgaagactgggaccacctc

SEQ ID NO: 67349 - DNA, 38 bp, Artificial Sequence
  primer
gtaaaacgacggccagtcaagtgaacagtcaaggcagg

SEQ ID NO: 67350 - DNA, 39 bp, Artificial Sequence
  primer
gtaaaacgacggccagttcagacgtattcaggcaatgtg

SEQ ID NO: 67351 - DNA, 38 bp, Artificial Sequence
  primer
gtaaaacgacggccagtcaatacagcatgaacacagcc

SEQ ID NO: 67352 - DNA, 20 bp, Artificial Sequence
  primer
accaggcatgtctgctcttc

SEQ ID NO: 67353 - DNA, 22 bp, Artificial Sequence
  primer
tgaacacaccagcctacaacac

SEQ ID NO: 67354 - DNA, 20 bp, Artificial Sequence
  primer
ctcctgggtcattcttctgg

SEQ ID NO: 67355 - DNA, 39 bp, Artificial Sequence
  primer
gtaaaacgacggccagtcaagtttgggcctcaatatgac

SEQ ID NO: 67356 - DNA, 35 bp, Artificial Sequence
  primer
gtaaaacgacggccagtaggtgcagcctccgaatg

SEQ ID NO: 67357 - DNA, 38 bp, Artificial Sequence
  primer
gtaaaacgacggccagtgtgttctccagtatcccaggc

SEQ ID NO: 67358 - DNA, 20 bp, Artificial Sequence
  primer
gagggagcaggaggaagaag

SEQ ID NO: 67359 - DNA, 38 bp, Artificial Sequence
  primer
gtaaaacgacggccagtcatacccacccatttagcacc

SEQ ID NO: 67360 - DNA, 21 bp, Artificial Sequence
  primer
ggagagacacagagagggtgg

SEQ ID NO: 67361 - DNA, 21 bp, Artificial Sequence
  primer
ctgcagccagacagattcttg

SEQ ID NO: 67362 - DNA, 21 bp, Artificial Sequence
  primer
tgtcaccaacctgttcacacc

SEQ ID NO: 67363 - DNA, 39 bp, Artificial Sequence
  primer
gtaaaacgacggccagtggactggacaatgagcctgtag

SEQ ID NO: 67364 - DNA, 21 bp, Artificial Sequence
  primer
aaagcctgtaccaacctccac

SEQ ID NO: 67365 - DNA, 21 bp, Artificial Sequence
  primer
agtggtgaagatggaagtggc

SEQ ID NO: 67366 - DNA, 36 bp, Artificial Sequence
  primer
gtaaaacgacggccagtatggtgaagagccaccgag

SEQ ID NO: 67367 - DNA, 22 bp, Artificial Sequence
  primer
cccatttccatcatatttccag

SEQ ID NO: 67368 - DNA, 38 bp, Artificial Sequence
  primer
gtaaaacgacggccagtcgaagtctcaatcggagaagc

SEQ ID NO: 67369 - DNA, 38 bp, Artificial Sequence
  primer
gtaaaacgacggccagtccttagatttgtgggctttgc

SEQ ID NO: 67370 - DNA, 21 bp, Artificial Sequence
  primer
ggaacatcaccacatcgtttg

SEQ ID NO: 67371 - DNA, 20 bp, Artificial Sequence
  primer
agaagccagagcaaggtgtg

SEQ ID NO: 67372 - DNA, 38 bp, Artificial Sequence
  primer
gtaaaacgacggccagttcatgaagctatccctctgcc

SEQ ID NO: 67373 - DNA, 20 bp, Artificial Sequence
  primer
ccagccacctgtgtttgttc

SEQ ID NO: 67374 - DNA, 21 bp, Artificial Sequence
  primer
gcagcacaaaccttgtaaacc

SEQ ID NO: 67375 - DNA, 37 bp, Artificial Sequence
  primer
gtaaaacgacggccagtctccaggttgggaacctctc

SEQ ID NO: 67376 - DNA, 21 bp, Artificial Sequence
  primer
aaaggaagggagatgatgctg

SEQ ID NO: 67377 - DNA, 21 bp, Artificial Sequence
  primer
tggaggaggtaaaggctatgg

SEQ ID NO: 67378 - DNA, 38 bp, Artificial Sequence
  primer
gtaaaacgacggccagtaacactgaacctgaagatcgc

SEQ ID NO: 67379 - DNA, 21 bp, Artificial Sequence
  primer
acataggcacacatttgggag

SEQ ID NO: 67380 - DNA, 39 bp, Artificial Sequence
  primer
gtaaaacgacggccagttcctcaagacctggtacagagc

SEQ ID NO: 67381 - DNA, 21 bp, Artificial Sequence
  primer
gaggccaaactgtctgtgatg

SEQ ID NO: 67382 - DNA, 21 bp, Artificial Sequence
  primer
agtctctccagcacttccctg

SEQ ID NO: 67383 - DNA, 21 bp, Artificial Sequence
  primer
cactgtgatggagatcatggg

SEQ ID NO: 67384 - DNA, 21 bp, Artificial Sequence
  primer
aagtggataatctgaagcccg

SEQ ID NO: 67385 - DNA, 38 bp, Artificial Sequence
  primer
gtaaaacgacggccagtaactctgccctaatgtcaccc

SEQ ID NO: 67386 - DNA, 21 bp, Artificial Sequence
  primer
aaggagtgggcaactgttctg

SEQ ID NO: 67387 - DNA, 36 bp, Artificial Sequence
  primer
gtaaaacgacggccagtaagccaatgcagaggcaag

SEQ ID NO: 67388 - DNA, 21 bp, Artificial Sequence
  primer
ggctcagagcaaacagctgac

SEQ ID NO: 67389 - DNA, 38 bp, Artificial Sequence
  primer
gtaaaacgacggccagtggatggcaatcctagttccag

SEQ ID NO: 67390 - DNA, 21 bp, Artificial Sequence
  primer
gacctttgctcaggtttcacc

SEQ ID NO: 67391 - DNA, 21 bp, Artificial Sequence
  primer
gaactcagggttggacacagc

SEQ ID NO: 67392 - DNA, 38 bp, Artificial Sequence
  primer
gtaaaacgacggccagtgaagcccagggagagtatctg

SEQ ID NO: 67393 - DNA, 21 bp, Artificial Sequence
  primer
ggctgaggaaattggttcaag

SEQ ID NO: 67394 - DNA, 21 bp, Artificial Sequence
  primer
gcaggcagtgtgtcccattac

SEQ ID NO: 67395 - DNA, 39 bp, Artificial Sequence
  primer
gtaaaacgacggccagtcgcaggcaataactgtccttag

SEQ ID NO: 67396 - DNA, 21 bp, Artificial Sequence
  primer
cactgggcagagcatagagag

SEQ ID NO: 67397 - DNA, 21 bp, Artificial Sequence
  primer
cacaggaggaaagaggacctg

SEQ ID NO: 67398 - DNA, 21 bp, Artificial Sequence
  primer
tttggagaacaaagggacagg

SEQ ID NO: 67399 - DNA, 38 bp, Artificial Sequence
  primer
gtaaaacgacggccagttctaccctctgggaggacaag

SEQ ID NO: 67400 - DNA, 21 bp, Artificial Sequence
  primer
tagtagaaatcgccctcgtcc

SEQ ID NO: 67401 - DNA, 39 bp, Artificial Sequence
  primer
gtaaaacgacggccagtcaaaggaaacagagtttacccg

SEQ ID NO: 67402 - DNA, 21 bp, Artificial Sequence
  primer
acagcaaactcggtgacattg

SEQ ID NO: 67403 - DNA, 21 bp, Artificial Sequence
  primer
aacttcccgttgtaccacacc

SEQ ID NO: 67404 - DNA, 20 bp, Artificial Sequence
  primer
ctcataggcaatgcgctctc

SEQ ID NO: 67405 - DNA, 38 bp, Artificial Sequence
  primer
gtaaaacgacggccagtgacagttgaagttgtccgcag

SEQ ID NO: 67406 - DNA, 21 bp, Artificial Sequence
  primer
taactttccaccaccagggag

SEQ ID NO: 67407 - DNA, 27 bp, Artificial Sequence
  primer
gtgtatatccacatagactaggaaccc

SEQ ID NO: 67408 - DNA, 38 bp, Artificial Sequence
  primer
gtaaaacgacggccagtgtgacctctgaacttgccgtc

SEQ ID NO: 67409 - DNA, 21 bp, Artificial Sequence
  primer
cgaggctctgagggtttattg

SEQ ID NO: 67410 - DNA, 35 bp, Artificial Sequence
  primer
gtaaaacgacggccagtatcagccatttctcccgc

SEQ ID NO: 67411 - DNA, 18 bp, Artificial Sequence
  primer
ggtcccgatcccgatctt

SEQ ID NO: 67412 - DNA, 21 bp, Artificial Sequence
  primer
atctctcgagaccaacccaag

SEQ ID NO: 67413 - DNA, 21 bp, Artificial Sequence
  primer
cagactctgtccacagggagg

SEQ ID NO: 67414 - DNA, 19 bp, Artificial Sequence
  primer
ttcaaggagtccgagaggg

SEQ ID NO: 67415 - DNA, 38 bp, Artificial Sequence
  primer
gtaaaacgacggccagtgtaaccacttcaccgactggc

SEQ ID NO: 67416 - DNA, 22 bp, Artificial Sequence
  primer
aagaggagcacgtttgtagctg

SEQ ID NO: 67417 - DNA, 38 bp, Artificial Sequence
  primer
gtaaaacgacggccagtgtgactccagcaccctctcac

SEQ ID NO: 67418 - DNA, 19 bp, Artificial Sequence
  primer
gcccgtgtgtgagagaagg

SEQ ID NO: 67419 - DNA, 21 bp, Artificial Sequence
  primer
actcacacactcacctcgcag

SEQ ID NO: 67420 - DNA, 21 bp, Artificial Sequence
  primer
ttacaacttcctgcctccacc

SEQ ID NO: 67421 - DNA, 21 bp, Artificial Sequence
  primer
agtttccggttcgtacaggtc

SEQ ID NO: 67422 - DNA, 38 bp, Artificial Sequence
  primer
gtaaaacgacggccagtagggccaaagacgtgatactg

SEQ ID NO: 67423 - DNA, 38 bp, Artificial Sequence
  primer
gtaaaacgacggccagtgagcagggatcagccatttac

SEQ ID NO: 67424 - DNA, 38 bp, Artificial Sequence
  primer
gtaaaacgacggccagtggagggcttgagaaagaggac

SEQ ID NO: 67425 - DNA, 21 bp, Artificial Sequence
  primer
gcagacatagctggtccaacc

SEQ ID NO: 67426 - DNA, 20 bp, Artificial Sequence
  primer
aaagagcaggctccttgacc

SEQ ID NO: 67427 - DNA, 38 bp, Artificial Sequence
  primer
gtaaaacgacggccagtctagctcacacccaggtctcc

SEQ ID NO: 67428 - DNA, 21 bp, Artificial Sequence
  primer
actgattaggtgccaggatgg

SEQ ID NO: 67429 - DNA, 37 bp, Artificial Sequence
  primer
gtaaaacgacggccagtagagcaagcctcctctccag

SEQ ID NO: 67430 - DNA, 21 bp, Artificial Sequence
  primer
ctcctgctggttacttctccg

SEQ ID NO: 67431 - DNA, 20 bp, Artificial Sequence
  primer
tttcacgaggagggactgag

SEQ ID NO: 67432 - DNA, 18 bp, Artificial Sequence
  primer
gtcatgggaccgtcaccc

SEQ ID NO: 67433 - DNA, 38 bp, Artificial Sequence
  primer
gtaaaacgacggccagtacgtacgcattccagttcttg

SEQ ID NO: 67434 - DNA, 19 bp, Artificial Sequence
  primer
aaatccagcaactcgtgcc

SEQ ID NO: 67435 - DNA, 38 bp, Artificial Sequence
  primer
gtaaaacgacggccagtgggagaaagatgagacaaggg

SEQ ID NO: 67436 - DNA, 21 bp, Artificial Sequence
  primer
agtccctgacaagggaaggtc

SEQ ID NO: 67437 - DNA, 37 bp, Artificial Sequence
  primer
gtaaaacgacggccagtccgggtagtcacgatcattc

SEQ ID NO: 67438 - DNA, 20 bp, Artificial Sequence
  primer
gtcaatggccatcagtgtcc

SEQ ID NO: 67439 - DNA, 21 bp, Artificial Sequence
  primer
tacaggaggcagtcctcagtg

SEQ ID NO: 67440 - DNA, 38 bp, Artificial Sequence
  primer
gtaaaacgacggccagttgggtggtaagagaggaatcg

SEQ ID NO: 67441 - DNA, 21 bp, Artificial Sequence
  primer
aagaccacgtcactgtggatg

SEQ ID NO: 67442 - DNA, 21 bp, Artificial Sequence
  primer
gtaatgtcagaggcagccacc

SEQ ID NO: 67443 - DNA, 21 bp, Artificial Sequence
  primer
tcctctctcttgcaacccaac

SEQ ID NO: 67444 - DNA, 21 bp, Artificial Sequence
  primer
agaacaacttcagggagccag

SEQ ID NO: 67445 - DNA, 38 bp, Artificial Sequence
  primer
gtaaaacgacggccagtgaccacacaaggaattgagcc

SEQ ID NO: 67446 - DNA, 21 bp, Artificial Sequence
  primer
agggctcggaagtagtcactg

SEQ ID NO: 67447 - DNA, 20 bp, Artificial Sequence
  primer
aaatccaaagtcccacagcc

SEQ ID NO: 67448 - DNA, 36 bp, Artificial Sequence
  primer
gtaaaacgacggccagtaccagctatgagcgggaag

SEQ ID NO: 67449 - DNA, 21 bp, Artificial Sequence
  primer
aagaagagctgcacacaaacg

SEQ ID NO: 67450 - DNA, 39 bp, Artificial Sequence
  primer
gtaaaacgacggccagtttgtctcaggaaattcactccc

SEQ ID NO: 67451 - DNA, 36 bp, Artificial Sequence
  primer
gtaaaacgacggccagtccagagcacttggaggagg

SEQ ID NO: 67452 - DNA, 38 bp, Artificial Sequence
  primer
gtaaaacgacggccagtttggtcagtcgtcagtcagtg

SEQ ID NO: 67453 - DNA, 38 bp, Artificial Sequence
  primer
gtaaaacgacggccagtggacacccttagaacagctca

SEQ ID NO: 67454 - DNA, 38 bp, Artificial Sequence
  primer
gtaaaacgacggccagttctcagggttaggacagaggg

SEQ ID NO: 67455 - DNA, 21 bp, Artificial Sequence
  primer
tctgtgcatcttgtctttccg

SEQ ID NO: 67456 - DNA, 21 bp, Artificial Sequence
  primer
tctatcgatcaggtgagctgg

SEQ ID NO: 67457 - DNA, 21 bp, Artificial Sequence
  primer
caacagaaactgatgggtggg

SEQ ID NO: 67458 - DNA, 20 bp, Artificial Sequence
  primer
gggaaactgaggctcctgtg

SEQ ID NO: 67459 - DNA, 20 bp, Artificial Sequence
  primer
gaagagcagcagggagtgac

SEQ ID NO: 67460 - DNA, 38 bp, Artificial Sequence
  primer
gtaaaacgacggccagtgtgtgtccatctgtgtgtccc

SEQ ID NO: 67461 - DNA, 38 bp, Artificial Sequence
  primer
gtaaaacgacggccagtaacagagaaactgaggctggg

SEQ ID NO: 67462 - DNA, 20 bp, Artificial Sequence
  primer
ctctgctgcaatgtgactgc

SEQ ID NO: 67463 - DNA, 20 bp, Artificial Sequence
  primer
agggaaagacctggatgctc

SEQ ID NO: 67464 - DNA, 38 bp, Artificial Sequence
  primer
gtaaaacgacggccagtcagatggagaggaagagccac

SEQ ID NO: 67465 - DNA, 21 bp, Artificial Sequence
  primer
cctgcatctcctagctcatcc

SEQ ID NO: 67466 - DNA, 37 bp, Artificial Sequence
  primer
gtaaaacgacggccagtgctccaagagggcctacaac

SEQ ID NO: 67467 - DNA, 21 bp, Artificial Sequence
  primer
aaccaaacatacgaaccggac

SEQ ID NO: 67468 - DNA, 38 bp, Artificial Sequence
  primer
gtaaaacgacggccagtagtctctcctcccatctgacg

SEQ ID NO: 67469 - DNA, 21 bp, Artificial Sequence
  primer
tggtgtccaaccttatcctcc

SEQ ID NO: 67470 - DNA, 22 bp, Artificial Sequence
  primer
tggtctctagatgggactcagc

SEQ ID NO: 67471 - DNA, 21 bp, Artificial Sequence
  primer
tgcatttgtgagaacccactc

SEQ ID NO: 67472 - DNA, 21 bp, Artificial Sequence
  primer
tcaagggcaacatcaagtctc

SEQ ID NO: 67473 - DNA, 21 bp, Artificial Sequence
  primer
agtggccctgacacttcctac

SEQ ID NO: 67474 - DNA, 21 bp, Artificial Sequence
  primer
tggtctattccaggttcccag

SEQ ID NO: 67475 - DNA, 21 bp, Artificial Sequence
  primer
caggaagggcttgaagtatgg

SEQ ID NO: 67476 - DNA, 38 bp, Artificial Sequence
  primer
gtaaaacgacggccagtcttctccacacagtaggcagc

SEQ ID NO: 67477 - DNA, 38 bp, Artificial Sequence
  primer
gtaaaacgacggccagtgattatgatccaaagcccacc

SEQ ID NO: 67478 - DNA, 21 bp, Artificial Sequence
  primer
ttgaagtgccttgatctgtcc

SEQ ID NO: 67479 - DNA, 21 bp, Artificial Sequence
  primer
ttaacccaaacaagcctttcg

SEQ ID NO: 67480 - DNA, 21 bp, Artificial Sequence
  primer
aagatcgcaccaccatactcc

SEQ ID NO: 67481 - DNA, 38 bp, Artificial Sequence
  primer
gtaaaacgacggccagttcaagcaatcctccctaaagc

SEQ ID NO: 67482 - DNA, 21 bp, Artificial Sequence
  primer
atcctcatcaacgaaattggc

SEQ ID NO: 67483 - DNA, 21 bp, Artificial Sequence
  primer
ctcaagggtccatctagggtc

SEQ ID NO: 67484 - DNA, 41 bp, Artificial Sequence
  primer
gtaaaacgacggccagtaagctaaacaactaaagactggca

SEQ ID NO: 67485 - DNA, 22 bp, Artificial Sequence
  primer
tctacaggtgaccttggtttgg

SEQ ID NO: 67486 - DNA, 40 bp, Artificial Sequence
  primer
gtaaaacgacggccagtcaacacaaggcatctaatgaagg

SEQ ID NO: 67487 - DNA, 21 bp, Artificial Sequence
  primer
tgttcctggtaacagccagtg

SEQ ID NO: 67488 - DNA, 38 bp, Artificial Sequence
  primer
gtaaaacgacggccagtagctgctctgaaggtcacttg

SEQ ID NO: 67489 - DNA, 38 bp, Artificial Sequence
  primer
gtaaaacgacggccagtggaaataatagcacagcaggg

SEQ ID NO: 67490 - DNA, 24 bp, Artificial Sequence
  primer
tcttagctgaaatcatccttgctc

SEQ ID NO: 67491 - DNA, 38 bp, Artificial Sequence
  primer
gtaaaacgacggccagtctagggaggcagaaaggctaa

SEQ ID NO: 67492 - DNA, 41 bp, Artificial Sequence
  primer
gtaaaacgacggccagtcattctcctacttaaaggctgtgc

SEQ ID NO: 67493 - DNA, 39 bp, Artificial Sequence
  primer
gtaaaacgacggccagttgaaagatgcttccaaaccttc

SEQ ID NO: 67494 - DNA, 22 bp, Artificial Sequence
  primer
ccaaagccttctccatatctcc

SEQ ID NO: 67495 - DNA, 26 bp, Artificial Sequence
  primer
ggagctacaaggtaccattaatcaac

SEQ ID NO: 67496 - DNA, 21 bp, Artificial Sequence
  primer
acatccctaacaccaccttgg

SEQ ID NO: 67497 - DNA, 37 bp, Artificial Sequence
  primer
gtaaaacgacggccagtagccatacgcaccatgtagg

SEQ ID NO: 67498 - DNA, 21 bp, Artificial Sequence
  primer
atgccattgttctcagattgg

SEQ ID NO: 67499 - DNA, 22 bp, Artificial Sequence
  primer
acagggtgaaagagaaatgacc

SEQ ID NO: 67500 - DNA, 21 bp, Artificial Sequence
  primer
ccaatgaagcaacaaccattt

SEQ ID NO: 67501 - DNA, 38 bp, Artificial Sequence
  primer
gtaaaacgacggccagttcctattcccatgctcacacc

SEQ ID NO: 67502 - DNA, 38 bp, Artificial Sequence
  primer
gtaaaacgacggccagtttcatgtagtggcagggattg

SEQ ID NO: 67503 - DNA, 21 bp, Artificial Sequence
  primer
tagcactcataagctgccagg

SEQ ID NO: 67504 - DNA, 38 bp, Artificial Sequence
  primer
gtaaaacgacggccagtgaacaacaaacgctgcttcag

SEQ ID NO: 67505 - DNA, 40 bp, Artificial Sequence
  primer
gtaaaacgacggccagtttcattgtccacatacactggag

SEQ ID NO: 67506 - DNA, 38 bp, Artificial Sequence
  primer
gtaaaacgacggccagttcagtcctagtccatcccagc

SEQ ID NO: 67507 - DNA, 38 bp, Artificial Sequence
  primer
gtaaaacgacggccagtaatcacttgcctctccaaacc

SEQ ID NO: 67508 - DNA, 38 bp, Artificial Sequence
  primer
gtaaaacgacggccagttcccacaactgaaggtgaaag

SEQ ID NO: 67509 - DNA, 21 bp, Artificial Sequence
  primer
cactgttgggtttgtaccctg

SEQ ID NO: 67510 - DNA, 42 bp, Artificial Sequence
  primer
gtaaaacgacggccagtctttccaatttcttgaagtcaaatc

SEQ ID NO: 67511 - DNA, 21 bp, Artificial Sequence
  primer
tcatcaagctgtgtttcgttg

SEQ ID NO: 67512 - DNA, 21 bp, Artificial Sequence
  primer
gttaatccacagctcaagccc

SEQ ID NO: 67513 - DNA, 25 bp, Artificial Sequence
  primer
tttaaagagacgcagcactaatctt

SEQ ID NO: 67514 - DNA, 44 bp, Artificial Sequence
  primer
gtaaaacgacggccagttttaagctaaaccacaattctaacagc

SEQ ID NO: 67515 - DNA, 22 bp, Artificial Sequence
  primer
agaaccaaccttaaggccagag

SEQ ID NO: 67516 - DNA, 22 bp, Artificial Sequence
  primer
ttagatcaaagaagtgggcacc

SEQ ID NO: 67517 - DNA, 21 bp, Artificial Sequence
  primer
ggagcttctccatactgaggc

SEQ ID NO: 67518 - DNA, 22 bp, Artificial Sequence
  primer
tttagctggctcatggctattc

SEQ ID NO: 67519 - DNA, 38 bp, Artificial Sequence
  primer
gtaaaacgacggccagtattcagagattcagaggcagc

SEQ ID NO: 67520 - DNA, 21 bp, Artificial Sequence
  primer
tccctaaacgcagaactagcc

SEQ ID NO: 67521 - DNA, 21 bp, Artificial Sequence
  primer
ggaaagacagcagaagttggc

SEQ ID NO: 67522 - DNA, 42 bp, Artificial Sequence
  primer
gtaaaacgacggccagttccagcccttctaacatatattctg

SEQ ID NO: 67523 - DNA, 21 bp, Artificial Sequence
  primer
atggcaagaagaacgtatggc

SEQ ID NO: 67524 - DNA, 42 bp, Artificial Sequence
  primer
gtaaaacgacggccagttctctctcagcagaagcataatacc

SEQ ID NO: 67525 - DNA, 22 bp, Artificial Sequence
  primer
cctgtttccaagtccaagtgag

SEQ ID NO: 67526 - DNA, 38 bp, Artificial Sequence
  primer
gtaaaacgacggccagtccaatgggatttgtgagtgtg

SEQ ID NO: 67527 - DNA, 38 bp, Artificial Sequence
  primer
gtaaaacgacggccagttatttcttgccctttggagtg

SEQ ID NO: 67528 - DNA, 21 bp, Artificial Sequence
  primer
ctcccaacaagactaccatgc

SEQ ID NO: 67529 - DNA, 42 bp, Artificial Sequence
  primer
gtaaaacgacggccagttttgaacttaaacctctacccttcc

SEQ ID NO: 67530 - DNA, 22 bp, Artificial Sequence
  primer
caataacccaaggttcttcagc

SEQ ID NO: 67531 - DNA, 23 bp, Artificial Sequence
  primer
cttcaagaaatgctctcatttgg

SEQ ID NO: 67532 - DNA, 21 bp, Artificial Sequence
  primer
acggattgaactgcttccttc

SEQ ID NO: 67533 - DNA, 21 bp, Artificial Sequence
  primer
aaacacagaggcagtgagctg

SEQ ID NO: 67534 - DNA, 21 bp, Artificial Sequence
  primer
tgcactgcttgacttaatggg

SEQ ID NO: 67535 - DNA, 21 bp, Artificial Sequence
  primer
gcaactgagaaccagcactcc

SEQ ID NO: 67536 - DNA, 21 bp, Artificial Sequence
  primer
atcattcaaggctgctgatgc

SEQ ID NO: 67537 - DNA, 39 bp, Artificial Sequence
  primer
gtaaaacgacggccagttctgctgaatctataccctccc

SEQ ID NO: 67538 - DNA, 21 bp, Artificial Sequence
  primer
aacattctccaggaggaaacc

SEQ ID NO: 67539 - DNA, 38 bp, Artificial Sequence
  primer
gtaaaacgacggccagtttgatcaaatgcttcagtgcc

SEQ ID NO: 67540 - DNA, 21 bp, Artificial Sequence
  primer
taatttggccctcatagctcc

SEQ ID NO: 67541 - DNA, 20 bp, Artificial Sequence
  primer
ctctttgctggcgagacttg

SEQ ID NO: 67542 - DNA, 21 bp, Artificial Sequence
  primer
ggccatatctgtacctgtggg

SEQ ID NO: 67543 - DNA, 20 bp, Artificial Sequence
  primer
atgccatttgactccagtgc

SEQ ID NO: 67544 - DNA, 38 bp, Artificial Sequence
  primer
gtaaaacgacggccagtctcttgatgtttgcctgcttc

SEQ ID NO: 67545 - DNA, 38 bp, Artificial Sequence
  primer
gtaaaacgacggccagtgaagctttggcatcagcaaac

SEQ ID NO: 67546 - DNA, 20 bp, Artificial Sequence
  primer
caggcagaatgagcctgaac

SEQ ID NO: 67547 - DNA, 36 bp, Artificial Sequence
  primer
gtaaaacgacggccagtgagaggtcctgaccatcgg

SEQ ID NO: 67548 - DNA, 21 bp, Artificial Sequence
  primer
cccttgtgaactgtggaattg

SEQ ID NO: 67549 - DNA, 21 bp, Artificial Sequence
  primer
cctgggactcactcactcctc

SEQ ID NO: 67550 - DNA, 22 bp, Artificial Sequence
  primer
gcatacttctgtcaccctgacc

SEQ ID NO: 67551 - DNA, 38 bp, Artificial Sequence
  primer
gtaaaacgacggccagtggtgcaaaggacaaacagacc

SEQ ID NO: 67552 - DNA, 22 bp, Artificial Sequence
  primer
aagagaaataatctggcagccc

SEQ ID NO: 67553 - DNA, 21 bp, Artificial Sequence
  primer
attcagccacactgaccgtag

SEQ ID NO: 67554 - DNA, 20 bp, Artificial Sequence
  primer
tgctctttggccagtcattc

SEQ ID NO: 67555 - DNA, 21 bp, Artificial Sequence
  primer
tctcttcccaggctaacatcc

SEQ ID NO: 67556 - DNA, 21 bp, Artificial Sequence
  primer
aaggaagggaggagaaagagg

SEQ ID NO: 67557 - DNA, 21 bp, Artificial Sequence
  primer
agcatgatatccggtttctcc

SEQ ID NO: 67558 - DNA, 21 bp, Artificial Sequence
  primer
ccacagcctcttcaagggtag

SEQ ID NO: 67559 - DNA, 21 bp, Artificial Sequence
  primer
tcaaggtcacggactacatgg

SEQ ID NO: 67560 - DNA, 21 bp, Artificial Sequence
  primer
ctaagacccttggacctgcac

SEQ ID NO: 67561 - DNA, 38 bp, Artificial Sequence
  primer
gtaaaacgacggccagttgttcagacatgggacaaagc

SEQ ID NO: 67562 - DNA, 21 bp, Artificial Sequence
  primer
tccttgtgtttctgcaccatc

SEQ ID NO: 67563 - DNA, 38 bp, Artificial Sequence
  primer
gtaaaacgacggccagttaatgacctctgctgtcacgg

SEQ ID NO: 67564 - DNA, 21 bp, Artificial Sequence
  primer
ttcaacttgatcagaggccag

SEQ ID NO: 67565 - DNA, 38 bp, Artificial Sequence
  primer
gtaaaacgacggccagtttctctcagttcaagcctgcc

SEQ ID NO: 67566 - DNA, 38 bp, Artificial Sequence
  primer
gtaaaacgacggccagtcacacacttgtcgtagtgggc

SEQ ID NO: 67567 - DNA, 35 bp, Artificial Sequence
  primer
gtaaaacgacggccagtacccagccactttctggc

SEQ ID NO: 67568 - DNA, 21 bp, Artificial Sequence
  primer
atggactccacctggttatgc

SEQ ID NO: 67569 - DNA, 21 bp, Artificial Sequence
  primer
ctgctgtcacactgtccttcc

SEQ ID NO: 67570 - DNA, 21 bp, Artificial Sequence
  primer
taggatcacattcaccaaggc

SEQ ID NO: 67571 - DNA, 38 bp, Artificial Sequence
  primer
gtaaaacgacggccagttccttccagagacaggacgac

SEQ ID NO: 67572 - DNA, 21 bp, Artificial Sequence
  primer
ttgttattgacatgctgtgcc

SEQ ID NO: 67573 - DNA, 38 bp, Artificial Sequence
  primer
gtaaaacgacggccagtgaatgtggatgggctcttctc

SEQ ID NO: 67574 - DNA, 21 bp, Artificial Sequence
  primer
agcagagctagagtgggaagc

SEQ ID NO: 67575 - DNA, 22 bp, Artificial Sequence
  primer
ttaaatcaagcaagacgcactg

SEQ ID NO: 67576 - DNA, 38 bp, Artificial Sequence
  primer
gtaaaacgacggccagttcctgagctcaagcaaacctc

SEQ ID NO: 67577 - DNA, 38 bp, Artificial Sequence
  primer
gtaaaacgacggccagttgttggtgtactctccatccc

SEQ ID NO: 67578 - DNA, 21 bp, Artificial Sequence
  primer
ctggaacccaggtcttgagtg

SEQ ID NO: 67579 - DNA, 22 bp, Artificial Sequence
  primer
gcctccaaatgccatcttaatc

SEQ ID NO: 67580 - DNA, 39 bp, Artificial Sequence
  primer
gtaaaacgacggccagtgagaattaaggatgggctttgg

SEQ ID NO: 67581 - DNA, 38 bp, Artificial Sequence
  primer
gtaaaacgacggccagtcaggttctcaccatgtagccc

SEQ ID NO: 67582 - DNA, 37 bp, Artificial Sequence
  primer
gtaaaacgacggccagttgctagcactcccactgaaa

SEQ ID NO: 67583 - DNA, 38 bp, Artificial Sequence
  primer
gtaaaacgacggccagttcccatcatacaaacaccacc

SEQ ID NO: 67584 - DNA, 21 bp, Artificial Sequence
  primer
gaggaaatatcagtgggctgg

SEQ ID NO: 67585 - DNA, 42 bp, Artificial Sequence
  primer
gtaaaacgacggccagtttgtatcagtaggaatgaaactggc

SEQ ID NO: 67586 - DNA, 37 bp, Artificial Sequence
  primer
gtaaaacgacggccagtcagtgcttcctgctcctcag

SEQ ID NO: 67587 - DNA, 38 bp, Artificial Sequence
  primer
gtaaaacgacggccagtatcaagcctttgtctcaagcg

SEQ ID NO: 67588 - DNA, 21 bp, Artificial Sequence
  primer
gacactgcagaaatcattccc

SEQ ID NO: 67589 - DNA, 37 bp, Artificial Sequence
  primer
gtaaaacgacggccagtgagaaacaggcactgagccc

SEQ ID NO: 67590 - DNA, 21 bp, Artificial Sequence
  primer
attagcatcaccacccagagg

SEQ ID NO: 67591 - DNA, 21 bp, Artificial Sequence
  primer
actgcatccctccatgatctc

SEQ ID NO: 67592 - DNA, 21 bp, Artificial Sequence
  primer
cctaggcaatagagccagacc

SEQ ID NO: 67593 - DNA, 37 bp, Artificial Sequence
  primer
gtaaaacgacggccagtatttgacccatcccaaccac

SEQ ID NO: 67594 - DNA, 19 bp, Artificial Sequence
  primer
accacctggttgttgtccc

SEQ ID NO: 67595 - DNA, 39 bp, Artificial Sequence
  primer
gtaaaacgacggccagtcataggagtcgggtagctaggg

SEQ ID NO: 67596 - DNA, 38 bp, Artificial Sequence
  primer
gtaaaacgacggccagttttgtttggaagaggcactcc

SEQ ID NO: 67597 - DNA, 37 bp, Artificial Sequence
  primer
gtaaaacgacggccagtacactgctgcccaagtgttc

SEQ ID NO: 67598 - DNA, 21 bp, Artificial Sequence
  primer
gcgcctggcctaagaaataac

SEQ ID NO: 67599 - DNA, 38 bp, Artificial Sequence
  primer
gtaaaacgacggccagtagcatttaacattgcaccctg

SEQ ID NO: 67600 - DNA, 41 bp, Artificial Sequence
  primer
gtaaaacgacggccagtgggaaaccctaaggaaagctagag

SEQ ID NO: 67601 - DNA, 38 bp, Artificial Sequence
  primer
gtaaaacgacggccagtaaagcttctttgtctccagcc

SEQ ID NO: 67602 - DNA, 22 bp, Artificial Sequence
  primer
caaggcactgggattataggtg

SEQ ID NO: 67603 - DNA, 40 bp, Artificial Sequence
  primer
gtaaaacgacggccagtggaatttgtgttagcatatgggc

SEQ ID NO: 67604 - DNA, 21 bp, Artificial Sequence
  primer
aagtctgccttacgcttggtg

SEQ ID NO: 67605 - DNA, 38 bp, Artificial Sequence
  primer
gtaaaacgacggccagtccagctgtaaattgcaccaag

SEQ ID NO: 67606 - DNA, 21 bp, Artificial Sequence
  primer
cccaatcacggactacttcag

SEQ ID NO: 67607 - DNA, 21 bp, Artificial Sequence
  primer
ggtctctccaaagcctctgtg

SEQ ID NO: 67608 - DNA, 37 bp, Artificial Sequence
  primer
gtaaaacgacggccagtctccatgaagtgcttcagcc

SEQ ID NO: 67609 - DNA, 38 bp, Artificial Sequence
  primer
gtaaaacgacggccagttatcttcactgcctgggatgg

SEQ ID NO: 67610 - DNA, 21 bp, Artificial Sequence
  primer
tcaagttcatgccagtgcttc

SEQ ID NO: 67611 - DNA, 21 bp, Artificial Sequence
  primer
agctgtcctcctctctgatgg

SEQ ID NO: 67612 - DNA, 20 bp, Artificial Sequence
  primer
cctcccaggcattgagagac

SEQ ID NO: 67613 - DNA, 38 bp, Artificial Sequence
  primer
gtaaaacgacggccagtaagtcctgaacaagagcaggg

SEQ ID NO: 67614 - DNA, 21 bp, Artificial Sequence
  primer
gacatcaccttgcttcacctg

SEQ ID NO: 67615 - DNA, 21 bp, Artificial Sequence
  primer
aacacaaaggccagtcctctc

SEQ ID NO: 67616 - DNA, 38 bp, Artificial Sequence
  primer
gtaaaacgacggccagtcatggtgagtgggtgacacag

SEQ ID NO: 67617 - DNA, 21 bp, Artificial Sequence
  primer
acaaacaccggatctttcgag

SEQ ID NO: 67618 - DNA, 35 bp, Artificial Sequence
  primer
gtaaaacgacggccagtgtgactggatggaacggg

SEQ ID NO: 67619 - DNA, 23 bp, Artificial Sequence
  primer
tccactaccggtattctcacttg

SEQ ID NO: 67620 - DNA, 35 bp, Artificial Sequence
  primer
gtaaaacgacggccagttacaggcacgagccactg

SEQ ID NO: 67621 - DNA, 37 bp, Artificial Sequence
  primer
gtaaaacgacggccagtgagtgctcggtaatgccatc

SEQ ID NO: 67622 - DNA, 38 bp, Artificial Sequence
  primer
gtaaaacgacggccagtaaggaaccagaggatgtcagg

SEQ ID NO: 67623 - DNA, 21 bp, Artificial Sequence
  primer
actcacaggtggcttgaagaa

SEQ ID NO: 67624 - DNA, 21 bp, Artificial Sequence
  primer
tacctggttactggccagagg

SEQ ID NO: 67625 - DNA, 21 bp, Artificial Sequence
  primer
cttctctcctggaaatgtggg

SEQ ID NO: 67626 - DNA, 21 bp, Artificial Sequence
  primer
gcttaaggtgatccttgtggg

SEQ ID NO: 67627 - DNA, 21 bp, Artificial Sequence
  primer
aggaagcctcgagacagacag

SEQ ID NO: 67628 - DNA, 21 bp, Artificial Sequence
  primer
ctcatcagtccagctcttccg

SEQ ID NO: 67629 - DNA, 21 bp, Artificial Sequence
  primer
agggtgtatctctctggcagg

SEQ ID NO: 67630 - DNA, 38 bp, Artificial Sequence
  primer
gtaaaacgacggccagttgagtggaaaccatttctccc

SEQ ID NO: 67631 - DNA, 38 bp, Artificial Sequence
  primer
gtaaaacgacggccagtaggtccttcagtcagtccacc

SEQ ID NO: 67632 - DNA, 38 bp, Artificial Sequence
  primer
gtaaaacgacggccagtatatcaggcccaattcagagg

SEQ ID NO: 67633 - DNA, 21 bp, Artificial Sequence
  primer
atggcaagaacagttgctgag

SEQ ID NO: 67634 - DNA, 21 bp, Artificial Sequence
  primer
tacaatccctggtgtgtggag

SEQ ID NO: 67635 - DNA, 21 bp, Artificial Sequence
  primer
acacacacacaccgtcaaagg

SEQ ID NO: 67636 - DNA, 21 bp, Artificial Sequence
  primer
taaccatgcaaagtcacctgc

SEQ ID NO: 67637 - DNA, 21 bp, Artificial Sequence
  primer
atgcggaagacaacaaacctc

SEQ ID NO: 67638 - DNA, 21 bp, Artificial Sequence
  primer
aagagaagcaagcccagtgac

SEQ ID NO: 67639 - DNA, 38 bp, Artificial Sequence
  primer
gtaaaacgacggccagtgacaggaggaagatgacaggc

SEQ ID NO: 67640 - DNA, 37 bp, Artificial Sequence
  primer
gtaaaacgacggccagtgccctgagcagcatctttag

SEQ ID NO: 67641 - DNA, 21 bp, Artificial Sequence
  primer
ctgaagctgtagggtgctgtg

SEQ ID NO: 67642 - DNA, 21 bp, Artificial Sequence
  primer
catggactagctggtgttccc

SEQ ID NO: 67643 - DNA, 21 bp, Artificial Sequence
  primer
gttctaggcctggtcccaaag

SEQ ID NO: 67644 - DNA, 21 bp, Artificial Sequence
  primer
gaagaagaaagggaacagccc

SEQ ID NO: 67645 - DNA, 21 bp, Artificial Sequence
  primer
gacagggtccagaaacagctc

SEQ ID NO: 67646 - DNA, 38 bp, Artificial Sequence
  primer
gtaaaacgacggccagtgacaacccttcaggtgcagac

SEQ ID NO: 67647 - DNA, 21 bp, Artificial Sequence
  primer
ggagaaatctttcggctttcc

SEQ ID NO: 67648 - DNA, 46 bp, Artificial Sequence
  primer
gtaaaacgacggccagtgtatagcaatatatggcattctaggaaat

SEQ ID NO: 67649 - DNA, 21 bp, Artificial Sequence
  primer
aatgtgcaagagtgcatgagc

SEQ ID NO: 67650 - DNA, 38 bp, Artificial Sequence
  primer
gtaaaacgacggccagtttatcccgtgttcatctttgc

SEQ ID NO: 67651 - DNA, 38 bp, Artificial Sequence
  primer
gtaaaacgacggccagtattcaattcctgcctgagtcc

SEQ ID NO: 67652 - DNA, 23 bp, Artificial Sequence
  primer
aaattgtgccacatgtaatcctc

SEQ ID NO: 67653 - DNA, 44 bp, Artificial Sequence
  primer
gtaaaacgacggccagtaagctttgattggatattactgagttc

SEQ ID NO: 67654 - DNA, 39 bp, Artificial Sequence
  primer
gtaaaacgacggccagttctcatccacttccatggtttc

SEQ ID NO: 67655 - DNA, 25 bp, Artificial Sequence
  primer
cacagatttcttcctttaagaccct

SEQ ID NO: 67656 - DNA, 21 bp, Artificial Sequence
  primer
aagattgcacacctcctttcc

SEQ ID NO: 67657 - DNA, 38 bp, Artificial Sequence
  primer
gtaaaacgacggccagtttagtgtttcctcgctttcca

SEQ ID NO: 67658 - DNA, 18 bp, Artificial Sequence
  primer
cgacttcccactcctccc

SEQ ID NO: 67659 - DNA, 23 bp, Artificial Sequence
  primer
gatcaggaagaatggagtgtgag

SEQ ID NO: 67660 - DNA, 21 bp, Artificial Sequence
  primer
ccaagttcccaggctcttcta

SEQ ID NO: 67661 - DNA, 39 bp, Artificial Sequence
  primer
gtaaaacgacggccagttgggcaaacactgtagtctgag

SEQ ID NO: 67662 - DNA, 21 bp, Artificial Sequence
  primer
aggcttcactgctgaatcttg

SEQ ID NO: 67663 - DNA, 21 bp, Artificial Sequence
  primer
tcttggcatccttgacacatc

SEQ ID NO: 67664 - DNA, 38 bp, Artificial Sequence
  primer
gtaaaacgacggccagttcctttaggccttccagttcc

SEQ ID NO: 67665 - DNA, 21 bp, Artificial Sequence
  primer
ttagccttctccacaggttgg

SEQ ID NO: 67666 - DNA, 20 bp, Artificial Sequence
  primer
tccatcctggtgacagagtg

SEQ ID NO: 67667 - DNA, 39 bp, Artificial Sequence
  primer
gtaaaacgacggccagttgcatagcacagtgtcaggttc

SEQ ID NO: 67668 - DNA, 27 bp, Artificial Sequence
  primer
tctaaataatcagaaatccacgttgtc

SEQ ID NO: 67669 - DNA, 23 bp, Artificial Sequence
  primer
aaaccaaacctgcttaagagaca

SEQ ID NO: 67670 - DNA, 36 bp, Artificial Sequence
  primer
gtaaaacgacggccagtaaggagcagcagaactggg

SEQ ID NO: 67671 - DNA, 37 bp, Artificial Sequence
  primer
gtaaaacgacggccagttgtcactgccaccattcatc

SEQ ID NO: 67672 - DNA, 21 bp, Artificial Sequence
  primer
ggcctacccagtaggaccaag

SEQ ID NO: 67673 - DNA, 37 bp, Artificial Sequence
  primer
gtaaaacgacggccagtgaaggcaatcttcctcccag

SEQ ID NO: 67674 - DNA, 20 bp, Artificial Sequence
  primer
ctgaggagggacagggacag

SEQ ID NO: 67675 - DNA, 21 bp, Artificial Sequence
  primer
cctaaagctgccaccattacc

SEQ ID NO: 67676 - DNA, 19 bp, Artificial Sequence
  primer
acggagagcagtcaggagg

SEQ ID NO: 67677 - DNA, 18 bp, Artificial Sequence
  primer
gccaaggagcagagaccc

SEQ ID NO: 67678 - DNA, 20 bp, Artificial Sequence
  primer
agtggctcaggagggagaag

SEQ ID NO: 67679 - DNA, 21 bp, Artificial Sequence
  primer
catgtgatctgatctgggtgg

SEQ ID NO: 67680 - DNA, 35 bp, Artificial Sequence
  primer
gtaaaacgacggccagtctctgccagctgcgattc

SEQ ID NO: 67681 - DNA, 37 bp, Artificial Sequence
  primer
gtaaaacgacggccagtccatgattgcaccactatgc

SEQ ID NO: 67682 - DNA, 38 bp, Artificial Sequence
  primer
gtaaaacgacggccagtgaaatgcagggttcattatgc

SEQ ID NO: 67683 - DNA, 35 bp, Artificial Sequence
  primer
gtaaaacgacggccagtaccgcattgtggtcttgg

SEQ ID NO: 67684 - DNA, 38 bp, Artificial Sequence
  primer
gtaaaacgacggccagtacagatatggtgggccaattc

SEQ ID NO: 67685 - DNA, 21 bp, Artificial Sequence
  primer
gacacctgtcttgcacacctc

SEQ ID NO: 67686 - DNA, 37 bp, Artificial Sequence
  primer
gtaaaacgacggccagtctcatgtaagggaacggtgc

SEQ ID NO: 67687 - DNA, 38 bp, Artificial Sequence
  primer
gtaaaacgacggccagtctccatggatttcaacacagc

SEQ ID NO: 67688 - DNA, 21 bp, Artificial Sequence
  primer
gggctactcaacgaaacattg

SEQ ID NO: 67689 - DNA, 26 bp, Artificial Sequence
  primer
atagagccaccaaacatatactgaag

SEQ ID NO: 67690 - DNA, 39 bp, Artificial Sequence
  primer
gtaaaacgacggccagtcctgtgcctaagttaaacagcc

SEQ ID NO: 67691 - DNA, 19 bp, Artificial Sequence
  primer
gacttacctgagcggcacc

SEQ ID NO: 67692 - DNA, 37 bp, Artificial Sequence
  primer
gtaaaacgacggccagtaggtacctggcaccaagagg

SEQ ID NO: 67693 - DNA, 21 bp, Artificial Sequence
  primer
aacacctgatctgtggtgagc

SEQ ID NO: 67694 - DNA, 38 bp, Artificial Sequence
  primer
gtaaaacgacggccagttacctcgaagaaacgggacac

SEQ ID NO: 67695 - DNA, 20 bp, Artificial Sequence
  primer
ctccagagcgtcattcttgg

SEQ ID NO: 67696 - DNA, 21 bp, Artificial Sequence
  primer
gttaacatccatcccacaggc

SEQ ID NO: 67697 - DNA, 21 bp, Artificial Sequence
  primer
caactgaaatgctcagccatc

SEQ ID NO: 67698 - DNA, 38 bp, Artificial Sequence
  primer
gtaaaacgacggccagtgtgaagatgtctgctaggccc

SEQ ID NO: 67699 - DNA, 21 bp, Artificial Sequence
  primer
ttagtcccaaaggccacattc

SEQ ID NO: 67700 - DNA, 38 bp, Artificial Sequence
  primer
gtaaaacgacggccagtcaagtgatcagggacacatgg

SEQ ID NO: 67701 - DNA, 38 bp, Artificial Sequence
  primer
gtaaaacgacggccagtggtgtaaagctggagacccac

SEQ ID NO: 67702 - DNA, 21 bp, Artificial Sequence
  primer
tgcctcctagggacaaagaac

SEQ ID NO: 67703 - DNA, 21 bp, Artificial Sequence
  primer
ttatatgcccgtgctgagatg

SEQ ID NO: 67704 - DNA, 38 bp, Artificial Sequence
  primer
gtaaaacgacggccagtccagagagctcctttcctttg

SEQ ID NO: 67705 - DNA, 37 bp, Artificial Sequence
  primer
gtaaaacgacggccagtgtggacaagtccgctgagac

SEQ ID NO: 67706 - DNA, 22 bp, Artificial Sequence
  primer
gggcattagtctcaaggagagg

SEQ ID NO: 67707 - DNA, 22 bp, Artificial Sequence
  primer
aactgttcatctgtccggtagg

SEQ ID NO: 67708 - DNA, 20 bp, Artificial Sequence
  primer
tcactcagggatcttgaggc

SEQ ID NO: 67709 - DNA, 21 bp, Artificial Sequence
  primer
cgggagtattcagaagccaag

SEQ ID NO: 67710 - DNA, 21 bp, Artificial Sequence
  primer
aaaccagggccttaaggaaag

SEQ ID NO: 67711 - DNA, 21 bp, Artificial Sequence
  primer
cacagaacctccatctcctca

SEQ ID NO: 67712 - DNA, 22 bp, Artificial Sequence
  primer
cctcacctgaggcattaagttg

SEQ ID NO: 67713 - DNA, 21 bp, Artificial Sequence
  primer
caaattctttccatcccttgc

SEQ ID NO: 67714 - DNA, 21 bp, Artificial Sequence
  primer
aggatctctaagccagggtcc

SEQ ID NO: 67715 - DNA, 21 bp, Artificial Sequence
  primer
gattcgagctgacagagggtc

SEQ ID NO: 67716 - DNA, 21 bp, Artificial Sequence
  primer
gacccacccatgtccatttag

SEQ ID NO: 67717 - DNA, 21 bp, Artificial Sequence
  primer
gaattgctcctggatcctcag

SEQ ID NO: 67718 - DNA, 21 bp, Artificial Sequence
  primer
cacctgaactgtctcaccctg

SEQ ID NO: 67719 - DNA, 38 bp, Artificial Sequence
  primer
gtaaaacgacggccagtaagcagccttgggaggtagtc

SEQ ID NO: 67720 - DNA, 21 bp, Artificial Sequence
  primer
attccaggtcagagagttggg

SEQ ID NO: 67721 - DNA, 37 bp, Artificial Sequence
  primer
gtaaaacgacggccagtagggaagcatcactcacagc

SEQ ID NO: 67722 - DNA, 20 bp, Artificial Sequence
  primer
aacgggagacagaacccaag

SEQ ID NO: 67723 - DNA, 21 bp, Artificial Sequence
  primer
agcaaacctccaaccatgaag

SEQ ID NO: 67724 - DNA, 21 bp, Artificial Sequence
  primer
gcaacacaccaactcttcctg

SEQ ID NO: 67725 - DNA, 21 bp, Artificial Sequence
  primer
agtacatggtctggccaaagg

SEQ ID NO: 67726 - DNA, 38 bp, Artificial Sequence
  primer
gtaaaacgacggccagtggaatctgtttgtggtttggg

SEQ ID NO: 67727 - DNA, 21 bp, Artificial Sequence
  primer
acttggtgaaagcactgaccc

SEQ ID NO: 67728 - DNA, 20 bp, Artificial Sequence
  primer
cagacagctggtcaagggag

SEQ ID NO: 67729 - DNA, 22 bp, Artificial Sequence
  primer
cctcacctgaggcattaagttg

SEQ ID NO: 67730 - DNA, 18 bp, Artificial Sequence
  primer
acggaataccggaggagg

SEQ ID NO: 67731 - DNA, 21 bp, Artificial Sequence
  primer
taagagagcacttgcaaagcc

SEQ ID NO: 67732 - DNA, 22 bp, Artificial Sequence
  primer
tgcctgtccctagtacgatctg

SEQ ID NO: 67733 - DNA, 21 bp, Artificial Sequence
  primer
ccaaattgagaaccacaaccc

SEQ ID NO: 67734 - DNA, 38 bp, Artificial Sequence
  primer
gtaaaacgacggccagtaggccaggaagaaacactgac

SEQ ID NO: 67735 - DNA, 21 bp, Artificial Sequence
  primer
atgaacctctccacaagcctc

SEQ ID NO: 67736 - DNA, 21 bp, Artificial Sequence
  primer
gaggtgctggtgctttctacc

SEQ ID NO: 67737 - DNA, 36 bp, Artificial Sequence
  primer
gtaaaacgacggccagtagtcccagcctcacacctg

SEQ ID NO: 67738 - DNA, 20 bp, Artificial Sequence
  primer
agtgaacgctgcaaggtcag

SEQ ID NO: 67739 - DNA, 38 bp, Artificial Sequence
  primer
gtaaaacgacggccagttgttacgctgcactcaaatcc

SEQ ID NO: 67740 - DNA, 20 bp, Artificial Sequence
  primer
cgggtgctagaagtgactcg

SEQ ID NO: 67741 - DNA, 21 bp, Artificial Sequence
  primer
agagcttggcccacagtatcc

SEQ ID NO: 67742 - DNA, 21 bp, Artificial Sequence
  primer
acagagacccaccatcctcac

SEQ ID NO: 67743 - DNA, 21 bp, Artificial Sequence
  primer
gtaggaagacgccaacctcag

SEQ ID NO: 67744 - DNA, 22 bp, Artificial Sequence
  primer
tgggtgttatcggagcacttag

SEQ ID NO: 67745 - DNA, 38 bp, Artificial Sequence
  primer
gtaaaacgacggccagtagcaacaaacattggcagaga

SEQ ID NO: 67746 - DNA, 39 bp, Artificial Sequence
  primer
gtaaaacgacggccagtaagggaaagcagaaatgtaggc

SEQ ID NO: 67747 - DNA, 38 bp, Artificial Sequence
  primer
gtaaaacgacggccagtcatctcttgacctcgtgatcc

SEQ ID NO: 67748 - DNA, 21 bp, Artificial Sequence
  primer
acccagcctacgctatcattt

SEQ ID NO: 67749 - DNA, 22 bp, Artificial Sequence
  primer
gcccatctttcagttcagtttg

SEQ ID NO: 67750 - DNA, 41 bp, Artificial Sequence
  primer
gtaaaacgacggccagtcataagcagttgaaatgaaccaag

SEQ ID NO: 67751 - DNA, 22 bp, Artificial Sequence
  primer
caatgccaatgaagaccctatc

SEQ ID NO: 67752 - DNA, 21 bp, Artificial Sequence
  primer
gtagtacaggcacatgccacc

SEQ ID NO: 67753 - DNA, 39 bp, Artificial Sequence
  primer
gtaaaacgacggccagtcaagctatctctctgctttggc

SEQ ID NO: 67754 - DNA, 38 bp, Artificial Sequence
  primer
gtaaaacgacggccagtgcaatgggaattatgaagcag

SEQ ID NO: 67755 - DNA, 26 bp, Artificial Sequence
  primer
ttatctgaatataagctgacccacag

SEQ ID NO: 67756 - DNA, 19 bp, Artificial Sequence
  primer
caatccaagcacgagggac

SEQ ID NO: 67757 - DNA, 21 bp, Artificial Sequence
  primer
gcaaggaggcaagaacttgag

SEQ ID NO: 67758 - DNA, 38 bp, Artificial Sequence
  primer
gtaaaacgacggccagttgttcactgtttggttccagc

SEQ ID NO: 67759 - DNA, 23 bp, Artificial Sequence
  primer
ccataaggacgaaagcacctaag

SEQ ID NO: 67760 - DNA, 39 bp, Artificial Sequence
  primer
gtaaaacgacggccagttgttaccgtgtcctgtaaaccc

SEQ ID NO: 67761 - DNA, 21 bp, Artificial Sequence
  primer
tcatattgctgcacacgaacc

SEQ ID NO: 67762 - DNA, 20 bp, Artificial Sequence
  primer
agctatgatggtgccactgc

SEQ ID NO: 67763 - DNA, 41 bp, Artificial Sequence
  primer
gtaaaacgacggccagtccttgggaagtaatgaactcagtc

SEQ ID NO: 67764 - DNA, 23 bp, Artificial Sequence
  primer
ggtttccatctgtactttggtcc

SEQ ID NO: 67765 - DNA, 21 bp, Artificial Sequence
  primer
aagtctggtccagtcaccctg

SEQ ID NO: 67766 - DNA, 42 bp, Artificial Sequence
  primer
gtaaaacgacggccagttgaaccagctacttacaccttaacc

SEQ ID NO: 67767 - DNA, 21 bp, Artificial Sequence
  primer
atccaaggaaagcaagacacc

SEQ ID NO: 67768 - DNA, 18 bp, Artificial Sequence
  primer
aggcgtgaaccaccacac

SEQ ID NO: 67769 - DNA, 42 bp, Artificial Sequence
  primer
gtaaaacgacggccagtcaccttagaggctaactaatgcaaa

SEQ ID NO: 67770 - DNA, 24 bp, Artificial Sequence
  primer
gagtcaccagagcattagattcag

SEQ ID NO: 67771 - DNA, 22 bp, Artificial Sequence
  primer
gctgggtgacacctgaactatg

SEQ ID NO: 67772 - DNA, 42 bp, Artificial Sequence
  primer
gtaaaacgacggccagtggtaaactgtgactctaatgctcca

SEQ ID NO: 67773 - DNA, 38 bp, Artificial Sequence
  primer
gtaaaacgacggccagtctgcagtgatcaggaccattc

SEQ ID NO: 67774 - DNA, 38 bp, Artificial Sequence
  primer
gtaaaacgacggccagtctgtgccaccagtttcatttc

SEQ ID NO: 67775 - DNA, 21 bp, Artificial Sequence
  primer
aacatgaaggtggtgattccc

SEQ ID NO: 67776 - DNA, 21 bp, Artificial Sequence
  primer
tcacaacctgctctttccaac

SEQ ID NO: 67777 - DNA, 22 bp, Artificial Sequence
  primer
aagtctcagtgtctgtggaggg

SEQ ID NO: 67778 - DNA, 21 bp, Artificial Sequence
  primer
gagctcacctttctttgtggg

SEQ ID NO: 67779 - DNA, 38 bp, Artificial Sequence
  primer
gtaaaacgacggccagtttcaactctgccctaggaagg

SEQ ID NO: 67780 - DNA, 22 bp, Artificial Sequence
  primer
cagagtagaagcatgtcagccc

SEQ ID NO: 67781 - DNA, 21 bp, Artificial Sequence
  primer
gaaggcaaacactgacaggac

SEQ ID NO: 67782 - DNA, 20 bp, Artificial Sequence
  primer
cccttccactacatggctcc

SEQ ID NO: 67783 - DNA, 23 bp, Artificial Sequence
  primer
ccaatacctaggacactttctgc

SEQ ID NO: 67784 - DNA, 23 bp, Artificial Sequence
  primer
caatctccttaaagcaaagcagc

SEQ ID NO: 67785 - DNA, 20 bp, Artificial Sequence
  primer
gactggcgcgtgaaagtaag

SEQ ID NO: 67786 - DNA, 38 bp, Artificial Sequence
  primer
gtaaaacgacggccagtatcccaccacctgctttaatc

SEQ ID NO: 67787 - DNA, 27 bp, Artificial Sequence
  primer
aaagagatacatatataaccttggccc

SEQ ID NO: 67788 - DNA, 43 bp, Artificial Sequence
  primer
gtaaaacgacggccagtttgctactaacagaagttacgcattg

SEQ ID NO: 67789 - DNA, 19 bp, Artificial Sequence
  primer
cgcgagactccatctcaaa

SEQ ID NO: 67790 - DNA, 23 bp, Artificial Sequence
  primer
tcaatatgatcaacgcagactcc

SEQ ID NO: 67791 - DNA, 35 bp, Artificial Sequence
  primer
gtaaaacgacggccagtgaacccaggaggcagagc

SEQ ID NO: 67792 - DNA, 22 bp, Artificial Sequence
  primer
ggacctagcatcccttaattgc

SEQ ID NO: 67793 - DNA, 39 bp, Artificial Sequence
  primer
gtaaaacgacggccagttcttgtgaacaccacaatccag

SEQ ID NO: 67794 - DNA, 22 bp, Artificial Sequence
  primer
tgcttgctatcagttgttgagg

SEQ ID NO: 67795 - DNA, 23 bp, Artificial Sequence
  primer
tcagctcactgctttctaattcc

SEQ ID NO: 67796 - DNA, 36 bp, Artificial Sequence
  primer
gtaaaacgacggccagtaggtgaaccacctggcttg

SEQ ID NO: 67797 - DNA, 21 bp, Artificial Sequence
  primer
tggcaaataccaccaaatcag

SEQ ID NO: 67798 - DNA, 44 bp, Artificial Sequence
  primer
gtaaaacgacggccagtaacatatggaagctatcagactcctac

SEQ ID NO: 67799 - DNA, 38 bp, Artificial Sequence
  primer
gtaaaacgacggccagtctaaacgccactgaattgcac

SEQ ID NO: 67800 - DNA, 25 bp, Artificial Sequence
  primer
gctagctgccaggtacctatctaag

SEQ ID NO: 67801 - DNA, 22 bp, Artificial Sequence
  primer
agccaatacataccaaagacgg

SEQ ID NO: 67802 - DNA, 36 bp, Artificial Sequence
  primer
gtaaaacgacggccagtaggcacaggtgcggtctac

SEQ ID NO: 67803 - DNA, 22 bp, Artificial Sequence
  primer
aaatctagcattcctggacacg

SEQ ID NO: 67804 - DNA, 40 bp, Artificial Sequence
  primer
gtaaaacgacggccagtaaacaggttatctccctgattgg

SEQ ID NO: 67805 - DNA, 41 bp, Artificial Sequence
  primer
gtaaaacgacggccagtgcctctccctctaaatgttaggtc

SEQ ID NO: 67806 - DNA, 35 bp, Artificial Sequence
  primer
gtaaaacgacggccagtagcgggttgttgttgcac

SEQ ID NO: 67807 - DNA, 18 bp, Artificial Sequence
  primer
cagcttgcggaaccactg

SEQ ID NO: 67808 - DNA, 39 bp, Artificial Sequence
  primer
gtaaaacgacggccagtggagtggtaacactgcaagagg

SEQ ID NO: 67809 - DNA, 38 bp, Artificial Sequence
  primer
gtaaaacgacggccagtaagacagctcaccagcctttc

SEQ ID NO: 67810 - DNA, 39 bp, Artificial Sequence
  primer
gtaaaacgacggccagtggaattccatttctcctccttg

SEQ ID NO: 67811 - DNA, 38 bp, Artificial Sequence
  primer
gtaaaacgacggccagtgaagtgggtgaagtgtttccc

SEQ ID NO: 67812 - DNA, 21 bp, Artificial Sequence
  primer
agttcccttcccaaccttctc

SEQ ID NO: 67813 - DNA, 21 bp, Artificial Sequence
  primer
tccttgattgcctccaatttc

SEQ ID NO: 67814 - DNA, 38 bp, Artificial Sequence
  primer
gtaaaacgacggccagtagactcctccgaggctatgtg

SEQ ID NO: 67815 - DNA, 38 bp, Artificial Sequence
  primer
gtaaaacgacggccagtcaccgccttccctctactatg

SEQ ID NO: 67816 - DNA, 21 bp, Artificial Sequence
  primer
tggaaaggtgtgcagtgagtc

SEQ ID NO: 67817 - DNA, 21 bp, Artificial Sequence
  primer
agcttgctgttccttgtcctg

SEQ ID NO: 67818 - DNA, 21 bp, Artificial Sequence
  primer
agcagcaccctaactcctctg

SEQ ID NO: 67819 - DNA, 36 bp, Artificial Sequence
  primer
gtaaaacgacggccagtcagcctgctccttgtctcc

SEQ ID NO: 67820 - DNA, 21 bp, Artificial Sequence
  primer
aactgaaccaggaagtgggag

SEQ ID NO: 67821 - DNA, 39 bp, Artificial Sequence
  primer
gtaaaacgacggccagttgtccttcccattactgattgc

SEQ ID NO: 67822 - DNA, 21 bp, Artificial Sequence
  primer
tgggagattgatatggatggg

SEQ ID NO: 67823 - DNA, 21 bp, Artificial Sequence
  primer
tgtaagccaccatgactgacc

SEQ ID NO: 67824 - DNA, 38 bp, Artificial Sequence
  primer
gtaaaacgacggccagtgcttgatcttccctgcatacc

SEQ ID NO: 67825 - DNA, 21 bp, Artificial Sequence
  primer
gtctccacttccatgcctacc

SEQ ID NO: 67826 - DNA, 39 bp, Artificial Sequence
  primer
gtaaaacgacggccagtgcacagcttgtgcttaatgacc

SEQ ID NO: 67827 - DNA, 21 bp, Artificial Sequence
  primer
gaagggcttcaggtagtgctg

SEQ ID NO: 67828 - DNA, 24 bp, Artificial Sequence
  primer
tccttaccacagacaagaggaaag

SEQ ID NO: 67829 - DNA, 21 bp, Artificial Sequence
  primer
cttggcttggctagtctctgc

SEQ ID NO: 67830 - DNA, 37 bp, Artificial Sequence
  primer
gtaaaacgacggccagtcggagagagtcttggtgacg

SEQ ID NO: 67831 - DNA, 21 bp, Artificial Sequence
  primer
cttggcttggctagtctctgc

SEQ ID NO: 67832 - DNA, 20 bp, Artificial Sequence
  primer
catgtcaaaggtgggactgg

SEQ ID NO: 67833 - DNA, 37 bp, Artificial Sequence
  primer
gtaaaacgacggccagtgtgctggctagggaattgtg

SEQ ID NO: 67834 - DNA, 20 bp, Artificial Sequence
  primer
cctgacacctcctctcctcc

SEQ ID NO: 67835 - DNA, 38 bp, Artificial Sequence
  primer
gtaaaacgacggccagtaggagctgagggtttagggtc

SEQ ID NO: 67836 - DNA, 37 bp, Artificial Sequence
  primer
gtaaaacgacggccagtgaggctcgcccttacctatg

SEQ ID NO: 67837 - DNA, 18 bp, Artificial Sequence
  primer
cacgagtccttgcgaagc

SEQ ID NO: 67838 - DNA, 21 bp, Artificial Sequence
  primer
ggccagaaagattaagcaacc

SEQ ID NO: 67839 - DNA, 21 bp, Artificial Sequence
  primer
atatcccaggaccttgtctcg

SEQ ID NO: 67840 - DNA, 38 bp, Artificial Sequence
  primer
gtaaaacgacggccagttgtcggttccagaaatatccc

SEQ ID NO: 67841 - DNA, 21 bp, Artificial Sequence
  primer
gatggtggtctaggcttcagg

SEQ ID NO: 67842 - DNA, 38 bp, Artificial Sequence
  primer
gtaaaacgacggccagtcaatgcctaagttgggctgac

SEQ ID NO: 67843 - DNA, 19 bp, Artificial Sequence
  primer
gtttcgcatcctcctcagc

SEQ ID NO: 67844 - DNA, 36 bp, Artificial Sequence
  primer
gtaaaacgacggccagtattggccaggtggaagatg

SEQ ID NO: 67845 - DNA, 22 bp, Artificial Sequence
  primer
ggcagaactcaccacagagaag

SEQ ID NO: 67846 - DNA, 37 bp, Artificial Sequence
  primer
gtaaaacgacggccagtaatgaagggaagccctgttg

SEQ ID NO: 67847 - DNA, 38 bp, Artificial Sequence
  primer
gtaaaacgacggccagtctcaaacgacgtctcatctgc

SEQ ID NO: 67848 - DNA, 21 bp, Artificial Sequence
  primer
ttctagagggcaggtttgctc

SEQ ID NO: 67849 - DNA, 39 bp, Artificial Sequence
  primer
gtaaaacgacggccagttcacactcacacgggtacagac

SEQ ID NO: 67850 - DNA, 21 bp, Artificial Sequence
  primer
acacagagtcacacagccacc

SEQ ID NO: 67851 - DNA, 38 bp, Artificial Sequence
  primer
gtaaaacgacggccagtgaagcaggagagcagtgtcag

SEQ ID NO: 67852 - DNA, 38 bp, Artificial Sequence
  primer
gtaaaacgacggccagtgcagagaaccctgaacctgac

SEQ ID NO: 67853 - DNA, 38 bp, Artificial Sequence
  primer
gtaaaacgacggccagtcaggctggttcagaaacaatg

SEQ ID NO: 67854 - DNA, 38 bp, Artificial Sequence
  primer
gtaaaacgacggccagtggaggatgagagcaggaactg

SEQ ID NO: 67855 - DNA, 22 bp, Artificial Sequence
  primer
aggcccaggataaatagaaacc

SEQ ID NO: 67856 - DNA, 40 bp, Artificial Sequence
  primer
gtaaaacgacggccagtctctttgtcagtcatccaagaaa

SEQ ID NO: 67857 - DNA, 38 bp, Artificial Sequence
  primer
gtaaaacgacggccagttgggagctcaatgtgaaacag

SEQ ID NO: 67858 - DNA, 39 bp, Artificial Sequence
  primer
gtaaaacgacggccagttccaatgtgtgggaactatctg

SEQ ID NO: 67859 - DNA, 21 bp, Artificial Sequence
  primer
tttacaggcatgggagaaagg

SEQ ID NO: 67860 - DNA, 21 bp, Artificial Sequence
  primer
ttctgtgaatgggtcagcaac

SEQ ID NO: 67861 - DNA, 24 bp, Artificial Sequence
  primer
tttctgggctatccatagtttgac

SEQ ID NO: 67862 - DNA, 22 bp, Artificial Sequence
  primer
tcatttcctgagtctttgaggg

SEQ ID NO: 67863 - DNA, 35 bp, Artificial Sequence
  primer
gtaaaacgacggccagtgggtgcctgtagtcccag

SEQ ID NO: 67864 - DNA, 44 bp, Artificial Sequence
  primer
gtaaaacgacggccagtaaagtgacgtaacaatgaattagtcaa

SEQ ID NO: 67865 - DNA, 36 bp, Artificial Sequence
  primer
gtaaaacgacggccagttgtagtacctgacggcggc

SEQ ID NO: 67866 - DNA, 20 bp, Artificial Sequence
  primer
gaactccttctcctccctgc

SEQ ID NO: 67867 - DNA, 21 bp, Artificial Sequence
  primer
ctggagatagaactctgcggg

SEQ ID NO: 67868 - DNA, 38 bp, Artificial Sequence
  primer
gtaaaacgacggccagtaccatgctgaggcctgtctac

SEQ ID NO: 67869 - DNA, 21 bp, Artificial Sequence
  primer
accatgctgaggcctgtctac

SEQ ID NO: 67870 - DNA, 39 bp, Artificial Sequence
  primer
gtaaaacgacggccagtggatgagtcaaggcttaaaggg

SEQ ID NO: 67871 - DNA, 38 bp, Artificial Sequence
  primer
gtaaaacgacggccagtaggcccgtttactctcatgtc

SEQ ID NO: 67872 - DNA, 21 bp, Artificial Sequence
  primer
aaggaggagaggctatgaggg

SEQ ID NO: 67873 - DNA, 37 bp, Artificial Sequence
  primer
gtaaaacgacggccagtgtgcacctttcacagcatcc

SEQ ID NO: 67874 - DNA, 21 bp, Artificial Sequence
  primer
ctccttgaactccaggctagg

SEQ ID NO: 67875 - DNA, 37 bp, Artificial Sequence
  primer
gtaaaacgacggccagtatccaaggctacccatgctc

SEQ ID NO: 67876 - DNA, 21 bp, Artificial Sequence
  primer
aaaggaagcagagtgtggagc

SEQ ID NO: 67877 - DNA, 20 bp, Artificial Sequence
  primer
acaggatctggccttggaac

SEQ ID NO: 67878 - DNA, 18 bp, Artificial Sequence
  primer
aactcgtgcatgctggga

SEQ ID NO: 67879 - DNA, 21 bp, Artificial Sequence
  primer
aaatcaatgctcagaaagcca

SEQ ID NO: 67880 - DNA, 21 bp, Artificial Sequence
  primer
ccacagaccctacacaactgc

SEQ ID NO: 67881 - DNA, 21 bp, Artificial Sequence
  primer
ataccagctgctctgcctgac

SEQ ID NO: 67882 - DNA, 21 bp, Artificial Sequence
  primer
ccttcccttaccctggacatc

SEQ ID NO: 67883 - DNA, 21 bp, Artificial Sequence
  primer
tgctcagtacccgaaaccttc

SEQ ID NO: 67884 - DNA, 19 bp, Artificial Sequence
  primer
gggtagggtagaggcaggc

SEQ ID NO: 67885 - DNA, 37 bp, Artificial Sequence
  primer
gtaaaacgacggccagtcaagtgaggtcctgctgtgg

SEQ ID NO: 67886 - DNA, 21 bp, Artificial Sequence
  primer
aggagaggctagaactggctg

SEQ ID NO: 67887 - DNA, 21 bp, Artificial Sequence
  primer
aggcagctaggatcacaggag

SEQ ID NO: 67888 - DNA, 21 bp, Artificial Sequence
  primer
atcagagcagccagacacctc

SEQ ID NO: 67889 - DNA, 38 bp, Artificial Sequence
  primer
gtaaaacgacggccagtggtaggagctgaccaggaacc

SEQ ID NO: 67890 - DNA, 21 bp, Artificial Sequence
  primer
tggtcttgatctgacctcgtg

SEQ ID NO: 67891 - DNA, 21 bp, Artificial Sequence
  primer
acaacgaggaagaggaagcag

SEQ ID NO: 67892 - DNA, 37 bp, Artificial Sequence
  primer
gtaaaacgacggccagtccaactctgtgctctcaccc

SEQ ID NO: 67893 - DNA, 21 bp, Artificial Sequence
  primer
acatagacctccacgagtccc

SEQ ID NO: 67894 - DNA, 21 bp, Artificial Sequence
  primer
gctccctaccctctagtcagc

SEQ ID NO: 67895 - DNA, 38 bp, Artificial Sequence
  primer
gtaaaacgacggccagtgagggctaaactggagggaac

SEQ ID NO: 67896 - DNA, 21 bp, Artificial Sequence
  primer
ggacagtagtggaccctttgc

SEQ ID NO: 67897 - DNA, 18 bp, Artificial Sequence
  primer
ttcccacctcccaagctc

SEQ ID NO: 67898 - DNA, 20 bp, Artificial Sequence
  primer
tttgacttgagggagggtcc

SEQ ID NO: 67899 - DNA, 38 bp, Artificial Sequence
  primer
gtaaaacgacggccagtcctgactgacagagcttgtgg

SEQ ID NO: 67900 - DNA, 38 bp, Artificial Sequence
  primer
gtaaaacgacggccagtcctaaggagatggcaatcagg

SEQ ID NO: 67901 - DNA, 20 bp, Artificial Sequence
  primer
gaagcaaggagacagcatgg

SEQ ID NO: 67902 - DNA, 18 bp, Artificial Sequence
  primer
gtgtgtcctcagctgccc

SEQ ID NO: 67903 - DNA, 21 bp, Artificial Sequence
  primer
tggaggcaaacatccaatctc

SEQ ID NO: 67904 - DNA, 21 bp, Artificial Sequence
  primer
aaataaaggcagctgctgtgg

SEQ ID NO: 67905 - DNA, 22 bp, Artificial Sequence
  primer
tggcagacatcaggtcataaag

SEQ ID NO: 67906 - DNA, 21 bp, Artificial Sequence
  primer
gcaggcttggtaatgcagaag

SEQ ID NO: 67907 - DNA, 39 bp, Artificial Sequence
  primer
gtaaaacgacggccagtgccagaatgcctttagtcactg

SEQ ID NO: 67908 - DNA, 43 bp, Artificial Sequence
  primer
gtaaaacgacggccagtgcgatttctacaatgttactaaccac

SEQ ID NO: 67909 - DNA, 38 bp, Artificial Sequence
  primer
gtaaaacgacggccagttctgaggccattgtaaactgc

SEQ ID NO: 67910 - DNA, 38 bp, Artificial Sequence
  primer
gtaaaacgacggccagtctggactcccagccttagttc

SEQ ID NO: 67911 - DNA, 26 bp, Artificial Sequence
  primer
tcaccagtagtaatttccagttaccc

SEQ ID NO: 67912 - DNA, 37 bp, Artificial Sequence
  primer
gtaaaacgacggccagttgtgtgtgtacacgccagtc

SEQ ID NO: 67913 - DNA, 39 bp, Artificial Sequence
  primer
gtaaaacgacggccagtccattgtaaagcaaggagcatc

SEQ ID NO: 67914 - DNA, 39 bp, Artificial Sequence
  primer
gtaaaacgacggccagttggtctaggttcctgtctgacc

SEQ ID NO: 67915 - DNA, 38 bp, Artificial Sequence
  primer
gtaaaacgacggccagttcagctgtgtcacaagtcctc

SEQ ID NO: 67916 - DNA, 20 bp, Artificial Sequence
  primer
caaagccaaaggccagaatc

SEQ ID NO: 67917 - DNA, 21 bp, Artificial Sequence
  primer
atggagtcacccaaattccac

SEQ ID NO: 67918 - DNA, 38 bp, Artificial Sequence
  primer
gtaaaacgacggccagttaatgcttggcacacaggaag

SEQ ID NO: 67919 - DNA, 43 bp, Artificial Sequence
  primer
gtaaaacgacggccagttctagggaatgcatcagagtatttag

SEQ ID NO: 67920 - DNA, 20 bp, Artificial Sequence
  primer
ccttggccatgttgtctttg

SEQ ID NO: 67921 - DNA, 41 bp, Artificial Sequence
  primer
gtaaaacgacggccagtcagaaatgttgcaatttccttctc

SEQ ID NO: 67922 - DNA, 21 bp, Artificial Sequence
  primer
aacagccactgaccaagaagg

SEQ ID NO: 67923 - DNA, 39 bp, Artificial Sequence
  primer
gtaaaacgacggccagttctatttcatttctggcttggc

SEQ ID NO: 67924 - DNA, 21 bp, Artificial Sequence
  primer
cagggaatggaatcaactgtg

SEQ ID NO: 67925 - DNA, 21 bp, Artificial Sequence
  primer
ttcctcgacacatacaccctc

SEQ ID NO: 67926 - DNA, 38 bp, Artificial Sequence
  primer
gtaaaacgacggccagtagaaggctggagtgagacagg

SEQ ID NO: 67927 - DNA, 39 bp, Artificial Sequence
  primer
gtaaaacgacggccagtaagtggacccatccaatgtatc

SEQ ID NO: 67928 - DNA, 20 bp, Artificial Sequence
  primer
cccagcattccttcaaagac

SEQ ID NO: 67929 - DNA, 38 bp, Artificial Sequence
  primer
gtaaaacgacggccagtggcacatcccaactacacatc

SEQ ID NO: 67930 - DNA, 23 bp, Artificial Sequence
  primer
caaacatttctgtgattcaatgg

SEQ ID NO: 67931 - DNA, 22 bp, Artificial Sequence
  primer
tctggaaaggcatttctttagg

SEQ ID NO: 67932 - DNA, 20 bp, Artificial Sequence
  primer
cccagcattccttcaaagac

SEQ ID NO: 67933 - DNA, 26 bp, Artificial Sequence
  primer
ggattattcagtatcaacgtttgaag

SEQ ID NO: 67934 - DNA, 21 bp, Artificial Sequence
  primer
cacgttgaggtacaggcagtc

SEQ ID NO: 67935 - DNA, 39 bp, Artificial Sequence
  primer
gtaaaacgacggccagtggtagttcatggacaccagcac

SEQ ID NO: 67936 - DNA, 21 bp, Artificial Sequence
  primer
ccaaacagcgtcactgatgtc

SEQ ID NO: 67937 - DNA, 20 bp, Artificial Sequence
  primer
cactagttacctgcaggccg

SEQ ID NO: 67938 - DNA, 38 bp, Artificial Sequence
  primer
gtaaaacgacggccagtcttctgggacttctgggaatg

SEQ ID NO: 67939 - DNA, 38 bp, Artificial Sequence
  primer
gtaaaacgacggccagttctgccgtgtagtttcgagag

SEQ ID NO: 67940 - DNA, 37 bp, Artificial Sequence
  primer
gtaaaacgacggccagttctgcctttgtgtgtcctcc

SEQ ID NO: 67941 - DNA, 20 bp, Artificial Sequence
  primer
aggaggagaagctggtggag

SEQ ID NO: 67942 - DNA, 38 bp, Artificial Sequence
  primer
gtaaaacgacggccagtgcccagccctgaaataaatag

SEQ ID NO: 67943 - DNA, 38 bp, Artificial Sequence
  primer
gtaaaacgacggccagtgaggaggaagggagcactagg

SEQ ID NO: 67944 - DNA, 18 bp, Artificial Sequence
  primer
agcgcgaacctcatcaac

SEQ ID NO: 67945 - DNA, 38 bp, Artificial Sequence
  primer
gtaaaacgacggccagttctgttctttactccaggccc

SEQ ID NO: 67946 - DNA, 21 bp, Artificial Sequence
  primer
taaaccacttggcttcatggg

SEQ ID NO: 67947 - DNA, 21 bp, Artificial Sequence
  primer
atggaggcttagcatgaaagg

SEQ ID NO: 67948 - DNA, 21 bp, Artificial Sequence
  primer
ctgcttaagcctaggaggtcg

SEQ ID NO: 67949 - DNA, 21 bp, Artificial Sequence
  primer
ctcatccatcatctcctctgg

SEQ ID NO: 67950 - DNA, 38 bp, Artificial Sequence
  primer
gtaaaacgacggccagtaggccttctttcgatcttcag

SEQ ID NO: 67951 - DNA, 21 bp, Artificial Sequence
  primer
caggttcaagatccttctggg

SEQ ID NO: 67952 - DNA, 21 bp, Artificial Sequence
  primer
gaacgagaacgtgaacgtgac

SEQ ID NO: 67953 - DNA, 39 bp, Artificial Sequence
  primer
gtaaaacgacggccagtcagaaatcatgacaggctctcc

SEQ ID NO: 67954 - DNA, 39 bp, Artificial Sequence
  primer
gtaaaacgacggccagtgcaggattaacaggtatccacc

SEQ ID NO: 67955 - DNA, 21 bp, Artificial Sequence
  primer
aaagaaccctagggagcgaag

SEQ ID NO: 67956 - DNA, 38 bp, Artificial Sequence
  primer
gtaaaacgacggccagtttaacccaccgtgtaagaggg

SEQ ID NO: 67957 - DNA, 39 bp, Artificial Sequence
  primer
gtaaaacgacggccagtgccattgagaatgaaattctgg

SEQ ID NO: 67958 - DNA, 19 bp, Artificial Sequence
  primer
ggatgaggctctgggacac

SEQ ID NO: 67959 - DNA, 38 bp, Artificial Sequence
  primer
gtaaaacgacggccagtaagtgtcagtcaacccaaccc

SEQ ID NO: 67960 - DNA, 21 bp, Artificial Sequence
  primer
attcaaagctttcagcgatcc

SEQ ID NO: 67961 - DNA, 21 bp, Artificial Sequence
  primer
atgtgaggccttctgcaagtc

SEQ ID NO: 67962 - DNA, 21 bp, Artificial Sequence
  primer
gaagggagaagatggagggtc

SEQ ID NO: 67963 - DNA, 20 bp, Artificial Sequence
  primer
taaaggaaccaaagccaggg

SEQ ID NO: 67964 - DNA, 35 bp, Artificial Sequence
  primer
gtaaaacgacggccagtgaccctctgtcccatccc

SEQ ID NO: 67965 - DNA, 38 bp, Artificial Sequence
  primer
gtaaaacgacggccagtttcagctgctatctgcgtgtc

SEQ ID NO: 67966 - DNA, 38 bp, Artificial Sequence
  primer
gtaaaacgacggccagtactgtgcctatccctctgtgg

SEQ ID NO: 67967 - DNA, 37 bp, Artificial Sequence
  primer
gtaaaacgacggccagtatcaccaacaaaccaatggc

SEQ ID NO: 67968 - DNA, 21 bp, Artificial Sequence
  primer
gtgatccacagagctgctgac

SEQ ID NO: 67969 - DNA, 38 bp, Artificial Sequence
  primer
gtaaaacgacggccagttctttcctcaggttacggtgg

SEQ ID NO: 67970 - DNA, 20 bp, Artificial Sequence
  primer
gtgtctaccacctggctccc

SEQ ID NO: 67971 - DNA, 38 bp, Artificial Sequence
  primer
gtaaaacgacggccagttgcttgtgcacatctgtcttg

SEQ ID NO: 67972 - DNA, 21 bp, Artificial Sequence
  primer
tccctgccaaataaacagctc

SEQ ID NO: 67973 - DNA, 20 bp, Artificial Sequence
  primer
gatgccactgctttcctctg

SEQ ID NO: 67974 - DNA, 21 bp, Artificial Sequence
  primer
actcctcagacgaagctgtcc

SEQ ID NO: 67975 - DNA, 38 bp, Artificial Sequence
  primer
gtaaaacgacggccagtacttggctctggctcaaactc

SEQ ID NO: 67976 - DNA, 20 bp, Artificial Sequence
  primer
caaactgcacacccaggaag

SEQ ID NO: 67977 - DNA, 38 bp, Artificial Sequence
  primer
gtaaaacgacggccagtcgctgtatttcctctatgccc

SEQ ID NO: 67978 - DNA, 19 bp, Artificial Sequence
  primer
acccaaaccgctgttcatc

SEQ ID NO: 67979 - DNA, 21 bp, Artificial Sequence
  primer
acagccacacagtgaggagag

SEQ ID NO: 67980 - DNA, 38 bp, Artificial Sequence
  primer
gtaaaacgacggccagtctcaagcagttctcccacctc

SEQ ID NO: 67981 - DNA, 21 bp, Artificial Sequence
  primer
gacatcaaccaggagccattc

SEQ ID NO: 67982 - DNA, 21 bp, Artificial Sequence
  primer
attgcagtgaggctgtgtctc

SEQ ID NO: 67983 - DNA, 37 bp, Artificial Sequence
  primer
gtaaaacgacggccagtgcaggacacagcatcgtctc

SEQ ID NO: 67984 - DNA, 21 bp, Artificial Sequence
  primer
atagtgacaaccttgaggccc

SEQ ID NO: 67985 - DNA, 21 bp, Artificial Sequence
  primer
gatgattacctggttcgcctc

SEQ ID NO: 67986 - DNA, 21 bp, Artificial Sequence
  primer
ctagacaccgagagggaccag

SEQ ID NO: 67987 - DNA, 38 bp, Artificial Sequence
  primer
gtaaaacgacggccagtgagttcaaggcaaatcaacgc

SEQ ID NO: 67988 - DNA, 38 bp, Artificial Sequence
  primer
gtaaaacgacggccagttttatgtgtccttcctctggc

SEQ ID NO: 67989 - DNA, 36 bp, Artificial Sequence
  primer
gtaaaacgacggccagtcttctagggccctgctgtg

SEQ ID NO: 67990 - DNA, 18 bp, Artificial Sequence
  primer
ccaactcccgacctcaag

SEQ ID NO: 67991 - DNA, 39 bp, Artificial Sequence
  primer
gtaaaacgacggccagtaatgtaacgtggctcctgtttc

SEQ ID NO: 67992 - DNA, 38 bp, Artificial Sequence
  primer
gtaaaacgacggccagtctgggtggtagcattacaggc

SEQ ID NO: 67993 - DNA, 38 bp, Artificial Sequence
  primer
gtaaaacgacggccagtcctggtgacagagcaagactc

SEQ ID NO: 67994 - DNA, 38 bp, Artificial Sequence
  primer
gtaaaacgacggccagtaaataaagcaggctccactgc

SEQ ID NO: 67995 - DNA, 38 bp, Artificial Sequence
  primer
gtaaaacgacggccagtttgtcagcaaactttaagggc

SEQ ID NO: 67996 - DNA, 19 bp, Artificial Sequence
  primer
gtgacgcttcacctcctcc

SEQ ID NO: 67997 - DNA, 42 bp, Artificial Sequence
  primer
gtaaaacgacggccagtgcattaatccaagtaagagctcagt

SEQ ID NO: 67998 - DNA, 21 bp, Artificial Sequence
  primer
aaaggaggagaaaccaaaggc

SEQ ID NO: 67999 - DNA, 38 bp, Artificial Sequence
  primer
gtaaaacgacggccagtaggccaaaggagagagaatgg

SEQ ID NO: 68000 - DNA, 40 bp, Artificial Sequence
  primer
gtaaaacgacggccagtctaggctgactttcagctttgtc

SEQ ID NO: 68001 - DNA, 41 bp, Artificial Sequence
  primer
gtaaaacgacggccagttttgcacatgaaataatgtactgc

SEQ ID NO: 68002 - DNA, 22 bp, Artificial Sequence
  primer
gggactggaactagaaacctgg

SEQ ID NO: 68003 - DNA, 27 bp, Artificial Sequence
  primer
tccatatactgcaatcataatatccaa

SEQ ID NO: 68004 - DNA, 39 bp, Artificial Sequence
  primer
gtaaaacgacggccagtttcacccattctctgctactcc

SEQ ID NO: 68005 - DNA, 22 bp, Artificial Sequence
  primer
ggcaatgacacccttagctttc

SEQ ID NO: 68006 - DNA, 21 bp, Artificial Sequence
  primer
aagtcagattcaaatgcaggc

SEQ ID NO: 68007 - DNA, 37 bp, Artificial Sequence
  primer
gtaaaacgacggccagtccactgggattgacaaatgg

SEQ ID NO: 68008 - DNA, 21 bp, Artificial Sequence
  primer
acctctcggaaacttgtggtc

SEQ ID NO: 68009 - DNA, 38 bp, Artificial Sequence
  primer
gtaaaacgacggccagtttgcattgctagagcacttgg

SEQ ID NO: 68010 - DNA, 21 bp, Artificial Sequence
  primer
gcagtgctcagattcttggtg

SEQ ID NO: 68011 - DNA, 39 bp, Artificial Sequence
  primer
gtaaaacgacggccagtaatttcctactagcgcattccc

SEQ ID NO: 68012 - DNA, 21 bp, Artificial Sequence
  primer
aaagcctggacgctgagtaac

SEQ ID NO: 68013 - DNA, 40 bp, Artificial Sequence
  primer
gtaaaacgacggccagtgactattatgcagtgtgcattcg

SEQ ID NO: 68014 - DNA, 23 bp, Artificial Sequence
  primer
catctgttacaaggtgacacagc

SEQ ID NO: 68015 - DNA, 43 bp, Artificial Sequence
  primer
gtaaaacgacggccagtaaagatcatactctaaaccacatccc

SEQ ID NO: 68016 - DNA, 21 bp, Artificial Sequence
  primer
ttatccctggaggctctatgc

SEQ ID NO: 68017 - DNA, 38 bp, Artificial Sequence
  primer
gtaaaacgacggccagttctgcagacaggacacaaagg

SEQ ID NO: 68018 - DNA, 21 bp, Artificial Sequence
  primer
tagtcaaagcaagagcatggg

SEQ ID NO: 68019 - DNA, 21 bp, Artificial Sequence
  primer
cctcagtgcacaaccaaagag

SEQ ID NO: 68020 - DNA, 21 bp, Artificial Sequence
  primer
gggtaggatggagctgtgaag

SEQ ID NO: 68021 - DNA, 21 bp, Artificial Sequence
  primer
taaagcaacaggatttgtgcc

SEQ ID NO: 68022 - DNA, 23 bp, Artificial Sequence
  primer
gcctcctaagtctaatgcagtcc

SEQ ID NO: 68023 - DNA, 21 bp, Artificial Sequence
  primer
tcagtgctcacttgctccatc

SEQ ID NO: 68024 - DNA, 20 bp, Artificial Sequence
  primer
cacaaccgggacaggtacac

SEQ ID NO: 68025 - DNA, 38 bp, Artificial Sequence
  primer
gtaaaacgacggccagtaaacacctccttctctgcctg

SEQ ID NO: 68026 - DNA, 22 bp, Artificial Sequence
  primer
ccaaagaggtgtgagaatttgg

SEQ ID NO: 68027 - DNA, 21 bp, Artificial Sequence
  primer
tggatatgtcatccagttccc

SEQ ID NO: 68028 - DNA, 37 bp, Artificial Sequence
  primer
gtaaaacgacggccagttccctcccagaagattcgag

SEQ ID NO: 68029 - DNA, 38 bp, Artificial Sequence
  primer
gtaaaacgacggccagtttcaccgcttctactcccaac

SEQ ID NO: 68030 - DNA, 38 bp, Artificial Sequence
  primer
gtaaaacgacggccagtgccctacagggaaaggcatag

SEQ ID NO: 68031 - DNA, 22 bp, Artificial Sequence
  primer
ggccctcagtgagtatttaggc

SEQ ID NO: 68032 - DNA, 38 bp, Artificial Sequence
  primer
gtaaaacgacggccagtgtgccacacagtaggcatagg

SEQ ID NO: 68033 - DNA, 38 bp, Artificial Sequence
  primer
gtaaaacgacggccagtcaggacgaagtgctgtactgg

SEQ ID NO: 68034 - DNA, 38 bp, Artificial Sequence
  primer
gtaaaacgacggccagttctaatgggcaagagtccctg

SEQ ID NO: 68035 - DNA, 21 bp, Artificial Sequence
  primer
ctggctaccacttggatgacc

SEQ ID NO: 68036 - DNA, 21 bp, Artificial Sequence
  primer
aggtgctgtgaggttgagaag

SEQ ID NO: 68037 - DNA, 21 bp, Artificial Sequence
  primer
gtgctcacttcctccaggttc

SEQ ID NO: 68038 - DNA, 38 bp, Artificial Sequence
  primer
gtaaaacgacggccagtctaatgtcctccctgcacctg

SEQ ID NO: 68039 - DNA, 21 bp, Artificial Sequence
  primer
ctagaaccaggcccaactcag

SEQ ID NO: 68040 - DNA, 20 bp, Artificial Sequence
  primer
tcctgggagaagctaccctg

SEQ ID NO: 68041 - DNA, 39 bp, Artificial Sequence
  primer
gtaaaacgacggccagtcaccatcttggaataggaagcc

SEQ ID NO: 68042 - DNA, 18 bp, Artificial Sequence
  primer
ggactccagcctggcaac

SEQ ID NO: 68043 - DNA, 21 bp, Artificial Sequence
  primer
gcgtttacaggcctcattagc

SEQ ID NO: 68044 - DNA, 22 bp, Artificial Sequence
  primer
cccaagtgtttgtggaagaaag

SEQ ID NO: 68045 - DNA, 21 bp, Artificial Sequence
  primer
ccagcttccaccctagtaacc

SEQ ID NO: 68046 - DNA, 37 bp, Artificial Sequence
  primer
gtaaaacgacggccagtagtttgaatttgctgccagg

SEQ ID NO: 68047 - DNA, 37 bp, Artificial Sequence
  primer
gtaaaacgacggccagtgaacagcttggacctgggag

SEQ ID NO: 68048 - DNA, 38 bp, Artificial Sequence
  primer
gtaaaacgacggccagtcagtgctagaagtcgccaaag

SEQ ID NO: 68049 - DNA, 21 bp, Artificial Sequence
  primer
caaggctcccaggaacaatag

SEQ ID NO: 68050 - DNA, 22 bp, Artificial Sequence
  primer
cccactgtgagaccatcaactg

SEQ ID NO: 68051 - DNA, 21 bp, Artificial Sequence
  primer
acaggcgaattgtatggtgtg

SEQ ID NO: 68052 - DNA, 43 bp, Artificial Sequence
  primer
gtaaaacgacggccagttgcactttagaatatcatcatctgtg

SEQ ID NO: 68053 - DNA, 20 bp, Artificial Sequence
  primer
gatcgtgccattacactccg

SEQ ID NO: 68054 - DNA, 41 bp, Artificial Sequence
  primer
gtaaaacgacggccagtgcagtgagcaacatacctgtctac

SEQ ID NO: 68055 - DNA, 21 bp, Artificial Sequence
  primer
atgtcatgtctgggatttgcc

SEQ ID NO: 68056 - DNA, 21 bp, Artificial Sequence
  primer
agcctggcaagagacagagag

SEQ ID NO: 68057 - DNA, 21 bp, Artificial Sequence
  primer
cctgggtaacaagagcgaaac

SEQ ID NO: 68058 - DNA, 22 bp, Artificial Sequence
  primer
caaaggccagtttaaaggtgtg

SEQ ID NO: 68059 - DNA, 37 bp, Artificial Sequence
  primer
gtaaaacgacggccagtacacacacccagactggtcc

SEQ ID NO: 68060 - DNA, 22 bp, Artificial Sequence
  primer
cagtcaactgcattaggaaggg

SEQ ID NO: 68061 - DNA, 39 bp, Artificial Sequence
  primer
gtaaaacgacggccagtcaggcatcaatacacttcctcc

SEQ ID NO: 68062 - DNA, 21 bp, Artificial Sequence
  primer
ctcctcctgtgtggaggacac

SEQ ID NO: 68063 - DNA, 21 bp, Artificial Sequence
  primer
tagttaatgccactgcccaaa

SEQ ID NO: 68064 - DNA, 20 bp, Artificial Sequence
  primer
acaggctgttcctcgaagtg

SEQ ID NO: 68065 - DNA, 20 bp, Artificial Sequence
  primer
accaagcacggtgatgaaag

SEQ ID NO: 68066 - DNA, 38 bp, Artificial Sequence
  primer
gtaaaacgacggccagtaattcccactcaccaaagcag

SEQ ID NO: 68067 - DNA, 38 bp, Artificial Sequence
  primer
gtaaaacgacggccagtccaagtctggccgacattatc

SEQ ID NO: 68068 - DNA, 38 bp, Artificial Sequence
  primer
gtaaaacgacggccagttcttcagttgggcattctacc

SEQ ID NO: 68069 - DNA, 21 bp, Artificial Sequence
  primer
aacaggaatatgccagtgtgc

SEQ ID NO: 68070 - DNA, 21 bp, Artificial Sequence
  primer
ttacaggcccagttatcaccc

SEQ ID NO: 68071 - DNA, 41 bp, Artificial Sequence
  primer
gtaaaacgacggccagtagttatctctggacctcatccaac

SEQ ID NO: 68072 - DNA, 21 bp, Artificial Sequence
  primer
aaccgtgagtcaggatggaag

SEQ ID NO: 68073 - DNA, 38 bp, Artificial Sequence
  primer
gtaaaacgacggccagttactcatgccttcttgccatc

SEQ ID NO: 68074 - DNA, 22 bp, Artificial Sequence
  primer
tccttaagacagcttgaatggc

SEQ ID NO: 68075 - DNA, 37 bp, Artificial Sequence
  primer
gtaaaacgacggccagttcaagtgatcaccgtacccg

SEQ ID NO: 68076 - DNA, 39 bp, Artificial Sequence
  primer
gtaaaacgacggccagtgaagtggccatggtactttcag

SEQ ID NO: 68077 - DNA, 41 bp, Artificial Sequence
  primer
gtaaaacgacggccagttggtttaacaggtctctttcagtg

SEQ ID NO: 68078 - DNA, 20 bp, Artificial Sequence
  primer
cagagccctggaccagtttc

SEQ ID NO: 68079 - DNA, 38 bp, Artificial Sequence
  primer
gtaaaacgacggccagtagtggaatttcaagggcaaag

SEQ ID NO: 68080 - DNA, 21 bp, Artificial Sequence
  primer
tcccaacaagtcttccctttg

SEQ ID NO: 68081 - DNA, 38 bp, Artificial Sequence
  primer
gtaaaacgacggccagtcctagatgtaaatgggccctc

SEQ ID NO: 68082 - DNA, 21 bp, Artificial Sequence
  primer
ggacctcaaagccagtgctac

SEQ ID NO: 68083 - DNA, 38 bp, Artificial Sequence
  primer
gtaaaacgacggccagtagcaccaagtctgtccaactg

SEQ ID NO: 68084 - DNA, 38 bp, Artificial Sequence
  primer
gtaaaacgacggccagtaagctctatggaggacccagg

SEQ ID NO: 68085 - DNA, 37 bp, Artificial Sequence
  primer
gtaaaacgacggccagtactctggctctggcagaagg

SEQ ID NO: 68086 - DNA, 20 bp, Artificial Sequence
  primer
gatgctgaaagctgggagag

SEQ ID NO: 68087 - DNA, 38 bp, Artificial Sequence
  primer
gtaaaacgacggccagtaatagcacttcgcaaagcctg

SEQ ID NO: 68088 - DNA, 38 bp, Artificial Sequence
  primer
gtaaaacgacggccagtcaatccaaaggccctagtgtg

SEQ ID NO: 68089 - DNA, 37 bp, Artificial Sequence
  primer
gtaaaacgacggccagttggaagtgaaatgagggcag

SEQ ID NO: 68090 - DNA, 20 bp, Artificial Sequence
  primer
gttgctgctctgcccattag

SEQ ID NO: 68091 - DNA, 21 bp, Artificial Sequence
  primer
aagtgattgccaacctaacgg

SEQ ID NO: 68092 - DNA, 20 bp, Artificial Sequence
  primer
catgtacctgcccattgacc

SEQ ID NO: 68093 - DNA, 22 bp, Artificial Sequence
  primer
cagaaatcccattctgctaacg

SEQ ID NO: 68094 - DNA, 38 bp, Artificial Sequence
  primer
gtaaaacgacggccagtgtttctctgcctcttggttgg

SEQ ID NO: 68095 - DNA, 21 bp, Artificial Sequence
  primer
ggaaggcctcagtgacaattc

SEQ ID NO: 68096 - DNA, 21 bp, Artificial Sequence
  primer
tgtatgtggacaggcctcttg

SEQ ID NO: 68097 - DNA, 20 bp, Artificial Sequence
  primer
agtgtccctggtccactcac

SEQ ID NO: 68098 - DNA, 38 bp, Artificial Sequence
  primer
gtaaaacgacggccagtcgcatttgagtctaagagggc

SEQ ID NO: 68099 - DNA, 19 bp, Artificial Sequence
  primer
acacctggcctacgtggag

SEQ ID NO: 68100 - DNA, 21 bp, Artificial Sequence
  primer
caactcccagtaaccaaacgg

SEQ ID NO: 68101 - DNA, 38 bp, Artificial Sequence
  primer
gtaaaacgacggccagtctctgtcctcgcaaatcaaag

SEQ ID NO: 68102 - DNA, 37 bp, Artificial Sequence
  primer
gtaaaacgacggccagtaggctggatttggtcctcag

SEQ ID NO: 68103 - DNA, 38 bp, Artificial Sequence
  primer
gtaaaacgacggccagtgaacagctgaatcagtgaggc

SEQ ID NO: 68104 - DNA, 21 bp, Artificial Sequence
  primer
aattcatctgtggagtcagcg

SEQ ID NO: 68105 - DNA, 38 bp, Artificial Sequence
  primer
gtaaaacgacggccagtcaggatgttcaaactcccagg

SEQ ID NO: 68106 - DNA, 20 bp, Artificial Sequence
  primer
ctcagtgagtcccgtggaag

SEQ ID NO: 68107 - DNA, 21 bp, Artificial Sequence
  primer
gtgtgtcagctctgggtgatg

SEQ ID NO: 68108 - DNA, 38 bp, Artificial Sequence
  primer
gtaaaacgacggccagttttccagaagacaccagaccc

SEQ ID NO: 68109 - DNA, 22 bp, Artificial Sequence
  primer
gaatcagaagttgaggtccacg

SEQ ID NO: 68110 - DNA, 21 bp, Artificial Sequence
  primer
aggcaatctacgacattcctg

SEQ ID NO: 68111 - DNA, 20 bp, Artificial Sequence
  primer
agacatgcagcccatgagac

SEQ ID NO: 68112 - DNA, 38 bp, Artificial Sequence
  primer
gtaaaacgacggccagttaccaactgtggctccagaag

SEQ ID NO: 68113 - DNA, 21 bp, Artificial Sequence
  primer
gaacaattccatctgcgacac

SEQ ID NO: 68114 - DNA, 20 bp, Artificial Sequence
  primer
aaatgacatcctgtgcctgc

SEQ ID NO: 68115 - DNA, 38 bp, Artificial Sequence
  primer
gtaaaacgacggccagtgaggctggtaaggaaggaacc

SEQ ID NO: 68116 - DNA, 42 bp, Artificial Sequence
  primer
gtaaaacgacggccagtttcagctacaacaaatatcaagtgc

SEQ ID NO: 68117 - DNA, 38 bp, Artificial Sequence
  primer
gtaaaacgacggccagtgagtgagttatgccaaggctg

SEQ ID NO: 68118 - DNA, 37 bp, Artificial Sequence
  primer
gtaaaacgacggccagtactctagccgcttccaggag

SEQ ID NO: 68119 - DNA, 38 bp, Artificial Sequence
  primer
gtaaaacgacggccagttgtgttgggactgtcctttcc

SEQ ID NO: 68120 - DNA, 20 bp, Artificial Sequence
  primer
aaccctccaattcgcctatg

SEQ ID NO: 68121 - DNA, 40 bp, Artificial Sequence
  primer
gtaaaacgacggccagtgaaactgatagaagattggcagg

SEQ ID NO: 68122 - DNA, 20 bp, Artificial Sequence
  primer
ggactacagccacatgccac

SEQ ID NO: 68123 - DNA, 37 bp, Artificial Sequence
  primer
gtaaaacgacggccagtacaacctacagcgcacaagc

SEQ ID NO: 68124 - DNA, 21 bp, Artificial Sequence
  primer
caacttcaagtccaaggacgg

SEQ ID NO: 68125 - DNA, 38 bp, Artificial Sequence
  primer
gtaaaacgacggccagtttaggcagctcacagctcttg

SEQ ID NO: 68126 - DNA, 45 bp, Artificial Sequence
  primer
gtaaaacgacggccagtcatgctattaacaactagactttccctt

SEQ ID NO: 68127 - DNA, 20 bp, Artificial Sequence
  primer
ctctgcagcacctgacacac

SEQ ID NO: 68128 - DNA, 22 bp, Artificial Sequence
  primer
gtcaactgaacaaagagctggg

SEQ ID NO: 68129 - DNA, 22 bp, Artificial Sequence
  primer
caagtctggttaatcctttcgc

SEQ ID NO: 68130 - DNA, 38 bp, Artificial Sequence
  primer
gtaaaacgacggccagtcaacttcaagtccaaggacgg

SEQ ID NO: 68131 - DNA, 22 bp, Artificial Sequence
  primer
caagtctggttaatcctttcgc

SEQ ID NO: 68132 - DNA, 21 bp, Artificial Sequence
  primer
ctaaaccagctgttccttccc

SEQ ID NO: 68133 - DNA, 38 bp, Artificial Sequence
  primer
gtaaaacgacggccagtacagcaatatcatgggcacag

SEQ ID NO: 68134 - DNA, 21 bp, Artificial Sequence
  primer
tcctagggctttgttccagac

SEQ ID NO: 68135 - DNA, 38 bp, Artificial Sequence
  primer
gtaaaacgacggccagtttcagcagctgtagagcgaag

SEQ ID NO: 68136 - DNA, 21 bp, Artificial Sequence
  primer
gacattccagacggtctccag

SEQ ID NO: 68137 - DNA, 21 bp, Artificial Sequence
  primer
acggtatcaggcactgtgttc

SEQ ID NO: 68138 - DNA, 39 bp, Artificial Sequence
  primer
gtaaaacgacggccagtgagagggaagtgtgtgagaagc

SEQ ID NO: 68139 - DNA, 21 bp, Artificial Sequence
  primer
tagacatccagtgccatttgc

SEQ ID NO: 68140 - DNA, 21 bp, Artificial Sequence
  primer
gaaattcctgagggtcgacag

SEQ ID NO: 68141 - DNA, 38 bp, Artificial Sequence
  primer
gtaaaacgacggccagtctcttgagatgcgtggatgtg

SEQ ID NO: 68142 - DNA, 21 bp, Artificial Sequence
  primer
taaacatcaggcatgggaatg

SEQ ID NO: 68143 - DNA, 38 bp, Artificial Sequence
  primer
gtaaaacgacggccagtaaggtcactaggtaaggcggc

SEQ ID NO: 68144 - DNA, 20 bp, Artificial Sequence
  primer
agaagtcccagggtcagctc

SEQ ID NO: 68145 - DNA, 21 bp, Artificial Sequence
  primer
gagaccctcaaacagcaggag

SEQ ID NO: 68146 - DNA, 19 bp, Artificial Sequence
  primer
aaagcctgcctgtgagcag

SEQ ID NO: 68147 - DNA, 38 bp, Artificial Sequence
  primer
gtaaaacgacggccagttctgaagatgtgtgtcagggc

SEQ ID NO: 68148 - DNA, 38 bp, Artificial Sequence
  primer
gtaaaacgacggccagtagtctctctcccaaggcaaac

SEQ ID NO: 68149 - DNA, 38 bp, Artificial Sequence
  primer
gtaaaacgacggccagtactaccttgggtgacagtggg

SEQ ID NO: 68150 - DNA, 21 bp, Artificial Sequence
  primer
cacactggaagtcacacatgc

SEQ ID NO: 68151 - DNA, 21 bp, Artificial Sequence
  primer
aaccttcccatccattattcg

SEQ ID NO: 68152 - DNA, 21 bp, Artificial Sequence
  primer
cttcctcgattgctccctatc

SEQ ID NO: 68153 - DNA, 38 bp, Artificial Sequence
  primer
gtaaaacgacggccagtgcctgatgaactcctcttccc

SEQ ID NO: 68154 - DNA, 21 bp, Artificial Sequence
  primer
ctaagatttgggttccctccc

SEQ ID NO: 68155 - DNA, 21 bp, Artificial Sequence
  primer
ggagggagacttggtgctaac

SEQ ID NO: 68156 - DNA, 21 bp, Artificial Sequence
  primer
ctcttcccaaacacacaaagc

SEQ ID NO: 68157 - DNA, 22 bp, Artificial Sequence
  primer
aaagacttcgttgtcttcagcc

SEQ ID NO: 68158 - DNA, 21 bp, Artificial Sequence
  primer
gctccttactgctgtgcaatg

SEQ ID NO: 68159 - DNA, 38 bp, Artificial Sequence
  primer
gtaaaacgacggccagtaggctcctgcaaacagtatgg

SEQ ID NO: 68160 - DNA, 38 bp, Artificial Sequence
  primer
gtaaaacgacggccagtagaactgctcggaaggtatgc

SEQ ID NO: 68161 - DNA, 21 bp, Artificial Sequence
  primer
tggtttcttaccgggcaatag

SEQ ID NO: 68162 - DNA, 38 bp, Artificial Sequence
  primer
gtaaaacgacggccagtcttctcccgtctttccctttc

SEQ ID NO: 68163 - DNA, 21 bp, Artificial Sequence
  primer
gtcttggcagaaagaggtgtg

SEQ ID NO: 68164 - DNA, 38 bp, Artificial Sequence
  primer
gtaaaacgacggccagttggacctttccctatgctctg

SEQ ID NO: 68165 - DNA, 21 bp, Artificial Sequence
  primer
aaacctgacgcttgccttatc

SEQ ID NO: 68166 - DNA, 35 bp, Artificial Sequence
  primer
gtaaaacgacggccagtttacaggtgcccaccacc

SEQ ID NO: 68167 - DNA, 38 bp, Artificial Sequence
  primer
gtaaaacgacggccagttggctacttgtcaagccaaag

SEQ ID NO: 68168 - DNA, 38 bp, Artificial Sequence
  primer
gtaaaacgacggccagtacaactgttgagtagcctgcc

SEQ ID NO: 68169 - DNA, 38 bp, Artificial Sequence
  primer
gtaaaacgacggccagtatcttgtgtcttggccctcac

SEQ ID NO: 68170 - DNA, 25 bp, Artificial Sequence
  primer
ggaagttgtgaattacgtttcaatg

SEQ ID NO: 68171 - DNA, 20 bp, Artificial Sequence
  primer
agaatggaagctggtgcaag

SEQ ID NO: 68172 - DNA, 39 bp, Artificial Sequence
  primer
gtaaaacgacggccagtgcctaccacgtacaaggagatg

SEQ ID NO: 68173 - DNA, 21 bp, Artificial Sequence
  primer
acaggcacacaacccttaacc

SEQ ID NO: 68174 - DNA, 39 bp, Artificial Sequence
  primer
gtaaaacgacggccagtggccaaagtatgttctcaaagc

SEQ ID NO: 68175 - DNA, 20 bp, Artificial Sequence
  primer
acctccttgtgtgggtccat

SEQ ID NO: 68176 - DNA, 21 bp, Artificial Sequence
  primer
ggtactccggactcaggaagg

SEQ ID NO: 68177 - DNA, 21 bp, Artificial Sequence
  primer
ggtagagggcaagtcaggttg

SEQ ID NO: 68178 - DNA, 21 bp, Artificial Sequence
  primer
gaggacagtcttgcttctcgg

SEQ ID NO: 68179 - DNA, 21 bp, Artificial Sequence
  primer
gaagttctccaggcgactcag

SEQ ID NO: 68180 - DNA, 38 bp, Artificial Sequence
  primer
gtaaaacgacggccagtgaggtgttgataccggtgttg

SEQ ID NO: 68181 - DNA, 38 bp, Artificial Sequence
  primer
gtaaaacgacggccagttgcaaggatagcattcagcag

SEQ ID NO: 68182 - DNA, 38 bp, Artificial Sequence
  primer
gtaaaacgacggccagtgctcttcctcacctaaatcgc

SEQ ID NO: 68183 - DNA, 38 bp, Artificial Sequence
  primer
gtaaaacgacggccagtttctgactcccacctgtcatc

SEQ ID NO: 68184 - DNA, 37 bp, Artificial Sequence
  primer
gtaaaacgacggccagtaccagcacagctacagctcc

SEQ ID NO: 68185 - DNA, 38 bp, Artificial Sequence
  primer
gtaaaacgacggccagtcacacaggcgcacagtaagtc

SEQ ID NO: 68186 - DNA, 21 bp, Artificial Sequence
  primer
ctctggaggaaaccacgaaag

SEQ ID NO: 68187 - DNA, 19 bp, Artificial Sequence
  primer
ggagtcttgcagccacttg

SEQ ID NO: 68188 - DNA, 19 bp, Artificial Sequence
  primer
accgctgcacctcaaagac

SEQ ID NO: 68189 - DNA, 21 bp, Artificial Sequence
  primer
gtggagatagtggagcttggg

SEQ ID NO: 68190 - DNA, 21 bp, Artificial Sequence
  primer
cggttggaaataccaaggaag

SEQ ID NO: 68191 - DNA, 21 bp, Artificial Sequence
  primer
tttctcaggagtgaagggctc

SEQ ID NO: 68192 - DNA, 21 bp, Artificial Sequence
  primer
gggtctgttgagaaccaggtc

SEQ ID NO: 68193 - DNA, 37 bp, Artificial Sequence
  primer
gtaaaacgacggccagtgagggttatccctgctgacc

SEQ ID NO: 68194 - DNA, 38 bp, Artificial Sequence
  primer
gtaaaacgacggccagtgtacgagctcatggtgtggtg

SEQ ID NO: 68195 - DNA, 21 bp, Artificial Sequence
  primer
aaggatgactctcctggaacc

SEQ ID NO: 68196 - DNA, 38 bp, Artificial Sequence
  primer
gtaaaacgacggccagttgtaaacagctgtctgctggc

SEQ ID NO: 68197 - DNA, 38 bp, Artificial Sequence
  primer
gtaaaacgacggccagtatgagctcctggatgttctcc

SEQ ID NO: 68198 - DNA, 38 bp, Artificial Sequence
  primer
gtaaaacgacggccagtgatctggaggctgaagctagg

SEQ ID NO: 68199 - DNA, 21 bp, Artificial Sequence
  primer
agtggactggtaatgcccttc

SEQ ID NO: 68200 - DNA, 20 bp, Artificial Sequence
  primer
gcacaccagaagtccatgtg

SEQ ID NO: 68201 - DNA, 21 bp, Artificial Sequence
  primer
ttggagagaggcaggagattc

SEQ ID NO: 68202 - DNA, 38 bp, Artificial Sequence
  primer
gtaaaacgacggccagtaggactggaggaatggaggag

SEQ ID NO: 68203 - DNA, 21 bp, Artificial Sequence
  primer
cgagtaacagacccagaaggg

SEQ ID NO: 68204 - DNA, 38 bp, Artificial Sequence
  primer
gtaaaacgacggccagtggaggctggactcctagtttg

SEQ ID NO: 68205 - DNA, 38 bp, Artificial Sequence
  primer
gtaaaacgacggccagtagaaacggtggcactcactac

SEQ ID NO: 68206 - DNA, 22 bp, Artificial Sequence
  primer
aatcatcactgttgtcgtcagg

SEQ ID NO: 68207 - DNA, 38 bp, Artificial Sequence
  primer
gtaaaacgacggccagtacacaaatcttctgctggcac

SEQ ID NO: 68208 - DNA, 21 bp, Artificial Sequence
  primer
tttccctgattgttccaccac

SEQ ID NO: 68209 - DNA, 38 bp, Artificial Sequence
  primer
gtaaaacgacggccagtgaaatggcacagggttgaaag

SEQ ID NO: 68210 - DNA, 38 bp, Artificial Sequence
  primer
gtaaaacgacggccagtcaaggacagaaaccttgtccc

SEQ ID NO: 68211 - DNA, 38 bp, Artificial Sequence
  primer
gtaaaacgacggccagtcatctcccaaccttaactgcc

SEQ ID NO: 68212 - DNA, 38 bp, Artificial Sequence
  primer
gtaaaacgacggccagttcacagggatggtgagacatc

SEQ ID NO: 68213 - DNA, 38 bp, Artificial Sequence
  primer
gtaaaacgacggccagttcctcttcagttcagacagcc

SEQ ID NO: 68214 - DNA, 38 bp, Artificial Sequence
  primer
gtaaaacgacggccagtcattgccttgtaattcctgcc

SEQ ID NO: 68215 - DNA, 21 bp, Artificial Sequence
  primer
ctggtcttccttcttcaaggc

SEQ ID NO: 68216 - DNA, 21 bp, Artificial Sequence
  primer
ctcaagctcactcaaaggctg

SEQ ID NO: 68217 - DNA, 38 bp, Artificial Sequence
  primer
gtaaaacgacggccagtttgtttagctttcaggctccc

SEQ ID NO: 68218 - DNA, 21 bp, Artificial Sequence
  primer
gttccttgattctttcctggg

SEQ ID NO: 68219 - DNA, 21 bp, Artificial Sequence
  primer
atcctaatgctcaggcagagg

SEQ ID NO: 68220 - DNA, 38 bp, Artificial Sequence
  primer
gtaaaacgacggccagtgctcaccttcagcatgttcag

SEQ ID NO: 68221 - DNA, 22 bp, Artificial Sequence
  primer
catgcctcttggtatgattgtg

SEQ ID NO: 68222 - DNA, 22 bp, Artificial Sequence
  primer
catgcctcttggtatgattgtg

SEQ ID NO: 68223 - DNA, 38 bp, Artificial Sequence
  primer
gtaaaacgacggccagtggctatcacattcaacagggc

SEQ ID NO: 68224 - DNA, 39 bp, Artificial Sequence
  primer
gtaaaacgacggccagtggaccgactctgggaaagttac

SEQ ID NO: 68225 - DNA, 38 bp, Artificial Sequence
  primer
gtaaaacgacggccagtacactctggagaaaccttccg

SEQ ID NO: 68226 - DNA, 24 bp, Artificial Sequence
  primer
tggtctctagcagaagttaggctc

SEQ ID NO: 68227 - DNA, 22 bp, Artificial Sequence
  primer
ctctgtcatatccagcacaagg

SEQ ID NO: 68228 - DNA, 38 bp, Artificial Sequence
  primer
gtaaaacgacggccagttctgctctctttcatgggttg

SEQ ID NO: 68229 - DNA, 21 bp, Artificial Sequence
  primer
aagatcttcaggtgctggagg

SEQ ID NO: 68230 - DNA, 38 bp, Artificial Sequence
  primer
gtaaaacgacggccagtttgaaccgcttccttctcttc

SEQ ID NO: 68231 - DNA, 21 bp, Artificial Sequence
  primer
ggttggcgattaggttcaaag

SEQ ID NO: 68232 - DNA, 23 bp, Artificial Sequence
  primer
acgccacacttaccttcaataac

SEQ ID NO: 68233 - DNA, 38 bp, Artificial Sequence
  primer
gtaaaacgacggccagtcatacagatggcacatggcac

SEQ ID NO: 68234 - DNA, 39 bp, Artificial Sequence
  primer
gtaaaacgacggccagtctcccttaccttcatctctccc

SEQ ID NO: 68235 - DNA, 21 bp, Artificial Sequence
  primer
actgcccagagggtagattcc

SEQ ID NO: 68236 - DNA, 21 bp, Artificial Sequence
  primer
tcagttgcaggaggtgttctc

SEQ ID NO: 68237 - DNA, 22 bp, Artificial Sequence
  primer
aatggctttattgagctgttgg

SEQ ID NO: 68238 - DNA, 39 bp, Artificial Sequence
  primer
gtaaaacgacggccagttggcagctgcacagtagataag

SEQ ID NO: 68239 - DNA, 38 bp, Artificial Sequence
  primer
gtaaaacgacggccagtaggcgtctcaaacttccaatc

SEQ ID NO: 68240 - DNA, 39 bp, Artificial Sequence
  primer
gtaaaacgacggccagtcccaagtctcaccatatcttcg

SEQ ID NO: 68241 - DNA, 21 bp, Artificial Sequence
  primer
atcctctcatttcagccaagc

SEQ ID NO: 68242 - DNA, 21 bp, Artificial Sequence
  primer
acgcttccttccctacacttg

SEQ ID NO: 68243 - DNA, 21 bp, Artificial Sequence
  primer
gctgtgcttgccctttacttc

SEQ ID NO: 68244 - DNA, 38 bp, Artificial Sequence
  primer
gtaaaacgacggccagtaagaggttcaagcctcactgc

SEQ ID NO: 68245 - DNA, 29 bp, Artificial Sequence
  primer
ggcatcttaacaatttataactctggatt

SEQ ID NO: 68246 - DNA, 44 bp, Artificial Sequence
  primer
gtaaaacgacggccagttgaaagtatacctagagggacctgttt

SEQ ID NO: 68247 - DNA, 42 bp, Artificial Sequence
  primer
gtaaaacgacggccagttgcctactacaaacagactctgagg

SEQ ID NO: 68248 - DNA, 22 bp, Artificial Sequence
  primer
aaccatcgctctcgcaatatac

SEQ ID NO: 68249 - DNA, 27 bp, Artificial Sequence
  primer
gaagctgaaattaagttgagtgcttag

SEQ ID NO: 68250 - DNA, 21 bp, Artificial Sequence
  primer
tctcctgacctcatgatccac

SEQ ID NO: 68251 - DNA, 23 bp, Artificial Sequence
  primer
ccattattctgcctcacaaacac

SEQ ID NO: 68252 - DNA, 41 bp, Artificial Sequence
  primer
gtaaaacgacggccagtttctaaagcaagaaagtgaagcac

SEQ ID NO: 68253 - DNA, 25 bp, Artificial Sequence
  primer
aagatttatattattcagcgcctcc

SEQ ID NO: 68254 - DNA, 44 bp, Artificial Sequence
  primer
gtaaaacgacggccagtaagtaacagataggaagagttctcgga

SEQ ID NO: 68255 - DNA, 38 bp, Artificial Sequence
  primer
gtaaaacgacggccagttgtgtagcaaggcttgaatgg

SEQ ID NO: 68256 - DNA, 37 bp, Artificial Sequence
  primer
gtaaaacgacggccagtagtttgccttgcagcttgag

SEQ ID NO: 68257 - DNA, 38 bp, Artificial Sequence
  primer
gtaaaacgacggccagtacagaagctatgagcggcttc

SEQ ID NO: 68258 - DNA, 20 bp, Artificial Sequence
  primer
tttccatttggctgcatttc

SEQ ID NO: 68259 - DNA, 38 bp, Artificial Sequence
  primer
gtaaaacgacggccagtagaagctatgagcggcttctg

SEQ ID NO: 68260 - DNA, 23 bp, Artificial Sequence
  primer
ccatacttaacaggagtcatcgg

SEQ ID NO: 68261 - DNA, 21 bp, Artificial Sequence
  primer
tgaatctcaaatccttcaggg

SEQ ID NO: 68262 - DNA, 24 bp, Artificial Sequence
  primer
tgaaccacagattacatctcaacc

SEQ ID NO: 68263 - DNA, 26 bp, Artificial Sequence
  primer
aggcatttgaagttagaaataccaag

SEQ ID NO: 68264 - DNA, 23 bp, Artificial Sequence
  primer
gcaatgctaacaaatctacaggg

SEQ ID NO: 68265 - DNA, 38 bp, Artificial Sequence
  primer
gtaaaacgacggccagtactcaaacaggcgtgcatttc

SEQ ID NO: 68266 - DNA, 25 bp, Artificial Sequence
  primer
ccttatgatcatggtggtgatattc

SEQ ID NO: 68267 - DNA, 38 bp, Artificial Sequence
  primer
gtaaaacgacggccagttttccaaaggtaatgcgaatg

SEQ ID NO: 68268 - DNA, 21 bp, Artificial Sequence
  primer
ttctccaaacccagaaagctc

SEQ ID NO: 68269 - DNA, 24 bp, Artificial Sequence
  primer
tccaaagtttgaactaatggaacc

SEQ ID NO: 68270 - DNA, 21 bp, Artificial Sequence
  primer
tttagcaagatgcaggtgtcc

SEQ ID NO: 68271 - DNA, 41 bp, Artificial Sequence
  primer
gtaaaacgacggccagtcaaacatattgaagagcctaatgc

SEQ ID NO: 68272 - DNA, 43 bp, Artificial Sequence
  primer
gtaaaacgacggccagtttctaacagttcaacaaaggcttaaa

SEQ ID NO: 68273 - DNA, 39 bp, Artificial Sequence
  primer
gtaaaacgacggccagtaagtcgcttaaagaaagtcggg

SEQ ID NO: 68274 - DNA, 38 bp, Artificial Sequence
  primer
gtaaaacgacggccagtagctttactttcccatgctgc

SEQ ID NO: 68275 - DNA, 21 bp, Artificial Sequence
  primer
gcatgttgcgattctacttgg

SEQ ID NO: 68276 - DNA, 21 bp, Artificial Sequence
  primer
atgcaagagacaggaacccag

SEQ ID NO: 68277 - DNA, 37 bp, Artificial Sequence
  primer
gtaaaacgacggccagtaagtgttggaatgctggacg

SEQ ID NO: 68278 - DNA, 21 bp, Artificial Sequence
  primer
cctgacgcatgtcattgaaac

SEQ ID NO: 68279 - DNA, 40 bp, Artificial Sequence
  primer
gtaaaacgacggccagtaagaacactgtcctcttgggaag

SEQ ID NO: 68280 - DNA, 21 bp, Artificial Sequence
  primer
accagtggccaagaattgaag

SEQ ID NO: 68281 - DNA, 21 bp, Artificial Sequence
  primer
accagtggccaagaattgaag

SEQ ID NO: 68282 - DNA, 21 bp, Artificial Sequence
  primer
ctccagcctttaacgtgtgtg

SEQ ID NO: 68283 - DNA, 21 bp, Artificial Sequence
  primer
agactctgcaggaaatgaggg

SEQ ID NO: 68284 - DNA, 38 bp, Artificial Sequence
  primer
gtaaaacgacggccagtttaaagtgacgctcaagcagc

SEQ ID NO: 68285 - DNA, 22 bp, Artificial Sequence
  primer
gcctgaagagatggttagaagg

SEQ ID NO: 68286 - DNA, 21 bp, Artificial Sequence
  primer
caccaatgcagactagccaag

SEQ ID NO: 68287 - DNA, 21 bp, Artificial Sequence
  primer
cgtgggcagtttatgaaacac

SEQ ID NO: 68288 - DNA, 22 bp, Artificial Sequence
  primer
ggaagtcataagccaggtaggg

SEQ ID NO: 68289 - DNA, 22 bp, Artificial Sequence
  primer
gccttatttgaggtttggaatg

SEQ ID NO: 68290 - DNA, 38 bp, Artificial Sequence
  primer
gtaaaacgacggccagtacagatgcaggaactggtgag

SEQ ID NO: 68291 - DNA, 22 bp, Artificial Sequence
  primer
aacagtaacacatgcccattcc

SEQ ID NO: 68292 - DNA, 38 bp, Artificial Sequence
  primer
gtaaaacgacggccagtatcgaagatgggaaagacagg

SEQ ID NO: 68293 - DNA, 38 bp, Artificial Sequence; identical to SEQ ID NO: 68274
  primer

SEQ ID NO: 68294 - DNA, 38 bp, Artificial Sequence
  primer
gtaaaacgacggccagtgatgtaacacctccacctcgg

SEQ ID NO: 68295 - DNA, 21 bp, Artificial Sequence
  primer
gcagagctaagtggctgactg

SEQ ID NO: 68296 - DNA, 21 bp, Artificial Sequence
  primer
tatcatgcttgcatacccacc

SEQ ID NO: 68297 - DNA, 38 bp, Artificial Sequence
  primer
gtaaaacgacggccagtgacaggccagggaaataaatg

SEQ ID NO: 68298 - DNA, 38 bp, Artificial Sequence
  primer
gtaaaacgacggccagtggccctacaaacagtgaaagc

SEQ ID NO: 68299 - DNA, 21 bp, Artificial Sequence
  primer
agcttgactcaggaagccaac

SEQ ID NO: 68300 - DNA, 21 bp, Artificial Sequence
  primer
tggacactgatataccctgcg

SEQ ID NO: 68301 - DNA, 38 bp, Artificial Sequence
  primer
gtaaaacgacggccagtacctgactcctgttccaggtc

SEQ ID NO: 68302 - DNA, 38 bp, Artificial Sequence
  primer
gtaaaacgacggccagttcaaagactccagcagtcacc

SEQ ID NO: 68303 - DNA, 21 bp, Artificial Sequence
  primer
ggcagcccaggttatatcaag

SEQ ID NO: 68304 - DNA, 21 bp, Artificial Sequence
  primer
gtgacacccgctagggttatg

SEQ ID NO: 68305 - DNA, 21 bp, Artificial Sequence
  primer
aagttccaggacttggcagtg

SEQ ID NO: 68306 - DNA, 39 bp, Artificial Sequence
  primer
gtaaaacgacggccagttgaacttctccagttctcctgc

SEQ ID NO: 68307 - DNA, 21 bp, Artificial Sequence
  primer
tggtttgtctgatccctttgc

SEQ ID NO: 68308 - DNA, 21 bp, Artificial Sequence
  primer
cagattcacaatgccacaacc

SEQ ID NO: 68309 - DNA, 21 bp, Artificial Sequence
  primer
tggttgcctcataaacaggag

SEQ ID NO: 68310 - DNA, 21 bp, Artificial Sequence
  primer
tttggagaagactcctgcctc

SEQ ID NO: 68311 - DNA, 38 bp, Artificial Sequence
  primer
gtaaaacgacggccagtgagaatcctggtgcctgattg

SEQ ID NO: 68312 - DNA, 38 bp, Artificial Sequence
  primer
gtaaaacgacggccagttcgtacgagctcgaatttcac

SEQ ID NO: 68313 - DNA, 22 bp, Artificial Sequence
  primer
caggaatctaggtcagggtcac

SEQ ID NO: 68314 - DNA, 23 bp, Artificial Sequence
  primer
tgttaaagacctcttgggacagg

SEQ ID NO: 68315 - DNA, 38 bp, Artificial Sequence
  primer
gtaaaacgacggccagttggtaccttctgaggacaggg

SEQ ID NO: 68316 - DNA, 38 bp, Artificial Sequence
  primer
gtaaaacgacggccagtgcccacgtaggaatctttctg

SEQ ID NO: 68317 - DNA, 35 bp, Artificial Sequence
  primer
gtaaaacgacggccagtgaggctaggctctcagcg

SEQ ID NO: 68318 - DNA, 38 bp, Artificial Sequence
  primer
gtaaaacgacggccagtcacagcttctccttgatgtcg

SEQ ID NO: 68319 - DNA, 22 bp, Artificial Sequence
  primer
ttcatgatgctgttgtaggtgg

SEQ ID NO: 68320 - DNA, 20 bp, Artificial Sequence
  primer
ggcgatgatctgcaagacag

SEQ ID NO: 68321 - DNA, 21 bp, Artificial Sequence
  primer
tacaaagaaagtgactgcggg

SEQ ID NO: 68322 - DNA, 41 bp, Artificial Sequence
  primer
gtaaaacgacggccagtaacaaggttacataacttctgggc

SEQ ID NO: 68323 - DNA, 22 bp, Artificial Sequence
  primer
gcaatgtgagccagttatttcc

SEQ ID NO: 68324 - DNA, 22 bp, Artificial Sequence
  primer
ggctgttagtctgttggtggac

SEQ ID NO: 68325 - DNA, 21 bp, Artificial Sequence
  primer
cccacgtgttaacgaccattc

SEQ ID NO: 68326 - DNA, 21 bp, Artificial Sequence
  primer
ggatagtgaggatggtcctgg

SEQ ID NO: 68327 - DNA, 21 bp, Artificial Sequence
  primer
gaatgctttgggcttaactgc

SEQ ID NO: 68328 - DNA, 21 bp, Artificial Sequence
  primer
aaacccacaattgcatgtcac

SEQ ID NO: 68329 - DNA, 21 bp, Artificial Sequence
  primer
gaggccaacgcaagaagttac

SEQ ID NO: 68330 - DNA, 38 bp, Artificial Sequence
  primer
gtaaaacgacggccagtgtgaggatgcctctcttgctc

SEQ ID NO: 68331 - DNA, 18 bp, Artificial Sequence
  primer
tgagaaagggcgcagctc

SEQ ID NO: 68332 - DNA, 21 bp, Artificial Sequence
  primer
ttaatgtcacgcacgatttcc

SEQ ID NO: 68333 - DNA, 38 bp, Artificial Sequence
  primer
gtaaaacgacggccagtggcaggacttagcttccacag

SEQ ID NO: 68334 - DNA, 21 bp, Artificial Sequence
  primer
caatgatctgaggagggaagg

SEQ ID NO: 68335 - DNA, 39 bp, Artificial Sequence
  primer
gtaaaacgacggccagtcaaataaagccatgccaatctc

SEQ ID NO: 68336 - DNA, 21 bp, Artificial Sequence
  primer
atcgaacaagagggtcaggtg

SEQ ID NO: 68337 - DNA, 38 bp, Artificial Sequence
  primer
gtaaaacgacggccagtgggatctgattcacagcaagg

SEQ ID NO: 68338 - DNA, 21 bp, Artificial Sequence
  primer
caattatagggaggtaggcgg

SEQ ID NO: 68339 - DNA, 21 bp, Artificial Sequence
  primer
aggttgagctgtgtgggaatc

SEQ ID NO: 68340 - DNA, 42 bp, Artificial Sequence
  primer
gtaaaacgacggccagtggagacaagaaactgagtatgaggg

SEQ ID NO: 68341 - DNA, 21 bp, Artificial Sequence
  primer
agggaaggtggtttggaagac

SEQ ID NO: 68342 - DNA, 21 bp, Artificial Sequence
  primer
ggtacttcagggtcaggatgc

SEQ ID NO: 68343 - DNA, 20 bp, Artificial Sequence
  primer
atgtcagaaatcaagccggg

SEQ ID NO: 68344 - DNA, 21 bp, Artificial Sequence
  primer
atggagttgaaggtggtctcg

SEQ ID NO: 68345 - DNA, 21 bp, Artificial Sequence
  primer
tgcttgctaatccacatctgc

SEQ ID NO: 68346 - DNA, 38 bp, Artificial Sequence
  primer
gtaaaacgacggccagtgaggctagcatgaggtgtgtg

SEQ ID NO: 68347 - DNA, 38 bp, Artificial Sequence
  primer
gtaaaacgacggccagtacacacacacatttccttccc

SEQ ID NO: 68348 - DNA, 38 bp, Artificial Sequence
  primer
gtaaaacgacggccagttggcctatgaatacgagggtc

SEQ ID NO: 68349 - DNA, 21 bp, Artificial Sequence
  primer
atggaccacagacatagcagg

SEQ ID NO: 68350 - DNA, 21 bp, Artificial Sequence
  primer
tggacttcagctgtccatttg

SEQ ID NO: 68351 - DNA, 22 bp, Artificial Sequence
  primer
tggtcctgagaacttcttgtcc

SEQ ID NO: 68352 - DNA, 38 bp, Artificial Sequence
  primer
gtaaaacgacggccagtgccatgactcctggtgtttct

SEQ ID NO: 68353 - DNA, 21 bp, Artificial Sequence
  primer
cagcaagttatcaggtctggc

SEQ ID NO: 68354 - DNA, 39 bp, Artificial Sequence
  primer
gtaaaacgacggccagtccacacagagaagtaaggcttg

SEQ ID NO: 68355 - DNA, 19 bp, Artificial Sequence
  primer
cacagagagccgccacttc

SEQ ID NO: 68356 - DNA, 22 bp, Artificial Sequence
  primer
tttcacctttcatcaagaaggc

SEQ ID NO: 68357 - DNA, 23 bp, Artificial Sequence
  primer
agtgtctggaaatcagtttgtgg

SEQ ID NO: 68358 - DNA, 22 bp, Artificial Sequence
  primer
ccacaagaatccattagggtgt

SEQ ID NO: 68359 - DNA, 38 bp, Artificial Sequence
  primer
gtaaaacgacggccagtaattggcgtatgtcttctccc

SEQ ID NO: 68360 - DNA, 22 bp, Artificial Sequence
  primer
ttccttgaacgaatttcctctg

SEQ ID NO: 68361 - DNA, 38 bp, Artificial Sequence
  primer
gtaaaacgacggccagtcacgaacagcttcctgagagt

SEQ ID NO: 68362 - DNA, 27 bp, Artificial Sequence
  primer
gaccctgagatcatgttctatttaatc

SEQ ID NO: 68363 - DNA, 21 bp, Artificial Sequence
  primer
ttctggaatctttagccgctc

SEQ ID NO: 68364 - DNA, 42 bp, Artificial Sequence
  primer
gtaaaacgacggccagttgactgactcctaacattgtgtttc

SEQ ID NO: 68365 - DNA, 40 bp, Artificial Sequence
  primer
gtaaaacgacggccagttgtcaacctaacaatgatttggg

SEQ ID NO: 68366 - DNA, 44 bp, Artificial Sequence
  primer
gtaaaacgacggccagttttagtgatactataccaggcacacac

SEQ ID NO: 68367 - DNA, 38 bp, Artificial Sequence
  primer
gtaaaacgacggccagtgcacagacaaatgaagcactg

SEQ ID NO: 68368 - DNA, 39 bp, Artificial Sequence
  primer
gtaaaacgacggccagtgcatttcaaggaaagcacaaac

SEQ ID NO: 68369 - DNA, 20 bp, Artificial Sequence
  primer
gaggtgggttgcaaggtagg

SEQ ID NO: 68370 - DNA, 38 bp, Artificial Sequence
  primer
gtaaaacgacggccagtgggtttattcccatattcccg

SEQ ID NO: 68371 - DNA, 37 bp, Artificial Sequence
  primer
gtaaaacgacggccagtggctgctatgacccagattg

SEQ ID NO: 68372 - DNA, 21 bp, Artificial Sequence
  primer
aaattgtttgggatgggtgag

SEQ ID NO: 68373 - DNA, 37 bp, Artificial Sequence
  primer
gtaaaacgacggccagtgaccctccagctcatcacag

SEQ ID NO: 68374 - DNA, 20 bp, Artificial Sequence
  primer
aggtgggatgatgtcaatgg

SEQ ID NO: 68375 - DNA, 37 bp, Artificial Sequence
  primer
gtaaaacgacggccagtctcagcctgtctggatttcg

SEQ ID NO: 68376 - DNA, 38 bp, Artificial Sequence
  primer
gtaaaacgacggccagtctggaagtcctggatcacctc

SEQ ID NO: 68377 - DNA, 21 bp, Artificial Sequence
  primer
ctcaagaaggatcagtgcgtg

SEQ ID NO: 68378 - DNA, 21 bp, Artificial Sequence
  primer
ctgcagagagaggtgactggg

SEQ ID NO: 68379 - DNA, 37 bp, Artificial Sequence
  primer
gtaaaacgacggccagtagggagaaggagtgagctgc

SEQ ID NO: 68380 - DNA, 38 bp, Artificial Sequence
  primer
gtaaaacgacggccagtaaggacatgggaaggatgaag

SEQ ID NO: 68381 - DNA, 21 bp, Artificial Sequence
  primer
tgtgtcctgttcacccttctg

SEQ ID NO: 68382 - DNA, 21 bp, Artificial Sequence
  primer
aatgaggacaagagggaaagg

SEQ ID NO: 68383 - DNA, 38 bp, Artificial Sequence
  primer
gtaaaacgacggccagtgtatcccagtccacgatgatg

SEQ ID NO: 68384 - DNA, 39 bp, Artificial Sequence
  primer
gtaaaacgacggccagtccataggagtacatggacaggc

SEQ ID NO: 68385 - DNA, 21 bp, Artificial Sequence
  primer
gctgcatggacttgatgagag

SEQ ID NO: 68386 - DNA, 21 bp, Artificial Sequence
  primer
atcctcgtcgctgttcagaag

SEQ ID NO: 68387 - DNA, 38 bp, Artificial Sequence
  primer
gtaaaacgacggccagtagagaaacacactgtggaggg

SEQ ID NO: 68388 - DNA, 21 bp, Artificial Sequence
  primer
agctcatggcccactaaagtc

SEQ ID NO: 68389 - DNA, 22 bp, Artificial Sequence
  primer
gcatcaggtagttggtgaggtc

SEQ ID NO: 68390 - DNA, 38 bp, Artificial Sequence
  primer
gtaaaacgacggccagtaagagcatctcagagcaacgg

SEQ ID NO: 68391 - DNA, 21 bp, Artificial Sequence
  primer
gctcctcaaactcttccttgc

SEQ ID NO: 68392 - DNA, 21 bp, Artificial Sequence
  primer
ggtgggatcagtatggtagcc

SEQ ID NO: 68393 - DNA, 35 bp, Artificial Sequence
  primer
gtaaaacgacggccagtaggcgcctgtaacccaac

SEQ ID NO: 68394 - DNA, 21 bp, Artificial Sequence
  primer
gcagaaccagaactcagaccc

SEQ ID NO: 68395 - DNA, 21 bp, Artificial Sequence
  primer
gcaatacaaagcctccacagg

SEQ ID NO: 68396 - DNA, 38 bp, Artificial Sequence
  primer
gtaaaacgacggccagttaaatgagcaagaagcccagg

SEQ ID NO: 68397 - DNA, 20 bp, Artificial Sequence
  primer
ctgagactgacccagccaag

SEQ ID NO: 68398 - DNA, 38 bp, Artificial Sequence
  primer
gtaaaacgacggccagtcaacaagggtcctagtcctgc

SEQ ID NO: 68399 - DNA, 21 bp, Artificial Sequence
  primer
aagaaccatcctcaggcagtc

SEQ ID NO: 68400 - DNA, 21 bp, Artificial Sequence
  primer
cctctgtccgagagaccagac

SEQ ID NO: 68401 - DNA, 38 bp, Artificial Sequence
  primer
gtaaaacgacggccagtcccacctcactactttctggg

SEQ ID NO: 68402 - DNA, 21 bp, Artificial Sequence
  primer
taggtagaagcaaacacgccc

SEQ ID NO: 68403 - DNA, 21 bp, Artificial Sequence
  primer
aatagcatagtggctgctggc

SEQ ID NO: 68404 - DNA, 38 bp, Artificial Sequence
  primer
gtaaaacgacggccagtcctttaacaggatggcagtgg

SEQ ID NO: 68405 - DNA, 21 bp, Artificial Sequence
  primer
ctgtgccaaagtgaatcttcc

SEQ ID NO: 68406 - DNA, 38 bp, Artificial Sequence
  primer
gtaaaacgacggccagtttaggatgctcttcctcaggg

SEQ ID NO: 68407 - DNA, 22 bp, Artificial Sequence
  primer
aacccagtcatttgacatttgg

SEQ ID NO: 68408 - DNA, 21 bp, Artificial Sequence
  primer
ctacagaacagcagacccacg

SEQ ID NO: 68409 - DNA, 21 bp, Artificial Sequence
  primer
acacattccttgggaaagcag

SEQ ID NO: 68410 - DNA, 19 bp, Artificial Sequence
  primer
ttgcagggtgcattgagtc

SEQ ID NO: 68411 - DNA, 38 bp, Artificial Sequence
  primer
gtaaaacgacggccagttaggttgccatgaaagacagc

SEQ ID NO: 68412 - DNA, 20 bp, Artificial Sequence
  primer
tcatgttccagctctcaccc

SEQ ID NO: 68413 - DNA, 38 bp, Artificial Sequence
  primer
gtaaaacgacggccagtttgtaaactgtcacttcgcgg

SEQ ID NO: 68414 - DNA, 20 bp, Artificial Sequence
  primer
agcacagcacctccacaaag

SEQ ID NO: 68415 - DNA, 21 bp, Artificial Sequence
  primer
aataccatgttcttgcccagc

SEQ ID NO: 68416 - DNA, 21 bp, Artificial Sequence
  primer
gagagcctgatacaaggcagg

SEQ ID NO: 68417 - DNA, 42 bp, Artificial Sequence
  primer
gtaaaacgacggccagttcaatcatgtaagtgactgttggac

SEQ ID NO: 68418 - DNA, 21 bp, Artificial Sequence
  primer
gtgcacacaaacactgttccc

SEQ ID NO: 68419 - DNA, 38 bp, Artificial Sequence
  primer
gtaaaacgacggccagtaaggctagctgggagaatgtg

SEQ ID NO: 68420 - DNA, 40 bp, Artificial Sequence
  primer
gtaaaacgacggccagtgccagtgacagaaatttgttagg

SEQ ID NO: 68421 - DNA, 38 bp, Artificial Sequence
  primer
gtaaaacgacggccagtagatgtgaagcgcacaaacac

SEQ ID NO: 68422 - DNA, 21 bp, Artificial Sequence
  primer
ctttgggatcgttggaaagac

SEQ ID NO: 68423 - DNA, 38 bp, Artificial Sequence
  primer
gtaaaacgacggccagtagaagtcaatgcctcctcctg

SEQ ID NO: 68424 - DNA, 21 bp, Artificial Sequence
  primer
taaggatgcatcatggctctg

SEQ ID NO: 68425 - DNA, 21 bp, Artificial Sequence
  primer
tttagtcaggaaaggcaaggc

SEQ ID NO: 68426 - DNA, 39 bp, Artificial Sequence
  primer
gtaaaacgacggccagtttcatgccacagagaaacacac

SEQ ID NO: 68427 - DNA, 21 bp, Artificial Sequence
  primer
aggttcaagggtaatttgggc

SEQ ID NO: 68428 - DNA, 21 bp, Artificial Sequence
  primer
gcgttaacttcctccttcgac

SEQ ID NO: 68429 - DNA, 21 bp, Artificial Sequence
  primer
ataacagaacggtgctcccac

SEQ ID NO: 68430 - DNA, 38 bp, Artificial Sequence
  primer
gtaaaacgacggccagtaagtgcatgaagaaagcaccc

SEQ ID NO: 68431 - DNA, 21 bp, Artificial Sequence
  primer
ccctgtaaatgttgtggagcc

SEQ ID NO: 68432 - DNA, 22 bp, Artificial Sequence
  primer
gcactaccttggtttgagcttg

SEQ ID NO: 68433 - DNA, 21 bp, Artificial Sequence
  primer
gtctgtttcctctgtgctggg

SEQ ID NO: 68434 - DNA, 22 bp, Artificial Sequence
  primer
tgctggcaattactgaactacg

SEQ ID NO: 68435 - DNA, 21 bp, Artificial Sequence
  primer
ggttaaagacaagctctgccc

SEQ ID NO: 68436 - DNA, 21 bp, Artificial Sequence
  primer
gaagcgcatcttgcctttatc

SEQ ID NO: 68437 - DNA, 21 bp, Artificial Sequence
  primer
gctcacagaggtgatttgctg

SEQ ID NO: 68438 - DNA, 20 bp, Artificial Sequence
  primer
cgatccttcaagtggtctgc

SEQ ID NO: 68439 - DNA, 38 bp, Artificial Sequence
  primer
gtaaaacgacggccagtgcttgtgacagagaccagctc

SEQ ID NO: 68440 - DNA, 38 bp, Artificial Sequence
  primer
gtaaaacgacggccagtcacctcaaaggcagtgttcag

SEQ ID NO: 68441 - DNA, 22 bp, Artificial Sequence
  primer
aaggtagggccattacataggg

SEQ ID NO: 68442 - DNA, 38 bp, Artificial Sequence
  primer
gtaaaacgacggccagtgcctccaatgttggactacag

SEQ ID NO: 68443 - DNA, 36 bp, Artificial Sequence
  primer
gtaaaacgacggccagtgatggacaggaggaggctg

SEQ ID NO: 68444 - DNA, 19 bp, Artificial Sequence
  primer
gatgtcctgtggagcaggc

SEQ ID NO: 68445 - DNA, 21 bp, Artificial Sequence
  primer
agagcacctacccttgtcctg

SEQ ID NO: 68446 - DNA, 21 bp, Artificial Sequence
  primer
agaacccaggagagcctagtg

SEQ ID NO: 68447 - DNA, 21 bp, Artificial Sequence
  primer
gtctccaggagcttctccatc

SEQ ID NO: 68448 - DNA, 37 bp, Artificial Sequence
  primer
gtaaaacgacggccagtcctaaagttgtgggtggcag

SEQ ID NO: 68449 - DNA, 21 bp, Artificial Sequence
  primer
attctccatatcttgggccac

SEQ ID NO: 68450 - DNA, 21 bp, Artificial Sequence
  primer
agccggtcaatgttagtcttg

SEQ ID NO: 68451 - DNA, 21 bp, Artificial Sequence
  primer
ctggaagggtcactttccatc

SEQ ID NO: 68452 - DNA, 21 bp, Artificial Sequence
  primer
catcatcccattctgcttctg

SEQ ID NO: 68453 - DNA, 21 bp, Artificial Sequence
  primer
agatgggaggtgcacagtagg

SEQ ID NO: 68454 - DNA, 20 bp, Artificial Sequence
  primer
ggagaagaggcgttgaggac

SEQ ID NO: 68455 - DNA, 21 bp, Artificial Sequence
  primer
tattcagaagcacttggctgg

SEQ ID NO: 68456 - DNA, 21 bp, Artificial Sequence
  primer
tcctcctcaggactccaattc

SEQ ID NO: 68457 - DNA, 38 bp, Artificial Sequence
  primer
gtaaaacgacggccagtaccaccgtgcagctattaagg

SEQ ID NO: 68458 - DNA, 36 bp, Artificial Sequence
  primer
gtaaaacgacggccagtgtgggcccagcatcatatc

SEQ ID NO: 68459 - DNA, 37 bp, Artificial Sequence
  primer
gtaaaacgacggccagtcccaaggaaacaggaagagg

SEQ ID NO: 68460 - DNA, 38 bp, Artificial Sequence
  primer
gtaaaacgacggccagttgcctcctcttcctcagagag

SEQ ID NO: 68461 - DNA, 21 bp, Artificial Sequence
  primer
taagggaggtgagagtcagcc

SEQ ID NO: 68462 - DNA, 38 bp, Artificial Sequence
  primer
gtaaaacgacggccagtgaatcattcagcccttcttgc

SEQ ID NO: 68463 - DNA, 37 bp, Artificial Sequence
  primer
gtaaaacgacggccagtgagaaatgaggtgagcacgg

SEQ ID NO: 68464 - DNA, 37 bp, Artificial Sequence
  primer
gtaaaacgacggccagtctaggtcatctcgctgccac

SEQ ID NO: 68465 - DNA, 38 bp, Artificial Sequence
  primer
gtaaaacgacggccagtgaaagattacgctggccaaac

SEQ ID NO: 68466 - DNA, 20 bp, Artificial Sequence
  primer
atgcatgcctgagagacagg

SEQ ID NO: 68467 - DNA, 37 bp, Artificial Sequence
  primer
gtaaaacgacggccagttctggaaggaggtgcagttg

SEQ ID NO: 68468 - DNA, 21 bp, Artificial Sequence
  primer
tcagagaacatcctctccgtg

SEQ ID NO: 68469 - DNA, 21 bp, Artificial Sequence
  primer
cagggtggacttgaactggtc

SEQ ID NO: 68470 - DNA, 36 bp, Artificial Sequence
  primer
gtaaaacgacggccagtctgcttgctctgctcctcc

SEQ ID NO: 68471 - DNA, 20 bp, Artificial Sequence
  primer
gtggtgagaattgggacctg

SEQ ID NO: 68472 - DNA, 21 bp, Artificial Sequence
  primer
cagctatcttctcactggccc

SEQ ID NO: 68473 - DNA, 20 bp, Artificial Sequence
  primer
atgcagagacgaaggtgtgg

SEQ ID NO: 68474 - DNA, 20 bp, Artificial Sequence
  primer
ggcaagagagccatgagatg

SEQ ID NO: 68475 - DNA, 19 bp, Artificial Sequence
  primer
gcaggatgggactctgagc

SEQ ID NO: 68476 - DNA, 38 bp, Artificial Sequence
  primer
gtaaaacgacggccagtagagtggaggaatgggactgt

SEQ ID NO: 68477 - DNA, 38 bp, Artificial Sequence
  primer
gtaaaacgacggccagtagagctgttatttgcaagggc

SEQ ID NO: 68478 - DNA, 18 bp, Artificial Sequence
  primer
aggtgcctgccaccactc

SEQ ID NO: 68479 - DNA, 43 bp, Artificial Sequence
  primer
gtaaaacgacggccagttgtaacacaaccaattatcactatgg

SEQ ID NO: 68480 - DNA, 25 bp, Artificial Sequence
  primer
ctgtgtgccatacacaatatgagac

SEQ ID NO: 68481 - DNA, 39 bp, Artificial Sequence
  primer
gtaaaacgacggccagttcctgggaccaaacaataataa

SEQ ID NO: 68482 - DNA, 39 bp, Artificial Sequence
  primer
gtaaaacgacggccagtccgtatcacaagccctctattg

SEQ ID NO: 68483 - DNA, 38 bp, Artificial Sequence
  primer
gtaaaacgacggccagtatcatgcaatggagcaaagac

SEQ ID NO: 68484 - DNA, 21 bp, Artificial Sequence
  primer
catcactatgccacagcttcc

SEQ ID NO: 68485 - DNA, 24 bp, Artificial Sequence
  primer
tctaatggatagtcaacatttggg

SEQ ID NO: 68486 - DNA, 42 bp, Artificial Sequence
  primer
gtaaaacgacggccagtaatggcaatagtgaaataaaggctc

SEQ ID NO: 68487 - DNA, 21 bp, Artificial Sequence
  primer
tgacaaggattgctagttgcc

SEQ ID NO: 68488 - DNA, 21 bp, Artificial Sequence
  primer
taaagtgggcaattctgaacc

SEQ ID NO: 68489 - DNA, 39 bp, Artificial Sequence
  primer
gtaaaacgacggccagtcacagaatgctttcacttccac

SEQ ID NO: 68490 - DNA, 38 bp, Artificial Sequence
  primer
gtaaaacgacggccagtctccagagttctccatcccac

SEQ ID NO: 68491 - DNA, 38 bp, Artificial Sequence
  primer
gtaaaacgacggccagtctcggctcctgtcccttatag

SEQ ID NO: 68492 - DNA, 21 bp, Artificial Sequence
  primer
ctccaagaccacaggctgttc

SEQ ID NO: 68493 - DNA, 21 bp, Artificial Sequence
  primer
gcagtgatcatcgtcctcctc

SEQ ID NO: 68494 - DNA, 22 bp, Artificial Sequence
  primer
aagcctcagtgctcagtttcag

SEQ ID NO: 68495 - DNA, 36 bp, Artificial Sequence
  primer
gtaaaacgacggccagttcactggcaggtcaccaag

SEQ ID NO: 68496 - DNA, 21 bp, Artificial Sequence
  primer
tgatggagaattctggttggg

SEQ ID NO: 68497 - DNA, 20 bp, Artificial Sequence
  primer
aacctgaatgggcaaagagg

SEQ ID NO: 68498 - DNA, 21 bp, Artificial Sequence
  primer
cctgtggctgacctagacctc

SEQ ID NO: 68499 - DNA, 38 bp, Artificial Sequence
  primer
gtaaaacgacggccagttgtgtgtggagcctaccagtc

SEQ ID NO: 68500 - DNA, 37 bp, Artificial Sequence
  primer
gtaaaacgacggccagtgcagttcctcgcaaacactc

SEQ ID NO: 68501 - DNA, 19 bp, Artificial Sequence
  primer
cttacaaggccaagagggc

SEQ ID NO: 68502 - DNA, 38 bp, Artificial Sequence
  primer
gtaaaacgacggccagtcaaagagccctgtgacagaag

SEQ ID NO: 68503 - DNA, 21 bp, Artificial Sequence
  primer
ctagaagaggaactgctgccc

SEQ ID NO: 68504 - DNA, 20 bp, Artificial Sequence
  primer
acccagacacacacggaaag

SEQ ID NO: 68505 - DNA, 20 bp, Artificial Sequence
  primer
tttccagggaagtcagaccc

SEQ ID NO: 68506 - DNA, 21 bp, Artificial Sequence
  primer
tgtgggttgatggacaggtag

SEQ ID NO: 68507 - DNA, 21 bp, Artificial Sequence
  primer
agattgaggcagacaggcttc

SEQ ID NO: 68508 - DNA, 23 bp, Artificial Sequence
  primer
aacagaatatggctctgggtagg

SEQ ID NO: 68509 - DNA, 21 bp, Artificial Sequence
  primer
gggaagaacaggactaggtgg

SEQ ID NO: 68510 - DNA, 21 bp, Artificial Sequence
  primer
taatttgggagggaaatccac

SEQ ID NO: 68511 - DNA, 19 bp, Artificial Sequence
  primer
cagctcaaggctcctgtcc

SEQ ID NO: 68512 - DNA, 20 bp, Artificial Sequence
  primer
ctcaagggagaccagggaac

SEQ ID NO: 68513 - DNA, 39 bp, Artificial Sequence
  primer
gtaaaacgacggccagttggcatcaagccatacataaac

SEQ ID NO: 68514 - DNA, 27 bp, Artificial Sequence
  primer
tctctttatccatagcaacagtaagaa

SEQ ID NO: 68515 - DNA, 44 bp, Artificial Sequence
  primer
gtaaaacgacggccagtacttattgagaaaccaaattctctgac

SEQ ID NO: 68516 - DNA, 23 bp, Artificial Sequence
  primer
agtggtacagatttgctggaatc

SEQ ID NO: 68517 - DNA, 24 bp, Artificial Sequence
  primer
cttaatttgcattatatggtgccc

SEQ ID NO: 68518 - DNA, 38 bp, Artificial Sequence
  primer
gtaaaacgacggccagtgcaacctttccgtaagtctga

SEQ ID NO: 68519 - DNA, 22 bp, Artificial Sequence
  primer
cctctggtggttgtcaagattc

SEQ ID NO: 68520 - DNA, 21 bp, Artificial Sequence
  primer
ctttccagtcaaagggcagag

SEQ ID NO: 68521 - DNA, 35 bp, Artificial Sequence
  primer
gtaaaacgacggccagtgccgcaccattcatttcc

SEQ ID NO: 68522 - DNA, 20 bp, Artificial Sequence
  primer
ggccacacttagaacctggc

SEQ ID NO: 68523 - DNA, 21 bp, Artificial Sequence
  primer
agagtgaattccagagggcac

SEQ ID NO: 68524 - DNA, 42 bp, Artificial Sequence
  primer
gtaaaacgacggccagtaacatgtggtgctttgacatactac

SEQ ID NO: 68525 - DNA, 26 bp, Artificial Sequence
  primer
tcaggagagaagtataacatgctttg

SEQ ID NO: 68526 - DNA, 38 bp, Artificial Sequence
  primer
gtaaaacgacggccagtatggccaaattatagtgcagc

SEQ ID NO: 68527 - DNA, 43 bp, Artificial Sequence
  primer
gtaaaacgacggccagtaaacagaagacaaactgctgtaataa

SEQ ID NO: 68528 - DNA, 21 bp, Artificial Sequence
  primer
ggttgaacctccagagaggac

SEQ ID NO: 68529 - DNA, 38 bp, Artificial Sequence
  primer
gtaaaacgacggccagtatcagagtgaatgctggcaaa

SEQ ID NO: 68530 - DNA, 38 bp, Artificial Sequence
  primer
gtaaaacgacggccagtacaagagcgaaagtccacctc

SEQ ID NO: 68531 - DNA, 44 bp, Artificial Sequence
  primer
gtaaaacgacggccagtttcctgtataatcatgtttggtgttac

SEQ ID NO: 68532 - DNA, 21 bp, Artificial Sequence
  primer
gagagcagagtgagcggagac

SEQ ID NO: 68533 - DNA, 43 bp, Artificial Sequence
  primer
gtaaaacgacggccagtcctttaaagcacgcagtaaataaatg

SEQ ID NO: 68534 - DNA, 20 bp, Artificial Sequence
  primer
aagcaaagaatcatgctggc

SEQ ID NO: 68535 - DNA, 21 bp, Artificial Sequence
  primer
caaagcatcttaaggccaatg

SEQ ID NO: 68536 - DNA, 37 bp, Artificial Sequence
  primer
gtaaaacgacggccagtctcctgactctgggcacaac

SEQ ID NO: 68537 - DNA, 20 bp, Artificial Sequence
  primer
aaccaatcgatcaatcaccg

SEQ ID NO: 68538 - DNA, 21 bp, Artificial Sequence
  primer
caggcctggtgataagagatg

SEQ ID NO: 68539 - DNA, 23 bp, Artificial Sequence
  primer
ttctacgcatgtcttcatcttcc

SEQ ID NO: 68540 - DNA, 21 bp, Artificial Sequence
  primer
gcagacttgggcaggtacatc

SEQ ID NO: 68541 - DNA, 21 bp, Artificial Sequence
  primer
gggaatccctctggctaagtc

SEQ ID NO: 68542 - DNA, 27 bp, Artificial Sequence
  primer
tcacaataagtaactaaatcatggtcg

SEQ ID NO: 68543 - DNA, 43 bp, Artificial Sequence
  primer
gtaaaacgacggccagttttactcaacctctacttcaacatgg

SEQ ID NO: 68544 - DNA, 38 bp, Artificial Sequence
  primer
gtaaaacgacggccagtccactgtgctagccaagaatg

SEQ ID NO: 68545 - DNA, 38 bp, Artificial Sequence
  primer
gtaaaacgacggccagtttcctcccacatttatcctgc

SEQ ID NO: 68546 - DNA, 36 bp, Artificial Sequence
  primer
gtaaaacgacggccagtcaagtgatgcacccacctc

SEQ ID NO: 68547 - DNA, 35 bp, Artificial Sequence
  primer
gtaaaacgacggccagtcgcagcaaccaaccattg

SEQ ID NO: 68548 - DNA, 22 bp, Artificial Sequence
  primer
ttaactcccatcttagcctccc

SEQ ID NO: 68549 - DNA, 38 bp, Artificial Sequence
  primer
gtaaaacgacggccagtagaggaaacagggttcacagg

SEQ ID NO: 68550 - DNA, 38 bp, Artificial Sequence
  primer
gtaaaacgacggccagtcaggtgaaatgaacctgccac

SEQ ID NO: 68551 - DNA, 44 bp, Artificial Sequence
  primer
gtaaaacgacggccagttgtagtaacctacctaagaagcctttg

SEQ ID NO: 68552 - DNA, 18 bp, Artificial Sequence
  primer
aaagaacgaccgcttccg

SEQ ID NO: 68553 - DNA, 21 bp, Artificial Sequence
  primer
tcatccacactcaattcaccc

SEQ ID NO: 68554 - DNA, 37 bp, Artificial Sequence
  primer
gtaaaacgacggccagtgtggcttgcctaagcatttg

SEQ ID NO: 68555 - DNA, 37 bp, Artificial Sequence
  primer
gtaaaacgacggccagtactgggtggcaacgtaaatg

SEQ ID NO: 68556 - DNA, 38 bp, Artificial Sequence
  primer
gtaaaacgacggccagtatcctcatgccaccaagaatc

SEQ ID NO: 68557 - DNA, 18 bp, Artificial Sequence
  primer
ggagagtggcgtgaaccc

SEQ ID NO: 68558 - DNA, 37 bp, Artificial Sequence
  primer
gtaaaacgacggccagttgctggtttaccatgcagac

SEQ ID NO: 68559 - DNA, 19 bp, Artificial Sequence
  primer
gcccagccaatgctgttac

SEQ ID NO: 68560 - DNA, 20 bp, Artificial Sequence
  primer
cacaatgtttccagcaaggg

SEQ ID NO: 68561 - DNA, 24 bp, Artificial Sequence
  primer
aatggcctattaactctggacaaa

SEQ ID NO: 68562 - DNA, 44 bp, Artificial Sequence
  primer
gtaaaacgacggccagtctgcacaagtatatcctagactgaacc

SEQ ID NO: 68563 - DNA, 38 bp, Artificial Sequence
  primer
gtaaaacgacggccagtcctcccaggatttgatctgtc

SEQ ID NO: 68564 - DNA, 23 bp, Artificial Sequence
  primer
tttcaaaccaatgtcatgtcctc

SEQ ID NO: 68565 - DNA, 21 bp, Artificial Sequence
  primer
tcccgctcaaagagatgtttc

SEQ ID NO: 68566 - DNA, 21 bp, Artificial Sequence
  primer
gtgacacaggcagaggcatag

SEQ ID NO: 68567 - DNA, 38 bp, Artificial Sequence
  primer
gtaaaacgacggccagtgcacttggtacagctcatccc

SEQ ID NO: 68568 - DNA, 38 bp, Artificial Sequence
  primer
gtaaaacgacggccagttctttgaaccacagatgtccc

SEQ ID NO: 68569 - DNA, 38 bp, Artificial Sequence
  primer
gtaaaacgacggccagtattgaacatcatgctgaagcc

SEQ ID NO: 68570 - DNA, 21 bp, Artificial Sequence
  primer
caccatgcttggccctatatt

SEQ ID NO: 68571 - DNA, 38 bp, Artificial Sequence
  primer
gtaaaacgacggccagtgatctttaacccacacggacc

SEQ ID NO: 68572 - DNA, 38 bp, Artificial Sequence
  primer
gtaaaacgacggccagtgcgtttcatgctcgaaataag

SEQ ID NO: 68573 - DNA, 21 bp, Artificial Sequence
  primer
cccaaagggtccacttacaac

SEQ ID NO: 68574 - DNA, 22 bp, Artificial Sequence
  primer
cactctcgaattcacattcacc

SEQ ID NO: 68575 - DNA, 40 bp, Artificial Sequence
  primer
gtaaaacgacggccagttgtggtgggtataaaggtgttca

SEQ ID NO: 68576 - DNA, 21 bp, Artificial Sequence
  primer
tttcaatagtcccttcagccc

SEQ ID NO: 68577 - DNA, 38 bp, Artificial Sequence
  primer
gtaaaacgacggccagtacgggacagatcactcagatg

SEQ ID NO: 68578 - DNA, 38 bp, Artificial Sequence
  primer
gtaaaacgacggccagtaaccagtcaggccagcattag

SEQ ID NO: 68579 - DNA, 35 bp, Artificial Sequence
  primer
gtaaaacgacggccagtgccatattgtgctcgtgg

SEQ ID NO: 68580 - DNA, 20 bp, Artificial Sequence
  primer
accaagtgagtgggcaagag

SEQ ID NO: 68581 - DNA, 38 bp, Artificial Sequence
  primer
gtaaaacgacggccagttagaaacaaatgcagggcctc

SEQ ID NO: 68582 - DNA, 21 bp, Artificial Sequence
  primer
acgggttacaatgatgaaggc

SEQ ID NO: 68583 - DNA, 21 bp, Artificial Sequence
  primer
tagagttcctgaggtccagcc

SEQ ID NO: 68584 - DNA, 38 bp, Artificial Sequence
  primer
gtaaaacgacggccagtttcaactttcagtgggctgag

SEQ ID NO: 68585 - DNA, 21 bp, Artificial Sequence
  primer
aagcacagctacctccacacc

SEQ ID NO: 68586 - DNA, 21 bp, Artificial Sequence
  primer
ccctaaagggcttgggatatg

SEQ ID NO: 68587 - DNA, 21 bp, Artificial Sequence
  primer
ctgggcagaaacgagaggtag

SEQ ID NO: 68588 - DNA, 19 bp, Artificial Sequence
  primer
cgaaggtcagtttgctcgg

SEQ ID NO: 68589 - DNA, 44 bp, Artificial Sequence
  primer
gtaaaacgacggccagtcataagacagtttgattcctaccattc

SEQ ID NO: 68590 - DNA, 21 bp, Artificial Sequence
  primer
accagagctcaccatgtatcc

SEQ ID NO: 68591 - DNA, 21 bp, Artificial Sequence
  primer
tgggtgacagagccagattac

SEQ ID NO: 68592 - DNA, 21 bp, Artificial Sequence
  primer
tatgggtataagccaccgtgc

SEQ ID NO: 68593 - DNA, 21 bp, Artificial Sequence
  primer
tttcctatttggacctgagcc

SEQ ID NO: 68594 - DNA, 23 bp, Artificial Sequence
  primer
ccattacatgcaagatatcccac

SEQ ID NO: 68595 - DNA, 21 bp, Artificial Sequence
  primer
atgcatgcacagcactaaagg

SEQ ID NO: 68596 - DNA, 38 bp, Artificial Sequence
  primer
gtaaaacgacggccagtttggatgaagtcaactcctgc

SEQ ID NO: 68597 - DNA, 21 bp, Artificial Sequence
  primer
cagatcacaatcagacctggg

SEQ ID NO: 68598 - DNA, 23 bp, Artificial Sequence
  primer
aaatttatgcactgatctttccc

SEQ ID NO: 68599 - DNA, 41 bp, Artificial Sequence
  primer
gtaaaacgacggccagtgcaaattattccatcaacacaaat

SEQ ID NO: 68600 - DNA, 39 bp, Artificial Sequence
  primer
gtaaaacgacggccagttcattctactcgacctcaaccc

SEQ ID NO: 68601 - DNA, 39 bp, Artificial Sequence
  primer
gtaaaacgacggccagtccaccttggtacatatggcttc

SEQ ID NO: 68602 - DNA, 39 bp, Artificial Sequence
  primer
gtaaaacgacggccagtctctgagggatttatagccagc

SEQ ID NO: 68603 - DNA, 38 bp, Artificial Sequence
  primer
gtaaaacgacggccagtacttcctggccaatctcaaag

SEQ ID NO: 68604 - DNA, 38 bp, Artificial Sequence
  primer
gtaaaacgacggccagtggttgctttacgaagtgcttg

SEQ ID NO: 68605 - DNA, 27 bp, Artificial Sequence
  primer
aaatattaccttggagtgtatcatccc

SEQ ID NO: 68606 - DNA, 21 bp, Artificial Sequence
  primer
cttctgcacaggaccattgag

SEQ ID NO: 68607 - DNA, 21 bp, Artificial Sequence
  primer
gcaatgcagtaagtctcccag

SEQ ID NO: 68608 - DNA, 20 bp, Artificial Sequence
  primer
cggaggtgagggctgaatac

SEQ ID NO: 68609 - DNA, 21 bp, Artificial Sequence
  primer
gacaaatagggtgtggaaggg

SEQ ID NO: 68610 - DNA, 38 bp, Artificial Sequence
  primer
gtaaaacgacggccagtctcacacttccagagccagac

SEQ ID NO: 68611 - DNA, 38 bp, Artificial Sequence
  primer
gtaaaacgacggccagtaaagtcattcatgagctgggc

SEQ ID NO: 68612 - DNA, 22 bp, Artificial Sequence
  primer
gaccagccaagtgtaacatgag

SEQ ID NO: 68613 - DNA, 38 bp, Artificial Sequence
  primer
gtaaaacgacggccagtgggcagagtacttcatggtgg

SEQ ID NO: 68614 - DNA, 38 bp, Artificial Sequence
  primer
gtaaaacgacggccagtatctccagacactgctctcgc

SEQ ID NO: 68615 - DNA, 21 bp, Artificial Sequence
  primer
tcctggtcttggtttctccac

SEQ ID NO: 68616 - DNA, 38 bp, Artificial Sequence
  primer
gtaaaacgacggccagtgcctggcaggatcactctaag

SEQ ID NO: 68617 - DNA, 38 bp, Artificial Sequence
  primer
gtaaaacgacggccagttcgcagactttctatttgccc

SEQ ID NO: 68618 - DNA, 25 bp, Artificial Sequence
  primer
tgatacagtagagcaatatgctggt

SEQ ID NO: 68619 - DNA, 38 bp, Artificial Sequence
  primer
gtaaaacgacggccagtgagcctcactgtcctccactc

SEQ ID NO: 68620 - DNA, 37 bp, Artificial Sequence
  primer
gtaaaacgacggccagtgagaggaaaggagggaaggg

SEQ ID NO: 68621 - DNA, 38 bp, Artificial Sequence
  primer
gtaaaacgacggccagtcggctctaatctctgggtgac

SEQ ID NO: 68622 - DNA, 21 bp, Artificial Sequence
  primer
gaattccaattctgacccagg

SEQ ID NO: 68623 - DNA, 39 bp, Artificial Sequence
  primer
gtaaaacgacggccagtgggttctgttaatgtctggagg

SEQ ID NO: 68624 - DNA, 21 bp, Artificial Sequence
  primer
aagtgctaatcatggtcaccg

SEQ ID NO: 68625 - DNA, 21 bp, Artificial Sequence
  primer
gtctgactgcaaacctcccag

SEQ ID NO: 68626 - DNA, 21 bp, Artificial Sequence
  primer
tagagaggtgccctaaccagg

SEQ ID NO: 68627 - DNA, 38 bp, Artificial Sequence
  primer
gtaaaacgacggccagtcagatagggcaccatccactg

SEQ ID NO: 68628 - DNA, 21 bp, Artificial Sequence
  primer
ctgccaggagtaaccttggtc

SEQ ID NO: 68629 - DNA, 21 bp, Artificial Sequence
  primer
agagtgtagggttggtgcctg

SEQ ID NO: 68630 - DNA, 21 bp, Artificial Sequence
  primer
aacttgaggttgaatcctggg

SEQ ID NO: 68631 - DNA, 21 bp, Artificial Sequence
  primer
ttccttggccttgagtttctc

SEQ ID NO: 68632 - DNA, 37 bp, Artificial Sequence
  primer
gtaaaacgacggccagtcagggacgtgagatgaggag

SEQ ID NO: 68633 - DNA, 20 bp, Artificial Sequence
  primer
acagtgaaggcatcagtggg

SEQ ID NO: 68634 - DNA, 21 bp, Artificial Sequence
  primer
cttctcaggcctcaactttgc

SEQ ID NO: 68635 - DNA, 21 bp, Artificial Sequence
  primer
gccaggatggagtttacaacc

SEQ ID NO: 68636 - DNA, 21 bp, Artificial Sequence
  primer
gcttagtcaggttcacggagg

SEQ ID NO: 68637 - DNA, 21 bp, Artificial Sequence
  primer
ctgatccttcaggctttccag

SEQ ID NO: 68638 - DNA, 21 bp, Artificial Sequence
  primer
cccacagtggcctctacaatg

SEQ ID NO: 68639 - DNA, 21 bp, Artificial Sequence
  primer
tatagcggttgtcagtggcag

SEQ ID NO: 68640 - DNA, 20 bp, Artificial Sequence
  primer
gggtgaggaagagccgttag

SEQ ID NO: 68641 - DNA, 21 bp, Artificial Sequence
  primer
attcttgctccacgagtgtcc

SEQ ID NO: 68642 - DNA, 18 bp, Artificial Sequence
  primer
cgtgggcagctggtagtg

SEQ ID NO: 68643 - DNA, 35 bp, Artificial Sequence
  primer
gtaaaacgacggccagtgtcccacacacacctgcc

SEQ ID NO: 68644 - DNA, 38 bp, Artificial Sequence
  primer
gtaaaacgacggccagtagaagaggcttgccaaatgtc

SEQ ID NO: 68645 - DNA, 19 bp, Artificial Sequence
  primer
caccgaaagaacacagccc

SEQ ID NO: 68646 - DNA, 21 bp, Artificial Sequence
  primer
caagcactgaggaatgaaacg

SEQ ID NO: 68647 - DNA, 40 bp, Artificial Sequence
  primer
gtaaaacgacggccagtcgacctcccaaaccattaaatac

SEQ ID NO: 68648 - DNA, 21 bp, Artificial Sequence
  primer
gctacccgtatctcaactggc

SEQ ID NO: 68649 - DNA, 37 bp, Artificial Sequence
  primer
gtaaaacgacggccagttctccacaccctgtcctcac

SEQ ID NO: 68650 - DNA, 21 bp, Artificial Sequence
  primer
ctaaatgttcggtttgtcccg

SEQ ID NO: 68651 - DNA, 21 bp, Artificial Sequence
  primer
aaaggaggttccagcattgtc

SEQ ID NO: 68652 - DNA, 38 bp, Artificial Sequence
  primer
gtaaaacgacggccagtgcaggtgcaggacccatatac

SEQ ID NO: 68653 - DNA, 21 bp, Artificial Sequence
  primer
gggtacgtcagggctagatcc

SEQ ID NO: 68654 - DNA, 21 bp, Artificial Sequence
  primer
tttccttgacaatcctcctcc

SEQ ID NO: 68655 - DNA, 38 bp, Artificial Sequence
  primer
gtaaaacgacggccagtgaacatggtgcatggtaggtg

SEQ ID NO: 68656 - DNA, 21 bp, Artificial Sequence
  primer
atagccagcggcttctagttc

SEQ ID NO: 68657 - DNA, 43 bp, Artificial Sequence
  primer
gtaaaacgacggccagtgatttgtgtacagtggtaatccttcc

SEQ ID NO: 68658 - DNA, 38 bp, Artificial Sequence
  primer
gtaaaacgacggccagtggcatactttaggtgggaggc

SEQ ID NO: 68659 - DNA, 20 bp, Artificial Sequence
  primer
ttgctgtcaaggacagggag

SEQ ID NO: 68660 - DNA, 35 bp, Artificial Sequence; identical to SEQ ID NO: 40169
  primer

SEQ ID NO: 68661 - DNA, 39 bp, Artificial Sequence
  primer
gtaaaacgacggccagtcgtacagtcgcttagctttcag

SEQ ID NO: 68662 - DNA, 38 bp, Artificial Sequence
  primer
gtaaaacgacggccagtaagaattacgttgccgactcc

SEQ ID NO: 68663 - DNA, 37 bp, Artificial Sequence
  primer
gtaaaacgacggccagtgcctccaacagcaatttcac

SEQ ID NO: 68664 - DNA, 20 bp, Artificial Sequence
  primer
gagaggaaggtgaagggtgg

SEQ ID NO: 68665 - DNA, 38 bp, Artificial Sequence
  primer
gtaaaacgacggccagttcacctgtgaggaagaggagg

SEQ ID NO: 68666 - DNA, 19 bp, Artificial Sequence
  primer
gtgagcagtgggctgacac

SEQ ID NO: 68667 - DNA, 21 bp, Artificial Sequence
  primer
aagtctttgggtgaggcagag

SEQ ID NO: 68668 - DNA, 18 bp, Artificial Sequence
  primer
aaagtctgggctctgggc

SEQ ID NO: 68669 - DNA, 21 bp, Artificial Sequence
  primer
ggtgaggacttcagtgcaaag

SEQ ID NO: 68670 - DNA, 39 bp, Artificial Sequence
  primer
gtaaaacgacggccagtgagagtgctctcttagcagcaa

SEQ ID NO: 68671 - DNA, 38 bp, Artificial Sequence
  primer
gtaaaacgacggccagtgttgtcggtgcaaatcaactg

SEQ ID NO: 68672 - DNA, 38 bp, Artificial Sequence
  primer
gtaaaacgacggccagtgaccaggcaatatgaagaggc

SEQ ID NO: 68673 - DNA, 22 bp, Artificial Sequence
  primer
gaatcagtctctgaggtgtggg

SEQ ID NO: 68674 - DNA, 21 bp, Artificial Sequence
  primer
aatcaacaggagacaggcagg

SEQ ID NO: 68675 - DNA, 38 bp, Artificial Sequence
  primer
gtaaaacgacggccagtgccaatggcttactgtgaatg

SEQ ID NO: 68676 - DNA, 18 bp, Artificial Sequence
  primer
attagcccgcaagcaagc

SEQ ID NO: 68677 - DNA, 38 bp, Artificial Sequence
  primer
gtaaaacgacggccagtgacaggaaggaacagtgaccc

SEQ ID NO: 68678 - DNA, 21 bp, Artificial Sequence
  primer
tcacacccacatctcagaagg

SEQ ID NO: 68679 - DNA, 21 bp, Artificial Sequence
  primer
gaacaaggtcttgcttgggtc

SEQ ID NO: 68680 - DNA, 38 bp, Artificial Sequence
  primer
gtaaaacgacggccagttgcctaggaggtctccagttg

SEQ ID NO: 68681 - DNA, 37 bp, Artificial Sequence
  primer
gtaaaacgacggccagtcatggtccctggttcttgtg

SEQ ID NO: 68682 - DNA, 21 bp, Artificial Sequence
  primer
cctgttataaagggcctggtc

SEQ ID NO: 68683 - DNA, 23 bp, Artificial Sequence
  primer
ccctgctttctgcctctctatac

SEQ ID NO: 68684 - DNA, 37 bp, Artificial Sequence
  primer
gtaaaacgacggccagtcagtcaagccacagcacatc

SEQ ID NO: 68685 - DNA, 38 bp, Artificial Sequence
  primer
gtaaaacgacggccagtctctctccaaagattccaggc

SEQ ID NO: 68686 - DNA, 21 bp, Artificial Sequence
  primer
ccagggagtcatcacacattc

SEQ ID NO: 68687 - DNA, 21 bp, Artificial Sequence
  primer
atgccgaggtatacgtgtgtg

SEQ ID NO: 68688 - DNA, 37 bp, Artificial Sequence
  primer
gtaaaacgacggccagtcagaatttcaggcatgagcc

SEQ ID NO: 68689 - DNA, 21 bp, Artificial Sequence
  primer
accacatgccaaccctatttc

SEQ ID NO: 68690 - DNA, 38 bp, Artificial Sequence
  primer
gtaaaacgacggccagtaaaggccatgtgcaataatgg

SEQ ID NO: 68691 - DNA, 21 bp, Artificial Sequence
  primer
gctatgtttgcaccactgcac

SEQ ID NO: 68692 - DNA, 21 bp, Artificial Sequence
  primer
gcttaatggcaaaggaacacc

SEQ ID NO: 68693 - DNA, 21 bp, Artificial Sequence
  primer
tgcccgaagctagtccttatc

SEQ ID NO: 68694 - DNA, 37 bp, Artificial Sequence
  primer
gtaaaacgacggccagtttccaatcccggtttattcc

SEQ ID NO: 68695 - DNA, 38 bp, Artificial Sequence
  primer
gtaaaacgacggccagtcaacgaataagacaagcaggg

SEQ ID NO: 68696 - DNA, 20 bp, Artificial Sequence
  primer
gacttcgcttctctgggagg

SEQ ID NO: 68697 - DNA, 40 bp, Artificial Sequence
  primer
gtaaaacgacggccagtggaatttccaaatgaagaccttg

SEQ ID NO: 68698 - DNA, 23 bp, Artificial Sequence
  primer
catatgaattcaacctcctctgg

SEQ ID NO: 68699 - DNA, 42 bp, Artificial Sequence
  primer
gtaaaacgacggccagtaaacagctaatgcttcatttgtctc

SEQ ID NO: 68700 - DNA, 21 bp, Artificial Sequence
  primer
acgttacctggcctctttgag

SEQ ID NO: 68701 - DNA, 40 bp, Artificial Sequence
  primer
gtaaaacgacggccagtttcagtgtcatcatctccttcag

SEQ ID NO: 68702 - DNA, 21 bp, Artificial Sequence
  primer
gtgtgtgggtgtgtaaatgcc

SEQ ID NO: 68703 - DNA, 23 bp, Artificial Sequence
  primer
aaagctccttcatctattgtggc

SEQ ID NO: 68704 - DNA, 40 bp, Artificial Sequence
  primer
gtaaaacgacggccagtccacaaacattctatcttcctcc

SEQ ID NO: 68705 - DNA, 21 bp, Artificial Sequence
  primer
aatgcaggtggtgggtatgtc

SEQ ID NO: 68706 - DNA, 39 bp, Artificial Sequence
  primer
gtaaaacgacggccagttgccaataacagagcagtaacc

SEQ ID NO: 68707 - DNA, 45 bp, Artificial Sequence
  primer
gtaaaacgacggccagttgagggaatattacttaaacagagacca

SEQ ID NO: 68708 - DNA, 40 bp, Artificial Sequence
  primer
gtaaaacgacggccagtctcaagaggacagatttagctgg

SEQ ID NO: 68709 - DNA, 22 bp, Artificial Sequence
  primer
tgatgacttctggccaagtaaa

SEQ ID NO: 68710 - DNA, 39 bp, Artificial Sequence
  primer
gtaaaacgacggccagttccaataatcccattcttacgg

SEQ ID NO: 68711 - DNA, 22 bp, Artificial Sequence
  primer
ttgtgagggtttagtttggaga

SEQ ID NO: 68712 - DNA, 36 bp, Artificial Sequence
  primer
gtaaaacgacggccagtagagacctgcagagctggc

SEQ ID NO: 68713 - DNA, 37 bp, Artificial Sequence
  primer
gtaaaacgacggccagtgggactccaaccctggttac

SEQ ID NO: 68714 - DNA, 38 bp, Artificial Sequence
  primer
gtaaaacgacggccagtgtattgcgaggagaggaggtg

SEQ ID NO: 68715 - DNA, 38 bp, Artificial Sequence
  primer
gtaaaacgacggccagtcacctgtgaccacagaaccac

SEQ ID NO: 68716 - DNA, 22 bp, Artificial Sequence
  primer
ccacgatgtaagtcaagttccc

SEQ ID NO: 68717 - DNA, 37 bp, Artificial Sequence
  primer
gtaaaacgacggccagtggtcactgaagagggcagtg

SEQ ID NO: 68718 - DNA, 21 bp, Artificial Sequence
  primer
catccatctgagccttccttc

SEQ ID NO: 68719 - DNA, 38 bp, Artificial Sequence
  primer
gtaaaacgacggccagttagatgccagcattagggaag

SEQ ID NO: 68720 - DNA, 38 bp, Artificial Sequence
  primer
gtaaaacgacggccagttgggagagagaagaatgggag

SEQ ID NO: 68721 - DNA, 21 bp, Artificial Sequence
  primer
ctgttctctccaggaagtggg

SEQ ID NO: 68722 - DNA, 21 bp, Artificial Sequence
  primer
cccagactctgagaggagcag

SEQ ID NO: 68723 - DNA, 21 bp, Artificial Sequence
  primer
ctacatcttccaacaggcacg

SEQ ID NO: 68724 - DNA, 21 bp, Artificial Sequence
  primer
agaactcacccagtgtcctcc

SEQ ID NO: 68725 - DNA, 21 bp, Artificial Sequence
  primer
ctgagtggttctgtgagctgg

SEQ ID NO: 68726 - DNA, 20 bp, Artificial Sequence
  primer
gaggacaggtcgggagtctg

SEQ ID NO: 68727 - DNA, 38 bp, Artificial Sequence
  primer
gtaaaacgacggccagtgagtcagggtgcatttcttgc

SEQ ID NO: 68728 - DNA, 37 bp, Artificial Sequence
  primer
gtaaaacgacggccagtcttccctccctagctcccac

SEQ ID NO: 68729 - DNA, 38 bp, Artificial Sequence
  primer
gtaaaacgacggccagtcagtctgatcagtggaggtcg

SEQ ID NO: 68730 - DNA, 38 bp, Artificial Sequence
  primer
gtaaaacgacggccagtccaagaattaagaggcaaggg

SEQ ID NO: 68731 - DNA, 20 bp, Artificial Sequence
  primer
catctcccacactctgcctg

SEQ ID NO: 68732 - DNA, 36 bp, Artificial Sequence
  primer
gtaaaacgacggccagtctcctgggagaacctgctg

SEQ ID NO: 68733 - DNA, 37 bp, Artificial Sequence
  primer
gtaaaacgacggccagtgaagtgacacagccagcctc

SEQ ID NO: 68734 - DNA, 21 bp, Artificial Sequence
  primer
cagatgcacttcccttcattg

SEQ ID NO: 68735 - DNA, 21 bp, Artificial Sequence
  primer
atggagccaatgatgatgttg

SEQ ID NO: 68736 - DNA, 21 bp, Artificial Sequence
  primer
cctatgacgtgtgagctctgg

SEQ ID NO: 68737 - DNA, 37 bp, Artificial Sequence
  primer
gtaaaacgacggccagtctgggaccttcttccctgag

SEQ ID NO: 68738 - DNA, 38 bp, Artificial Sequence
  primer
gtaaaacgacggccagtagccaggagttgaagggtttg

SEQ ID NO: 68739 - DNA, 18 bp, Artificial Sequence
  primer
aaggaattggcacctggg

SEQ ID NO: 68740 - DNA, 23 bp, Artificial Sequence
  primer
caacccttgaatgagagaatacc

SEQ ID NO: 68741 - DNA, 21 bp, Artificial Sequence
  primer
atccatgcatttcgttctttg

SEQ ID NO: 68742 - DNA, 38 bp, Artificial Sequence
  primer
gtaaaacgacggccagtacgcctaccactaagggacac

SEQ ID NO: 68743 - DNA, 38 bp, Artificial Sequence
  primer
gtaaaacgacggccagtcccatcactcactctcagtgc

SEQ ID NO: 68744 - DNA, 38 bp, Artificial Sequence
  primer
gtaaaacgacggccagtctccagatgtcctagtgtggg

SEQ ID NO: 68745 - DNA, 37 bp, Artificial Sequence
  primer
gtaaaacgacggccagtcaatgggttgtttccattgc

SEQ ID NO: 68746 - DNA, 21 bp, Artificial Sequence
  primer
aggcagaacctcatctccttg

SEQ ID NO: 68747 - DNA, 20 bp, Artificial Sequence
  primer
ctgtgcaggtgaaacgaagg

SEQ ID NO: 68748 - DNA, 21 bp, Artificial Sequence
  primer
tttacatgcccacctttcctg

SEQ ID NO: 68749 - DNA, 21 bp, Artificial Sequence
  primer
ttgactcatctggttcccaac

SEQ ID NO: 68750 - DNA, 21 bp, Artificial Sequence
  primer
tggctgtacagttcctccaag

SEQ ID NO: 68751 - DNA, 20 bp, Artificial Sequence
  primer
actgaagcgtgcatttcacc

SEQ ID NO: 68752 - DNA, 21 bp, Artificial Sequence
  primer
gtcaatcactcccgactgaac

SEQ ID NO: 68753 - DNA, 38 bp, Artificial Sequence
  primer
gtaaaacgacggccagtttcccaaggagaaaccatttg

SEQ ID NO: 68754 - DNA, 22 bp, Artificial Sequence
  primer
ccttgtaacccagttcttgctg

SEQ ID NO: 68755 - DNA, 26 bp, Artificial Sequence
  primer
tttcaaacacaataactgctctattt

SEQ ID NO: 68756 - DNA, 38 bp, Artificial Sequence
  primer
gtaaaacgacggccagttcttgttggctctacctgcac

SEQ ID NO: 68757 - DNA, 20 bp, Artificial Sequence
  primer
ttcaccgtggtctcgatctc

SEQ ID NO: 68758 - DNA, 38 bp, Artificial Sequence
  primer
gtaaaacgacggccagtgactcagcatttcacaggcag

SEQ ID NO: 68759 - DNA, 27 bp, Artificial Sequence
  primer
cttattattatactccaggcaccaaac

SEQ ID NO: 68760 - DNA, 21 bp, Artificial Sequence
  primer
gcttggattagtcgtggttgg

SEQ ID NO: 68761 - DNA, 38 bp, Artificial Sequence
  primer
gtaaaacgacggccagtatagcacagcacagcactgac

SEQ ID NO: 68762 - DNA, 21 bp, Artificial Sequence
  primer
ctgttgtcatggaaacgatgg

SEQ ID NO: 68763 - DNA, 19 bp, Artificial Sequence
  primer
aggatgaccaggcaggagg

SEQ ID NO: 68764 - DNA, 21 bp, Artificial Sequence
  primer
aagctttggctttgagacacc

SEQ ID NO: 68765 - DNA, 38 bp, Artificial Sequence
  primer
gtaaaacgacggccagttctctctgtgccttgacttcc

SEQ ID NO: 68766 - DNA, 21 bp, Artificial Sequence
  primer
cttccctggtagcagcagttc

SEQ ID NO: 68767 - DNA, 21 bp, Artificial Sequence
  primer
cttggattcgcgaaataatgg

SEQ ID NO: 68768 - DNA, 21 bp, Artificial Sequence
  primer
tcgcaggagctgttgttactg

SEQ ID NO: 68769 - DNA, 21 bp, Artificial Sequence
  primer
cacttccagtgtgcggtttag

SEQ ID NO: 68770 - DNA, 38 bp, Artificial Sequence
  primer
gtaaaacgacggccagtccggaagaactgaaagacagc

SEQ ID NO: 68771 - DNA, 20 bp, Artificial Sequence
  primer
aggctaaagttcagggccag

SEQ ID NO: 68772 - DNA, 21 bp, Artificial Sequence
  primer
tgatagcaaaggccacatcac

SEQ ID NO: 68773 - DNA, 20 bp, Artificial Sequence
  primer
gttcaggcctggtaggaagc

SEQ ID NO: 68774 - DNA, 22 bp, Artificial Sequence
  primer
aagtcccttcagaacccaagag

SEQ ID NO: 68775 - DNA, 21 bp, Artificial Sequence
  primer
ggcagaattcaggcaagtcac

SEQ ID NO: 68776 - DNA, 20 bp, Artificial Sequence
  primer
acaaatggcatctctgtggg

SEQ ID NO: 68777 - DNA, 39 bp, Artificial Sequence
  primer
gtaaaacgacggccagtgaagtctgggctctgttcattg

SEQ ID NO: 68778 - DNA, 21 bp, Artificial Sequence
  primer
gcaaagttagtaacctgcccg

SEQ ID NO: 68779 - DNA, 21 bp, Artificial Sequence
  primer
acagactcagggaaccagcag

SEQ ID NO: 68780 - DNA, 21 bp, Artificial Sequence
  primer
agcaactttaaggtccaaggg

SEQ ID NO: 68781 - DNA, 38 bp, Artificial Sequence
  primer
gtaaaacgacggccagtgagtctggagcctttaatgcg

SEQ ID NO: 68782 - DNA, 38 bp, Artificial Sequence
  primer
gtaaaacgacggccagtggtcagaggtagagcgaggac

SEQ ID NO: 68783 - DNA, 37 bp, Artificial Sequence
  primer
gtaaaacgacggccagtcttcctcaatcccgtccaac

SEQ ID NO: 68784 - DNA, 38 bp, Artificial Sequence; identical to SEQ ID NO: 68782
  primer

SEQ ID NO: 68785 - DNA, 38 bp, Artificial Sequence
  primer
gtaaaacgacggccagtcagagtgtctgaaggctgagg

SEQ ID NO: 68786 - DNA, 21 bp, Artificial Sequence
  primer
cctgtcaccattaaaggcacc

SEQ ID NO: 68787 - DNA, 38 bp, Artificial Sequence
  primer
gtaaaacgacggccagtacacctgatagacccagctcc

SEQ ID NO: 68788 - DNA, 21 bp, Artificial Sequence
  primer
caagcaatccacatgtcttgg

SEQ ID NO: 68789 - DNA, 36 bp, Artificial Sequence
  primer
gtaaaacgacggccagtcccactatcctgcaccaga

SEQ ID NO: 68790 - DNA, 23 bp, Artificial Sequence
  primer
tccatcccacatgtaactctctc

SEQ ID NO: 68791 - DNA, 43 bp, Artificial Sequence
  primer
gtaaaacgacggccagtaaatttctggaacaaacctcttattt

SEQ ID NO: 68792 - DNA, 23 bp, Artificial Sequence
  primer
ggaacagatctggttgcattaag

SEQ ID NO: 68793 - DNA, 41 bp, Artificial Sequence
  primer
gtaaaacgacggccagtaaggctttctacctaaagcgagac

SEQ ID NO: 68794 - DNA, 37 bp, Artificial Sequence
  primer
gtaaaacgacggccagtctggaggagactgcttctgg

SEQ ID NO: 68795 - DNA, 38 bp, Artificial Sequence
  primer
gtaaaacgacggccagttctttgtgctcgtcaaaccac

SEQ ID NO: 68796 - DNA, 21 bp, Artificial Sequence
  primer
gcagtggtcctcacatgtttc

SEQ ID NO: 68797 - DNA, 21 bp, Artificial Sequence
  primer
aacgcctaggaatggaatacg

SEQ ID NO: 68798 - DNA, 21 bp, Artificial Sequence
  primer
gcaatttcttgctgtgaaggg

SEQ ID NO: 68799 - DNA, 21 bp, Artificial Sequence
  primer
aggagtgccagaaactcaacc

SEQ ID NO: 68800 - DNA, 20 bp, Artificial Sequence
  primer
attcgcacaacctccaaatg

SEQ ID NO: 68801 - DNA, 37 bp, Artificial Sequence
  primer
gtaaaacgacggccagtatgggccagaaggatgtagc

SEQ ID NO: 68802 - DNA, 38 bp, Artificial Sequence
  primer
gtaaaacgacggccagtaaatctgtgcatccaagctcc

SEQ ID NO: 68803 - DNA, 22 bp, Artificial Sequence
  primer
tccagagattacatggttggag

SEQ ID NO: 68804 - DNA, 20 bp, Artificial Sequence
  primer
ccatcagccagtgaaagctc

SEQ ID NO: 68805 - DNA, 21 bp, Artificial Sequence
  primer
ttcaaacacatgaccagcatc

SEQ ID NO: 68806 - DNA, 22 bp, Artificial Sequence
  primer
aatgacaagaaactgctcccag

SEQ ID NO: 68807 - DNA, 21 bp, Artificial Sequence
  primer
tgattgctgagcatttcttgg

SEQ ID NO: 68808 - DNA, 24 bp, Artificial Sequence
  primer
aatgaatcctaaattgggaagttg

SEQ ID NO: 68809 - DNA, 37 bp, Artificial Sequence
  primer
gtaaaacgacggccagtttgcagctgggtttcatctc

SEQ ID NO: 68810 - DNA, 40 bp, Artificial Sequence
  primer
gtaaaacgacggccagtaaacttccatgatttgtgtctgc

SEQ ID NO: 68811 - DNA, 43 bp, Artificial Sequence
  primer
gtaaaacgacggccagtctcaacagctaactaaattcctttca

SEQ ID NO: 68812 - DNA, 21 bp, Artificial Sequence
  primer
aaggagacaatggaggaaggg

SEQ ID NO: 68813 - DNA, 38 bp, Artificial Sequence
  primer
gtaaaacgacggccagtttcattggccaagatagaacc

SEQ ID NO: 68814 - DNA, 24 bp, Artificial Sequence
  primer
tagcacctctatgacaaaggctac

SEQ ID NO: 68815 - DNA, 39 bp, Artificial Sequence
  primer
gtaaaacgacggccagtgaccagttggtgagtgattaca

SEQ ID NO: 68816 - DNA, 41 bp, Artificial Sequence
  primer
gtaaaacgacggccagtcaagcatgatgtaactttctagcc

SEQ ID NO: 68817 - DNA, 24 bp, Artificial Sequence
  primer
gccttctcagtttaagagttgtgg

SEQ ID NO: 68818 - DNA, 41 bp, Artificial Sequence
  primer
gtaaaacgacggccagtaaacttgtgtttgttcatgcactc

SEQ ID NO: 68819 - DNA, 23 bp, Artificial Sequence
  primer
tcttgtggttcagtttcttccac

SEQ ID NO: 68820 - DNA, 21 bp, Artificial Sequence
  primer
gatttctggcagtgtgtgtcc

SEQ ID NO: 68821 - DNA, 21 bp, Artificial Sequence
  primer
tgccagcacaagtttaaatcc

SEQ ID NO: 68822 - DNA, 38 bp, Artificial Sequence
  primer
gtaaaacgacggccagtccagagctaggcaagtcaacc

SEQ ID NO: 68823 - DNA, 38 bp, Artificial Sequence
  primer
gtaaaacgacggccagtcaaataaggagggactgctgc

SEQ ID NO: 68824 - DNA, 41 bp, Artificial Sequence
  primer
gtaaaacgacggccagtcagcataggatactcatcaggaaa

SEQ ID NO: 68825 - DNA, 35 bp, Artificial Sequence
  primer
gtaaaacgacggccagtggcacgcaggctttattt

SEQ ID NO: 68826 - DNA, 19 bp, Artificial Sequence
  primer
agaacgtgggaacaaagcc

SEQ ID NO: 68827 - DNA, 21 bp, Artificial Sequence
  primer
ggaaggaaagtcccatctgtg

SEQ ID NO: 68828 - DNA, 21 bp, Artificial Sequence
  primer
agatgctgcctgaaagaaacc

SEQ ID NO: 68829 - DNA, 38 bp, Artificial Sequence
  primer
gtaaaacgacggccagtggagagaccaactccatcagg

SEQ ID NO: 68830 - DNA, 38 bp, Artificial Sequence
  primer
gtaaaacgacggccagtctcaatggactccttcccaag

SEQ ID NO: 68831 - DNA, 39 bp, Artificial Sequence
  primer
gtaaaacgacggccagtcctggattcaaagtaagcaacc

SEQ ID NO: 68832 - DNA, 38 bp, Artificial Sequence
  primer
gtaaaacgacggccagtggagaaagatgaatgggcaac

SEQ ID NO: 68833 - DNA, 21 bp, Artificial Sequence
  primer
cattccctttcagaagatggc

SEQ ID NO: 68834 - DNA, 38 bp, Artificial Sequence
  primer
gtaaaacgacggccagtcaaactctgagcatgtgctgg

SEQ ID NO: 68835 - DNA, 21 bp, Artificial Sequence
  primer
aaacaattgcccttcctgatg

SEQ ID NO: 68836 - DNA, 20 bp, Artificial Sequence
  primer
tacaccagcaccaaacctcc

SEQ ID NO: 68837 - DNA, 21 bp, Artificial Sequence
  primer
tgatcctggacactagcgatg

SEQ ID NO: 68838 - DNA, 37 bp, Artificial Sequence
  primer
gtaaaacgacggccagtactctgttgccatcacagcc

SEQ ID NO: 68839 - DNA, 22 bp, Artificial Sequence
  primer
aagccaagattccaaactaccc

SEQ ID NO: 68840 - DNA, 20 bp, Artificial Sequence
  primer
ggcaacagtgaggacagagc

SEQ ID NO: 68841 - DNA, 38 bp, Artificial Sequence
  primer
gtaaaacgacggccagtccttccctcagacctcacttc

SEQ ID NO: 68842 - DNA, 21 bp, Artificial Sequence
  primer
cagtggcagttctggttgttg

SEQ ID NO: 68843 - DNA, 21 bp, Artificial Sequence
  primer
atgagcagtcgctcctctctc

SEQ ID NO: 68844 - DNA, 21 bp, Artificial Sequence
  primer
gagagggcagcatgtatcttg

SEQ ID NO: 68845 - DNA, 20 bp, Artificial Sequence
  primer
ggtggtgggcacctgtagtc

SEQ ID NO: 68846 - DNA, 37 bp, Artificial Sequence
  primer
gtaaaacgacggccagtcccacaagtttcaccttccc

SEQ ID NO: 68847 - DNA, 39 bp, Artificial Sequence
  primer
gtaaaacgacggccagttttctcaactctacacctgccc

SEQ ID NO: 68848 - DNA, 38 bp, Artificial Sequence
  primer
gtaaaacgacggccagtgagatgtggaggttcctggag

SEQ ID NO: 68849 - DNA, 21 bp, Artificial Sequence
  primer
atgtaacttggaggcaaaggg

SEQ ID NO: 68850 - DNA, 38 bp, Artificial Sequence
  primer
gtaaaacgacggccagtaacaggtgtgcatgaatgaaa

SEQ ID NO: 68851 - DNA, 39 bp, Artificial Sequence
  primer
gtaaaacgacggccagttgataagggatgaatgaatggc

SEQ ID NO: 68852 - DNA, 20 bp, Artificial Sequence
  primer
tatgccaagaagccatgacc

SEQ ID NO: 68853 - DNA, 38 bp, Artificial Sequence
  primer
gtaaaacgacggccagttccacaatagtcatgccacac

SEQ ID NO: 68854 - DNA, 40 bp, Artificial Sequence
  primer
gtaaaacgacggccagttttggtgtttatgggtgtgtaaa

SEQ ID NO: 68855 - DNA, 40 bp, Artificial Sequence
  primer
gtaaaacgacggccagtcattaatgcagagctaaggcaaa

SEQ ID NO: 68856 - DNA, 44 bp, Artificial Sequence
  primer
gtaaaacgacggccagttttatcaacagtaagatattcggtcaa

SEQ ID NO: 68857 - DNA, 24 bp, Artificial Sequence
  primer
aacatttctgtcagcaacagtgac

SEQ ID NO: 68858 - DNA, 38 bp, Artificial Sequence
  primer
gtaaaacgacggccagtgtcctcagtcacagctgatcg

SEQ ID NO: 68859 - DNA, 21 bp, Artificial Sequence
  primer
acctacatgccctcctgaatc

SEQ ID NO: 68860 - DNA, 38 bp, Artificial Sequence
  primer
gtaaaacgacggccagtccattgcaatattcagggagg

SEQ ID NO: 68861 - DNA, 18 bp, Artificial Sequence
  primer
cgcctggccgtattcttc

SEQ ID NO: 68862 - DNA, 43 bp, Artificial Sequence
  primer
gtaaaacgacggccagtaacatggtcttactttatgttcaggg

SEQ ID NO: 68863 - DNA, 38 bp, Artificial Sequence
  primer
gtaaaacgacggccagttctagccagggcaagagtgac

SEQ ID NO: 68864 - DNA, 39 bp, Artificial Sequence
  primer
gtaaaacgacggccagttgtgtgtagcaatgcagtttcc

SEQ ID NO: 68865 - DNA, 41 bp, Artificial Sequence
  primer
gtaaaacgacggccagtctctctggaagtggaagtaacaca

SEQ ID NO: 68866 - DNA, 38 bp, Artificial Sequence
  primer
gtaaaacgacggccagtctcagaaagtggtgggatgac

SEQ ID NO: 68867 - DNA, 23 bp, Artificial Sequence
  primer
ggaagagcattgagaccaatacc

SEQ ID NO: 68868 - DNA, 21 bp, Artificial Sequence
  primer
aaggtgtgcagcaaacaacag

SEQ ID NO: 68869 - DNA, 21 bp, Artificial Sequence
  primer
cacgaccactaccagctcaac

SEQ ID NO: 68870 - DNA, 22 bp, Artificial Sequence
  primer
aggtctccactggtaggaagtg

SEQ ID NO: 68871 - DNA, 38 bp, Artificial Sequence
  primer
gtaaaacgacggccagtttatgcaccactgtagctcgc

SEQ ID NO: 68872 - DNA, 20 bp, Artificial Sequence
  primer
actgccgtatggttccacag

SEQ ID NO: 68873 - DNA, 38 bp, Artificial Sequence
  primer
gtaaaacgacggccagtacattacaggagatcccgtcc

SEQ ID NO: 68874 - DNA, 38 bp, Artificial Sequence
  primer
gtaaaacgacggccagtttctggaccacatactgtgcc

SEQ ID NO: 68875 - DNA, 21 bp, Artificial Sequence
  primer
gacaggtaacgcaactttccc

SEQ ID NO: 68876 - DNA, 38 bp, Artificial Sequence
  primer
gtaaaacgacggccagtatgttccattgcaccattctg

SEQ ID NO: 68877 - DNA, 21 bp, Artificial Sequence
  primer
tagcctctgtgctggcagtag

SEQ ID NO: 68878 - DNA, 38 bp, Artificial Sequence
  primer
gtaaaacgacggccagtagaagcccgacagtaaacagg

SEQ ID NO: 68879 - DNA, 38 bp, Artificial Sequence
  primer
gtaaaacgacggccagtatgtgctcagtttcagggatg

SEQ ID NO: 68880 - DNA, 36 bp, Artificial Sequence
  primer
gtaaaacgacggccagttttcaatacgcctgagggc

SEQ ID NO: 68881 - DNA, 38 bp, Artificial Sequence
  primer
gtaaaacgacggccagtacccaactcatttcacccaag

SEQ ID NO: 68882 - DNA, 28 bp, Artificial Sequence
  primer
tgttatctgccagactttataacctaca

SEQ ID NO: 68883 - DNA, 44 bp, Artificial Sequence
  primer
gtaaaacgacggccagtttaagtctagcaattcctacagtaccc

SEQ ID NO: 68884 - DNA, 25 bp, Artificial Sequence
  primer
tccatcaccaatttaaagtcatttc

SEQ ID NO: 68885 - DNA, 22 bp, Artificial Sequence
  primer
gacccatcataagttgaggagc

SEQ ID NO: 68886 - DNA, 22 bp, Artificial Sequence
  primer
ttctccctcttgacgtgacttg

SEQ ID NO: 68887 - DNA, 20 bp, Artificial Sequence
  primer
tcacaccctgacaaattccc

SEQ ID NO: 68888 - DNA, 39 bp, Artificial Sequence
  primer
gtaaaacgacggccagtaggttacaacttgatgggcttc

SEQ ID NO: 68889 - DNA, 38 bp, Artificial Sequence
  primer
gtaaaacgacggccagtagttcctcttcccagccagac

SEQ ID NO: 68890 - DNA, 23 bp, Artificial Sequence
  primer
tctgccatgtcaaatcctaattg

SEQ ID NO: 68891 - DNA, 38 bp, Artificial Sequence
  primer
gtaaaacgacggccagtcaggccaccatactgatttgt

SEQ ID NO: 68892 - DNA, 21 bp, Artificial Sequence
  primer
tttgtgcgctggatgtttatc

SEQ ID NO: 68893 - DNA, 45 bp, Artificial Sequence
  primer
gtaaaacgacggccagttgcactaagttattgagtgtcatattcc

SEQ ID NO: 68894 - DNA, 23 bp, Artificial Sequence
  primer
tgtacatacagggcaagttgaaa

SEQ ID NO: 68895 - DNA, 21 bp, Artificial Sequence
  primer
ggcatgacatttgctccatac

SEQ ID NO: 68896 - DNA, 22 bp, Artificial Sequence
  primer
gatcctataaagcacctggcac

SEQ ID NO: 68897 - DNA, 38 bp, Artificial Sequence
  primer
gtaaaacgacggccagttttctctttgagggtcagtgc

SEQ ID NO: 68898 - DNA, 23 bp, Artificial Sequence
  primer
gcgatgcaatatctgcttatgtc

SEQ ID NO: 68899 - DNA, 38 bp, Artificial Sequence
  primer
gtaaaacgacggccagtttacttccagcacacacgtcc

SEQ ID NO: 68900 - DNA, 38 bp, Artificial Sequence
  primer
gtaaaacgacggccagttttgtgtgatgcagaaagcag

SEQ ID NO: 68901 - DNA, 39 bp, Artificial Sequence
  primer
gtaaaacgacggccagtaacggaaggaatcctaaactgc

SEQ ID NO: 68902 - DNA, 25 bp, Artificial Sequence
  primer
cccaggctttctcagattatacaac

SEQ ID NO: 68903 - DNA, 40 bp, Artificial Sequence
  primer
gtaaaacgacggccagtgggttaattgacagcctcagaaa

SEQ ID NO: 68904 - DNA, 38 bp, Artificial Sequence
  primer
gtaaaacgacggccagtataagcattgactggctgctg

SEQ ID NO: 68905 - DNA, 24 bp, Artificial Sequence
  primer
tgctatatttcacagcaccatcat

SEQ ID NO: 68906 - DNA, 36 bp, Artificial Sequence
  primer
gtaaaacgacggccagtcccatcatttcccatccag

SEQ ID NO: 68907 - DNA, 22 bp, Artificial Sequence
  primer
caagaccggagacatggtttac

SEQ ID NO: 68908 - DNA, 27 bp, Artificial Sequence
  primer
tgtatcaatgcagattaaactatttgc

SEQ ID NO: 68909 - DNA, 38 bp, Artificial Sequence
  primer
gtaaaacgacggccagttgtgaaactccgcttcctctc

SEQ ID NO: 68910 - DNA, 22 bp, Artificial Sequence
  primer
caagaccggagacatggtttac

SEQ ID NO: 68911 - DNA, 21 bp, Artificial Sequence
  primer
aaccagacttgctcacgaagc

SEQ ID NO: 68912 - DNA, 40 bp, Artificial Sequence
  primer
gtaaaacgacggccagtggaagaagtaatcaaacctgctg

SEQ ID NO: 68913 - DNA, 18 bp, Artificial Sequence
  primer
gcagggagggaaggaaag

SEQ ID NO: 68914 - DNA, 38 bp, Artificial Sequence
  primer
gtaaaacgacggccagtttgtgaactcagattctggca

SEQ ID NO: 68915 - DNA, 21 bp, Artificial Sequence
  primer
taagtgctgggtttgagatgc

SEQ ID NO: 68916 - DNA, 21 bp, Artificial Sequence
  primer
acgcagtgtgcactgatcaac

SEQ ID NO: 68917 - DNA, 20 bp, Artificial Sequence
  primer
caagaggacagggacattgc

SEQ ID NO: 68918 - DNA, 38 bp, Artificial Sequence
  primer
gtaaaacgacggccagtatcctttacgggtacatgggc

SEQ ID NO: 68919 - DNA, 21 bp, Artificial Sequence
  primer
aagagccaccactcattccag

SEQ ID NO: 68920 - DNA, 40 bp, Artificial Sequence
  primer
gtaaaacgacggccagtaaagcagtgtgttaaggctcaaa

SEQ ID NO: 68921 - DNA, 40 bp, Artificial Sequence
  primer
gtaaaacgacggccagtctccaaacaccgacaaataaatc

SEQ ID NO: 68922 - DNA, 39 bp, Artificial Sequence
  primer
gtaaaacgacggccagttccttagccagatgagcttcag

SEQ ID NO: 68923 - DNA, 22 bp, Artificial Sequence
  primer
gacaaaggaacccacagaaatc

SEQ ID NO: 68924 - DNA, 23 bp, Artificial Sequence
  primer
ctacatttgccatgtcatcattc

SEQ ID NO: 68925 - DNA, 38 bp, Artificial Sequence
  primer
gtaaaacgacggccagtctgactcattcccggagaaac

SEQ ID NO: 68926 - DNA, 38 bp, Artificial Sequence
  primer
gtaaaacgacggccagtaccaatacccgagagaccttg

SEQ ID NO: 68927 - DNA, 21 bp, Artificial Sequence
  primer
tgatatccagcactgttgcac

SEQ ID NO: 68928 - DNA, 21 bp, Artificial Sequence
  primer
ttgctcagacaaggccataag

SEQ ID NO: 68929 - DNA, 21 bp, Artificial Sequence
  primer
tagagataaatgttgcggccc

SEQ ID NO: 68930 - DNA, 21 bp, Artificial Sequence
  primer
gtcagacttgagtcccatccc

SEQ ID NO: 68931 - DNA, 39 bp, Artificial Sequence
  primer
gtaaaacgacggccagtttggcataacatgaagcaactc

SEQ ID NO: 68932 - DNA, 20 bp, Artificial Sequence
  primer
cttctctgagagccacagcc

SEQ ID NO: 68933 - DNA, 26 bp, Artificial Sequence
  primer
cagtttaatctatagccatttgcctc

SEQ ID NO: 68934 - DNA, 22 bp, Artificial Sequence
  primer
gagcaaatgtaagctgcaagtc

SEQ ID NO: 68935 - DNA, 20 bp, Artificial Sequence
  primer
ggactacaggtgcccaccac

SEQ ID NO: 68936 - DNA, 25 bp, Artificial Sequence
  primer
tcagaatccttaatttggcagtaac

SEQ ID NO: 68937 - DNA, 21 bp, Artificial Sequence
  primer
gttgagggtccgtgtttcttc

SEQ ID NO: 68938 - DNA, 21 bp, Artificial Sequence
  primer
gctccgtagtcattaccaccc

SEQ ID NO: 68939 - DNA, 21 bp, Artificial Sequence
  primer
gtctttgtatcactcgcagcc

SEQ ID NO: 68940 - DNA, 21 bp, Artificial Sequence
  primer
ttccacttgaaacacacaggc

SEQ ID NO: 68941 - DNA, 21 bp, Artificial Sequence
  primer
gtgagccataagcagcaacag

SEQ ID NO: 68942 - DNA, 21 bp, Artificial Sequence
  primer
aacatgctccttctacccacc

SEQ ID NO: 68943 - DNA, 21 bp, Artificial Sequence
  primer
agccactatcaagagaagcgg

SEQ ID NO: 68944 - DNA, 46 bp, Artificial Sequence
  primer
gtaaaacgacggccagtacaatgactatagtttcagtaaattgcac

SEQ ID NO: 68945 - DNA, 21 bp, Artificial Sequence
  primer
tcatatcaattgccctgatcg

SEQ ID NO: 68946 - DNA, 21 bp, Artificial Sequence
  primer
atgcttcatgtgcgttcattg

SEQ ID NO: 68947 - DNA, 37 bp, Artificial Sequence
  primer
gtaaaacgacggccagtcactttgccaaggctcagaa

SEQ ID NO: 68948 - DNA, 24 bp, Artificial Sequence
  primer
ccatgtcaacagactacagagaaa

SEQ ID NO: 68949 - DNA, 38 bp, Artificial Sequence
  primer
gtaaaacgacggccagttcgaacacgttgttgaagatg

SEQ ID NO: 68950 - DNA, 38 bp, Artificial Sequence
  primer
gtaaaacgacggccagttaatgttatagcgggccacac

SEQ ID NO: 68951 - DNA, 40 bp, Artificial Sequence
  primer
gtaaaacgacggccagtgaagattcaataggccatgtgtg

SEQ ID NO: 68952 - DNA, 23 bp, Artificial Sequence
  primer
ggataggacagaatggtcctttg

SEQ ID NO: 68953 - DNA, 21 bp, Artificial Sequence
  primer
tgatgaccaaatgcactttcc

SEQ ID NO: 68954 - DNA, 21 bp, Artificial Sequence
  primer
atcgggaaacaaggcacatag

SEQ ID NO: 68955 - DNA, 22 bp, Artificial Sequence
  primer
gcatttcatgaatgattcccag

SEQ ID NO: 68956 - DNA, 44 bp, Artificial Sequence
  primer
gtaaaacgacggccagtggataaatattgtggattcaacatcaa

SEQ ID NO: 68957 - DNA, 41 bp, Artificial Sequence
  primer
gtaaaacgacggccagtaaagaccatctgcatgtatttctg

SEQ ID NO: 68958 - DNA, 38 bp, Artificial Sequence
  primer
gtaaaacgacggccagtaaacgctgctgggtagaaatg

SEQ ID NO: 68959 - DNA, 21 bp, Artificial Sequence
  primer
ttgtgggctatgactttcacc

SEQ ID NO: 68960 - DNA, 21 bp, Artificial Sequence
  primer
gcacccatctccaaatcatac

SEQ ID NO: 68961 - DNA, 39 bp, Artificial Sequence
  primer
gtaaaacgacggccagtttgagtcgagagcaaatactgg

SEQ ID NO: 68962 - DNA, 22 bp, Artificial Sequence
  primer
gcatgggatatactgatgctga

SEQ ID NO: 68963 - DNA, 22 bp, Artificial Sequence
  primer
gcagttattctggacaaatggc

SEQ ID NO: 68964 - DNA, 37 bp, Artificial Sequence
  primer
gtaaaacgacggccagtcctccagcaactttgagtcg

SEQ ID NO: 68965 - DNA, 38 bp, Artificial Sequence
  primer
gtaaaacgacggccagtgcgtaatgttctccgacttcc

SEQ ID NO: 68966 - DNA, 38 bp, Artificial Sequence
  primer
gtaaaacgacggccagtagttattggtgggttgccttc

SEQ ID NO: 68967 - DNA, 21 bp, Artificial Sequence
  primer
agtaccattgcaccactctgg

SEQ ID NO: 68968 - DNA, 38 bp, Artificial Sequence
  primer
gtaaaacgacggccagttgaccaacacggtcacctaag

SEQ ID NO: 68969 - DNA, 38 bp, Artificial Sequence
  primer
gtaaaacgacggccagttgtttattgttgcagatgccc

SEQ ID NO: 68970 - DNA, 21 bp, Artificial Sequence
  primer
cctgaggatgactctgggaag

SEQ ID NO: 68971 - DNA, 21 bp, Artificial Sequence
  primer
tcacatgaggttgactctggg

SEQ ID NO: 68972 - DNA, 21 bp, Artificial Sequence
  primer
gcagtaggtaggacacgggac

SEQ ID NO: 68973 - DNA, 21 bp, Artificial Sequence
  primer
ccaggaaagtcccttagcctc

SEQ ID NO: 68974 - DNA, 41 bp, Artificial Sequence
  primer
gtaaaacgacggccagtcgaacatcttgaaagtaggtgtcc

SEQ ID NO: 68975 - DNA, 21 bp, Artificial Sequence
  primer
ctgcaattgctaaacccagtg

SEQ ID NO: 68976 - DNA, 21 bp, Artificial Sequence
  primer
tgcaaggtcacattcatttcc

SEQ ID NO: 68977 - DNA, 19 bp, Artificial Sequence
  primer
taggagcctccatggcatc

SEQ ID NO: 68978 - DNA, 38 bp, Artificial Sequence
  primer
gtaaaacgacggccagttcaggcaaacagtcaaactgc

SEQ ID NO: 68979 - DNA, 38 bp, Artificial Sequence
  primer
gtaaaacgacggccagtgtcaatgcttcctccataccc

SEQ ID NO: 68980 - DNA, 38 bp, Artificial Sequence
  primer
gtaaaacgacggccagtgagtatggattgcccggttac

SEQ ID NO: 68981 - DNA, 38 bp, Artificial Sequence
  primer
gtaaaacgacggccagtctcagtctctcaaagccctgg

SEQ ID NO: 68982 - DNA, 44 bp, Artificial Sequence
  primer
gtaaaacgacggccagttgctgatgtcctagatatcactcagat

SEQ ID NO: 68983 - DNA, 22 bp, Artificial Sequence
  primer
tcacaggacagcatctcttcac

SEQ ID NO: 68984 - DNA, 22 bp, Artificial Sequence
  primer
cctgtgaatcttgagagccttc

SEQ ID NO: 68985 - DNA, 39 bp, Artificial Sequence
  primer
gtaaaacgacggccagtcataggaaagctccttcaaccc

SEQ ID NO: 68986 - DNA, 44 bp, Artificial Sequence
  primer
gtaaaacgacggccagtaggatatttgctacaattctacagtgg

SEQ ID NO: 68987 - DNA, 38 bp, Artificial Sequence
  primer
gtaaaacgacggccagttagaaatgtgaagtgccaggg

SEQ ID NO: 68988 - DNA, 22 bp, Artificial Sequence
  primer
gcaataattcatctgcctcacc

SEQ ID NO: 68989 - DNA, 26 bp, Artificial Sequence
  primer
gcacatactaaataatcaaagcatgg

SEQ ID NO: 68990 - DNA, 26 bp, Artificial Sequence
  primer
gaacagcatgcgtatttatgatattt

SEQ ID NO: 68991 - DNA, 24 bp, Artificial Sequence
  primer
ggtccattgatagctaatttgtgc

SEQ ID NO: 68992 - DNA, 23 bp, Artificial Sequence
  primer
cttactgtcaacattctgcatgg

SEQ ID NO: 68993 - DNA, 26 bp, Artificial Sequence
  primer
gctgtaggtctgtgttgtaaagtacc

SEQ ID NO: 68994 - DNA, 22 bp, Artificial Sequence
  primer
gaattagcgcgtatatgtttgc

SEQ ID NO: 68995 - DNA, 39 bp, Artificial Sequence
  primer
gtaaaacgacggccagtaccactggaatgaatgacacag

SEQ ID NO: 68996 - DNA, 41 bp, Artificial Sequence
  primer
gtaaaacgacggccagttgcctccaaacatttaagattacc

SEQ ID NO: 68997 - DNA, 23 bp, Artificial Sequence
  primer
caattgaagctagatgcaacaga

SEQ ID NO: 68998 - DNA, 39 bp, Artificial Sequence
  primer
gtaaaacgacggccagttaagatggcatgtttggtttcc

SEQ ID NO: 68999 - DNA, 40 bp, Artificial Sequence
  primer
gtaaaacgacggccagtttgctactgctcgtgatattgtc

SEQ ID NO: 69000 - DNA, 21 bp, Artificial Sequence
  primer
ctggatttcagtgcattgctt

SEQ ID NO: 69001 - DNA, 41 bp, Artificial Sequence
  primer
gtaaaacgacggccagtttgctttaccaattgacattgttc

SEQ ID NO: 69002 - DNA, 27 bp, Artificial Sequence
  primer
aactaaactgcaggaaagaagatattg

SEQ ID NO: 69003 - DNA, 38 bp, Artificial Sequence
  primer
gtaaaacgacggccagtgactttatcgattgtggctgc

SEQ ID NO: 69004 - DNA, 41 bp, Artificial Sequence
  primer
gtaaaacgacggccagttttaccaattcatctacccagtcc

SEQ ID NO: 69005 - DNA, 21 bp, Artificial Sequence
  primer
ggacagctgagatgagtttgg

SEQ ID NO: 69006 - DNA, 36 bp, Artificial Sequence
  primer
gtaaaacgacggccagtagcacacttgagcgtccct

SEQ ID NO: 69007 - DNA, 37 bp, Artificial Sequence
  primer
gtaaaacgacggccagtagtgacttggtggttctggg

SEQ ID NO: 69008 - DNA, 37 bp, Artificial Sequence
  primer
gtaaaacgacggccagtgtcatctgcaccctctctgg

SEQ ID NO: 69009 - DNA, 21 bp, Artificial Sequence
  primer
cttactcgcccttggtagtgg

SEQ ID NO: 69010 - DNA, 21 bp, Artificial Sequence
  primer
cgcagataatagctggcattc

SEQ ID NO: 69011 - DNA, 21 bp, Artificial Sequence
  primer
cctgtgaattcccgtctcttc

SEQ ID NO: 69012 - DNA, 21 bp, Artificial Sequence
  primer
agtcaagaactgggaaggcag

SEQ ID NO: 69013 - DNA, 21 bp, Artificial Sequence
  primer
cctgaatgtccagagtcctga

SEQ ID NO: 69014 - DNA, 21 bp, Artificial Sequence
  primer
tagagcctcctgtctctccct

SEQ ID NO: 69015 - DNA, 18 bp, Artificial Sequence
  primer
gaggctgtggccgatctc

SEQ ID NO: 69016 - DNA, 18 bp, Artificial Sequence
  primer
caaagaaacgcagcggag

SEQ ID NO: 69017 - DNA, 37 bp, Artificial Sequence
  primer
gtaaaacgacggccagtggaccagaaaggcaagaagg

SEQ ID NO: 69018 - DNA, 18 bp, Artificial Sequence
  primer
gagccaggcctacccaag

SEQ ID NO: 69019 - DNA, 35 bp, Artificial Sequence
  primer
gtaaaacgacggccagttcagcgggcctcagtttc

SEQ ID NO: 69020 - DNA, 21 bp, Artificial Sequence
  primer
ggccatctaggtgaacggtag

SEQ ID NO: 69021 - DNA, 39 bp, Artificial Sequence
  primer
gtaaaacgacggccagtgggtcacgtaggattaggaacc

SEQ ID NO: 69022 - DNA, 20 bp, Artificial Sequence
  primer
agcctggcttgtcacagaag

SEQ ID NO: 69023 - DNA, 20 bp, Artificial Sequence
  primer
agcaggaaggtgtcatggtc

SEQ ID NO: 69024 - DNA, 21 bp, Artificial Sequence
  primer
gctacttctttccatggcctc

SEQ ID NO: 69025 - DNA, 37 bp, Artificial Sequence
  primer
gtaaaacgacggccagtgactcaaggtgactgggtgc

SEQ ID NO: 69026 - DNA, 21 bp, Artificial Sequence
  primer
cagtgaggaccagtgatccag

SEQ ID NO: 69027 - DNA, 37 bp, Artificial Sequence
  primer
gtaaaacgacggccagtcagtgttctccagccctcag

SEQ ID NO: 69028 - DNA, 21 bp, Artificial Sequence
  primer
tcctcactgtgggtcagaatg

SEQ ID NO: 69029 - DNA, 39 bp, Artificial Sequence
  primer
gtaaaacgacggccagtttgcttctggttggagctagag

SEQ ID NO: 69030 - DNA, 39 bp, Artificial Sequence
  primer
gtaaaacgacggccagtagaacagtggcatctgtgattg

SEQ ID NO: 69031 - DNA, 21 bp, Artificial Sequence
  primer
aggttagggtccacacaatcg

SEQ ID NO: 69032 - DNA, 23 bp, Artificial Sequence
  primer
aggctacagctgaaactgctaaa

SEQ ID NO: 69033 - DNA, 23 bp, Artificial Sequence
  primer
aagtgccagactgaaagtagcac

SEQ ID NO: 69034 - DNA, 38 bp, Artificial Sequence
  primer
gtaaaacgacggccagtctgctattgtggcaaaggacc

SEQ ID NO: 69035 - DNA, 37 bp, Artificial Sequence
  primer
gtaaaacgacggccagtcagagaactgcgctgaaagg

SEQ ID NO: 69036 - DNA, 20 bp, Artificial Sequence
  primer
tttgtccctgtgtgctaccc

SEQ ID NO: 69037 - DNA, 24 bp, Artificial Sequence
  primer
agctttactaatcattgcatgctg

SEQ ID NO: 69038 - DNA, 18 bp, Artificial Sequence
  primer
ttacacgcatgtgccacc

SEQ ID NO: 69039 - DNA, 21 bp, Artificial Sequence
  primer
acggttggtttgattaatggc

SEQ ID NO: 69040 - DNA, 20 bp, Artificial Sequence
  primer
agcccaatgctcagatgttg

SEQ ID NO: 69041 - DNA, 20 bp, Artificial Sequence
  primer
tgacccaattcctacagggc

SEQ ID NO: 69042 - DNA, 22 bp, Artificial Sequence
  primer
ttcttatttccctcttctcccg

SEQ ID NO: 69043 - DNA, 24 bp, Artificial Sequence
  primer
agacctctttggaagcaattacag

SEQ ID NO: 69044 - DNA, 28 bp, Artificial Sequence
  primer
gcattacttgtaatactggctgtatctg

SEQ ID NO: 69045 - DNA, 21 bp, Artificial Sequence
  primer
ttgtgtgttgagggtttgtgg

SEQ ID NO: 69046 - DNA, 22 bp, Artificial Sequence
  primer
aatgtgcacaagtttgggaatc

SEQ ID NO: 69047 - DNA, 22 bp, Artificial Sequence
  primer
tcacttagcttaggacgggttc

SEQ ID NO: 69048 - DNA, 21 bp, Artificial Sequence
  primer
tcctttggtccggttagaaag

SEQ ID NO: 69049 - DNA, 25 bp, Artificial Sequence
  primer
tctggataaagaacgtttgaaacac

SEQ ID NO: 69050 - DNA, 37 bp, Artificial Sequence
  primer
gtaaaacgacggccagtctttgaaggttccctccgac

SEQ ID NO: 69051 - DNA, 37 bp, Artificial Sequence
  primer
gtaaaacgacggccagttggcctctcaccactttctg

SEQ ID NO: 69052 - DNA, 39 bp, Artificial Sequence
  primer
gtaaaacgacggccagtaaagaagtgctgtgactgcctc

SEQ ID NO: 69053 - DNA, 37 bp, Artificial Sequence
  primer
gtaaaacgacggccagtgtagaagcagtggtcctgcg

SEQ ID NO: 69054 - DNA, 19 bp, Artificial Sequence
  primer
acagcaaaggcctgagtgg

SEQ ID NO: 69055 - DNA, 19 bp, Artificial Sequence
  primer
ctccaggctgcagacaatg

SEQ ID NO: 69056 - DNA, 20 bp, Artificial Sequence
  primer
acgtgattcaccacctccag

SEQ ID NO: 69057 - DNA, 20 bp, Artificial Sequence
  primer
aaggtacagcagggagggtg

SEQ ID NO: 69058 - DNA, 21 bp, Artificial Sequence
  primer
aagtgggagtgacacagatgc

SEQ ID NO: 69059 - DNA, 20 bp, Artificial Sequence
  primer
ctccagagacctggaccgag

SEQ ID NO: 69060 - DNA, 21 bp, Artificial Sequence
  primer
tgcagtcactgaacatcctgg

SEQ ID NO: 69061 - DNA, 20 bp, Artificial Sequence
  primer
agttccacgtgtggatgtgc

SEQ ID NO: 69062 - DNA, 20 bp, Artificial Sequence
  primer
ccagcagagaacagctcacc

SEQ ID NO: 69063 - DNA, 39 bp, Artificial Sequence
  primer
gtaaaacgacggccagtgcagcctggtaggatgtcatag

SEQ ID NO: 69064 - DNA, 19 bp, Artificial Sequence
  primer
cagaccctcatgggagcag

SEQ ID NO: 69065 - DNA, 20 bp, Artificial Sequence
  primer
ctcagaaacgcatctgcacc

SEQ ID NO: 69066 - DNA, 20 bp, Artificial Sequence
  primer
gtgaccatgcaggttccatc

SEQ ID NO: 69067 - DNA, 22 bp, Artificial Sequence
  primer
acagacaggctctgcctatacc

SEQ ID NO: 69068 - DNA, 36 bp, Artificial Sequence
  primer
gtaaaacgacggccagtacagaggagcctgggtgtc

SEQ ID NO: 69069 - DNA, 38 bp, Artificial Sequence
  primer
gtaaaacgacggccagtgcgtgaatttaatgaaagggc

SEQ ID NO: 69070 - DNA, 19 bp, Artificial Sequence
  primer
ctcacgaggtcgggctaac

SEQ ID NO: 69071 - DNA, 20 bp, Artificial Sequence
  primer
agtacagccactgccaatgc

SEQ ID NO: 69072 - DNA, 37 bp, Artificial Sequence
  primer
gtaaaacgacggccagtggagaaggaattggctgagg

SEQ ID NO: 69073 - DNA, 37 bp, Artificial Sequence
  primer
gtaaaacgacggccagtcaggcaccacaggttcactc

SEQ ID NO: 69074 - DNA, 24 bp, Artificial Sequence
  primer
ctgctacaaataacacctttgtgc

SEQ ID NO: 69075 - DNA, 39 bp, Artificial Sequence
  primer
gtaaaacgacggccagttgtgcagcaccaatatgaagag

SEQ ID NO: 69076 - DNA, 39 bp, Artificial Sequence
  primer
gtaaaacgacggccagtaatgttaaaggtaccctgtggg

SEQ ID NO: 69077 - DNA, 23 bp, Artificial Sequence
  primer
catgccaaggatatctgaaacac

SEQ ID NO: 69078 - DNA, 24 bp, Artificial Sequence
  primer
tgtactcaacttggtagcaggaac

SEQ ID NO: 69079 - DNA, 22 bp, Artificial Sequence
  primer
gcttctgttggtattctggtgg

SEQ ID NO: 69080 - DNA, 22 bp, Artificial Sequence
  primer
gcacctaagcctagcaactctg

SEQ ID NO: 69081 - DNA, 23 bp, Artificial Sequence
  primer
aaggaggatatgggagaaaggtc

SEQ ID NO: 69082 - DNA, 38 bp, Artificial Sequence
  primer
gtaaaacgacggccagtaaagaacccatctgcgacttc

SEQ ID NO: 69083 - DNA, 38 bp, Artificial Sequence
  primer
gtaaaacgacggccagtgcaattaatttcagcaaaccg

SEQ ID NO: 69084 - DNA, 21 bp, Artificial Sequence
  primer
cctatgtcagagttgcccaaa

SEQ ID NO: 69085 - DNA, 26 bp, Artificial Sequence
  primer
aaacaatatcaacagaccacttaacg

SEQ ID NO: 69086 - DNA, 21 bp, Artificial Sequence
  primer
tgcctccaaagaagaaaggaa

SEQ ID NO: 69087 - DNA, 18 bp, Artificial Sequence
  primer
gcctggcaacagagcaag

SEQ ID NO: 69088 - DNA, 41 bp, Artificial Sequence
  primer
gtaaaacgacggccagtcccagtaaggaaatgtggataaca

SEQ ID NO: 69089 - DNA, 40 bp, Artificial Sequence
  primer
gtaaaacgacggccagtgaatggaaaccaagagaaaggac

SEQ ID NO: 69090 - DNA, 22 bp, Artificial Sequence
  primer
tcacaaggaatttaggaggctg

SEQ ID NO: 69091 - DNA, 20 bp, Artificial Sequence
  primer
ccagggaagtcgagattctg

SEQ ID NO: 69092 - DNA, 40 bp, Artificial Sequence
  primer
gtaaaacgacggccagtctcagggaccacctacaatactc

SEQ ID NO: 69093 - DNA, 47 bp, Artificial Sequence
  primer
gtaaaacgacggccagtaactgttgacaataaatacctttcactaaa

SEQ ID NO: 69094 - DNA, 21 bp, Artificial Sequence
  primer
tccctggctttactgcatttc

SEQ ID NO: 69095 - DNA, 23 bp, Artificial Sequence
  primer
gcaaatggtaatggtctttcgac

SEQ ID NO: 69096 - DNA, 39 bp, Artificial Sequence
  primer
gtaaaacgacggccagtgggagttgtatacatgggcttc

SEQ ID NO: 69097 - DNA, 39 bp, Artificial Sequence
  primer
gtaaaacgacggccagttcaaaccacactaaatggagcc

SEQ ID NO: 69098 - DNA, 39 bp, Artificial Sequence
  primer
gtaaaacgacggccagtttgagccctttggagatcttag

SEQ ID NO: 69099 - DNA, 38 bp, Artificial Sequence
  primer
gtaaaacgacggccagtattgctaggcctgacttctcc

SEQ ID NO: 69100 - DNA, 38 bp, Artificial Sequence
  primer
gtaaaacgacggccagttttctgtgcccgaagaaagtc

SEQ ID NO: 69101 - DNA, 21 bp, Artificial Sequence
  primer
agacacccaggtggacaaatg

SEQ ID NO: 69102 - DNA, 22 bp, Artificial Sequence
  primer
tgcatgtgatttcaccttgatg

SEQ ID NO: 69103 - DNA, 38 bp, Artificial Sequence
  primer
gtaaaacgacggccagtgaaatccctgctaaggaaccc

SEQ ID NO: 69104 - DNA, 20 bp, Artificial Sequence
  primer
acccaagggatcttcagtgc

SEQ ID NO: 69105 - DNA, 25 bp, Artificial Sequence
  primer
tgggtaacactttcaatctatcctg

SEQ ID NO: 69106 - DNA, 25 bp, Artificial Sequence
  primer
actacgatgccaagtttgtctttag

SEQ ID NO: 69107 - DNA, 38 bp, Artificial Sequence
  primer
gtaaaacgacggccagtttccagcagccctaatctcac

SEQ ID NO: 69108 - DNA, 38 bp, Artificial Sequence
  primer
gtaaaacgacggccagtttcacaagattcctgggacag

SEQ ID NO: 69109 - DNA, 21 bp, Artificial Sequence
  primer
accactagctcctcgtcctcc

SEQ ID NO: 69110 - DNA, 37 bp, Artificial Sequence
  primer
gtaaaacgacggccagtagtagaagcagtgcgccagg

SEQ ID NO: 69111 - DNA, 38 bp, Artificial Sequence
  primer
gtaaaacgacggccagtgcaattcttctacctgtgggc

SEQ ID NO: 69112 - DNA, 38 bp, Artificial Sequence
  primer
gtaaaacgacggccagtaaccacattcctccactccag

SEQ ID NO: 69113 - DNA, 38 bp, Artificial Sequence
  primer
gtaaaacgacggccagtaaacactggtgaaatgccttg

SEQ ID NO: 69114 - DNA, 43 bp, Artificial Sequence
  primer
gtaaaacgacggccagtagggtgtaaacaaacatacacatttc

SEQ ID NO: 69115 - DNA, 26 bp, Artificial Sequence
  primer
tctcaacagttaggatcttgacagag

SEQ ID NO: 69116 - DNA, 20 bp, Artificial Sequence
  primer
tcctgctagaggacacggat

SEQ ID NO: 69117 - DNA, 21 bp, Artificial Sequence
  primer
caatcttgagccacctgtttg

SEQ ID NO: 69118 - DNA, 39 bp, Artificial Sequence
  primer
gtaaaacgacggccagtctaaactcaaagcaggcagttg

SEQ ID NO: 69119 - DNA, 38 bp, Artificial Sequence
  primer
gtaaaacgacggccagttgatatccaggtctgcaggtg

SEQ ID NO: 69120 - DNA, 38 bp, Artificial Sequence
  primer
gtaaaacgacggccagtgcattgcccacagtaagaacc

SEQ ID NO: 69121 - DNA, 20 bp, Artificial Sequence
  primer
atggtctgcacaaggtctgg

SEQ ID NO: 69122 - DNA, 37 bp, Artificial Sequence
  primer
gtaaaacgacggccagtcctccagccttcttgctttc

SEQ ID NO: 69123 - DNA, 38 bp, Artificial Sequence
  primer
gtaaaacgacggccagtgatgcctctttctgttggagc

SEQ ID NO: 69124 - DNA, 22 bp, Artificial Sequence
  primer
ccactatcattccttctctgcc

SEQ ID NO: 69125 - DNA, 21 bp, Artificial Sequence
  primer
tctcagcagctccattcttcc

SEQ ID NO: 69126 - DNA, 21 bp, Artificial Sequence
  primer
gcctgcaaccttcctttctac

SEQ ID NO: 69127 - DNA, 37 bp, Artificial Sequence
  primer
gtaaaacgacggccagtgtgatctccagagtgggctg

SEQ ID NO: 69128 - DNA, 21 bp, Artificial Sequence
  primer
tgtttggactctcatggttcc

SEQ ID NO: 69129 - DNA, 20 bp, Artificial Sequence
  primer
aatgtcctcattgacgctgc

SEQ ID NO: 69130 - DNA, 20 bp, Artificial Sequence
  primer
gtcatggttcatgccgaatc

SEQ ID NO: 69131 - DNA, 38 bp, Artificial Sequence
  primer
gtaaaacgacggccagtcctgatttctatcgtctcccg

SEQ ID NO: 69132 - DNA, 21 bp, Artificial Sequence
  primer
acctctgtcctcccaggtcac

SEQ ID NO: 69133 - DNA, 38 bp, Artificial Sequence
  primer
gtaaaacgacggccagtgcagataataggccgaaggac

SEQ ID NO: 69134 - DNA, 21 bp, Artificial Sequence
  primer
gaactcacatccgtgttgcag

SEQ ID NO: 69135 - DNA, 18 bp, Artificial Sequence
  primer
gacctcgtgatccgcctg

SEQ ID NO: 69136 - DNA, 37 bp, Artificial Sequence
  primer
gtaaaacgacggccagtatgctgcattcatccacctg

SEQ ID NO: 69137 - DNA, 38 bp, Artificial Sequence
  primer
gtaaaacgacggccagtacacactcggcacttgtcctc

SEQ ID NO: 69138 - DNA, 21 bp, Artificial Sequence
  primer
cagctactgcactgggatcag

SEQ ID NO: 69139 - DNA, 20 bp, Artificial Sequence
  primer
ggtcccagctagaggcagac

SEQ ID NO: 69140 - DNA, 19 bp, Artificial Sequence
  primer
cattgaagcggtagcggag

SEQ ID NO: 69141 - DNA, 18 bp, Artificial Sequence
  primer
cctgcacctggctacctg

SEQ ID NO: 69142 - DNA, 21 bp, Artificial Sequence
  primer
tccgactctgcactaatctgc

SEQ ID NO: 69143 - DNA, 21 bp, Artificial Sequence
  primer
gggacagctaacctggagacc

SEQ ID NO: 69144 - DNA, 21 bp, Artificial Sequence
  primer
tggtcacccacataccttcag

SEQ ID NO: 69145 - DNA, 37 bp, Artificial Sequence
  primer
gtaaaacgacggccagtatgcatttccgaggttccag

SEQ ID NO: 69146 - DNA, 21 bp, Artificial Sequence
  primer
taaataacttccggctccgtc

SEQ ID NO: 69147 - DNA, 38 bp, Artificial Sequence
  primer
gtaaaacgacggccagtagatttccttacaacgcagcc

SEQ ID NO: 69148 - DNA, 21 bp, Artificial Sequence
  primer
gtgcatctgtgaacctgttgg

SEQ ID NO: 69149 - DNA, 24 bp, Artificial Sequence
  primer
tgcagagactcgagtattgacaag

SEQ ID NO: 69150 - DNA, 22 bp, Artificial Sequence
  primer
tccatattcatccttaggcagg

SEQ ID NO: 69151 - DNA, 21 bp, Artificial Sequence
  primer
gatgggcttccaaacactttc

SEQ ID NO: 69152 - DNA, 21 bp, Artificial Sequence
  primer
acacctggtaagcctttcacc

SEQ ID NO: 69153 - DNA, 41 bp, Artificial Sequence
  primer
gtaaaacgacggccagtggtgtgttcacctcaaattctctc

SEQ ID NO: 69154 - DNA, 20 bp, Artificial Sequence
  primer
tttccaggcatcagcttctc

SEQ ID NO: 69155 - DNA, 21 bp, Artificial Sequence
  primer
caaatattgtcctggcccttc

SEQ ID NO: 69156 - DNA, 38 bp, Artificial Sequence
  primer
gtaaaacgacggccagtcctctagggccttctcctcag

SEQ ID NO: 69157 - DNA, 21 bp, Artificial Sequence
  primer
gtcactgaggtcatgccattc

SEQ ID NO: 69158 - DNA, 22 bp, Artificial Sequence
  primer
ccaggtcagtgtttccatcttc

SEQ ID NO: 69159 - DNA, 38 bp, Artificial Sequence
  primer
gtaaaacgacggccagtaatgctgtgaaagcacaaacc

SEQ ID NO: 69160 - DNA, 21 bp, Artificial Sequence
  primer
ttcctcctttgtggtaaaggc

SEQ ID NO: 69161 - DNA, 37 bp, Artificial Sequence
  primer
gtaaaacgacggccagtcctccctgctccttgctaaa

SEQ ID NO: 69162 - DNA, 20 bp, Artificial Sequence
  primer
atgttcactgtccgcagagg

SEQ ID NO: 69163 - DNA, 21 bp, Artificial Sequence
  primer
tatgtcctcacagcttgccac

SEQ ID NO: 69164 - DNA, 38 bp, Artificial Sequence
  primer
gtaaaacgacggccagtcctagggtcactttggattgg

SEQ ID NO: 69165 - DNA, 21 bp, Artificial Sequence
  primer
acaggccaagtgatagggttg

SEQ ID NO: 69166 - DNA, 37 bp, Artificial Sequence
  primer
gtaaaacgacggccagtcagagggagcagagtgttgg

SEQ ID NO: 69167 - DNA, 38 bp, Artificial Sequence
  primer
gtaaaacgacggccagttcttacctcgctccagtttcc

SEQ ID NO: 69168 - DNA, 21 bp, Artificial Sequence
  primer
ttcagaattgtacacggcagg

SEQ ID NO: 69169 - DNA, 21 bp, Artificial Sequence
  primer
taacaaacctgaacgttgtgc

SEQ ID NO: 69170 - DNA, 21 bp, Artificial Sequence
  primer
ggtgtggtcttccctgatttc

SEQ ID NO: 69171 - DNA, 21 bp, Artificial Sequence
  primer
acgttgtgcacaggtacccta

SEQ ID NO: 69172 - DNA, 38 bp, Artificial Sequence
  primer
gtaaaacgacggccagtttcccagggttactggttgac

SEQ ID NO: 69173 - DNA, 21 bp, Artificial Sequence
  primer
catgacccaaagctgaatctg

SEQ ID NO: 69174 - DNA, 38 bp, Artificial Sequence
  primer
gtaaaacgacggccagttcagtgagcacacttcatccc

SEQ ID NO: 69175 - DNA, 22 bp, Artificial Sequence
  primer
aattaacagggttgacagcagc

SEQ ID NO: 69176 - DNA, 38 bp, Artificial Sequence
  primer
gtaaaacgacggccagtcagatacaccagcccacagac

SEQ ID NO: 69177 - DNA, 38 bp, Artificial Sequence
  primer
gtaaaacgacggccagtaaagaggatggagatgcgatg

SEQ ID NO: 69178 - DNA, 20 bp, Artificial Sequence
  primer
aacagtcacttgggtggtgc

SEQ ID NO: 69179 - DNA, 38 bp, Artificial Sequence
  primer
gtaaaacgacggccagtcttgctaagaccacctccacc

SEQ ID NO: 69180 - DNA, 21 bp, Artificial Sequence
  primer
gacggacgtagagagaggtgg

SEQ ID NO: 69181 - DNA, 37 bp, Artificial Sequence
  primer
gtaaaacgacggccagtagcaggttctcaccatgcac

SEQ ID NO: 69182 - DNA, 38 bp, Artificial Sequence
  primer
gtaaaacgacggccagtgccaactccaagactctctgc

SEQ ID NO: 69183 - DNA, 20 bp, Artificial Sequence
  primer
ggcctacctgagtgttgcac

SEQ ID NO: 69184 - DNA, 38 bp, Artificial Sequence
  primer
gtaaaacgacggccagtcacagatggtcactttggctc

SEQ ID NO: 69185 - DNA, 20 bp, Artificial Sequence
  primer
cagagcctgaaccactttgc

SEQ ID NO: 69186 - DNA, 21 bp, Artificial Sequence
  primer
ttaacccaggctgactccaag

SEQ ID NO: 69187 - DNA, 20 bp, Artificial Sequence
  primer
gcgaagtggaagagggagac

SEQ ID NO: 69188 - DNA, 22 bp, Artificial Sequence
  primer
ctctcagtgagctctgggagtc

SEQ ID NO: 69189 - DNA, 21 bp, Artificial Sequence
  primer
tggatggatagacaaacgagc

SEQ ID NO: 69190 - DNA, 21 bp, Artificial Sequence
  primer
ccaggcagctgtagtttaccc

SEQ ID NO: 69191 - DNA, 19 bp, Artificial Sequence
  primer
ccataggccagggacagag

SEQ ID NO: 69192 - DNA, 20 bp, Artificial Sequence
  primer
acttacaaccgccaggtgac

SEQ ID NO: 69193 - DNA, 38 bp, Artificial Sequence
  primer
gtaaaacgacggccagtaggatggtgttcttgctctgg

SEQ ID NO: 69194 - DNA, 21 bp, Artificial Sequence
  primer
ttctgcaatccacctcaaatg

SEQ ID NO: 69195 - DNA, 20 bp, Artificial Sequence
  primer
ctcacacagtgcacagccag

SEQ ID NO: 69196 - DNA, 20 bp, Artificial Sequence
  primer
ctgcgattacaggcacacac

SEQ ID NO: 69197 - DNA, 38 bp, Artificial Sequence
  primer
gtaaaacgacggccagtatgagccaatgcctcctagac

SEQ ID NO: 69198 - DNA, 38 bp, Artificial Sequence
  primer
gtaaaacgacggccagtagtccttcccagaggaagatg

SEQ ID NO: 69199 - DNA, 21 bp, Artificial Sequence
  primer
tgcaaactacaggtgggaatg

SEQ ID NO: 69200 - DNA, 21 bp, Artificial Sequence
  primer
tcagttccctccgtatcttcc

SEQ ID NO: 69201 - DNA, 21 bp, Artificial Sequence
  primer
tggtgaatatgtggaggaagc

SEQ ID NO: 69202 - DNA, 38 bp, Artificial Sequence
  primer
gtaaaacgacggccagtcgaattggaaagcactgagac

SEQ ID NO: 69203 - DNA, 37 bp, Artificial Sequence; identical to SEQ ID NO: 69181
  primer

SEQ ID NO: 69204 - DNA, 39 bp, Artificial Sequence
  primer
gtaaaacgacggccagtggacaggacataactggactgc

SEQ ID NO: 69205 - DNA, 21 bp, Artificial Sequence
  primer
ctgtagtagaggccaggctgc

SEQ ID NO: 69206 - DNA, 21 bp, Artificial Sequence
  primer
aaagacagcaaatcagcccag

SEQ ID NO: 69207 - DNA, 21 bp, Artificial Sequence
  primer
gtctcatcccttaccaatccg

SEQ ID NO: 69208 - DNA, 37 bp, Artificial Sequence
  primer
gtaaaacgacggccagtacttggccacttcacacctg

SEQ ID NO: 69209 - DNA, 38 bp, Artificial Sequence
  primer
gtaaaacgacggccagtagactgaggccagacatggac

SEQ ID NO: 69210 - DNA, 22 bp, Artificial Sequence
  primer
aaacttccacttggatcagcac

SEQ ID NO: 69211 - DNA, 21 bp, Artificial Sequence
  primer
cagattcctggatgcttaccc

SEQ ID NO: 69212 - DNA, 20 bp, Artificial Sequence
  primer
gtcccatcccttcaaacctc

SEQ ID NO: 69213 - DNA, 38 bp, Artificial Sequence
  primer
gtaaaacgacggccagtggttagggcctccctctactg

SEQ ID NO: 69214 - DNA, 21 bp, Artificial Sequence
  primer
gagtcacggaagagtcaagcc

SEQ ID NO: 69215 - DNA, 19 bp, Artificial Sequence
  primer
catgaatggtcagcatggg

SEQ ID NO: 69216 - DNA, 38 bp, Artificial Sequence
  primer
gtaaaacgacggccagttataagcacttggagggaggg

SEQ ID NO: 69217 - DNA, 21 bp, Artificial Sequence
  primer
agcatacacaaccacccacag

SEQ ID NO: 69218 - DNA, 23 bp, Artificial Sequence
  primer
caccttcactggtgtatgtaggg

SEQ ID NO: 69219 - DNA, 20 bp, Artificial Sequence
  primer
gaggcaatgctcatcttccc

SEQ ID NO: 69220 - DNA, 20 bp, Artificial Sequence
  primer
cacagttcaaggagggaggg

SEQ ID NO: 69221 - DNA, 38 bp, Artificial Sequence
  primer
gtaaaacgacggccagtggtctctgcccattactccag

SEQ ID NO: 69222 - DNA, 38 bp, Artificial Sequence
  primer
gtaaaacgacggccagtccaggctcctaaagacaccag

SEQ ID NO: 69223 - DNA, 38 bp, Artificial Sequence
  primer
gtaaaacgacggccagtgcaaggacacatcaaatggag

SEQ ID NO: 69224 - DNA, 38 bp, Artificial Sequence
  primer
gtaaaacgacggccagtatggtcgtgtctccataaccc

SEQ ID NO: 69225 - DNA, 21 bp, Artificial Sequence
  primer
gagccattcaggcagaaactc

SEQ ID NO: 69226 - DNA, 38 bp, Artificial Sequence
  primer
gtaaaacgacggccagtctggtgatttcctgtgagcag

SEQ ID NO: 69227 - DNA, 21 bp, Artificial Sequence
  primer
tacaagctgggtttgctccac

SEQ ID NO: 69228 - DNA, 21 bp, Artificial Sequence
  primer
ctcaggtcttctccaggttgc

SEQ ID NO: 69229 - DNA, 21 bp, Artificial Sequence
  primer
cctgatctttgtcttcctccc

SEQ ID NO: 69230 - DNA, 20 bp, Artificial Sequence
  primer
gtcccatcccttcaaacctc

SEQ ID NO: 69231 - DNA, 21 bp, Artificial Sequence
  primer
ccagatgctcagtggagaagg

SEQ ID NO: 69232 - DNA, 21 bp, Artificial Sequence
  primer
gggatagacacgaaacgcttg

SEQ ID NO: 69233 - DNA, 21 bp, Artificial Sequence
  primer
agtgacggcagatcaactcac

SEQ ID NO: 69234 - DNA, 38 bp, Artificial Sequence
  primer
gtaaaacgacggccagtaggcattgcacgatacaaagg

SEQ ID NO: 69235 - DNA, 21 bp, Artificial Sequence
  primer
gctcactgtgccctaagaagg

SEQ ID NO: 69236 - DNA, 21 bp, Artificial Sequence
  primer
gctagcccagaatctgaatgg

SEQ ID NO: 69237 - DNA, 38 bp, Artificial Sequence
  primer
gtaaaacgacggccagtgtgataggcaccttcctggtg

SEQ ID NO: 69238 - DNA, 21 bp, Artificial Sequence
  primer
agtccctttgtcatcagcagg

SEQ ID NO: 69239 - DNA, 20 bp, Artificial Sequence
  primer
aagaaggaagagcagggcag

SEQ ID NO: 69240 - DNA, 21 bp, Artificial Sequence
  primer
ggctggatctgacatttaccc

SEQ ID NO: 69241 - DNA, 39 bp, Artificial Sequence
  primer
gtaaaacgacggccagtaggctctttgggcagatagaag

SEQ ID NO: 69242 - DNA, 20 bp, Artificial Sequence
  primer
agtgagcgcctctgaaatcc

SEQ ID NO: 69243 - DNA, 21 bp, Artificial Sequence
  primer
agaacgctggcatatcagtgg

SEQ ID NO: 69244 - DNA, 36 bp, Artificial Sequence
  primer
gtaaaacgacggccagtccacctcacggacttaccg

SEQ ID NO: 69245 - DNA, 21 bp, Artificial Sequence
  primer
cacctaataaaccagcggcac

SEQ ID NO: 69246 - DNA, 21 bp, Artificial Sequence
  primer
aaagtcctggttacgctctcc

SEQ ID NO: 69247 - DNA, 22 bp, Artificial Sequence
  primer
cgacagtccatagatttcaccc

SEQ ID NO: 69248 - DNA, 23 bp, Artificial Sequence
  primer
tggaacatcaatccacaggtaac

SEQ ID NO: 69249 - DNA, 21 bp, Artificial Sequence
  primer
tcccacctatatgctgaaggc

SEQ ID NO: 69250 - DNA, 21 bp, Artificial Sequence
  primer
tactcaacactgtgtcacggc

SEQ ID NO: 69251 - DNA, 21 bp, Artificial Sequence
  primer
tcccttcatggacttgacttg

SEQ ID NO: 69252 - DNA, 38 bp, Artificial Sequence
  primer
gtaaaacgacggccagtaacaggcctccatgctctaag

SEQ ID NO: 69253 - DNA, 39 bp, Artificial Sequence
  primer
gtaaaacgacggccagtaggaccagccttaacatacagg

SEQ ID NO: 69254 - DNA, 38 bp, Artificial Sequence
  primer
gtaaaacgacggccagtatgcaagaggagcaaagatgc

SEQ ID NO: 69255 - DNA, 21 bp, Artificial Sequence
  primer
gtggtggtggcacctatagtc

SEQ ID NO: 69256 - DNA, 21 bp, Artificial Sequence
  primer
ccagaagagaatatgcgaccc

SEQ ID NO: 69257 - DNA, 40 bp, Artificial Sequence
  primer
gtaaaacgacggccagtctagcctctacaggatgcttgac

SEQ ID NO: 69258 - DNA, 38 bp, Artificial Sequence
  primer
gtaaaacgacggccagtcaagaggctcgagaagcaaag

SEQ ID NO: 69259 - DNA, 23 bp, Artificial Sequence
  primer
tgccaacagccattaacttacac

SEQ ID NO: 69260 - DNA, 37 bp, Artificial Sequence
  primer
gtaaaacgacggccagtaaaggccagtgcaatgtacg

SEQ ID NO: 69261 - DNA, 39 bp, Artificial Sequence
  primer
gtaaaacgacggccagttctctctcgaaatcaggagctg

SEQ ID NO: 69262 - DNA, 21 bp, Artificial Sequence
  primer
tcaggataagcacccagtgag

SEQ ID NO: 69263 - DNA, 21 bp, Artificial Sequence
  primer
agctgagaaggtgcaaggaag

SEQ ID NO: 69264 - DNA, 36 bp, Artificial Sequence
  primer
gtaaaacgacggccagtcacccgattcccgtactcc

SEQ ID NO: 69265 - DNA, 20 bp, Artificial Sequence
  primer
cgagtagaagcacagctcgg

SEQ ID NO: 69266 - DNA, 35 bp, Artificial Sequence
  primer
gtaaaacgacggccagtccctggaggctggacttc

SEQ ID NO: 69267 - DNA, 38 bp, Artificial Sequence
  primer
gtaaaacgacggccagtgcacttggagacacacaaagg

SEQ ID NO: 69268 - DNA, 21 bp, Artificial Sequence
  primer
accaggctatgttcccgtatc

SEQ ID NO: 69269 - DNA, 22 bp, Artificial Sequence
  primer
tgcttagggttccctgagattc

SEQ ID NO: 69270 - DNA, 38 bp, Artificial Sequence
  primer
gtaaaacgacggccagtggtctgatttccaagcctgag

SEQ ID NO: 69271 - DNA, 38 bp, Artificial Sequence
  primer
gtaaaacgacggccagtaaggcaacagaatgtgcagtg

SEQ ID NO: 69272 - DNA, 38 bp, Artificial Sequence
  primer
gtaaaacgacggccagtagcaaaggcatagagcagcac

SEQ ID NO: 69273 - DNA, 38 bp, Artificial Sequence
  primer
gtaaaacgacggccagtctgaggctagatgcaaatccc

SEQ ID NO: 69274 - DNA, 38 bp, Artificial Sequence
  primer
gtaaaacgacggccagttatgtgcctgtgctgagtgtg

SEQ ID NO: 69275 - DNA, 21 bp, Artificial Sequence
  primer
gatgtaggcaccactctgtgc

SEQ ID NO: 69276 - DNA, 21 bp, Artificial Sequence
  primer
acagaccctgctttgtgtgag

SEQ ID NO: 69277 - DNA, 38 bp, Artificial Sequence
  primer
gtaaaacgacggccagtagagagctgggtcattcaagg

SEQ ID NO: 69278 - DNA, 38 bp, Artificial Sequence
  primer
gtaaaacgacggccagtcctgagacctctgctctaccc

SEQ ID NO: 69279 - DNA, 22 bp, Artificial Sequence
  primer
tgaagttccaggtcacctatcc

SEQ ID NO: 69280 - DNA, 20 bp, Artificial Sequence
  primer
gaagccagatgcatttcctg

SEQ ID NO: 69281 - DNA, 38 bp, Artificial Sequence
  primer
gtaaaacgacggccagtatggttaaattcccatggagc

SEQ ID NO: 69282 - DNA, 38 bp, Artificial Sequence
  primer
gtaaaacgacggccagtagcaagcggaaatctctcatc

SEQ ID NO: 69283 - DNA, 38 bp, Artificial Sequence
  primer
gtaaaacgacggccagtcacaacttcaagctgacctgg

SEQ ID NO: 69284 - DNA, 21 bp, Artificial Sequence
  primer
aatttgcctagttacgctggg

SEQ ID NO: 69285 - DNA, 20 bp, Artificial Sequence
  primer
gctgaaagaacctcaccgtc

SEQ ID NO: 69286 - DNA, 38 bp, Artificial Sequence
  primer
gtaaaacgacggccagttagttggattcttgtggcagc

SEQ ID NO: 69287 - DNA, 21 bp, Artificial Sequence
  primer
gggcaaatacgaaccatcatt

SEQ ID NO: 69288 - DNA, 21 bp, Artificial Sequence
  primer
aggaaccatttccaagacagc

SEQ ID NO: 69289 - DNA, 37 bp, Artificial Sequence
  primer
gtaaaacgacggccagttgaatgtgtggagttggctg

SEQ ID NO: 69290 - DNA, 38 bp, Artificial Sequence
  primer
gtaaaacgacggccagttgcaaagcttgtacacccaac

SEQ ID NO: 69291 - DNA, 38 bp, Artificial Sequence
  primer
gtaaaacgacggccagttgcaccgacctaatacacctg

SEQ ID NO: 69292 - DNA, 41 bp, Artificial Sequence
  primer
gtaaaacgacggccagttttgaggagagtcagcctagtttc

SEQ ID NO: 69293 - DNA, 22 bp, Artificial Sequence
  primer
acataagggctatccatcatcc

SEQ ID NO: 69294 - DNA, 39 bp, Artificial Sequence
  primer
gtaaaacgacggccagtcaacaacggttagaggaacacc

SEQ ID NO: 69295 - DNA, 39 bp, Artificial Sequence
  primer
gtaaaacgacggccagttccactgagtattcgtttgcag

SEQ ID NO: 69296 - DNA, 38 bp, Artificial Sequence
  primer
gtaaaacgacggccagtaacccagaacctaacccttgg

SEQ ID NO: 69297 - DNA, 25 bp, Artificial Sequence
  primer
aaactaccaaagcattcaccctaag

SEQ ID NO: 69298 - DNA, 39 bp, Artificial Sequence
  primer
gtaaaacgacggccagtaaggcttgaagtgatggatacc

SEQ ID NO: 69299 - DNA, 38 bp, Artificial Sequence
  primer
gtaaaacgacggccagtccttgggtttacagatgtggg

SEQ ID NO: 69300 - DNA, 38 bp, Artificial Sequence
  primer
gtaaaacgacggccagtctctcacaccactgttcacgg

SEQ ID NO: 69301 - DNA, 21 bp, Artificial Sequence
  primer
cacatttggcgtgactcaaac

SEQ ID NO: 69302 - DNA, 21 bp, Artificial Sequence
  primer
ctggctcaaattgcagtcaac

SEQ ID NO: 69303 - DNA, 22 bp, Artificial Sequence
  primer
ttaaagacgcctggagtgaaag

SEQ ID NO: 69304 - DNA, 21 bp, Artificial Sequence
  primer
caccatgcctagctcatcatc

SEQ ID NO: 69305 - DNA, 38 bp, Artificial Sequence
  primer
gtaaaacgacggccagtcccagtggagagcaaagacac

SEQ ID NO: 69306 - DNA, 35 bp, Artificial Sequence
  primer
gtaaaacgacggccagtgttcacgccatgctcctg

SEQ ID NO: 69307 - DNA, 21 bp, Artificial Sequence
  primer
tctgccttcagaacttgagcc

SEQ ID NO: 69308 - DNA, 38 bp, Artificial Sequence
  primer
gtaaaacgacggccagtgacttcgggtgaatggcttac

SEQ ID NO: 69309 - DNA, 38 bp, Artificial Sequence
  primer
gtaaaacgacggccagtctcaaaggcagctggtctctc

SEQ ID NO: 69310 - DNA, 38 bp, Artificial Sequence
  primer
gtaaaacgacggccagtgcttcatttccgaacttgacc

SEQ ID NO: 69311 - DNA, 38 bp, Artificial Sequence
  primer
gtaaaacgacggccagtggtacaggtcccgagagaagg

SEQ ID NO: 69312 - DNA, 38 bp, Artificial Sequence
  primer
gtaaaacgacggccagtgtgcatgcaaatcatcctgac

SEQ ID NO: 69313 - DNA, 22 bp, Artificial Sequence
  primer
tcccatgaggaacactttacaa

SEQ ID NO: 69314 - DNA, 23 bp, Artificial Sequence
  primer
catagaaagagctttgccacatc

SEQ ID NO: 69315 - DNA, 23 bp, Artificial Sequence
  primer
ttcaggattcttggaaactaacg

SEQ ID NO: 69316 - DNA, 40 bp, Artificial Sequence
  primer
gtaaaacgacggccagttcactcttgaaacacgaaatctg

SEQ ID NO: 69317 - DNA, 46 bp, Artificial Sequence
  primer
gtaaaacgacggccagtaaccagaacacaaataatttcctatactt

SEQ ID NO: 69318 - DNA, 44 bp, Artificial Sequence
  primer
gtaaaacgacggccagtttctttaaatgtagtcagtcttcaccc

SEQ ID NO: 69319 - DNA, 19 bp, Artificial Sequence
  primer
cctttccactttgccacac

SEQ ID NO: 69320 - DNA, 25 bp, Artificial Sequence
  primer
aatgctcacatcttatttctatcgc

SEQ ID NO: 69321 - DNA, 42 bp, Artificial Sequence
  primer
gtaaaacgacggccagttgaatacaaatgtaactggcagaga

SEQ ID NO: 69322 - DNA, 23 bp, Artificial Sequence
  primer
tccaacgtgagtagagtttgagg

SEQ ID NO: 69323 - DNA, 39 bp, Artificial Sequence
  primer
gtaaaacgacggccagttttgtcagtgcttgtggttatt

SEQ ID NO: 69324 - DNA, 20 bp, Artificial Sequence
  primer
ggtcacagtcaaggcaggac

SEQ ID NO: 69325 - DNA, 38 bp, Artificial Sequence
  primer
gtaaaacgacggccagtcattattgggaaatgggcttg

SEQ ID NO: 69326 - DNA, 41 bp, Artificial Sequence
  primer
gtaaaacgacggccagtaaacagattgacttcctcctcatc

SEQ ID NO: 69327 - DNA, 25 bp, Artificial Sequence
  primer
catcttgctcctcctgtaataattg

SEQ ID NO: 69328 - DNA, 26 bp, Artificial Sequence
  primer
tgttcttccattctaagtatttcagg

SEQ ID NO: 69329 - DNA, 21 bp, Artificial Sequence
  primer
tttggtacgtatcctttggca

SEQ ID NO: 69330 - DNA, 22 bp, Artificial Sequence
  primer
ttctgaacatgatccaacctga

SEQ ID NO: 69331 - DNA, 21 bp, Artificial Sequence
  primer
cttccctcctaaactccatgc

SEQ ID NO: 69332 - DNA, 22 bp, Artificial Sequence
  primer
tggatccaatttagtgcaaacc

SEQ ID NO: 69333 - DNA, 18 bp, Artificial Sequence
  primer
ttggatgtttggcaggca

SEQ ID NO: 69334 - DNA, 19 bp, Artificial Sequence
  primer
ccaagtcaggctggacgac

SEQ ID NO: 69335 - DNA, 37 bp, Artificial Sequence
  primer
gtaaaacgacggccagtccaagggactcccaggtaac

SEQ ID NO: 69336 - DNA, 20 bp, Artificial Sequence
  primer
ccaagctggtctgtggagag

SEQ ID NO: 69337 - DNA, 21 bp, Artificial Sequence
  primer
taacaaggaaatcggcagagc

SEQ ID NO: 69338 - DNA, 21 bp, Artificial Sequence
  primer
caaacgcacacactctccaag

SEQ ID NO: 69339 - DNA, 36 bp, Artificial Sequence
  primer
gtaaaacgacggccagtctgccctgacactcttccc

SEQ ID NO: 69340 - DNA, 20 bp, Artificial Sequence
  primer
cacagaggagaagtgggcag

SEQ ID NO: 69341 - DNA, 21 bp, Artificial Sequence
  primer
ccgcacacaagcttagaggac

SEQ ID NO: 69342 - DNA, 18 bp, Artificial Sequence
  primer
gccggtcctcacactgtc

SEQ ID NO: 69343 - DNA, 20 bp, Artificial Sequence
  primer
agcatcagaagcacagggtg

SEQ ID NO: 69344 - DNA, 20 bp, Artificial Sequence
  primer
ctccagaactggtgtgcagc

SEQ ID NO: 69345 - DNA, 37 bp, Artificial Sequence
  primer
gtaaaacgacggccagttgcaggatcagaggcacaag

SEQ ID NO: 69346 - DNA, 38 bp, Artificial Sequence
  primer
gtaaaacgacggccagtctcatgcatcttgccaatacc

SEQ ID NO: 69347 - DNA, 21 bp, Artificial Sequence
  primer
ccgacttaggattctccctcc

SEQ ID NO: 69348 - DNA, 37 bp, Artificial Sequence
  primer
gtaaaacgacggccagtctgagcagagggacaggttg

SEQ ID NO: 69349 - DNA, 36 bp, Artificial Sequence
  primer
gtaaaacgacggccagtctctgaccaagtcggagcc

SEQ ID NO: 69350 - DNA, 18 bp, Artificial Sequence
  primer
aaaggtccctgctgtggc

SEQ ID NO: 69351 - DNA, 37 bp, Artificial Sequence
  primer
gtaaaacgacggccagtgtcaaatgcctcggatgatg

SEQ ID NO: 69352 - DNA, 38 bp, Artificial Sequence
  primer
gtaaaacgacggccagtctgaaccaagcctctgacacc

SEQ ID NO: 69353 - DNA, 35 bp, Artificial Sequence
  primer
gtaaaacgacggccagtaaggcaagctccacaggg

SEQ ID NO: 69354 - DNA, 37 bp, Artificial Sequence
  primer
gtaaaacgacggccagtattaggttgggtggctggac

SEQ ID NO: 69355 - DNA, 38 bp, Artificial Sequence
  primer
gtaaaacgacggccagttctccatgacacaggatttgc

SEQ ID NO: 69356 - DNA, 22 bp, Artificial Sequence
  primer
caaaggttgctttgttggaatg

SEQ ID NO: 69357 - DNA, 47 bp, Artificial Sequence
  primer
gtaaaacgacggccagtaacaaagaattactgttacaccttctttac

SEQ ID NO: 69358 - DNA, 22 bp, Artificial Sequence
  primer
ggcaacatagcaagaactggtc

SEQ ID NO: 69359 - DNA, 21 bp, Artificial Sequence
  primer
ggttcctgcaattcttggatg

SEQ ID NO: 69360 - DNA, 37 bp, Artificial Sequence
  primer
gtaaaacgacggccagtgcataccatcatctgccctc

SEQ ID NO: 69361 - DNA, 43 bp, Artificial Sequence
  primer
gtaaaacgacggccagtcatacaaacagattaccagatttccc

SEQ ID NO: 69362 - DNA, 21 bp, Artificial Sequence
  primer
cttgaatttctttgcaggtgg

SEQ ID NO: 69363 - DNA, 23 bp, Artificial Sequence
  primer
gggttctccaagtacatgtctgc

SEQ ID NO: 69364 - DNA, 40 bp, Artificial Sequence
  primer
gtaaaacgacggccagttcactctgagggctagaagttcc

SEQ ID NO: 69365 - DNA, 38 bp, Artificial Sequence
  primer
gtaaaacgacggccagtggtccttctctgtaccctggc

SEQ ID NO: 69366 - DNA, 22 bp, Artificial Sequence
  primer
ccatggactaaacggaaagatg

SEQ ID NO: 69367 - DNA, 41 bp, Artificial Sequence
  primer
gtaaaacgacggccagtaaacctccacatgcacattaatac

SEQ ID NO: 69368 - DNA, 20 bp, Artificial Sequence
  primer
acatggaaatctcgggaagg

SEQ ID NO: 69369 - DNA, 18 bp, Artificial Sequence
  primer
acctctccggctgactgg

SEQ ID NO: 69370 - DNA, 38 bp, Artificial Sequence
  primer
gtaaaacgacggccagtaacctgaactccagggtcatc

SEQ ID NO: 69371 - DNA, 27 bp, Artificial Sequence
  primer
ttaattagtttgattaagccattccac

SEQ ID NO: 69372 - DNA, 42 bp, Artificial Sequence
  primer
gtaaaacgacggccagtaaggtgtccaagtaacagaatagga

SEQ ID NO: 69373 - DNA, 42 bp, Artificial Sequence
  primer
gtaaaacgacggccagtcaacaaataagggtaatctcattcc

SEQ ID NO: 69374 - DNA, 18 bp, Artificial Sequence
  primer
agaatggcgtgaacccag

SEQ ID NO: 69375 - DNA, 41 bp, Artificial Sequence
  primer
gtaaaacgacggccagtcagcagcagaatgaaataagtgac

SEQ ID NO: 69376 - DNA, 23 bp, Artificial Sequence
  primer
ccagagttagcatttcagggaag

SEQ ID NO: 69377 - DNA, 25 bp, Artificial Sequence
  primer
aaagctaaacagaaattgaaccacc

SEQ ID NO: 69378 - DNA, 44 bp, Artificial Sequence
  primer
gtaaaacgacggccagttcataggaatttgagagttaacaaaga

SEQ ID NO: 69379 - DNA, 42 bp, Artificial Sequence
  primer
gtaaaacgacggccagttggcaataacattaattcgactagc

SEQ ID NO: 69380 - DNA, 39 bp, Artificial Sequence
  primer
gtaaaacgacggccagtaaacttacggactgacctccag

SEQ ID NO: 69381 - DNA, 21 bp, Artificial Sequence
  primer
aattggttccagcaacctgac

SEQ ID NO: 69382 - DNA, 22 bp, Artificial Sequence
  primer
caaaggttgctttgttggaatg

SEQ ID NO: 69383 - DNA, 47 bp, Artificial Sequence; identical to SEQ ID NO: 69357
  primer

SEQ ID NO: 69384 - DNA, 22 bp, Artificial Sequence
  primer
gcgctaagctcagtatgaaatg

SEQ ID NO: 69385 - DNA, 40 bp, Artificial Sequence
  primer
gtaaaacgacggccagtaaattacccacacacaacacctc

SEQ ID NO: 69386 - DNA, 38 bp, Artificial Sequence
  primer
gtaaaacgacggccagtgattccataggcagccaagac

SEQ ID NO: 69387 - DNA, 38 bp, Artificial Sequence
  primer
gtaaaacgacggccagtcatgtccatgctgtgtcagtc

SEQ ID NO: 69388 - DNA, 21 bp, Artificial Sequence
  primer
tccacaactcctggaacactg

SEQ ID NO: 69389 - DNA, 37 bp, Artificial Sequence
  primer
gtaaaacgacggccagtatgagacactgtgtgcctgg

SEQ ID NO: 69390 - DNA, 21 bp, Artificial Sequence
  primer
ttgcatccactaagggaggag

SEQ ID NO: 69391 - DNA, 23 bp, Artificial Sequence
  primer
cacacatacacgtgtttaaggca

SEQ ID NO: 69392 - DNA, 24 bp, Artificial Sequence
  primer
ggcaaaggacttagccattaattc

SEQ ID NO: 69393 - DNA, 20 bp, Artificial Sequence
  primer
ccacaggaagctgaacactg

SEQ ID NO: 69394 - DNA, 42 bp, Artificial Sequence
  primer
gtaaaacgacggccagttttagcatttaaagtactgatggca

SEQ ID NO: 69395 - DNA, 35 bp, Artificial Sequence
  primer
gtaaaacgacggccagtcttgagcccaggaggtgg

SEQ ID NO: 69396 - DNA, 38 bp, Artificial Sequence
  primer
gtaaaacgacggccagtaaacctgcacatcttgcacat

SEQ ID NO: 69397 - DNA, 26 bp, Artificial Sequence
  primer
aaattccaagaaagtaatccacagtc

SEQ ID NO: 69398 - DNA, 38 bp, Artificial Sequence
  primer
gtaaaacgacggccagtgtgcaactcaaccctctaccc

SEQ ID NO: 69399 - DNA, 21 bp, Artificial Sequence
  primer
ggaccttcctccagaaagagg

SEQ ID NO: 69400 - DNA, 21 bp, Artificial Sequence
  primer
accagaccatcacagttgctg

SEQ ID NO: 69401 - DNA, 38 bp, Artificial Sequence
  primer
gtaaaacgacggccagtcctccaccttccaaactatgc

SEQ ID NO: 69402 - DNA, 38 bp, Artificial Sequence
  primer
gtaaaacgacggccagtcaagagaacatggcaatcaca

SEQ ID NO: 69403 - DNA, 38 bp, Artificial Sequence
  primer
gtaaaacgacggccagtagattgccaaagggtaccaac

SEQ ID NO: 69404 - DNA, 39 bp, Artificial Sequence
  primer
gtaaaacgacggccagtcctcaatttcaagcaactaggg

SEQ ID NO: 69405 - DNA, 38 bp, Artificial Sequence
  primer
gtaaaacgacggccagttggtggagagcagaacatttg

SEQ ID NO: 69406 - DNA, 21 bp, Artificial Sequence
  primer
cattctgcccaaagaggaaac

SEQ ID NO: 69407 - DNA, 28 bp, Artificial Sequence
  primer
ctatgatcaagtcctaagagtcagtttc

SEQ ID NO: 69408 - DNA, 38 bp, Artificial Sequence
  primer
gtaaaacgacggccagtgcacacagcaacacaatgaac

SEQ ID NO: 69409 - DNA, 37 bp, Artificial Sequence
  primer
gtaaaacgacggccagtcctgcccacacactgatttc

SEQ ID NO: 69410 - DNA, 23 bp, Artificial Sequence
  primer
cttcatcactgactgcttgtcac

SEQ ID NO: 69411 - DNA, 21 bp, Artificial Sequence
  primer
cttgccaggaactattgcacc

SEQ ID NO: 69412 - DNA, 22 bp, Artificial Sequence
  primer
gccagtgaccaaagtttgattt

SEQ ID NO: 69413 - DNA, 39 bp, Artificial Sequence
  primer
gtaaaacgacggccagttgcatttctaaaggaagaagcc

SEQ ID NO: 69414 - DNA, 18 bp, Artificial Sequence
  primer
cgcatgcacatcatgcac

SEQ ID NO: 69415 - DNA, 23 bp, Artificial Sequence
  primer
agcaactcatgtttcaaagttca

SEQ ID NO: 69416 - DNA, 21 bp, Artificial Sequence
  primer
gtggcctcgattagagacagc

SEQ ID NO: 69417 - DNA, 21 bp, Artificial Sequence
  primer
caagaatgtggtgaaaggcac

SEQ ID NO: 69418 - DNA, 23 bp, Artificial Sequence
  primer
agtttctcagttcacacaaagcc

SEQ ID NO: 69419 - DNA, 39 bp, Artificial Sequence
  primer
gtaaaacgacggccagtcagaaatggcagggctatagtg

SEQ ID NO: 69420 - DNA, 21 bp, Artificial Sequence
  primer
tggtacggtgaccagtctcac

SEQ ID NO: 69421 - DNA, 37 bp, Artificial Sequence
  primer
gtaaaacgacggccagtagcatatgcaccatgggaag

SEQ ID NO: 69422 - DNA, 38 bp, Artificial Sequence
  primer
gtaaaacgacggccagtttgatggtgccagtcaggtag

SEQ ID NO: 69423 - DNA, 38 bp, Artificial Sequence
  primer
gtaaaacgacggccagtaacggccagaagtgtaagtgg

SEQ ID NO: 69424 - DNA, 22 bp, Artificial Sequence
  primer
caactccaggaacatcatttgc

SEQ ID NO: 69425 - DNA, 38 bp, Artificial Sequence
  primer
gtaaaacgacggccagttacacctggagcagagaggag

SEQ ID NO: 69426 - DNA, 20 bp, Artificial Sequence
  primer
gaatgcagcggaagtgagag

SEQ ID NO: 69427 - DNA, 38 bp, Artificial Sequence
  primer
gtaaaacgacggccagtagtgaactctctcctgggctt

SEQ ID NO: 69428 - DNA, 38 bp, Artificial Sequence
  primer
gtaaaacgacggccagtggtcttgcactcaagggacag

SEQ ID NO: 69429 - DNA, 21 bp, Artificial Sequence
  primer
ggaacagggttactttgggtg

SEQ ID NO: 69430 - DNA, 22 bp, Artificial Sequence
  primer
tgagagtggaaacagtgctgag

SEQ ID NO: 69431 - DNA, 21 bp, Artificial Sequence
  primer
cagaatctgtgctcttcggtg

SEQ ID NO: 69432 - DNA, 38 bp, Artificial Sequence
  primer
gtaaaacgacggccagtgtcttagcatgaggcagcaac

SEQ ID NO: 69433 - DNA, 21 bp, Artificial Sequence
  primer
cagtggctttagggtgtagcg

SEQ ID NO: 69434 - DNA, 35 bp, Artificial Sequence
  primer
gtaaaacgacggccagtagggcctcgaagctgaag

SEQ ID NO: 69435 - DNA, 21 bp, Artificial Sequence
  primer
ttcttgctcacttccaggctc

SEQ ID NO: 69436 - DNA, 38 bp, Artificial Sequence
  primer
gtaaaacgacggccagtaggtttgagggagaagcaaag

SEQ ID NO: 69437 - DNA, 38 bp, Artificial Sequence
  primer
gtaaaacgacggccagttctgaaccaggagaaatctgg

SEQ ID NO: 69438 - DNA, 21 bp, Artificial Sequence
  primer
ggacgttggcagtacataccc

SEQ ID NO: 69439 - DNA, 21 bp, Artificial Sequence
  primer
agaacagtgcccatacccatc

SEQ ID NO: 69440 - DNA, 39 bp, Artificial Sequence
  primer
gtaaaacgacggccagttctgcatattggtggaactgtg

SEQ ID NO: 69441 - DNA, 20 bp, Artificial Sequence
  primer
gtccgcaggcttcattctac

SEQ ID NO: 69442 - DNA, 41 bp, Artificial Sequence
  primer
gtaaaacgacggccagttgaatcctcctttatcaattctgc

SEQ ID NO: 69443 - DNA, 20 bp, Artificial Sequence
  primer
tttggagtggacttcttggg

SEQ ID NO: 69444 - DNA, 38 bp, Artificial Sequence
  primer
gtaaaacgacggccagtgcattgcttaaacgcagaagg

SEQ ID NO: 69445 - DNA, 38 bp, Artificial Sequence
  primer
gtaaaacgacggccagtagacctcctgttcaccacgac

SEQ ID NO: 69446 - DNA, 21 bp, Artificial Sequence
  primer
tcccacacaatccttcagttg

SEQ ID NO: 69447 - DNA, 22 bp, Artificial Sequence
  primer
tgatcatttccagcattgtgtc

SEQ ID NO: 69448 - DNA, 21 bp, Artificial Sequence
  primer
catggtcactgttacacagcc

SEQ ID NO: 69449 - DNA, 39 bp, Artificial Sequence
  primer
gtaaaacgacggccagtcaatgatcacacaaggaacctc

SEQ ID NO: 69450 - DNA, 38 bp, Artificial Sequence
  primer
gtaaaacgacggccagtactgtgctcttcagaccctgg

SEQ ID NO: 69451 - DNA, 20 bp, Artificial Sequence
  primer
ctgggtggctctctttgatg

SEQ ID NO: 69452 - DNA, 36 bp, Artificial Sequence
  primer
gtaaaacgacggccagtaagacgcgaccaactccag

SEQ ID NO: 69453 - DNA, 38 bp, Artificial Sequence
  primer
gtaaaacgacggccagtaaggctagagccaatctgcac

SEQ ID NO: 69454 - DNA, 38 bp, Artificial Sequence
  primer
gtaaaacgacggccagtagggcacaggctatggtaaag

SEQ ID NO: 69455 - DNA, 36 bp, Artificial Sequence
  primer
gtaaaacgacggccagtgtccagcctgacagccttc

SEQ ID NO: 69456 - DNA, 38 bp, Artificial Sequence
  primer
gtaaaacgacggccagtcccttccataaagagcagcac

SEQ ID NO: 69457 - DNA, 37 bp, Artificial Sequence
  primer
gtaaaacgacggccagtaaggtgcgcaaactctcctc

SEQ ID NO: 69458 - DNA, 37 bp, Artificial Sequence
  primer
gtaaaacgacggccagtgtgacccacaggctggatac

SEQ ID NO: 69459 - DNA, 21 bp, Artificial Sequence
  primer
ccctgcagtatgactgtctgc

SEQ ID NO: 69460 - DNA, 39 bp, Artificial Sequence
  primer
gtaaaacgacggccagtccacttgacgtctcacagtgtc

SEQ ID NO: 69461 - DNA, 21 bp, Artificial Sequence
  primer
acaatcatctgtgacccaggc

SEQ ID NO: 69462 - DNA, 38 bp, Artificial Sequence
  primer
gtaaaacgacggccagtaagtgacttaaggtggcctgg

SEQ ID NO: 69463 - DNA, 21 bp, Artificial Sequence
  primer
atcacagggtaaccttggacc

SEQ ID NO: 69464 - DNA, 20 bp, Artificial Sequence
  primer
gaggaggatcaggagggacc

SEQ ID NO: 69465 - DNA, 37 bp, Artificial Sequence
  primer
gtaaaacgacggccagtagcaaggcttccctgcttag

SEQ ID NO: 69466 - DNA, 20 bp, Artificial Sequence
  primer
ggaaactgaggtagaggccg

SEQ ID NO: 69467 - DNA, 20 bp, Artificial Sequence
  primer
cagtgagctgggagctgaag

SEQ ID NO: 69468 - DNA, 21 bp, Artificial Sequence
  primer
acccagatgtagggacctgtg

SEQ ID NO: 69469 - DNA, 38 bp, Artificial Sequence
  primer
gtaaaacgacggccagtaaggtctccaggaaggctgtc

SEQ ID NO: 69470 - DNA, 20 bp, Artificial Sequence
  primer
ccgtaggacagatcctcgtg

SEQ ID NO: 69471 - DNA, 37 bp, Artificial Sequence
  primer
gtaaaacgacggccagttgggttcctcatcatccttg

SEQ ID NO: 69472 - DNA, 21 bp, Artificial Sequence
  primer
tgtccctgaccttcatctctg

SEQ ID NO: 69473 - DNA, 21 bp, Artificial Sequence
  primer
gtctcagggactctgtggctg

SEQ ID NO: 69474 - DNA, 38 bp, Artificial Sequence
  primer
gtaaaacgacggccagtaagagaggctagacagacggc

SEQ ID NO: 69475 - DNA, 21 bp, Artificial Sequence
  primer
aaaggcaagctggtgaaagac

SEQ ID NO: 69476 - DNA, 37 bp, Artificial Sequence
  primer
gtaaaacgacggccagtctccgggcaggtcactagac

SEQ ID NO: 69477 - DNA, 37 bp, Artificial Sequence
  primer
gtaaaacgacggccagtcttcacccaacccaagactg

SEQ ID NO: 69478 - DNA, 37 bp, Artificial Sequence
  primer
gtaaaacgacggccagtttgactgactcccagcacag

SEQ ID NO: 69479 - DNA, 38 bp, Artificial Sequence
  primer
gtaaaacgacggccagtcctgctgctgggtagtgagag

SEQ ID NO: 69480 - DNA, 20 bp, Artificial Sequence
  primer
cctggtggtctcctctctcc

SEQ ID NO: 69481 - DNA, 38 bp, Artificial Sequence
  primer
gtaaaacgacggccagtgaggctctcagtcctacctgc

SEQ ID NO: 69482 - DNA, 39 bp, Artificial Sequence
  primer
gtaaaacgacggccagtgggtaaggctggagaagatgag

SEQ ID NO: 69483 - DNA, 20 bp, Artificial Sequence
  primer
ggagacgtttcccatgtttg

SEQ ID NO: 69484 - DNA, 39 bp, Artificial Sequence
  primer
gtaaaacgacggccagtgatctacgcaaccttggatctg

SEQ ID NO: 69485 - DNA, 37 bp, Artificial Sequence
  primer
gtaaaacgacggccagtgggccagaagagcagacttc

SEQ ID NO: 69486 - DNA, 21 bp, Artificial Sequence
  primer
tcaagtgtggtttccttctgg

SEQ ID NO: 69487 - DNA, 22 bp, Artificial Sequence
  primer
tcccactttacacatcctctgg

SEQ ID NO: 69488 - DNA, 20 bp, Artificial Sequence
  primer
agtgtttctggcccacacag

SEQ ID NO: 69489 - DNA, 38 bp, Artificial Sequence
  primer
gtaaaacgacggccagtagttcaatttgggcctagcag

SEQ ID NO: 69490 - DNA, 38 bp, Artificial Sequence
  primer
gtaaaacgacggccagtctctgcatgctaaagtccacg

SEQ ID NO: 69491 - DNA, 38 bp, Artificial Sequence
  primer
gtaaaacgacggccagtcacagtggagacccttgtctg

SEQ ID NO: 69492 - DNA, 36 bp, Artificial Sequence
  primer
gtaaaacgacggccagtaaaggagagaagcctccgc

SEQ ID NO: 69493 - DNA, 20 bp, Artificial Sequence
  primer
ttcctgagcagaggctgatg

SEQ ID NO: 69494 - DNA, 38 bp, Artificial Sequence
  primer
gtaaaacgacggccagtccacagtgagggtctctaggc

SEQ ID NO: 69495 - DNA, 39 bp, Artificial Sequence
  primer
gtaaaacgacggccagttccctacatcatttgaggactg

SEQ ID NO: 69496 - DNA, 21 bp, Artificial Sequence
  primer
tccaaagcactgagtggaaac

SEQ ID NO: 69497 - DNA, 20 bp, Artificial Sequence
  primer
tccacctggactgttcttcg

SEQ ID NO: 69498 - DNA, 38 bp, Artificial Sequence
  primer
gtaaaacgacggccagttaggaatgcatgaccacatcc

SEQ ID NO: 69499 - DNA, 21 bp, Artificial Sequence
  primer
aaggtaactcacacatggccc

SEQ ID NO: 69500 - DNA, 38 bp, Artificial Sequence
  primer
gtaaaacgacggccagtaaagctcttcaaccctgcaac

SEQ ID NO: 69501 - DNA, 41 bp, Artificial Sequence
  primer
gtaaaacgacggccagtttgtctttcccacaattagttcac

SEQ ID NO: 69502 - DNA, 41 bp, Artificial Sequence
  primer
gtaaaacgacggccagtgcactatttaacactgagcagcag

SEQ ID NO: 69503 - DNA, 23 bp, Artificial Sequence
  primer
ttcccataggcacactgtaattt

SEQ ID NO: 69504 - DNA, 38 bp, Artificial Sequence
  primer
gtaaaacgacggccagtaagcagcccttgaagtttacg

SEQ ID NO: 69505 - DNA, 38 bp, Artificial Sequence
  primer
gtaaaacgacggccagtctctgcagaacaacttgcacc

SEQ ID NO: 69506 - DNA, 38 bp, Artificial Sequence
  primer
gtaaaacgacggccagtcacactttgagaaccactgcc

SEQ ID NO: 69507 - DNA, 38 bp, Artificial Sequence
  primer
gtaaaacgacggccagtggtgccttctagtcgatggat

SEQ ID NO: 69508 - DNA, 21 bp, Artificial Sequence
  primer
catctgaaagctctgcctctg

SEQ ID NO: 69509 - DNA, 21 bp, Artificial Sequence
  primer
aaacagaaacgaactgggtgg

SEQ ID NO: 69510 - DNA, 37 bp, Artificial Sequence
  primer
gtaaaacgacggccagtagtttgcatgcatttggctg

SEQ ID NO: 69511 - DNA, 38 bp, Artificial Sequence
  primer
gtaaaacgacggccagtggaactaaagaccagcatccc

SEQ ID NO: 69512 - DNA, 38 bp, Artificial Sequence
  primer
gtaaaacgacggccagtcttacacacctgcaaggagcc

SEQ ID NO: 69513 - DNA, 21 bp, Artificial Sequence
  primer
aaaggtgcacaagggtttgtc

SEQ ID NO: 69514 - DNA, 38 bp, Artificial Sequence
  primer
gtaaaacgacggccagtatctccaccactggaatgctc

SEQ ID NO: 69515 - DNA, 42 bp, Artificial Sequence
  primer
gtaaaacgacggccagtctggacaaattaatctactggttgc

SEQ ID NO: 69516 - DNA, 38 bp, Artificial Sequence
  primer
gtaaaacgacggccagtatctcatccgggtacctttcc

SEQ ID NO: 69517 - DNA, 20 bp, Artificial Sequence
  primer
attgacatttccaagtggcg

SEQ ID NO: 69518 - DNA, 21 bp, Artificial Sequence
  primer
atgcacaatgtcaatcccttg

SEQ ID NO: 69519 - DNA, 21 bp, Artificial Sequence
  primer
tcctcacctgtgtacccaaac

SEQ ID NO: 69520 - DNA, 21 bp, Artificial Sequence
  primer
ggatgcccttgtaagtgtgac

SEQ ID NO: 69521 - DNA, 39 bp, Artificial Sequence
  primer
gtaaaacgacggccagtaaaccgtgcatagaaacacaag

SEQ ID NO: 69522 - DNA, 38 bp, Artificial Sequence
  primer
gtaaaacgacggccagtaaagagccagcattgtaaccg

SEQ ID NO: 69523 - DNA, 38 bp, Artificial Sequence
  primer
gtaaaacgacggccagtatccctccactcatccctctg

SEQ ID NO: 69524 - DNA, 21 bp, Artificial Sequence
  primer
tgatccctgttagcccatttc

SEQ ID NO: 69525 - DNA, 22 bp, Artificial Sequence
  primer
tttagcaaagcgaatgatttcc

SEQ ID NO: 69526 - DNA, 38 bp, Artificial Sequence
  primer
gtaaaacgacggccagtcccgcacagaatatctgaaag

SEQ ID NO: 69527 - DNA, 38 bp, Artificial Sequence
  primer
gtaaaacgacggccagtttctggtaaggatgggaaagc

SEQ ID NO: 69528 - DNA, 21 bp, Artificial Sequence
  primer
ctgctagccaatgtgcaagac

SEQ ID NO: 69529 - DNA, 21 bp, Artificial Sequence
  primer
caggaacagatgcaactgagg

SEQ ID NO: 69530 - DNA, 38 bp, Artificial Sequence
  primer
gtaaaacgacggccagtttgctccttcagcaccactac

SEQ ID NO: 69531 - DNA, 21 bp, Artificial Sequence
  primer
taatggcagagaactgatggc

SEQ ID NO: 69532 - DNA, 22 bp, Artificial Sequence
  primer
agaacccatgaaagctacaacc

SEQ ID NO: 69533 - DNA, 21 bp, Artificial Sequence
  primer
atcttgcttgggaagttgagg

SEQ ID NO: 69534 - DNA, 21 bp, Artificial Sequence
  primer
gctgcagatggacgtaagaac

SEQ ID NO: 69535 - DNA, 38 bp, Artificial Sequence
  primer
gtaaaacgacggccagtagttggttgatttcctgctca

SEQ ID NO: 69536 - DNA, 43 bp, Artificial Sequence
  primer
gtaaaacgacggccagttgagtgattcagagagtgagactatg

SEQ ID NO: 69537 - DNA, 20 bp, Artificial Sequence
  primer
tttggtggaggtgttgttcc

SEQ ID NO: 69538 - DNA, 38 bp, Artificial Sequence
  primer
gtaaaacgacggccagttaacccatgaacaacccattg

SEQ ID NO: 69539 - DNA, 21 bp, Artificial Sequence
  primer
taacaaacgggctttccaaac

SEQ ID NO: 69540 - DNA, 38 bp, Artificial Sequence
  primer
gtaaaacgacggccagtaaggatctggtccaagacagc

SEQ ID NO: 69541 - DNA, 42 bp, Artificial Sequence
  primer
gtaaaacgacggccagtttagtaatgaacactggacagcaac

SEQ ID NO: 69542 - DNA, 22 bp, Artificial Sequence
  primer
aagcagaactcaggatggattg

SEQ ID NO: 69543 - DNA, 38 bp, Artificial Sequence
  primer
gtaaaacgacggccagtggagctaagctggtaggcttc

SEQ ID NO: 69544 - DNA, 25 bp, Artificial Sequence
  primer
tcaaacaactttatgacttgggaga

SEQ ID NO: 69545 - DNA, 22 bp, Artificial Sequence
  primer
agaacccatgaaagctacaacc

SEQ ID NO: 69546 - DNA, 21 bp, Artificial Sequence
  primer
tttgaggcagtcacatgatcc

SEQ ID NO: 69547 - DNA, 38 bp, Artificial Sequence
  primer
gtaaaacgacggccagtgtcttgcccactgaaagatgc

SEQ ID NO: 69548 - DNA, 38 bp, Artificial Sequence
  primer
gtaaaacgacggccagtacataaagggcagacacctcg

SEQ ID NO: 69549 - DNA, 39 bp, Artificial Sequence
  primer
gtaaaacgacggccagtaggagctaagctggtaggcttc

SEQ ID NO: 69550 - DNA, 21 bp, Artificial Sequence
  primer
taggagccaagatgggttctg

SEQ ID NO: 69551 - DNA, 37 bp, Artificial Sequence
  primer
gtaaaacgacggccagtgaagccaccaggctgaagag

SEQ ID NO: 69552 - DNA, 20 bp, Artificial Sequence
  primer
cttgaagagcagcccacaac

SEQ ID NO: 69553 - DNA, 21 bp, Artificial Sequence
  primer
tcgtctgaccacctccatttc

SEQ ID NO: 69554 - DNA, 20 bp, Artificial Sequence
  primer
cagatgccacacttgtccag

SEQ ID NO: 69555 - DNA, 21 bp, Artificial Sequence
  primer
ctacaatcaccaggccagctc

SEQ ID NO: 69556 - DNA, 21 bp, Artificial Sequence
  primer
ctctgagttcaaggtcctgcc

SEQ ID NO: 69557 - DNA, 20 bp, Artificial Sequence
  primer
gaagacctcacctgtggctg

SEQ ID NO: 69558 - DNA, 21 bp, Artificial Sequence
  primer
ctcaggattcagagaggaccc

SEQ ID NO: 69559 - DNA, 21 bp, Artificial Sequence
  primer
ggatccttcaagggtgtcaag

SEQ ID NO: 69560 - DNA, 39 bp, Artificial Sequence
  primer
gtaaaacgacggccagtgcaaacgttacaccatcatcac

SEQ ID NO: 69561 - DNA, 39 bp, Artificial Sequence
  primer
gtaaaacgacggccagttctgaactttgaaggagcttgc

SEQ ID NO: 69562 - DNA, 38 bp, Artificial Sequence
  primer
gtaaaacgacggccagtaggtgtaagccaccgtacctg

SEQ ID NO: 69563 - DNA, 20 bp, Artificial Sequence
  primer
gcattggcaaaggttcaaag

SEQ ID NO: 69564 - DNA, 21 bp, Artificial Sequence
  primer
tgcttgttggtttggtttgtg

SEQ ID NO: 69565 - DNA, 40 bp, Artificial Sequence
  primer
gtaaaacgacggccagtaacaatgattgatgacctcttgc

SEQ ID NO: 69566 - DNA, 38 bp, Artificial Sequence
  primer
gtaaaacgacggccagtgctgctgagtaaggtgctgtg

SEQ ID NO: 69567 - DNA, 38 bp, Artificial Sequence
  primer
gtaaaacgacggccagttgtattgccctgcaaagattg

SEQ ID NO: 69568 - DNA, 21 bp, Artificial Sequence
  primer
gctctagcgatgggaaacatc

SEQ ID NO: 69569 - DNA, 21 bp, Artificial Sequence
  primer
cctcgtcctccaactgtcttc

SEQ ID NO: 69570 - DNA, 24 bp, Artificial Sequence
  primer
tgtactgaatcaacaggagctcag

SEQ ID NO: 69571 - DNA, 21 bp, Artificial Sequence
  primer
gaaactgccaaaggaggactg

SEQ ID NO: 69572 - DNA, 25 bp, Artificial Sequence
  primer
cagttatttgaatgacttcacctcc

SEQ ID NO: 69573 - DNA, 22 bp, Artificial Sequence
  primer
aagccacaagtctgcacttagg

SEQ ID NO: 69574 - DNA, 20 bp, Artificial Sequence
  primer
ctgccgacaggtgactcttc

SEQ ID NO: 69575 - DNA, 21 bp, Artificial Sequence
  primer
gagcacctccttaaatgtggc

SEQ ID NO: 69576 - DNA, 38 bp, Artificial Sequence
  primer
gtaaaacgacggccagtagcttgagttgccttacccac

SEQ ID NO: 69577 - DNA, 38 bp, Artificial Sequence
  primer
gtaaaacgacggccagtgatgagccggttgtcagtacc

SEQ ID NO: 69578 - DNA, 39 bp, Artificial Sequence
  primer
gtaaaacgacggccagtgatatatcagctgggacgcaag

SEQ ID NO: 69579 - DNA, 38 bp, Artificial Sequence
  primer
gtaaaacgacggccagttgtatatgtggcctcactggg

SEQ ID NO: 69580 - DNA, 38 bp, Artificial Sequence
  primer
gtaaaacgacggccagtaatcctgttggaaacacatgc

SEQ ID NO: 69581 - DNA, 18 bp, Artificial Sequence
  primer
aggctggagaatggcgtg

SEQ ID NO: 69582 - DNA, 36 bp, Artificial Sequence
  primer
gtaaaacgacggccagtaatgccagctggtgtttcc

SEQ ID NO: 69583 - DNA, 38 bp, Artificial Sequence
  primer
gtaaaacgacggccagtacatctgtgttaggtgctggg

SEQ ID NO: 69584 - DNA, 41 bp, Artificial Sequence
  primer
gtaaaacgacggccagtagttgaaccactaaagactgaggg

SEQ ID NO: 69585 - DNA, 21 bp, Artificial Sequence
  primer
gtccaaatcactgcacctttc

SEQ ID NO: 69586 - DNA, 21 bp, Artificial Sequence
  primer
gagaccagtcagattcctgcc

SEQ ID NO: 69587 - DNA, 23 bp, Artificial Sequence
  primer
tttaccacatagagtggtgtccc

SEQ ID NO: 69588 - DNA, 37 bp, Artificial Sequence
  primer
gtaaaacgacggccagtgtttggtgccgtgatggtag

SEQ ID NO: 69589 - DNA, 36 bp, Artificial Sequence
  primer
gtaaaacgacggccagttttgaatcagcgacatggg

SEQ ID NO: 69590 - DNA, 21 bp, Artificial Sequence
  primer
ctcacaagacgcacaaattcc

SEQ ID NO: 69591 - DNA, 21 bp, Artificial Sequence
  primer
tcctggaaatgtgaggaaagg

SEQ ID NO: 69592 - DNA, 38 bp, Artificial Sequence
  primer
gtaaaacgacggccagtctgtagcttgcccttctttgc

SEQ ID NO: 69593 - DNA, 21 bp, Artificial Sequence
  primer
caaattcagggcagaggagtc

SEQ ID NO: 69594 - DNA, 38 bp, Artificial Sequence
  primer
gtaaaacgacggccagttcctctctcgcttcttgtctg

SEQ ID NO: 69595 - DNA, 38 bp, Artificial Sequence
  primer
gtaaaacgacggccagtggccattgtaatgaacaggtg

SEQ ID NO: 69596 - DNA, 21 bp, Artificial Sequence
  primer
tgcgcggatactattcaagtc

SEQ ID NO: 69597 - DNA, 38 bp, Artificial Sequence
  primer
gtaaaacgacggccagttgctcacaaatcagccaagac

SEQ ID NO: 69598 - DNA, 38 bp, Artificial Sequence
  primer
gtaaaacgacggccagtagttgtttaggctgggattgc

SEQ ID NO: 69599 - DNA, 38 bp, Artificial Sequence
  primer
gtaaaacgacggccagtaaattggtcaatctgccatcc

SEQ ID NO: 69600 - DNA, 22 bp, Artificial Sequence
  primer
caggaaatgttgagggagtcac

SEQ ID NO: 69601 - DNA, 21 bp, Artificial Sequence
  primer
cacagctaaagcacacccttg

SEQ ID NO: 69602 - DNA, 21 bp, Artificial Sequence
  primer
caagagccacctccacttagg

SEQ ID NO: 69603 - DNA, 21 bp, Artificial Sequence
  primer
ttctccctgccttggacttac

SEQ ID NO: 69604 - DNA, 37 bp, Artificial Sequence
  primer
gtaaaacgacggccagtcatgacccgtctgtctgagg

SEQ ID NO: 69605 - DNA, 21 bp, Artificial Sequence
  primer
gccaggagagcatttggatac

SEQ ID NO: 69606 - DNA, 21 bp, Artificial Sequence
  primer
gcagccttgtagagacttggg

SEQ ID NO: 69607 - DNA, 38 bp, Artificial Sequence
  primer
gtaaaacgacggccagtcaataaagcatgcagtttggg

SEQ ID NO: 69608 - DNA, 21 bp, Artificial Sequence
  primer
ctaccactgtgggcaatgttc

SEQ ID NO: 69609 - DNA, 38 bp, Artificial Sequence
  primer
gtaaaacgacggccagttcattattcacctgggacctg

SEQ ID NO: 69610 - DNA, 21 bp, Artificial Sequence
  primer
tgaggaatgctacgacctacc

SEQ ID NO: 69611 - DNA, 38 bp, Artificial Sequence
  primer
gtaaaacgacggccagttccttagctttcaggtcccag

SEQ ID NO: 69612 - DNA, 38 bp, Artificial Sequence
  primer
gtaaaacgacggccagtacctgttgcagagaacacacc

SEQ ID NO: 69613 - DNA, 38 bp, Artificial Sequence; identical to SEQ ID NO: 69612
  primer

SEQ ID NO: 69614 - DNA, 38 bp, Artificial Sequence
  primer
gtaaaacgacggccagtaaccattgaagagcgtgtcag

SEQ ID NO: 69615 - DNA, 21 bp, Artificial Sequence
  primer
tggcaagcttcttgtttctcc

SEQ ID NO: 69616 - DNA, 38 bp, Artificial Sequence
  primer
gtaaaacgacggccagtatggaaatcaagcagccagac

SEQ ID NO: 69617 - DNA, 38 bp, Artificial Sequence
  primer
gtaaaacgacggccagtagaagtaaccatctcccgtcg

SEQ ID NO: 69618 - DNA, 37 bp, Artificial Sequence
  primer
gtaaaacgacggccagtaatgggatgcagccttattg

SEQ ID NO: 69619 - DNA, 41 bp, Artificial Sequence
  primer
gtaaaacgacggccagttcttatcagatccacatccaagtc

SEQ ID NO: 69620 - DNA, 35 bp, Artificial Sequence
  primer
gtaaaacgacggccagtaggtggatcgcttgagcc

SEQ ID NO: 69621 - DNA, 38 bp, Artificial Sequence
  primer
gtaaaacgacggccagtgaacacctgagtgggaaatgg

SEQ ID NO: 69622 - DNA, 20 bp, Artificial Sequence
  primer
acagagcagctcaggtggtg

SEQ ID NO: 69623 - DNA, 21 bp, Artificial Sequence
  primer
tggcattaaggtttcagggac

SEQ ID NO: 69624 - DNA, 38 bp, Artificial Sequence
  primer
gtaaaacgacggccagttcagatgtgaggttctggagg

SEQ ID NO: 69625 - DNA, 38 bp, Artificial Sequence
  primer
gtaaaacgacggccagtcgtgagtgagaactggtcctg

SEQ ID NO: 69626 - DNA, 38 bp, Artificial Sequence
  primer
gtaaaacgacggccagtctttccacttacacagcgtgg

SEQ ID NO: 69627 - DNA, 20 bp, Artificial Sequence
  primer
agctgctcacaacggacaag

SEQ ID NO: 69628 - DNA, 38 bp, Artificial Sequence
  primer
gtaaaacgacggccagtaaacagaccctcccagatgac

SEQ ID NO: 69629 - DNA, 37 bp, Artificial Sequence
  primer
gtaaaacgacggccagtgcatcttggccttcttcttg

SEQ ID NO: 69630 - DNA, 21 bp, Artificial Sequence
  primer
gttctgccagacacacgtagc

SEQ ID NO: 69631 - DNA, 37 bp, Artificial Sequence
  primer
gtaaaacgacggccagtactcccaacagggaaaggtc

SEQ ID NO: 69632 - DNA, 36 bp, Artificial Sequence
  primer
gtaaaacgacggccagttttggcctccaagatcagg

SEQ ID NO: 69633 - DNA, 21 bp, Artificial Sequence
  primer
ctgtgccaggatagagggaag

SEQ ID NO: 69634 - DNA, 19 bp, Artificial Sequence
  primer
ccttccagtacccaagggc

SEQ ID NO: 69635 - DNA, 20 bp, Artificial Sequence
  primer
cccagcatcactgacctcac

SEQ ID NO: 69636 - DNA, 37 bp, Artificial Sequence
  primer
gtaaaacgacggccagtgatgaagtctgcgagggatg

SEQ ID NO: 69637 - DNA, 38 bp, Artificial Sequence
  primer
gtaaaacgacggccagtcagaccaagtgttggcctctc

SEQ ID NO: 69638 - DNA, 21 bp, Artificial Sequence
  primer
gaggcacgttctgaatttgtg

SEQ ID NO: 69639 - DNA, 21 bp, Artificial Sequence
  primer
agttcacaccctacccacgac

SEQ ID NO: 69640 - DNA, 38 bp, Artificial Sequence
  primer
gtaaaacgacggccagttaggaaacaaatgccatgcac

SEQ ID NO: 69641 - DNA, 19 bp, Artificial Sequence
  primer
acgggcctgtagtctcagc

SEQ ID NO: 69642 - DNA, 22 bp, Artificial Sequence
  primer
tggctacttcagccattagtgc

SEQ ID NO: 69643 - DNA, 38 bp, Artificial Sequence
  primer
gtaaaacgacggccagttacaggacatggagcgtgttc

SEQ ID NO: 69644 - DNA, 21 bp, Artificial Sequence
  primer
gctcttaggccttaccctcag

SEQ ID NO: 69645 - DNA, 20 bp, Artificial Sequence
  primer
agggtaaataacatgccggg

SEQ ID NO: 69646 - DNA, 21 bp, Artificial Sequence
  primer
agaggtttccaagggatgagg

SEQ ID NO: 69647 - DNA, 21 bp, Artificial Sequence
  primer
tacccatcctctgcatctcag

SEQ ID NO: 69648 - DNA, 23 bp, Artificial Sequence
  primer
aagctcagaaagaatgttccctg

SEQ ID NO: 69649 - DNA, 21 bp, Artificial Sequence
  primer
acctcaggatcacaggaaccc

SEQ ID NO: 69650 - DNA, 21 bp, Artificial Sequence
  primer
aagtggtcctcctctccttcc

SEQ ID NO: 69651 - DNA, 21 bp, Artificial Sequence
  primer
gtcgaggctgcaagaattcag

SEQ ID NO: 69652 - DNA, 38 bp, Artificial Sequence
  primer
gtaaaacgacggccagtctccactcaccagcttgaacc

SEQ ID NO: 69653 - DNA, 21 bp, Artificial Sequence
  primer
cccaattatgtcctgaaaggg

SEQ ID NO: 69654 - DNA, 21 bp, Artificial Sequence
  primer
aaagcaggtaatggcagaagg

SEQ ID NO: 69655 - DNA, 37 bp, Artificial Sequence
  primer
gtaaaacgacggccagtctatctccctcccggttctg

SEQ ID NO: 69656 - DNA, 21 bp, Artificial Sequence
  primer
ttccatccagggcattatttc

SEQ ID NO: 69657 - DNA, 21 bp, Artificial Sequence
  primer
gcagggatatctggagattgg

SEQ ID NO: 69658 - DNA, 38 bp, Artificial Sequence
  primer
gtaaaacgacggccagtgacatggacagtgactctggg

SEQ ID NO: 69659 - DNA, 21 bp, Artificial Sequence
  primer
gcgtatgctttgtacacctgg

SEQ ID NO: 69660 - DNA, 38 bp, Artificial Sequence
  primer
gtaaaacgacggccagtgatctgggatagctcagtggg

SEQ ID NO: 69661 - DNA, 38 bp, Artificial Sequence
  primer
gtaaaacgacggccagtgcactcagatattggtcaggc

SEQ ID NO: 69662 - DNA, 22 bp, Artificial Sequence
  primer
cggccagaactttgatataagc

SEQ ID NO: 69663 - DNA, 21 bp, Artificial Sequence
  primer
cctctaaggcaggtcaccaac

SEQ ID NO: 69664 - DNA, 38 bp, Artificial Sequence
  primer
gtaaaacgacggccagtctctccttcccacccagatag

SEQ ID NO: 69665 - DNA, 20 bp, Artificial Sequence
  primer
tctgagccaccatgcttcac

SEQ ID NO: 69666 - DNA, 37 bp, Artificial Sequence
  primer
gtaaaacgacggccagtctcctcatgcctggaagatg

SEQ ID NO: 69667 - DNA, 38 bp, Artificial Sequence
  primer
gtaaaacgacggccagtataatagaagcgcctcccacc

SEQ ID NO: 69668 - DNA, 21 bp, Artificial Sequence
  primer
cttccaccactggagggttac

SEQ ID NO: 69669 - DNA, 37 bp, Artificial Sequence
  primer
gtaaaacgacggccagtaagaacctccacatggtccc

SEQ ID NO: 69670 - DNA, 20 bp, Artificial Sequence
  primer
actctgccaccacacccttc

SEQ ID NO: 69671 - DNA, 38 bp, Artificial Sequence
  primer
gtaaaacgacggccagtctgattcatcctctcccttgc

SEQ ID NO: 69672 - DNA, 21 bp, Artificial Sequence
  primer
tggtttaggcctgttcaaagc

SEQ ID NO: 69673 - DNA, 39 bp, Artificial Sequence
  primer
gtaaaacgacggccagtggaagtaagcgaagaggtgagg

SEQ ID NO: 69674 - DNA, 38 bp, Artificial Sequence
  primer
gtaaaacgacggccagtgaaagtgaggctcagaggcag

SEQ ID NO: 69675 - DNA, 21 bp, Artificial Sequence
  primer
ctgtaaagggagaagggaggg

SEQ ID NO: 69676 - DNA, 21 bp, Artificial Sequence
  primer
tcccgtctctctaaggctctg

SEQ ID NO: 69677 - DNA, 38 bp, Artificial Sequence
  primer
gtaaaacgacggccagttggaaggatggatgaacaatg

SEQ ID NO: 69678 - DNA, 21 bp, Artificial Sequence
  primer
gtcaggagctggaagcaaatc

SEQ ID NO: 69679 - DNA, 19 bp, Artificial Sequence
  primer
ggtccctgaatcccacttg

SEQ ID NO: 69680 - DNA, 21 bp, Artificial Sequence
  primer
ttcgccttcttactcctctgc

SEQ ID NO: 69681 - DNA, 21 bp, Artificial Sequence
  primer
gacacacagcctccattctcc

SEQ ID NO: 69682 - DNA, 35 bp, Artificial Sequence
  primer
gtaaaacgacggccagtagactgggaagcccaagg

SEQ ID NO: 69683 - DNA, 18 bp, Artificial Sequence
  primer
gggaggatcgcctgagtc

SEQ ID NO: 69684 - DNA, 38 bp, Artificial Sequence
  primer
gtaaaacgacggccagtgaggagcaaacatatcctgcc

SEQ ID NO: 69685 - DNA, 37 bp, Artificial Sequence
  primer
gtaaaacgacggccagttctgtgaaggcatctggagc

SEQ ID NO: 69686 - DNA, 21 bp, Artificial Sequence
  primer
agtagcctgggctgttctgac

SEQ ID NO: 69687 - DNA, 37 bp, Artificial Sequence
  primer
gtaaaacgacggccagtctggaaggacaggtgctcag

SEQ ID NO: 69688 - DNA, 21 bp, Artificial Sequence
  primer
gagggtgtggtgagaacttgg

SEQ ID NO: 69689 - DNA, 21 bp, Artificial Sequence
  primer
aagaccagctctgcctaccag

SEQ ID NO: 69690 - DNA, 20 bp, Artificial Sequence
  primer
cctccacatcgttgaccttg

SEQ ID NO: 69691 - DNA, 21 bp, Artificial Sequence
  primer
taaattcctaccgttgccagg

SEQ ID NO: 69692 - DNA, 38 bp, Artificial Sequence
  primer
gtaaaacgacggccagtccgcaccagaactagggatac

SEQ ID NO: 69693 - DNA, 19 bp, Artificial Sequence
  primer
ccgactcccttctgtggtg

SEQ ID NO: 69694 - DNA, 19 bp, Artificial Sequence
  primer
ctcggcgaacaggaggtag

SEQ ID NO: 69695 - DNA, 21 bp, Artificial Sequence
  primer
aacttgagcatctcccagacg

SEQ ID NO: 69696 - DNA, 35 bp, Artificial Sequence
  primer
gtaaaacgacggccagtatggccaaggtctccagc

SEQ ID NO: 69697 - DNA, 21 bp, Artificial Sequence
  primer
agtgtgtggtcattacacggc

SEQ ID NO: 69698 - DNA, 35 bp, Artificial Sequence
  primer
gtaaaacgacggccagtcagtgcaccgggtgtgag

SEQ ID NO: 69699 - DNA, 38 bp, Artificial Sequence
  primer
gtaaaacgacggccagtaagtgtgtccgagaccagatg

SEQ ID NO: 69700 - DNA, 38 bp, Artificial Sequence
  primer
gtaaaacgacggccagtggagtgaccttgaacacaccc

SEQ ID NO: 69701 - DNA, 37 bp, Artificial Sequence
  primer
gtaaaacgacggccagtgtaccaatgggaattgtggc

SEQ ID NO: 69702 - DNA, 21 bp, Artificial Sequence
  primer
cccacttctgtcatcacctcc

SEQ ID NO: 69703 - DNA, 21 bp, Artificial Sequence
  primer
gaatccacctggcttatcgtc

SEQ ID NO: 69704 - DNA, 21 bp, Artificial Sequence
  primer
gaacccagcatcctcctaatg

SEQ ID NO: 69705 - DNA, 22 bp, Artificial Sequence
  primer
aacctgaagcaaggatttagcc

SEQ ID NO: 69706 - DNA, 21 bp, Artificial Sequence
  primer
agaggaagcaggaggagtcac

SEQ ID NO: 69707 - DNA, 36 bp, Artificial Sequence
  primer
gtaaaacgacggccagtcatattgggagggcaggac

SEQ ID NO: 69708 - DNA, 21 bp, Artificial Sequence
  primer
cctgaagctggtggtactgtg

SEQ ID NO: 69709 - DNA, 39 bp, Artificial Sequence
  primer
gtaaaacgacggccagtcaataactgtgggagacgaagc

SEQ ID NO: 69710 - DNA, 21 bp, Artificial Sequence
  primer
tatgcaggtgcaggatacagg

SEQ ID NO: 69711 - DNA, 19 bp, Artificial Sequence
  primer
cttgttccctggctccttg

SEQ ID NO: 69712 - DNA, 23 bp, Artificial Sequence
  primer
tctggactcagaagcctgtagtg

SEQ ID NO: 69713 - DNA, 21 bp, Artificial Sequence
  primer
cagcataggtctcctccatcc

SEQ ID NO: 69714 - DNA, 21 bp, Artificial Sequence
  primer
tggaagttcaaaggatgggtc

SEQ ID NO: 69715 - DNA, 21 bp, Artificial Sequence
  primer
tattgtgagacacgctctgcc

SEQ ID NO: 69716 - DNA, 21 bp, Artificial Sequence
  primer
aatccaacacagagggcaaac

SEQ ID NO: 69717 - DNA, 21 bp, Artificial Sequence
  primer
caccctccttcctgtaagacc

SEQ ID NO: 69718 - DNA, 21 bp, Artificial Sequence
  primer
acttacgggctgtagactggg

SEQ ID NO: 69719 - DNA, 35 bp, Artificial Sequence
  primer
gtaaaacgacggccagtccctgctctgctggtctg

SEQ ID NO: 69720 - DNA, 43 bp, Artificial Sequence
  primer
gtaaaacgacggccagttcaaagtttaaggccaagttgtttac

SEQ ID NO: 69721 - DNA, 21 bp, Artificial Sequence
  primer
gaacagctgcaggtaccacac

SEQ ID NO: 69722 - DNA, 37 bp, Artificial Sequence
  primer
gtaaaacgacggccagtagcccagggtttcttctctg

SEQ ID NO: 69723 - DNA, 38 bp, Artificial Sequence
  primer
gtaaaacgacggccagttatgaggtgtgagatcccagg

SEQ ID NO: 69724 - DNA, 40 bp, Artificial Sequence
  primer
gtaaaacgacggccagtcaaacaatgttcctaaaggatgc

SEQ ID NO: 69725 - DNA, 20 bp, Artificial Sequence
  primer
ggtgcaggaaaccaacacag

SEQ ID NO: 69726 - DNA, 21 bp, Artificial Sequence
  primer
ttaacataagaggccgttggg

SEQ ID NO: 69727 - DNA, 21 bp, Artificial Sequence
  primer
ctagcaacctgcatcaacacc

SEQ ID NO: 69728 - DNA, 38 bp, Artificial Sequence
  primer
gtaaaacgacggccagtatggttgttcataagggcctc

SEQ ID NO: 69729 - DNA, 22 bp, Artificial Sequence
  primer
gctgctctttcagaagtagccc

SEQ ID NO: 69730 - DNA, 40 bp, Artificial Sequence
  primer
gtaaaacgacggccagtggctttgtcatggtaactattgc

SEQ ID NO: 69731 - DNA, 21 bp, Artificial Sequence
  primer
tatcgagagggttgagaatgg

SEQ ID NO: 69732 - DNA, 38 bp, Artificial Sequence
  primer
gtaaaacgacggccagtgaggtcctgggttactctccc

SEQ ID NO: 69733 - DNA, 39 bp, Artificial Sequence
  primer
gtaaaacgacggccagttgtttccttaactgggatctgg

SEQ ID NO: 69734 - DNA, 38 bp, Artificial Sequence
  primer
gtaaaacgacggccagtattccacagaacaggtcccag

SEQ ID NO: 69735 - DNA, 39 bp, Artificial Sequence
  primer
gtaaaacgacggccagttcagggattgataccagagagg

SEQ ID NO: 69736 - DNA, 22 bp, Artificial Sequence
  primer
gacaatgacatcgctaacttgc

SEQ ID NO: 69737 - DNA, 21 bp, Artificial Sequence
  primer
tatatcgaagcatccacaccc

SEQ ID NO: 69738 - DNA, 38 bp, Artificial Sequence
  primer
gtaaaacgacggccagtctgaagaagctttcagccctc

SEQ ID NO: 69739 - DNA, 21 bp, Artificial Sequence
  primer
gccatctgccagaaattatgc

SEQ ID NO: 69740 - DNA, 21 bp, Artificial Sequence
  primer
cataggaccttgaccctgagc

SEQ ID NO: 69741 - DNA, 21 bp, Artificial Sequence
  primer
agcctaggtccaatcaaaggg

SEQ ID NO: 69742 - DNA, 41 bp, Artificial Sequence
  primer
gtaaaacgacggccagttcaatacagaaactgacatttccc

SEQ ID NO: 69743 - DNA, 21 bp, Artificial Sequence
  primer
gctccataggacagacagcac

SEQ ID NO: 69744 - DNA, 20 bp, Artificial Sequence
  primer
gaagttcaggcccaggtagg

SEQ ID NO: 69745 - DNA, 38 bp, Artificial Sequence
  primer
gtaaaacgacggccagtaaacagcaactccaacaggtc

SEQ ID NO: 69746 - DNA, 38 bp, Artificial Sequence
  primer
gtaaaacgacggccagtacctgaacagggtggatgaac

SEQ ID NO: 69747 - DNA, 21 bp, Artificial Sequence
  primer
aggccttgcttctagtccctg

SEQ ID NO: 69748 - DNA, 21 bp, Artificial Sequence
  primer
cagtcgcccaggatcttaatc

SEQ ID NO: 69749 - DNA, 21 bp, Artificial Sequence
  primer
agtgctgtgtcccagtctctg

SEQ ID NO: 69750 - DNA, 37 bp, Artificial Sequence
  primer
gtaaaacgacggccagtgtccctcatcagggtcacag

SEQ ID NO: 69751 - DNA, 39 bp, Artificial Sequence
  primer
gtaaaacgacggccagtttaatctcctcctttccaaccc

SEQ ID NO: 69752 - DNA, 38 bp, Artificial Sequence
  primer
gtaaaacgacggccagtggaacgtattgcttcctggtg

SEQ ID NO: 69753 - DNA, 20 bp, Artificial Sequence
  primer
ttgggatgctcagtttcctg

SEQ ID NO: 69754 - DNA, 20 bp, Artificial Sequence
  primer
agggagcagagactggcttg

SEQ ID NO: 69755 - DNA, 37 bp, Artificial Sequence
  primer
gtaaaacgacggccagtagtgcctggaccgtcctaac

SEQ ID NO: 69756 - DNA, 21 bp, Artificial Sequence
  primer
caaagctacatgacggtggag

SEQ ID NO: 69757 - DNA, 38 bp, Artificial Sequence
  primer
gtaaaacgacggccagtctagtggcagaaagccacctc

SEQ ID NO: 69758 - DNA, 21 bp, Artificial Sequence
  primer
atgccagcttctctaacctgc

SEQ ID NO: 69759 - DNA, 38 bp, Artificial Sequence
  primer
gtaaaacgacggccagtaggagcttgggctcttaggtc

SEQ ID NO: 69760 - DNA, 18 bp, Artificial Sequence
  primer
gtccctgagaaggcctgg

SEQ ID NO: 69761 - DNA, 37 bp, Artificial Sequence
  primer
gtaaaacgacggccagtaagccagtttctctggcctc

SEQ ID NO: 69762 - DNA, 21 bp, Artificial Sequence
  primer
tgtgtgtctgggaccactttg

SEQ ID NO: 69763 - DNA, 38 bp, Artificial Sequence
  primer
gtaaaacgacggccagtctcatgtctctcctggtggtg

SEQ ID NO: 69764 - DNA, 21 bp, Artificial Sequence
  primer
gacttactgttcagggccagg

SEQ ID NO: 69765 - DNA, 38 bp, Artificial Sequence
  primer
gtaaaacgacggccagtgcacttcaatccaggaaggtc

SEQ ID NO: 69766 - DNA, 38 bp, Artificial Sequence
  primer
gtaaaacgacggccagtagggtagagtgacttgcccag

SEQ ID NO: 69767 - DNA, 36 bp, Artificial Sequence
  primer
gtaaaacgacggccagtggctattcaaggcctggtg

SEQ ID NO: 69768 - DNA, 21 bp, Artificial Sequence
  primer
gttgtaccagctctgcgaaag

SEQ ID NO: 69769 - DNA, 21 bp, Artificial Sequence
  primer
cactcaacttgtggaggagcc

SEQ ID NO: 69770 - DNA, 21 bp, Artificial Sequence
  primer
ctgcatagggcagactgtgtc

SEQ ID NO: 69771 - DNA, 21 bp, Artificial Sequence
  primer
gagagggtttcctccttccac

SEQ ID NO: 69772 - DNA, 22 bp, Artificial Sequence
  primer
tgtgtgtgggacaatctgagtc

SEQ ID NO: 69773 - DNA, 37 bp, Artificial Sequence
  primer
gtaaaacgacggccagtcaccctaggatctcccaagc

SEQ ID NO: 69774 - DNA, 21 bp, Artificial Sequence
  primer
tctggcacagaagagatcagg

SEQ ID NO: 69775 - DNA, 21 bp, Artificial Sequence
  primer
ttaagtggctcactggtggtg

SEQ ID NO: 69776 - DNA, 21 bp, Artificial Sequence
  primer
gacctggaagaacttggcatc

SEQ ID NO: 69777 - DNA, 21 bp, Artificial Sequence
  primer
aaagcaccagagaacagaggg

SEQ ID NO: 69778 - DNA, 21 bp, Artificial Sequence
  primer
ggagttaccctccttcctccc

SEQ ID NO: 69779 - DNA, 38 bp, Artificial Sequence
  primer
gtaaaacgacggccagtgggtgaaggaagaaagtgtgg

SEQ ID NO: 69780 - DNA, 38 bp, Artificial Sequence
  primer
gtaaaacgacggccagtgacacacctctgtggagggag

SEQ ID NO: 69781 - DNA, 36 bp, Artificial Sequence
  primer
gtaaaacgacggccagtcttagtccagctgcctgcc

SEQ ID NO: 69782 - DNA, 19 bp, Artificial Sequence
  primer
gagcgttcctccactcagg

SEQ ID NO: 69783 - DNA, 38 bp, Artificial Sequence
  primer
gtaaaacgacggccagtcaggacagctctgctgtatcc

SEQ ID NO: 69784 - DNA, 21 bp, Artificial Sequence
  primer
agaaaggaagcaggaaggctc

SEQ ID NO: 69785 - DNA, 20 bp, Artificial Sequence
  primer
ggccataggtcaaggctttc

SEQ ID NO: 69786 - DNA, 38 bp, Artificial Sequence
  primer
gtaaaacgacggccagtggaggtgagggagtactgtgg

SEQ ID NO: 69787 - DNA, 38 bp, Artificial Sequence
  primer
gtaaaacgacggccagtgggcacaggaataagtcccac

SEQ ID NO: 69788 - DNA, 21 bp, Artificial Sequence
  primer
tctctaagggctggaggaatg

SEQ ID NO: 69789 - DNA, 21 bp, Artificial Sequence
  primer
cctttgcctttcaccttgatg

SEQ ID NO: 69790 - DNA, 38 bp, Artificial Sequence
  primer
gtaaaacgacggccagtagcagcttcagacatcaatgg

SEQ ID NO: 69791 - DNA, 18 bp, Artificial Sequence
  primer
gaagctgaagccgaagcc

SEQ ID NO: 69792 - DNA, 20 bp, Artificial Sequence
  primer
acttggagcggaagctgaag

SEQ ID NO: 69793 - DNA, 36 bp, Artificial Sequence
  primer
gtaaaacgacggccagtcgacgggaacttcttggag

SEQ ID NO: 69794 - DNA, 38 bp, Artificial Sequence
  primer
gtaaaacgacggccagtcacagccatgatgaggatcac

SEQ ID NO: 69795 - DNA, 37 bp, Artificial Sequence
  primer
gtaaaacgacggccagttctttggagtccagctgagg

SEQ ID NO: 69796 - DNA, 20 bp, Artificial Sequence
  primer
ccctttctttggagtccagc

SEQ ID NO: 69797 - DNA, 38 bp, Artificial Sequence
  primer
gtaaaacgacggccagtcctggaatgctggactctctc

SEQ ID NO: 69798 - DNA, 21 bp, Artificial Sequence
  primer
cacttgaaaggaagtgggatg

SEQ ID NO: 69799 - DNA, 38 bp, Artificial Sequence
  primer
gtaaaacgacggccagtcagcaggatatacccaggcac

SEQ ID NO: 69800 - DNA, 21 bp, Artificial Sequence
  primer
gtttccctgcctccaactagg

SEQ ID NO: 69801 - DNA, 40 bp, Artificial Sequence
  primer
gtaaaacgacggccagttttctacttccactgtgctcacc

SEQ ID NO: 69802 - DNA, 22 bp, Artificial Sequence
  primer
tcaaggaaagagaaggaagcag

SEQ ID NO: 69803 - DNA, 38 bp, Artificial Sequence
  primer
gtaaaacgacggccagtccgcacttgtatttgcttgtg

SEQ ID NO: 69804 - DNA, 38 bp, Artificial Sequence
  primer
gtaaaacgacggccagtgtgggctccattcactctcag

SEQ ID NO: 69805 - DNA, 38 bp, Artificial Sequence
  primer
gtaaaacgacggccagtcctccctagaactcgcatctc

SEQ ID NO: 69806 - DNA, 38 bp, Artificial Sequence
  primer
gtaaaacgacggccagtagaaacttctctccgtgcctg

SEQ ID NO: 69807 - DNA, 38 bp, Artificial Sequence
  primer
gtaaaacgacggccagtcactgaccatttgccagactc

SEQ ID NO: 69808 - DNA, 21 bp, Artificial Sequence
  primer
cccaggtgcgaaacaaataag

SEQ ID NO: 69809 - DNA, 38 bp, Artificial Sequence
  primer
gtaaaacgacggccagtaccctgtccttcagactgtcc

SEQ ID NO: 69810 - DNA, 21 bp, Artificial Sequence
  primer
taaacctcctgctcttgccac

SEQ ID NO: 69811 - DNA, 38 bp, Artificial Sequence
  primer
gtaaaacgacggccagtcttcactacccaccttgccac

SEQ ID NO: 69812 - DNA, 20 bp, Artificial Sequence
  primer
cagacgagcctgttgtctcc

SEQ ID NO: 69813 - DNA, 38 bp, Artificial Sequence
  primer
gtaaaacgacggccagttcttcacatccctcccatacc

SEQ ID NO: 69814 - DNA, 19 bp, Artificial Sequence
  primer
cctggccttctaccttggg

SEQ ID NO: 69815 - DNA, 21 bp, Artificial Sequence
  primer
tccaagcttccaagacatcag

SEQ ID NO: 69816 - DNA, 38 bp, Artificial Sequence
  primer
gtaaaacgacggccagtaaacatctttggtcagctggg

SEQ ID NO: 69817 - DNA, 38 bp, Artificial Sequence
  primer
gtaaaacgacggccagttgtcgttgtcacctcggtatc

SEQ ID NO: 69818 - DNA, 38 bp, Artificial Sequence
  primer
gtaaaacgacggccagtaagctatgccggttacacacc

SEQ ID NO: 69819 - DNA, 21 bp, Artificial Sequence
  primer
atcaaatgcaaggtggagagg

SEQ ID NO: 69820 - DNA, 38 bp, Artificial Sequence
  primer
gtaaaacgacggccagttcctcccagatacagccagac

SEQ ID NO: 69821 - DNA, 37 bp, Artificial Sequence
  primer
gtaaaacgacggccagtaaggcagcagatccaatgtg

SEQ ID NO: 69822 - DNA, 21 bp, Artificial Sequence
  primer
gcaaagagctcattcagggtc

SEQ ID NO: 69823 - DNA, 38 bp, Artificial Sequence
  primer
gtaaaacgacggccagttttactctcttgcccacccag

SEQ ID NO: 69824 - DNA, 38 bp, Artificial Sequence
  primer
gtaaaacgacggccagttcccagtgacagacagacctc

SEQ ID NO: 69825 - DNA, 21 bp, Artificial Sequence
  primer
gtatgtggccaagagggtgag

SEQ ID NO: 69826 - DNA, 38 bp, Artificial Sequence
  primer
gtaaaacgacggccagtgcatgggtacaggctcagaag

SEQ ID NO: 69827 - DNA, 21 bp, Artificial Sequence
  primer
gcagtcacaagaaaggacagg

SEQ ID NO: 69828 - DNA, 22 bp, Artificial Sequence
  primer
cccacacaacactcctaaggtc

SEQ ID NO: 69829 - DNA, 21 bp, Artificial Sequence
  primer
ctctgtggtcccttctccatc

SEQ ID NO: 69830 - DNA, 21 bp, Artificial Sequence
  primer
gggcttgtgtgggtatttagg

SEQ ID NO: 69831 - DNA, 21 bp, Artificial Sequence
  primer
aggttgtatcagccaaggagg

SEQ ID NO: 69832 - DNA, 21 bp, Artificial Sequence
  primer
agaaccggagttaaccttccc

SEQ ID NO: 69833 - DNA, 21 bp, Artificial Sequence
  primer
actctggtgagttcctgggtc

SEQ ID NO: 69834 - DNA, 21 bp, Artificial Sequence
  primer
caggactagggtttccttggg

SEQ ID NO: 69835 - DNA, 20 bp, Artificial Sequence
  primer
agtcgactccacctgctgag

SEQ ID NO: 69836 - DNA, 21 bp, Artificial Sequence
  primer
tgagccttagccagctagcac

SEQ ID NO: 69837 - DNA, 21 bp, Artificial Sequence
  primer
ctcttcccagttccactcacc

SEQ ID NO: 69838 - DNA, 21 bp, Artificial Sequence
  primer
tgggaaatctgtgatcccatc

SEQ ID NO: 69839 - DNA, 38 bp, Artificial Sequence
  primer
gtaaaacgacggccagtagaacactagccaccctaccc

SEQ ID NO: 69840 - DNA, 19 bp, Artificial Sequence
  primer
cacagctccacccagtgag

SEQ ID NO: 69841 - DNA, 20 bp, Artificial Sequence
  primer
cttgagcccaggagatggag

SEQ ID NO: 69842 - DNA, 37 bp, Artificial Sequence
  primer
gtaaaacgacggccagtgccatcctagacacacagcc

SEQ ID NO: 69843 - DNA, 20 bp, Artificial Sequence
  primer
gggtctgattcacccagagg

SEQ ID NO: 69844 - DNA, 38 bp, Artificial Sequence
  primer
gtaaaacgacggccagtacatggcagcatgagtgtctc

SEQ ID NO: 69845 - DNA, 19 bp, Artificial Sequence
  primer
cccagattgacctggaacc

SEQ ID NO: 69846 - DNA, 20 bp, Artificial Sequence
  primer
gcactgaacacaggacaccc

SEQ ID NO: 69847 - DNA, 39 bp, Artificial Sequence
  primer
gtaaaacgacggccagttgacatgagaatgacacatccc

SEQ ID NO: 69848 - DNA, 18 bp, Artificial Sequence
  primer
atccacccagggatgcac

SEQ ID NO: 69849 - DNA, 21 bp, Artificial Sequence
  primer
ggctactcggtgcctagaatg

SEQ ID NO: 69850 - DNA, 39 bp, Artificial Sequence
  primer
gtaaaacgacggccagtgcaggagatcttcagcactcac

SEQ ID NO: 69851 - DNA, 21 bp, Artificial Sequence
  primer
ccaacttcacagaggtcctgg

SEQ ID NO: 69852 - DNA, 22 bp, Artificial Sequence
  primer
ccaaaggtgtagaagtcatcgg

SEQ ID NO: 69853 - DNA, 21 bp, Artificial Sequence
  primer
atttgggtcatggaatgaagc

SEQ ID NO: 69854 - DNA, 21 bp, Artificial Sequence
  primer
cacacatatgacaggtggctg

SEQ ID NO: 69855 - DNA, 20 bp, Artificial Sequence
  primer
cagggcactcaggaaattgt

SEQ ID NO: 69856 - DNA, 20 bp, Artificial Sequence
  primer
ctcaaggcatcacatcctcc

SEQ ID NO: 69857 - DNA, 21 bp, Artificial Sequence
  primer
cctacccacacagcctagacc

SEQ ID NO: 69858 - DNA, 20 bp, Artificial Sequence
  primer
cagtgaattcctcggctctg

SEQ ID NO: 69859 - DNA, 21 bp, Artificial Sequence
  primer
tttctgctactccacctgagc

SEQ ID NO: 69860 - DNA, 21 bp, Artificial Sequence
  primer
cacagctgatgccatacattg

SEQ ID NO: 69861 - DNA, 38 bp, Artificial Sequence
  primer
gtaaaacgacggccagtttatagaccaccttgcccagc

SEQ ID NO: 69862 - DNA, 21 bp, Artificial Sequence
  primer
tggctgagccctacaagtacc

SEQ ID NO: 69863 - DNA, 38 bp, Artificial Sequence
  primer
gtaaaacgacggccagttcataatagatggcgaggtgc

SEQ ID NO: 69864 - DNA, 19 bp, Artificial Sequence
  primer
cagtctgccttccctggag

SEQ ID NO: 69865 - DNA, 38 bp, Artificial Sequence
  primer
gtaaaacgacggccagtcaaagaagccaacatgcacag

SEQ ID NO: 69866 - DNA, 18 bp, Artificial Sequence
  primer
ggtgcccgtgaatgaagc

SEQ ID NO: 69867 - DNA, 38 bp, Artificial Sequence
  primer
gtaaaacgacggccagtctggtagaggcgttccaaatc

SEQ ID NO: 69868 - DNA, 37 bp, Artificial Sequence
  primer
gtaaaacgacggccagtaggtggtgtccttcctgacc

SEQ ID NO: 69869 - DNA, 38 bp, Artificial Sequence
  primer
gtaaaacgacggccagtaaagagagtgaggcaaccctg

SEQ ID NO: 69870 - DNA, 21 bp, Artificial Sequence
  primer
aagtcaggacgtgtttgggag

SEQ ID NO: 69871 - DNA, 21 bp, Artificial Sequence
  primer
ggtgctgacattcaagcagac

SEQ ID NO: 69872 - DNA, 38 bp, Artificial Sequence
  primer
gtaaaacgacggccagtgaatgtgagagggtcagggtc

SEQ ID NO: 69873 - DNA, 21 bp, Artificial Sequence
  primer
acaaagggtaggtgaagtggc

SEQ ID NO: 69874 - DNA, 39 bp, Artificial Sequence
  primer
gtaaaacgacggccagttctgtacacaggaaacccactg

SEQ ID NO: 69875 - DNA, 38 bp, Artificial Sequence
  primer
gtaaaacgacggccagttctctgaggtgtctggattgg

SEQ ID NO: 69876 - DNA, 21 bp, Artificial Sequence
  primer
ccaaaccaaaccaaagcaaac

SEQ ID NO: 69877 - DNA, 39 bp, Artificial Sequence
  primer
gtaaaacgacggccagtttagcagagtaagacaaccgga

SEQ ID NO: 69878 - DNA, 38 bp, Artificial Sequence
  primer
gtaaaacgacggccagtgaagctgcaggctccataaac

SEQ ID NO: 69879 - DNA, 38 bp, Artificial Sequence
  primer
gtaaaacgacggccagtcaggaaagaggactgggaaac

SEQ ID NO: 69880 - DNA, 37 bp, Artificial Sequence
  primer
gtaaaacgacggccagtttagtaatgcagcgggcatc

SEQ ID NO: 69881 - DNA, 37 bp, Artificial Sequence
  primer
gtaaaacgacggccagtcagcagaggccagtttgatg

SEQ ID NO: 69882 - DNA, 38 bp, Artificial Sequence
  primer
gtaaaacgacggccagtccagagtttgggatcaatgtg

SEQ ID NO: 69883 - DNA, 24 bp, Artificial Sequence
  primer
catgtttgtgtttataatgcaggc

SEQ ID NO: 69884 - DNA, 37 bp, Artificial Sequence
  primer
gtaaaacgacggccagtgtgacagaggcttcaccacc

SEQ ID NO: 69885 - DNA, 38 bp, Artificial Sequence
  primer
gtaaaacgacggccagtaaagctttcctggattgatgc

SEQ ID NO: 69886 - DNA, 38 bp, Artificial Sequence
  primer
gtaaaacgacggccagtatcagatttgtcggtgccttc

SEQ ID NO: 69887 - DNA, 38 bp, Artificial Sequence
  primer
gtaaaacgacggccagtagaccaacgaaaccatccttg

SEQ ID NO: 69888 - DNA, 18 bp, Artificial Sequence
  primer
gaggccctctcgaacagc

SEQ ID NO: 69889 - DNA, 38 bp, Artificial Sequence
  primer
gtaaaacgacggccagtcgatgtagaagagcgcatacc

SEQ ID NO: 69890 - DNA, 21 bp, Artificial Sequence
  primer
cagaaagaagcccacacacac

SEQ ID NO: 69891 - DNA, 37 bp, Artificial Sequence
  primer
gtaaaacgacggccagtcgatgcacatggagaagctc

SEQ ID NO: 69892 - DNA, 21 bp, Artificial Sequence
  primer
ctgcttcattaagtcatcggc

SEQ ID NO: 69893 - DNA, 21 bp, Artificial Sequence
  primer
cgccacgcagtagtaacagtc

SEQ ID NO: 69894 - DNA, 37 bp, Artificial Sequence
  primer
gtaaaacgacggccagtgatgccgaggtaaagcagtg

SEQ ID NO: 69895 - DNA, 37 bp, Artificial Sequence
  primer
gtaaaacgacggccagtgcagacactgaggctggaag

SEQ ID NO: 69896 - DNA, 22 bp, Artificial Sequence
  primer
ggaggctgcttattatttcacg

SEQ ID NO: 69897 - DNA, 38 bp, Artificial Sequence
  primer
gtaaaacgacggccagtagacaggaatgtcaccttggg

SEQ ID NO: 69898 - DNA, 38 bp, Artificial Sequence
  primer
gtaaaacgacggccagtttgaacctgggagatagaggc

SEQ ID NO: 69899 - DNA, 37 bp, Artificial Sequence
  primer
gtaaaacgacggccagtaatcaatgttcgccttcgtg

SEQ ID NO: 69900 - DNA, 37 bp, Artificial Sequence
  primer
gtaaaacgacggccagtctcagccataagccatggag

SEQ ID NO: 69901 - DNA, 19 bp, Artificial Sequence
  primer
accttgtgatctgcccacc

SEQ ID NO: 69902 - DNA, 18 bp, Artificial Sequence
  primer
aatgcagccaggccctac

SEQ ID NO: 69903 - DNA, 36 bp, Artificial Sequence
  primer
gtaaaacgacggccagtgaagcttcgaaatgggcag

SEQ ID NO: 69904 - DNA, 21 bp, Artificial Sequence
  primer
tcttgatcttctcgatgctgc

SEQ ID NO: 69905 - DNA, 21 bp, Artificial Sequence
  primer
acggtccctctgtagtcgaag

SEQ ID NO: 69906 - DNA, 38 bp, Artificial Sequence
  primer
gtaaaacgacggccagttgaaacgttgagcttggtgag

SEQ ID NO: 69907 - DNA, 40 bp, Artificial Sequence
  primer
gtaaaacgacggccagtctgaaatgaccacataacaccac

SEQ ID NO: 69908 - DNA, 38 bp, Artificial Sequence
  primer
gtaaaacgacggccagtagggcgatgctagtagtctgg

SEQ ID NO: 69909 - DNA, 18 bp, Artificial Sequence
  primer
gtgggtcaccacactgcc

SEQ ID NO: 69910 - DNA, 19 bp, Artificial Sequence
  primer
aaatctccaactgcgaccc

SEQ ID NO: 69911 - DNA, 40 bp, Artificial Sequence
  primer
gtaaaacgacggccagtcgatgactgttgagtcagtttgg

SEQ ID NO: 69912 - DNA, 21 bp, Artificial Sequence
  primer
tggtgttggcagaaataccag

SEQ ID NO: 69913 - DNA, 38 bp, Artificial Sequence
  primer
gtaaaacgacggccagtccagaaacccataccttgacc

SEQ ID NO: 69914 - DNA, 38 bp, Artificial Sequence
  primer
gtaaaacgacggccagtctcaggagcagggactgtctg

SEQ ID NO: 69915 - DNA, 38 bp, Artificial Sequence
  primer
gtaaaacgacggccagtgaacctgatacccagtgagcc

SEQ ID NO: 69916 - DNA, 37 bp, Artificial Sequence
  primer
gtaaaacgacggccagtacagccacagaggagcagag

SEQ ID NO: 69917 - DNA, 21 bp, Artificial Sequence
  primer
gtgctcatgaatgctgcctac

SEQ ID NO: 69918 - DNA, 21 bp, Artificial Sequence
  primer
ttctagggctgacatcaaggg

SEQ ID NO: 69919 - DNA, 21 bp, Artificial Sequence
  primer
acttgatctgcagggtgtcag

SEQ ID NO: 69920 - DNA, 21 bp, Artificial Sequence
  primer
gagcctaggccattagactcg

SEQ ID NO: 69921 - DNA, 38 bp, Artificial Sequence
  primer
gtaaaacgacggccagtgcagttcatgtgaagtcaggg

SEQ ID NO: 69922 - DNA, 38 bp, Artificial Sequence
  primer
gtaaaacgacggccagtgaggaagtcaggttgtgtggg

SEQ ID NO: 69923 - DNA, 38 bp, Artificial Sequence
  primer
gtaaaacgacggccagttgcaaatgctgatgctaggtc

SEQ ID NO: 69924 - DNA, 21 bp, Artificial Sequence
  primer
ttaaagaggctccagcaccac

SEQ ID NO: 69925 - DNA, 21 bp, Artificial Sequence
  primer
caatgccaggagctgtatgac

SEQ ID NO: 69926 - DNA, 18 bp, Artificial Sequence
  primer
gagggaagaggcgcaaac

SEQ ID NO: 69927 - DNA, 22 bp, Artificial Sequence
  primer
ctatgccactcatacaacaggg

SEQ ID NO: 69928 - DNA, 21 bp, Artificial Sequence
  primer
gcccacttatttcacatgagc

SEQ ID NO: 69929 - DNA, 21 bp, Artificial Sequence
  primer
taaatggaaagaggtggtgcc

SEQ ID NO: 69930 - DNA, 21 bp, Artificial Sequence
  primer
ggctctttcttgtttcttggg

SEQ ID NO: 69931 - DNA, 38 bp, Artificial Sequence
  primer
gtaaaacgacggccagtcaagggcaattcagaggaaac

SEQ ID NO: 69932 - DNA, 21 bp, Artificial Sequence
  primer
tggttccggagaataagaacc

SEQ ID NO: 69933 - DNA, 21 bp, Artificial Sequence
  primer
tggcaaagagattgctcaaag

SEQ ID NO: 69934 - DNA, 39 bp, Artificial Sequence
  primer
gtaaaacgacggccagttgcttcttcatgactttgaagg

SEQ ID NO: 69935 - DNA, 38 bp, Artificial Sequence
  primer
gtaaaacgacggccagtagaaaggctggattcccaaag

SEQ ID NO: 69936 - DNA, 21 bp, Artificial Sequence
  primer
gagatggcttcactgcaacag

SEQ ID NO: 69937 - DNA, 21 bp, Artificial Sequence
  primer
aaagtgcctgaaccgtttctc

SEQ ID NO: 69938 - DNA, 20 bp, Artificial Sequence
  primer
tcttatcaccacccacagcc

SEQ ID NO: 69939 - DNA, 38 bp, Artificial Sequence
  primer
gtaaaacgacggccagtctgatgcaagcacacacttcc

SEQ ID NO: 69940 - DNA, 38 bp, Artificial Sequence
  primer
gtaaaacgacggccagtcacaaggacagagcacagacg

SEQ ID NO: 69941 - DNA, 21 bp, Artificial Sequence
  primer
tcaggtgactgaaccacttcc

SEQ ID NO: 69942 - DNA, 40 bp, Artificial Sequence
  primer
gtaaaacgacggccagttcctcctccttctctaacattgg

SEQ ID NO: 69943 - DNA, 21 bp, Artificial Sequence
  primer
gttactcatctttcgggtggg

SEQ ID NO: 69944 - DNA, 38 bp, Artificial Sequence
  primer
gtaaaacgacggccagtggctgcttactccatagcctg

SEQ ID NO: 69945 - DNA, 37 bp, Artificial Sequence
  primer
gtaaaacgacggccagttagccaaaggtcaccagcag

SEQ ID NO: 69946 - DNA, 21 bp, Artificial Sequence
  primer
aattggtctcttggtcgcatc

SEQ ID NO: 69947 - DNA, 21 bp, Artificial Sequence
  primer
tcagaaagatggagaggctgg

SEQ ID NO: 69948 - DNA, 38 bp, Artificial Sequence
  primer
gtaaaacgacggccagtccctctctccctcccttattg

SEQ ID NO: 69949 - DNA, 21 bp, Artificial Sequence
  primer
aagactccctgaatcacagcc

SEQ ID NO: 69950 - DNA, 38 bp, Artificial Sequence
  primer
gtaaaacgacggccagttgccttgtacttcctggttcc

SEQ ID NO: 69951 - DNA, 38 bp, Artificial Sequence
  primer
gtaaaacgacggccagtgagaggtttgttctgttcccg

SEQ ID NO: 69952 - DNA, 21 bp, Artificial Sequence
  primer
gtgagatgtcagcgagtcagg

SEQ ID NO: 69953 - DNA, 37 bp, Artificial Sequence
  primer
gtaaaacgacggccagtgggaaggtgggtatgaggac

SEQ ID NO: 69954 - DNA, 38 bp, Artificial Sequence
  primer
gtaaaacgacggccagttcaggaacagagcaatgaagg

SEQ ID NO: 69955 - DNA, 38 bp, Artificial Sequence
  primer
gtaaaacgacggccagtgggccagccagtaacttattc

SEQ ID NO: 69956 - DNA, 21 bp, Artificial Sequence
  primer
ctatccctccttagccctgtg

SEQ ID NO: 69957 - DNA, 20 bp, Artificial Sequence
  primer
ttggtcatcaatcctcctgg

SEQ ID NO: 69958 - DNA, 37 bp, Artificial Sequence
  primer
gtaaaacgacggccagttgggtttaagctgcaaggtg

SEQ ID NO: 69959 - DNA, 38 bp, Artificial Sequence
  primer
gtaaaacgacggccagtaactggtcaccactcctcctc

SEQ ID NO: 69960 - DNA, 22 bp, Artificial Sequence
  primer
gactgaacccgagcagaatatg

SEQ ID NO: 69961 - DNA, 38 bp, Artificial Sequence
  primer
gtaaaacgacggccagtgcctctcccttgggtataagg

SEQ ID NO: 69962 - DNA, 42 bp, Artificial Sequence
  primer
gtaaaacgacggccagtccatccataccttcttattctgtcc

SEQ ID NO: 69963 - DNA, 42 bp, Artificial Sequence
  primer
gtaaaacgacggccagtgcagatagtaaagcatcctgttgag

SEQ ID NO: 69964 - DNA, 21 bp, Artificial Sequence
  primer
tagaatgcccacagcaatcac

SEQ ID NO: 69965 - DNA, 21 bp, Artificial Sequence
  primer
ggcccttagattgtgtgtgag

SEQ ID NO: 69966 - DNA, 22 bp, Artificial Sequence
  primer
ccaaactcagcttctggaagag

SEQ ID NO: 69967 - DNA, 38 bp, Artificial Sequence
  primer
gtaaaacgacggccagtttgcacaaagttaaagccaga

SEQ ID NO: 69968 - DNA, 39 bp, Artificial Sequence
  primer
gtaaaacgacggccagtttggcattaaccagattcaacc

SEQ ID NO: 69969 - DNA, 21 bp, Artificial Sequence
  primer
aaactgggaattgtgggtgac

SEQ ID NO: 69970 - DNA, 39 bp, Artificial Sequence
  primer
gtaaaacgacggccagtctgctttctatcatccaacgtg

SEQ ID NO: 69971 - DNA, 20 bp, Artificial Sequence
  primer
tcttaagaactgcgggttgc

SEQ ID NO: 69972 - DNA, 21 bp, Artificial Sequence
  primer
cccaatctgatctaccattgc

SEQ ID NO: 69973 - DNA, 21 bp, Artificial Sequence
  primer
tctctgccatctcacacacag

SEQ ID NO: 69974 - DNA, 40 bp, Artificial Sequence
  primer
gtaaaacgacggccagtggctgaggagttccagatgttac

SEQ ID NO: 69975 - DNA, 40 bp, Artificial Sequence
  primer
gtaaaacgacggccagttgcctgtttgtgatatgtacagc

SEQ ID NO: 69976 - DNA, 21 bp, Artificial Sequence
  primer
actggattgcagtgatgcttg

SEQ ID NO: 69977 - DNA, 38 bp, Artificial Sequence
  primer
gtaaaacgacggccagtagcgagattagcattgcttcc

SEQ ID NO: 69978 - DNA, 38 bp, Artificial Sequence
  primer
gtaaaacgacggccagttctgccacataactagccacc

SEQ ID NO: 69979 - DNA, 38 bp, Artificial Sequence
  primer
gtaaaacgacggccagtttgcttcccaatttagggttg

SEQ ID NO: 69980 - DNA, 21 bp, Artificial Sequence
  primer
cgcaaatgtctttaatgtggg

SEQ ID NO: 69981 - DNA, 40 bp, Artificial Sequence
  primer
gtaaaacgacggccagttggaattacactgtgtgcacttt

SEQ ID NO: 69982 - DNA, 20 bp, Artificial Sequence
  primer
ctttcgtccctctttgcctc

SEQ ID NO: 69983 - DNA, 21 bp, Artificial Sequence
  primer
cacaaaggcatgagacaggac

SEQ ID NO: 69984 - DNA, 38 bp, Artificial Sequence
  primer
gtaaaacgacggccagttgagacattccttccctttgg

SEQ ID NO: 69985 - DNA, 23 bp, Artificial Sequence
  primer
ggtaacaaacagatgatgggaaa

SEQ ID NO: 69986 - DNA, 21 bp, Artificial Sequence
  primer
ccttctgcctgcattagttcc

SEQ ID NO: 69987 - DNA, 21 bp, Artificial Sequence
  primer
tggtaatggaagaaccaaggc

SEQ ID NO: 69988 - DNA, 21 bp, Artificial Sequence
  primer
ggtttattggcttcaattccc

SEQ ID NO: 69989 - DNA, 25 bp, Artificial Sequence
  primer
tttccactgcagttcagtatacatt

SEQ ID NO: 69990 - DNA, 47 bp, Artificial Sequence
  primer
gtaaaacgacggccagtgatcatataagatatgcctcttagtggatt

SEQ ID NO: 69991 - DNA, 38 bp, Artificial Sequence
  primer
gtaaaacgacggccagtccttggtttccttatccaggc

SEQ ID NO: 69992 - DNA, 21 bp, Artificial Sequence
  primer
cacaaaggcatgagacaggag

SEQ ID NO: 69993 - DNA, 40 bp, Artificial Sequence
  primer
gtaaaacgacggccagttgtgtactcaattctttctgggc

SEQ ID NO: 69994 - DNA, 23 bp, Artificial Sequence
  primer
gccacataacaaacagatgatgg

SEQ ID NO: 69995 - DNA, 23 bp, Artificial Sequence
  primer
gaccttctgtctgcattagttcc

SEQ ID NO: 69996 - DNA, 21 bp, Artificial Sequence
  primer
tccatgcaaagactgaactgg

SEQ ID NO: 69997 - DNA, 21 bp, Artificial Sequence
  primer
aggtttgttggcttcaattcc

SEQ ID NO: 69998 - DNA, 27 bp, Artificial Sequence
  primer
ggaatagcttatttccactgtagttca

SEQ ID NO: 69999 - DNA, 23 bp, Artificial Sequence
  primer
tccttcatatactgtttgcccac

SEQ ID NO: 70000 - DNA, 38 bp, Artificial Sequence
  primer
gtaaaacgacggccagtgtctttcattgcctcggtttc

SEQ ID NO: 70001 - DNA, 21 bp, Artificial Sequence
  primer
tgtactgggagaaggtgctga

SEQ ID NO: 70002 - DNA, 39 bp, Artificial Sequence
  primer
gtaaaacgacggccagttgctctcagttctttctgggtc

SEQ ID NO: 70003 - DNA, 22 bp, Artificial Sequence
  primer
tttgcttagctgattgaatgga

SEQ ID NO: 70004 - DNA, 20 bp, Artificial Sequence
  primer
cacttgaacctgtgaggtgg

SEQ ID NO: 70005 - DNA, 20 bp, Artificial Sequence
  primer
ttctctgctagacaacgccc

SEQ ID NO: 70006 - DNA, 39 bp, Artificial Sequence
  primer
gtaaaacgacggccagtcccatcaatttccatttctttg

SEQ ID NO: 70007 - DNA, 21 bp, Artificial Sequence
  primer
tcactgcttcctgagttcctg

SEQ ID NO: 70008 - DNA, 42 bp, Artificial Sequence
  primer
gtaaaacgacggccagtgcttccctgtactagaaactccaag

SEQ ID NO: 70009 - DNA, 35 bp, Artificial Sequence
  primer
gtaaaacgacggccagtcatgccaagccaggactc

SEQ ID NO: 70010 - DNA, 38 bp, Artificial Sequence
  primer
gtaaaacgacggccagtaaggtttgcacctcttcaagg

SEQ ID NO: 70011 - DNA, 38 bp, Artificial Sequence
  primer
gtaaaacgacggccagttgacacagccacagtttgaag

SEQ ID NO: 70012 - DNA, 39 bp, Artificial Sequence
  primer
gtaaaacgacggccagtaccctgtcatccatttgaaagt

SEQ ID NO: 70013 - DNA, 22 bp, Artificial Sequence
  primer
tgctctagggattcaatggttg

SEQ ID NO: 70014 - DNA, 23 bp, Artificial Sequence
  primer
caagctggttgcttcttaacatc

SEQ ID NO: 70015 - DNA, 39 bp, Artificial Sequence
  primer
gtaaaacgacggccagttccttggttcatcaaatcaggt

SEQ ID NO: 70016 - DNA, 37 bp, Artificial Sequence
  primer
gtaaaacgacggccagtagaaccaagagccagatccc

SEQ ID NO: 70017 - DNA, 21 bp, Artificial Sequence
  primer
cctttgggatttatcctctgc

SEQ ID NO: 70018 - DNA, 39 bp, Artificial Sequence
  primer
gtaaaacgacggccagtgcttcccagatgaggaatcaac

SEQ ID NO: 70019 - DNA, 22 bp, Artificial Sequence
  primer
gtagcttgactctttgttcggg

SEQ ID NO: 70020 - DNA, 38 bp, Artificial Sequence
  primer
gtaaaacgacggccagtggccaatttcactattccagg

SEQ ID NO: 70021 - DNA, 27 bp, Artificial Sequence
  primer
ttcttgtatcatttcccattgtagttc

SEQ ID NO: 70022 - DNA, 22 bp, Artificial Sequence
  primer
gcaccaagtggtcctatgtttc

SEQ ID NO: 70023 - DNA, 38 bp, Artificial Sequence
  primer
gtaaaacgacggccagttcacatcacgacaggatggac

SEQ ID NO: 70024 - DNA, 40 bp, Artificial Sequence
  primer
gtaaaacgacggccagtttcatgaatgacacacataaccc

SEQ ID NO: 70025 - DNA, 21 bp, Artificial Sequence
  primer
agcctctcacctttaggagcc

SEQ ID NO: 70026 - DNA, 23 bp, Artificial Sequence
  primer
agcctatgctttacctccctaac

SEQ ID NO: 70027 - DNA, 40 bp, Artificial Sequence
  primer
gtaaaacgacggccagtacctttcatttcacttgatcctg

SEQ ID NO: 70028 - DNA, 21 bp, Artificial Sequence
  primer
gcatcaatcttggcaactgag

SEQ ID NO: 70029 - DNA, 38 bp, Artificial Sequence
  primer
gtaaaacgacggccagtgatgacaaagatgcaagaggc

SEQ ID NO: 70030 - DNA, 21 bp, Artificial Sequence
  primer
ccagctgagatgtcatggaac

SEQ ID NO: 70031 - DNA, 22 bp, Artificial Sequence
  primer
ccaagaggcactagatacaccc

SEQ ID NO: 70032 - DNA, 21 bp, Artificial Sequence
  primer
cagggacgacccttcttctac

SEQ ID NO: 70033 - DNA, 38 bp, Artificial Sequence
  primer
gtaaaacgacggccagttgctcaccaagcatttcattc

SEQ ID NO: 70034 - DNA, 40 bp, Artificial Sequence
  primer
gtaaaacgacggccagtttaagaatccagcctcacaacag

SEQ ID NO: 70035 - DNA, 21 bp, Artificial Sequence
  primer
aacaccgtaaggtttgccttc

SEQ ID NO: 70036 - DNA, 38 bp, Artificial Sequence
  primer
gtaaaacgacggccagtcatcagccagtactccacgac

SEQ ID NO: 70037 - DNA, 20 bp, Artificial Sequence
  primer
tgcttggcagcctgaatatg

SEQ ID NO: 70038 - DNA, 23 bp, Artificial Sequence
  primer
tgactatcgcagagatatttcca

SEQ ID NO: 70039 - DNA, 38 bp, Artificial Sequence
  primer
gtaaaacgacggccagtgaaacaggcttctcccacttg

SEQ ID NO: 70040 - DNA, 44 bp, Artificial Sequence
  primer
gtaaaacgacggccagtagaagtaattagctgtatcaatctggc

SEQ ID NO: 70041 - DNA, 21 bp, Artificial Sequence
  primer
taattcccaggtgctcacaag

SEQ ID NO: 70042 - DNA, 21 bp, Artificial Sequence
  primer
agctacttgcacaggagggag

SEQ ID NO: 70043 - DNA, 37 bp, Artificial Sequence
  primer
gtaaaacgacggccagtctgacctcaagcaatctgcc

SEQ ID NO: 70044 - DNA, 38 bp, Artificial Sequence
  primer
gtaaaacgacggccagtaaggactggcttgcatctttc

SEQ ID NO: 70045 - DNA, 20 bp, Artificial Sequence
  primer
gctgactttcgtcaccttgc

SEQ ID NO: 70046 - DNA, 21 bp, Artificial Sequence
  primer
caaagctagggatgttgtggg

SEQ ID NO: 70047 - DNA, 20 bp, Artificial Sequence
  primer
caggcatgtcatgtttcacg

SEQ ID NO: 70048 - DNA, 23 bp, Artificial Sequence
  primer
ggtttctactttagctggtggtg

SEQ ID NO: 70049 - DNA, 21 bp, Artificial Sequence
  primer
gacaaagctgttcttccctgc

SEQ ID NO: 70050 - DNA, 21 bp, Artificial Sequence
  primer
agtgatgcacccaacttagcc

SEQ ID NO: 70051 - DNA, 38 bp, Artificial Sequence
  primer
gtaaaacgacggccagtcatcaatgcagcatgtctttc

SEQ ID NO: 70052 - DNA, 23 bp, Artificial Sequence
  primer
caggtaagttatgcgcaaagatg

SEQ ID NO: 70053 - DNA, 38 bp, Artificial Sequence
  primer
gtaaaacgacggccagtctcatccttggaagaccaacc

SEQ ID NO: 70054 - DNA, 38 bp, Artificial Sequence
  primer
gtaaaacgacggccagtaaagcctgtgaaggtggagtc

SEQ ID NO: 70055 - DNA, 38 bp, Artificial Sequence
  primer
gtaaaacgacggccagtggtcatgtttgtgaagctccc

SEQ ID NO: 70056 - DNA, 21 bp, Artificial Sequence
  primer
atttccaggatgcaatgttcc

SEQ ID NO: 70057 - DNA, 38 bp, Artificial Sequence
  primer
gtaaaacgacggccagtacaaatccactccttcccagg

SEQ ID NO: 70058 - DNA, 21 bp, Artificial Sequence
  primer
ctgaacaactttgttgggctc

SEQ ID NO: 70059 - DNA, 39 bp, Artificial Sequence
  primer
gtaaaacgacggccagtgagctcctatcacccagtaagc

SEQ ID NO: 70060 - DNA, 20 bp, Artificial Sequence
  primer
acaaatcagggtttgggtgg

SEQ ID NO: 70061 - DNA, 21 bp, Artificial Sequence
  primer
tgatcccagtctcataccacc

SEQ ID NO: 70062 - DNA, 21 bp, Artificial Sequence
  primer
gctgaagcttggttggtactg

SEQ ID NO: 70063 - DNA, 19 bp, Artificial Sequence
  primer
catcctccctccagcaatg

SEQ ID NO: 70064 - DNA, 21 bp, Artificial Sequence
  primer
ccatcttgccacagatcttcc

SEQ ID NO: 70065 - DNA, 40 bp, Artificial Sequence
  primer
gtaaaacgacggccagttttctgaagttctgtgcttaccc

SEQ ID NO: 70066 - DNA, 22 bp, Artificial Sequence
  primer
aagaattctgccaactctgctg

SEQ ID NO: 70067 - DNA, 38 bp, Artificial Sequence
  primer
gtaaaacgacggccagtagcataatgtttggcaaatgg

SEQ ID NO: 70068 - DNA, 23 bp, Artificial Sequence
  primer
gctcaatagggagttaggaccag

SEQ ID NO: 70069 - DNA, 38 bp, Artificial Sequence
  primer
gtaaaacgacggccagttgatgcactccatcctttgag

SEQ ID NO: 70070 - DNA, 38 bp, Artificial Sequence
  primer
gtaaaacgacggccagtgaaagcagaaatgcccaaatg

SEQ ID NO: 70071 - DNA, 37 bp, Artificial Sequence
  primer
gtaaaacgacggccagtagtgagagacaccacccagc

SEQ ID NO: 70072 - DNA, 40 bp, Artificial Sequence
  primer
gtaaaacgacggccagttgaagacattcggtggtaaattc

SEQ ID NO: 70073 - DNA, 42 bp, Artificial Sequence
  primer
gtaaaacgacggccagtagcatgacatatttcccagtaagac

SEQ ID NO: 70074 - DNA, 40 bp, Artificial Sequence
  primer
gtaaaacgacggccagtaaatcccaattcaaatgaacaaa

SEQ ID NO: 70075 - DNA, 38 bp, Artificial Sequence
  primer
gtaaaacgacggccagtatgcctcatgaattcaactgc

SEQ ID NO: 70076 - DNA, 28 bp, Artificial Sequence
  primer
gagagagataaataatttgcagggtaaa

SEQ ID NO: 70077 - DNA, 22 bp, Artificial Sequence
  primer
ttgttgcacaattctcaaggac

SEQ ID NO: 70078 - DNA, 38 bp, Artificial Sequence
  primer
gtaaaacgacggccagtcaaagaaaccatgacgactgc

SEQ ID NO: 70079 - DNA, 23 bp, Artificial Sequence
  primer
ttgatgcagtttgtttatgcaat

SEQ ID NO: 70080 - DNA, 39 bp, Artificial Sequence
  primer
gtaaaacgacggccagtgcattaccatacccttgtaccc

SEQ ID NO: 70081 - DNA, 38 bp, Artificial Sequence
  primer
gtaaaacgacggccagtttctagaccttcgggaccaac

SEQ ID NO: 70082 - DNA, 21 bp, Artificial Sequence
  primer
ttctagagccagagggagctg

SEQ ID NO: 70083 - DNA, 19 bp, Artificial Sequence
  primer
ctcgggaagtccttcgtcc

SEQ ID NO: 70084 - DNA, 20 bp, Artificial Sequence
  primer
gtcctagcagcaggtggagg

SEQ ID NO: 70085 - DNA, 20 bp, Artificial Sequence
  primer
gagggactgggcttcagatg

SEQ ID NO: 70086 - DNA, 21 bp, Artificial Sequence
  primer
gtgcctctgaacgtgtgaaac

SEQ ID NO: 70087 - DNA, 37 bp, Artificial Sequence
  primer
gtaaaacgacggccagtagcaggactgcgtctgaaac

SEQ ID NO: 70088 - DNA, 20 bp, Artificial Sequence
  primer
gtcctttggcggtggtagag

SEQ ID NO: 70089 - DNA, 36 bp, Artificial Sequence
  primer
gtaaaacgacggccagtgctccgagagcaacagagg

SEQ ID NO: 70090 - DNA, 21 bp, Artificial Sequence
  primer
gtgacatagcggtcgacactg

SEQ ID NO: 70091 - DNA, 38 bp, Artificial Sequence
  primer
gtaaaacgacggccagtcaggctgtcagcacattgaag

SEQ ID NO: 70092 - DNA, 21 bp, Artificial Sequence
  primer
tggactacagcattcaggagc

SEQ ID NO: 70093 - DNA, 21 bp, Artificial Sequence
  primer
ttggaggagtctggcctctac

SEQ ID NO: 70094 - DNA, 38 bp, Artificial Sequence
  primer
gtaaaacgacggccagtaaattgaccacgagtgctttg

SEQ ID NO: 70095 - DNA, 38 bp, Artificial Sequence
  primer
gtaaaacgacggccagtatcttggccactgacacaaag

SEQ ID NO: 70096 - DNA, 21 bp, Artificial Sequence
  primer
ttgacactttcgatgtttggc

SEQ ID NO: 70097 - DNA, 21 bp, Artificial Sequence
  primer
tgctctacactgtcagcctgc

SEQ ID NO: 70098 - DNA, 40 bp, Artificial Sequence
  primer
gtaaaacgacggccagtgcatcgcttgcagtgaatactac

SEQ ID NO: 70099 - DNA, 20 bp, Artificial Sequence
  primer
atggcagtgacctgatagcc

SEQ ID NO: 70100 - DNA, 21 bp, Artificial Sequence
  primer
tctgacccaagcccataagac

SEQ ID NO: 70101 - DNA, 38 bp, Artificial Sequence
  primer
gtaaaacgacggccagtaggtttggaactggactgacc

SEQ ID NO: 70102 - DNA, 21 bp, Artificial Sequence
  primer
ttgaacggcaatatggacaag

SEQ ID NO: 70103 - DNA, 38 bp, Artificial Sequence
  primer
gtaaaacgacggccagttaagcaacagattcagctggg

SEQ ID NO: 70104 - DNA, 21 bp, Artificial Sequence
  primer
atagttgaggcggtcatgttg

SEQ ID NO: 70105 - DNA, 21 bp, Artificial Sequence
  primer
acaggtgccagacttggagac

SEQ ID NO: 70106 - DNA, 21 bp, Artificial Sequence
  primer
aaatgggaagcgatgtcactc

SEQ ID NO: 70107 - DNA, 37 bp, Artificial Sequence
  primer
gtaaaacgacggccagtcttccttcccaaggttgagc

SEQ ID NO: 70108 - DNA, 38 bp, Artificial Sequence
  primer
gtaaaacgacggccagtagaagcaccgtctttccactc

SEQ ID NO: 70109 - DNA, 42 bp, Artificial Sequence
  primer
gtaaaacgacggccagtggaactattcttccatttcaactgc

SEQ ID NO: 70110 - DNA, 38 bp, Artificial Sequence
  primer
gtaaaacgacggccagtccagtgagaagacagctttgc

SEQ ID NO: 70111 - DNA, 21 bp, Artificial Sequence
  primer
cccaaagaacatctggcttac

SEQ ID NO: 70112 - DNA, 21 bp, Artificial Sequence
  primer
agctgcttgcggattaggtag

SEQ ID NO: 70113 - DNA, 38 bp, Artificial Sequence
  primer
gtaaaacgacggccagtgtgaggactggactgagaccc

SEQ ID NO: 70114 - DNA, 19 bp, Artificial Sequence
  primer
ctgacactgcagaccaggc

SEQ ID NO: 70115 - DNA, 21 bp, Artificial Sequence
  primer
atagacacccagcatgagcag

SEQ ID NO: 70116 - DNA, 38 bp, Artificial Sequence
  primer
gtaaaacgacggccagtagctgccttgaaaggttcttg

SEQ ID NO: 70117 - DNA, 19 bp, Artificial Sequence
  primer
actccctccactcaccagc

SEQ ID NO: 70118 - DNA, 37 bp, Artificial Sequence
  primer
gtaaaacgacggccagtacgtgactggtcaagccaac

SEQ ID NO: 70119 - DNA, 35 bp, Artificial Sequence
  primer
gtaaaacgacggccagtgcctggagaagacgaccc

SEQ ID NO: 70120 - DNA, 21 bp, Artificial Sequence
  primer
tgggattgacaactgaattgg

SEQ ID NO: 70121 - DNA, 21 bp, Artificial Sequence
  primer
tatcttctcctggaagaggcg

SEQ ID NO: 70122 - DNA, 38 bp, Artificial Sequence
  primer
gtaaaacgacggccagtggcagtccatttccttgtgag

SEQ ID NO: 70123 - DNA, 21 bp, Artificial Sequence
  primer
ccagaaacaaggacttagccg

SEQ ID NO: 70124 - DNA, 22 bp, Artificial Sequence
  primer
tcccacctcagtggaagtaatc

SEQ ID NO: 70125 - DNA, 21 bp, Artificial Sequence
  primer
tctgagaagccctgtttctgc

SEQ ID NO: 70126 - DNA, 39 bp, Artificial Sequence
  primer
gtaaaacgacggccagtaagttgcttgcttgcttctagg

SEQ ID NO: 70127 - DNA, 39 bp, Artificial Sequence
  primer
gtaaaacgacggccagtcagggtttgttgcaaggattag

SEQ ID NO: 70128 - DNA, 20 bp, Artificial Sequence
  primer
aatttccggcacagtcacac

SEQ ID NO: 70129 - DNA, 21 bp, Artificial Sequence
  primer
gaggccaggacctaagacaag

SEQ ID NO: 70130 - DNA, 21 bp, Artificial Sequence
  primer
atctccatggacttgggtctg

SEQ ID NO: 70131 - DNA, 39 bp, Artificial Sequence
  primer
gtaaaacgacggccagtaaggatattccctctctgtgcc

SEQ ID NO: 70132 - DNA, 38 bp, Artificial Sequence
  primer
gtaaaacgacggccagttctttggctgtcttccaaacc

SEQ ID NO: 70133 - DNA, 18 bp, Artificial Sequence
  primer
aggaagcatctgcctcgg

SEQ ID NO: 70134 - DNA, 18 bp, Artificial Sequence
  primer
ctcctgggctcaagcaac

SEQ ID NO: 70135 - DNA, 38 bp, Artificial Sequence
  primer
gtaaaacgacggccagttctgtctgaaaggcagtgagg

SEQ ID NO: 70136 - DNA, 21 bp, Artificial Sequence
  primer
aactggtagctcctggcaatc

SEQ ID NO: 70137 - DNA, 38 bp, Artificial Sequence
  primer
gtaaaacgacggccagtcctgggctcatgagtaggttg

SEQ ID NO: 70138 - DNA, 21 bp, Artificial Sequence
  primer
gaaggagatgttcccaaccac

SEQ ID NO: 70139 - DNA, 22 bp, Artificial Sequence
  primer
gactgtgagctgtgatctgtgg

SEQ ID NO: 70140 - DNA, 20 bp, Artificial Sequence
  primer
ggtgttcagccagctgtttc

SEQ ID NO: 70141 - DNA, 21 bp, Artificial Sequence
  primer
tacacagcaatgcggaggtag

SEQ ID NO: 70142 - DNA, 28 bp, Artificial Sequence
  primer
tctgttatttaaatctccatcaacattc

SEQ ID NO: 70143 - DNA, 38 bp, Artificial Sequence
  primer
gtaaaacgacggccagtatgtgcaggtggatgtacacg

SEQ ID NO: 70144 - DNA, 37 bp, Artificial Sequence
  primer
gtaaaacgacggccagtaaaccatgagggttgctgtg

SEQ ID NO: 70145 - DNA, 21 bp, Artificial Sequence
  primer
agcaatggcagctgtagaatc

SEQ ID NO: 70146 - DNA, 38 bp, Artificial Sequence
  primer
gtaaaacgacggccagtgtgcccaagggacttgttatc

SEQ ID NO: 70147 - DNA, 20 bp, Artificial Sequence
  primer
tctcggaggcttactgggag

SEQ ID NO: 70148 - DNA, 21 bp, Artificial Sequence
  primer
tggaaggcagatggttaggac

SEQ ID NO: 70149 - DNA, 21 bp, Artificial Sequence
  primer
taacctgtgaggtggttgtgg

SEQ ID NO: 70150 - DNA, 38 bp, Artificial Sequence
  primer
gtaaaacgacggccagtccatctaagagcgaaagtgcc

SEQ ID NO: 70151 - DNA, 38 bp, Artificial Sequence
  primer
gtaaaacgacggccagtatccatccacttgctatgcac

SEQ ID NO: 70152 - DNA, 38 bp, Artificial Sequence
  primer
gtaaaacgacggccagtgaaaggaagagatggacgcac

SEQ ID NO: 70153 - DNA, 22 bp, Artificial Sequence
  primer
gagttagatgtggccagtcagg

SEQ ID NO: 70154 - DNA, 21 bp, Artificial Sequence
  primer
cgacaaagggactctaggcag

SEQ ID NO: 70155 - DNA, 36 bp, Artificial Sequence
  primer
gtaaaacgacggccagtaagctgtctgcgggtcatc

SEQ ID NO: 70156 - DNA, 38 bp, Artificial Sequence
  primer
gtaaaacgacggccagtgcacaaatgtcattcctctgg

SEQ ID NO: 70157 - DNA, 21 bp, Artificial Sequence
  primer
gaggaggagacctgctgtcac

SEQ ID NO: 70158 - DNA, 21 bp, Artificial Sequence
  primer
aggaaggtttacagtttgcgg

SEQ ID NO: 70159 - DNA, 19 bp, Artificial Sequence
  primer
gactccgtgtcacagcagc

SEQ ID NO: 70160 - DNA, 20 bp, Artificial Sequence
  primer
gaagccacactcaaggaagc

SEQ ID NO: 70161 - DNA, 20 bp, Artificial Sequence
  primer
catccgtcttggagatcctg

SEQ ID NO: 70162 - DNA, 38 bp, Artificial Sequence
  primer
gtaaaacgacggccagtggtcctgtcttgtcctccaag

SEQ ID NO: 70163 - DNA, 38 bp, Artificial Sequence
  primer
gtaaaacgacggccagtgtcgatggagatgatgcagag

SEQ ID NO: 70164 - DNA, 21 bp, Artificial Sequence
  primer
tcactgagaagtgcgtcttgg

SEQ ID NO: 70165 - DNA, 39 bp, Artificial Sequence
  primer
gtaaaacgacggccagtgctaatccttcctcttccatcc

SEQ ID NO: 70166 - DNA, 20 bp, Artificial Sequence
  primer
catccgtcttggagatcctg

SEQ ID NO: 70167 - DNA, 38 bp, Artificial Sequence
  primer
gtaaaacgacggccagtgatggttcttgtcaaggctgg

SEQ ID NO: 70168 - DNA, 38 bp, Artificial Sequence
  primer
gtaaaacgacggccagtgattccaaagacagtgggtcg

SEQ ID NO: 70169 - DNA, 36 bp, Artificial Sequence
  primer
gtaaaacgacggccagttactgggccagaaggttgg

SEQ ID NO: 70170 - DNA, 21 bp, Artificial Sequence
  primer
atgaagtagttggtgggcgtc

SEQ ID NO: 70171 - DNA, 38 bp, Artificial Sequence
  primer
gtaaaacgacggccagttactgcagagagtagcgcacc

SEQ ID NO: 70172 - DNA, 21 bp, Artificial Sequence
  primer
ctccttcatgactcctgcctc

SEQ ID NO: 70173 - DNA, 21 bp, Artificial Sequence
  primer
ttattcaatctccgaacacgc

SEQ ID NO: 70174 - DNA, 19 bp, Artificial Sequence
  primer
gtcgtccagcgagtccttg

SEQ ID NO: 70175 - DNA, 36 bp, Artificial Sequence
  primer
gtaaaacgacggccagtcccagggaaagaaagctgc

SEQ ID NO: 70176 - DNA, 35 bp, Artificial Sequence
  primer
gtaaaacgacggccagtggtacctggcacccatgc

SEQ ID NO: 70177 - DNA, 21 bp, Artificial Sequence
  primer
cgatgaaatagttggtgacgg

SEQ ID NO: 70178 - DNA, 19 bp, Artificial Sequence
  primer
acaccaccagggctacgac

SEQ ID NO: 70179 - DNA, 38 bp, Artificial Sequence
  primer
gtaaaacgacggccagtagtacatgaccacgatgaccg

SEQ ID NO: 70180 - DNA, 37 bp, Artificial Sequence
  primer
gtaaaacgacggccagtgtcttggccgctttcttctc

SEQ ID NO: 70181 - DNA, 37 bp, Artificial Sequence
  primer
gtaaaacgacggccagtatgcacacctgcctcttagg

SEQ ID NO: 70182 - DNA, 19 bp, Artificial Sequence
  primer
cagtggtggccgtagacac

SEQ ID NO: 70183 - DNA, 38 bp, Artificial Sequence
  primer
gtaaaacgacggccagttccttaaatatcggtctcccg

SEQ ID NO: 70184 - DNA, 38 bp, Artificial Sequence
  primer
gtaaaacgacggccagtccagttcctcagggatgtcac

SEQ ID NO: 70185 - DNA, 38 bp, Artificial Sequence
  primer
gtaaaacgacggccagtcttgccgaagtaccagtagcc

SEQ ID NO: 70186 - DNA, 36 bp, Artificial Sequence
  primer
gtaaaacgacggccagttctcgatggagatgagcgg

SEQ ID NO: 70187 - DNA, 20 bp, Artificial Sequence
  primer
gagctctcctccaggtccag

SEQ ID NO: 70188 - DNA, 21 bp, Artificial Sequence
  primer
agaatttgaagagcgtgcgtg

SEQ ID NO: 70189 - DNA, 38 bp, Artificial Sequence
  primer
gtaaaacgacggccagtcagaggatcttcttgaaggcg

SEQ ID NO: 70190 - DNA, 36 bp, Artificial Sequence
  primer
gtaaaacgacggccagtagacgaggaaacgcagagc

SEQ ID NO: 70191 - DNA, 21 bp, Artificial Sequence
  primer
aagtaccagtagcccagcagc

SEQ ID NO: 70192 - DNA, 38 bp, Artificial Sequence
  primer
gtaaaacgacggccagtagccacacagtgaggatgatg

SEQ ID NO: 70193 - DNA, 38 bp, Artificial Sequence
  primer
gtaaaacgacggccagtagtgtccgttgacctctctgg

SEQ ID NO: 70194 - DNA, 21 bp, Artificial Sequence
  primer
accactgcccacctatagcac

SEQ ID NO: 70195 - DNA, 21 bp, Artificial Sequence
  primer
gatgaggcctacaggatctgg

SEQ ID NO: 70196 - DNA, 38 bp, Artificial Sequence
  primer
gtaaaacgacggccagtacctgcccgaagtaccagtag

SEQ ID NO: 70197 - DNA, 18 bp, Artificial Sequence
  primer
tggcggtagagcgagacc

SEQ ID NO: 70198 - DNA, 36 bp, Artificial Sequence
  primer
gtaaaacgacggccagtcagcttggccactcggtag

SEQ ID NO: 70199 - DNA, 38 bp, Artificial Sequence
  primer
gtaaaacgacggccagtgacaggaagaactcgacggag

SEQ ID NO: 70200 - DNA, 21 bp, Artificial Sequence
  primer
acagccagcacaaaggtgaag

SEQ ID NO: 70201 - DNA, 36 bp, Artificial Sequence
  primer
gtaaaacgacggccagtgggtctctgggaaagctcc

SEQ ID NO: 70202 - DNA, 21 bp, Artificial Sequence
  primer
atgaagaggttggtgagcgtc

SEQ ID NO: 70203 - DNA, 38 bp, Artificial Sequence
  primer
gtaaaacgacggccagtgtccactgaggtccacagctc

SEQ ID NO: 70204 - DNA, 19 bp, Artificial Sequence
  primer
caccagtgcatgaggatgg

SEQ ID NO: 70205 - DNA, 20 bp, Artificial Sequence
  primer
gtacacgaaggccatgatgc

SEQ ID NO: 70206 - DNA, 37 bp, Artificial Sequence
  primer
gtaaaacgacggccagtaagaagacgaagaggcggtc

SEQ ID NO: 70207 - DNA, 21 bp, Artificial Sequence
  primer
tagcccagccagttgaagaag

SEQ ID NO: 70208 - DNA, 38 bp, Artificial Sequence
  primer
gtaaaacgacggccagtcttcgagttcacctgctatcg

SEQ ID NO: 70209 - DNA, 21 bp, Artificial Sequence
  primer
tttcataagaatatgggcggc

SEQ ID NO: 70210 - DNA, 38 bp, Artificial Sequence
  primer
gtaaaacgacggccagtcagcaggtctcattggcatag

SEQ ID NO: 70211 - DNA, 21 bp, Artificial Sequence
  primer
ttaacgatgaagaagggcagc

SEQ ID NO: 70212 - DNA, 21 bp, Artificial Sequence
  primer
ttcctcccttgtgaatcaatg

SEQ ID NO: 70213 - DNA, 37 bp, Artificial Sequence
  primer
gtaaaacgacggccagttgcccttccttctgcatatc

SEQ ID NO: 70214 - DNA, 20 bp, Artificial Sequence
  primer
gttggtcacagccaggtagc

SEQ ID NO: 70215 - DNA, 20 bp, Artificial Sequence
  primer
aggaggacagcagcacgtag

SEQ ID NO: 70216 - DNA, 38 bp, Artificial Sequence
  primer
gtaaaacgacggccagtaccagcagagagtgaaggtgc

SEQ ID NO: 70217 - DNA, 36 bp, Artificial Sequence
  primer
gtaaaacgacggccagtggctgcggcagtagatgag

SEQ ID NO: 70218 - DNA, 36 bp, Artificial Sequence
  primer
gtaaaacgacggccagtcggttacctacccgtcgag

SEQ ID NO: 70219 - DNA, 37 bp, Artificial Sequence
  primer
gtaaaacgacggccagtcaaagccatcccaccttctc

SEQ ID NO: 70220 - DNA, 21 bp, Artificial Sequence
  primer
aggagtgaagttcaaggctgg

SEQ ID NO: 70221 - DNA, 37 bp, Artificial Sequence
  primer
gtaaaacgacggccagtgatgggaggccaaatctctg

SEQ ID NO: 70222 - DNA, 38 bp, Artificial Sequence
  primer
gtaaaacgacggccagtttcctgcaggtcatctagagc

SEQ ID NO: 70223 - DNA, 21 bp, Artificial Sequence
  primer
cagaggtggccatgaattctc

SEQ ID NO: 70224 - DNA, 21 bp, Artificial Sequence
  primer
aggaagctggaagttggtgac

SEQ ID NO: 70225 - DNA, 38 bp, Artificial Sequence
  primer
gtaaaacgacggccagtcctaatgaaggctggcttctg

SEQ ID NO: 70226 - DNA, 21 bp, Artificial Sequence
  primer
gggctaaaggacagacatccc

SEQ ID NO: 70227 - DNA, 21 bp, Artificial Sequence
  primer
acaaatcagagacagggaggg

SEQ ID NO: 70228 - DNA, 21 bp, Artificial Sequence
  primer
gacatgcagacaatgaatggg

SEQ ID NO: 70229 - DNA, 21 bp, Artificial Sequence
  primer
tgtcagcctctgagaagaccc

SEQ ID NO: 70230 - DNA, 21 bp, Artificial Sequence
  primer
gtacccaaagaaagggcaaag

SEQ ID NO: 70231 - DNA, 20 bp, Artificial Sequence
  primer
cagagagaaccagtcggcac

SEQ ID NO: 70232 - DNA, 38 bp, Artificial Sequence
  primer
gtaaaacgacggccagtcctaccaccaaggcagctatg

SEQ ID NO: 70233 - DNA, 20 bp, Artificial Sequence
  primer
gtgggaagcaagagtcatgg

SEQ ID NO: 70234 - DNA, 38 bp, Artificial Sequence
  primer
gtaaaacgacggccagtctctgagaacattggacaggg

SEQ ID NO: 70235 - DNA, 20 bp, Artificial Sequence
  primer
tgtgtcctcctcatcgaagg

SEQ ID NO: 70236 - DNA, 38 bp, Artificial Sequence
  primer
gtaaaacgacggccagtggaactgaggcctacaagctg

SEQ ID NO: 70237 - DNA, 38 bp, Artificial Sequence
  primer
gtaaaacgacggccagtagggtgagttccttaaacccg

SEQ ID NO: 70238 - DNA, 38 bp, Artificial Sequence
  primer
gtaaaacgacggccagtgactggatctcctccatggtc

SEQ ID NO: 70239 - DNA, 21 bp, Artificial Sequence
  primer
ctccttcttccactgcaccag

SEQ ID NO: 70240 - DNA, 18 bp, Artificial Sequence
  primer
gggttggtgcagcaggag

SEQ ID NO: 70241 - DNA, 21 bp, Artificial Sequence
  primer
ttcctttattcccagccacag

SEQ ID NO: 70242 - DNA, 38 bp, Artificial Sequence
  primer
gtaaaacgacggccagtcttccatagcactctgaagcc

SEQ ID NO: 70243 - DNA, 38 bp, Artificial Sequence
  primer
gtaaaacgacggccagtttcattctggaaacgctgaac

SEQ ID NO: 70244 - DNA, 37 bp, Artificial Sequence
  primer
gtaaaacgacggccagtttgcaatgggaagataagcg

SEQ ID NO: 70245 - DNA, 20 bp, Artificial Sequence
  primer
aacacaaagcctggcacatc

SEQ ID NO: 70246 - DNA, 22 bp, Artificial Sequence
  primer
gggagtacgttccagaatcaag

SEQ ID NO: 70247 - DNA, 37 bp, Artificial Sequence
  primer
gtaaaacgacggccagtcccggcctacagcttatttc

SEQ ID NO: 70248 - DNA, 38 bp, Artificial Sequence
  primer
gtaaaacgacggccagtggccttgcaatcagctagaag

SEQ ID NO: 70249 - DNA, 21 bp, Artificial Sequence
  primer
ccgcagagtctggtctagagg

SEQ ID NO: 70250 - DNA, 21 bp, Artificial Sequence
  primer
gtccctgagcaggttcaactc

SEQ ID NO: 70251 - DNA, 21 bp, Artificial Sequence
  primer
attgggaagcagctttcactc

SEQ ID NO: 70252 - DNA, 20 bp, Artificial Sequence
  primer
gtgacagggcaagactccat

SEQ ID NO: 70253 - DNA, 21 bp, Artificial Sequence
  primer
gccagcagtgcatagagagac

SEQ ID NO: 70254 - DNA, 26 bp, Artificial Sequence
  primer
tcctgcttcaggtataattcaagttt

SEQ ID NO: 70255 - DNA, 38 bp, Artificial Sequence
  primer
gtaaaacgacggccagttatggcattgctttcttctcg

SEQ ID NO: 70256 - DNA, 41 bp, Artificial Sequence
  primer
gtaaaacgacggccagtgaatcacagagtttcggaggatag

SEQ ID NO: 70257 - DNA, 35 bp, Artificial Sequence
  primer
gtaaaacgacggccagtctgcatcctcctgccatt

SEQ ID NO: 70258 - DNA, 36 bp, Artificial Sequence
  primer
gtaaaacgacggccagtcgaactccaaagcgaggac

SEQ ID NO: 70259 - DNA, 39 bp, Artificial Sequence
  primer
gtaaaacgacggccagtgcaccacactgtaagcaagttc

SEQ ID NO: 70260 - DNA, 21 bp, Artificial Sequence
  primer
ttccaaacaacctgtgctgag

SEQ ID NO: 70261 - DNA, 21 bp, Artificial Sequence
  primer
acactacgcagacagagccag

SEQ ID NO: 70262 - DNA, 20 bp, Artificial Sequence
  primer
tggaagaggtggtggatgac

SEQ ID NO: 70263 - DNA, 37 bp, Artificial Sequence
  primer
gtaaaacgacggccagtcagatgccttggaaggtgag

SEQ ID NO: 70264 - DNA, 19 bp, Artificial Sequence
  primer
agcactggccatggtgaag

SEQ ID NO: 70265 - DNA, 21 bp, Artificial Sequence
  primer
tgtctaacccttgcccagaac

SEQ ID NO: 70266 - DNA, 21 bp, Artificial Sequence
  primer
ctgtctctgggaccctacagc

SEQ ID NO: 70267 - DNA, 21 bp, Artificial Sequence
  primer
ctcggactgagaacacgtgag

SEQ ID NO: 70268 - DNA, 20 bp, Artificial Sequence
  primer
gagaatggtgtgaacccagg

SEQ ID NO: 70269 - DNA, 21 bp, Artificial Sequence
  primer
gacaggagagctgtctgagcc

SEQ ID NO: 70270 - DNA, 23 bp, Artificial Sequence
  primer
tcttcacctcaaggttactgtgg

SEQ ID NO: 70271 - DNA, 38 bp, Artificial Sequence
  primer
gtaaaacgacggccagtcctatcatcctcaaaggcagc

SEQ ID NO: 70272 - DNA, 21 bp, Artificial Sequence
  primer
atgtcagcaagacgattaggc

SEQ ID NO: 70273 - DNA, 21 bp, Artificial Sequence
  primer
atcataccattgcactccagc

SEQ ID NO: 70274 - DNA, 21 bp, Artificial Sequence
  primer
gcttatatggcatcgcacttg

SEQ ID NO: 70275 - DNA, 38 bp, Artificial Sequence
  primer
gtaaaacgacggccagtttgcctccctgctagactctg

SEQ ID NO: 70276 - DNA, 38 bp, Artificial Sequence
  primer
gtaaaacgacggccagttacagctccctcaacacaccc

SEQ ID NO: 70277 - DNA, 22 bp, Artificial Sequence
  primer
ggccactgctctgtaccattac

SEQ ID NO: 70278 - DNA, 20 bp, Artificial Sequence
  primer
ttagccagcaacctgctctg

SEQ ID NO: 70279 - DNA, 21 bp, Artificial Sequence
  primer
agcaccatgggaagaagaaag

SEQ ID NO: 70280 - DNA, 18 bp, Artificial Sequence
  primer
agtggatccgggttctgg

SEQ ID NO: 70281 - DNA, 22 bp, Artificial Sequence
  primer
tgaaccatctggtcagtgagag

SEQ ID NO: 70282 - DNA, 21 bp, Artificial Sequence
  primer
tgttcgtctggcataagatcc

SEQ ID NO: 70283 - DNA, 44 bp, Artificial Sequence
  primer
gtaaaacgacggccagtaattactacaatccatcctacttacgc

SEQ ID NO: 70284 - DNA, 21 bp, Artificial Sequence
  primer
ctcctggtcagatcattgcag

SEQ ID NO: 70285 - DNA, 27 bp, Artificial Sequence
  primer
tttcatgaagttaatctgtaaccaagg

SEQ ID NO: 70286 - DNA, 38 bp, Artificial Sequence
  primer
gtaaaacgacggccagtttcaggtactcctcctgctcc

SEQ ID NO: 70287 - DNA, 40 bp, Artificial Sequence
  primer
gtaaaacgacggccagtaaagagtgccacaagatgacaaa

SEQ ID NO: 70288 - DNA, 22 bp, Artificial Sequence
  primer
aagcactgggattacagacagg

SEQ ID NO: 70289 - DNA, 38 bp, Artificial Sequence
  primer
gtaaaacgacggccagttctgcctggcactacaatttc

SEQ ID NO: 70290 - DNA, 21 bp, Artificial Sequence
  primer
aagggcatatcaaacctgtcg

SEQ ID NO: 70291 - DNA, 20 bp, Artificial Sequence
  primer
agagcgagactccgtctcaa

SEQ ID NO: 70292 - DNA, 21 bp, Artificial Sequence
  primer
tctccacagtaggcatccatc

SEQ ID NO: 70293 - DNA, 19 bp, Artificial Sequence
  primer
atccaagcgggtgagtgac

SEQ ID NO: 70294 - DNA, 20 bp, Artificial Sequence
  primer
ggctatgcaggtttctgtgc

SEQ ID NO: 70295 - DNA, 36 bp, Artificial Sequence
  primer
gtaaaacgacggccagtagctcactcgctttctgcg

SEQ ID NO: 70296 - DNA, 37 bp, Artificial Sequence
  primer
gtaaaacgacggccagtctgcaaatgggctagtgacc

SEQ ID NO: 70297 - DNA, 38 bp, Artificial Sequence
  primer
gtaaaacgacggccagtgttgaggtaccctcctcgttg

SEQ ID NO: 70298 - DNA, 21 bp, Artificial Sequence
  primer
aagggacagtcatcatcaccc

SEQ ID NO: 70299 - DNA, 21 bp, Artificial Sequence
  primer
tgttcaacgagcaccaggtag

SEQ ID NO: 70300 - DNA, 22 bp, Artificial Sequence
  primer
cccttgctgacaataggaacac

SEQ ID NO: 70301 - DNA, 35 bp, Artificial Sequence
  primer
gtaaaacgacggccagtcaccctggcactgctcac

SEQ ID NO: 70302 - DNA, 38 bp, Artificial Sequence
  primer
gtaaaacgacggccagttcgagatcagtggaaaccttg

SEQ ID NO: 70303 - DNA, 21 bp, Artificial Sequence
  primer
ctggtcactggagacaagctg

SEQ ID NO: 70304 - DNA, 38 bp, Artificial Sequence
  primer
gtaaaacgacggccagtttcttattgctcaccaagccc

SEQ ID NO: 70305 - DNA, 37 bp, Artificial Sequence
  primer
gtaaaacgacggccagtgaggaacgtgactgctgctg

SEQ ID NO: 70306 - DNA, 37 bp, Artificial Sequence
  primer
gtaaaacgacggccagtaaggccctgcaatgtttagg

SEQ ID NO: 70307 - DNA, 25 bp, Artificial Sequence
  primer
ggtacctctgacttcccaatttaac

SEQ ID NO: 70308 - DNA, 38 bp, Artificial Sequence
  primer
gtaaaacgacggccagtctggcccagttcagctcttag

SEQ ID NO: 70309 - DNA, 21 bp, Artificial Sequence
  primer
gtcacggccacatacgtttag

SEQ ID NO: 70310 - DNA, 21 bp, Artificial Sequence
  primer
gtccaagctggcttgagtttc

SEQ ID NO: 70311 - DNA, 21 bp, Artificial Sequence
  primer
acaaaggcatgacatgagctg

SEQ ID NO: 70312 - DNA, 22 bp, Artificial Sequence
  primer
aaggacaacttgtagctgggtg

SEQ ID NO: 70313 - DNA, 38 bp, Artificial Sequence
  primer
gtaaaacgacggccagttaggttccacccacagtgatg

SEQ ID NO: 70314 - DNA, 38 bp, Artificial Sequence
  primer
gtaaaacgacggccagtttcagcatgtactgctttccc

SEQ ID NO: 70315 - DNA, 38 bp, Artificial Sequence
  primer
gtaaaacgacggccagttcaataagggccacttggaac

SEQ ID NO: 70316 - DNA, 39 bp, Artificial Sequence
  primer
gtaaaacgacggccagtggaggaagaaacggaaacctaa

SEQ ID NO: 70317 - DNA, 38 bp, Artificial Sequence
  primer
gtaaaacgacggccagtcctataggtcctcagtgcagc

SEQ ID NO: 70318 - DNA, 39 bp, Artificial Sequence
  primer
gtaaaacgacggccagtctaacttgggtccaacgtcttc

SEQ ID NO: 70319 - DNA, 38 bp, Artificial Sequence
  primer
gtaaaacgacggccagttagtaagccagccattcctcc

SEQ ID NO: 70320 - DNA, 18 bp, Artificial Sequence
  primer
aaacctgcctcccactcc

SEQ ID NO: 70321 - DNA, 21 bp, Artificial Sequence
  primer
ttgtagtccagtgtgggttgc

SEQ ID NO: 70322 - DNA, 20 bp, Artificial Sequence
  primer
gcgccgaatgtactcaactg

SEQ ID NO: 70323 - DNA, 19 bp, Artificial Sequence
  primer
gcttcacaggaggctctgg

SEQ ID NO: 70324 - DNA, 20 bp, Artificial Sequence
  primer
agcagggacagcgaggtaac

SEQ ID NO: 70325 - DNA, 21 bp, Artificial Sequence
  primer
ctctggaaggtgcaaggtagg

SEQ ID NO: 70326 - DNA, 21 bp, Artificial Sequence
  primer
tctagggacaatgaagggagg

SEQ ID NO: 70327 - DNA, 38 bp, Artificial Sequence
  primer
gtaaaacgacggccagtgtttgtgacattgggccagtc

SEQ ID NO: 70328 - DNA, 38 bp, Artificial Sequence
  primer
gtaaaacgacggccagttcctggtgtccacctctatcc

SEQ ID NO: 70329 - DNA, 21 bp, Artificial Sequence
  primer
tccttaatgggacacagagcc

SEQ ID NO: 70330 - DNA, 20 bp, Artificial Sequence
  primer
tgtccacgttcccatgaaag

SEQ ID NO: 70331 - DNA, 38 bp, Artificial Sequence
  primer
gtaaaacgacggccagtctgtagacagctgcaagggag

SEQ ID NO: 70332 - DNA, 21 bp, Artificial Sequence
  primer
cagcatccctggaaccagtag

SEQ ID NO: 70333 - DNA, 21 bp, Artificial Sequence
  primer
ctagggccctgtaagacaagc

SEQ ID NO: 70334 - DNA, 21 bp, Artificial Sequence
  primer
ctcctcagtccacagtcccag

SEQ ID NO: 70335 - DNA, 20 bp, Artificial Sequence
  primer
ctcagcgtctggagttcagg

SEQ ID NO: 70336 - DNA, 38 bp, Artificial Sequence
  primer
gtaaaacgacggccagtgaagtcattgatagctggccg

SEQ ID NO: 70337 - DNA, 20 bp, Artificial Sequence
  primer
cctcaggaaggtccaatgtg

SEQ ID NO: 70338 - DNA, 20 bp, Artificial Sequence
  primer
ccctccctctctgaatttcg

SEQ ID NO: 70339 - DNA, 21 bp, Artificial Sequence
  primer
atggtagtgctcagggtggtg

SEQ ID NO: 70340 - DNA, 38 bp, Artificial Sequence
  primer
gtaaaacgacggccagtgggtgatgtgactgtggtcag

SEQ ID NO: 70341 - DNA, 21 bp, Artificial Sequence
  primer
aacggtttgagagttggaagc

SEQ ID NO: 70342 - DNA, 23 bp, Artificial Sequence
  primer
aatcccaaattactttcagcaaa

SEQ ID NO: 70343 - DNA, 19 bp, Artificial Sequence
  primer
caagatggcaccattgcac

SEQ ID NO: 70344 - DNA, 40 bp, Artificial Sequence
  primer
gtaaaacgacggccagtcaggcatcctacctgtttgttac

SEQ ID NO: 70345 - DNA, 26 bp, Artificial Sequence
  primer
tttgagagatttagaaatgattgtgg

SEQ ID NO: 70346 - DNA, 26 bp, Artificial Sequence
  primer
aaacgtgaacctgatagtgtaagacc

SEQ ID NO: 70347 - DNA, 27 bp, Artificial Sequence
  primer
aagataaatctgggattaaacaagcat

SEQ ID NO: 70348 - DNA, 21 bp, Artificial Sequence
  primer
tgtgcaactttccctaaaccc

SEQ ID NO: 70349 - DNA, 38 bp, Artificial Sequence
  primer
gtaaaacgacggccagtcactgccacacagatggtagg

SEQ ID NO: 70350 - DNA, 20 bp, Artificial Sequence
  primer
ggtcctgctcgaagtcacag

SEQ ID NO: 70351 - DNA, 37 bp, Artificial Sequence
  primer
gtaaaacgacggccagtgtgagaggtcaggagacggg

SEQ ID NO: 70352 - DNA, 37 bp, Artificial Sequence
  primer
gtaaaacgacggccagtccacatctgcaatgtcaggg

SEQ ID NO: 70353 - DNA, 36 bp, Artificial Sequence
  primer
gtaaaacgacggccagtgggtggcagagaaggtcac

SEQ ID NO: 70354 - DNA, 20 bp, Artificial Sequence
  primer
accttgttctggcagtggtg

SEQ ID NO: 70355 - DNA, 37 bp, Artificial Sequence
  primer
gtaaaacgacggccagtccaagaaggaccatccaagg

SEQ ID NO: 70356 - DNA, 38 bp, Artificial Sequence
  primer
gtaaaacgacggccagtgggctggagagtatagcaggg

SEQ ID NO: 70357 - DNA, 21 bp, Artificial Sequence
  primer
gaccagctgtggaaccaagag

SEQ ID NO: 70358 - DNA, 38 bp, Artificial Sequence
  primer
gtaaaacgacggccagtcagtgggtaccttgtgggttc

SEQ ID NO: 70359 - DNA, 37 bp, Artificial Sequence
  primer
gtaaaacgacggccagtgcagaactggtgtcaggagg

SEQ ID NO: 70360 - DNA, 20 bp, Artificial Sequence
  primer
ctcagagtcctcagcctgcc

SEQ ID NO: 70361 - DNA, 21 bp, Artificial Sequence
  primer
tccagagaccctctgtagtgc

SEQ ID NO: 70362 - DNA, 21 bp, Artificial Sequence
  primer
ccacaactagtgccaggaagc

SEQ ID NO: 70363 - DNA, 38 bp, Artificial Sequence
  primer
gtaaaacgacggccagtcagaagctgagacactccgtg

SEQ ID NO: 70364 - DNA, 21 bp, Artificial Sequence
  primer
gggaccagtccataactgacc

SEQ ID NO: 70365 - DNA, 35 bp, Artificial Sequence
  primer
gtaaaacgacggccagtcatggtgccgtggtatcc

SEQ ID NO: 70366 - DNA, 20 bp, Artificial Sequence
  primer
caccatgtagtgccctggag

SEQ ID NO: 70367 - DNA, 19 bp, Artificial Sequence
  primer
ggtctgagctcccaggctc

SEQ ID NO: 70368 - DNA, 21 bp, Artificial Sequence
  primer
atccagagccacgtaggagtg

SEQ ID NO: 70369 - DNA, 19 bp, Artificial Sequence
  primer
aggaacctgcaggacatgg

SEQ ID NO: 70370 - DNA, 21 bp, Artificial Sequence
  primer
atgtactctgtgggtgggcag

SEQ ID NO: 70371 - DNA, 19 bp, Artificial Sequence
  primer
ctcctgcacgcctaaccag

SEQ ID NO: 70372 - DNA, 21 bp, Artificial Sequence
  primer
ggcttcaaacacgatctgatg

SEQ ID NO: 70373 - DNA, 38 bp, Artificial Sequence
  primer
gtaaaacgacggccagtctgggaccacacactggtaag

SEQ ID NO: 70374 - DNA, 21 bp, Artificial Sequence
  primer
gaggaggagctttgacagtgg

SEQ ID NO: 70375 - DNA, 38 bp, Artificial Sequence
  primer
gtaaaacgacggccagtggacacactgacttcaccctg

SEQ ID NO: 70376 - DNA, 39 bp, Artificial Sequence
  primer
gtaaaacgacggccagtgaattctgccttcagtttcagg

SEQ ID NO: 70377 - DNA, 22 bp, Artificial Sequence
  primer
tctagctggaaattagggcatc

SEQ ID NO: 70378 - DNA, 38 bp, Artificial Sequence
  primer
gtaaaacgacggccagtgccagggcaatagacagaaac

SEQ ID NO: 70379 - DNA, 21 bp, Artificial Sequence
  primer
gcactgagccatgattacacc

SEQ ID NO: 70380 - DNA, 37 bp, Artificial Sequence
  primer
gtaaaacgacggccagtcacttcccagaagctcatgc

SEQ ID NO: 70381 - DNA, 27 bp, Artificial Sequence
  primer
aaatctactgtttgtcatactgcttcc

SEQ ID NO: 70382 - DNA, 21 bp, Artificial Sequence
  primer
tatgtgcggctgtacatgttg

SEQ ID NO: 70383 - DNA, 21 bp, Artificial Sequence
  primer
atgggtggtttggtgaatctc

SEQ ID NO: 70384 - DNA, 38 bp, Artificial Sequence
  primer
gtaaaacgacggccagtgtctacttgtcccttctgggc

SEQ ID NO: 70385 - DNA, 35 bp, Artificial Sequence
  primer
gtaaaacgacggccagtggcaggctgcagactttg

SEQ ID NO: 70386 - DNA, 38 bp, Artificial Sequence
  primer
gtaaaacgacggccagttcacgaagctgcctttgtaac

SEQ ID NO: 70387 - DNA, 27 bp, Artificial Sequence
  primer
gggataggaaataacagattgctttac

SEQ ID NO: 70388 - DNA, 35 bp, Artificial Sequence
  primer
gtaaaacgacggccagtgtggatcgggaactggag

SEQ ID NO: 70389 - DNA, 38 bp, Artificial Sequence
  primer
gtaaaacgacggccagtctattgtctaatggcggcgac

SEQ ID NO: 70390 - DNA, 26 bp, Artificial Sequence
  primer
tcaagtgattaggtcagagtctagca

SEQ ID NO: 70391 - DNA, 36 bp, Artificial Sequence
  primer
gtaaaacgacggccagtctgaatggagaacaggccc

SEQ ID NO: 70392 - DNA, 38 bp, Artificial Sequence
  primer
gtaaaacgacggccagttaagcgcttgtgcgaatgtag

SEQ ID NO: 70393 - DNA, 37 bp, Artificial Sequence
  primer
gtaaaacgacggccagtaagatggctgcagtggacag

SEQ ID NO: 70394 - DNA, 20 bp, Artificial Sequence
  primer
gtcttccttggagaggtggg

SEQ ID NO: 70395 - DNA, 21 bp, Artificial Sequence
  primer
ccgctgtgtcttgtgctaaac

SEQ ID NO: 70396 - DNA, 21 bp, Artificial Sequence
  primer
gggaaaggagtggaaaggaag

SEQ ID NO: 70397 - DNA, 25 bp, Artificial Sequence
  primer
tgatctgagttgtatgaagctgttg

SEQ ID NO: 70398 - DNA, 21 bp, Artificial Sequence
  primer
tatatgactcacggtcgtgcc

SEQ ID NO: 70399 - DNA, 38 bp, Artificial Sequence
  primer
gtaaaacgacggccagttcagaggacagctttggttcc

SEQ ID NO: 70400 - DNA, 21 bp, Artificial Sequence
  primer
acgcatccacttgggagtaac

SEQ ID NO: 70401 - DNA, 21 bp, Artificial Sequence
  primer
tagctctctgaaggcaaatgg

SEQ ID NO: 70402 - DNA, 22 bp, Artificial Sequence
  primer
tgctctcagttccattaccctg

SEQ ID NO: 70403 - DNA, 21 bp, Artificial Sequence
  primer
agtgagctacgaccacaccac

SEQ ID NO: 70404 - DNA, 19 bp, Artificial Sequence
  primer
acgtgatctgcctgccttg

SEQ ID NO: 70405 - DNA, 42 bp, Artificial Sequence
  primer
gtaaaacgacggccagtctacaacatttcagtgtcagaaagc

SEQ ID NO: 70406 - DNA, 25 bp, Artificial Sequence
  primer
ccagagcttcactgtaaatgaaatg

SEQ ID NO: 70407 - DNA, 21 bp, Artificial Sequence
  primer
tggaaccttctttccttctcc

SEQ ID NO: 70408 - DNA, 22 bp, Artificial Sequence
  primer
gcatgctgctagccaagtctac

SEQ ID NO: 70409 - DNA, 21 bp, Artificial Sequence
  primer
caggagtcctattgctctcgg

SEQ ID NO: 70410 - DNA, 38 bp, Artificial Sequence
  primer
gtaaaacgacggccagtggcttactgagatttccaccg

SEQ ID NO: 70411 - DNA, 38 bp, Artificial Sequence
  primer
gtaaaacgacggccagtcacagcttatgacccaccttg

SEQ ID NO: 70412 - DNA, 25 bp, Artificial Sequence
  primer
cccactatttggcatatgttatgtg

SEQ ID NO: 70413 - DNA, 37 bp, Artificial Sequence
  primer
gtaaaacgacggccagtagcacagtgtcaccctggaa

SEQ ID NO: 70414 - DNA, 37 bp, Artificial Sequence
  primer
gtaaaacgacggccagtcctgacctcgtgatctgcct

SEQ ID NO: 70415 - DNA, 23 bp, Artificial Sequence
  primer
tcccacattcaatgaaagatacc

SEQ ID NO: 70416 - DNA, 44 bp, Artificial Sequence
  primer
gtaaaacgacggccagtccctcttcagtttactatatatcagcc

SEQ ID NO: 70417 - DNA, 20 bp, Artificial Sequence
  primer
gcttgacccatcaggaacag

SEQ ID NO: 70418 - DNA, 20 bp, Artificial Sequence
  primer
tgagggcagttctcagatgg

SEQ ID NO: 70419 - DNA, 21 bp, Artificial Sequence
  primer
gcctgctgtgataagtccaag

SEQ ID NO: 70420 - DNA, 28 bp, Artificial Sequence
  primer
gctaagcaatgaagactattaacaaaca

SEQ ID NO: 70421 - DNA, 38 bp, Artificial Sequence
  primer
gtaaaacgacggccagtacaacacatgaaccaacgagg

SEQ ID NO: 70422 - DNA, 22 bp, Artificial Sequence
  primer
cttggcacaagtgtaaaccctc

SEQ ID NO: 70423 - DNA, 21 bp, Artificial Sequence
  primer
gtgcctcgagacaaataaggg

SEQ ID NO: 70424 - DNA, 39 bp, Artificial Sequence
  primer
gtaaaacgacggccagtaataccctgttgcccttcctac

SEQ ID NO: 70425 - DNA, 22 bp, Artificial Sequence
  primer
tcctgcacagctgatgttaatg

SEQ ID NO: 70426 - DNA, 21 bp, Artificial Sequence
  primer
ctttgggtgaatccatcttgc

SEQ ID NO: 70427 - DNA, 20 bp, Artificial Sequence
  primer
aaagatgggaagcacgactg

SEQ ID NO: 70428 - DNA, 21 bp, Artificial Sequence
  primer
agaagacctgcagggttgatg

SEQ ID NO: 70429 - DNA, 38 bp, Artificial Sequence
  primer
gtaaaacgacggccagtggatgaactgggtaccgacac

SEQ ID NO: 70430 - DNA, 21 bp, Artificial Sequence
  primer
atagaggagtcagcattcgcc

SEQ ID NO: 70431 - DNA, 19 bp, Artificial Sequence
  primer
aaacccagtgggctgacac

SEQ ID NO: 70432 - DNA, 22 bp, Artificial Sequence
  primer
ttattcagacctgaaaccaggg

SEQ ID NO: 70433 - DNA, 38 bp, Artificial Sequence
  primer
gtaaaacgacggccagttcgccactgtccttctatgtg

SEQ ID NO: 70434 - DNA, 38 bp, Artificial Sequence
  primer
gtaaaacgacggccagtgtgagcaataggtcctttggg

SEQ ID NO: 70435 - DNA, 21 bp, Artificial Sequence
  primer
ccactccacattctctctggg

SEQ ID NO: 70436 - DNA, 38 bp, Artificial Sequence
  primer
gtaaaacgacggccagtgaatgggctccctactcacac

SEQ ID NO: 70437 - DNA, 20 bp, Artificial Sequence
  primer
tcagagctcagtcgtggagc

SEQ ID NO: 70438 - DNA, 20 bp, Artificial Sequence
  primer
cagaccaggaaagggaggtc

SEQ ID NO: 70439 - DNA, 20 bp, Artificial Sequence
  primer
atcctgagggtacctgggag

SEQ ID NO: 70440 - DNA, 21 bp, Artificial Sequence
  primer
ctggcataacagagcgagact

SEQ ID NO: 70441 - DNA, 24 bp, Artificial Sequence
  primer
tttccaaatacttccatccctaag

SEQ ID NO: 70442 - DNA, 38 bp, Artificial Sequence
  primer
gtaaaacgacggccagtagactggtgtgatgcacgaag

SEQ ID NO: 70443 - DNA, 37 bp, Artificial Sequence
  primer
gtaaaacgacggccagtttagtcaaggccaccgtcac

SEQ ID NO: 70444 - DNA, 21 bp, Artificial Sequence
  primer
tgttgtgctgagttggaagaa

SEQ ID NO: 70445 - DNA, 38 bp, Artificial Sequence
  primer
gtaaaacgacggccagttggaaactgaattcacgaggg

SEQ ID NO: 70446 - DNA, 38 bp, Artificial Sequence
  primer
gtaaaacgacggccagtgtcaaaccacagactatgggc

SEQ ID NO: 70447 - DNA, 21 bp, Artificial Sequence
  primer
gattggaggcttgattctccc

SEQ ID NO: 70448 - DNA, 20 bp, Artificial Sequence
  primer
catttgggcagcacttgaac

SEQ ID NO: 70449 - DNA, 38 bp, Artificial Sequence
  primer
gtaaaacgacggccagtagagaaccatgggcttccttc

SEQ ID NO: 70450 - DNA, 36 bp, Artificial Sequence
  primer
gtaaaacgacggccagtcttggttaacacccggcac

SEQ ID NO: 70451 - DNA, 39 bp, Artificial Sequence
  primer
gtaaaacgacggccagttccacacatgcatgataaatcc

SEQ ID NO: 70452 - DNA, 19 bp, Artificial Sequence
  primer
gtgacagtgacaatgcccg

SEQ ID NO: 70453 - DNA, 19 bp, Artificial Sequence
  primer
ctgtccttggcctttgctc

SEQ ID NO: 70454 - DNA, 19 bp, Artificial Sequence
  primer
gtggctcgctctgttgttg

SEQ ID NO: 70455 - DNA, 38 bp, Artificial Sequence
  primer
gtaaaacgacggccagttccttcagcctctgatcattc

SEQ ID NO: 70456 - DNA, 36 bp, Artificial Sequence
  primer
gtaaaacgacggccagttggacaggagggtcaggtc

SEQ ID NO: 70457 - DNA, 38 bp, Artificial Sequence
  primer
gtaaaacgacggccagtcagcctatgggtgctctatcc

SEQ ID NO: 70458 - DNA, 21 bp, Artificial Sequence
  primer
gaccctcctccaacatagcag

SEQ ID NO: 70459 - DNA, 38 bp, Artificial Sequence
  primer
gtaaaacgacggccagtaattctcaagggacctcaagc

SEQ ID NO: 70460 - DNA, 21 bp, Artificial Sequence
  primer
ggctccaattccattcaagag

SEQ ID NO: 70461 - DNA, 38 bp, Artificial Sequence
  primer
gtaaaacgacggccagtacccggccatccttgtaatag

SEQ ID NO: 70462 - DNA, 38 bp, Artificial Sequence
  primer
gtaaaacgacggccagtgatgaacactggttcctggtg

SEQ ID NO: 70463 - DNA, 39 bp, Artificial Sequence
  primer
gtaaaacgacggccagttccctggtcattagaactgctc

SEQ ID NO: 70464 - DNA, 21 bp, Artificial Sequence
  primer
cccaaagcaatggagtctacc

SEQ ID NO: 70465 - DNA, 19 bp, Artificial Sequence
  primer
ttccagtgctcctggaagg

SEQ ID NO: 70466 - DNA, 22 bp, Artificial Sequence
  primer
acaactgtgtgagtatcccagc

SEQ ID NO: 70467 - DNA, 38 bp, Artificial Sequence
  primer
gtaaaacgacggccagttgtggctgggagtttcagtag

SEQ ID NO: 70468 - DNA, 37 bp, Artificial Sequence
  primer
gtaaaacgacggccagtcttgtacctccagcctccac

SEQ ID NO: 70469 - DNA, 38 bp, Artificial Sequence
  primer
gtaaaacgacggccagtcacagcttcttaagggcatcg

SEQ ID NO: 70470 - DNA, 21 bp, Artificial Sequence
  primer
actgcttggcaaatctgaacc

SEQ ID NO: 70471 - DNA, 38 bp, Artificial Sequence
  primer
gtaaaacgacggccagtttatcctccaccctctccttg

SEQ ID NO: 70472 - DNA, 39 bp, Artificial Sequence
  primer
gtaaaacgacggccagtccctccaaatacactgcaaatc

SEQ ID NO: 70473 - DNA, 21 bp, Artificial Sequence
  primer
gcactgccagaactgaatgag

SEQ ID NO: 70474 - DNA, 36 bp, Artificial Sequence
  primer
gtaaaacgacggccagtgaccttgacgtccgctctc

SEQ ID NO: 70475 - DNA, 38 bp, Artificial Sequence
  primer
gtaaaacgacggccagtcagacataagttggaggcagg

SEQ ID NO: 70476 - DNA, 18 bp, Artificial Sequence
  primer
ttcaccacattgcccagg

SEQ ID NO: 70477 - DNA, 39 bp, Artificial Sequence
  primer
gtaaaacgacggccagtgagacacaaatccctccaacac

SEQ ID NO: 70478 - DNA, 39 bp, Artificial Sequence
  primer
gtaaaacgacggccagtcctgctgactgtcacttctttg

SEQ ID NO: 70479 - DNA, 21 bp, Artificial Sequence
  primer
acaacattcccatttccactg

SEQ ID NO: 70480 - DNA, 36 bp, Artificial Sequence
  primer
gtaaaacgacggccagtctgcacccagggacagaac

SEQ ID NO: 70481 - DNA, 39 bp, Artificial Sequence
  primer
gtaaaacgacggccagtgctgagaaagaggaaggacaga

SEQ ID NO: 70482 - DNA, 38 bp, Artificial Sequence
  primer
gtaaaacgacggccagtccatctctagcaagtgcctcc

SEQ ID NO: 70483 - DNA, 20 bp, Artificial Sequence
  primer
agcctggacgacagagtcag

SEQ ID NO: 70484 - DNA, 21 bp, Artificial Sequence
  primer
gccaatttatccttctccagg

SEQ ID NO: 70485 - DNA, 21 bp, Artificial Sequence
  primer
caccactcagtccatcctgtg

SEQ ID NO: 70486 - DNA, 38 bp, Artificial Sequence
  primer
gtaaaacgacggccagtcttgcccaaacagagaaatcc

SEQ ID NO: 70487 - DNA, 38 bp, Artificial Sequence
  primer
gtaaaacgacggccagtctttgcaggagtgtagcttgc

SEQ ID NO: 70488 - DNA, 24 bp, Artificial Sequence
  primer
gcacaactatattgtttcagagcc

SEQ ID NO: 70489 - DNA, 22 bp, Artificial Sequence
  primer
ttctgcagtctacacaccaacc

SEQ ID NO: 70490 - DNA, 35 bp, Artificial Sequence
  primer
gtaaaacgacggccagtaaatcagcgcagcattcc

SEQ ID NO: 70491 - DNA, 42 bp, Artificial Sequence
  primer
gtaaaacgacggccagtgcctatgtaaattagtgagagggtg

SEQ ID NO: 70492 - DNA, 23 bp, Artificial Sequence
  primer
gttgtcttcttggatatggcttc

SEQ ID NO: 70493 - DNA, 22 bp, Artificial Sequence
  primer
gacagagcgagactctgtttca

SEQ ID NO: 70494 - DNA, 24 bp, Artificial Sequence
  primer
tgaacccagccatatttatttgag

SEQ ID NO: 70495 - DNA, 37 bp, Artificial Sequence
  primer
gtaaaacgacggccagtacctggtgaccaatggtttg

SEQ ID NO: 70496 - DNA, 38 bp, Artificial Sequence
  primer
gtaaaacgacggccagtcctaatgtcctggtcctgagc

SEQ ID NO: 70497 - DNA, 22 bp, Artificial Sequence
  primer
ccacatatcagggcaacttgag

SEQ ID NO: 70498 - DNA, 24 bp, Artificial Sequence
  primer
tgtccttccacctaaattagcaac

SEQ ID NO: 70499 - DNA, 21 bp, Artificial Sequence
  primer
ttggccttcccaataatcttc

SEQ ID NO: 70500 - DNA, 37 bp, Artificial Sequence
  primer
gtaaaacgacggccagttgaatcggccataactgaaa

SEQ ID NO: 70501 - DNA, 25 bp, Artificial Sequence
  primer
aagaaaggaatatggataatcacgg

SEQ ID NO: 70502 - DNA, 21 bp, Artificial Sequence
  primer
ggtggaaggaacaggattgtg

SEQ ID NO: 70503 - DNA, 21 bp, Artificial Sequence
  primer
cactgcagagaggaagcagtg

SEQ ID NO: 70504 - DNA, 21 bp, Artificial Sequence
  primer
taaggagtggctgatacccag

SEQ ID NO: 70505 - DNA, 21 bp, Artificial Sequence
  primer
cacaggagtgctctagacggc

SEQ ID NO: 70506 - DNA, 21 bp, Artificial Sequence
  primer
ataaagtgcctggtgtttggg

SEQ ID NO: 70507 - DNA, 38 bp, Artificial Sequence
  primer
gtaaaacgacggccagtcctccgtgaaagaacaggaag

SEQ ID NO: 70508 - DNA, 21 bp, Artificial Sequence
  primer
tgcccacatttgacttgagac

SEQ ID NO: 70509 - DNA, 38 bp, Artificial Sequence
  primer
gtaaaacgacggccagtcccacttgttgcttggatacc

SEQ ID NO: 70510 - DNA, 38 bp, Artificial Sequence
  primer
gtaaaacgacggccagtcttcgaagagtcccaatttgc

SEQ ID NO: 70511 - DNA, 37 bp, Artificial Sequence
  primer
gtaaaacgacggccagtgaggatttcaagcagttggc

SEQ ID NO: 70512 - DNA, 21 bp, Artificial Sequence
  primer
aacctgcactgggagtacctg

SEQ ID NO: 70513 - DNA, 38 bp, Artificial Sequence
  primer
gtaaaacgacggccagtatgatggagggtcttgtccac

SEQ ID NO: 70514 - DNA, 21 bp, Artificial Sequence
  primer
acaggcacgtaccatcacatc

SEQ ID NO: 70515 - DNA, 21 bp, Artificial Sequence
  primer
cagacagacacagcaaggctc

SEQ ID NO: 70516 - DNA, 24 bp, Artificial Sequence
  primer
acaaaccattcatccattaaacac

SEQ ID NO: 70517 - DNA, 27 bp, Artificial Sequence
  primer
tgtcactgatcagacactaatcttcag

SEQ ID NO: 70518 - DNA, 25 bp, Artificial Sequence
  primer
caattcagaatgaatctaatccctc

SEQ ID NO: 70519 - DNA, 29 bp, Artificial Sequence
  primer
gaaacattatacctcttactgggagtaca

SEQ ID NO: 70520 - DNA, 23 bp, Artificial Sequence
  primer
tttatcccatcaaactcacttcc

SEQ ID NO: 70521 - DNA, 22 bp, Artificial Sequence
  primer
catggttctaatcccattagcc

SEQ ID NO: 70522 - DNA, 39 bp, Artificial Sequence
  primer
gtaaaacgacggccagttcaagtcaaacaaccttctccc

SEQ ID NO: 70523 - DNA, 21 bp, Artificial Sequence
  primer
tccatttcaacaacgcaaatc

SEQ ID NO: 70524 - DNA, 20 bp, Artificial Sequence
  primer
agccactagctgctgactgc

SEQ ID NO: 70525 - DNA, 38 bp, Artificial Sequence
  primer
gtaaaacgacggccagttcttgttgcttccaaaggagg

SEQ ID NO: 70526 - DNA, 38 bp, Artificial Sequence
  primer
gtaaaacgacggccagtaacaagcctcctaaggccatc

SEQ ID NO: 70527 - DNA, 38 bp, Artificial Sequence
  primer
gtaaaacgacggccagtcccaatagtgttaggtgagcg

SEQ ID NO: 70528 - DNA, 21 bp, Artificial Sequence
  primer
ccctcaatctgcttctcaatg

SEQ ID NO: 70529 - DNA, 25 bp, Artificial Sequence
  primer
tttaagagaattaatggcactcctc

SEQ ID NO: 70530 - DNA, 23 bp, Artificial Sequence
  primer
gaaggtacaaactcttccttggg

SEQ ID NO: 70531 - DNA, 39 bp, Artificial Sequence
  primer
gtaaaacgacggccagttgttccaacattctgtctctgc

SEQ ID NO: 70532 - DNA, 39 bp, Artificial Sequence
  primer
gtaaaacgacggccagtaaatctgcaaattcctcagcag

SEQ ID NO: 70533 - DNA, 21 bp, Artificial Sequence
  primer
atcctgttgcagtgttggaag

SEQ ID NO: 70534 - DNA, 20 bp, Artificial Sequence
  primer
actggcagagccaaagtcac

SEQ ID NO: 70535 - DNA, 38 bp, Artificial Sequence
  primer
gtaaaacgacggccagtgtccaatctcaccttcttgcc

SEQ ID NO: 70536 - DNA, 38 bp, Artificial Sequence
  primer
gtaaaacgacggccagtaactgctcctttggaagttgc

SEQ ID NO: 70537 - DNA, 38 bp, Artificial Sequence
  primer
gtaaaacgacggccagtaccaacccacaaatcagacag

SEQ ID NO: 70538 - DNA, 39 bp, Artificial Sequence
  primer
gtaaaacgacggccagtcaacctcaatcccaagtagctg

SEQ ID NO: 70539 - DNA, 44 bp, Artificial Sequence
  primer
gtaaaacgacggccagtactagcttaccacagcttaaacagaag

SEQ ID NO: 70540 - DNA, 27 bp, Artificial Sequence
  primer
tgatcaatatttgatgggatttatgag

SEQ ID NO: 70541 - DNA, 40 bp, Artificial Sequence
  primer
gtaaaacgacggccagttgttcattgtattccaagggatg

SEQ ID NO: 70542 - DNA, 40 bp, Artificial Sequence
  primer
gtaaaacgacggccagttcagaaagaaagcctgaatttcc

SEQ ID NO: 70543 - DNA, 18 bp, Artificial Sequence
  primer
ttctggacttgggcatcg

SEQ ID NO: 70544 - DNA, 21 bp, Artificial Sequence
  primer
tctagtgcggcttaccaacaa

SEQ ID NO: 70545 - DNA, 38 bp, Artificial Sequence
  primer
gtaaaacgacggccagtgactcgggaagacctagaggg

SEQ ID NO: 70546 - DNA, 38 bp, Artificial Sequence
  primer
gtaaaacgacggccagttttagcttggcattctcccag

SEQ ID NO: 70547 - DNA, 24 bp, Artificial Sequence
  primer
gctggaatttgaacttagatctgg

SEQ ID NO: 70548 - DNA, 21 bp, Artificial Sequence
  primer
accagtaccctggacaacagg

SEQ ID NO: 70549 - DNA, 27 bp, Artificial Sequence
  primer
aaatcaacttctggtagaagaataggg

SEQ ID NO: 70550 - DNA, 38 bp, Artificial Sequence
  primer
gtaaaacgacggccagttgagactagggctgtgctttg

SEQ ID NO: 70551 - DNA, 18 bp, Artificial Sequence
  primer
gtgagccactgcacccag

SEQ ID NO: 70552 - DNA, 22 bp, Artificial Sequence
  primer
tgaacatttactcaatgcccac

SEQ ID NO: 70553 - DNA, 26 bp, Artificial Sequence
  primer
tcagatatagaaagtgccaattcaac

SEQ ID NO: 70554 - DNA, 22 bp, Artificial Sequence
  primer
ttcagccaaattatttcccaac

SEQ ID NO: 70555 - DNA, 44 bp, Artificial Sequence
  primer
gtaaaacgacggccagtaaacaaatgacaaggtaaatccttatg

SEQ ID NO: 70556 - DNA, 43 bp, Artificial Sequence
  primer
gtaaaacgacggccagtgctcatgttatatttctgttggaatg

SEQ ID NO: 70557 - DNA, 41 bp, Artificial Sequence
  primer
gtaaaacgacggccagttctgaaatttccactacaaacagc

SEQ ID NO: 70558 - DNA, 37 bp, Artificial Sequence
  primer
gtaaaacgacggccagtccctcctccacaacaatttc

SEQ ID NO: 70559 - DNA, 37 bp, Artificial Sequence
  primer
gtaaaacgacggccagtgtcagaatcacagccttccg

SEQ ID NO: 70560 - DNA, 21 bp, Artificial Sequence
  primer
tacggtttaaatcccgtccag

SEQ ID NO: 70561 - DNA, 39 bp, Artificial Sequence
  primer
gtaaaacgacggccagtaaatgaatgagattgtgggagc

SEQ ID NO: 70562 - DNA, 38 bp, Artificial Sequence
  primer
gtaaaacgacggccagttattatccacgtgggccattc

SEQ ID NO: 70563 - DNA, 45 bp, Artificial Sequence
  primer
gtaaaacgacggccagttttaaagattaccatatgaaacaaccaa

SEQ ID NO: 70564 - DNA, 38 bp, Artificial Sequence
  primer
gtaaaacgacggccagtctgcataggcccatagtcagc

SEQ ID NO: 70565 - DNA, 26 bp, Artificial Sequence
  primer
aaaccaatttcatatgtctttcacac

SEQ ID NO: 70566 - DNA, 35 bp, Artificial Sequence
  primer
gtaaaacgacggccagtaccagggaaggttgcagg

SEQ ID NO: 70567 - DNA, 21 bp, Artificial Sequence
  primer
attctgtgacttcctggtgcc

SEQ ID NO: 70568 - DNA, 38 bp, Artificial Sequence
  primer
gtaaaacgacggccagttgcatttggataggcaacaag

SEQ ID NO: 70569 - DNA, 38 bp, Artificial Sequence
  primer
gtaaaacgacggccagtgccctccctgttcatttatcc

SEQ ID NO: 70570 - DNA, 21 bp, Artificial Sequence
  primer
tctaatgaactcatgggcagc

SEQ ID NO: 70571 - DNA, 21 bp, Artificial Sequence
  primer
cagagaagagcaggcctagtg

SEQ ID NO: 70572 - DNA, 38 bp, Artificial Sequence
  primer
gtaaaacgacggccagtacagagttaggtgtcccgtgg

SEQ ID NO: 70573 - DNA, 21 bp, Artificial Sequence
  primer
actaagggctgaggcaaactg

SEQ ID NO: 70574 - DNA, 21 bp, Artificial Sequence
  primer
agcaccaggttcagtacccag

SEQ ID NO: 70575 - DNA, 38 bp, Artificial Sequence
  primer
gtaaaacgacggccagtctcacctttcaccacgacttc

SEQ ID NO: 70576 - DNA, 38 bp, Artificial Sequence
  primer
gtaaaacgacggccagtagctccatgtcacagaggaag

SEQ ID NO: 70577 - DNA, 21 bp, Artificial Sequence
  primer
tctaacctaggctggccacag

SEQ ID NO: 70578 - DNA, 21 bp, Artificial Sequence
  primer
gcctgtgtgatctcaggtgtc

SEQ ID NO: 70579 - DNA, 37 bp, Artificial Sequence
  primer
gtaaaacgacggccagtcaaccctccctttccaagat

SEQ ID NO: 70580 - DNA, 21 bp, Artificial Sequence
  primer
gtggcctctccagtctcattc

SEQ ID NO: 70581 - DNA, 38 bp, Artificial Sequence
  primer
gtaaaacgacggccagtcccacgtgccaggttaagtag

SEQ ID NO: 70582 - DNA, 38 bp, Artificial Sequence
  primer
gtaaaacgacggccagtcacaaggtattgggtgctcag

SEQ ID NO: 70583 - DNA, 20 bp, Artificial Sequence
  primer
ttgtatcgccctgtcagctc

SEQ ID NO: 70584 - DNA, 38 bp, Artificial Sequence
  primer
gtaaaacgacggccagttctgatggatgggatactggg

SEQ ID NO: 70585 - DNA, 19 bp, Artificial Sequence
  primer
caaatcccagggagggaac

SEQ ID NO: 70586 - DNA, 38 bp, Artificial Sequence
  primer
gtaaaacgacggccagtgcccactgtggaagtaagacc

SEQ ID NO: 70587 - DNA, 38 bp, Artificial Sequence
  primer
gtaaaacgacggccagtcccactgaggtctcctactcc

SEQ ID NO: 70588 - DNA, 38 bp, Artificial Sequence
  primer
gtaaaacgacggccagtgagttccagaaggcagtttgc

SEQ ID NO: 70589 - DNA, 21 bp, Artificial Sequence
  primer
tcctgaagggagtccactagc

SEQ ID NO: 70590 - DNA, 21 bp, Artificial Sequence
  primer
ccaaactggtgtccacaaatg

SEQ ID NO: 70591 - DNA, 21 bp, Artificial Sequence
  primer
cactgacctcagctatgccac

SEQ ID NO: 70592 - DNA, 38 bp, Artificial Sequence
  primer
gtaaaacgacggccagtcacttacattggtggtgctgg

SEQ ID NO: 70593 - DNA, 38 bp, Artificial Sequence
  primer
gtaaaacgacggccagtttctactccagacccagggag

SEQ ID NO: 70594 - DNA, 21 bp, Artificial Sequence
  primer
agacaggtctccgctgatttc

SEQ ID NO: 70595 - DNA, 38 bp, Artificial Sequence
  primer
gtaaaacgacggccagtaagctatgctgcctccttctg

SEQ ID NO: 70596 - DNA, 21 bp, Artificial Sequence
  primer
cccaaagaccgttgtcttctc

SEQ ID NO: 70597 - DNA, 21 bp, Artificial Sequence
  primer
ttagctcaatctgtccagccc

SEQ ID NO: 70598 - DNA, 21 bp, Artificial Sequence
  primer
cagaagacaagggactcaccc

SEQ ID NO: 70599 - DNA, 38 bp, Artificial Sequence
  primer
gtaaaacgacggccagtcgacaagaagaggacaccgtc

SEQ ID NO: 70600 - DNA, 21 bp, Artificial Sequence
  primer
atgtcatcatgcagctccttc

SEQ ID NO: 70601 - DNA, 21 bp, Artificial Sequence
  primer
ccttctaagggcagtggtcag

SEQ ID NO: 70602 - DNA, 38 bp, Artificial Sequence
  primer
gtaaaacgacggccagtgaccttgaaaggcacttcctc

SEQ ID NO: 70603 - DNA, 20 bp, Artificial Sequence
  primer
actgtgaggcagagtgacgg

SEQ ID NO: 70604 - DNA, 21 bp, Artificial Sequence
  primer
ctctgtgtgtggaaatgaggc

SEQ ID NO: 70605 - DNA, 21 bp, Artificial Sequence
  primer
catccaagtgccagctaagag

SEQ ID NO: 70606 - DNA, 38 bp, Artificial Sequence
  primer
gtaaaacgacggccagtgtctcagggtgtctcctggtc

SEQ ID NO: 70607 - DNA, 21 bp, Artificial Sequence
  primer
ctccctctttccctaagggtc

SEQ ID NO: 70608 - DNA, 21 bp, Artificial Sequence
  primer
tcttcctcctcagctcctagc

SEQ ID NO: 70609 - DNA, 38 bp, Artificial Sequence
  primer
gtaaaacgacggccagttagggataaggccagaatggg

SEQ ID NO: 70610 - DNA, 37 bp, Artificial Sequence
  primer
gtaaaacgacggccagtattgagagcacagccaccac

SEQ ID NO: 70611 - DNA, 21 bp, Artificial Sequence
  primer
ttcctgaggagaaagattggg

SEQ ID NO: 70612 - DNA, 22 bp, Artificial Sequence
  primer
tggttgtagaagaaagcttggc

SEQ ID NO: 70613 - DNA, 21 bp, Artificial Sequence
  primer
ctctgtgtgtggaaatgaggc

SEQ ID NO: 70614 - DNA, 21 bp, Artificial Sequence
  primer
tcttcctcctcagctcctagc

SEQ ID NO: 70615 - DNA, 22 bp, Artificial Sequence
  primer
tggttgtagaagaaagcttggc

SEQ ID NO: 70616 - DNA, 22 bp, Artificial Sequence
  primer
aattgtaactgcgctgagcttc

SEQ ID NO: 70617 - DNA, 39 bp, Artificial Sequence
  primer
gtaaaacgacggccagtaagtagatggctaactgcctgc

SEQ ID NO: 70618 - DNA, 38 bp, Artificial Sequence
  primer
gtaaaacgacggccagtctgtgacggaccaaagaagtc

SEQ ID NO: 70619 - DNA, 18 bp, Artificial Sequence
  primer
tagcagggtgtggtggtg

SEQ ID NO: 70620 - DNA, 41 bp, Artificial Sequence
  primer
gtaaaacgacggccagtttaatgggtatgtttgaaatgcag

SEQ ID NO: 70621 - DNA, 42 bp, Artificial Sequence
  primer
gtaaaacgacggccagttttctggcagatatactacaactca

SEQ ID NO: 70622 - DNA, 21 bp, Artificial Sequence
  primer
cctggacaacagagcacaact

SEQ ID NO: 70623 - DNA, 41 bp, Artificial Sequence
  primer
gtaaaacgacggccagtcagatctgcactgcctttattacc

SEQ ID NO: 70624 - DNA, 21 bp, Artificial Sequence
  primer
gcctttctggaaattccttcc

SEQ ID NO: 70625 - DNA, 41 bp, Artificial Sequence
  primer
gtaaaacgacggccagttgtagccagtagctgactgatgtt

SEQ ID NO: 70626 - DNA, 39 bp, Artificial Sequence
  primer
gtaaaacgacggccagttgtcaaggcatcttaatgcaag

SEQ ID NO: 70627 - DNA, 20 bp, Artificial Sequence
  primer
ccctgaacatcagaccaccc

SEQ ID NO: 70628 - DNA, 20 bp, Artificial Sequence
  primer
attgtgaatgccacaaaggc

SEQ ID NO: 70629 - DNA, 20 bp, Artificial Sequence
  primer
ccctgtgctgctgattcttt

SEQ ID NO: 70630 - DNA, 21 bp, Artificial Sequence
  primer
agaacacagcaccatctttgc

SEQ ID NO: 70631 - DNA, 21 bp, Artificial Sequence
  primer
gcactgccatggttcatacag

SEQ ID NO: 70632 - DNA, 41 bp, Artificial Sequence
  primer
gtaaaacgacggccagtttctttactgcaatgagagaatgg

SEQ ID NO: 70633 - DNA, 24 bp, Artificial Sequence
  primer
aaacagaaggacacctaatcatca

SEQ ID NO: 70634 - DNA, 21 bp, Artificial Sequence
  primer
caaccgctttgttgacatcta

SEQ ID NO: 70635 - DNA, 41 bp, Artificial Sequence
  primer
gtaaaacgacggccagttgccctttagatgtttctgctaac

SEQ ID NO: 70636 - DNA, 21 bp, Artificial Sequence
  primer
atagaaacatggcccacacac

SEQ ID NO: 70637 - DNA, 24 bp, Artificial Sequence
  primer
caacacctggtaactaaaggatgc

SEQ ID NO: 70638 - DNA, 23 bp, Artificial Sequence
  primer
gtatgcagtcctccagaaacatt

SEQ ID NO: 70639 - DNA, 43 bp, Artificial Sequence
  primer
gtaaaacgacggccagttgtatctctggtacctttatggtgaa

SEQ ID NO: 70640 - DNA, 38 bp, Artificial Sequence
  primer
gtaaaacgacggccagtaccaaatcaatgcttgtgtcc

SEQ ID NO: 70641 - DNA, 27 bp, Artificial Sequence
  primer
aagcattgcatatgaagctattaaatc

SEQ ID NO: 70642 - DNA, 41 bp, Artificial Sequence
  primer
gtaaaacgacggccagttgattgtgaccaagtgtcagagag

SEQ ID NO: 70643 - DNA, 21 bp, Artificial Sequence
  primer
ccactgaaatctggacaaagg

SEQ ID NO: 70644 - DNA, 40 bp, Artificial Sequence
  primer
gtaaaacgacggccagttgatccacatacacctgagaagc

SEQ ID NO: 70645 - DNA, 22 bp, Artificial Sequence
  primer
catcatacctggccaagttacc

SEQ ID NO: 70646 - DNA, 27 bp, Artificial Sequence
  primer
acctgaatataataacacttcctggag

SEQ ID NO: 70647 - DNA, 38 bp, Artificial Sequence
  primer
gtaaaacgacggccagtgaattccaacagcgacttgtg

SEQ ID NO: 70648 - DNA, 23 bp, Artificial Sequence
  primer
tggaccgtactttgagtagcaag

SEQ ID NO: 70649 - DNA, 38 bp, Artificial Sequence
  primer
gtaaaacgacggccagtagcagagccataattgcaacc

SEQ ID NO: 70650 - DNA, 21 bp, Artificial Sequence
  primer
agcctgcaaccatttaccaac

SEQ ID NO: 70651 - DNA, 43 bp, Artificial Sequence
  primer
gtaaaacgacggccagtttctatgacaattctttatggtttgg

SEQ ID NO: 70652 - DNA, 21 bp, Artificial Sequence
  primer
acacacataaatgcctggtgc

SEQ ID NO: 70653 - DNA, 41 bp, Artificial Sequence
  primer
gtaaaacgacggccagtaagatggacaagaaggaaagtttg

SEQ ID NO: 70654 - DNA, 22 bp, Artificial Sequence
  primer
aggtgccaaatcaatactgaca

SEQ ID NO: 70655 - DNA, 40 bp, Artificial Sequence
  primer
gtaaaacgacggccagtcattatatcgtgaggtttggcac

SEQ ID NO: 70656 - DNA, 38 bp, Artificial Sequence
  primer
gtaaaacgacggccagtagatgaagggaagaaggcagg

SEQ ID NO: 70657 - DNA, 40 bp, Artificial Sequence
  primer
gtaaaacgacggccagtcaaagttgcgacaaatatggttc

SEQ ID NO: 70658 - DNA, 25 bp, Artificial Sequence
  primer
aaacaaatgggaataaggaactaag

SEQ ID NO: 70659 - DNA, 22 bp, Artificial Sequence
  primer
gccatcatagctcactacagcc

SEQ ID NO: 70660 - DNA, 21 bp, Artificial Sequence
  primer
gtctttgcagtagtctccggg

SEQ ID NO: 70661 - DNA, 38 bp, Artificial Sequence
  primer
gtaaaacgacggccagttttcattgggatacctagggc

SEQ ID NO: 70662 - DNA, 23 bp, Artificial Sequence
  primer
gcctgtgcatataaggcatttac

SEQ ID NO: 70663 - DNA, 21 bp, Artificial Sequence
  primer
gcactgccatggttcatacag

SEQ ID NO: 70664 - DNA, 21 bp, Artificial Sequence
  primer
taaaggatcgagaatgggcag

SEQ ID NO: 70665 - DNA, 36 bp, Artificial Sequence
  primer
gtaaaacgacggccagtgtctcggtgctttccatgc

SEQ ID NO: 70666 - DNA, 20 bp, Artificial Sequence
  primer
acatttgcagtggcttgcag

SEQ ID NO: 70667 - DNA, 38 bp, Artificial Sequence
  primer
gtaaaacgacggccagtaagcagctcataacctgagcc

SEQ ID NO: 70668 - DNA, 21 bp, Artificial Sequence
  primer
gcaaactcagccttgtatccc

SEQ ID NO: 70669 - DNA, 38 bp, Artificial Sequence
  primer
gtaaaacgacggccagtaagattcgcttcaagtcccag

SEQ ID NO: 70670 - DNA, 20 bp, Artificial Sequence
  primer
tggccaaattggtcttgaac

SEQ ID NO: 70671 - DNA, 21 bp, Artificial Sequence
  primer
agccagcaatgacactttcag

SEQ ID NO: 70672 - DNA, 21 bp, Artificial Sequence
  primer
tgtctttctgaccacctttgc

SEQ ID NO: 70673 - DNA, 21 bp, Artificial Sequence
  primer
gttctacccagggaatgaagg

SEQ ID NO: 70674 - DNA, 39 bp, Artificial Sequence
  primer
gtaaaacgacggccagtgggagaaagagggtcaaagaag

SEQ ID NO: 70675 - DNA, 21 bp, Artificial Sequence
  primer
taaagcaggtcagtccacagc

SEQ ID NO: 70676 - DNA, 21 bp, Artificial Sequence
  primer
gtaacagcctctcttggtggg

SEQ ID NO: 70677 - DNA, 21 bp, Artificial Sequence
  primer
agacaaggaagagggtttggc

SEQ ID NO: 70678 - DNA, 38 bp, Artificial Sequence
  primer
gtaaaacgacggccagtgggaagcccagaagaaagtta

SEQ ID NO: 70679 - DNA, 20 bp, Artificial Sequence
  primer
ccctgagggaggtactgagg

SEQ ID NO: 70680 - DNA, 37 bp, Artificial Sequence
  primer
gtaaaacgacggccagtaaaccaagtcacaagctggc

SEQ ID NO: 70681 - DNA, 19 bp, Artificial Sequence
  primer
cggaaatgggaacgatgag

SEQ ID NO: 70682 - DNA, 36 bp, Artificial Sequence
  primer
gtaaaacgacggccagtggtatttggaagccgggag

SEQ ID NO: 70683 - DNA, 20 bp, Artificial Sequence
  primer
gagagtggcacgtcacacag

SEQ ID NO: 70684 - DNA, 20 bp, Artificial Sequence
  primer
agctcactcccagtcaccac

SEQ ID NO: 70685 - DNA, 21 bp, Artificial Sequence
  primer
cttaggatggcctggtcagag

SEQ ID NO: 70686 - DNA, 18 bp, Artificial Sequence
  primer
aacctgacgcgggaacct

SEQ ID NO: 70687 - DNA, 37 bp, Artificial Sequence
  primer
gtaaaacgacggccagtcttccgtgtgagttccaccc

SEQ ID NO: 70688 - DNA, 19 bp, Artificial Sequence
  primer
cctgtctcccacggagttc

SEQ ID NO: 70689 - DNA, 37 bp, Artificial Sequence
  primer
gtaaaacgacggccagtgtgatgagtcaccaggtccc

SEQ ID NO: 70690 - DNA, 36 bp, Artificial Sequence
  primer
gtaaaacgacggccagtgctgtgggaggctgaagac

SEQ ID NO: 70691 - DNA, 21 bp, Artificial Sequence
  primer
gcacacaacgaaagcctagtg

SEQ ID NO: 70692 - DNA, 21 bp, Artificial Sequence
  primer
tgcaagttctgaatgaccagg

SEQ ID NO: 70693 - DNA, 21 bp, Artificial Sequence
  primer
gtcacgtgtcctgtggaagtc

SEQ ID NO: 70694 - DNA, 36 bp, Artificial Sequence
  primer
gtaaaacgacggccagtgaagcaagctctgcccatc

SEQ ID NO: 70695 - DNA, 38 bp, Artificial Sequence
  primer
gtaaaacgacggccagtgacggaaggagacttcagcag

SEQ ID NO: 70696 - DNA, 38 bp, Artificial Sequence
  primer
gtaaaacgacggccagtgagaaaggcctgctaccacac

SEQ ID NO: 70697 - DNA, 38 bp, Artificial Sequence
  primer
gtaaaacgacggccagttatacagatggccttcgtccc

SEQ ID NO: 70698 - DNA, 21 bp, Artificial Sequence
  primer
ttgtcaccgtgtcccactaag

SEQ ID NO: 70699 - DNA, 35 bp, Artificial Sequence
  primer
gtaaaacgacggccagtgtgctctccgtgctgggt

SEQ ID NO: 70700 - DNA, 38 bp, Artificial Sequence
  primer
gtaaaacgacggccagtacatccaacagagggagaagg

SEQ ID NO: 70701 - DNA, 20 bp, Artificial Sequence
  primer
gaggtcaaggctgcagtgag

SEQ ID NO: 70702 - DNA, 23 bp, Artificial Sequence
  primer
agggtttctgttacctcagcata

SEQ ID NO: 70703 - DNA, 43 bp, Artificial Sequence
  primer
gtaaaacgacggccagtggagaagaaacttcatttcctaagag

SEQ ID NO: 70704 - DNA, 39 bp, Artificial Sequence
  primer
gtaaaacgacggccagtgccaagaaataccacactttgc

SEQ ID NO: 70705 - DNA, 43 bp, Artificial Sequence
  primer
gtaaaacgacggccagttttacattggtttcaaattgttgact

SEQ ID NO: 70706 - DNA, 39 bp, Artificial Sequence
  primer
gtaaaacgacggccagttccaatcttcaatcaacaaggc

SEQ ID NO: 70707 - DNA, 20 bp, Artificial Sequence
  primer
gtctgggaaccacgtctgag

SEQ ID NO: 70708 - DNA, 21 bp, Artificial Sequence
  primer
gaggccagttcttcactccag

SEQ ID NO: 70709 - DNA, 21 bp, Artificial Sequence
  primer
caggaaagaatagcacctggg

SEQ ID NO: 70710 - DNA, 21 bp, Artificial Sequence
  primer
gctagagggcatgaggtatgg

SEQ ID NO: 70711 - DNA, 22 bp, Artificial Sequence
  primer
gaaacacaggtgagggcataag

SEQ ID NO: 70712 - DNA, 21 bp, Artificial Sequence
  primer
agcaggaacagtttaggtggg

SEQ ID NO: 70713 - DNA, 37 bp, Artificial Sequence
  primer
gtaaaacgacggccagtaggtatgaccactcccaccc

SEQ ID NO: 70714 - DNA, 37 bp, Artificial Sequence
  primer
gtaaaacgacggccagtagctgttcaagagcccttcc

SEQ ID NO: 70715 - DNA, 25 bp, Artificial Sequence
  primer
cacctgcattattacatatccttcc

SEQ ID NO: 70716 - DNA, 38 bp, Artificial Sequence
  primer
gtaaaacgacggccagtcagctgtgagaacatccactg

SEQ ID NO: 70717 - DNA, 21 bp, Artificial Sequence
  primer
tttaggcactgtggcactagg

SEQ ID NO: 70718 - DNA, 38 bp, Artificial Sequence
  primer
gtaaaacgacggccagtcactaacccttgttccctccc

SEQ ID NO: 70719 - DNA, 38 bp, Artificial Sequence
  primer
gtaaaacgacggccagtttcaaacaggagcagagatgg

SEQ ID NO: 70720 - DNA, 18 bp, Artificial Sequence
  primer
cttcccacctcgcctgtg

SEQ ID NO: 70721 - DNA, 44 bp, Artificial Sequence
  primer
gtaaaacgacggccagttgttgataatgtttaaactcaaggagg

SEQ ID NO: 70722 - DNA, 22 bp, Artificial Sequence
  primer
tgccgctaacagtctaacaagg

SEQ ID NO: 70723 - DNA, 21 bp, Artificial Sequence
  primer
tcaaacattccttccctgagc

SEQ ID NO: 70724 - DNA, 40 bp, Artificial Sequence
  primer
gtaaaacgacggccagtcaaccaagtcaagaaagagcttc

SEQ ID NO: 70725 - DNA, 40 bp, Artificial Sequence
  primer
gtaaaacgacggccagtaaatgagcatcattgaccaattt

SEQ ID NO: 70726 - DNA, 18 bp, Artificial Sequence
  primer
cgcccagtggctagattc

SEQ ID NO: 70727 - DNA, 22 bp, Artificial Sequence
  primer
acctgaaggtagcagacaatgc

SEQ ID NO: 70728 - DNA, 18 bp, Artificial Sequence
  primer
ttacaggcattggccacc

SEQ ID NO: 70729 - DNA, 40 bp, Artificial Sequence
  primer
gtaaaacgacggccagtctttcaaagatctgatgtcacaa

SEQ ID NO: 70730 - DNA, 26 bp, Artificial Sequence
  primer
gcacttaaaggatgactgtacaacac

SEQ ID NO: 70731 - DNA, 39 bp, Artificial Sequence
  primer
gtaaaacgacggccagtttctttctacctctgcactccg

SEQ ID NO: 70732 - DNA, 38 bp, Artificial Sequence
  primer
gtaaaacgacggccagtcaataggtgcatgtgggaaga

SEQ ID NO: 70733 - DNA, 38 bp, Artificial Sequence
  primer
gtaaaacgacggccagttgagacatgcagtctgtttgg

SEQ ID NO: 70734 - DNA, 39 bp, Artificial Sequence
  primer
gtaaaacgacggccagttgggcttctgaagatttgtagc

SEQ ID NO: 70735 - DNA, 20 bp, Artificial Sequence
  primer
tttcttcaactccctccacc

SEQ ID NO: 70736 - DNA, 21 bp, Artificial Sequence
  primer
ggcacaatcctaacaaggtgg

SEQ ID NO: 70737 - DNA, 38 bp, Artificial Sequence
  primer
gtaaaacgacggccagtaacagctaggcaaaccatgtg

SEQ ID NO: 70738 - DNA, 21 bp, Artificial Sequence
  primer
aggcaggcgtgtcaaagtaag

SEQ ID NO: 70739 - DNA, 21 bp, Artificial Sequence
  primer
tgaaatgacaaccgctgaatg

SEQ ID NO: 70740 - DNA, 22 bp, Artificial Sequence
  primer
ccaggtttaagcaccaagagag

SEQ ID NO: 70741 - DNA, 22 bp, Artificial Sequence
  primer
aaattaccttgactgtgtgggc

SEQ ID NO: 70742 - DNA, 22 bp, Artificial Sequence
  primer
tgctggtgtattgaatgtggac

SEQ ID NO: 70743 - DNA, 21 bp, Artificial Sequence
  primer
tgggatatttggaagcaatcc

SEQ ID NO: 70744 - DNA, 21 bp, Artificial Sequence
  primer
aaggaatgtcatgctccttgc

SEQ ID NO: 70745 - DNA, 21 bp, Artificial Sequence
  primer
ctctctcacctcaccatgcag

SEQ ID NO: 70746 - DNA, 40 bp, Artificial Sequence
  primer
gtaaaacgacggccagtttcactatgcttccacactagcc

SEQ ID NO: 70747 - DNA, 19 bp, Artificial Sequence
  primer
gaggtgcacttgtctccgc

SEQ ID NO: 70748 - DNA, 21 bp, Artificial Sequence
  primer
gaggttggaccacaagacacc

SEQ ID NO: 70749 - DNA, 38 bp, Artificial Sequence
  primer
gtaaaacgacggccagtactccagacacactccacacg

SEQ ID NO: 70750 - DNA, 19 bp, Artificial Sequence
  primer
caggtcacgttggagcagg

SEQ ID NO: 70751 - DNA, 18 bp, Artificial Sequence
  primer
agggcaggagtcaggacg

SEQ ID NO: 70752 - DNA, 35 bp, Artificial Sequence
  primer
gtaaaacgacggccagtcctgggatgtgcagggag

SEQ ID NO: 70753 - DNA, 21 bp, Artificial Sequence
  primer
aagatggcatgtgatgtccag

SEQ ID NO: 70754 - DNA, 20 bp, Artificial Sequence
  primer
gaggagcttccatcaccagg

SEQ ID NO: 70755 - DNA, 37 bp, Artificial Sequence
  primer
gtaaaacgacggccagttctctgcaggagacagagcc

SEQ ID NO: 70756 - DNA, 38 bp, Artificial Sequence
  primer
gtaaaacgacggccagtggcagctgaagtcacagacac

SEQ ID NO: 70757 - DNA, 20 bp, Artificial Sequence
  primer
agggtggtgtcagtgtgagc

SEQ ID NO: 70758 - DNA, 21 bp, Artificial Sequence
  primer
acaatacacacgtccacaggg

SEQ ID NO: 70759 - DNA, 21 bp, Artificial Sequence
  primer
ctcgaaagttccagaagccag

SEQ ID NO: 70760 - DNA, 20 bp, Artificial Sequence
  primer
gcaggtgaggagaagcacag

SEQ ID NO: 70761 - DNA, 20 bp, Artificial Sequence
  primer
atgggaaacctctgtggctc

SEQ ID NO: 70762 - DNA, 21 bp, Artificial Sequence
  primer
gactccatctgacccacagac

SEQ ID NO: 70763 - DNA, 20 bp, Artificial Sequence
  primer
ctgcaaggagagggaggttg

SEQ ID NO: 70764 - DNA, 38 bp, Artificial Sequence
  primer
gtaaaacgacggccagtgttgtagcaggaagccctctc

SEQ ID NO: 70765 - DNA, 21 bp, Artificial Sequence
  primer
caacgagagagacgggttagg

SEQ ID NO: 70766 - DNA, 20 bp, Artificial Sequence
  primer
ggagtaggcaaggacttggg

SEQ ID NO: 70767 - DNA, 38 bp, Artificial Sequence
  primer
gtaaaacgacggccagtccaaagtccataaatcgcacg

SEQ ID NO: 70768 - DNA, 21 bp, Artificial Sequence
  primer
gggagctgttagggtttcctg

SEQ ID NO: 70769 - DNA, 38 bp, Artificial Sequence
  primer
gtaaaacgacggccagtccaactcaaagcctgatggtg

SEQ ID NO: 70770 - DNA, 19 bp, Artificial Sequence
  primer
caggagcaggtgctcagga

SEQ ID NO: 70771 - DNA, 37 bp, Artificial Sequence
  primer
gtaaaacgacggccagtggcaaagccacctcgtacac

SEQ ID NO: 70772 - DNA, 20 bp, Artificial Sequence
  primer
ggtcctggatggaggaagac

SEQ ID NO: 70773 - DNA, 21 bp, Artificial Sequence
  primer
tgctacctggaacctgtaccc

SEQ ID NO: 70774 - DNA, 19 bp, Artificial Sequence
  primer
ccaggaacacgacctccag

SEQ ID NO: 70775 - DNA, 36 bp, Artificial Sequence
  primer
gtaaaacgacggccagtagtgggctctgtccaccac

SEQ ID NO: 70776 - DNA, 21 bp, Artificial Sequence
  primer
gacagtaccttgcgggatttc

SEQ ID NO: 70777 - DNA, 21 bp, Artificial Sequence
  primer
gacacaggcacacataggcag

SEQ ID NO: 70778 - DNA, 20 bp, Artificial Sequence
  primer
agataggcaggtgagggtgg

SEQ ID NO: 70779 - DNA, 20 bp, Artificial Sequence
  primer
gaccgggaggtgagagagag

SEQ ID NO: 70780 - DNA, 21 bp, Artificial Sequence
  primer
cacaagtgactggacacagcc

SEQ ID NO: 70781 - DNA, 19 bp, Artificial Sequence
  primer
cagtgatgctgatgggcac

SEQ ID NO: 70782 - DNA, 20 bp, Artificial Sequence
  primer
atccctcggcactaggtctg

SEQ ID NO: 70783 - DNA, 21 bp, Artificial Sequence
  primer
gggagaaagagggtttatgcc

SEQ ID NO: 70784 - DNA, 21 bp, Artificial Sequence
  primer
gggatcttacctgtcccaacc

SEQ ID NO: 70785 - DNA, 21 bp, Artificial Sequence
  primer
ggccacgtttgaaataaccac

SEQ ID NO: 70786 - DNA, 38 bp, Artificial Sequence
  primer
gtaaaacgacggccagtaggtgcagttcttgtccttcc

SEQ ID NO: 70787 - DNA, 38 bp, Artificial Sequence
  primer
gtaaaacgacggccagttggaagtggacgtaggtgttg

SEQ ID NO: 70788 - DNA, 38 bp, Artificial Sequence
  primer
gtaaaacgacggccagtagggtggtcaccaggtatgtc

SEQ ID NO: 70789 - DNA, 18 bp, Artificial Sequence
  primer
gcacccaaggctcagctc

SEQ ID NO: 70790 - DNA, 21 bp, Artificial Sequence
  primer
acccatagcctcctctgtgtc

SEQ ID NO: 70791 - DNA, 38 bp, Artificial Sequence
  primer
gtaaaacgacggccagtgttatctgctgctggcctttg

SEQ ID NO: 70792 - DNA, 38 bp, Artificial Sequence
  primer
gtaaaacgacggccagtggaggtggtcatagtttgctg

SEQ ID NO: 70793 - DNA, 19 bp, Artificial Sequence
  primer
catgatctgcccaccttgg

SEQ ID NO: 70794 - DNA, 26 bp, Artificial Sequence
  primer
aatgaatttccatttactggctttac

SEQ ID NO: 70795 - DNA, 21 bp, Artificial Sequence
  primer
caaggctgtgaaatacatggc

SEQ ID NO: 70796 - DNA, 44 bp, Artificial Sequence
  primer
gtaaaacgacggccagttgagtagttacaaggtgagagaatcac

SEQ ID NO: 70797 - DNA, 39 bp, Artificial Sequence
  primer
gtaaaacgacggccagtttgttgtggttggagtcaagag

SEQ ID NO: 70798 - DNA, 41 bp, Artificial Sequence
  primer
gtaaaacgacggccagttggagacaatttaattcaacctgc

SEQ ID NO: 70799 - DNA, 26 bp, Artificial Sequence
  primer
agaaataagaaatcaatgtgcttgac

SEQ ID NO: 70800 - DNA, 40 bp, Artificial Sequence
  primer
gtaaaacgacggccagtacgtttctgagtatttgcacact

SEQ ID NO: 70801 - DNA, 38 bp, Artificial Sequence
  primer
gtaaaacgacggccagtcaacacatcccacaccatttc

SEQ ID NO: 70802 - DNA, 26 bp, Artificial Sequence
  primer
tggatttaaaccaatatcatctaccc

SEQ ID NO: 70803 - DNA, 21 bp, Artificial Sequence
  primer
ctgcagctcaggatattgaca

SEQ ID NO: 70804 - DNA, 38 bp, Artificial Sequence
  primer
gtaaaacgacggccagtgtccatcaggtacttcaaccg

SEQ ID NO: 70805 - DNA, 23 bp, Artificial Sequence
  primer
tgcctcatatcttgacaatagcc

SEQ ID NO: 70806 - DNA, 42 bp, Artificial Sequence
  primer
gtaaaacgacggccagtttaccattaccattacatcccaaag

SEQ ID NO: 70807 - DNA, 19 bp, Artificial Sequence
  primer
acctggtcgcattccactg

SEQ ID NO: 70808 - DNA, 23 bp, Artificial Sequence
  primer
gcttgacctatttcaaatgttgc

SEQ ID NO: 70809 - DNA, 38 bp, Artificial Sequence
  primer
gtaaaacgacggccagtcacagcctggacctaagtttg

SEQ ID NO: 70810 - DNA, 38 bp, Artificial Sequence
  primer
gtaaaacgacggccagtgcccaagtcttctgatgtctg

SEQ ID NO: 70811 - DNA, 26 bp, Artificial Sequence
  primer
tttgttaacctggacattgttatttc

SEQ ID NO: 70812 - DNA, 40 bp, Artificial Sequence
  primer
gtaaaacgacggccagtcctcatgattatcacacaagtgc

SEQ ID NO: 70813 - DNA, 38 bp, Artificial Sequence
  primer
gtaaaacgacggccagttgcaagccaactggtattcac

SEQ ID NO: 70814 - DNA, 26 bp, Artificial Sequence
  primer
gttcagagaagtaaagaaaccaacaa

SEQ ID NO: 70815 - DNA, 22 bp, Artificial Sequence
  primer
tctaaacatgctcttgcctgtc

SEQ ID NO: 70816 - DNA, 39 bp, Artificial Sequence
  primer
gtaaaacgacggccagttcatttctctcaagcttcctgg

SEQ ID NO: 70817 - DNA, 39 bp, Artificial Sequence
  primer
gtaaaacgacggccagttggattatagctggcaaactgg

SEQ ID NO: 70818 - DNA, 37 bp, Artificial Sequence
  primer
gtaaaacgacggccagtatggccgtgtccacaatatc

SEQ ID NO: 70819 - DNA, 37 bp, Artificial Sequence
  primer
gtaaaacgacggccagtcaggcttcttggtggatgag

SEQ ID NO: 70820 - DNA, 38 bp, Artificial Sequence
  primer
gtaaaacgacggccagtatgtggctttgctttgtcttg

SEQ ID NO: 70821 - DNA, 38 bp, Artificial Sequence
  primer
gtaaaacgacggccagtttcaatggttctgacgtctcg

SEQ ID NO: 70822 - DNA, 38 bp, Artificial Sequence
  primer
gtaaaacgacggccagtattaatgacacccatccaggc

SEQ ID NO: 70823 - DNA, 21 bp, Artificial Sequence
  primer
aattctggtgagcctcaaagc

SEQ ID NO: 70824 - DNA, 21 bp, Artificial Sequence
  primer
tctgtaccttcccttcctccc

SEQ ID NO: 70825 - DNA, 20 bp, Artificial Sequence
  primer
ggaaatcaagacccggagag

SEQ ID NO: 70826 - DNA, 22 bp, Artificial Sequence
  primer
tgaacaggctttagacaatggg

SEQ ID NO: 70827 - DNA, 21 bp, Artificial Sequence
  primer
tgtccagcctagtacagagcg

SEQ ID NO: 70828 - DNA, 21 bp, Artificial Sequence
  primer
taggtccaagagacggaggtc

SEQ ID NO: 70829 - DNA, 38 bp, Artificial Sequence
  primer
gtaaaacgacggccagtttgcagaagaaggtcccaaag

SEQ ID NO: 70830 - DNA, 19 bp, Artificial Sequence
  primer
gcgtaacaccatgacaggc

SEQ ID NO: 70831 - DNA, 38 bp, Artificial Sequence
  primer
gtaaaacgacggccagtagcatgtacagcgtcttcacc

SEQ ID NO: 70832 - DNA, 19 bp, Artificial Sequence
  primer
actgctgctgtgggaggtg

SEQ ID NO: 70833 - DNA, 21 bp, Artificial Sequence
  primer
ggatgtgcataggacaaggag

SEQ ID NO: 70834 - DNA, 38 bp, Artificial Sequence
  primer
gtaaaacgacggccagtttgatctcgtccatgatctgc

SEQ ID NO: 70835 - DNA, 20 bp, Artificial Sequence
  primer
agcttcaaacagagggaggc

SEQ ID NO: 70836 - DNA, 38 bp, Artificial Sequence
  primer
gtaaaacgacggccagtgctcaccagatgctaggatgg

SEQ ID NO: 70837 - DNA, 37 bp, Artificial Sequence
  primer
gtaaaacgacggccagtagaaggaccagagggaccag

SEQ ID NO: 70838 - DNA, 21 bp, Artificial Sequence
  primer
aaggagtgagtgtttccctgg

SEQ ID NO: 70839 - DNA, 21 bp, Artificial Sequence
  primer
tggtcactccttgctgtgaag

SEQ ID NO: 70840 - DNA, 21 bp, Artificial Sequence
  primer
gttcttgaggcatgaaggtgg

SEQ ID NO: 70841 - DNA, 20 bp, Artificial Sequence
  primer
acacagcaatggaagggttg

SEQ ID NO: 70842 - DNA, 37 bp, Artificial Sequence
  primer
gtaaaacgacggccagtgctcctgccgagactaatcc

SEQ ID NO: 70843 - DNA, 38 bp, Artificial Sequence
  primer
gtaaaacgacggccagtcgacaggatacgctttactgg

SEQ ID NO: 70844 - DNA, 21 bp, Artificial Sequence
  primer
aagtggactgtttccaggagg

SEQ ID NO: 70845 - DNA, 21 bp, Artificial Sequence
  primer
ctcagggtgagaacctgtgtg

SEQ ID NO: 70846 - DNA, 38 bp, Artificial Sequence
  primer
gtaaaacgacggccagttagtttagtggcaagcagggc

SEQ ID NO: 70847 - DNA, 38 bp, Artificial Sequence
  primer
gtaaaacgacggccagtagcagggagtatgtcagccac

SEQ ID NO: 70848 - DNA, 21 bp, Artificial Sequence
  primer
acagatgttcagtgcacaggc

SEQ ID NO: 70849 - DNA, 22 bp, Artificial Sequence
  primer
ccctctcttgtatcaggccaac

SEQ ID NO: 70850 - DNA, 39 bp, Artificial Sequence
  primer
gtaaaacgacggccagtgaaggcctttctaatggtgtcc

SEQ ID NO: 70851 - DNA, 21 bp, Artificial Sequence
  primer
gggatgggtctgcctttattc

SEQ ID NO: 70852 - DNA, 38 bp, Artificial Sequence
  primer
gtaaaacgacggccagtctggtgagaatggaggagagg

SEQ ID NO: 70853 - DNA, 38 bp, Artificial Sequence
  primer
gtaaaacgacggccagtctttctgcctggaacacagag

SEQ ID NO: 70854 - DNA, 22 bp, Artificial Sequence
  primer
ttctctctttcatttgcttggg

SEQ ID NO: 70855 - DNA, 24 bp, Artificial Sequence
  primer
tcttatccaatactttcagcaccc

SEQ ID NO: 70856 - DNA, 21 bp, Artificial Sequence
  primer
ggatggcaaggataatgttgg

SEQ ID NO: 70857 - DNA, 38 bp, Artificial Sequence
  primer
gtaaaacgacggccagttgcaaccagcattaggacatc

SEQ ID NO: 70858 - DNA, 38 bp, Artificial Sequence
  primer
gtaaaacgacggccagtgagagctgcaggctttctctg

SEQ ID NO: 70859 - DNA, 37 bp, Artificial Sequence
  primer
gtaaaacgacggccagtctagccggctttctctctcc

SEQ ID NO: 70860 - DNA, 37 bp, Artificial Sequence
  primer
gtaaaacgacggccagtccactcagcaaaggaactgc

SEQ ID NO: 70861 - DNA, 21 bp, Artificial Sequence
  primer
gaaccagaaaggctaggtccc

SEQ ID NO: 70862 - DNA, 38 bp, Artificial Sequence
  primer
gtaaaacgacggccagttgtcctctttcacatgcgttc

SEQ ID NO: 70863 - DNA, 38 bp, Artificial Sequence
  primer
gtaaaacgacggccagtctagatgaaagcattggctgg

SEQ ID NO: 70864 - DNA, 40 bp, Artificial Sequence
  primer
gtaaaacgacggccagtccatctcttcagtgaatcccaac

SEQ ID NO: 70865 - DNA, 38 bp, Artificial Sequence
  primer
gtaaaacgacggccagtcaggtgtggctatttaccagc

SEQ ID NO: 70866 - DNA, 21 bp, Artificial Sequence
  primer
tggttagccggcaatactgag

SEQ ID NO: 70867 - DNA, 38 bp, Artificial Sequence
  primer
gtaaaacgacggccagtcatgttgcccagcctataaac

SEQ ID NO: 70868 - DNA, 21 bp, Artificial Sequence
  primer
gatgggaggaagtcaagcaag

SEQ ID NO: 70869 - DNA, 21 bp, Artificial Sequence
  primer
gactagaccagggtttgaggg

SEQ ID NO: 70870 - DNA, 22 bp, Artificial Sequence
  primer
aatgatgtgacacttgctgtgg

SEQ ID NO: 70871 - DNA, 41 bp, Artificial Sequence
  primer
gtaaaacgacggccagttgacatggtttgattatcacttgg

SEQ ID NO: 70872 - DNA, 20 bp, Artificial Sequence
  primer
gacttgtagtccacggccac

SEQ ID NO: 70873 - DNA, 38 bp, Artificial Sequence
  primer
gtaaaacgacggccagtcacagtcgtcttcttccctgg

SEQ ID NO: 70874 - DNA, 21 bp, Artificial Sequence
  primer
acaaagcagctctttcctgtg

SEQ ID NO: 70875 - DNA, 21 bp, Artificial Sequence
  primer
atcctcccatcttccagatcc

SEQ ID NO: 70876 - DNA, 21 bp, Artificial Sequence
  primer
tgtccctaatctcagccttcc

SEQ ID NO: 70877 - DNA, 20 bp, Artificial Sequence
  primer
ctgtgggtcatctacggtgg

SEQ ID NO: 70878 - DNA, 21 bp, Artificial Sequence
  primer
aagaccgtgggagattgtcag

SEQ ID NO: 70879 - DNA, 38 bp, Artificial Sequence
  primer
gtaaaacgacggccagtctctgatgctaggccctcttc

SEQ ID NO: 70880 - DNA, 22 bp, Artificial Sequence
  primer
ttataaactctggcaagccctg

SEQ ID NO: 70881 - DNA, 21 bp, Artificial Sequence
  primer
tgccattagctcttagggagg

SEQ ID NO: 70882 - DNA, 38 bp, Artificial Sequence
  primer
gtaaaacgacggccagtagtcccaaactagccagagcc

SEQ ID NO: 70883 - DNA, 37 bp, Artificial Sequence
  primer
gtaaaacgacggccagtcactgcccagccactaacag

SEQ ID NO: 70884 - DNA, 42 bp, Artificial Sequence
  primer
gtaaaacgacggccagttcttcccagtacactttcaagtcag

SEQ ID NO: 70885 - DNA, 21 bp, Artificial Sequence
  primer
atttggaggttggcgagttag

SEQ ID NO: 70886 - DNA, 21 bp, Artificial Sequence
  primer
tccactttcttcctgttgagg

SEQ ID NO: 70887 - DNA, 22 bp, Artificial Sequence
  primer
tgagccatgtgttcagctagtc

SEQ ID NO: 70888 - DNA, 23 bp, Artificial Sequence
  primer
tcactcaatggagtaaatgggag

SEQ ID NO: 70889 - DNA, 21 bp, Artificial Sequence
  primer
tcctcttcaggctgtggaaac

SEQ ID NO: 70890 - DNA, 38 bp, Artificial Sequence
  primer
gtaaaacgacggccagtacagcacaagcctcctttacc

SEQ ID NO: 70891 - DNA, 21 bp, Artificial Sequence
  primer
gcagtcctagccttctcttcc

SEQ ID NO: 70892 - DNA, 21 bp, Artificial Sequence
  primer
gaagacatgcataaccgctcc

SEQ ID NO: 70893 - DNA, 21 bp, Artificial Sequence
  primer
tgagaacgtactcgctcccac

SEQ ID NO: 70894 - DNA, 22 bp, Artificial Sequence
  primer
gcctaatatttgtttccctccc

SEQ ID NO: 70895 - DNA, 38 bp, Artificial Sequence
  primer
gtaaaacgacggccagtactaaagggcagcacacatcc

SEQ ID NO: 70896 - DNA, 21 bp, Artificial Sequence
  primer
taaatccaatgcctttcatgg

SEQ ID NO: 70897 - DNA, 40 bp, Artificial Sequence
  primer
gtaaaacgacggccagttgatctttatgtcagaagcaggc

SEQ ID NO: 70898 - DNA, 21 bp, Artificial Sequence
  primer
agcaagttcctgtgtggtctg

SEQ ID NO: 70899 - DNA, 18 bp, Artificial Sequence
  primer
aaggcgtgggtggagaag

SEQ ID NO: 70900 - DNA, 37 bp, Artificial Sequence
  primer
gtaaaacgacggccagtgtcaatcagctgcaccactg

SEQ ID NO: 70901 - DNA, 36 bp, Artificial Sequence
  primer
gtaaaacgacggccagtctcctcagggctacggatg

SEQ ID NO: 70902 - DNA, 20 bp, Artificial Sequence
  primer
agggaggccagctcactaag

SEQ ID NO: 70903 - DNA, 37 bp, Artificial Sequence
  primer
gtaaaacgacggccagtgatcagcaagaggttgcagg

SEQ ID NO: 70904 - DNA, 19 bp, Artificial Sequence
  primer
ggtgagcacaagtccaggc

SEQ ID NO: 70905 - DNA, 38 bp, Artificial Sequence
  primer
gtaaaacgacggccagtttgtatgtggtcttgttccgc

SEQ ID NO: 70906 - DNA, 38 bp, Artificial Sequence
  primer
gtaaaacgacggccagtcagcagcaggttcttaggagg

SEQ ID NO: 70907 - DNA, 20 bp, Artificial Sequence
  primer
gtctgagtactcggccttgc

SEQ ID NO: 70908 - DNA, 38 bp, Artificial Sequence
  primer
gtaaaacgacggccagtaagtcactgaaggagcatcgg

SEQ ID NO: 70909 - DNA, 18 bp, Artificial Sequence
  primer
cactcagcacctgcctcc

SEQ ID NO: 70910 - DNA, 21 bp, Artificial Sequence
  primer
caaagtccaagagatcggagg

SEQ ID NO: 70911 - DNA, 38 bp, Artificial Sequence
  primer
gtaaaacgacggccagtgtctgaagcggctggagttag

SEQ ID NO: 70912 - DNA, 38 bp, Artificial Sequence
  primer
gtaaaacgacggccagtgcctgtaaagggcttagttgg

SEQ ID NO: 70913 - DNA, 21 bp, Artificial Sequence
  primer
gtgcccttgggtaccatgtag

SEQ ID NO: 70914 - DNA, 41 bp, Artificial Sequence
  primer
gtaaaacgacggccagttgggattgtagagctgactaaagg

SEQ ID NO: 70915 - DNA, 38 bp, Artificial Sequence
  primer
gtaaaacgacggccagtagatgatgcctcgttccagtc

SEQ ID NO: 70916 - DNA, 38 bp, Artificial Sequence
  primer
gtaaaacgacggccagtgtcctggaacagtgggttgac

SEQ ID NO: 70917 - DNA, 19 bp, Artificial Sequence
  primer
agtcgcagtggaagccttg

SEQ ID NO: 70918 - DNA, 38 bp, Artificial Sequence
  primer
gtaaaacgacggccagttacccaccttgccttcatagg

SEQ ID NO: 70919 - DNA, 38 bp, Artificial Sequence
  primer
gtaaaacgacggccagtcatttccagtggctccttgtc

SEQ ID NO: 70920 - DNA, 39 bp, Artificial Sequence
  primer
gtaaaacgacggccagttccttgcctaagctctgatgtc

SEQ ID NO: 70921 - DNA, 38 bp, Artificial Sequence
  primer
gtaaaacgacggccagtttgtccatctgagtcccaaac

SEQ ID NO: 70922 - DNA, 39 bp, Artificial Sequence
  primer
gtaaaacgacggccagttcttcctgtaggacagcactca

SEQ ID NO: 70923 - DNA, 21 bp, Artificial Sequence
  primer
atgaaggaaagccaccaaatc

SEQ ID NO: 70924 - DNA, 21 bp, Artificial Sequence
  primer
gcttgcatcaattcttcatcc

SEQ ID NO: 70925 - DNA, 21 bp, Artificial Sequence
  primer
ggatctggctcagcctcttac

SEQ ID NO: 70926 - DNA, 27 bp, Artificial Sequence
  primer
cagagaagactcaagtgatacaaactc

SEQ ID NO: 70927 - DNA, 23 bp, Artificial Sequence
  primer
actgactttcaactaccaatggc

SEQ ID NO: 70928 - DNA, 21 bp, Artificial Sequence
  primer
cgtctcacttgattccacagc

SEQ ID NO: 70929 - DNA, 38 bp, Artificial Sequence
  primer
gtaaaacgacggccagtactgatttgggagaaagcagc

SEQ ID NO: 70930 - DNA, 23 bp, Artificial Sequence
  primer
tcaactcctgctttaaatcaacc

SEQ ID NO: 70931 - DNA, 45 bp, Artificial Sequence
  primer
gtaaaacgacggccagtaagctagatatcctaggagttattggag

SEQ ID NO: 70932 - DNA, 24 bp, Artificial Sequence
  primer
ttctttgtttgaagaaatccgttt

SEQ ID NO: 70933 - DNA, 39 bp, Artificial Sequence
  primer
gtaaaacgacggccagttttatgacagtcccttcttggg

SEQ ID NO: 70934 - DNA, 22 bp, Artificial Sequence
  primer
gcgcaatcatcagtacataacc

SEQ ID NO: 70935 - DNA, 41 bp, Artificial Sequence
  primer
gtaaaacgacggccagttcgttatatcatcagtcagccatc

SEQ ID NO: 70936 - DNA, 39 bp, Artificial Sequence
  primer
gtaaaacgacggccagtgatactgccagatgttccttgg

SEQ ID NO: 70937 - DNA, 27 bp, Artificial Sequence
  primer
acaagtttagactgtagctgagttcct

SEQ ID NO: 70938 - DNA, 40 bp, Artificial Sequence
  primer
gtaaaacgacggccagtttccagacagattcctggtttag

SEQ ID NO: 70939 - DNA, 23 bp, Artificial Sequence
  primer
cctaaattcaggttgtctgttgc

SEQ ID NO: 70940 - DNA, 21 bp, Artificial Sequence
  primer
atggtgcattccagttctttg

SEQ ID NO: 70941 - DNA, 41 bp, Artificial Sequence
  primer
gtaaaacgacggccagtccgaccattatgagctttatttct

SEQ ID NO: 70942 - DNA, 21 bp, Artificial Sequence
  primer
tgaacaaatcttgcagggata

SEQ ID NO: 70943 - DNA, 40 bp, Artificial Sequence
  primer
gtaaaacgacggccagttcagaatggagcagcttctaatg

SEQ ID NO: 70944 - DNA, 20 bp, Artificial Sequence
  primer
ctctgggcctcctcagtttc

SEQ ID NO: 70945 - DNA, 19 bp, Artificial Sequence
  primer
agctgagattgtgccacgg

SEQ ID NO: 70946 - DNA, 21 bp, Artificial Sequence
  primer
atcccaaatgggacttgtcag

SEQ ID NO: 70947 - DNA, 20 bp, Artificial Sequence
  primer
aactgaactcaaaggccacg

SEQ ID NO: 70948 - DNA, 20 bp, Artificial Sequence
  primer
gacagccactcacccacttc

SEQ ID NO: 70949 - DNA, 37 bp, Artificial Sequence
  primer
gtaaaacgacggccagtaaagaaacagggtggccaag

SEQ ID NO: 70950 - DNA, 21 bp, Artificial Sequence
  primer
tcctgagccatatccttccac

SEQ ID NO: 70951 - DNA, 38 bp, Artificial Sequence
  primer
gtaaaacgacggccagtgctataaacatgcatgctccg

SEQ ID NO: 70952 - DNA, 21 bp, Artificial Sequence
  primer
tccaagtcctctgtctcccag

SEQ ID NO: 70953 - DNA, 38 bp, Artificial Sequence
  primer
gtaaaacgacggccagtatctggctttgccactgaaat

SEQ ID NO: 70954 - DNA, 41 bp, Artificial Sequence
  primer
gtaaaacgacggccagttgagcaaatcctaagtaaacaggg

SEQ ID NO: 70955 - DNA, 21 bp, Artificial Sequence
  primer
tacaaatggccaactgtgtcc

SEQ ID NO: 70956 - DNA, 38 bp, Artificial Sequence
  primer
gtaaaacgacggccagtctgtggcctatgattgcagac

SEQ ID NO: 70957 - DNA, 22 bp, Artificial Sequence
  primer
tgcctgatttgggaatagttct

SEQ ID NO: 70958 - DNA, 26 bp, Artificial Sequence
  primer
cactggaagaatgtacgataatagcc

SEQ ID NO: 70959 - DNA, 41 bp, Artificial Sequence
  primer
gtaaaacgacggccagtttctacatggcaggtgtagacaag

SEQ ID NO: 70960 - DNA, 39 bp, Artificial Sequence
  primer
gtaaaacgacggccagtctcaatgtctctcacctgtgct

SEQ ID NO: 70961 - DNA, 38 bp, Artificial Sequence
  primer
gtaaaacgacggccagttgccaatttctgcattcattc

SEQ ID NO: 70962 - DNA, 21 bp, Artificial Sequence
  primer
agtatcatttcccatcggtgc

SEQ ID NO: 70963 - DNA, 21 bp, Artificial Sequence
  primer
tgagttcagagccaaggactg

SEQ ID NO: 70964 - DNA, 21 bp, Artificial Sequence
  primer
attgttgtgggtcttgctgtg

SEQ ID NO: 70965 - DNA, 21 bp, Artificial Sequence
  primer
ttgtactgcatctgacccacg

SEQ ID NO: 70966 - DNA, 40 bp, Artificial Sequence
  primer
gtaaaacgacggccagttccatgaatgctgtagataaccg

SEQ ID NO: 70967 - DNA, 36 bp, Artificial Sequence
  primer
gtaaaacgacggccagtgcatcaatgcctccatgtg

SEQ ID NO: 70968 - DNA, 18 bp, Artificial Sequence
  primer
cgctcgccctgttcctaa

SEQ ID NO: 70969 - DNA, 21 bp, Artificial Sequence
  primer
ccaccagacacacttcacctg

SEQ ID NO: 70970 - DNA, 21 bp, Artificial Sequence
  primer
atgcgtgacacggagtatgac

SEQ ID NO: 70971 - DNA, 39 bp, Artificial Sequence
  primer
gtaaaacgacggccagttcaaaccttgacgacaacaaac

SEQ ID NO: 70972 - DNA, 21 bp, Artificial Sequence
  primer
gaagaaaggtgagatttggcg

SEQ ID NO: 70973 - DNA, 38 bp, Artificial Sequence
  primer
gtaaaacgacggccagtccatcacagggtacacagagc

SEQ ID NO: 70974 - DNA, 38 bp, Artificial Sequence
  primer
gtaaaacgacggccagtaaagacagagaggaaggcgtg

SEQ ID NO: 70975 - DNA, 38 bp, Artificial Sequence
  primer
gtaaaacgacggccagttaatcgctgctgcctatgttg

SEQ ID NO: 70976 - DNA, 20 bp, Artificial Sequence
  primer
ccatggaatacgccaacatc

SEQ ID NO: 70977 - DNA, 38 bp, Artificial Sequence
  primer
gtaaaacgacggccagtgacacacgtgacttccagtcc

SEQ ID NO: 70978 - DNA, 38 bp, Artificial Sequence
  primer
gtaaaacgacggccagtcacccagagtccttctccatc

SEQ ID NO: 70979 - DNA, 21 bp, Artificial Sequence
  primer
agatgtacacctgttgccgag

SEQ ID NO: 70980 - DNA, 38 bp, Artificial Sequence
  primer
gtaaaacgacggccagtcacagatctgagcttggatgg

SEQ ID NO: 70981 - DNA, 38 bp, Artificial Sequence
  primer
gtaaaacgacggccagtctgcaaagcgtgtgtcttagg

SEQ ID NO: 70982 - DNA, 19 bp, Artificial Sequence
  primer
catctccggacagggctac

SEQ ID NO: 70983 - DNA, 21 bp, Artificial Sequence
  primer
caacatctgccttctcccttc

SEQ ID NO: 70984 - DNA, 22 bp, Artificial Sequence
  primer
ttatctgcaggctagggttctg

SEQ ID NO: 70985 - DNA, 21 bp, Artificial Sequence
  primer
tacccatttgccaaagaaagg

SEQ ID NO: 70986 - DNA, 21 bp, Artificial Sequence
  primer
tgaatgaatgcatattgcagg

SEQ ID NO: 70987 - DNA, 19 bp, Artificial Sequence
  primer
gatgaaggcctcatggctc

SEQ ID NO: 70988 - DNA, 38 bp, Artificial Sequence
  primer
gtaaaacgacggccagtgcccttcatacggagtctacc

SEQ ID NO: 70989 - DNA, 21 bp, Artificial Sequence
  primer
ggaggttaaggctgcagtttg

SEQ ID NO: 70990 - DNA, 21 bp, Artificial Sequence
  primer
gacgatgcaatcctgtgagtc

SEQ ID NO: 70991 - DNA, 21 bp, Artificial Sequence
  primer
ctcagttctccatcaacacgg

SEQ ID NO: 70992 - DNA, 39 bp, Artificial Sequence
  primer
gtaaaacgacggccagttcagacttctgtcaccaccatc

SEQ ID NO: 70993 - DNA, 21 bp, Artificial Sequence
  primer
tgtttgccctagagtaggcac

SEQ ID NO: 70994 - DNA, 23 bp, Artificial Sequence
  primer
tcgatggaaggtcaggttaatac

SEQ ID NO: 70995 - DNA, 21 bp, Artificial Sequence
  primer
cagaatgtctcctctcctgcc

SEQ ID NO: 70996 - DNA, 20 bp, Artificial Sequence
  primer
tttagaaactgcaccctggc

SEQ ID NO: 70997 - DNA, 20 bp, Artificial Sequence
  primer
tttcctcaccgacaaagctg

SEQ ID NO: 70998 - DNA, 38 bp, Artificial Sequence
  primer
gtaaaacgacggccagtttccaaacaaccctctccttg

SEQ ID NO: 70999 - DNA, 21 bp, Artificial Sequence
  primer
tccagtgggtgagatgatttg

SEQ ID NO: 71000 - DNA, 38 bp, Artificial Sequence
  primer
gtaaaacgacggccagtagcacaggagagcaaatgtcc

SEQ ID NO: 71001 - DNA, 18 bp, Artificial Sequence
  primer
atgtgacacttgcgtggc

SEQ ID NO: 71002 - DNA, 22 bp, Artificial Sequence
  primer
tctgaaacagaaagaattgggc

SEQ ID NO: 71003 - DNA, 37 bp, Artificial Sequence
  primer
gtaaaacgacggccagtataccatcagcaggtggctc

SEQ ID NO: 71004 - DNA, 38 bp, Artificial Sequence
  primer
gtaaaacgacggccagttaactcattcattccgcatcg

SEQ ID NO: 71005 - DNA, 38 bp, Artificial Sequence
  primer
gtaaaacgacggccagtgagggctctgaatggtgaaac

SEQ ID NO: 71006 - DNA, 21 bp, Artificial Sequence
  primer
gccagacctgtgttccttctc

SEQ ID NO: 71007 - DNA, 21 bp, Artificial Sequence
  primer
ccttgttgatctcatccagcc

SEQ ID NO: 71008 - DNA, 38 bp, Artificial Sequence
  primer
gtaaaacgacggccagtcctttgaagccttccagtttg

SEQ ID NO: 71009 - DNA, 38 bp, Artificial Sequence
  primer
gtaaaacgacggccagtgagggcaataaaggcaggttc

SEQ ID NO: 71010 - DNA, 37 bp, Artificial Sequence
  primer
gtaaaacgacggccagttctctcctctcccacttccg

SEQ ID NO: 71011 - DNA, 37 bp, Artificial Sequence
  primer
gtaaaacgacggccagtagcctgtggacaagggtagg

SEQ ID NO: 71012 - DNA, 21 bp, Artificial Sequence
  primer
tccctcaagacctgtctctcc

SEQ ID NO: 71013 - DNA, 39 bp, Artificial Sequence
  primer
gtaaaacgacggccagttgtagaaatgttgagcctgtgg

SEQ ID NO: 71014 - DNA, 18 bp, Artificial Sequence
  primer
gcgcatccacacacacac

SEQ ID NO: 71015 - DNA, 22 bp, Artificial Sequence
  primer
ggtactgacagctccagcaaac

SEQ ID NO: 71016 - DNA, 41 bp, Artificial Sequence
  primer
gtaaaacgacggccagttttaggcaaattctatggaaggtc

SEQ ID NO: 71017 - DNA, 39 bp, Artificial Sequence
  primer
gtaaaacgacggccagtgcacacagcgtgaatctgttag

SEQ ID NO: 71018 - DNA, 22 bp, Artificial Sequence
  primer
ttcaggtaactgtcagcagctc

SEQ ID NO: 71019 - DNA, 37 bp, Artificial Sequence
  primer
gtaaaacgacggccagtgatgccaccaagttcctttg

SEQ ID NO: 71020 - DNA, 18 bp, Artificial Sequence
  primer
gtgcccttggtgactggg

SEQ ID NO: 71021 - DNA, 38 bp, Artificial Sequence
  primer
gtaaaacgacggccagttcttccacaatgcagataccc

SEQ ID NO: 71022 - DNA, 21 bp, Artificial Sequence
  primer
aggttgctccatttctttggc

SEQ ID NO: 71023 - DNA, 21 bp, Artificial Sequence
  primer
gccgttggaggtaaatctttg

SEQ ID NO: 71024 - DNA, 38 bp, Artificial Sequence
  primer
gtaaaacgacggccagtggatggacactcacttcccac

SEQ ID NO: 71025 - DNA, 21 bp, Artificial Sequence
  primer
ggagtggctaagtgatttccg

SEQ ID NO: 71026 - DNA, 38 bp, Artificial Sequence
  primer
gtaaaacgacggccagttggtcttcgtgaataggaggc

SEQ ID NO: 71027 - DNA, 38 bp, Artificial Sequence
  primer
gtaaaacgacggccagtttaatgccaccatttgtgacg

SEQ ID NO: 71028 - DNA, 21 bp, Artificial Sequence
  primer
gcaagtgtaggttgcttcgtg

SEQ ID NO: 71029 - DNA, 21 bp, Artificial Sequence
  primer
gctcatcatccttctcttccc

SEQ ID NO: 71030 - DNA, 21 bp, Artificial Sequence
  primer
cttctcagagacgtcgggttc

SEQ ID NO: 71031 - DNA, 40 bp, Artificial Sequence
  primer
gtaaaacgacggccagtaccacgagtagtatttcctgtgc

SEQ ID NO: 71032 - DNA, 39 bp, Artificial Sequence
  primer
gtaaaacgacggccagtgcaccaaatatgtttcccaatc

SEQ ID NO: 71033 - DNA, 25 bp, Artificial Sequence
  primer
cagatgaatcataacataggtgcaa

SEQ ID NO: 71034 - DNA, 23 bp, Artificial Sequence
  primer
tttattgcttcaaagtcacaccc

SEQ ID NO: 71035 - DNA, 21 bp, Artificial Sequence
  primer
tcctttggctgcatttatgtg

SEQ ID NO: 71036 - DNA, 21 bp, Artificial Sequence
  primer
acccagcctcaaactgctttc

SEQ ID NO: 71037 - DNA, 24 bp, Artificial Sequence
  primer
tcccaatacatcaatactggaacc

SEQ ID NO: 71038 - DNA, 43 bp, Artificial Sequence
  primer
gtaaaacgacggccagtttgaatgcctactctgtgatagactc

SEQ ID NO: 71039 - DNA, 19 bp, Artificial Sequence
  primer
tgggccagtgaaagaatcc

SEQ ID NO: 71040 - DNA, 21 bp, Artificial Sequence
  primer
atagacacaagccaccacacc

SEQ ID NO: 71041 - DNA, 21 bp, Artificial Sequence
  primer
caagcacctaacaggcatcac

SEQ ID NO: 71042 - DNA, 38 bp, Artificial Sequence
  primer
gtaaaacgacggccagtcaggttctaccggctggttac

SEQ ID NO: 71043 - DNA, 39 bp, Artificial Sequence
  primer
gtaaaacgacggccagttcaaatgatccttctacctcgg

SEQ ID NO: 71044 - DNA, 24 bp, Artificial Sequence
  primer
gggtgaggccagttataaactttg

SEQ ID NO: 71045 - DNA, 24 bp, Artificial Sequence
  primer
tctgaaagtactccaggaattgtg

SEQ ID NO: 71046 - DNA, 20 bp, Artificial Sequence
  primer
cagcagctggcacacagtag

SEQ ID NO: 71047 - DNA, 21 bp, Artificial Sequence
  primer
tccagtctggtcttccatcag

SEQ ID NO: 71048 - DNA, 21 bp, Artificial Sequence
  primer
aaagctcagtcctggccatag

SEQ ID NO: 71049 - DNA, 21 bp, Artificial Sequence
  primer
acactggcctcacagtcacag

SEQ ID NO: 71050 - DNA, 19 bp, Artificial Sequence
  primer
ccagacctgtgctccttgg

SEQ ID NO: 71051 - DNA, 21 bp, Artificial Sequence
  primer
ctgctttgcagggtgagttag

SEQ ID NO: 71052 - DNA, 38 bp, Artificial Sequence
  primer
gtaaaacgacggccagtacgatggagcagaaagacctc

SEQ ID NO: 71053 - DNA, 37 bp, Artificial Sequence
  primer
gtaaaacgacggccagtagggatgccatgaaaggaaa

SEQ ID NO: 71054 - DNA, 37 bp, Artificial Sequence
  primer
gtaaaacgacggccagtgccttgcttcccttatttgc

SEQ ID NO: 71055 - DNA, 38 bp, Artificial Sequence
  primer
gtaaaacgacggccagtatgttcagcgggacattaacc

SEQ ID NO: 71056 - DNA, 21 bp, Artificial Sequence
  primer
tttctgataatgttcagcggg

SEQ ID NO: 71057 - DNA, 20 bp, Artificial Sequence
  primer
cctgttcaatggctccagtc

SEQ ID NO: 71058 - DNA, 38 bp, Artificial Sequence
  primer
gtaaaacgacggccagtagagaggagcctgtgaactgc

SEQ ID NO: 71059 - DNA, 19 bp, Artificial Sequence
  primer
tctgcatgtgagcggtagg

SEQ ID NO: 71060 - DNA, 21 bp, Artificial Sequence
  primer
cagtctagcagagggtggagg

SEQ ID NO: 71061 - DNA, 20 bp, Artificial Sequence
  primer
agacccagggtactgccaag

SEQ ID NO: 71062 - DNA, 21 bp, Artificial Sequence
  primer
caggctgttcctgggagtatg

SEQ ID NO: 71063 - DNA, 38 bp, Artificial Sequence
  primer
gtaaaacgacggccagtctgccgagtagaggcatttag

SEQ ID NO: 71064 - DNA, 37 bp, Artificial Sequence
  primer
gtaaaacgacggccagtacagaagcatgacgcagcac

SEQ ID NO: 71065 - DNA, 35 bp, Artificial Sequence
  primer
gtaaaacgacggccagtaccctttcattgccctgc

SEQ ID NO: 71066 - DNA, 25 bp, Artificial Sequence
  primer
tctggctacaacttcatcataaacc

SEQ ID NO: 71067 - DNA, 21 bp, Artificial Sequence
  primer
cagcccattagtaacctggtg

SEQ ID NO: 71068 - DNA, 41 bp, Artificial Sequence
  primer
gtaaaacgacggccagtcacgtgaacacacagatgtaagaa

SEQ ID NO: 71069 - DNA, 27 bp, Artificial Sequence
  primer
ctgtattaaggcactatcccactattc

SEQ ID NO: 71070 - DNA, 40 bp, Artificial Sequence
  primer
gtaaaacgacggccagtgctgaaatgccgagttaattctc

SEQ ID NO: 71071 - DNA, 21 bp, Artificial Sequence
  primer
ttagccagctggagaggaaag

SEQ ID NO: 71072 - DNA, 38 bp, Artificial Sequence
  primer
gtaaaacgacggccagtcatatttggaagagcaggcag

SEQ ID NO: 71073 - DNA, 21 bp, Artificial Sequence
  primer
agtccattgaatccagcaaac

SEQ ID NO: 71074 - DNA, 21 bp, Artificial Sequence
  primer
acacattgtcatcatggacgg

SEQ ID NO: 71075 - DNA, 38 bp, Artificial Sequence
  primer
gtaaaacgacggccagtattgctgagccagtgtttgtc

SEQ ID NO: 71076 - DNA, 23 bp, Artificial Sequence
  primer
cttgtgggacagatacaagacaa

SEQ ID NO: 71077 - DNA, 40 bp, Artificial Sequence
  primer
gtaaaacgacggccagtttcagcctcaatatatctcctgg

SEQ ID NO: 71078 - DNA, 38 bp, Artificial Sequence
  primer
gtaaaacgacggccagttcaccatgatgagacttgctg

SEQ ID NO: 71079 - DNA, 23 bp, Artificial Sequence
  primer
gagcaatgtccctattgaatgtg

SEQ ID NO: 71080 - DNA, 38 bp, Artificial Sequence
  primer
gtaaaacgacggccagttgtggccttaccatgtctcac

SEQ ID NO: 71081 - DNA, 43 bp, Artificial Sequence
  primer
gtaaaacgacggccagttccgtgacagtcttctgatatacttg

SEQ ID NO: 71082 - DNA, 19 bp, Artificial Sequence
  primer
gacaccacagtgacggcag

SEQ ID NO: 71083 - DNA, 21 bp, Artificial Sequence
  primer
ggtatgcacggcgatttctac

SEQ ID NO: 71084 - DNA, 23 bp, Artificial Sequence
  primer
tcccagacaggtactctttcctc

SEQ ID NO: 71085 - DNA, 21 bp, Artificial Sequence
  primer
agagggcaaacctacagcaac

SEQ ID NO: 71086 - DNA, 22 bp, Artificial Sequence
  primer
aacattccttaatggagggagc

SEQ ID NO: 71087 - DNA, 20 bp, Artificial Sequence
  primer
caggctgaaagctcctttgg

SEQ ID NO: 71088 - DNA, 20 bp, Artificial Sequence
  primer
gccgtgagacggaacctaag

SEQ ID NO: 71089 - DNA, 21 bp, Artificial Sequence
  primer
tcgtggatctatgcgtgtgac

SEQ ID NO: 71090 - DNA, 21 bp, Artificial Sequence
  primer
cctcagcccatgctaaagttg

SEQ ID NO: 71091 - DNA, 20 bp, Artificial Sequence
  primer
tttgcaaagcttcgcttgag

SEQ ID NO: 71092 - DNA, 38 bp, Artificial Sequence
  primer
gtaaaacgacggccagtcatggcttatgaaccctctcg

SEQ ID NO: 71093 - DNA, 21 bp, Artificial Sequence
  primer
atcttctccagcttcagccac

SEQ ID NO: 71094 - DNA, 37 bp, Artificial Sequence
  primer
gtaaaacgacggccagtaggctatggcaggtgtctcc

SEQ ID NO: 71095 - DNA, 36 bp, Artificial Sequence
  primer
gtaaaacgacggccagtccacgatcctggtcaatcg

SEQ ID NO: 71096 - DNA, 41 bp, Artificial Sequence
  primer
gtaaaacgacggccagtgggaccaacttctaacttgtcatc

SEQ ID NO: 71097 - DNA, 21 bp, Artificial Sequence
  primer
aagacggtcctggaacatcac

SEQ ID NO: 71098 - DNA, 20 bp, Artificial Sequence
  primer
agaggctggtccagtgtgtg

SEQ ID NO: 71099 - DNA, 38 bp, Artificial Sequence
  primer
gtaaaacgacggccagtcttaggcccttggaatgacac

SEQ ID NO: 71100 - DNA, 38 bp, Artificial Sequence
  primer
gtaaaacgacggccagtggcagaaactctggctacctg

SEQ ID NO: 71101 - DNA, 18 bp, Artificial Sequence
  primer
ccagaggcaacgctgttc

SEQ ID NO: 71102 - DNA, 38 bp, Artificial Sequence
  primer
gtaaaacgacggccagtgagctgtaccctgtgggtagg

SEQ ID NO: 71103 - DNA, 38 bp, Artificial Sequence
  primer
gtaaaacgacggccagtccagtgacctgactcagaacc

SEQ ID NO: 71104 - DNA, 38 bp, Artificial Sequence
  primer
gtaaaacgacggccagtagccaggagagctgggtttag

SEQ ID NO: 71105 - DNA, 21 bp, Artificial Sequence
  primer
ctccctctcctcctgtttcag

SEQ ID NO: 71106 - DNA, 38 bp, Artificial Sequence
  primer
gtaaaacgacggccagtagtgtggctgtggagtgtagg

SEQ ID NO: 71107 - DNA, 36 bp, Artificial Sequence
  primer
gtaaaacgacggccagtcacatggtcagtgcgtctg

SEQ ID NO: 71108 - DNA, 20 bp, Artificial Sequence
  primer
ctgagtttccacggctcaag

SEQ ID NO: 71109 - DNA, 21 bp, Artificial Sequence
  primer
tgtttacagccgagcactgac

SEQ ID NO: 71110 - DNA, 21 bp, Artificial Sequence
  primer
tctctgggtacctgaactccc

SEQ ID NO: 71111 - DNA, 38 bp, Artificial Sequence
  primer
gtaaaacgacggccagttttccatcttggatgggagag

SEQ ID NO: 71112 - DNA, 38 bp, Artificial Sequence
  primer
gtaaaacgacggccagttcaggacccacacacagtagg

SEQ ID NO: 71113 - DNA, 21 bp, Artificial Sequence
  primer
gctggagtggaggtctaggag

SEQ ID NO: 71114 - DNA, 36 bp, Artificial Sequence
  primer
gtaaaacgacggccagtagcacatggtcagtgcgtc

SEQ ID NO: 71115 - DNA, 38 bp, Artificial Sequence
  primer
gtaaaacgacggccagtctcccagaatgtctccctgag

SEQ ID NO: 71116 - DNA, 20 bp, Artificial Sequence
  primer
acgcccacccattcataaac

SEQ ID NO: 71117 - DNA, 20 bp, Artificial Sequence
  primer
gttacggtcagctttgcctg

SEQ ID NO: 71118 - DNA, 21 bp, Artificial Sequence
  primer
aactctgacctgcatcacagc

SEQ ID NO: 71119 - DNA, 21 bp, Artificial Sequence
  primer
gagcccaacctaattgacagc

SEQ ID NO: 71120 - DNA, 21 bp, Artificial Sequence
  primer
caactccaactggaagcagag

SEQ ID NO: 71121 - DNA, 21 bp, Artificial Sequence
  primer
gaggaagcttctctttgcctg

SEQ ID NO: 71122 - DNA, 37 bp, Artificial Sequence
  primer
gtaaaacgacggccagtccagggcttctagatctccg

SEQ ID NO: 71123 - DNA, 38 bp, Artificial Sequence
  primer
gtaaaacgacggccagtgcgttggctggtaaatacttg

SEQ ID NO: 71124 - DNA, 38 bp, Artificial Sequence
  primer
gtaaaacgacggccagtagaatgtgtggcccacctaag

SEQ ID NO: 71125 - DNA, 38 bp, Artificial Sequence
  primer
gtaaaacgacggccagtatcccatctcaccacttcagc

SEQ ID NO: 71126 - DNA, 22 bp, Artificial Sequence
  primer
tgacacaggccatgtgatttac

SEQ ID NO: 71127 - DNA, 21 bp, Artificial Sequence
  primer
tttgcctgtcctatcattccc

SEQ ID NO: 71128 - DNA, 38 bp, Artificial Sequence
  primer
gtaaaacgacggccagttccaagtattcctctgagccc

SEQ ID NO: 71129 - DNA, 35 bp, Artificial Sequence
  primer
gtaaaacgacggccagtacaggaggagcggtggag

SEQ ID NO: 71130 - DNA, 40 bp, Artificial Sequence
  primer
gtaaaacgacggccagttccattcggtaagaagttaaggg

SEQ ID NO: 71131 - DNA, 21 bp, Artificial Sequence
  primer
aaatgtcccttccctgacaac

SEQ ID NO: 71132 - DNA, 21 bp, Artificial Sequence
  primer
aacactactctgcctcagccc

SEQ ID NO: 71133 - DNA, 22 bp, Artificial Sequence
  primer
gggcctcttcatgaactctttc

SEQ ID NO: 71134 - DNA, 35 bp, Artificial Sequence
  primer
gtaaaacgacggccagtagcccgaggtctctgtcc

SEQ ID NO: 71135 - DNA, 38 bp, Artificial Sequence
  primer
gtaaaacgacggccagttccttgacgtctgtctgaagc

SEQ ID NO: 71136 - DNA, 42 bp, Artificial Sequence
  primer
gtaaaacgacggccagttcactcaacttatgtctgttagggc

SEQ ID NO: 71137 - DNA, 21 bp, Artificial Sequence
  primer
gtgactgaagcccaacctacc

SEQ ID NO: 71138 - DNA, 38 bp, Artificial Sequence
  primer
gtaaaacgacggccagtatccgaatcatttggcacatc

SEQ ID NO: 71139 - DNA, 37 bp, Artificial Sequence
  primer
gtaaaacgacggccagtcgtgatccaatgacttcagg

SEQ ID NO: 71140 - DNA, 38 bp, Artificial Sequence
  primer
gtaaaacgacggccagtgcttctaagcccagccttctg

SEQ ID NO: 71141 - DNA, 37 bp, Artificial Sequence; identical to SEQ ID NO: 71139
  primer

SEQ ID NO: 71142 - DNA, 22 bp, Artificial Sequence
  primer
ccatttattgtcccttgagctt

SEQ ID NO: 71143 - DNA, 21 bp, Artificial Sequence
  primer
aacaatgccctcttcatcagg

SEQ ID NO: 71144 - DNA, 38 bp, Artificial Sequence
  primer
gtaaaacgacggccagtttctgccaacccatactgatg

SEQ ID NO: 71145 - DNA, 38 bp, Artificial Sequence
  primer
gtaaaacgacggccagttgagaacatgggctaatgaga

SEQ ID NO: 71146 - DNA, 42 bp, Artificial Sequence
  primer
gtaaaacgacggccagtaacttcaaccattaatacaaagccc

SEQ ID NO: 71147 - DNA, 22 bp, Artificial Sequence
  primer
aattcttgggcaagagaacctc

SEQ ID NO: 71148 - DNA, 20 bp, Artificial Sequence
  primer
gaggcaggaaagacccaaag

SEQ ID NO: 71149 - DNA, 36 bp, Artificial Sequence
  primer
gtaaaacgacggccagtgtgtaagccaccgcacctg

SEQ ID NO: 71150 - DNA, 38 bp, Artificial Sequence
  primer
gtaaaacgacggccagtgggtttcttagttccagcagc

SEQ ID NO: 71151 - DNA, 22 bp, Artificial Sequence
  primer
agtttgagtcaagtttctgccc

SEQ ID NO: 71152 - DNA, 22 bp, Artificial Sequence
  primer
gctgcacagagttctaattccc

SEQ ID NO: 71153 - DNA, 38 bp, Artificial Sequence
  primer
gtaaaacgacggccagtgaagcaaacagtgctgtcagg

SEQ ID NO: 71154 - DNA, 21 bp, Artificial Sequence
  primer
ccagtgatttccagacacctg

SEQ ID NO: 71155 - DNA, 20 bp, Artificial Sequence
  primer
aagttgtcaaggcgttggag

SEQ ID NO: 71156 - DNA, 21 bp, Artificial Sequence
  primer
tacaggcatgagtcagtgtgc

SEQ ID NO: 71157 - DNA, 21 bp, Artificial Sequence
  primer
tgggataggattcaggagtgg

SEQ ID NO: 71158 - DNA, 40 bp, Artificial Sequence
  primer
gtaaaacgacggccagtgggtaagtctcaggaaaccacac

SEQ ID NO: 71159 - DNA, 38 bp, Artificial Sequence
  primer
gtaaaacgacggccagtctgcactaaccacacccaaag

SEQ ID NO: 71160 - DNA, 39 bp, Artificial Sequence
  primer
gtaaaacgacggccagtccttctgcatagggttgttacg

SEQ ID NO: 71161 - DNA, 18 bp, Artificial Sequence
  primer
ccaccgtctcctgggttc

SEQ ID NO: 71162 - DNA, 21 bp, Artificial Sequence
  primer
ccttctgactccaaatccctc

SEQ ID NO: 71163 - DNA, 38 bp, Artificial Sequence
  primer
gtaaaacgacggccagtaaagcaaatacttccgttggc

SEQ ID NO: 71164 - DNA, 38 bp, Artificial Sequence
  primer
gtaaaacgacggccagtctgcatccagctggctaattc

SEQ ID NO: 71165 - DNA, 21 bp, Artificial Sequence
  primer
agtgatcctcccacctcagac

SEQ ID NO: 71166 - DNA, 39 bp, Artificial Sequence
  primer
gtaaaacgacggccagtcgtaaagaaaggtgagccaaag

SEQ ID NO: 71167 - DNA, 35 bp, Artificial Sequence
  primer
gtaaaacgacggccagtcacgctacgacacccagc

SEQ ID NO: 71168 - DNA, 21 bp, Artificial Sequence
  primer
ccaacccatgattacactccc

SEQ ID NO: 71169 - DNA, 38 bp, Artificial Sequence
  primer
gtaaaacgacggccagtgaactggcctaaatggctttg

SEQ ID NO: 71170 - DNA, 21 bp, Artificial Sequence
  primer
ctcccaaagtgctgggattac

SEQ ID NO: 71171 - DNA, 25 bp, Artificial Sequence
  primer
tgagctatgcacaaatgtctttatc

SEQ ID NO: 71172 - DNA, 21 bp, Artificial Sequence
  primer
gaggaatcgatttggcttcac

SEQ ID NO: 71173 - DNA, 21 bp, Artificial Sequence
  primer
gagccgactcgatgaacctac

SEQ ID NO: 71174 - DNA, 38 bp, Artificial Sequence
  primer
gtaaaacgacggccagttctcctcattgcccagttctc

SEQ ID NO: 71175 - DNA, 21 bp, Artificial Sequence
  primer
ttgcttctgagatcacttggg

SEQ ID NO: 71176 - DNA, 21 bp, Artificial Sequence
  primer
tggtgtgcagagatatttggc

SEQ ID NO: 71177 - DNA, 21 bp, Artificial Sequence
  primer
catcctctaaacgaacccgag

SEQ ID NO: 71178 - DNA, 38 bp, Artificial Sequence
  primer
gtaaaacgacggccagttgcacaagtagcagaagggag

SEQ ID NO: 71179 - DNA, 38 bp, Artificial Sequence
  primer
gtaaaacgacggccagtgtttactgtccctctcccagc

SEQ ID NO: 71180 - DNA, 20 bp, Artificial Sequence
  primer
ggatgagaagcagggtttcc

SEQ ID NO: 71181 - DNA, 21 bp, Artificial Sequence
  primer
atgtgcacttggccttcttag

SEQ ID NO: 71182 - DNA, 21 bp, Artificial Sequence
  primer
ggcaagaattgaaggatgctg

SEQ ID NO: 71183 - DNA, 21 bp, Artificial Sequence
  primer
gcaggagggaagaagtaaccc

SEQ ID NO: 71184 - DNA, 21 bp, Artificial Sequence
  primer
ggcctaagcccagacctattc

SEQ ID NO: 71185 - DNA, 21 bp, Artificial Sequence
  primer
aggaaagaaggcattgaaagg

SEQ ID NO: 71186 - DNA, 37 bp, Artificial Sequence
  primer
gtaaaacgacggccagtcccaggaccagctcctaatc

SEQ ID NO: 71187 - DNA, 21 bp, Artificial Sequence
  primer
acactatcctttggctttgcg

SEQ ID NO: 71188 - DNA, 22 bp, Artificial Sequence
  primer
aaacaagtcagagagccactcg

SEQ ID NO: 71189 - DNA, 37 bp, Artificial Sequence
  primer
gtaaaacgacggccagtgagcagagcaaggcactcag

SEQ ID NO: 71190 - DNA, 19 bp, Artificial Sequence
  primer
gtgtgaacccgggagacag

SEQ ID NO: 71191 - DNA, 40 bp, Artificial Sequence
  primer
gtaaaacgacggccagttttccaaagcactttccaattat

SEQ ID NO: 71192 - DNA, 37 bp, Artificial Sequence
  primer
gtaaaacgacggccagtaactgtgctgagccagaatc

SEQ ID NO: 71193 - DNA, 38 bp, Artificial Sequence
  primer
gtaaaacgacggccagtggaaacttggtgagttcctgc

SEQ ID NO: 71194 - DNA, 21 bp, Artificial Sequence
  primer
aaggtccagtcactcctgctc

SEQ ID NO: 71195 - DNA, 37 bp, Artificial Sequence
  primer
gtaaaacgacggccagtgtctgtgccggttagcgtag

SEQ ID NO: 71196 - DNA, 42 bp, Artificial Sequence
  primer
gtaaaacgacggccagtaatcactacagactcaatcactccc

SEQ ID NO: 71197 - DNA, 39 bp, Artificial Sequence
  primer
gtaaaacgacggccagttttggaaatgacttggctcttc

SEQ ID NO: 71198 - DNA, 40 bp, Artificial Sequence
  primer
gtaaaacgacggccagtgctccttgacaacagagactgag

SEQ ID NO: 71199 - DNA, 38 bp, Artificial Sequence
  primer
gtaaaacgacggccagtctgcttcaatttccactgtgc

SEQ ID NO: 71200 - DNA, 23 bp, Artificial Sequence
  primer
ggatctgttactgggatgtgaag

SEQ ID NO: 71201 - DNA, 25 bp, Artificial Sequence
  primer
ggaagtcactccagagcctttatac

SEQ ID NO: 71202 - DNA, 21 bp, Artificial Sequence
  primer
tgtgactacaggaagcccttg

SEQ ID NO: 71203 - DNA, 20 bp, Artificial Sequence
  primer
tgctgcttaaacatgggacc

SEQ ID NO: 71204 - DNA, 21 bp, Artificial Sequence
  primer
tccttcaaaggcaaagaaacc

SEQ ID NO: 71205 - DNA, 39 bp, Artificial Sequence
  primer
gtaaaacgacggccagtcattggctgtgttgaagaatcc

SEQ ID NO: 71206 - DNA, 23 bp, Artificial Sequence
  primer
catgccaatctttgcagtagttc

SEQ ID NO: 71207 - DNA, 29 bp, Artificial Sequence
  primer
gctgaatatagtaggcatcatctaatgta

SEQ ID NO: 71208 - DNA, 37 bp, Artificial Sequence
  primer
gtaaaacgacggccagtaaagtcagtctgcggtttgc

SEQ ID NO: 71209 - DNA, 24 bp, Artificial Sequence
  primer
cataccatctacggaacttcacag

SEQ ID NO: 71210 - DNA, 36 bp, Artificial Sequence
  primer
gtaaaacgacggccagttcaactgaacaagcctgcc

SEQ ID NO: 71211 - DNA, 27 bp, Artificial Sequence
  primer
ttagatgacctatagaaactcctttgg

SEQ ID NO: 71212 - DNA, 21 bp, Artificial Sequence
  primer
aacattagctgggagagctgg

SEQ ID NO: 71213 - DNA, 21 bp, Artificial Sequence
  primer
ccactatcttcccttgatgcc

SEQ ID NO: 71214 - DNA, 42 bp, Artificial Sequence
  primer
gtaaaacgacggccagtgggtattagtatggtgggtacgaag

SEQ ID NO: 71215 - DNA, 23 bp, Artificial Sequence
  primer
gcattggtacatgaagagactcc

SEQ ID NO: 71216 - DNA, 38 bp, Artificial Sequence
  primer
gtaaaacgacggccagttcaaagtcaaacgacccacac

SEQ ID NO: 71217 - DNA, 21 bp, Artificial Sequence
  primer
cgatggcactacactttctgc

SEQ ID NO: 71218 - DNA, 21 bp, Artificial Sequence
  primer
tttgtggcaatatgcacttgg

SEQ ID NO: 71219 - DNA, 41 bp, Artificial Sequence
  primer
gtaaaacgacggccagttgctaataattgcaggatcatttg

SEQ ID NO: 71220 - DNA, 21 bp, Artificial Sequence
  primer
cttctccagaaacaggcaagc

SEQ ID NO: 71221 - DNA, 40 bp, Artificial Sequence
  primer
gtaaaacgacggccagttttcagtggttgatccttagcag

SEQ ID NO: 71222 - DNA, 38 bp, Artificial Sequence
  primer
gtaaaacgacggccagttggtgtagcaggtgcaaactc

SEQ ID NO: 71223 - DNA, 38 bp, Artificial Sequence
  primer
gtaaaacgacggccagttgcaaactgaaccttcttccc

SEQ ID NO: 71224 - DNA, 21 bp, Artificial Sequence
  primer
gacttctgctgccagatcacc

SEQ ID NO: 71225 - DNA, 40 bp, Artificial Sequence
  primer
gtaaaacgacggccagtcctgacatacaagaacttggtgg

SEQ ID NO: 71226 - DNA, 37 bp, Artificial Sequence
  primer
gtaaaacgacggccagttgagttgcactgcactttgg

SEQ ID NO: 71227 - DNA, 21 bp, Artificial Sequence
  primer
atggatccagggtcctttcac

SEQ ID NO: 71228 - DNA, 23 bp, Artificial Sequence
  primer
gaggaaggctgaagagacttagg

SEQ ID NO: 71229 - DNA, 21 bp, Artificial Sequence
  primer
gaagctggcttactactggcg

SEQ ID NO: 71230 - DNA, 20 bp, Artificial Sequence
  primer
aaggctttcagcaaagctgg

SEQ ID NO: 71231 - DNA, 41 bp, Artificial Sequence
  primer
gtaaaacgacggccagtaaacaatacataaatgcaacaggg

SEQ ID NO: 71232 - DNA, 39 bp, Artificial Sequence
  primer
gtaaaacgacggccagtcaaatcaactattggcacaccc

SEQ ID NO: 71233 - DNA, 22 bp, Artificial Sequence
  primer
gcaggttgatacatactggcac

SEQ ID NO: 71234 - DNA, 36 bp, Artificial Sequence
  primer
gtaaaacgacggccagtcgtgcctgcccagtatttc

SEQ ID NO: 71235 - DNA, 36 bp, Artificial Sequence
  primer
gtaaaacgacggccagtaccatcaccaggcatcttg

SEQ ID NO: 71236 - DNA, 20 bp, Artificial Sequence
  primer
tgcctcccaactgacttacg

SEQ ID NO: 71237 - DNA, 35 bp, Artificial Sequence
  primer
gtaaaacgacggccagtttctctcggcggaaatcg

SEQ ID NO: 71238 - DNA, 21 bp, Artificial Sequence
  primer
ccaccaggcagtatgacagag

SEQ ID NO: 71239 - DNA, 23 bp, Artificial Sequence
  primer
tgtcaggcttctctgtcttatcc

SEQ ID NO: 71240 - DNA, 21 bp, Artificial Sequence
  primer
cttccacttcatcctccttcg

SEQ ID NO: 71241 - DNA, 38 bp, Artificial Sequence
  primer
gtaaaacgacggccagtacggagcaggtttctcttcag

SEQ ID NO: 71242 - DNA, 21 bp, Artificial Sequence
  primer
tgatgacagcatttccacctc

SEQ ID NO: 71243 - DNA, 21 bp, Artificial Sequence
  primer
aaggtagcgctcttgaccttg

SEQ ID NO: 71244 - DNA, 21 bp, Artificial Sequence
  primer
atcatgttcttgggaaccagc

SEQ ID NO: 71245 - DNA, 21 bp, Artificial Sequence
  primer
aaatgactcccaggtggaaac

SEQ ID NO: 71246 - DNA, 21 bp, Artificial Sequence
  primer
ggtcaattccgcctcactaac

SEQ ID NO: 71247 - DNA, 38 bp, Artificial Sequence
  primer
gtaaaacgacggccagtctggtctttctgcctctgctc

SEQ ID NO: 71248 - DNA, 21 bp, Artificial Sequence
  primer
agatgcgacctcattctcctc

SEQ ID NO: 71249 - DNA, 21 bp, Artificial Sequence
  primer
tgcagttcaagagcatcatcc

SEQ ID NO: 71250 - DNA, 21 bp, Artificial Sequence
  primer
gatgggcacattcactgtctg

SEQ ID NO: 71251 - DNA, 20 bp, Artificial Sequence
  primer
aggctccaacgtttcacctg

SEQ ID NO: 71252 - DNA, 21 bp, Artificial Sequence
  primer
gtacaaactggtcaacggctg

SEQ ID NO: 71253 - DNA, 38 bp, Artificial Sequence
  primer
gtaaaacgacggccagttgctaacaaggcatgaccatc

SEQ ID NO: 71254 - DNA, 21 bp, Artificial Sequence
  primer
gtaactcctcctgtgcttggg

SEQ ID NO: 71255 - DNA, 21 bp, Artificial Sequence
  primer
ttgtctgattcttgctgagcc

SEQ ID NO: 71256 - DNA, 21 bp, Artificial Sequence
  primer
tgtgctcacagacaaagcagg

SEQ ID NO: 71257 - DNA, 38 bp, Artificial Sequence
  primer
gtaaaacgacggccagttccatgcacagattagccatt

SEQ ID NO: 71258 - DNA, 26 bp, Artificial Sequence
  primer
actgtctacacttcactcttcctgtc

SEQ ID NO: 71259 - DNA, 20 bp, Artificial Sequence
  primer
cagcctctgtggaagacctg

SEQ ID NO: 71260 - DNA, 38 bp, Artificial Sequence
  primer
gtaaaacgacggccagtgatgccaagtgggtggtactc

SEQ ID NO: 71261 - DNA, 21 bp, Artificial Sequence
  primer
atcaaggttcattggaggagg

SEQ ID NO: 71262 - DNA, 24 bp, Artificial Sequence
  primer
ttcctacaggaacggtctgtattc

SEQ ID NO: 71263 - DNA, 21 bp, Artificial Sequence
  primer
gcacattcttccaaacagtgg

SEQ ID NO: 71264 - DNA, 37 bp, Artificial Sequence
  primer
gtaaaacgacggccagtcgtgaagtttccgtttctgc

SEQ ID NO: 71265 - DNA, 21 bp, Artificial Sequence
  primer
aaatctgagggtgacattgcc

SEQ ID NO: 71266 - DNA, 21 bp, Artificial Sequence
  primer
gtgactgtatgagcctgtggg

SEQ ID NO: 71267 - DNA, 38 bp, Artificial Sequence
  primer
gtaaaacgacggccagtggacaactggatgtggatgtg

SEQ ID NO: 71268 - DNA, 38 bp, Artificial Sequence
  primer
gtaaaacgacggccagtaggctcattcgaatttccatc

SEQ ID NO: 71269 - DNA, 21 bp, Artificial Sequence
  primer
agtggccttacccacactttg

SEQ ID NO: 71270 - DNA, 21 bp, Artificial Sequence
  primer
gtcagcagtgagacttgtggg

SEQ ID NO: 71271 - DNA, 21 bp, Artificial Sequence
  primer
aactccctgtgggtcagtcac

SEQ ID NO: 71272 - DNA, 21 bp, Artificial Sequence
  primer
caacaggctgcagtaggacag

SEQ ID NO: 71273 - DNA, 38 bp, Artificial Sequence
  primer
gtaaaacgacggccagtgagtactgcccattggtaggc

SEQ ID NO: 71274 - DNA, 38 bp, Artificial Sequence
  primer
gtaaaacgacggccagtaccaggacaccacagtgactc

SEQ ID NO: 71275 - DNA, 38 bp, Artificial Sequence
  primer
gtaaaacgacggccagttaacagcacaagagggaaggg

SEQ ID NO: 71276 - DNA, 22 bp, Artificial Sequence
  primer
ccagatcacatacatcccttcc

SEQ ID NO: 71277 - DNA, 38 bp, Artificial Sequence
  primer
gtaaaacgacggccagtagggaaacaggagagcacaag

SEQ ID NO: 71278 - DNA, 38 bp, Artificial Sequence
  primer
gtaaaacgacggccagtctccggaagggagaaagagag

SEQ ID NO: 71279 - DNA, 42 bp, Artificial Sequence
  primer
gtaaaacgacggccagttttcctgattccaaagcctatattc

SEQ ID NO: 71280 - DNA, 38 bp, Artificial Sequence
  primer
gtaaaacgacggccagttttgcctgaattagatgggac

SEQ ID NO: 71281 - DNA, 24 bp, Artificial Sequence
  primer
ccttatactaccagaagccttgcc

SEQ ID NO: 71282 - DNA, 21 bp, Artificial Sequence
  primer
tgctgagccattcactcaaag

SEQ ID NO: 71283 - DNA, 38 bp, Artificial Sequence
  primer
gtaaaacgacggccagtcataagcaaagggtgcacaag

SEQ ID NO: 71284 - DNA, 38 bp, Artificial Sequence
  primer
gtaaaacgacggccagtggcgatttcggagagtaatcc

SEQ ID NO: 71285 - DNA, 22 bp, Artificial Sequence
  primer
gggacaggaaacaagaaatgag

SEQ ID NO: 71286 - DNA, 21 bp, Artificial Sequence
  primer
tccaccacaacctcaactctc

SEQ ID NO: 71287 - DNA, 22 bp, Artificial Sequence
  primer
cagcagccttctctcacttacc

SEQ ID NO: 71288 - DNA, 21 bp, Artificial Sequence
  primer
gctggatgagtctgattacgc

SEQ ID NO: 71289 - DNA, 38 bp, Artificial Sequence
  primer
gtaaaacgacggccagtggataccaacaggaccacgtc

SEQ ID NO: 71290 - DNA, 37 bp, Artificial Sequence
  primer
gtaaaacgacggccagtgatgtgaatgcatggctgtg

SEQ ID NO: 71291 - DNA, 21 bp, Artificial Sequence
  primer
ggctctagtgaaagccgacag

SEQ ID NO: 71292 - DNA, 21 bp, Artificial Sequence
  primer
tgtgttccctttccttcttgc

SEQ ID NO: 71293 - DNA, 21 bp, Artificial Sequence
  primer
tttagagatgggctctctggg

SEQ ID NO: 71294 - DNA, 21 bp, Artificial Sequence
  primer
atgctccagtgaccaggtttc

SEQ ID NO: 71295 - DNA, 38 bp, Artificial Sequence
  primer
gtaaaacgacggccagttactctggtcacagtccagcc

SEQ ID NO: 71296 - DNA, 38 bp, Artificial Sequence
  primer
gtaaaacgacggccagttttagaactgagggcaaaccc

SEQ ID NO: 71297 - DNA, 20 bp, Artificial Sequence
  primer
acagagcatgtggaggaagg

SEQ ID NO: 71298 - DNA, 37 bp, Artificial Sequence
  primer
gtaaaacgacggccagtgattgggagcggtgatgtag

SEQ ID NO: 71299 - DNA, 37 bp, Artificial Sequence
  primer
gtaaaacgacggccagtaaagcagcaattcaggcatc

SEQ ID NO: 71300 - DNA, 21 bp, Artificial Sequence
  primer
agccagcagttagcctctttg

SEQ ID NO: 71301 - DNA, 21 bp, Artificial Sequence
  primer
tcctgcaaacctcaaagatcc

SEQ ID NO: 71302 - DNA, 21 bp, Artificial Sequence
  primer
cagtcgctccaggtcatactg

SEQ ID NO: 71303 - DNA, 38 bp, Artificial Sequence
  primer
gtaaaacgacggccagtgatcacaggcatgagcatctg

SEQ ID NO: 71304 - DNA, 21 bp, Artificial Sequence
  primer
tttgagcatctgaactgtccc

SEQ ID NO: 71305 - DNA, 37 bp, Artificial Sequence
  primer
gtaaaacgacggccagtcagtgggcgtccagtgtaag

SEQ ID NO: 71306 - DNA, 38 bp, Artificial Sequence; identical to SEQ ID NO: 71284
  primer

SEQ ID NO: 71307 - DNA, 38 bp, Artificial Sequence
  primer
gtaaaacgacggccagtggtgtgagttcgttagttgcc

SEQ ID NO: 71308 - DNA, 40 bp, Artificial Sequence
  primer
gtaaaacgacggccagtccttcaaagactatcccaccttg

SEQ ID NO: 71309 - DNA, 38 bp, Artificial Sequence
  primer
gtaaaacgacggccagtcgtgcataggccagtaagatg

SEQ ID NO: 71310 - DNA, 38 bp, Artificial Sequence
  primer
gtaaaacgacggccagttccagcaactaatcctcaagc

SEQ ID NO: 71311 - DNA, 21 bp, Artificial Sequence
  primer
attctgtggtttgacgtgctg

SEQ ID NO: 71312 - DNA, 38 bp, Artificial Sequence
  primer
gtaaaacgacggccagtgaggactcccagatttccagc

SEQ ID NO: 71313 - DNA, 38 bp, Artificial Sequence
  primer
gtaaaacgacggccagtggttggtggtatggtggagag

SEQ ID NO: 71314 - DNA, 21 bp, Artificial Sequence
  primer
atctactgaactcccgttgcc

SEQ ID NO: 71315 - DNA, 20 bp, Artificial Sequence
  primer
agcattcctggaacatgcag

SEQ ID NO: 71316 - DNA, 21 bp, Artificial Sequence
  primer
ttcagtaggatggtggcaatg

SEQ ID NO: 71317 - DNA, 21 bp, Artificial Sequence
  primer
ttcctttcatggagatgaggg

SEQ ID NO: 71318 - DNA, 38 bp, Artificial Sequence
  primer
gtaaaacgacggccagttatggaggaaggctgaggttg

SEQ ID NO: 71319 - DNA, 38 bp, Artificial Sequence
  primer
gtaaaacgacggccagtcttaaggcaagattcatcggg

SEQ ID NO: 71320 - DNA, 21 bp, Artificial Sequence
  primer
cttccttaactggctgttccg

SEQ ID NO: 71321 - DNA, 21 bp, Artificial Sequence
  primer
agcctactggcatctccagac

SEQ ID NO: 71322 - DNA, 20 bp, Artificial Sequence
  primer
attgctgacaatcaccgtgg

SEQ ID NO: 71323 - DNA, 38 bp, Artificial Sequence
  primer
gtaaaacgacggccagttcttcaaatcccactgttccc

SEQ ID NO: 71324 - DNA, 20 bp, Artificial Sequence
  primer
gaagtgagaaagaagggcgg

SEQ ID NO: 71325 - DNA, 38 bp, Artificial Sequence
  primer
gtaaaacgacggccagttgcgagacctccagaacaatc

SEQ ID NO: 71326 - DNA, 38 bp, Artificial Sequence
  primer
gtaaaacgacggccagtcttgttgagcttggttgcttg

SEQ ID NO: 71327 - DNA, 19 bp, Artificial Sequence
  primer
aaccagggatcttgggctc

SEQ ID NO: 71328 - DNA, 38 bp, Artificial Sequence
  primer
gtaaaacgacggccagtggtcttgaacttacgcctgtg

SEQ ID NO: 71329 - DNA, 22 bp, Artificial Sequence
  primer
tgatcggcatagacactgtagc

SEQ ID NO: 71330 - DNA, 21 bp, Artificial Sequence
  primer
gagtgctaggaggtttggctg

SEQ ID NO: 71331 - DNA, 39 bp, Artificial Sequence
  primer
gtaaaacgacggccagtcttcataggccatttcagaagc

SEQ ID NO: 71332 - DNA, 21 bp, Artificial Sequence
  primer
tgcaagaatcaatcaaatcgg

SEQ ID NO: 71333 - DNA, 21 bp, Artificial Sequence
  primer
ggcctccatgatgtctgtagc

SEQ ID NO: 71334 - DNA, 38 bp, Artificial Sequence
  primer
gtaaaacgacggccagtctttattgctgcatgctttgg

SEQ ID NO: 71335 - DNA, 21 bp, Artificial Sequence
  primer
ccatatagcccatggtggaac

SEQ ID NO: 71336 - DNA, 21 bp, Artificial Sequence
  primer
tcaagttcttgatgctcctgg

SEQ ID NO: 71337 - DNA, 21 bp, Artificial Sequence
  primer
gctgcttctgcaagctatttg

SEQ ID NO: 71338 - DNA, 38 bp, Artificial Sequence
  primer
gtaaaacgacggccagtgaaactcgaatgatcttgggc

SEQ ID NO: 71339 - DNA, 20 bp, Artificial Sequence
  primer
agttgactggcctgatggtg

SEQ ID NO: 71340 - DNA, 22 bp, Artificial Sequence
  primer
tcagcatcctcagcatttattg

SEQ ID NO: 71341 - DNA, 38 bp, Artificial Sequence
  primer
gtaaaacgacggccagttttctgaagtttcaagtgggc

SEQ ID NO: 71342 - DNA, 42 bp, Artificial Sequence
  primer
gtaaaacgacggccagttggcttagtttcttcagctacaatc

SEQ ID NO: 71343 - DNA, 41 bp, Artificial Sequence
  primer
gtaaaacgacggccagtgctgaaattaagaattgcttaggg

SEQ ID NO: 71344 - DNA, 27 bp, Artificial Sequence
  primer
actagagaagaggctgtttcaattaag

SEQ ID NO: 71345 - DNA, 42 bp, Artificial Sequence
  primer
gtaaaacgacggccagtttcctcactggaaattacagaacac

SEQ ID NO: 71346 - DNA, 21 bp, Artificial Sequence
  primer
atcagggcctgcttatttacc

SEQ ID NO: 71347 - DNA, 22 bp, Artificial Sequence
  primer
ccaacacttcggataagctcag

SEQ ID NO: 71348 - DNA, 21 bp, Artificial Sequence
  primer
atctctgatggttcgtttggg

SEQ ID NO: 71349 - DNA, 38 bp, Artificial Sequence
  primer
gtaaaacgacggccagttcttctgaggtcttgtgtggc

SEQ ID NO: 71350 - DNA, 21 bp, Artificial Sequence
  primer
gtgacttggagaggaggcttg

SEQ ID NO: 71351 - DNA, 38 bp, Artificial Sequence
  primer
gtaaaacgacggccagttctggatggtttctcctctgg

SEQ ID NO: 71352 - DNA, 38 bp, Artificial Sequence
  primer
gtaaaacgacggccagtagcgagaggcatactggactc

SEQ ID NO: 71353 - DNA, 38 bp, Artificial Sequence
  primer
gtaaaacgacggccagtaggagtgtgaccttctcccag

SEQ ID NO: 71354 - DNA, 44 bp, Artificial Sequence
  primer
gtaaaacgacggccagttgatatttctcataaacaaacaagcag

SEQ ID NO: 71355 - DNA, 21 bp, Artificial Sequence
  primer
gaacagaccatttggaggcag

SEQ ID NO: 71356 - DNA, 22 bp, Artificial Sequence
  primer
aagccttagggttggaaagaaa

SEQ ID NO: 71357 - DNA, 21 bp, Artificial Sequence
  primer
tccacagtcttcaattctggc

SEQ ID NO: 71358 - DNA, 21 bp, Artificial Sequence
  primer
cacacaagggatggaaatgag

SEQ ID NO: 71359 - DNA, 39 bp, Artificial Sequence
  primer
gtaaaacgacggccagttgcctcaaattagaaatcggac

SEQ ID NO: 71360 - DNA, 40 bp, Artificial Sequence
  primer
gtaaaacgacggccagtcaaggaaacatttaggtgcacag

SEQ ID NO: 71361 - DNA, 20 bp, Artificial Sequence
  primer
gatgaacaccgtttccaagc

SEQ ID NO: 71362 - DNA, 21 bp, Artificial Sequence
  primer
ctcctcgtcataaccagggtc

SEQ ID NO: 71363 - DNA, 21 bp, Artificial Sequence
  primer
tttgtgggtccagatgttcag

SEQ ID NO: 71364 - DNA, 38 bp, Artificial Sequence
  primer
gtaaaacgacggccagtacacaacccactggtgaaatg

SEQ ID NO: 71365 - DNA, 24 bp, Artificial Sequence
  primer
tcgctttgtgactgtttcattatc

SEQ ID NO: 71366 - DNA, 21 bp, Artificial Sequence
  primer
gcccaatccaaataaatcacc

SEQ ID NO: 71367 - DNA, 21 bp, Artificial Sequence
  primer
tcctcatctttgatgcacagc

SEQ ID NO: 71368 - DNA, 41 bp, Artificial Sequence
  primer
gtaaaacgacggccagtttcagagtatcagagggattggtc

SEQ ID NO: 71369 - DNA, 21 bp, Artificial Sequence
  primer
aaacaaattccttgccagcag

SEQ ID NO: 71370 - DNA, 38 bp, Artificial Sequence
  primer
gtaaaacgacggccagtcaagtgctaggcaacaaccag

SEQ ID NO: 71371 - DNA, 21 bp, Artificial Sequence
  primer
gaagccatgtcaatgatttcc

SEQ ID NO: 71372 - DNA, 38 bp, Artificial Sequence
  primer
gtaaaacgacggccagtaacaaggctcctctccatcag

SEQ ID NO: 71373 - DNA, 21 bp, Artificial Sequence
  primer
cttcctttccaacctcagctc

SEQ ID NO: 71374 - DNA, 21 bp, Artificial Sequence
  primer
ccttgtctgttggctgatttg

SEQ ID NO: 71375 - DNA, 22 bp, Artificial Sequence
  primer
tgagctgggagaataccaacag

SEQ ID NO: 71376 - DNA, 23 bp, Artificial Sequence
  primer
gacagagcaagactgtgtctcaa

SEQ ID NO: 71377 - DNA, 36 bp, Artificial Sequence
  primer
gtaaaacgacggccagtgccagagcaagaccctgtc

SEQ ID NO: 71378 - DNA, 37 bp, Artificial Sequence
  primer
gtaaaacgacggccagtctctttgggttctgctgtgc

SEQ ID NO: 71379 - DNA, 22 bp, Artificial Sequence
  primer
tccttcagacttatgattggga

SEQ ID NO: 71380 - DNA, 38 bp, Artificial Sequence
  primer
gtaaaacgacggccagtaatgtcactcgtgctccagac

SEQ ID NO: 71381 - DNA, 45 bp, Artificial Sequence
  primer
gtaaaacgacggccagtttctaaatcaatatttccagacttcatt

SEQ ID NO: 71382 - DNA, 40 bp, Artificial Sequence
  primer
gtaaaacgacggccagttgcaagtcagtccctagactcag

SEQ ID NO: 71383 - DNA, 22 bp, Artificial Sequence
  primer
tctacagcttaggctcccacac

SEQ ID NO: 71384 - DNA, 21 bp, Artificial Sequence
  primer
aaacggcccacactgtctaag

SEQ ID NO: 71385 - DNA, 21 bp, Artificial Sequence
  primer
agactgtggagcccataaagc

SEQ ID NO: 71386 - DNA, 22 bp, Artificial Sequence
  primer
tcaggaacagagccagaaagtc

SEQ ID NO: 71387 - DNA, 19 bp, Artificial Sequence
  primer
ctccctcaagagtgggtgc

SEQ ID NO: 71388 - DNA, 21 bp, Artificial Sequence
  primer
tagggcatggtgctgtcatag

SEQ ID NO: 71389 - DNA, 38 bp, Artificial Sequence
  primer
gtaaaacgacggccagtaaatccagagaccagtggtgg

SEQ ID NO: 71390 - DNA, 21 bp, Artificial Sequence
  primer
gagtgtccacgacacagatgg

SEQ ID NO: 71391 - DNA, 21 bp, Artificial Sequence
  primer
gtcagggtcctgaatccactc

SEQ ID NO: 71392 - DNA, 38 bp, Artificial Sequence
  primer
gtaaaacgacggccagttttgaagcaaagtgttggctg

SEQ ID NO: 71393 - DNA, 36 bp, Artificial Sequence
  primer
gtaaaacgacggccagtattgtggagcgaggacagg

SEQ ID NO: 71394 - DNA, 20 bp, Artificial Sequence
  primer
cctctgatttcccttcctcc

SEQ ID NO: 71395 - DNA, 21 bp, Artificial Sequence
  primer
actcccaggttgacaccattc

SEQ ID NO: 71396 - DNA, 21 bp, Artificial Sequence
  primer
cccataagacacagcaggctc

SEQ ID NO: 71397 - DNA, 21 bp, Artificial Sequence
  primer
atgctaaatgctgcactctgg

SEQ ID NO: 71398 - DNA, 38 bp, Artificial Sequence
  primer
gtaaaacgacggccagttggaacagggaaatgagcatc

SEQ ID NO: 71399 - DNA, 39 bp, Artificial Sequence
  primer
gtaaaacgacggccagtcgcccttgtactgcttacaaac

SEQ ID NO: 71400 - DNA, 38 bp, Artificial Sequence
  primer
gtaaaacgacggccagtgacacagagagctgaggcaac

SEQ ID NO: 71401 - DNA, 21 bp, Artificial Sequence
  primer
ttcccataattgcctgaaagg

SEQ ID NO: 71402 - DNA, 21 bp, Artificial Sequence
  primer
gaagaccctagccactgaagc

SEQ ID NO: 71403 - DNA, 35 bp, Artificial Sequence
  primer
gtaaaacgacggccagtagccacagcagcaccaag

SEQ ID NO: 71404 - DNA, 38 bp, Artificial Sequence
  primer
gtaaaacgacggccagtatgttctgggagaagagggag

SEQ ID NO: 71405 - DNA, 38 bp, Artificial Sequence
  primer
gtaaaacgacggccagttcttggtctgggtcataaggg

SEQ ID NO: 71406 - DNA, 38 bp, Artificial Sequence
  primer
gtaaaacgacggccagtagccagagccacttaccactc

SEQ ID NO: 71407 - DNA, 38 bp, Artificial Sequence
  primer
gtaaaacgacggccagttttccaacaaggaaactgtgc

SEQ ID NO: 71408 - DNA, 37 bp, Artificial Sequence
  primer
gtaaaacgacggccagtgaggaggaagagtgggaagg

SEQ ID NO: 71409 - DNA, 19 bp, Artificial Sequence
  primer
ctatggccctgctctcctg

SEQ ID NO: 71410 - DNA, 38 bp, Artificial Sequence
  primer
gtaaaacgacggccagttataaaggttcatgtgggccg

SEQ ID NO: 71411 - DNA, 21 bp, Artificial Sequence
  primer
gaacagaagggtgtcctgacc

SEQ ID NO: 71412 - DNA, 38 bp, Artificial Sequence
  primer
gtaaaacgacggccagtagaggttccaactgcacaacc

SEQ ID NO: 71413 - DNA, 20 bp, Artificial Sequence
  primer
ctgtcggtgaaagggttctc

SEQ ID NO: 71414 - DNA, 21 bp, Artificial Sequence
  primer
taacagagaaacccggaggtg

SEQ ID NO: 71415 - DNA, 21 bp, Artificial Sequence
  primer
tcctcgcggaagtattatcag

SEQ ID NO: 71416 - DNA, 37 bp, Artificial Sequence
  primer
gtaaaacgacggccagttgcgcacagttgctaatgac

SEQ ID NO: 71417 - DNA, 41 bp, Artificial Sequence
  primer
gtaaaacgacggccagttgacaagaaatcaagtagcaacaa

SEQ ID NO: 71418 - DNA, 18 bp, Artificial Sequence
  primer
agacgtaagccaccacgc

SEQ ID NO: 71419 - DNA, 19 bp, Artificial Sequence
  primer
aagcagaggatgcagtggg

SEQ ID NO: 71420 - DNA, 24 bp, Artificial Sequence
  primer
ccctcaatcaaccttacacaattt

SEQ ID NO: 71421 - DNA, 23 bp, Artificial Sequence
  primer
acattactgagattcccatttgc

SEQ ID NO: 71422 - DNA, 21 bp, Artificial Sequence
  primer
tcagcttcttgtgattcagcc

SEQ ID NO: 71423 - DNA, 26 bp, Artificial Sequence
  primer
tttcattctgtaaaccatctatctgc

SEQ ID NO: 71424 - DNA, 43 bp, Artificial Sequence
  primer
gtaaaacgacggccagttttgaagttcattgatttgaagagtc

SEQ ID NO: 71425 - DNA, 27 bp, Artificial Sequence
  primer
ttcatctttaagaatgctattctctgc

SEQ ID NO: 71426 - DNA, 38 bp, Artificial Sequence
  primer
gtaaaacgacggccagttcaacaacctcacccatttcc

SEQ ID NO: 71427 - DNA, 21 bp, Artificial Sequence
  primer
gaaactgatccttcagcaccc

SEQ ID NO: 71428 - DNA, 41 bp, Artificial Sequence
  primer
gtaaaacgacggccagttgagttgctctaagtgatgattcc

SEQ ID NO: 71429 - DNA, 38 bp, Artificial Sequence
  primer
gtaaaacgacggccagtctgaaagaaaggcaacaatgg

SEQ ID NO: 71430 - DNA, 39 bp, Artificial Sequence
  primer
gtaaaacgacggccagtaacaaatcaccttcctctgtgg

SEQ ID NO: 71431 - DNA, 21 bp, Artificial Sequence
  primer
ctgggactataggcacacacc

SEQ ID NO: 71432 - DNA, 27 bp, Artificial Sequence
  primer
gacagctccaattatattcatatcacc

SEQ ID NO: 71433 - DNA, 23 bp, Artificial Sequence
  primer
tgcagaaattctttcagcttacc

SEQ ID NO: 71434 - DNA, 21 bp, Artificial Sequence
  primer
gaaatgccaaaggtcactacg

SEQ ID NO: 71435 - DNA, 29 bp, Artificial Sequence
  primer
aaattcctataatgtctttggtttacatc

SEQ ID NO: 71436 - DNA, 25 bp, Artificial Sequence
  primer
ccaaacttaacttcctctgtgtgtt

SEQ ID NO: 71437 - DNA, 21 bp, Artificial Sequence
  primer
accaaacttcttcacaaggca

SEQ ID NO: 71438 - DNA, 27 bp, Artificial Sequence
  primer
gagaacatttcttctgaaatagtcagc

SEQ ID NO: 71439 - DNA, 38 bp, Artificial Sequence
  primer
gtaaaacgacggccagtcctccaaacattaagcagcac

SEQ ID NO: 71440 - DNA, 29 bp, Artificial Sequence
  primer
agtatagagtgtgttcctgatgctaaata

SEQ ID NO: 71441 - DNA, 40 bp, Artificial Sequence
  primer
gtaaaacgacggccagtctccacctaccttacacacatgc

SEQ ID NO: 71442 - DNA, 41 bp, Artificial Sequence
  primer
gtaaaacgacggccagtacatggacatgtttcatacacaga

SEQ ID NO: 71443 - DNA, 21 bp, Artificial Sequence
  primer
tctgtttgaaggtccatttgc

SEQ ID NO: 71444 - DNA, 39 bp, Artificial Sequence
  primer
gtaaaacgacggccagtttagctcagtcgagagagtggg

SEQ ID NO: 71445 - DNA, 21 bp, Artificial Sequence
  primer
taaattggattgacggcttcc

SEQ ID NO: 71446 - DNA, 39 bp, Artificial Sequence
  primer
gtaaaacgacggccagttgaataatggcactgaaagagg

SEQ ID NO: 71447 - DNA, 25 bp, Artificial Sequence
  primer
ttgatcgattagtagattcgacacc

SEQ ID NO: 71448 - DNA, 41 bp, Artificial Sequence
  primer
gtaaaacgacggccagtgacatatgcagatggaaatgattc

SEQ ID NO: 71449 - DNA, 43 bp, Artificial Sequence
  primer
gtaaaacgacggccagtcagaaatggttacaatgtcaacagag

SEQ ID NO: 71450 - DNA, 38 bp, Artificial Sequence
  primer
gtaaaacgacggccagtgcttcaaggcctttacactgg

SEQ ID NO: 71451 - DNA, 20 bp, Artificial Sequence
  primer
gctgaggcagaattgcttga

SEQ ID NO: 71452 - DNA, 20 bp, Artificial Sequence
  primer
gaggttgcaccattggactc

SEQ ID NO: 71453 - DNA, 21 bp, Artificial Sequence
  primer
tacttgctgttccaaggccag

SEQ ID NO: 71454 - DNA, 22 bp, Artificial Sequence
  primer
caggtttgtctttgctcagatg

SEQ ID NO: 71455 - DNA, 38 bp, Artificial Sequence
  primer
gtaaaacgacggccagttttgcatattcctgaactgcc

SEQ ID NO: 71456 - DNA, 21 bp, Artificial Sequence
  primer
ttctcattgccctccaatagc

SEQ ID NO: 71457 - DNA, 20 bp, Artificial Sequence
  primer
cctgacctcaagatccaccc

SEQ ID NO: 71458 - DNA, 39 bp, Artificial Sequence
  primer
gtaaaacgacggccagtaaaccaagcaagaagatgttgg

SEQ ID NO: 71459 - DNA, 23 bp, Artificial Sequence
  primer
tcagacactgtatcactgccttc

SEQ ID NO: 71460 - DNA, 21 bp, Artificial Sequence
  primer
tgtcaaatccctgactgtgtg

SEQ ID NO: 71461 - DNA, 39 bp, Artificial Sequence
  primer
gtaaaacgacggccagttctcttcagaaatgatcccacc

SEQ ID NO: 71462 - DNA, 21 bp, Artificial Sequence
  primer
tgcttctggctgagtttcaag

SEQ ID NO: 71463 - DNA, 30 bp, Artificial Sequence
  primer
tcagtctttcttaccttctaacataatacg

SEQ ID NO: 71464 - DNA, 42 bp, Artificial Sequence
  primer
gtaaaacgacggccagtgctgtttaaaccaattagacaatcc

SEQ ID NO: 71465 - DNA, 27 bp, Artificial Sequence
  primer
gcatgttacatttctctatatttgcac

SEQ ID NO: 71466 - DNA, 37 bp, Artificial Sequence
  primer
gtaaaacgacggccagtggaggaaagccttaagaccc

SEQ ID NO: 71467 - DNA, 39 bp, Artificial Sequence
  primer
gtaaaacgacggccagtgctgtttctgcagctctttcag

SEQ ID NO: 71468 - DNA, 36 bp, Artificial Sequence
  primer
gtaaaacgacggccagttgatcaaagggctgcagtg

SEQ ID NO: 71469 - DNA, 21 bp, Artificial Sequence
  primer
tttcttccctgggtcaaagtg

SEQ ID NO: 71470 - DNA, 23 bp, Artificial Sequence
  primer
tcaggaagcttgtctccatacag

SEQ ID NO: 71471 - DNA, 24 bp, Artificial Sequence
  primer
cagatcctaagaatcaggtgtgtg

SEQ ID NO: 71472 - DNA, 20 bp, Artificial Sequence
  primer
ataggcgtgaaccactgtgc

SEQ ID NO: 71473 - DNA, 22 bp, Artificial Sequence
  primer
aaccagcagagaatagagggag

SEQ ID NO: 71474 - DNA, 36 bp, Artificial Sequence
  primer
gtaaaacgacggccagtagtaatgcccgctgctcac

SEQ ID NO: 71475 - DNA, 38 bp, Artificial Sequence
  primer
gtaaaacgacggccagttcaatgcaaagaagtcaaagc

SEQ ID NO: 71476 - DNA, 23 bp, Artificial Sequence
  primer
catgcactaaactggaagctttg

SEQ ID NO: 71477 - DNA, 42 bp, Artificial Sequence
  primer
gtaaaacgacggccagtcaatcataagctgtgttcatattgg

SEQ ID NO: 71478 - DNA, 21 bp, Artificial Sequence
  primer
tggcaatgaagcaagactctg

SEQ ID NO: 71479 - DNA, 21 bp, Artificial Sequence
  primer
agttctgccatctgggcttag

SEQ ID NO: 71480 - DNA, 38 bp, Artificial Sequence
  primer
gtaaaacgacggccagtgaagggagtggcttaggtgac

SEQ ID NO: 71481 - DNA, 39 bp, Artificial Sequence
  primer
gtaaaacgacggccagtggacggtagctctcatctttgg

SEQ ID NO: 71482 - DNA, 38 bp, Artificial Sequence
  primer
gtaaaacgacggccagtacacatccacagccatgagtc

SEQ ID NO: 71483 - DNA, 37 bp, Artificial Sequence
  primer
gtaaaacgacggccagttctatcccaggcctctccac

SEQ ID NO: 71484 - DNA, 37 bp, Artificial Sequence
  primer
gtaaaacgacggccagtaggtcacagagggaccttgg

SEQ ID NO: 71485 - DNA, 21 bp, Artificial Sequence
  primer
tgaaccaagtcagtcccacag

SEQ ID NO: 71486 - DNA, 21 bp, Artificial Sequence
  primer
gactcccagagtgcctctcac

SEQ ID NO: 71487 - DNA, 21 bp, Artificial Sequence
  primer
ccacagtccctgtacacaacc

SEQ ID NO: 71488 - DNA, 21 bp, Artificial Sequence
  primer
taaggacaaagtgcctccctc

SEQ ID NO: 71489 - DNA, 21 bp, Artificial Sequence
  primer
acactggcatatggcacacac

SEQ ID NO: 71490 - DNA, 21 bp, Artificial Sequence
  primer
tgcagaagaacacacagaggg

SEQ ID NO: 71491 - DNA, 38 bp, Artificial Sequence
  primer
gtaaaacgacggccagtaagaggcaggacaggtaagcc

SEQ ID NO: 71492 - DNA, 22 bp, Artificial Sequence
  primer
gacccagaagcagaaagttgag

SEQ ID NO: 71493 - DNA, 21 bp, Artificial Sequence
  primer
ccatcctctcttattctgggc

SEQ ID NO: 71494 - DNA, 21 bp, Artificial Sequence
  primer
cagcactgatggtttccagag

SEQ ID NO: 71495 - DNA, 38 bp, Artificial Sequence
  primer
gtaaaacgacggccagttctccacctccacctgctaac

SEQ ID NO: 71496 - DNA, 21 bp, Artificial Sequence
  primer
gcctgagtccatatgtctggg

SEQ ID NO: 71497 - DNA, 38 bp, Artificial Sequence
  primer
gtaaaacgacggccagtaagacagcagctacaaagccc

SEQ ID NO: 71498 - DNA, 21 bp, Artificial Sequence
  primer
gcccactgggtatatggaaag

SEQ ID NO: 71499 - DNA, 38 bp, Artificial Sequence
  primer
gtaaaacgacggccagtaacccactgctaagttcaggg

SEQ ID NO: 71500 - DNA, 20 bp, Artificial Sequence
  primer
tcccagactggaacaacagc

SEQ ID NO: 71501 - DNA, 38 bp, Artificial Sequence
  primer
gtaaaacgacggccagtcctactgcatgttatccacgc

SEQ ID NO: 71502 - DNA, 38 bp, Artificial Sequence
  primer
gtaaaacgacggccagtcctcctggtgaggaactatgc

SEQ ID NO: 71503 - DNA, 21 bp, Artificial Sequence
  primer
cctcagcccactctctgagtc

SEQ ID NO: 71504 - DNA, 38 bp, Artificial Sequence
  primer
gtaaaacgacggccagtgaactggaaggaagctgatgc

SEQ ID NO: 71505 - DNA, 21 bp, Artificial Sequence
  primer
ctatcctgctctgctgctgtg

SEQ ID NO: 71506 - DNA, 38 bp, Artificial Sequence
  primer
gtaaaacgacggccagtcccttaagcagatccatcgtc

SEQ ID NO: 71507 - DNA, 20 bp, Artificial Sequence
  primer
atcctcagcctcacccagac

SEQ ID NO: 71508 - DNA, 21 bp, Artificial Sequence
  primer
aagaaagccagctttgtgagc

SEQ ID NO: 71509 - DNA, 21 bp, Artificial Sequence
  primer
tgccttatccctgagccatac

SEQ ID NO: 71510 - DNA, 39 bp, Artificial Sequence
  primer
gtaaaacgacggccagtcaggcaaataagacaagcaagc

SEQ ID NO: 71511 - DNA, 19 bp, Artificial Sequence
  primer
agctgctcagggtcactcg

SEQ ID NO: 71512 - DNA, 21 bp, Artificial Sequence
  primer
ttgagtgtggacttggctttg

SEQ ID NO: 71513 - DNA, 21 bp, Artificial Sequence
  primer
tggtccactggctataccttg

SEQ ID NO: 71514 - DNA, 38 bp, Artificial Sequence
  primer
gtaaaacgacggccagtgagagcaaacaacagggacag

SEQ ID NO: 71515 - DNA, 38 bp, Artificial Sequence
  primer
gtaaaacgacggccagtggtggacgagaaatccctacc

SEQ ID NO: 71516 - DNA, 20 bp, Artificial Sequence
  primer
aaaccagcaagaggctcagg

SEQ ID NO: 71517 - DNA, 38 bp, Artificial Sequence
  primer
gtaaaacgacggccagtatctgtgccctttccactctg

SEQ ID NO: 71518 - DNA, 38 bp, Artificial Sequence
  primer
gtaaaacgacggccagtcctcagaagagaggatggtgg

SEQ ID NO: 71519 - DNA, 38 bp, Artificial Sequence
  primer
gtaaaacgacggccagtgcagttcagctgatgcaagtc

SEQ ID NO: 71520 - DNA, 21 bp, Artificial Sequence
  primer
catcaagctagacacgccctc

SEQ ID NO: 71521 - DNA, 38 bp, Artificial Sequence
  primer
gtaaaacgacggccagtgaaagcaacctaagtcctggc

SEQ ID NO: 71522 - DNA, 38 bp, Artificial Sequence
  primer
gtaaaacgacggccagtacagagttcttgctgccaacc

SEQ ID NO: 71523 - DNA, 21 bp, Artificial Sequence
  primer
cccaattatgaaatgcaaggc

SEQ ID NO: 71524 - DNA, 21 bp, Artificial Sequence
  primer
gcacatggcctcattcatatc

SEQ ID NO: 71525 - DNA, 21 bp, Artificial Sequence
  primer
gggcatagcattgaacattcc

SEQ ID NO: 71526 - DNA, 39 bp, Artificial Sequence
  primer
gtaaaacgacggccagttggacccataccaacatttacc

SEQ ID NO: 71527 - DNA, 21 bp, Artificial Sequence
  primer
tttgttgaggacaacacagga

SEQ ID NO: 71528 - DNA, 21 bp, Artificial Sequence
  primer
ctactgaccctagctccctgg

SEQ ID NO: 71529 - DNA, 21 bp, Artificial Sequence
  primer
acacaagtagtcccagcagcc

SEQ ID NO: 71530 - DNA, 38 bp, Artificial Sequence
  primer
gtaaaacgacggccagtaacagcacctcgattctcgtc

SEQ ID NO: 71531 - DNA, 22 bp, Artificial Sequence
  primer
cagtcatagaactgccacctcc

SEQ ID NO: 71532 - DNA, 21 bp, Artificial Sequence
  primer
aggcagaggctttgagagttc

SEQ ID NO: 71533 - DNA, 21 bp, Artificial Sequence
  primer
aaatcccagtcctccttaccc

SEQ ID NO: 71534 - DNA, 22 bp, Artificial Sequence
  primer
aagccgggtacaagtaagatcc

SEQ ID NO: 71535 - DNA, 21 bp, Artificial Sequence
  primer
aatgcaaattcttccctcacc

SEQ ID NO: 71536 - DNA, 38 bp, Artificial Sequence
  primer
gtaaaacgacggccagtcccatcctatttctctccacc

SEQ ID NO: 71537 - DNA, 38 bp, Artificial Sequence
  primer
gtaaaacgacggccagttgaaatcaccaagcaggagag

SEQ ID NO: 71538 - DNA, 21 bp, Artificial Sequence
  primer
aaagccatcttcacttcctgc

SEQ ID NO: 71539 - DNA, 20 bp, Artificial Sequence
  primer
ggcagaggctttgaggattc

SEQ ID NO: 71540 - DNA, 21 bp, Artificial Sequence
  primer
gcaaggaaagaaatcccagtc

SEQ ID NO: 71541 - DNA, 21 bp, Artificial Sequence
  primer
taagaggactccatgcccttc

SEQ ID NO: 71542 - DNA, 21 bp, Artificial Sequence
  primer
cccaagtcagctgtgagtgaa

SEQ ID NO: 71543 - DNA, 38 bp, Artificial Sequence
  primer
gtaaaacgacggccagtgctgtcctgagagccttacaa

SEQ ID NO: 71544 - DNA, 38 bp, Artificial Sequence
  primer
gtaaaacgacggccagttttaaccagaggcgatgtgtc

SEQ ID NO: 71545 - DNA, 38 bp, Artificial Sequence
  primer
gtaaaacgacggccagtggaacacgaaccttacaaccc

SEQ ID NO: 71546 - DNA, 23 bp, Artificial Sequence
  primer
cacccacaactactcatccagtc

SEQ ID NO: 71547 - DNA, 21 bp, Artificial Sequence
  primer
tttgaggaagaggctttgagg

SEQ ID NO: 71548 - DNA, 21 bp, Artificial Sequence
  primer
tttcccttcatctcaccaaag

SEQ ID NO: 71549 - DNA, 21 bp, Artificial Sequence
  primer
tcacgcctttcttgacagaag

SEQ ID NO: 71550 - DNA, 39 bp, Artificial Sequence
  primer
gtaaaacgacggccagtgcatcatccaagatctcgtcag

SEQ ID NO: 71551 - DNA, 38 bp, Artificial Sequence
  primer
gtaaaacgacggccagtaatacagggaaatggagctgg

SEQ ID NO: 71552 - DNA, 38 bp, Artificial Sequence
  primer
gtaaaacgacggccagttcacctctgactcacattggc

SEQ ID NO: 71553 - DNA, 22 bp, Artificial Sequence
  primer
cgctaaacaggacggatttaag

SEQ ID NO: 71554 - DNA, 21 bp, Artificial Sequence
  primer
gaacaacccaggtcatcgttc

SEQ ID NO: 71555 - DNA, 23 bp, Artificial Sequence
  primer
gcacaattcacccacaactactg

SEQ ID NO: 71556 - DNA, 21 bp, Artificial Sequence
  primer
tttgaatcagaggctttgagg

SEQ ID NO: 71557 - DNA, 21 bp, Artificial Sequence
  primer
atgttgcatatgaaagctggg

SEQ ID NO: 71558 - DNA, 38 bp, Artificial Sequence
  primer
gtaaaacgacggccagtcaaatggaagccaggcagtag

SEQ ID NO: 71559 - DNA, 38 bp, Artificial Sequence
  primer
gtaaaacgacggccagtcccttaccctgacccattgag

SEQ ID NO: 71560 - DNA, 21 bp, Artificial Sequence
  primer
ttagtccaagggtgtcctgag

SEQ ID NO: 71561 - DNA, 38 bp, Artificial Sequence
  primer
gtaaaacgacggccagtttgaggtcactttcaacaccc

SEQ ID NO: 71562 - DNA, 38 bp, Artificial Sequence
  primer
gtaaaacgacggccagttgtgtccagtcaccagcatag

SEQ ID NO: 71563 - DNA, 21 bp, Artificial Sequence
  primer
tgtgaccttgagaggagcaag

SEQ ID NO: 71564 - DNA, 26 bp, Artificial Sequence
  primer
gacactgaagaattgtgttctaccag

SEQ ID NO: 71565 - DNA, 38 bp, Artificial Sequence
  primer
gtaaaacgacggccagtggaagaaccctggaaaccaag

SEQ ID NO: 71566 - DNA, 21 bp, Artificial Sequence
  primer
atacagtgcaatgccctcaac

SEQ ID NO: 71567 - DNA, 26 bp, Artificial Sequence
  primer
cattattacaaattgaggttgcttcc

SEQ ID NO: 71568 - DNA, 21 bp, Artificial Sequence
  primer
cacacacacacacggaagatg

SEQ ID NO: 71569 - DNA, 38 bp, Artificial Sequence
  primer
gtaaaacgacggccagttgtggtgccaagtaatacgct

SEQ ID NO: 71570 - DNA, 38 bp, Artificial Sequence
  primer
gtaaaacgacggccagttggttaggaatgcctgttctg

SEQ ID NO: 71571 - DNA, 21 bp, Artificial Sequence
  primer
cagctgaggcttctttgtgtc

SEQ ID NO: 71572 - DNA, 35 bp, Artificial Sequence
  primer
gtaaaacgacggccagtggttgcacaggcaaacca

SEQ ID NO: 71573 - DNA, 21 bp, Artificial Sequence
  primer
tatgggctacatgggtcaagg

SEQ ID NO: 71574 - DNA, 38 bp, Artificial Sequence
  primer
gtaaaacgacggccagtatgagccttgttgcttgacac

SEQ ID NO: 71575 - DNA, 25 bp, Artificial Sequence
  primer
tcaaagtcatttacactgcacaaac

SEQ ID NO: 71576 - DNA, 38 bp, Artificial Sequence
  primer
gtaaaacgacggccagtagtgtagcccagaccaggaag

SEQ ID NO: 71577 - DNA, 20 bp, Artificial Sequence
  primer
caggctgaggagcttgaatg

SEQ ID NO: 71578 - DNA, 20 bp, Artificial Sequence
  primer
cctcagggctctggtctagg

SEQ ID NO: 71579 - DNA, 21 bp, Artificial Sequence
  primer
gaacagcccaggacttcattc

SEQ ID NO: 71580 - DNA, 38 bp, Artificial Sequence
  primer
gtaaaacgacggccagtccctcactacaaagcctccac

SEQ ID NO: 71581 - DNA, 21 bp, Artificial Sequence
  primer
tcagcttaaggccaagactgg

SEQ ID NO: 71582 - DNA, 20 bp, Artificial Sequence
  primer
ctaaggagcctggtgttccc

SEQ ID NO: 71583 - DNA, 21 bp, Artificial Sequence
  primer
gcctctgctctcaccattagg

SEQ ID NO: 71584 - DNA, 21 bp, Artificial Sequence
  primer
tgaaccattctctcacggaag

SEQ ID NO: 71585 - DNA, 20 bp, Artificial Sequence
  primer
gtcaaaccctccttgcttcc

SEQ ID NO: 71586 - DNA, 21 bp, Artificial Sequence
  primer
aggtccagggagtctcctttc

SEQ ID NO: 71587 - DNA, 38 bp, Artificial Sequence
  primer
gtaaaacgacggccagtccagtgggaagaatgtttgtg

SEQ ID NO: 71588 - DNA, 22 bp, Artificial Sequence
  primer
tttgtccaaatacttccatccc

SEQ ID NO: 71589 - DNA, 19 bp, Artificial Sequence
  primer
aggcactcacagaccctgg

SEQ ID NO: 71590 - DNA, 19 bp, Artificial Sequence
  primer
agccagtgcttgttgcttg

SEQ ID NO: 71591 - DNA, 21 bp, Artificial Sequence
  primer
agtgaggatggctacaggcag

SEQ ID NO: 71592 - DNA, 21 bp, Artificial Sequence
  primer
tggagtgctgagtgtctcctg

SEQ ID NO: 71593 - DNA, 21 bp, Artificial Sequence
  primer
ccacctcgtcctgtaaagcag

SEQ ID NO: 71594 - DNA, 37 bp, Artificial Sequence
  primer
gtaaaacgacggccagtcccaagaagacaggacatcg

SEQ ID NO: 71595 - DNA, 21 bp, Artificial Sequence
  primer
ctcagcaggaacaagtcaccc

SEQ ID NO: 71596 - DNA, 21 bp, Artificial Sequence
  primer
cttgtccagcatgaggttctc

SEQ ID NO: 71597 - DNA, 38 bp, Artificial Sequence
  primer
gtaaaacgacggccagtccgtagtcattgtcctccagc

SEQ ID NO: 71598 - DNA, 23 bp, Artificial Sequence
  primer
ggctatcagtgtagtctgggagg

SEQ ID NO: 71599 - DNA, 20 bp, Artificial Sequence
  primer
agcaaggccctccttgtacc

SEQ ID NO: 71600 - DNA, 21 bp, Artificial Sequence
  primer
ctgccaggaaactgagacagg

SEQ ID NO: 71601 - DNA, 37 bp, Artificial Sequence
  primer
gtaaaacgacggccagtaaacgtctttccatctgggc

SEQ ID NO: 71602 - DNA, 38 bp, Artificial Sequence
  primer
gtaaaacgacggccagtagtactctgggctaagcaggc

SEQ ID NO: 71603 - DNA, 21 bp, Artificial Sequence
  primer
gagggtggacttcagcttctg

SEQ ID NO: 71604 - DNA, 37 bp, Artificial Sequence
  primer
gtaaaacgacggccagttatgggtggaaagcagcatc

SEQ ID NO: 71605 - DNA, 38 bp, Artificial Sequence
  primer
gtaaaacgacggccagtacaatcttgggaatgggagac

SEQ ID NO: 71606 - DNA, 21 bp, Artificial Sequence
  primer
cccagatgaccactgaaggag

SEQ ID NO: 71607 - DNA, 37 bp, Artificial Sequence
  primer
gtaaaacgacggccagtgctcaatgaccaagtcccac

SEQ ID NO: 71608 - DNA, 38 bp, Artificial Sequence
  primer
gtaaaacgacggccagtccagaagcgcagataggaaac

SEQ ID NO: 71609 - DNA, 37 bp, Artificial Sequence
  primer
gtaaaacgacggccagtagggcagccttgtctctcag

SEQ ID NO: 71610 - DNA, 36 bp, Artificial Sequence
  primer
gtaaaacgacggccagtgtaagcgtccaggcctcag

SEQ ID NO: 71611 - DNA, 38 bp, Artificial Sequence
  primer
gtaaaacgacggccagtcatgtcttggttcggatgact

SEQ ID NO: 71612 - DNA, 38 bp, Artificial Sequence
  primer
gtaaaacgacggccagtacactgaaatttccctccacc

SEQ ID NO: 71613 - DNA, 20 bp, Artificial Sequence
  primer
gaatgagggcagaagctcag

SEQ ID NO: 71614 - DNA, 38 bp, Artificial Sequence
  primer
gtaaaacgacggccagtatctgggctggaaacacacag

SEQ ID NO: 71615 - DNA, 36 bp, Artificial Sequence
  primer
gtaaaacgacggccagtcgaccctacaagcgagcac

SEQ ID NO: 71616 - DNA, 38 bp, Artificial Sequence
  primer
gtaaaacgacggccagtctacggaggagaggagctcag

SEQ ID NO: 71617 - DNA, 21 bp, Artificial Sequence
  primer
aaatctcccagacatgaagcg

SEQ ID NO: 71618 - DNA, 22 bp, Artificial Sequence
  primer
cctgaagaagaactggaaaggg

SEQ ID NO: 71619 - DNA, 23 bp, Artificial Sequence
  primer
aacaagcaaattcctaacacacg

SEQ ID NO: 71620 - DNA, 41 bp, Artificial Sequence
  primer
gtaaaacgacggccagtgggactgaaattctatcaaagctg

SEQ ID NO: 71621 - DNA, 21 bp, Artificial Sequence
  primer
ttctagcatgcccagaggttc

SEQ ID NO: 71622 - DNA, 39 bp, Artificial Sequence
  primer
gtaaaacgacggccagtgctgacatctttctgcaaatgg

SEQ ID NO: 71623 - DNA, 39 bp, Artificial Sequence
  primer
gtaaaacgacggccagtgcatgtaaattcatgagcccac

SEQ ID NO: 71624 - DNA, 41 bp, Artificial Sequence
  primer
gtaaaacgacggccagtgggaggaattatcaatgcatacac

SEQ ID NO: 71625 - DNA, 42 bp, Artificial Sequence
  primer
gtaaaacgacggccagtcctatcaagaaatggagaactgcta

SEQ ID NO: 71626 - DNA, 20 bp, Artificial Sequence
  primer
agtcgggcagaaattgcttt

SEQ ID NO: 71627 - DNA, 25 bp, Artificial Sequence
  primer
cccattataacaaattaagagccaa

SEQ ID NO: 71628 - DNA, 23 bp, Artificial Sequence
  primer
caccaaatacattgcttcttgga

SEQ ID NO: 71629 - DNA, 24 bp, Artificial Sequence
  primer
gaggcaaacaaattattatgggaa

SEQ ID NO: 71630 - DNA, 41 bp, Artificial Sequence
  primer
gtaaaacgacggccagttggagtaagtcactgtggaatttg

SEQ ID NO: 71631 - DNA, 40 bp, Artificial Sequence
  primer
gtaaaacgacggccagtaagagctaggactggtgatgtcc

SEQ ID NO: 71632 - DNA, 21 bp, Artificial Sequence
  primer
gtgaagggctttgatgtggac

SEQ ID NO: 71633 - DNA, 38 bp, Artificial Sequence
  primer
gtaaaacgacggccagtatccaagtagcctgcttccag

SEQ ID NO: 71634 - DNA, 21 bp, Artificial Sequence
  primer
tgtctgtctgtccgcatcttc

SEQ ID NO: 71635 - DNA, 38 bp, Artificial Sequence
  primer
gtaaaacgacggccagttcaagtgatccacccactttg

SEQ ID NO: 71636 - DNA, 38 bp, Artificial Sequence
  primer
gtaaaacgacggccagtgagcccttcaggacagatgac

SEQ ID NO: 71637 - DNA, 20 bp, Artificial Sequence
  primer
ggctaccacctgacatcctg

SEQ ID NO: 71638 - DNA, 38 bp, Artificial Sequence
  primer
gtaaaacgacggccagtgtgattcttagcagacacggg

SEQ ID NO: 71639 - DNA, 38 bp, Artificial Sequence
  primer
gtaaaacgacggccagtaagctgggcttgacttagctg

SEQ ID NO: 71640 - DNA, 21 bp, Artificial Sequence
  primer
gtcagctccttcccgtacatc

SEQ ID NO: 71641 - DNA, 21 bp, Artificial Sequence
  primer
tgcttccaactctgagattcc

SEQ ID NO: 71642 - DNA, 21 bp, Artificial Sequence
  primer
ccggaataagatcccaagctc

SEQ ID NO: 71643 - DNA, 38 bp, Artificial Sequence
  primer
gtaaaacgacggccagtgatgcagctgcgagttacaag

SEQ ID NO: 71644 - DNA, 20 bp, Artificial Sequence
  primer
agtgtgaccctcaccaccac

SEQ ID NO: 71645 - DNA, 22 bp, Artificial Sequence
  primer
ggtgtttccataaatactgccc

SEQ ID NO: 71646 - DNA, 21 bp, Artificial Sequence
  primer
caggtatgagctactgtgccc

SEQ ID NO: 71647 - DNA, 22 bp, Artificial Sequence
  primer
tcagctactgaatgttccctcc

SEQ ID NO: 71648 - DNA, 22 bp, Artificial Sequence
  primer
tctggtaaggcttctttgttgc

SEQ ID NO: 71649 - DNA, 19 bp, Artificial Sequence
  primer
cagagcgaggatcggtcac

SEQ ID NO: 71650 - DNA, 44 bp, Artificial Sequence
  primer
gtaaaacgacggccagtgatcccagttagactagttagtccttg

SEQ ID NO: 71651 - DNA, 36 bp, Artificial Sequence
  primer
gtaaaacgacggccagtgctcaagcccaacttcagg

SEQ ID NO: 71652 - DNA, 21 bp, Artificial Sequence
  primer
aatctgaatgcctctgaaggg

SEQ ID NO: 71653 - DNA, 40 bp, Artificial Sequence
  primer
gtaaaacgacggccagtgaaagaaccaccatttaagcaag

SEQ ID NO: 71654 - DNA, 21 bp, Artificial Sequence
  primer
tggcagaagacagattctggg

SEQ ID NO: 71655 - DNA, 21 bp, Artificial Sequence
  primer
catcatgggatgtgtactggc

SEQ ID NO: 71656 - DNA, 22 bp, Artificial Sequence
  primer
caaggcccttctgtactgtttc

SEQ ID NO: 71657 - DNA, 21 bp, Artificial Sequence
  primer
tagaacccaagtttccactgc

SEQ ID NO: 71658 - DNA, 21 bp, Artificial Sequence
  primer
acagggaaggagtgatggaac

SEQ ID NO: 71659 - DNA, 26 bp, Artificial Sequence
  primer
tttgcttggcacataataaacactat

SEQ ID NO: 71660 - DNA, 21 bp, Artificial Sequence
  primer
tctcatcaactctgcagtggg

SEQ ID NO: 71661 - DNA, 38 bp, Artificial Sequence
  primer
gtaaaacgacggccagtgatgtaggtttgttgggagcg

SEQ ID NO: 71662 - DNA, 22 bp, Artificial Sequence
  primer
tggtctctgtcctctcagcttc

SEQ ID NO: 71663 - DNA, 21 bp, Artificial Sequence
  primer
aggctcaattcagctagaggc

SEQ ID NO: 71664 - DNA, 24 bp, Artificial Sequence
  primer
ttcaatcttcaaccctattctgtg

SEQ ID NO: 71665 - DNA, 40 bp, Artificial Sequence
  primer
gtaaaacgacggccagtacagaatatcttcctcaacgcag

SEQ ID NO: 71666 - DNA, 21 bp, Artificial Sequence
  primer
caccatgactgttgtgtttgg

SEQ ID NO: 71667 - DNA, 25 bp, Artificial Sequence
  primer
ttcagaaagattgtatcctgtttca

SEQ ID NO: 71668 - DNA, 23 bp, Artificial Sequence
  primer
tcaggttccctaaatctagccac

SEQ ID NO: 71669 - DNA, 27 bp, Artificial Sequence
  primer
agagttctacctgttagacaaccaaag

SEQ ID NO: 71670 - DNA, 38 bp, Artificial Sequence
  primer
gtaaaacgacggccagtaccaatgataccaaacgcatc

SEQ ID NO: 71671 - DNA, 20 bp, Artificial Sequence
  primer
ggcagcagggaaattgtagc

SEQ ID NO: 71672 - DNA, 23 bp, Artificial Sequence
  primer
tccagaattgaaaccatctcaag

SEQ ID NO: 71673 - DNA, 21 bp, Artificial Sequence
  primer
tttggtatttaccctcccagc

SEQ ID NO: 71674 - DNA, 20 bp, Artificial Sequence
  primer
gggccttgactgccaatatc

SEQ ID NO: 71675 - DNA, 38 bp, Artificial Sequence
  primer
gtaaaacgacggccagtggcaacactccaatactttcc

SEQ ID NO: 71676 - DNA, 40 bp, Artificial Sequence
  primer
gtaaaacgacggccagtaaatccctaagccctagcctaac

SEQ ID NO: 71677 - DNA, 21 bp, Artificial Sequence
  primer
tggtcggtgctggtctatatg

SEQ ID NO: 71678 - DNA, 38 bp, Artificial Sequence
  primer
gtaaaacgacggccagtccaaacttgagctaaccagcc

SEQ ID NO: 71679 - DNA, 42 bp, Artificial Sequence
  primer
gtaaaacgacggccagttgcctctaacacttaaggtggaatc

SEQ ID NO: 71680 - DNA, 25 bp, Artificial Sequence
  primer
gcagaatgaagatctctttaagtcc

SEQ ID NO: 71681 - DNA, 22 bp, Artificial Sequence
  primer
tgtcatctccacaagagcaaag

SEQ ID NO: 71682 - DNA, 21 bp, Artificial Sequence
  primer
taatgcctgtgaatcaccctg

SEQ ID NO: 71683 - DNA, 21 bp, Artificial Sequence
  primer
aattggattgggacctcaaag

SEQ ID NO: 71684 - DNA, 21 bp, Artificial Sequence
  primer
taggtggcgtctcttgtctcc

SEQ ID NO: 71685 - DNA, 21 bp, Artificial Sequence
  primer
aagttgagcttatcccgatgc

SEQ ID NO: 71686 - DNA, 20 bp, Artificial Sequence
  primer
gtcaccgtgttgagcacctc

SEQ ID NO: 71687 - DNA, 19 bp, Artificial Sequence
  primer
cattgaatggctggctttg

SEQ ID NO: 71688 - DNA, 23 bp, Artificial Sequence
  primer
cctatagggtaggttcgtgaagg

SEQ ID NO: 71689 - DNA, 41 bp, Artificial Sequence
  primer
gtaaaacgacggccagtcagtacaggaagatggaattgaag

SEQ ID NO: 71690 - DNA, 39 bp, Artificial Sequence
  primer
gtaaaacgacggccagttccatgcaattacagacaatgc

SEQ ID NO: 71691 - DNA, 25 bp, Artificial Sequence
  primer
aaattatatgcacgactggagtgag

SEQ ID NO: 71692 - DNA, 20 bp, Artificial Sequence
  primer
atggcacgtttataccagcg

SEQ ID NO: 71693 - DNA, 35 bp, Artificial Sequence
  primer
gtaaaacgacggccagtctaagagaggcggagcgg

SEQ ID NO: 71694 - DNA, 38 bp, Artificial Sequence
  primer
gtaaaacgacggccagtttcagaaggaaccagacatcg

SEQ ID NO: 71695 - DNA, 38 bp, Artificial Sequence
  primer
gtaaaacgacggccagttgaatagtggacaacggatgc

SEQ ID NO: 71696 - DNA, 20 bp, Artificial Sequence
  primer
gtggtgggtgcctgtaattc

SEQ ID NO: 71697 - DNA, 37 bp, Artificial Sequence
  primer
gtaaaacgacggccagttcagactctggagtttgggc

SEQ ID NO: 71698 - DNA, 21 bp, Artificial Sequence
  primer
gactggagacagacaccaacg

SEQ ID NO: 71699 - DNA, 38 bp, Artificial Sequence
  primer
gtaaaacgacggccagtaatgaacagagactcgggacc

SEQ ID NO: 71700 - DNA, 37 bp, Artificial Sequence
  primer
gtaaaacgacggccagtcttcctcggacccagttgtc

SEQ ID NO: 71701 - DNA, 36 bp, Artificial Sequence
  primer
gtaaaacgacggccagtccaccagggaaggagccta

SEQ ID NO: 71702 - DNA, 21 bp, Artificial Sequence
  primer
gggaagatgaaggtgtccaac

SEQ ID NO: 71703 - DNA, 21 bp, Artificial Sequence
  primer
gagggccgcagatactcatac

SEQ ID NO: 71704 - DNA, 38 bp, Artificial Sequence
  primer
gtaaaacgacggccagtgagatggtttggatggacctc

SEQ ID NO: 71705 - DNA, 37 bp, Artificial Sequence
  primer
gtaaaacgacggccagtgtcttggctctcctgacacc

SEQ ID NO: 71706 - DNA, 21 bp, Artificial Sequence
  primer
gggttatctcacagcctctgg

SEQ ID NO: 71707 - DNA, 38 bp, Artificial Sequence
  primer
gtaaaacgacggccagtgtaagagacaagctcctgccg

SEQ ID NO: 71708 - DNA, 38 bp, Artificial Sequence
  primer
gtaaaacgacggccagttaacttgagtcctaagggcgg

SEQ ID NO: 71709 - DNA, 21 bp, Artificial Sequence
  primer
gagacacaggaaccagaaggg

SEQ ID NO: 71710 - DNA, 21 bp, Artificial Sequence
  primer
ggattgcttgagtccaagagg

SEQ ID NO: 71711 - DNA, 41 bp, Artificial Sequence
  primer
gtaaaacgacggccagttgggttaaatctactgcactgaaa

SEQ ID NO: 71712 - DNA, 38 bp, Artificial Sequence
  primer
gtaaaacgacggccagtacaggctcgtgcctctaagac

SEQ ID NO: 71713 - DNA, 38 bp, Artificial Sequence
  primer
gtaaaacgacggccagtgcaagtgatgaagctgacacc

SEQ ID NO: 71714 - DNA, 39 bp, Artificial Sequence
  primer
gtaaaacgacggccagttgccaaacttctggtgttagtg

SEQ ID NO: 71715 - DNA, 21 bp, Artificial Sequence
  primer
ccctttgtcagaacatatggc

SEQ ID NO: 71716 - DNA, 37 bp, Artificial Sequence
  primer
gtaaaacgacggccagtcctgcccttgcagagtttac

SEQ ID NO: 71717 - DNA, 43 bp, Artificial Sequence
  primer
gtaaaacgacggccagttgcagagaataggtctagataggcag

SEQ ID NO: 71718 - DNA, 39 bp, Artificial Sequence
  primer
gtaaaacgacggccagtgcccagtatgtggcagaattag

SEQ ID NO: 71719 - DNA, 38 bp, Artificial Sequence
  primer
gtaaaacgacggccagtgaataccagccacccacctac

SEQ ID NO: 71720 - DNA, 20 bp, Artificial Sequence
  primer
cagcaaaccaatatggcaca

SEQ ID NO: 71721 - DNA, 21 bp, Artificial Sequence
  primer
cctgctggagtgtcaagtctg

SEQ ID NO: 71722 - DNA, 38 bp, Artificial Sequence
  primer
gtaaaacgacggccagttccattgacatgatccagagc

SEQ ID NO: 71723 - DNA, 21 bp, Artificial Sequence
  primer
ttcgactactagagggcaggg

SEQ ID NO: 71724 - DNA, 22 bp, Artificial Sequence
  primer
tcaaagtaccaaatgcaaccac

SEQ ID NO: 71725 - DNA, 20 bp, Artificial Sequence
  primer
gcacccagcctgtttctctc

SEQ ID NO: 71726 - DNA, 21 bp, Artificial Sequence
  primer
tttccaacaggcagaccctac

SEQ ID NO: 71727 - DNA, 21 bp, Artificial Sequence
  primer
aagagaattcctttcgcttgg

SEQ ID NO: 71728 - DNA, 18 bp, Artificial Sequence
  primer
tttggagcttgcaatggg

SEQ ID NO: 71729 - DNA, 23 bp, Artificial Sequence
  primer
gggagcagaaattaacatcatcc

SEQ ID NO: 71730 - DNA, 42 bp, Artificial Sequence
  primer
gtaaaacgacggccagtaagggagagtttgaaattattcagc

SEQ ID NO: 71731 - DNA, 40 bp, Artificial Sequence
  primer
gtaaaacgacggccagtttagtcacagggagaccaagttc

SEQ ID NO: 71732 - DNA, 22 bp, Artificial Sequence
  primer
gccgtcatgctaaatgtattcc

SEQ ID NO: 71733 - DNA, 39 bp, Artificial Sequence
  primer
gtaaaacgacggccagtaggtgcatcatgtcattcaaac

SEQ ID NO: 71734 - DNA, 27 bp, Artificial Sequence
  primer
tttggactctttacactttgatgttag

SEQ ID NO: 71735 - DNA, 38 bp, Artificial Sequence
  primer
gtaaaacgacggccagttaaacaccaaactggcacagc

SEQ ID NO: 71736 - DNA, 21 bp, Artificial Sequence
  primer
gggaaagatgttccaaagagc

SEQ ID NO: 71737 - DNA, 20 bp, Artificial Sequence
  primer
ctcagtcagctgatccaccc

SEQ ID NO: 71738 - DNA, 38 bp, Artificial Sequence
  primer
gtaaaacgacggccagtttggtgctatgaatctccagg

SEQ ID NO: 71739 - DNA, 25 bp, Artificial Sequence
  primer
ggcaaataattctttcagaagaagc

SEQ ID NO: 71740 - DNA, 36 bp, Artificial Sequence
  primer
gtaaaacgacggccagtcagtcccgaagacaggcag

SEQ ID NO: 71741 - DNA, 21 bp, Artificial Sequence
  primer
agcatatgtttgctgctctgc

SEQ ID NO: 71742 - DNA, 35 bp, Artificial Sequence
  primer
gtaaaacgacggccagtcgtgcacgtaatcccagc

SEQ ID NO: 71743 - DNA, 38 bp, Artificial Sequence
  primer
gtaaaacgacggccagtactgctgtttgtgtttggtgg

SEQ ID NO: 71744 - DNA, 37 bp, Artificial Sequence
  primer
gtaaaacgacggccagtaacacacatcgctgaggacc

SEQ ID NO: 71745 - DNA, 38 bp, Artificial Sequence
  primer
gtaaaacgacggccagtaggaaacgtggctgatgaaag

SEQ ID NO: 71746 - DNA, 21 bp, Artificial Sequence
  primer
gtgtgcctttgctttcacatc

SEQ ID NO: 71747 - DNA, 21 bp, Artificial Sequence
  primer
gaccaagccttcatctcatcc

SEQ ID NO: 71748 - DNA, 38 bp, Artificial Sequence
  primer
gtaaaacgacggccagtaaggaagatgtcgctttgctg

SEQ ID NO: 71749 - DNA, 38 bp, Artificial Sequence
  primer
gtaaaacgacggccagtcctccacctagcttgcttgtc

SEQ ID NO: 71750 - DNA, 25 bp, Artificial Sequence
  primer
ttctggatctaagcagtaaggagtg

SEQ ID NO: 71751 - DNA, 21 bp, Artificial Sequence
  primer
atgtgctccacgaaatgtttg

SEQ ID NO: 71752 - DNA, 21 bp, Artificial Sequence
  primer
aagtaaggaccgtggctcaac

SEQ ID NO: 71753 - DNA, 21 bp, Artificial Sequence
  primer
ctgagaaccacatgccaattc

SEQ ID NO: 71754 - DNA, 38 bp, Artificial Sequence
  primer
gtaaaacgacggccagtctcagaggatggaacagaccc

SEQ ID NO: 71755 - DNA, 21 bp, Artificial Sequence
  primer
tggtgccttagggaaacagtc

SEQ ID NO: 71756 - DNA, 37 bp, Artificial Sequence
  primer
gtaaaacgacggccagttgattccaaaggacacaggg

SEQ ID NO: 71757 - DNA, 21 bp, Artificial Sequence
  primer
agtctgccactgtcccatctc

SEQ ID NO: 71758 - DNA, 43 bp, Artificial Sequence
  primer
gtaaaacgacggccagtagtttggaaactagaccagtgacttt

SEQ ID NO: 71759 - DNA, 20 bp, Artificial Sequence
  primer
gatgtccacctgcctgtctg

SEQ ID NO: 71760 - DNA, 19 bp, Artificial Sequence
  primer
ggagagggaccctgtaggc

SEQ ID NO: 71761 - DNA, 22 bp, Artificial Sequence
  primer
tcagatcacaaggatttctggg

SEQ ID NO: 71762 - DNA, 21 bp, Artificial Sequence
  primer
aggatggaaggaagcactgag

SEQ ID NO: 71763 - DNA, 21 bp, Artificial Sequence
  primer
accaaccctagagggacacag

SEQ ID NO: 71764 - DNA, 20 bp, Artificial Sequence
  primer
ctccagaagaatgtgtcccg

SEQ ID NO: 71765 - DNA, 37 bp, Artificial Sequence
  primer
gtaaaacgacggccagtagtagactcgatcccgctcc

SEQ ID NO: 71766 - DNA, 38 bp, Artificial Sequence
  primer
gtaaaacgacggccagtctgccaccttcataaccacag

SEQ ID NO: 71767 - DNA, 38 bp, Artificial Sequence
  primer
gtaaaacgacggccagtatgttgaagaacagggcttcg

SEQ ID NO: 71768 - DNA, 21 bp, Artificial Sequence
  primer
aggcttgatgaagaaaccacg

SEQ ID NO: 71769 - DNA, 21 bp, Artificial Sequence
  primer
gtcaaggtggttgtggaattg

SEQ ID NO: 71770 - DNA, 21 bp, Artificial Sequence
  primer
caaagaaagggtgttcttggc

SEQ ID NO: 71771 - DNA, 20 bp, Artificial Sequence
  primer
cccacctactgcttcccttc

SEQ ID NO: 71772 - DNA, 22 bp, Artificial Sequence
  primer
aatggaaagtgacaagtcaggc

SEQ ID NO: 71773 - DNA, 38 bp, Artificial Sequence
  primer
gtaaaacgacggccagtaatcctgcctctgaaaccttg

SEQ ID NO: 71774 - DNA, 20 bp, Artificial Sequence
  primer
cctgtgttctggcctcaaag

SEQ ID NO: 71775 - DNA, 38 bp, Artificial Sequence
  primer
gtaaaacgacggccagtggaaaggctgggatgtttagg

SEQ ID NO: 71776 - DNA, 21 bp, Artificial Sequence
  primer
gtcagtgttccttcctgggtc

SEQ ID NO: 71777 - DNA, 38 bp, Artificial Sequence
  primer
gtaaaacgacggccagttagaaccaacactgcacctgg

SEQ ID NO: 71778 - DNA, 21 bp, Artificial Sequence
  primer
aatggttgtttcctgctgctc

SEQ ID NO: 71779 - DNA, 38 bp, Artificial Sequence
  primer
gtaaaacgacggccagtttctgaatgtccaggtttccc

SEQ ID NO: 71780 - DNA, 38 bp, Artificial Sequence
  primer
gtaaaacgacggccagtgcagagactctcagggtcagg

SEQ ID NO: 71781 - DNA, 20 bp, Artificial Sequence
  primer
aaagggcctccacagaagtc

SEQ ID NO: 71782 - DNA, 21 bp, Artificial Sequence
  primer
aaacaggtgtcattccaagcc

SEQ ID NO: 71783 - DNA, 37 bp, Artificial Sequence
  primer
gtaaaacgacggccagtgcaggctgtgctacagttcc

SEQ ID NO: 71784 - DNA, 21 bp, Artificial Sequence
  primer
ttagcaggacccttcttccag

SEQ ID NO: 71785 - DNA, 21 bp, Artificial Sequence
  primer
tatccagtagggcctgctctg

SEQ ID NO: 71786 - DNA, 37 bp, Artificial Sequence
  primer
gtaaaacgacggccagtgtttgcatagagcccagcag

SEQ ID NO: 71787 - DNA, 38 bp, Artificial Sequence
  primer
gtaaaacgacggccagttgtggctgtggaatcagagac

SEQ ID NO: 71788 - DNA, 36 bp, Artificial Sequence
  primer
gtaaaacgacggccagtgagcccagcctcacttgac

SEQ ID NO: 71789 - DNA, 22 bp, Artificial Sequence
  primer
tgtgtaggtacctggccttcag

SEQ ID NO: 71790 - DNA, 21 bp, Artificial Sequence
  primer
actgcccgtagactacctccc

SEQ ID NO: 71791 - DNA, 38 bp, Artificial Sequence
  primer
gtaaaacgacggccagtcgtccctgcatctgagatagg

SEQ ID NO: 71792 - DNA, 21 bp, Artificial Sequence
  primer
cagagaaacgcagagatgtgg

SEQ ID NO: 71793 - DNA, 38 bp, Artificial Sequence
  primer
gtaaaacgacggccagtgtgtactgcatggaaagcacc

SEQ ID NO: 71794 - DNA, 20 bp, Artificial Sequence
  primer
ctaagcatcgctgctcatcc

SEQ ID NO: 71795 - DNA, 38 bp, Artificial Sequence
  primer
gtaaaacgacggccagtttggaccatgagatggaagtc

SEQ ID NO: 71796 - DNA, 20 bp, Artificial Sequence
  primer
catttgagcccaggagtttg

SEQ ID NO: 71797 - DNA, 26 bp, Artificial Sequence
  primer
gatttccatcctaaatataccatccc

SEQ ID NO: 71798 - DNA, 23 bp, Artificial Sequence
  primer
ttggcaagatcatagtatgtggg

SEQ ID NO: 71799 - DNA, 20 bp, Artificial Sequence
  primer
aaggaagaaccatgggaagc

SEQ ID NO: 71800 - DNA, 20 bp, Artificial Sequence
  primer
agcctatgcagatctgtggg

SEQ ID NO: 71801 - DNA, 21 bp, Artificial Sequence
  primer
aggttgatttcctcttgcagc

SEQ ID NO: 71802 - DNA, 22 bp, Artificial Sequence
  primer
tccagaacaaaggatgtgtgtg

SEQ ID NO: 71803 - DNA, 18 bp, Artificial Sequence
  primer
aatgggcaacaggcacag

SEQ ID NO: 71804 - DNA, 21 bp, Artificial Sequence
  primer
tatgcagatgagtgcctctgg

SEQ ID NO: 71805 - DNA, 18 bp, Artificial Sequence
  primer
ccaccactcacgcctgta

SEQ ID NO: 71806 - DNA, 39 bp, Artificial Sequence
  primer
gtaaaacgacggccagttgacacagtgcctggtacaaac

SEQ ID NO: 71807 - DNA, 38 bp, Artificial Sequence
  primer
gtaaaacgacggccagtatcatcagcgggtagttccag

SEQ ID NO: 71808 - DNA, 21 bp, Artificial Sequence
  primer
tgcaagaattgaattggttcg

SEQ ID NO: 71809 - DNA, 24 bp, Artificial Sequence
  primer
catccttaactgtttggtgaattg

SEQ ID NO: 71810 - DNA, 22 bp, Artificial Sequence
  primer
gatttcccttccaaagttgatg

SEQ ID NO: 71811 - DNA, 37 bp, Artificial Sequence
  primer
gtaaaacgacggccagtcaagtgatccacccgtcttg

SEQ ID NO: 71812 - DNA, 21 bp, Artificial Sequence
  primer
ctactcatttcctgtcctgcg

SEQ ID NO: 71813 - DNA, 21 bp, Artificial Sequence
  primer
gctggtcttaaactgtcgctg

SEQ ID NO: 71814 - DNA, 38 bp, Artificial Sequence
  primer
gtaaaacgacggccagtgttggccattaattgaagctg

SEQ ID NO: 71815 - DNA, 21 bp, Artificial Sequence
  primer
aacgaatgcccttctaaaccc

SEQ ID NO: 71816 - DNA, 20 bp, Artificial Sequence
  primer
tttggtttgtggctgacacc

SEQ ID NO: 71817 - DNA, 37 bp, Artificial Sequence
  primer
gtaaaacgacggccagtagtacactaaggcccacggc

SEQ ID NO: 71818 - DNA, 39 bp, Artificial Sequence
  primer
gtaaaacgacggccagtgtgaattaacaccgttgtctgc

SEQ ID NO: 71819 - DNA, 21 bp, Artificial Sequence
  primer
tgttcacaggatgcttggttc

SEQ ID NO: 71820 - DNA, 21 bp, Artificial Sequence
  primer
ctcacgtaatccacctggctc

SEQ ID NO: 71821 - DNA, 21 bp, Artificial Sequence
  primer
atcttcttacctgccacccag

SEQ ID NO: 71822 - DNA, 22 bp, Artificial Sequence
  primer
caaacacacctccctgtttagg

SEQ ID NO: 71823 - DNA, 38 bp, Artificial Sequence
  primer
gtaaaacgacggccagtctcctggtacctacagggtcg

SEQ ID NO: 71824 - DNA, 20 bp, Artificial Sequence
  primer
atgatgcagagagcagccag

SEQ ID NO: 71825 - DNA, 21 bp, Artificial Sequence
  primer
cccagtcccaactgatctgag

SEQ ID NO: 71826 - DNA, 21 bp, Artificial Sequence
  primer
tgaatagcgtgttatgggcac

SEQ ID NO: 71827 - DNA, 38 bp, Artificial Sequence
  primer
gtaaaacgacggccagtgaccaccagattccagtaggc

SEQ ID NO: 71828 - DNA, 36 bp, Artificial Sequence
  primer
gtaaaacgacggccagtcaggtcctgaacctctggc

SEQ ID NO: 71829 - DNA, 38 bp, Artificial Sequence
  primer
gtaaaacgacggccagttcagatattcagcacgcaagg

SEQ ID NO: 71830 - DNA, 37 bp, Artificial Sequence
  primer
gtaaaacgacggccagtgcagcaggaagttgaaatgg

SEQ ID NO: 71831 - DNA, 21 bp, Artificial Sequence
  primer
ccagcaaacccttatctgacc

SEQ ID NO: 71832 - DNA, 38 bp, Artificial Sequence
  primer
gtaaaacgacggccagtgctaagaacaatcctcagccc

SEQ ID NO: 71833 - DNA, 38 bp, Artificial Sequence
  primer
gtaaaacgacggccagttactcagagtggacccacagc

SEQ ID NO: 71834 - DNA, 21 bp, Artificial Sequence
  primer
gcctcaagtgatcctccactc

SEQ ID NO: 71835 - DNA, 21 bp, Artificial Sequence
  primer
gattctgaggttgaagcaggg

SEQ ID NO: 71836 - DNA, 21 bp, Artificial Sequence
  primer
ggtcacacagccagagaacag

SEQ ID NO: 71837 - DNA, 21 bp, Artificial Sequence
  primer
caaatggaagaggctaatggg

SEQ ID NO: 71838 - DNA, 21 bp, Artificial Sequence
  primer
gtgctgggtcatctgtgaaag

SEQ ID NO: 71839 - DNA, 20 bp, Artificial Sequence
  primer
ggtggagacttggaatggtg

SEQ ID NO: 71840 - DNA, 38 bp, Artificial Sequence
  primer
gtaaaacgacggccagttggagatcatactcccagtgc

SEQ ID NO: 71841 - DNA, 21 bp, Artificial Sequence
  primer
actggtggtgtaaacaaaggc

SEQ ID NO: 71842 - DNA, 20 bp, Artificial Sequence
  primer
agagctgggtgactccacac

SEQ ID NO: 71843 - DNA, 21 bp, Artificial Sequence
  primer
gacaaccacatgatgtcagga

SEQ ID NO: 71844 - DNA, 38 bp, Artificial Sequence
  primer
gtaaaacgacggccagtgatgctgcctgcgaatagtta

SEQ ID NO: 71845 - DNA, 25 bp, Artificial Sequence
  primer
caggtacagtataccagaaagcagg

SEQ ID NO: 71846 - DNA, 21 bp, Artificial Sequence
  primer
aacctcggaacacaacctcac

SEQ ID NO: 71847 - DNA, 38 bp, Artificial Sequence
  primer
gtaaaacgacggccagtggagaggacaatcagggtacg

SEQ ID NO: 71848 - DNA, 39 bp, Artificial Sequence
  primer
gtaaaacgacggccagtcctgctagaatatgcatctggc

SEQ ID NO: 71849 - DNA, 37 bp, Artificial Sequence
  primer
gtaaaacgacggccagttgggacgtagttgaaatggc

SEQ ID NO: 71850 - DNA, 21 bp, Artificial Sequence
  primer
aggttcagcggatagttccag

SEQ ID NO: 71851 - DNA, 18 bp, Artificial Sequence
  primer
ggcgcaggtgtcttcatc

SEQ ID NO: 71852 - DNA, 21 bp, Artificial Sequence
  primer
gaccagacagtcctctttgcc

SEQ ID NO: 71853 - DNA, 38 bp, Artificial Sequence
  primer
gtaaaacgacggccagtagaagaggcaggattgaggtg

SEQ ID NO: 71854 - DNA, 21 bp, Artificial Sequence
  primer
gggactccatcccttcctaag

SEQ ID NO: 71855 - DNA, 21 bp, Artificial Sequence
  primer
agcaggactcaccgatgtagc

SEQ ID NO: 71856 - DNA, 38 bp, Artificial Sequence
  primer
gtaaaacgacggccagtacagagacggaatcatggcac

SEQ ID NO: 71857 - DNA, 21 bp, Artificial Sequence
  primer
caccatcccaaagtcctgaag

SEQ ID NO: 71858 - DNA, 38 bp, Artificial Sequence
  primer
gtaaaacgacggccagttttggcagaaatgtatgcagg

SEQ ID NO: 71859 - DNA, 18 bp, Artificial Sequence
  primer
cctggagccttggcaatc

SEQ ID NO: 71860 - DNA, 21 bp, Artificial Sequence
  primer
gttccttccagatgaagaccg

SEQ ID NO: 71861 - DNA, 38 bp, Artificial Sequence
  primer
gtaaaacgacggccagtacctcagagcaagattccagg

SEQ ID NO: 71862 - DNA, 21 bp, Artificial Sequence
  primer
ctctagcagctgccctgtctc

SEQ ID NO: 71863 - DNA, 19 bp, Artificial Sequence
  primer
agcctcctccctccacaac

SEQ ID NO: 71864 - DNA, 38 bp, Artificial Sequence
  primer
gtaaaacgacggccagttccattgagaaagggtcttgg

SEQ ID NO: 71865 - DNA, 38 bp, Artificial Sequence
  primer
gtaaaacgacggccagtctgtgaaaggaaaggtgccag

SEQ ID NO: 71866 - DNA, 21 bp, Artificial Sequence
  primer
gtgagtgaagggacttcctgg

SEQ ID NO: 71867 - DNA, 38 bp, Artificial Sequence
  primer
gtaaaacgacggccagttggaggaacaatgtgagttgg

SEQ ID NO: 71868 - DNA, 21 bp, Artificial Sequence
  primer
gctaagggatctcagtgggag

SEQ ID NO: 71869 - DNA, 37 bp, Artificial Sequence
  primer
gtaaaacgacggccagtctgggagcaagggtagaagc

SEQ ID NO: 71870 - DNA, 21 bp, Artificial Sequence
  primer
ccttgaagtcagagcccacac

SEQ ID NO: 71871 - DNA, 38 bp, Artificial Sequence
  primer
gtaaaacgacggccagtaaagacatcacccagggactc

SEQ ID NO: 71872 - DNA, 38 bp, Artificial Sequence
  primer
gtaaaacgacggccagtaaagggcttaggacccagaag

SEQ ID NO: 71873 - DNA, 21 bp, Artificial Sequence
  primer
tgaagttaaagggcgagatgg

SEQ ID NO: 71874 - DNA, 21 bp, Artificial Sequence
  primer
tgactaggctgagacccaagg

SEQ ID NO: 71875 - DNA, 21 bp, Artificial Sequence
  primer
gagtagagtccgtgcatgacc

SEQ ID NO: 71876 - DNA, 38 bp, Artificial Sequence
  primer
gtaaaacgacggccagtggttcatccacctgacttgtg

SEQ ID NO: 71877 - DNA, 21 bp, Artificial Sequence
  primer
aagagacgagtcactgcaggc

SEQ ID NO: 71878 - DNA, 20 bp, Artificial Sequence
  primer
cctttctgaagctggaggtg

SEQ ID NO: 71879 - DNA, 21 bp, Artificial Sequence
  primer
ctccctttagggcctcatctg

SEQ ID NO: 71880 - DNA, 38 bp, Artificial Sequence
  primer
gtaaaacgacggccagtattactgggaaccacgtccag

SEQ ID NO: 71881 - DNA, 20 bp, Artificial Sequence
  primer
ggcccacaataagtgctcag

SEQ ID NO: 71882 - DNA, 21 bp, Artificial Sequence
  primer
ggtaagaagggagtcaagccc

SEQ ID NO: 71883 - DNA, 35 bp, Artificial Sequence
  primer
gtaaaacgacggccagtcggctggtgtcactttgg

SEQ ID NO: 71884 - DNA, 21 bp, Artificial Sequence
  primer
ttcttcagctacagccagcag

SEQ ID NO: 71885 - DNA, 22 bp, Artificial Sequence
  primer
gctcacgaggaagaatgaattg

SEQ ID NO: 71886 - DNA, 21 bp, Artificial Sequence
  primer
tacacaacaccatgcatcagg

SEQ ID NO: 71887 - DNA, 43 bp, Artificial Sequence
  primer
gtaaaacgacggccagtaaattggtgatcaggatgaaatagta

SEQ ID NO: 71888 - DNA, 22 bp, Artificial Sequence
  primer
ggtggtgggatctttgtaacac

SEQ ID NO: 71889 - DNA, 23 bp, Artificial Sequence
  primer
tgtaatattctgtcaacccaccc

SEQ ID NO: 71890 - DNA, 38 bp, Artificial Sequence
  primer
gtaaaacgacggccagtcagcccaggaatctctttcag

SEQ ID NO: 71891 - DNA, 38 bp, Artificial Sequence
  primer
gtaaaacgacggccagtaatccaaatccattccaccac

SEQ ID NO: 71892 - DNA, 23 bp, Artificial Sequence
  primer
tccctagttacattaagggcagg

SEQ ID NO: 71893 - DNA, 38 bp, Artificial Sequence
  primer
gtaaaacgacggccagtagccttcagccctagaccttc

SEQ ID NO: 71894 - DNA, 21 bp, Artificial Sequence
  primer
aggttatgaagtgagggctgg

SEQ ID NO: 71895 - DNA, 23 bp, Artificial Sequence
  primer
gacatggtaatccatttcaggag

SEQ ID NO: 71896 - DNA, 38 bp, Artificial Sequence
  primer
gtaaaacgacggccagtttacaacagacacccaggtcc

SEQ ID NO: 71897 - DNA, 20 bp, Artificial Sequence
  primer
agagtaagggagggtggctg

SEQ ID NO: 71898 - DNA, 38 bp, Artificial Sequence
  primer
gtaaaacgacggccagtaagaagcaacctcccattctg

SEQ ID NO: 71899 - DNA, 40 bp, Artificial Sequence
  primer
gtaaaacgacggccagtaacatccaaccatcactcaacac

SEQ ID NO: 71900 - DNA, 21 bp, Artificial Sequence
  primer
ctgacattggagtgggatgag

SEQ ID NO: 71901 - DNA, 36 bp, Artificial Sequence
  primer
gtaaaacgacggccagtaaggccagtgacagaaccc

SEQ ID NO: 71902 - DNA, 22 bp, Artificial Sequence
  primer
tcaatcctggcaagagataagg

SEQ ID NO: 71903 - DNA, 24 bp, Artificial Sequence
  primer
gcaatcttaaaccaatgactcacc

SEQ ID NO: 71904 - DNA, 21 bp, Artificial Sequence
  primer
cagtcccttccttgcagaatc

SEQ ID NO: 71905 - DNA, 39 bp, Artificial Sequence
  primer
gtaaaacgacggccagtaagctgacaaatgaagctggtc

SEQ ID NO: 71906 - DNA, 38 bp, Artificial Sequence
  primer
gtaaaacgacggccagtgacgtcgattctgcatagcac

SEQ ID NO: 71907 - DNA, 21 bp, Artificial Sequence
  primer
aagaaagcctgcacaaactcc

SEQ ID NO: 71908 - DNA, 20 bp, Artificial Sequence
  primer
tttaacaaggcggcactgac

SEQ ID NO: 71909 - DNA, 21 bp, Artificial Sequence
  primer
gggtgacagcaagactccatc

SEQ ID NO: 71910 - DNA, 21 bp, Artificial Sequence
  primer
tttgcacagtcaatagccaga

SEQ ID NO: 71911 - DNA, 21 bp, Artificial Sequence
  primer
tattgaagaagccaggtgtgg

SEQ ID NO: 71912 - DNA, 38 bp, Artificial Sequence
  primer
gtaaaacgacggccagtgacatggcactgaaagcactc

SEQ ID NO: 71913 - DNA, 40 bp, Artificial Sequence
  primer
gtaaaacgacggccagttcatcctccaataggagttaggc

SEQ ID NO: 71914 - DNA, 39 bp, Artificial Sequence
  primer
gtaaaacgacggccagtaataaacatgaccactgcctcc

SEQ ID NO: 71915 - DNA, 39 bp, Artificial Sequence
  primer
gtaaaacgacggccagtcaacatggacgaaatgagatcc

SEQ ID NO: 71916 - DNA, 39 bp, Artificial Sequence
  primer
gtaaaacgacggccagtttgctgacacctctctaacagc

SEQ ID NO: 71917 - DNA, 38 bp, Artificial Sequence
  primer
gtaaaacgacggccagtcctctcaggaaagggaaagaa

SEQ ID NO: 71918 - DNA, 39 bp, Artificial Sequence
  primer
gtaaaacgacggccagtgagaagaaggatgtcaaatggg

SEQ ID NO: 71919 - DNA, 21 bp, Artificial Sequence
  primer
ctacccaatctggtttccctg

SEQ ID NO: 71920 - DNA, 23 bp, Artificial Sequence
  primer
aatctaaaccaaagctcaaaggc

SEQ ID NO: 71921 - DNA, 39 bp, Artificial Sequence
  primer
gtaaaacgacggccagtggagatgacgcaggactctatg

SEQ ID NO: 71922 - DNA, 37 bp, Artificial Sequence
  primer
gtaaaacgacggccagtagacagctgtggaatgctgg

SEQ ID NO: 71923 - DNA, 37 bp, Artificial Sequence
  primer
gtaaaacgacggccagtgatttaatcagggctttggg

SEQ ID NO: 71924 - DNA, 27 bp, Artificial Sequence
  primer
tcttccttctatcatgtttaacaatcc

SEQ ID NO: 71925 - DNA, 38 bp, Artificial Sequence
  primer
gtaaaacgacggccagttactattgccagaggagcagg

SEQ ID NO: 71926 - DNA, 23 bp, Artificial Sequence
  primer
gaggacaatgccatagaatgttg

SEQ ID NO: 71927 - DNA, 20 bp, Artificial Sequence
  primer
actggaatcgattgtgctgc

SEQ ID NO: 71928 - DNA, 21 bp, Artificial Sequence
  primer
actggattgactggcttgctc

SEQ ID NO: 71929 - DNA, 21 bp, Artificial Sequence
  primer
tgtgtccacaatttctcccag

SEQ ID NO: 71930 - DNA, 38 bp, Artificial Sequence
  primer
gtaaaacgacggccagtgtggctccaccattagcaaag

SEQ ID NO: 71931 - DNA, 38 bp, Artificial Sequence
  primer
gtaaaacgacggccagtttctgccaagtcaaggcatag

SEQ ID NO: 71932 - DNA, 22 bp, Artificial Sequence
  primer
ctccactgtcactgtcttgtgc

SEQ ID NO: 71933 - DNA, 39 bp, Artificial Sequence
  primer
gtaaaacgacggccagtgcaacaaagtcgaactgcaaac

SEQ ID NO: 71934 - DNA, 38 bp, Artificial Sequence
  primer
gtaaaacgacggccagtgccacccaggtagaaagtgac

SEQ ID NO: 71935 - DNA, 21 bp, Artificial Sequence
  primer
tttgaatatcccagagcaggc

SEQ ID NO: 71936 - DNA, 20 bp, Artificial Sequence
  primer
cttcccattcccaattcagg

SEQ ID NO: 71937 - DNA, 21 bp, Artificial Sequence
  primer
tctggttcaaaggtacatggg

SEQ ID NO: 71938 - DNA, 38 bp, Artificial Sequence
  primer
gtaaaacgacggccagtagccagggatgctaatagtcc

SEQ ID NO: 71939 - DNA, 38 bp, Artificial Sequence
  primer
gtaaaacgacggccagttgccagcccttgctttatatc

SEQ ID NO: 71940 - DNA, 38 bp, Artificial Sequence
  primer
gtaaaacgacggccagtcaaacagaaagtgctgatggc

SEQ ID NO: 71941 - DNA, 38 bp, Artificial Sequence
  primer
gtaaaacgacggccagtgaccaggaacctgtatttccc

SEQ ID NO: 71942 - DNA, 21 bp, Artificial Sequence
  primer
acgctttgaggagaatcacag

SEQ ID NO: 71943 - DNA, 39 bp, Artificial Sequence
  primer
gtaaaacgacggccagtgggagtgtcacatgggaattag

SEQ ID NO: 71944 - DNA, 21 bp, Artificial Sequence
  primer
attccctgcctcactaacctg

SEQ ID NO: 71945 - DNA, 21 bp, Artificial Sequence
  primer
ctccgtccttcttgtactggg

SEQ ID NO: 71946 - DNA, 21 bp, Artificial Sequence
  primer
ggcatcatggcaggtaatagg

SEQ ID NO: 71947 - DNA, 38 bp, Artificial Sequence
  primer
gtaaaacgacggccagtagagccttgtagacagcagcc

SEQ ID NO: 71948 - DNA, 21 bp, Artificial Sequence
  primer
ctccagacaggaaggtgatcc

SEQ ID NO: 71949 - DNA, 20 bp, Artificial Sequence
  primer
gttggcctaagcagggagag

SEQ ID NO: 71950 - DNA, 21 bp, Artificial Sequence
  primer
ttcacagacgacaccacacac

SEQ ID NO: 71951 - DNA, 21 bp, Artificial Sequence
  primer
ggctttcaggaatgtgcctac

SEQ ID NO: 71952 - DNA, 21 bp, Artificial Sequence
  primer
gaatgttcagagtgttggccc

SEQ ID NO: 71953 - DNA, 21 bp, Artificial Sequence
  primer
cgtgtggctctaagaccagtg

SEQ ID NO: 71954 - DNA, 38 bp, Artificial Sequence
  primer
gtaaaacgacggccagtgcttgtgggaccaaatctttc

SEQ ID NO: 71955 - DNA, 21 bp, Artificial Sequence
  primer
gatgagcacctccctaccttc

SEQ ID NO: 71956 - DNA, 21 bp, Artificial Sequence
  primer
caaacagaaagcttgtggctc

SEQ ID NO: 71957 - DNA, 38 bp, Artificial Sequence
  primer
gtaaaacgacggccagtgcttctccgtgttggaaagtc

SEQ ID NO: 71958 - DNA, 37 bp, Artificial Sequence
  primer
gtaaaacgacggccagttgcaaggaaactgctgtgtg

SEQ ID NO: 71959 - DNA, 39 bp, Artificial Sequence
  primer
gtaaaacgacggccagtgcaaacaaagagaggcagtgag

SEQ ID NO: 71960 - DNA, 38 bp, Artificial Sequence
  primer
gtaaaacgacggccagtcaagcagagggttgaatccag

SEQ ID NO: 71961 - DNA, 21 bp, Artificial Sequence
  primer
accatccttcttgtattgggc

SEQ ID NO: 71962 - DNA, 21 bp, Artificial Sequence
  primer
aagagcagagatgcttgggag

SEQ ID NO: 71963 - DNA, 38 bp, Artificial Sequence
  primer
gtaaaacgacggccagtgtgtgcctggatctaagctgg

SEQ ID NO: 71964 - DNA, 22 bp, Artificial Sequence
  primer
gacaaactgactggtcactccc

SEQ ID NO: 71965 - DNA, 37 bp, Artificial Sequence
  primer
gtaaaacgacggccagtcgtggagtaagcaggctgag

SEQ ID NO: 71966 - DNA, 21 bp, Artificial Sequence
  primer
ctctgcatagctatttggccc

SEQ ID NO: 71967 - DNA, 37 bp, Artificial Sequence
  primer
gtaaaacgacggccagtgccagtgccagctagaagag

SEQ ID NO: 71968 - DNA, 21 bp, Artificial Sequence
  primer
gaactgtgtgaagggcaagtg

SEQ ID NO: 71969 - DNA, 20 bp, Artificial Sequence
  primer
accacacaggcctctccatc

SEQ ID NO: 71970 - DNA, 19 bp, Artificial Sequence
  primer
agagccaggaagggtccag

SEQ ID NO: 71971 - DNA, 21 bp, Artificial Sequence
  primer
gtagtatcccaggccaagcac

SEQ ID NO: 71972 - DNA, 37 bp, Artificial Sequence
  primer
gtaaaacgacggccagtatacatcccgagctctgtgc

SEQ ID NO: 71973 - DNA, 21 bp, Artificial Sequence
  primer
ccggatcatgtagaaagcctg

SEQ ID NO: 71974 - DNA, 38 bp, Artificial Sequence
  primer
gtaaaacgacggccagtccggatcatgtagaaagcctg

SEQ ID NO: 71975 - DNA, 21 bp, Artificial Sequence
  primer
ccagggcagtacttgtcaatg

SEQ ID NO: 71976 - DNA, 38 bp, Artificial Sequence
  primer
gtaaaacgacggccagtgaagcacaacatccttccagg

SEQ ID NO: 71977 - DNA, 21 bp, Artificial Sequence
  primer
agaaccgctcgtctaatctcg

SEQ ID NO: 71978 - DNA, 21 bp, Artificial Sequence
  primer
gcagaggctgatacacacctg

SEQ ID NO: 71979 - DNA, 23 bp, Artificial Sequence
  primer
tgtctttaaacgcccatacacac

SEQ ID NO: 71980 - DNA, 38 bp, Artificial Sequence
  primer
gtaaaacgacggccagtagacacttccatttcatgggc

SEQ ID NO: 71981 - DNA, 37 bp, Artificial Sequence
  primer
gtaaaacgacggccagtaaccaaagaccacctcccag

SEQ ID NO: 71982 - DNA, 21 bp, Artificial Sequence
  primer
gtagccttagtttgccaaccc

SEQ ID NO: 71983 - DNA, 36 bp, Artificial Sequence
  primer
gtaaaacgacggccagtccctcttccagctcacagg

SEQ ID NO: 71984 - DNA, 21 bp, Artificial Sequence
  primer
ccaccagcctgtgtgagatac

SEQ ID NO: 71985 - DNA, 38 bp, Artificial Sequence
  primer
gtaaaacgacggccagtgacaagatcatgggaagcaca

SEQ ID NO: 71986 - DNA, 36 bp, Artificial Sequence
  primer
gtaaaacgacggccagtctcctcctgggagttcagc

SEQ ID NO: 71987 - DNA, 36 bp, Artificial Sequence
  primer
gtaaaacgacggccagtagctccctctgcactgctt

SEQ ID NO: 71988 - DNA, 38 bp, Artificial Sequence
  primer
gtaaaacgacggccagtctccagcatcatttgtggagt

SEQ ID NO: 71989 - DNA, 38 bp, Artificial Sequence
  primer
gtaaaacgacggccagtaggcagtaccactgctgtcat

SEQ ID NO: 71990 - DNA, 20 bp, Artificial Sequence
  primer
tgtagggccaagtcagaagc

SEQ ID NO: 71991 - DNA, 21 bp, Artificial Sequence
  primer
gatgtgggaggcagaggtatg

SEQ ID NO: 71992 - DNA, 44 bp, Artificial Sequence
  primer
gtaaaacgacggccagtaaactaatgtaatttgaagaccaccac

SEQ ID NO: 71993 - DNA, 21 bp, Artificial Sequence
  primer
tctttcatgttctgaggctgg

SEQ ID NO: 71994 - DNA, 27 bp, Artificial Sequence
  primer
ttattgaactggtttgactcacttaac

SEQ ID NO: 71995 - DNA, 21 bp, Artificial Sequence
  primer
tctgaattctgcaaatggtcc

SEQ ID NO: 71996 - DNA, 42 bp, Artificial Sequence
  primer
gtaaaacgacggccagtaaacacagagactaaggtaaccacc

SEQ ID NO: 71997 - DNA, 39 bp, Artificial Sequence
  primer
gtaaaacgacggccagtgtaatttgaggaccaccactgc

SEQ ID NO: 71998 - DNA, 22 bp, Artificial Sequence
  primer
aatttagctacactggacgggc

SEQ ID NO: 71999 - DNA, 21 bp, Artificial Sequence
  primer
cagcctgggtgacagagtaag

SEQ ID NO: 72000 - DNA, 38 bp, Artificial Sequence
  primer
gtaaaacgacggccagtctacagagagcatgtcggtgc

SEQ ID NO: 72001 - DNA, 39 bp, Artificial Sequence
  primer
gtaaaacgacggccagttgcaattcccaactttccatag

SEQ ID NO: 72002 - DNA, 20 bp, Artificial Sequence
  primer
tcgttccacatggtatgcag

SEQ ID NO: 72003 - DNA, 21 bp, Artificial Sequence
  primer
ttagggcatgatgcagatttc

SEQ ID NO: 72004 - DNA, 38 bp, Artificial Sequence
  primer
gtaaaacgacggccagtccgaaggctagtcatccattt

SEQ ID NO: 72005 - DNA, 21 bp, Artificial Sequence
  primer
tcaagatggtcgtactgcgag

SEQ ID NO: 72006 - DNA, 21 bp, Artificial Sequence
  primer
gggcaggcaagactaacagac

SEQ ID NO: 72007 - DNA, 21 bp, Artificial Sequence
  primer
ttcaggtcacagaccatcctg

SEQ ID NO: 72008 - DNA, 21 bp, Artificial Sequence
  primer
cctcccaaatttctcttgacc

SEQ ID NO: 72009 - DNA, 20 bp, Artificial Sequence
  primer
gctgcagagaagggagaagc

SEQ ID NO: 72010 - DNA, 18 bp, Artificial Sequence
  primer
gaggaggcaggaggatgg

SEQ ID NO: 72011 - DNA, 21 bp, Artificial Sequence
  primer
tgttgacttggagaaaccgag

SEQ ID NO: 72012 - DNA, 21 bp, Artificial Sequence
  primer
ttgtcgtacctgtgggatgag

SEQ ID NO: 72013 - DNA, 38 bp, Artificial Sequence
  primer
gtaaaacgacggccagttaattgtgctggaattgtgcc

SEQ ID NO: 72014 - DNA, 38 bp, Artificial Sequence
  primer
gtaaaacgacggccagtcagggaaggtcttctctcagg

SEQ ID NO: 72015 - DNA, 21 bp, Artificial Sequence
  primer
cagatgaaccctctcccaatc

SEQ ID NO: 72016 - DNA, 21 bp, Artificial Sequence
  primer
gtcaggctcacacagaaaccc

SEQ ID NO: 72017 - DNA, 39 bp, Artificial Sequence
  primer
gtaaaacgacggccagtcagcagtttggtaacatatcgg

SEQ ID NO: 72018 - DNA, 38 bp, Artificial Sequence
  primer
gtaaaacgacggccagtggaaagtggctcacattcaag

SEQ ID NO: 72019 - DNA, 38 bp, Artificial Sequence
  primer
gtaaaacgacggccagttaacggtggctatcttcaggg

SEQ ID NO: 72020 - DNA, 37 bp, Artificial Sequence
  primer
gtaaaacgacggccagttcgcaattgacgagtgagtg

SEQ ID NO: 72021 - DNA, 38 bp, Artificial Sequence
  primer
gtaaaacgacggccagtaactccgaggtcaggaatttg

SEQ ID NO: 72022 - DNA, 19 bp, Artificial Sequence
  primer
gctcaacacagcccacatc

SEQ ID NO: 72023 - DNA, 38 bp, Artificial Sequence
  primer
gtaaaacgacggccagtatagcaacaagcaagcagcag

SEQ ID NO: 72024 - DNA, 39 bp, Artificial Sequence
  primer
gtaaaacgacggccagtaatggagagtgttaggcacagc

SEQ ID NO: 72025 - DNA, 38 bp, Artificial Sequence
  primer
gtaaaacgacggccagttcaagcagtgggcaaacatac

SEQ ID NO: 72026 - DNA, 24 bp, Artificial Sequence
  primer
acttgggtagaagcaatcagaaac

SEQ ID NO: 72027 - DNA, 21 bp, Artificial Sequence
  primer
tgtgccaatccttcataacct

SEQ ID NO: 72028 - DNA, 27 bp, Artificial Sequence
  primer
cacataactttataccatattgttggg

SEQ ID NO: 72029 - DNA, 39 bp, Artificial Sequence
  primer
gtaaaacgacggccagtgcaaggagaacattaaagccag

SEQ ID NO: 72030 - DNA, 24 bp, Artificial Sequence
  primer
gcaggcactttagggtaagaatag

SEQ ID NO: 72031 - DNA, 25 bp, Artificial Sequence
  primer
gcatgcttctatttagctgttatcc

SEQ ID NO: 72032 - DNA, 38 bp, Artificial Sequence
  primer
gtaaaacgacggccagtcaccagcatgcaagagatgag

SEQ ID NO: 72033 - DNA, 39 bp, Artificial Sequence
  primer
gtaaaacgacggccagtagcagctacaagcaatctctcc

SEQ ID NO: 72034 - DNA, 41 bp, Artificial Sequence
  primer
gtaaaacgacggccagtgcacccagaattattcctttctac

SEQ ID NO: 72035 - DNA, 22 bp, Artificial Sequence
  primer
agtttggtcaatctcacaagcc

SEQ ID NO: 72036 - DNA, 22 bp, Artificial Sequence
  primer
tttgttcccaatcaaacaacat

SEQ ID NO: 72037 - DNA, 24 bp, Artificial Sequence
  primer
tctctcttcccacataccctacag

SEQ ID NO: 72038 - DNA, 39 bp, Artificial Sequence
  primer
gtaaaacgacggccagttggcaaggaatgattacaggag

SEQ ID NO: 72039 - DNA, 21 bp, Artificial Sequence
  primer
aacccaggagacagagactgc

SEQ ID NO: 72040 - DNA, 38 bp, Artificial Sequence
  primer
gtaaaacgacggccagtttcccaacccaataaatcctg

SEQ ID NO: 72041 - DNA, 44 bp, Artificial Sequence
  primer
gtaaaacgacggccagttgcaaagatataacatttgtgtagttt

SEQ ID NO: 72042 - DNA, 38 bp, Artificial Sequence
  primer
gtaaaacgacggccagtgagggcattaggagttcatcc

SEQ ID NO: 72043 - DNA, 41 bp, Artificial Sequence
  primer
gtaaaacgacggccagtggtgatagttgtgcaaatctgttt

SEQ ID NO: 72044 - DNA, 38 bp, Artificial Sequence
  primer
gtaaaacgacggccagtccatttcctttcctgtggttc

SEQ ID NO: 72045 - DNA, 38 bp, Artificial Sequence
  primer
gtaaaacgacggccagttatccacacctttctctcccg

SEQ ID NO: 72046 - DNA, 19 bp, Artificial Sequence
  primer
ctgacctcatgatctgccc

SEQ ID NO: 72047 - DNA, 23 bp, Artificial Sequence
  primer
ccatttcttccacaagattcagc

SEQ ID NO: 72048 - DNA, 38 bp, Artificial Sequence
  primer
gtaaaacgacggccagttcagagtccagtgaagttggg

SEQ ID NO: 72049 - DNA, 38 bp, Artificial Sequence
  primer
gtaaaacgacggccagtagtgtctatcgcacttggcag

SEQ ID NO: 72050 - DNA, 21 bp, Artificial Sequence
  primer
cttatcaagcaagccaccaag

SEQ ID NO: 72051 - DNA, 21 bp, Artificial Sequence
  primer
ggagtcacgttgggtaaggag

SEQ ID NO: 72052 - DNA, 38 bp, Artificial Sequence
  primer
gtaaaacgacggccagttggagaacaaacaattcagcc

SEQ ID NO: 72053 - DNA, 39 bp, Artificial Sequence
  primer
gtaaaacgacggccagtaatctgcagaaggattacaggc

SEQ ID NO: 72054 - DNA, 21 bp, Artificial Sequence
  primer
tggtgaacatgacaagaaggg

SEQ ID NO: 72055 - DNA, 23 bp, Artificial Sequence
  primer
tgctgagaattacaggaaattgg

SEQ ID NO: 72056 - DNA, 21 bp, Artificial Sequence
  primer
tgggattgagtgatttctccc

SEQ ID NO: 72057 - DNA, 39 bp, Artificial Sequence
  primer
gtaaaacgacggccagtggcaactttcttcaagttctgg

SEQ ID NO: 72058 - DNA, 36 bp, Artificial Sequence
  primer
gtaaaacgacggccagtcgccacagctaagaccctc

SEQ ID NO: 72059 - DNA, 38 bp, Artificial Sequence
  primer
gtaaaacgacggccagtttctgacctcaggcaattcac

SEQ ID NO: 72060 - DNA, 21 bp, Artificial Sequence
  primer
gcttgttgaatggtgaattgg

SEQ ID NO: 72061 - DNA, 44 bp, Artificial Sequence
  primer
gtaaaacgacggccagttctaatcactgcctagactatcacaac

SEQ ID NO: 72062 - DNA, 39 bp, Artificial Sequence
  primer
gtaaaacgacggccagttgtgaactattggtgaacctgc

SEQ ID NO: 72063 - DNA, 41 bp, Artificial Sequence
  primer
gtaaaacgacggccagtgcccaattgattaacttcagattc

SEQ ID NO: 72064 - DNA, 19 bp, Artificial Sequence
  primer
caatgaccaccacaggcac

SEQ ID NO: 72065 - DNA, 38 bp, Artificial Sequence
  primer
gtaaaacgacggccagttggctacgtgtcatcattgtg

SEQ ID NO: 72066 - DNA, 22 bp, Artificial Sequence
  primer
gtaagccaaccatttccatagg

SEQ ID NO: 72067 - DNA, 23 bp, Artificial Sequence
  primer
ggtggaagcattctgtaatttgc

SEQ ID NO: 72068 - DNA, 26 bp, Artificial Sequence
  primer
aagatacagaagtcatatgccactca

SEQ ID NO: 72069 - DNA, 21 bp, Artificial Sequence
  primer
ctacctagacccagccctcag

SEQ ID NO: 72070 - DNA, 21 bp, Artificial Sequence
  primer
tgaattcaagcaattatcccg

SEQ ID NO: 72071 - DNA, 22 bp, Artificial Sequence
  primer
cgatggctactagagtcaaccc

SEQ ID NO: 72072 - DNA, 38 bp, Artificial Sequence
  primer
gtaaaacgacggccagtacttgcagggagtcaggtcac

SEQ ID NO: 72073 - DNA, 21 bp, Artificial Sequence
  primer
actgccagactcttcctctgc

SEQ ID NO: 72074 - DNA, 21 bp, Artificial Sequence
  primer
ctgaacagctcgctgagattg

SEQ ID NO: 72075 - DNA, 21 bp, Artificial Sequence
  primer
aaacactaaatcccggcacac

SEQ ID NO: 72076 - DNA, 38 bp, Artificial Sequence
  primer
gtaaaacgacggccagtgaaactacggtctgattcggg

SEQ ID NO: 72077 - DNA, 38 bp, Artificial Sequence
  primer
gtaaaacgacggccagtttgcatatagggagctgaggg

SEQ ID NO: 72078 - DNA, 39 bp, Artificial Sequence
  primer
gtaaaacgacggccagtaagaagccatggaaagtcacag

SEQ ID NO: 72079 - DNA, 21 bp, Artificial Sequence
  primer
attgctcaacctggacctacc

SEQ ID NO: 72080 - DNA, 21 bp, Artificial Sequence
  primer
ataagtgtgcacattcccagc

SEQ ID NO: 72081 - DNA, 38 bp, Artificial Sequence
  primer
gtaaaacgacggccagtttgaagactgtgtggctttgc

SEQ ID NO: 72082 - DNA, 38 bp, Artificial Sequence
  primer
gtaaaacgacggccagttgtgtgaacgctctaggcaag

SEQ ID NO: 72083 - DNA, 38 bp, Artificial Sequence
  primer
gtaaaacgacggccagtatgttgatggacatgctctgc

SEQ ID NO: 72084 - DNA, 21 bp, Artificial Sequence
  primer
acatctgcatgtgtgtcttgg

SEQ ID NO: 72085 - DNA, 38 bp, Artificial Sequence
  primer
gtaaaacgacggccagtgagggttgatttcagggtgag

SEQ ID NO: 72086 - DNA, 39 bp, Artificial Sequence
  primer
gtaaaacgacggccagtcaccctaaagacagcaccaatc

SEQ ID NO: 72087 - DNA, 21 bp, Artificial Sequence
  primer
atgcacccataggcaagactc

SEQ ID NO: 72088 - DNA, 38 bp, Artificial Sequence
  primer
gtaaaacgacggccagtgaggagggtgttgagtgttgg

SEQ ID NO: 72089 - DNA, 38 bp, Artificial Sequence
  primer
gtaaaacgacggccagttgtttctatcccagggctgtc

SEQ ID NO: 72090 - DNA, 21 bp, Artificial Sequence
  primer
gtgactaagatgccctcaggc

SEQ ID NO: 72091 - DNA, 21 bp, Artificial Sequence
  primer
acatcacagtccacacttggg

SEQ ID NO: 72092 - DNA, 38 bp, Artificial Sequence
  primer
gtaaaacgacggccagtggacccataattgtgcctctg

SEQ ID NO: 72093 - DNA, 21 bp, Artificial Sequence
  primer
ctggaacccagaaaccatttg

SEQ ID NO: 72094 - DNA, 37 bp, Artificial Sequence
  primer
gtaaaacgacggccagtaagtgacaccttggcacctg

SEQ ID NO: 72095 - DNA, 21 bp, Artificial Sequence
  primer
tttgtggctagaggagtctgc

SEQ ID NO: 72096 - DNA, 38 bp, Artificial Sequence
  primer
gtaaaacgacggccagtaggctgtgagctgagaactgc

SEQ ID NO: 72097 - DNA, 21 bp, Artificial Sequence
  primer
acaacacgatttcccttggag

SEQ ID NO: 72098 - DNA, 21 bp, Artificial Sequence
  primer
ccctgtccaagcctaaagttg

SEQ ID NO: 72099 - DNA, 21 bp, Artificial Sequence
  primer
ttactggagcccagaaattcg

SEQ ID NO: 72100 - DNA, 21 bp, Artificial Sequence
  primer
atgtaagggacaagcagccac

SEQ ID NO: 72101 - DNA, 21 bp, Artificial Sequence
  primer
tttgagaaccactgttgtcgg

SEQ ID NO: 72102 - DNA, 37 bp, Artificial Sequence
  primer
gtaaaacgacggccagttgaagtcgcagtcacattcg

SEQ ID NO: 72103 - DNA, 37 bp, Artificial Sequence
  primer
gtaaaacgacggccagtggcaaatggagacaccagtc

SEQ ID NO: 72104 - DNA, 20 bp, Artificial Sequence
  primer
agctgtgggtttctttgcag

SEQ ID NO: 72105 - DNA, 38 bp, Artificial Sequence
  primer
gtaaaacgacggccagttgttgctggtagccgtaattg

SEQ ID NO: 72106 - DNA, 38 bp, Artificial Sequence
  primer
gtaaaacgacggccagttctctggtttgtgaaggagcc

SEQ ID NO: 72107 - DNA, 21 bp, Artificial Sequence
  primer
agccaaaggaggtcaggaatc

SEQ ID NO: 72108 - DNA, 21 bp, Artificial Sequence
  primer
ttcaatggtcatgccactttc

SEQ ID NO: 72109 - DNA, 20 bp, Artificial Sequence
  primer
aagggatcctcccacaaatg

SEQ ID NO: 72110 - DNA, 21 bp, Artificial Sequence
  primer
tttgcttggaaacaatgaagg

SEQ ID NO: 72111 - DNA, 20 bp, Artificial Sequence
  primer
aagggatcctcccacaaatg

SEQ ID NO: 72112 - DNA, 43 bp, Artificial Sequence
  primer
gtaaaacgacggccagttggaagattatagagtccaaccactt

SEQ ID NO: 72113 - DNA, 38 bp, Artificial Sequence
  primer
gtaaaacgacggccagtctgaagtccacggcaatacac

SEQ ID NO: 72114 - DNA, 24 bp, Artificial Sequence
  primer
tccaaacatacgatcattaattgc

SEQ ID NO: 72115 - DNA, 38 bp, Artificial Sequence
  primer
gtaaaacgacggccagttgaaccaaatagggtggaacc

SEQ ID NO: 72116 - DNA, 20 bp, Artificial Sequence
  primer
ggtaagggaaatgccagctc

SEQ ID NO: 72117 - DNA, 21 bp, Artificial Sequence
  primer
ccgagtcctcctgatacttgc

SEQ ID NO: 72118 - DNA, 38 bp, Artificial Sequence
  primer
gtaaaacgacggccagtgaagtacttgttgcgcagtgg

SEQ ID NO: 72119 - DNA, 38 bp, Artificial Sequence
  primer
gtaaaacgacggccagtacctgagcacagtcacgcttc

SEQ ID NO: 72120 - DNA, 38 bp, Artificial Sequence
  primer
gtaaaacgacggccagtaacccttctctcgctccctac

SEQ ID NO: 72121 - DNA, 22 bp, Artificial Sequence
  primer
aatgttgcccaaatcttgtctc

SEQ ID NO: 72122 - DNA, 21 bp, Artificial Sequence
  primer
agcaagccaaggctcctaaac

SEQ ID NO: 72123 - DNA, 38 bp, Artificial Sequence
  primer
gtaaaacgacggccagttaaggatgagccagagttccc

SEQ ID NO: 72124 - DNA, 40 bp, Artificial Sequence
  primer
gtaaaacgacggccagtaaataaacccagcctgatacagc

SEQ ID NO: 72125 - DNA, 21 bp, Artificial Sequence
  primer
tctttctcgctaacgggtttc

SEQ ID NO: 72126 - DNA, 39 bp, Artificial Sequence
  primer
gtaaaacgacggccagtcatgctgatttgcatgtctttc

SEQ ID NO: 72127 - DNA, 20 bp, Artificial Sequence
  primer
cttctcaccctttgtgcctg

SEQ ID NO: 72128 - DNA, 38 bp, Artificial Sequence
  primer
gtaaaacgacggccagtctgggtggtagggaaagtgag

SEQ ID NO: 72129 - DNA, 38 bp, Artificial Sequence
  primer
gtaaaacgacggccagtcatgatgctcactcttcccag

SEQ ID NO: 72130 - DNA, 22 bp, Artificial Sequence
  primer
accaagaaggaaagagcaagtc

SEQ ID NO: 72131 - DNA, 21 bp, Artificial Sequence
  primer
gtgctttgagatgtgcctttc

SEQ ID NO: 72132 - DNA, 20 bp, Artificial Sequence
  primer
ttgggcttctgagtctctgc

SEQ ID NO: 72133 - DNA, 21 bp, Artificial Sequence
  primer
agtgtcctcagtcccacttcc

SEQ ID NO: 72134 - DNA, 39 bp, Artificial Sequence
  primer
gtaaaacgacggccagtttggagcgtatcctaatccttc

SEQ ID NO: 72135 - DNA, 23 bp, Artificial Sequence
  primer
agagatcaatttgtgagacgacc

SEQ ID NO: 72136 - DNA, 20 bp, Artificial Sequence
  primer
ttgggcttctgagtctctgc

SEQ ID NO: 72137 - DNA, 19 bp, Artificial Sequence
  primer
gagtctgggccgcctacta

SEQ ID NO: 72138 - DNA, 21 bp, Artificial Sequence
  primer
aagctatgatcatgccactgc

SEQ ID NO: 72139 - DNA, 41 bp, Artificial Sequence
  primer
gtaaaacgacggccagtgaaagttacaagacttgcagtccc

SEQ ID NO: 72140 - DNA, 38 bp, Artificial Sequence
  primer
gtaaaacgacggccagtcccaccttagcctgaagtcac

SEQ ID NO: 72141 - DNA, 38 bp, Artificial Sequence
  primer
gtaaaacgacggccagtgcaaagttccctctttgttcc

SEQ ID NO: 72142 - DNA, 38 bp, Artificial Sequence
  primer
gtaaaacgacggccagtttggtcatgtacccaggaaac

SEQ ID NO: 72143 - DNA, 21 bp, Artificial Sequence
  primer
cacttgatcttggaaccagcc

SEQ ID NO: 72144 - DNA, 21 bp, Artificial Sequence
  primer
gctggttcaggaatagctgtg

SEQ ID NO: 72145 - DNA, 21 bp, Artificial Sequence
  primer
agcagctgaaacttccaaagg

SEQ ID NO: 72146 - DNA, 38 bp, Artificial Sequence
  primer
gtaaaacgacggccagtctgtctgcgaactcttgttgg

SEQ ID NO: 72147 - DNA, 38 bp, Artificial Sequence
  primer
gtaaaacgacggccagtctgtctgctaagtcctgtggg

SEQ ID NO: 72148 - DNA, 37 bp, Artificial Sequence
  primer
gtaaaacgacggccagtactttcagagcctcttcggg

SEQ ID NO: 72149 - DNA, 21 bp, Artificial Sequence
  primer
ctgctgatagaaagcactggg

SEQ ID NO: 72150 - DNA, 39 bp, Artificial Sequence
  primer
gtaaaacgacggccagtggtactgttggtgttgggacag

SEQ ID NO: 72151 - DNA, 38 bp, Artificial Sequence
  primer
gtaaaacgacggccagttgctggtgtgtcagtcatctg

SEQ ID NO: 72152 - DNA, 38 bp, Artificial Sequence
  primer
gtaaaacgacggccagtcctggcaaggtctgttgatag

SEQ ID NO: 72153 - DNA, 21 bp, Artificial Sequence
  primer
accgctgaaacattcttagcc

SEQ ID NO: 72154 - DNA, 38 bp, Artificial Sequence
  primer
gtaaaacgacggccagtcgctgaaacgttcttagcctc

SEQ ID NO: 72155 - DNA, 38 bp, Artificial Sequence
  primer
gtaaaacgacggccagttagatgaccctctggaaaggc

SEQ ID NO: 72156 - DNA, 21 bp, Artificial Sequence
  primer
gcctgccggtagaaagtaatg

SEQ ID NO: 72157 - DNA, 38 bp, Artificial Sequence
  primer
gtaaaacgacggccagtcagggcctgttggtagaagac

SEQ ID NO: 72158 - DNA, 21 bp, Artificial Sequence
  primer
tggtaggaaacaatgggcttc

SEQ ID NO: 72159 - DNA, 21 bp, Artificial Sequence
  primer
aagatctggcaactcctgctc

SEQ ID NO: 72160 - DNA, 38 bp, Artificial Sequence
  primer
gtaaaacgacggccagtcagtcttccggtcaccttgtc

SEQ ID NO: 72161 - DNA, 21 bp, Artificial Sequence
  primer
gggtagctgctggaaactcag

SEQ ID NO: 72162 - DNA, 23 bp, Artificial Sequence
  primer
ttagttcagggacagctgaaatc

SEQ ID NO: 72163 - DNA, 36 bp, Artificial Sequence
  primer
gtaaaacgacggccagtccagctggtccaggaattg

SEQ ID NO: 72164 - DNA, 23 bp, Artificial Sequence
  primer
aaggaactaggaagagctgttgg

SEQ ID NO: 72165 - DNA, 38 bp, Artificial Sequence
  primer
gtaaaacgacggccagttggaagagggttctttgaagc

SEQ ID NO: 72166 - DNA, 38 bp, Artificial Sequence
  primer
gtaaaacgacggccagtggcatttcaaattcgtctgtg

SEQ ID NO: 72167 - DNA, 21 bp, Artificial Sequence
  primer
tcccaatggttccactacacc

SEQ ID NO: 72168 - DNA, 21 bp, Artificial Sequence
  primer
actgctaccaccaccatcctc

SEQ ID NO: 72169 - DNA, 24 bp, Artificial Sequence
  primer
tgaaactttcttcttaccatgtgc

SEQ ID NO: 72170 - DNA, 38 bp, Artificial Sequence
  primer
gtaaaacgacggccagtcagtgacctgtgattgcactg

SEQ ID NO: 72171 - DNA, 21 bp, Artificial Sequence
  primer
ttgaaatgggagttgttctgg

SEQ ID NO: 72172 - DNA, 20 bp, Artificial Sequence
  primer
gcattcgaagacctttgctg

SEQ ID NO: 72173 - DNA, 21 bp, Artificial Sequence
  primer
ttggctttgccttctaccttc

SEQ ID NO: 72174 - DNA, 38 bp, Artificial Sequence
  primer
gtaaaacgacggccagtctagggtggaacttggtctgc

SEQ ID NO: 72175 - DNA, 21 bp, Artificial Sequence
  primer
tttgctttggcattgttcaag

SEQ ID NO: 72176 - DNA, 21 bp, Artificial Sequence
  primer
ttggttccagtgatctcgaag

SEQ ID NO: 72177 - DNA, 21 bp, Artificial Sequence
  primer
agagaaatcacacggcctttc

SEQ ID NO: 72178 - DNA, 41 bp, Artificial Sequence
  primer
gtaaaacgacggccagttctgttgacagctatgcaaataaa

SEQ ID NO: 72179 - DNA, 23 bp, Artificial Sequence
  primer
tgtcactccagaatcaactagcc

SEQ ID NO: 72180 - DNA, 23 bp, Artificial Sequence
  primer
tgctcaatataacagcaaggaga

SEQ ID NO: 72181 - DNA, 24 bp, Artificial Sequence
  primer
aaaccctccagaaatatcacaaag

SEQ ID NO: 72182 - DNA, 26 bp, Artificial Sequence
  primer
catcagaatgaaatggaaacactaac

SEQ ID NO: 72183 - DNA, 21 bp, Artificial Sequence
  primer
aattcacattgatgctgaggc

SEQ ID NO: 72184 - DNA, 21 bp, Artificial Sequence
  primer
ggtgaccttctgatccctttg

SEQ ID NO: 72185 - DNA, 26 bp, Artificial Sequence
  primer
cctctgctatcatcatgtgtactttc

SEQ ID NO: 72186 - DNA, 21 bp, Artificial Sequence
  primer
ctactcctttcgtgcagagcc

SEQ ID NO: 72187 - DNA, 21 bp, Artificial Sequence
  primer
tggatgtgtctccttctggtg

SEQ ID NO: 72188 - DNA, 21 bp, Artificial Sequence
  primer
gatctagcagcaaagcccttc

SEQ ID NO: 72189 - DNA, 22 bp, Artificial Sequence
  primer
gaaatatacaagggaacccgct

SEQ ID NO: 72190 - DNA, 38 bp, Artificial Sequence
  primer
gtaaaacgacggccagtgaaacacagagtcagcatcgc

SEQ ID NO: 72191 - DNA, 39 bp, Artificial Sequence
  primer
gtaaaacgacggccagtctcagctcaccaagtcacagag

SEQ ID NO: 72192 - DNA, 38 bp, Artificial Sequence
  primer
gtaaaacgacggccagtaatgtgctgacggctaagttg

SEQ ID NO: 72193 - DNA, 21 bp, Artificial Sequence
  primer
gaggagcctaagacatgcaaa

SEQ ID NO: 72194 - DNA, 20 bp, Artificial Sequence
  primer
tcattcctcaaatgcggttc

SEQ ID NO: 72195 - DNA, 39 bp, Artificial Sequence
  primer
gtaaaacgacggccagtgcagaaagtattgctcccaaac

SEQ ID NO: 72196 - DNA, 21 bp, Artificial Sequence
  primer
tggcctcatacttacattggc

SEQ ID NO: 72197 - DNA, 21 bp, Artificial Sequence
  primer
ctccgaccgtccttaactctg

SEQ ID NO: 72198 - DNA, 21 bp, Artificial Sequence
  primer
ggatgtcatggtcagtgatgg

SEQ ID NO: 72199 - DNA, 22 bp, Artificial Sequence
  primer
cagtccctcaccgtctatcatc

SEQ ID NO: 72200 - DNA, 21 bp, Artificial Sequence
  primer
gggactgtggagtgtgatgag

SEQ ID NO: 72201 - DNA, 39 bp, Artificial Sequence
  primer
gtaaaacgacggccagtcagtttggattctctctgtccg

SEQ ID NO: 72202 - DNA, 19 bp, Artificial Sequence
  primer
gtttgggagccaagagctg

SEQ ID NO: 72203 - DNA, 23 bp, Artificial Sequence
  primer
tctcctcttcactcacaaattgc

SEQ ID NO: 72204 - DNA, 25 bp, Artificial Sequence
  primer
gacattcacacatagttgatcttgg

SEQ ID NO: 72205 - DNA, 21 bp, Artificial Sequence
  primer
tctgcttctcctttctggacc

SEQ ID NO: 72206 - DNA, 21 bp, Artificial Sequence
  primer
atacacatgctttcccgtgtg

SEQ ID NO: 72207 - DNA, 21 bp, Artificial Sequence
  primer
cattgtgcatggagcattagg

SEQ ID NO: 72208 - DNA, 38 bp, Artificial Sequence
  primer
gtaaaacgacggccagtaagacaaacgcacctagagcc

SEQ ID NO: 72209 - DNA, 23 bp, Artificial Sequence
  primer
gccttagcagcagagactttagg

SEQ ID NO: 72210 - DNA, 21 bp, Artificial Sequence
  primer
agctctggacaaggcgtgtag

SEQ ID NO: 72211 - DNA, 21 bp, Artificial Sequence
  primer
ggaaatgtgtgacagtggcag

SEQ ID NO: 72212 - DNA, 38 bp, Artificial Sequence
  primer
gtaaaacgacggccagtcaagggaaaccgagatgtcac

SEQ ID NO: 72213 - DNA, 39 bp, Artificial Sequence
  primer
gtaaaacgacggccagtgaatcccggaatatagccattc

SEQ ID NO: 72214 - DNA, 20 bp, Artificial Sequence
  primer
tttctgggtctgcgtttcag

SEQ ID NO: 72215 - DNA, 21 bp, Artificial Sequence
  primer
aagaagactatgggcaccgag

SEQ ID NO: 72216 - DNA, 36 bp, Artificial Sequence
  primer
gtaaaacgacggccagtcaagtaggcacccacacgg

SEQ ID NO: 72217 - DNA, 21 bp, Artificial Sequence
  primer
aggtccacacgctcacataag

SEQ ID NO: 72218 - DNA, 38 bp, Artificial Sequence
  primer
gtaaaacgacggccagtccaggctgactggagtctctc

SEQ ID NO: 72219 - DNA, 38 bp, Artificial Sequence
  primer
gtaaaacgacggccagtggagaaccaacttcatccagc

SEQ ID NO: 72220 - DNA, 21 bp, Artificial Sequence
  primer
caccagacccacactcagttc

SEQ ID NO: 72221 - DNA, 21 bp, Artificial Sequence
  primer
ctagggcagcaatttggtctc

SEQ ID NO: 72222 - DNA, 21 bp, Artificial Sequence
  primer
tggagttgaagctggaacaag

SEQ ID NO: 72223 - DNA, 21 bp, Artificial Sequence
  primer
gtttcagtggcctctcactcc

SEQ ID NO: 72224 - DNA, 19 bp, Artificial Sequence
  primer
cattcacagccagacccag

SEQ ID NO: 72225 - DNA, 20 bp, Artificial Sequence
  primer
ttactgtgtgccaccgactg

SEQ ID NO: 72226 - DNA, 20 bp, Artificial Sequence
  primer
gtccttctgtgtggcctctg

SEQ ID NO: 72227 - DNA, 38 bp, Artificial Sequence
  primer
gtaaaacgacggccagtttaacccgtccttccagtttc

SEQ ID NO: 72228 - DNA, 38 bp, Artificial Sequence
  primer
gtaaaacgacggccagttctaacatgacgaccacaggc

SEQ ID NO: 72229 - DNA, 38 bp, Artificial Sequence
  primer
gtaaaacgacggccagtccaccctgcttctttcaattc

SEQ ID NO: 72230 - DNA, 21 bp, Artificial Sequence
  primer
actctcgtgtaggaaggaggc

SEQ ID NO: 72231 - DNA, 21 bp, Artificial Sequence
  primer
ttgcagatggtgctcagtaaa

SEQ ID NO: 72232 - DNA, 19 bp, Artificial Sequence
  primer
agcctccagaggtcggaac

SEQ ID NO: 72233 - DNA, 21 bp, Artificial Sequence
  primer
ctgagaagtgagggtgagcag

SEQ ID NO: 72234 - DNA, 38 bp, Artificial Sequence
  primer
gtaaaacgacggccagtgcagacctcctgctctcctac

SEQ ID NO: 72235 - DNA, 21 bp, Artificial Sequence
  primer
tgacagggagtggaatctgag

SEQ ID NO: 72236 - DNA, 21 bp, Artificial Sequence
  primer
acccaagagtaccagtccagc

SEQ ID NO: 72237 - DNA, 38 bp, Artificial Sequence
  primer
gtaaaacgacggccagtgtggctgagagccttatgacc

SEQ ID NO: 72238 - DNA, 20 bp, Artificial Sequence
  primer
agggctataaccacgaaggg

SEQ ID NO: 72239 - DNA, 39 bp, Artificial Sequence
  primer
gtaaaacgacggccagtgggaggttaagtatgcgtcagg

SEQ ID NO: 72240 - DNA, 21 bp, Artificial Sequence
  primer
agctcacctctccatttcacc

SEQ ID NO: 72241 - DNA, 38 bp, Artificial Sequence
  primer
gtaaaacgacggccagttttgataggagaggtggaggc

SEQ ID NO: 72242 - DNA, 38 bp, Artificial Sequence
  primer
gtaaaacgacggccagttgctctgtgggattggtagtg

SEQ ID NO: 72243 - DNA, 20 bp, Artificial Sequence
  primer
tttctgagactctgggcagc

SEQ ID NO: 72244 - DNA, 38 bp, Artificial Sequence
  primer
gtaaaacgacggccagtgaggagtgtgtttcgggagag

SEQ ID NO: 72245 - DNA, 20 bp, Artificial Sequence
  primer
acttgtcatcagtgggcagg

SEQ ID NO: 72246 - DNA, 38 bp, Artificial Sequence
  primer
gtaaaacgacggccagtgatagggccatgtgaggaaag

SEQ ID NO: 72247 - DNA, 38 bp, Artificial Sequence
  primer
gtaaaacgacggccagtagaagcaggaggtagcactgg

SEQ ID NO: 72248 - DNA, 36 bp, Artificial Sequence
  primer
gtaaaacgacggccagtgggcctcagtctcctttcc

SEQ ID NO: 72249 - DNA, 21 bp, Artificial Sequence
  primer
ggagggtatacctgcaaggag

SEQ ID NO: 72250 - DNA, 21 bp, Artificial Sequence
  primer
ccaagcacaggagtcaaactg

SEQ ID NO: 72251 - DNA, 20 bp, Artificial Sequence
  primer
aaggctcatgtgtcccactg

SEQ ID NO: 72252 - DNA, 21 bp, Artificial Sequence
  primer
ttctctgggtgccagttatcc

SEQ ID NO: 72253 - DNA, 20 bp, Artificial Sequence
  primer
aagtctccgtttccgacagg

SEQ ID NO: 72254 - DNA, 21 bp, Artificial Sequence
  primer
tgcacagcagtgtcattcctc

SEQ ID NO: 72255 - DNA, 21 bp, Artificial Sequence
  primer
tgactttccagcagtgacagg

SEQ ID NO: 72256 - DNA, 21 bp, Artificial Sequence
  primer
catatcatcaaagcgtttggc

SEQ ID NO: 72257 - DNA, 38 bp, Artificial Sequence
  primer
gtaaaacgacggccagtatttcccggcaagtatcagac

SEQ ID NO: 72258 - DNA, 20 bp, Artificial Sequence
  primer
aaaggaagcggctgctgtag

SEQ ID NO: 72259 - DNA, 38 bp, Artificial Sequence
  primer
gtaaaacgacggccagttcagctggagtgtgaatggag

SEQ ID NO: 72260 - DNA, 37 bp, Artificial Sequence
  primer
gtaaaacgacggccagtgggatgtcagtgatccctcc

SEQ ID NO: 72261 - DNA, 21 bp, Artificial Sequence
  primer
agactccagccttcacccttc

SEQ ID NO: 72262 - DNA, 18 bp, Artificial Sequence
  primer
acctggtcgccctcgtag

SEQ ID NO: 72263 - DNA, 19 bp, Artificial Sequence
  primer
gggaagcctagggtggaac

SEQ ID NO: 72264 - DNA, 21 bp, Artificial Sequence
  primer
cagaatccatcctgcaagtcc

SEQ ID NO: 72265 - DNA, 38 bp, Artificial Sequence
  primer
gtaaaacgacggccagtaggattcctttgctccaagtg

SEQ ID NO: 72266 - DNA, 38 bp, Artificial Sequence
  primer
gtaaaacgacggccagttcggaggaagagatgtgactg

SEQ ID NO: 72267 - DNA, 38 bp, Artificial Sequence
  primer
gtaaaacgacggccagtaagcctgacttccaaacaacc

SEQ ID NO: 72268 - DNA, 21 bp, Artificial Sequence
  primer
cctctctggtgaagtccaacc

SEQ ID NO: 72269 - DNA, 21 bp, Artificial Sequence
  primer
cttcacagatgggagccagag

SEQ ID NO: 72270 - DNA, 22 bp, Artificial Sequence
  primer
ctacggagccgtgaatctagtc

SEQ ID NO: 72271 - DNA, 39 bp, Artificial Sequence
  primer
gtaaaacgacggccagtgatggccaatagatttacagcc

SEQ ID NO: 72272 - DNA, 38 bp, Artificial Sequence
  primer
gtaaaacgacggccagtggatctcaagagtccaggagg

SEQ ID NO: 72273 - DNA, 21 bp, Artificial Sequence
  primer
tacttgggagcccagagtttc

SEQ ID NO: 72274 - DNA, 38 bp, Artificial Sequence
  primer
gtaaaacgacggccagtcacccaaggttgagaatgagg

SEQ ID NO: 72275 - DNA, 20 bp, Artificial Sequence
  primer
cttcctggctatcaggaccc

SEQ ID NO: 72276 - DNA, 38 bp, Artificial Sequence
  primer
gtaaaacgacggccagtggagagggaatgagtccagag

SEQ ID NO: 72277 - DNA, 38 bp, Artificial Sequence
  primer
gtaaaacgacggccagttttcccaggaaggagaggaag

SEQ ID NO: 72278 - DNA, 21 bp, Artificial Sequence
  primer
tccataccctccacacacatc

SEQ ID NO: 72279 - DNA, 37 bp, Artificial Sequence
  primer
gtaaaacgacggccagtaaaggaacgagggatgatgg

SEQ ID NO: 72280 - DNA, 21 bp, Artificial Sequence
  primer
ctgcagcgtgtatcgagtgtg

SEQ ID NO: 72281 - DNA, 19 bp, Artificial Sequence
  primer
cccaggtgtcctcacaagg

SEQ ID NO: 72282 - DNA, 21 bp, Artificial Sequence
  primer
ctacctgccatttcagaaggg

SEQ ID NO: 72283 - DNA, 21 bp, Artificial Sequence
  primer
actgatgggagtagggtgtgg

SEQ ID NO: 72284 - DNA, 38 bp, Artificial Sequence
  primer
gtaaaacgacggccagtccaagctctcaacccaaattc

SEQ ID NO: 72285 - DNA, 38 bp, Artificial Sequence
  primer
gtaaaacgacggccagtctgcagtgaacataaatcccg

SEQ ID NO: 72286 - DNA, 21 bp, Artificial Sequence
  primer
tctggaggacctgaggaactg

SEQ ID NO: 72287 - DNA, 21 bp, Artificial Sequence
  primer
gtcctggaaccactgaaggtc

SEQ ID NO: 72288 - DNA, 38 bp, Artificial Sequence
  primer
gtaaaacgacggccagtgtcctggaaccactgaaggtc

SEQ ID NO: 72289 - DNA, 38 bp, Artificial Sequence
  primer
gtaaaacgacggccagtgatcctaactgctcccagctc

SEQ ID NO: 72290 - DNA, 21 bp, Artificial Sequence
  primer
tctgagtaccagttgcggttc

SEQ ID NO: 72291 - DNA, 37 bp, Artificial Sequence
  primer
gtaaaacgacggccagtcacctccagaacctgctgac

SEQ ID NO: 72292 - DNA, 21 bp, Artificial Sequence
  primer
tcagtgcggttccacacatac

SEQ ID NO: 72293 - DNA, 38 bp, Artificial Sequence
  primer
gtaaaacgacggccagtcggtggatctcatatttcgtg

SEQ ID NO: 72294 - DNA, 21 bp, Artificial Sequence
  primer
ctcagtgagtgcctggtaagc

SEQ ID NO: 72295 - DNA, 37 bp, Artificial Sequence
  primer
gtaaaacgacggccagtgctcggtcctcacaagatcc

SEQ ID NO: 72296 - DNA, 20 bp, Artificial Sequence
  primer
ccctggtaggagggtgagtg

SEQ ID NO: 72297 - DNA, 37 bp, Artificial Sequence
  primer
gtaaaacgacggccagtacacctgtgtgtgttcgctg

SEQ ID NO: 72298 - DNA, 21 bp, Artificial Sequence
  primer
ccattcatgccctagaaatcc

SEQ ID NO: 72299 - DNA, 38 bp, Artificial Sequence
  primer
gtaaaacgacggccagttctggcagagctgagcataag

SEQ ID NO: 72300 - DNA, 22 bp, Artificial Sequence
  primer
tcccacagaggtcaagtagctc

SEQ ID NO: 72301 - DNA, 39 bp, Artificial Sequence
  primer
gtaaaacgacggccagtcccagatagctctggaaacatc

SEQ ID NO: 72302 - DNA, 22 bp, Artificial Sequence
  primer
aaattccacagtgaaaccatgc

SEQ ID NO: 72303 - DNA, 38 bp, Artificial Sequence
  primer
gtaaaacgacggccagtagctgtgagtgaggatgaagc

SEQ ID NO: 72304 - DNA, 20 bp, Artificial Sequence
  primer
catttgtctaggaggcgcag

SEQ ID NO: 72305 - DNA, 38 bp, Artificial Sequence
  primer
gtaaaacgacggccagtaaacctttcccttctcactgg

SEQ ID NO: 72306 - DNA, 23 bp, Artificial Sequence
  primer
ttccttacagagctgacttgctg

SEQ ID NO: 72307 - DNA, 20 bp, Artificial Sequence
  primer
ccttgcccatgcaagataag

SEQ ID NO: 72308 - DNA, 40 bp, Artificial Sequence
  primer
gtaaaacgacggccagtcctgtgtctctttgacaatgtgg

SEQ ID NO: 72309 - DNA, 21 bp, Artificial Sequence
  primer
ccctgataagttgctccaagc

SEQ ID NO: 72310 - DNA, 22 bp, Artificial Sequence
  primer
gaagctgtgaatgcaatgaatg

SEQ ID NO: 72311 - DNA, 21 bp, Artificial Sequence
  primer
tttgacatcgcagttggtttc

SEQ ID NO: 72312 - DNA, 38 bp, Artificial Sequence
  primer
gtaaaacgacggccagtctacatggcagcatggaaatg

SEQ ID NO: 72313 - DNA, 21 bp, Artificial Sequence
  primer
cacactgaggatgagctggag

SEQ ID NO: 72314 - DNA, 38 bp, Artificial Sequence
  primer
gtaaaacgacggccagttatgtgctcggtggagttgac

SEQ ID NO: 72315 - DNA, 38 bp, Artificial Sequence
  primer
gtaaaacgacggccagtatcgcacagagtgagggagac

SEQ ID NO: 72316 - DNA, 38 bp, Artificial Sequence
  primer
gtaaaacgacggccagtacagtatggccaatgtttccc

SEQ ID NO: 72317 - DNA, 38 bp, Artificial Sequence
  primer
gtaaaacgacggccagtagcctgattatgtggaaccag

SEQ ID NO: 72318 - DNA, 22 bp, Artificial Sequence
  primer
cataagccagaccctctcactg

SEQ ID NO: 72319 - DNA, 37 bp, Artificial Sequence
  primer
gtaaaacgacggccagtgcctggaaggagagaaccag

SEQ ID NO: 72320 - DNA, 38 bp, Artificial Sequence
  primer
gtaaaacgacggccagtcttgataactgtggcagaggg

SEQ ID NO: 72321 - DNA, 38 bp, Artificial Sequence
  primer
gtaaaacgacggccagtattccatctcttcgtcatcgc

SEQ ID NO: 72322 - DNA, 21 bp, Artificial Sequence
  primer
aattcctctcttgcttggtgg

SEQ ID NO: 72323 - DNA, 21 bp, Artificial Sequence
  primer
ttgctccataagtcctttccc

SEQ ID NO: 72324 - DNA, 38 bp, Artificial Sequence
  primer
gtaaaacgacggccagttctcccttgcaatttgtgttg

SEQ ID NO: 72325 - DNA, 38 bp, Artificial Sequence
  primer
gtaaaacgacggccagtaaaccagatttccttccgagc

SEQ ID NO: 72326 - DNA, 20 bp, Artificial Sequence
  primer
agagcaaatttcttgaggcg

SEQ ID NO: 72327 - DNA, 21 bp, Artificial Sequence
  primer
gagggcagtatctgtgggttc

SEQ ID NO: 72328 - DNA, 21 bp, Artificial Sequence
  primer
ctccattgcacacactgcttc

SEQ ID NO: 72329 - DNA, 21 bp, Artificial Sequence
  primer
atgttgttggcttctcccaag

SEQ ID NO: 72330 - DNA, 21 bp, Artificial Sequence
  primer
ttactgcagaaaccctctccc

SEQ ID NO: 72331 - DNA, 21 bp, Artificial Sequence
  primer
gagcctgactgtcttcttccc

SEQ ID NO: 72332 - DNA, 38 bp, Artificial Sequence
  primer
gtaaaacgacggccagttacactgatggtgggctcttc

SEQ ID NO: 72333 - DNA, 38 bp, Artificial Sequence
  primer
gtaaaacgacggccagtaaggcagtgtgatccatcttg

SEQ ID NO: 72334 - DNA, 38 bp, Artificial Sequence
  primer
gtaaaacgacggccagtgcttcatactgccttcttggc

SEQ ID NO: 72335 - DNA, 38 bp, Artificial Sequence
  primer
gtaaaacgacggccagtatactgacgctttctgggctc

SEQ ID NO: 72336 - DNA, 38 bp, Artificial Sequence
  primer
gtaaaacgacggccagtccagggacttctctctctccc

SEQ ID NO: 72337 - DNA, 38 bp, Artificial Sequence
  primer
gtaaaacgacggccagtaatgatgtttcgagtttgggc

SEQ ID NO: 72338 - DNA, 38 bp, Artificial Sequence
  primer
gtaaaacgacggccagtctggccttaattgcaaaggac

SEQ ID NO: 72339 - DNA, 21 bp, Artificial Sequence
  primer
tggatgtggaatctctgcttc

SEQ ID NO: 72340 - DNA, 21 bp, Artificial Sequence
  primer
cagtaagcccatttcctctgg

SEQ ID NO: 72341 - DNA, 21 bp, Artificial Sequence
  primer
tctccttctcggttggaagag

SEQ ID NO: 72342 - DNA, 21 bp, Artificial Sequence
  primer
ttcccatcaatcctgagtctg

SEQ ID NO: 72343 - DNA, 21 bp, Artificial Sequence
  primer
gctgaaacacttgccctactg

SEQ ID NO: 72344 - DNA, 38 bp, Artificial Sequence
  primer
gtaaaacgacggccagtagcaggcctatccttcctctc

SEQ ID NO: 72345 - DNA, 21 bp, Artificial Sequence
  primer
aagaaattcactttgcccacc

SEQ ID NO: 72346 - DNA, 20 bp, Artificial Sequence
  primer
gagtaaggattgccacgcac

SEQ ID NO: 72347 - DNA, 20 bp, Artificial Sequence
  primer
ccctatttatagccggtggc

SEQ ID NO: 72348 - DNA, 19 bp, Artificial Sequence
  primer
cacagggactgatcccagg

SEQ ID NO: 72349 - DNA, 38 bp, Artificial Sequence
  primer
gtaaaacgacggccagttattcctgagatcctgtgccc

SEQ ID NO: 72350 - DNA, 37 bp, Artificial Sequence
  primer
gtaaaacgacggccagtctgtcctcacagcctccttg

SEQ ID NO: 72351 - DNA, 21 bp, Artificial Sequence
  primer
agactgctccatttctgaggg

SEQ ID NO: 72352 - DNA, 38 bp, Artificial Sequence
  primer
gtaaaacgacggccagtgtctcagtctctccctcctgc

SEQ ID NO: 72353 - DNA, 38 bp, Artificial Sequence
  primer
gtaaaacgacggccagtactatctgtgccagaggaccc

SEQ ID NO: 72354 - DNA, 21 bp, Artificial Sequence
  primer
agaagaaatgggcttgctgtc

SEQ ID NO: 72355 - DNA, 38 bp, Artificial Sequence
  primer
gtaaaacgacggccagttgcagcaagagtttccatgag

SEQ ID NO: 72356 - DNA, 38 bp, Artificial Sequence
  primer
gtaaaacgacggccagttcttctcacctgcctgtgttg

SEQ ID NO: 72357 - DNA, 38 bp, Artificial Sequence
  primer
gtaaaacgacggccagtagcacagtttgctcatggttc

SEQ ID NO: 72358 - DNA, 21 bp, Artificial Sequence
  primer
gacagccaccctgatccatac

SEQ ID NO: 72359 - DNA, 35 bp, Artificial Sequence
  primer
gtaaaacgacggccagttggccatggtttctggtg

SEQ ID NO: 72360 - DNA, 38 bp, Artificial Sequence
  primer
gtaaaacgacggccagtcttccacagtgggtgtcagag

SEQ ID NO: 72361 - DNA, 18 bp, Artificial Sequence
  primer
agtgagggagctgggacc

SEQ ID NO: 72362 - DNA, 21 bp, Artificial Sequence
  primer
agccagttcctcaggtgtagc

SEQ ID NO: 72363 - DNA, 21 bp, Artificial Sequence
  primer
tcacctttcagcaggtctttg

SEQ ID NO: 72364 - DNA, 21 bp, Artificial Sequence
  primer
tgcaaaggcggtactgttatc

SEQ ID NO: 72365 - DNA, 21 bp, Artificial Sequence
  primer
gaggcgataggttcaaagcac

SEQ ID NO: 72366 - DNA, 21 bp, Artificial Sequence
  primer
ccttaaagagggtcctccctg

SEQ ID NO: 72367 - DNA, 38 bp, Artificial Sequence
  primer
gtaaaacgacggccagttccaagcccttaaagagggtc

SEQ ID NO: 72368 - DNA, 21 bp, Artificial Sequence
  primer
tgagactgagatgccttctgc

SEQ ID NO: 72369 - DNA, 20 bp, Artificial Sequence
  primer
ggctgtgagcctatttgcac

SEQ ID NO: 72370 - DNA, 38 bp, Artificial Sequence
  primer
gtaaaacgacggccagttgtaaacgatcagccaagcac

SEQ ID NO: 72371 - DNA, 38 bp, Artificial Sequence
  primer
gtaaaacgacggccagttggagaaccagaagggcttag

SEQ ID NO: 72372 - DNA, 38 bp, Artificial Sequence
  primer
gtaaaacgacggccagtggaaagtctccatccagttca

SEQ ID NO: 72373 - DNA, 38 bp, Artificial Sequence
  primer
gtaaaacgacggccagtaagtagcagggctgaggtttc

SEQ ID NO: 72374 - DNA, 38 bp, Artificial Sequence
  primer
gtaaaacgacggccagttaaacacccttcctccagagc

SEQ ID NO: 72375 - DNA, 37 bp, Artificial Sequence
  primer
gtaaaacgacggccagtcgcaagcaggtacagtgatg

SEQ ID NO: 72376 - DNA, 38 bp, Artificial Sequence
  primer
gtaaaacgacggccagtcccttcccatgacacagtcag

SEQ ID NO: 72377 - DNA, 18 bp, Artificial Sequence
  primer
aggccaggctgctttctc

SEQ ID NO: 72378 - DNA, 38 bp, Artificial Sequence
  primer
gtaaaacgacggccagttttccgatgccctttctacag

SEQ ID NO: 72379 - DNA, 22 bp, Artificial Sequence
  primer
cctaattccaggaaccagaacc

SEQ ID NO: 72380 - DNA, 21 bp, Artificial Sequence
  primer
gctggacttctccatcctgac

SEQ ID NO: 72381 - DNA, 21 bp, Artificial Sequence
  primer
acccagttgtcattgagtccc

SEQ ID NO: 72382 - DNA, 21 bp, Artificial Sequence
  primer
tgaccttgaccacaagctgac

SEQ ID NO: 72383 - DNA, 21 bp, Artificial Sequence
  primer
ctttcttgcagttgcagaggc

SEQ ID NO: 72384 - DNA, 21 bp, Artificial Sequence
  primer
aagatgatgaggttcttggcg

SEQ ID NO: 72385 - DNA, 38 bp, Artificial Sequence
  primer
gtaaaacgacggccagtacagaaatgtgtgaggcttgg

SEQ ID NO: 72386 - DNA, 22 bp, Artificial Sequence
  primer
tccctcctaccacactccatag

SEQ ID NO: 72387 - DNA, 21 bp, Artificial Sequence
  primer
ccactgacttccctaagggtg

SEQ ID NO: 72388 - DNA, 19 bp, Artificial Sequence
  primer
cctgggctgcaccttctac

SEQ ID NO: 72389 - DNA, 20 bp, Artificial Sequence
  primer
atgagatgggtcacagacgg

SEQ ID NO: 72390 - DNA, 38 bp, Artificial Sequence
  primer
gtaaaacgacggccagtctcggtggatctcgtatttca

SEQ ID NO: 72391 - DNA, 20 bp, Artificial Sequence
  primer
ctcagtcagtgcccggtaag

SEQ ID NO: 72392 - DNA, 38 bp, Artificial Sequence
  primer
gtaaaacgacggccagtgcttagtcctcaggagaccct

SEQ ID NO: 72393 - DNA, 38 bp, Artificial Sequence
  primer
gtaaaacgacggccagtcattcagttccaggcagacag

SEQ ID NO: 72394 - DNA, 35 bp, Artificial Sequence
  primer
gtaaaacgacggccagtaggcaggacgacaggagg

SEQ ID NO: 72395 - DNA, 21 bp, Artificial Sequence
  primer
agagcaaagatcaggtcagcc

SEQ ID NO: 72396 - DNA, 38 bp, Artificial Sequence
  primer
gtaaaacgacggccagtagcagaagtgtgtgaggcttg

SEQ ID NO: 72397 - DNA, 21 bp, Artificial Sequence
  primer
tttagggtccctccctcctac

SEQ ID NO: 72398 - DNA, 21 bp, Artificial Sequence
  primer
ccactcccactgactttcctg

SEQ ID NO: 72399 - DNA, 19 bp, Artificial Sequence
  primer
gttgcctgggtctgagctg

SEQ ID NO: 72400 - DNA, 20 bp, Artificial Sequence
  primer
atgagatgggtcacagacgg

SEQ ID NO: 72401 - DNA, 38 bp, Artificial Sequence
  primer
gtaaaacgacggccagtatgtgcacacaggctcagaag

SEQ ID NO: 72402 - DNA, 20 bp, Artificial Sequence
  primer
gagaagacgtgggagtggtc

SEQ ID NO: 72403 - DNA, 38 bp, Artificial Sequence
  primer
gtaaaacgacggccagtttagtccgcaggagaccctac

SEQ ID NO: 72404 - DNA, 38 bp, Artificial Sequence
  primer
gtaaaacgacggccagtctggttggagggttcagtttc

SEQ ID NO: 72405 - DNA, 36 bp, Artificial Sequence
  primer
gtaaaacgacggccagtatggcaggacgtctgtgtg

SEQ ID NO: 72406 - DNA, 42 bp, Artificial Sequence
  primer
gtaaaacgacggccagttcactattcccacttaacaaccatc

SEQ ID NO: 72407 - DNA, 21 bp, Artificial Sequence
  primer
ctcccatacctgaccttccac

SEQ ID NO: 72408 - DNA, 38 bp, Artificial Sequence
  primer
gtaaaacgacggccagtattgacaatgccagagtgtgc

SEQ ID NO: 72409 - DNA, 38 bp, Artificial Sequence
  primer
gtaaaacgacggccagttcagtgtcacacctaatgggc

SEQ ID NO: 72410 - DNA, 38 bp, Artificial Sequence
  primer
gtaaaacgacggccagtaggtacctgagatggcactgg

SEQ ID NO: 72411 - DNA, 21 bp, Artificial Sequence
  primer
aagcccaacatgacacctttc

SEQ ID NO: 72412 - DNA, 21 bp, Artificial Sequence
  primer
aatacagcatgcgatgtcagg

SEQ ID NO: 72413 - DNA, 23 bp, Artificial Sequence
  primer
tgagatttagagaccttcccagg

SEQ ID NO: 72414 - DNA, 39 bp, Artificial Sequence
  primer
gtaaaacgacggccagtcttactccacttccctcgtctg

SEQ ID NO: 72415 - DNA, 42 bp, Artificial Sequence
  primer
gtaaaacgacggccagttgcatatttaatgaacagttgaagc

SEQ ID NO: 72416 - DNA, 38 bp, Artificial Sequence
  primer
gtaaaacgacggccagttgataggccctttggagagag

SEQ ID NO: 72417 - DNA, 23 bp, Artificial Sequence
  primer
cacacacaaagacagtgcatagc

SEQ ID NO: 72418 - DNA, 23 bp, Artificial Sequence
  primer
ttctgattaaggagctgttctcc

SEQ ID NO: 72419 - DNA, 21 bp, Artificial Sequence
  primer
aagtcaaagctttccctgagc

SEQ ID NO: 72420 - DNA, 38 bp, Artificial Sequence
  primer
gtaaaacgacggccagtagttccagatcttgtggtggc

SEQ ID NO: 72421 - DNA, 43 bp, Artificial Sequence
  primer
gtaaaacgacggccagtcccattagtatggtccttagacattt

SEQ ID NO: 72422 - DNA, 38 bp, Artificial Sequence
  primer
gtaaaacgacggccagtagtttgctgagaatgatggct

SEQ ID NO: 72423 - DNA, 21 bp, Artificial Sequence
  primer
tctaatgtgctgagaggtggg

SEQ ID NO: 72424 - DNA, 24 bp, Artificial Sequence
  primer
tcagacagaactgtgcatcattag

SEQ ID NO: 72425 - DNA, 38 bp, Artificial Sequence
  primer
gtaaaacgacggccagtcctctggaatgcataagcaaa

SEQ ID NO: 72426 - DNA, 21 bp, Artificial Sequence
  primer
ttgaggtcacacggctatcag

SEQ ID NO: 72427 - DNA, 38 bp, Artificial Sequence
  primer
gtaaaacgacggccagtttggctatgcaaacattcagg

SEQ ID NO: 72428 - DNA, 21 bp, Artificial Sequence
  primer
tgggtgacagagtgaaaccct

SEQ ID NO: 72429 - DNA, 38 bp, Artificial Sequence
  primer
gtaaaacgacggccagtagagtgcacgcagtcatatcc

SEQ ID NO: 72430 - DNA, 22 bp, Artificial Sequence
  primer
ggtttgtacagccatgttgacc

SEQ ID NO: 72431 - DNA, 44 bp, Artificial Sequence
  primer
gtaaaacgacggccagtaagaagactttaagaacttgactttgc

SEQ ID NO: 72432 - DNA, 40 bp, Artificial Sequence
  primer
gtaaaacgacggccagtggtgagccttgactacttactgg

SEQ ID NO: 72433 - DNA, 21 bp, Artificial Sequence
  primer
aagaaatgcacaggatgcaaa

SEQ ID NO: 72434 - DNA, 38 bp, Artificial Sequence
  primer
gtaaaacgacggccagttcagggtgaaactacccaagc

SEQ ID NO: 72435 - DNA, 38 bp, Artificial Sequence
  primer
gtaaaacgacggccagtaagatcaagcaatcctcccac

SEQ ID NO: 72436 - DNA, 21 bp, Artificial Sequence
  primer
gccaaatttccaataatgcag

SEQ ID NO: 72437 - DNA, 21 bp, Artificial Sequence
  primer
tgtcagagtgcaggtctttgg

SEQ ID NO: 72438 - DNA, 40 bp, Artificial Sequence
  primer
gtaaaacgacggccagtgataacccaagggtctcattctg

SEQ ID NO: 72439 - DNA, 37 bp, Artificial Sequence
  primer
gtaaaacgacggccagtggaagagcgtactcctgctg

SEQ ID NO: 72440 - DNA, 41 bp, Artificial Sequence
  primer
gtaaaacgacggccagttgctctaaaggcatttaaggtttg

SEQ ID NO: 72441 - DNA, 24 bp, Artificial Sequence
  primer
cacaaagtcctttccaatttcaac

SEQ ID NO: 72442 - DNA, 20 bp, Artificial Sequence
  primer
gctcagcaagtccaacaagg

SEQ ID NO: 72443 - DNA, 38 bp, Artificial Sequence
  primer
gtaaaacgacggccagtccaggtgaaccttaatgccag

SEQ ID NO: 72444 - DNA, 37 bp, Artificial Sequence
  primer
gtaaaacgacggccagtctgtgacacctgctgctctg

SEQ ID NO: 72445 - DNA, 37 bp, Artificial Sequence
  primer
gtaaaacgacggccagtgcatggctgagtccttcttg

SEQ ID NO: 72446 - DNA, 21 bp, Artificial Sequence
  primer
atacagcaagcagctcaagcc

SEQ ID NO: 72447 - DNA, 21 bp, Artificial Sequence
  primer
caacgcctttctatccctgac

SEQ ID NO: 72448 - DNA, 38 bp, Artificial Sequence
  primer
gtaaaacgacggccagtagacggaggtgatgagtaggc

SEQ ID NO: 72449 - DNA, 20 bp, Artificial Sequence
  primer
cagggttgcatacttctgcc

SEQ ID NO: 72450 - DNA, 21 bp, Artificial Sequence
  primer
acaattaggcttgtgtgctgc

SEQ ID NO: 72451 - DNA, 21 bp, Artificial Sequence
  primer
cttgaggtttgggaattcagg

SEQ ID NO: 72452 - DNA, 21 bp, Artificial Sequence
  primer
atcaacaacgagctctgcctc

SEQ ID NO: 72453 - DNA, 38 bp, Artificial Sequence
  primer
gtaaaacgacggccagtgtcctgcaacaatctggtctg

SEQ ID NO: 72454 - DNA, 20 bp, Artificial Sequence
  primer
gaggtgggtggtagagctgg

SEQ ID NO: 72455 - DNA, 21 bp, Artificial Sequence
  primer
cactccagaatcaatcgcaac

SEQ ID NO: 72456 - DNA, 21 bp, Artificial Sequence
  primer
ccctctgaggagacctgagtc

SEQ ID NO: 72457 - DNA, 21 bp, Artificial Sequence
  primer
tgtcttccatactgcccacac

SEQ ID NO: 72458 - DNA, 37 bp, Artificial Sequence
  primer
gtaaaacgacggccagttgaggacaagggatccacag

SEQ ID NO: 72459 - DNA, 38 bp, Artificial Sequence
  primer
gtaaaacgacggccagtaaatgcaaggcagaactgatg

SEQ ID NO: 72460 - DNA, 38 bp, Artificial Sequence
  primer
gtaaaacgacggccagttcaatagagtgaatgcccagc

SEQ ID NO: 72461 - DNA, 21 bp, Artificial Sequence
  primer
acctagatccagccacacctg

SEQ ID NO: 72462 - DNA, 21 bp, Artificial Sequence
  primer
cagcttacctccaccacactg

SEQ ID NO: 72463 - DNA, 37 bp, Artificial Sequence
  primer
gtaaaacgacggccagtgtagctggctccaggtcaag

SEQ ID NO: 72464 - DNA, 22 bp, Artificial Sequence
  primer
agagaagctgcatccataaacc

SEQ ID NO: 72465 - DNA, 39 bp, Artificial Sequence
  primer
gtaaaacgacggccagtggtgttatgatgtctgggaagg

SEQ ID NO: 72466 - DNA, 38 bp, Artificial Sequence
  primer
gtaaaacgacggccagtcattgaagatgggctagtggc

SEQ ID NO: 72467 - DNA, 38 bp, Artificial Sequence
  primer
gtaaaacgacggccagtggttgggtcttggactctagc

SEQ ID NO: 72468 - DNA, 38 bp, Artificial Sequence
  primer
gtaaaacgacggccagtttaatcctttcaccaccctcc

SEQ ID NO: 72469 - DNA, 22 bp, Artificial Sequence
  primer
aaatacgccatcagagagaacc

SEQ ID NO: 72470 - DNA, 21 bp, Artificial Sequence
  primer
tggaatggtttgtaatgcagc

SEQ ID NO: 72471 - DNA, 25 bp, Artificial Sequence
  primer
cacagacagtaacatctcaggaaag

SEQ ID NO: 72472 - DNA, 23 bp, Artificial Sequence
  primer
aaacacatgaatttgaaggcaga

SEQ ID NO: 72473 - DNA, 43 bp, Artificial Sequence
  primer
gtaaaacgacggccagtctatttcaaacagtgactggtatggt

SEQ ID NO: 72474 - DNA, 38 bp, Artificial Sequence
  primer
gtaaaacgacggccagtacatacctcaaagtcgggagg

SEQ ID NO: 72475 - DNA, 38 bp, Artificial Sequence
  primer
gtaaaacgacggccagtcctcaactcctctatccaggg

SEQ ID NO: 72476 - DNA, 21 bp, Artificial Sequence
  primer
gcaagcctatgtctcaaaggg

SEQ ID NO: 72477 - DNA, 22 bp, Artificial Sequence
  primer
ttcattgaatggcacattatca

SEQ ID NO: 72478 - DNA, 37 bp, Artificial Sequence; identical to SEQ ID NO: 5320
  primer

SEQ ID NO: 72479 - DNA, 41 bp, Artificial Sequence
  primer
gtaaaacgacggccagttgagtaacttcttggatgcctttc

SEQ ID NO: 72480 - DNA, 21 bp, Artificial Sequence
  primer
tgccagctaatttctgttgga

SEQ ID NO: 72481 - DNA, 37 bp, Artificial Sequence
  primer
gtaaaacgacggccagtcagaagtggacctgggaatg

SEQ ID NO: 72482 - DNA, 19 bp, Artificial Sequence
  primer
tctgactgctggcctcaca

SEQ ID NO: 72483 - DNA, 21 bp, Artificial Sequence
  primer
tgcaccaacactgagacttcc

SEQ ID NO: 72484 - DNA, 37 bp, Artificial Sequence
  primer
gtaaaacgacggccagtagccaaggttacaccactgc

SEQ ID NO: 72485 - DNA, 21 bp, Artificial Sequence
  primer
ttcaagtcgtggttcttccac

SEQ ID NO: 72486 - DNA, 38 bp, Artificial Sequence
  primer
gtaaaacgacggccagtgtggagagatgcatcatcagg

SEQ ID NO: 72487 - DNA, 22 bp, Artificial Sequence
  primer
cagtccaatctttagggtcctg

SEQ ID NO: 72488 - DNA, 21 bp, Artificial Sequence
  primer
cacgtgtcttgttcatctccc

SEQ ID NO: 72489 - DNA, 21 bp, Artificial Sequence
  primer
cctttgtgtgccttggaaatc

SEQ ID NO: 72490 - DNA, 20 bp, Artificial Sequence
  primer
aagccattgggttcatcctc

SEQ ID NO: 72491 - DNA, 21 bp, Artificial Sequence
  primer
caggtatctagcatgtggccc

SEQ ID NO: 72492 - DNA, 38 bp, Artificial Sequence
  primer
gtaaaacgacggccagttaattatggaggcacacctgg

SEQ ID NO: 72493 - DNA, 21 bp, Artificial Sequence
  primer
catttgtggtttgaaccttgc

SEQ ID NO: 72494 - DNA, 21 bp, Artificial Sequence
  primer
gggcagagctatatggcagag

SEQ ID NO: 72495 - DNA, 22 bp, Artificial Sequence
  primer
ggcctagagtgacatacctccc

SEQ ID NO: 72496 - DNA, 20 bp, Artificial Sequence
  primer
aaaccctcccaggagtttcc

SEQ ID NO: 72497 - DNA, 21 bp, Artificial Sequence
  primer
cagaatacctggaggtcaggc

SEQ ID NO: 72498 - DNA, 38 bp, Artificial Sequence
  primer
gtaaaacgacggccagtcaaatccttgctgcccataat

SEQ ID NO: 72499 - DNA, 21 bp, Artificial Sequence
  primer
tctctgtgtcattctgcctcc

SEQ ID NO: 72500 - DNA, 21 bp, Artificial Sequence
  primer
tttcattcactcacccaggtc

SEQ ID NO: 72501 - DNA, 38 bp, Artificial Sequence
  primer
gtaaaacgacggccagtcctcgagtgtgtgtgttctgc

SEQ ID NO: 72502 - DNA, 21 bp, Artificial Sequence
  primer
gtgtgcatctgtattcccagc

SEQ ID NO: 72503 - DNA, 37 bp, Artificial Sequence
  primer
gtaaaacgacggccagtgatgccatcagaatccagtg

SEQ ID NO: 72504 - DNA, 21 bp, Artificial Sequence
  primer
gggcctttgagaacaggtaac

SEQ ID NO: 72505 - DNA, 21 bp, Artificial Sequence
  primer
gagccgtgacctcctattcag

SEQ ID NO: 72506 - DNA, 21 bp, Artificial Sequence
  primer
gggcctttgagaacaggtaac

SEQ ID NO: 72507 - DNA, 42 bp, Artificial Sequence
  primer
gtaaaacgacggccagtccctttattagaatgaacagtgacc

SEQ ID NO: 72508 - DNA, 23 bp, Artificial Sequence
  primer
tcaactacagtctccaagcaacc

SEQ ID NO: 72509 - DNA, 40 bp, Artificial Sequence
  primer
gtaaaacgacggccagtcctcaataaagcaaagtcaaagg

SEQ ID NO: 72510 - DNA, 21 bp, Artificial Sequence
  primer
taggaaagtgctgacccttgg

SEQ ID NO: 72511 - DNA, 18 bp, Artificial Sequence
  primer
accagaaaccagggccac

SEQ ID NO: 72512 - DNA, 18 bp, Artificial Sequence
  primer
gaacctgggaggcagagc

SEQ ID NO: 72513 - DNA, 43 bp, Artificial Sequence
  primer
gtaaaacgacggccagtgacccagacagtttctaatgttaagg

SEQ ID NO: 72514 - DNA, 41 bp, Artificial Sequence
  primer
gtaaaacgacggccagtggttctagcatcaataagcacacc

SEQ ID NO: 72515 - DNA, 20 bp, Artificial Sequence
  primer
ctagccctcccaaagtccag

SEQ ID NO: 72516 - DNA, 41 bp, Artificial Sequence
  primer
gtaaaacgacggccagtcgggttacaatctaaatcctttcc

SEQ ID NO: 72517 - DNA, 38 bp, Artificial Sequence
  primer
gtaaaacgacggccagttgtatctggcgggaaagtctc

SEQ ID NO: 72518 - DNA, 21 bp, Artificial Sequence
  primer
tccttgactttcaatttgccc

SEQ ID NO: 72519 - DNA, 19 bp, Artificial Sequence
  primer
gctgcagctacaggcagtg

SEQ ID NO: 72520 - DNA, 41 bp, Artificial Sequence
  primer
gtaaaacgacggccagtggtgaaacctgaacagatggtatc

SEQ ID NO: 72521 - DNA, 21 bp, Artificial Sequence
  primer
agggcatacaattctgcttca

SEQ ID NO: 72522 - DNA, 40 bp, Artificial Sequence
  primer
gtaaaacgacggccagtaaactgcaaagtcccacttaacc

SEQ ID NO: 72523 - DNA, 23 bp, Artificial Sequence
  primer
ttggatggattaaggatcatttg

SEQ ID NO: 72524 - DNA, 40 bp, Artificial Sequence
  primer
gtaaaacgacggccagtggccaacagaagtatgtcttgag

SEQ ID NO: 72525 - DNA, 20 bp, Artificial Sequence
  primer
tgtgggccacctttgagtag

SEQ ID NO: 72526 - DNA, 22 bp, Artificial Sequence
  primer
gcatctgtttcaggactatcgg

SEQ ID NO: 72527 - DNA, 22 bp, Artificial Sequence
  primer
tgcaatgattctttccacttcc

SEQ ID NO: 72528 - DNA, 23 bp, Artificial Sequence
  primer
cccatatcactgaccttattggg

SEQ ID NO: 72529 - DNA, 40 bp, Artificial Sequence
  primer
gtaaaacgacggccagttgaagcctgtgatttagaactcg

SEQ ID NO: 72530 - DNA, 41 bp, Artificial Sequence
  primer
gtaaaacgacggccagttgccatactaggaatggaagtctg

SEQ ID NO: 72531 - DNA, 22 bp, Artificial Sequence
  primer
cccaactctctcagtgtttgtg

SEQ ID NO: 72532 - DNA, 20 bp, Artificial Sequence
  primer
ttcactgaagctttcgctgg

SEQ ID NO: 72533 - DNA, 38 bp, Artificial Sequence
  primer
gtaaaacgacggccagtccttgttccctgaggtttgag

SEQ ID NO: 72534 - DNA, 40 bp, Artificial Sequence
  primer
gtaaaacgacggccagtagccaagcaataagtcatctttg

SEQ ID NO: 72535 - DNA, 38 bp, Artificial Sequence
  primer
gtaaaacgacggccagtagttgagcacacattcttgcc

SEQ ID NO: 72536 - DNA, 21 bp, Artificial Sequence
  primer
gtatgcatttggctgaagacg

SEQ ID NO: 72537 - DNA, 25 bp, Artificial Sequence
  primer
ttgtatcagacacctttcctttcag

SEQ ID NO: 72538 - DNA, 38 bp, Artificial Sequence
  primer
gtaaaacgacggccagttcggtttcagcagtagagatg

SEQ ID NO: 72539 - DNA, 38 bp, Artificial Sequence
  primer
gtaaaacgacggccagtcttgaccgtgttcttctgctc

SEQ ID NO: 72540 - DNA, 38 bp, Artificial Sequence
  primer
gtaaaacgacggccagtaactagggctacagcagacgg

SEQ ID NO: 72541 - DNA, 37 bp, Artificial Sequence
  primer
gtaaaacgacggccagtgaatcctgggttcggtaagg

SEQ ID NO: 72542 - DNA, 38 bp, Artificial Sequence
  primer
gtaaaacgacggccagtgcagtcatgcgttacaatgtc

SEQ ID NO: 72543 - DNA, 37 bp, Artificial Sequence
  primer
gtaaaacgacggccagtactggtgtgggtggcatatc

SEQ ID NO: 72544 - DNA, 24 bp, Artificial Sequence
  primer
aaggcaaagttagagcattcattg

SEQ ID NO: 72545 - DNA, 23 bp, Artificial Sequence
  primer
tccacttgactgacacaattagc

SEQ ID NO: 72546 - DNA, 38 bp, Artificial Sequence
  primer
gtaaaacgacggccagtttcacaattggttgaatctgc

SEQ ID NO: 72547 - DNA, 38 bp, Artificial Sequence
  primer
gtaaaacgacggccagtaagctgaagggaagacacagc

SEQ ID NO: 72548 - DNA, 21 bp, Artificial Sequence
  primer
atccactgcacctaatggtcc

SEQ ID NO: 72549 - DNA, 37 bp, Artificial Sequence
  primer
gtaaaacgacggccagtagaaggccattcaccaatcc

SEQ ID NO: 72550 - DNA, 38 bp, Artificial Sequence
  primer
gtaaaacgacggccagtccaatgggctataaggaggac

SEQ ID NO: 72551 - DNA, 21 bp, Artificial Sequence
  primer
ctcctggaagggcaatgttac

SEQ ID NO: 72552 - DNA, 39 bp, Artificial Sequence
  primer
gtaaaacgacggccagtccctttcatcatttctagccaa

SEQ ID NO: 72553 - DNA, 38 bp, Artificial Sequence
  primer
gtaaaacgacggccagtgattctccagtgcaccaactg

SEQ ID NO: 72554 - DNA, 21 bp, Artificial Sequence
  primer
tatgctggactgaggcatttg

SEQ ID NO: 72555 - DNA, 25 bp, Artificial Sequence
  primer
tcttcctgtgaaatcagttcaaata

SEQ ID NO: 72556 - DNA, 41 bp, Artificial Sequence
  primer
gtaaaacgacggccagttgatgtgcaaatttgatagattcc

SEQ ID NO: 72557 - DNA, 38 bp, Artificial Sequence
  primer
gtaaaacgacggccagttctattgccatcatttcaggg

SEQ ID NO: 72558 - DNA, 24 bp, Artificial Sequence
  primer
ttcacctcaatagtacctggacct

SEQ ID NO: 72559 - DNA, 39 bp, Artificial Sequence
  primer
gtaaaacgacggccagttgatctaacttccgaggtggag

SEQ ID NO: 72560 - DNA, 43 bp, Artificial Sequence
  primer
gtaaaacgacggccagttcaataatttacaccactttctgagg

SEQ ID NO: 72561 - DNA, 35 bp, Artificial Sequence
  primer
gtaaaacgacggccagtgagccaccacaaccagcc

SEQ ID NO: 72562 - DNA, 41 bp, Artificial Sequence
  primer
gtaaaacgacggccagtaataattggagtccagaaacaagg

SEQ ID NO: 72563 - DNA, 21 bp, Artificial Sequence
  primer
ccatcagaaataaagccaccc

SEQ ID NO: 72564 - DNA, 39 bp, Artificial Sequence
  primer
gtaaaacgacggccagtgaatgtgcgtatgtgaatctgg

SEQ ID NO: 72565 - DNA, 22 bp, Artificial Sequence
  primer
gacacaaatctcaattccaggg

SEQ ID NO: 72566 - DNA, 20 bp, Artificial Sequence
  primer
agtgagcagaggtagccagc

SEQ ID NO: 72567 - DNA, 38 bp, Artificial Sequence
  primer
gtaaaacgacggccagtcatactcacttgccctgccta

SEQ ID NO: 72568 - DNA, 38 bp, Artificial Sequence
  primer
gtaaaacgacggccagtctcctggcatcttccattctc

SEQ ID NO: 72569 - DNA, 21 bp, Artificial Sequence
  primer
actgctgaacctcagtcctcc

SEQ ID NO: 72570 - DNA, 37 bp, Artificial Sequence
  primer
gtaaaacgacggccagttcctccattagggctcatcc

SEQ ID NO: 72571 - DNA, 39 bp, Artificial Sequence
  primer
gtaaaacgacggccagtcccagagacccaacctctaatc

SEQ ID NO: 72572 - DNA, 41 bp, Artificial Sequence
  primer
gtaaaacgacggccagttcagaagagtttcctgaatcattg

SEQ ID NO: 72573 - DNA, 21 bp, Artificial Sequence
  primer
attccactgcttcaaactggc

SEQ ID NO: 72574 - DNA, 38 bp, Artificial Sequence
  primer
gtaaaacgacggccagtgaaaccacctgtgggatatgg

SEQ ID NO: 72575 - DNA, 40 bp, Artificial Sequence
  primer
gtaaaacgacggccagtttaatgagaagctactgcttcgg

SEQ ID NO: 72576 - DNA, 44 bp, Artificial Sequence
  primer
gtaaaacgacggccagtttattcctctcctatttcacatttagg

SEQ ID NO: 72577 - DNA, 43 bp, Artificial Sequence
  primer
gtaaaacgacggccagtcactgataggtagatcactcaattcc

SEQ ID NO: 72578 - DNA, 43 bp, Artificial Sequence
  primer
gtaaaacgacggccagtaagaacagaagtagactggccttaaa

SEQ ID NO: 72579 - DNA, 30 bp, Artificial Sequence
  primer
aacatctataggtaatgtttataaggagca

SEQ ID NO: 72580 - DNA, 22 bp, Artificial Sequence
  primer
gccttcattatttgcagttgaa

SEQ ID NO: 72581 - DNA, 21 bp, Artificial Sequence
  primer
actcctccctgcttctcttgg

SEQ ID NO: 72582 - DNA, 23 bp, Artificial Sequence
  primer
aaacactttcacttgctggtttc

SEQ ID NO: 72583 - DNA, 38 bp, Artificial Sequence
  primer
gtaaaacgacggccagtctcagtaattgccctggaagc

SEQ ID NO: 72584 - DNA, 38 bp, Artificial Sequence
  primer
gtaaaacgacggccagtgtcttgcacaggtcctgagtg

SEQ ID NO: 72585 - DNA, 37 bp, Artificial Sequence
  primer
gtaaaacgacggccagtgaggccaaacacatggaaag

SEQ ID NO: 72586 - DNA, 39 bp, Artificial Sequence
  primer
gtaaaacgacggccagtgatggatgtgggaacaataagg

SEQ ID NO: 72587 - DNA, 41 bp, Artificial Sequence
  primer
gtaaaacgacggccagttcataggactttgctttgtgagac

SEQ ID NO: 72588 - DNA, 37 bp, Artificial Sequence
  primer
gtaaaacgacggccagtaaagcatcatgttcttgggc

SEQ ID NO: 72589 - DNA, 38 bp, Artificial Sequence
  primer
gtaaaacgacggccagtccagggtgcttatagctgtgg

SEQ ID NO: 72590 - DNA, 38 bp, Artificial Sequence
  primer
gtaaaacgacggccagtttgccgctgagttcacaatac

SEQ ID NO: 72591 - DNA, 40 bp, Artificial Sequence
  primer
gtaaaacgacggccagtgcatcttcctacagcttagagcc

SEQ ID NO: 72592 - DNA, 21 bp, Artificial Sequence
  primer
aatgctatgattctccggtgc

SEQ ID NO: 72593 - DNA, 38 bp, Artificial Sequence
  primer
gtaaaacgacggccagtatccctgagcaatgtcctctc

SEQ ID NO: 72594 - DNA, 38 bp, Artificial Sequence
  primer
gtaaaacgacggccagttcccttgagcataaagagctg

SEQ ID NO: 72595 - DNA, 38 bp, Artificial Sequence
  primer
gtaaaacgacggccagtgtgaaccaagattgtgccatt

SEQ ID NO: 72596 - DNA, 39 bp, Artificial Sequence
  primer
gtaaaacgacggccagttgaatttatttgggcaaagagc

SEQ ID NO: 72597 - DNA, 23 bp, Artificial Sequence
  primer
tctgccagctttaaatgtgtaat

SEQ ID NO: 72598 - DNA, 38 bp, Artificial Sequence
  primer
gtaaaacgacggccagtcgagggaagagagttgcaaga

SEQ ID NO: 72599 - DNA, 22 bp, Artificial Sequence
  primer
tagcattcaattgtcagctacc

SEQ ID NO: 72600 - DNA, 23 bp, Artificial Sequence
  primer
tctctctgcctttatatgcatcc

SEQ ID NO: 72601 - DNA, 26 bp, Artificial Sequence
  primer
gcaaatcaatttaatacctagggaac

SEQ ID NO: 72602 - DNA, 21 bp, Artificial Sequence
  primer
cttgccaagcatttgttagaa

SEQ ID NO: 72603 - DNA, 23 bp, Artificial Sequence
  primer
gatggcctaacactagccattct

SEQ ID NO: 72604 - DNA, 38 bp, Artificial Sequence
  primer
gtaaaacgacggccagttcctacgtctttggatcctgg

SEQ ID NO: 72605 - DNA, 26 bp, Artificial Sequence
  primer
aaatccctaggagaagaagaggtaaa

SEQ ID NO: 72606 - DNA, 38 bp, Artificial Sequence
  primer
gtaaaacgacggccagtacgcagggtaatgaaatctcc

SEQ ID NO: 72607 - DNA, 21 bp, Artificial Sequence
  primer
tccaattatctcaatgccacg

SEQ ID NO: 72608 - DNA, 41 bp, Artificial Sequence
  primer
gtaaaacgacggccagtttccaacggagttcaaacttactc

SEQ ID NO: 72609 - DNA, 23 bp, Artificial Sequence
  primer
caagataagtttgaactgtgccc

SEQ ID NO: 72610 - DNA, 38 bp, Artificial Sequence
  primer
gtaaaacgacggccagtccagagcgccctctacttaac

SEQ ID NO: 72611 - DNA, 20 bp, Artificial Sequence
  primer
gagtggagatggtgccactg

SEQ ID NO: 72612 - DNA, 23 bp, Artificial Sequence
  primer
ccaattcctgcagtgacactatc

SEQ ID NO: 72613 - DNA, 21 bp, Artificial Sequence
  primer
aggactccggttctaacttgg

SEQ ID NO: 72614 - DNA, 38 bp, Artificial Sequence
  primer
gtaaaacgacggccagttctgctgttcaatgagaaggg

SEQ ID NO: 72615 - DNA, 21 bp, Artificial Sequence
  primer
tccgtgtaaacgcagtggtag

SEQ ID NO: 72616 - DNA, 38 bp, Artificial Sequence
  primer
gtaaaacgacggccagtagcttatcccagaatcgcttg

SEQ ID NO: 72617 - DNA, 21 bp, Artificial Sequence
  primer
cccagctaagagatggtcctc

SEQ ID NO: 72618 - DNA, 38 bp, Artificial Sequence
  primer
gtaaaacgacggccagtccctttctggaccatttcttg

SEQ ID NO: 72619 - DNA, 25 bp, Artificial Sequence
  primer
attatcgaccaaagtactcttcctg

SEQ ID NO: 72620 - DNA, 41 bp, Artificial Sequence
  primer
gtaaaacgacggccagtccagaacaccactagggtctaaag

SEQ ID NO: 72621 - DNA, 23 bp, Artificial Sequence
  primer
ttctctgaagcattggtcatttc

SEQ ID NO: 72622 - DNA, 43 bp, Artificial Sequence
  primer
gtaaaacgacggccagttggcttgagctagtaaagataatttg

SEQ ID NO: 72623 - DNA, 38 bp, Artificial Sequence
  primer
gtaaaacgacggccagttaataacctgtccacgggagg

SEQ ID NO: 72624 - DNA, 20 bp, Artificial Sequence
  primer
tgttgaaacgtgctgctctg

SEQ ID NO: 72625 - DNA, 26 bp, Artificial Sequence
  primer
caccatcttgaactgaattattatcg

SEQ ID NO: 72626 - DNA, 38 bp, Artificial Sequence
  primer
gtaaaacgacggccagttcacaggatcttcagccattg

SEQ ID NO: 72627 - DNA, 21 bp, Artificial Sequence
  primer
aactggaactttcctgatggg

SEQ ID NO: 72628 - DNA, 38 bp, Artificial Sequence
  primer
gtaaaacgacggccagttgtgatttgggtctgatctgc

SEQ ID NO: 72629 - DNA, 38 bp, Artificial Sequence
  primer
gtaaaacgacggccagttctccttctttcaaagctgcc

SEQ ID NO: 72630 - DNA, 21 bp, Artificial Sequence
  primer
tttgtgccactcaaagattcc

SEQ ID NO: 72631 - DNA, 38 bp, Artificial Sequence
  primer
gtaaaacgacggccagtaccaaatggaactttgcaacc

SEQ ID NO: 72632 - DNA, 21 bp, Artificial Sequence
  primer
ctgacaggcacaggtcttgag

SEQ ID NO: 72633 - DNA, 22 bp, Artificial Sequence
  primer
ccactgacaattcagcctgtag

SEQ ID NO: 72634 - DNA, 22 bp, Artificial Sequence
  primer
tctgaatggccatgtaatcaac

SEQ ID NO: 72635 - DNA, 30 bp, Artificial Sequence
  primer
tgttgtaaacatataggaatacatagcagc

SEQ ID NO: 72636 - DNA, 38 bp, Artificial Sequence
  primer
gtaaaacgacggccagtcaaatcaaagaggaaatggca

SEQ ID NO: 72637 - DNA, 38 bp, Artificial Sequence
  primer
gtaaaacgacggccagtcctttgtcattcaaagttgcc

SEQ ID NO: 72638 - DNA, 23 bp, Artificial Sequence
  primer
gcttcaaattacctttagtgccc

SEQ ID NO: 72639 - DNA, 38 bp, Artificial Sequence
  primer
gtaaaacgacggccagtgcacaaccttgtaatcccacc

SEQ ID NO: 72640 - DNA, 22 bp, Artificial Sequence
  primer
aaagcccatagcttgtctgaac

SEQ ID NO: 72641 - DNA, 21 bp, Artificial Sequence
  primer
tttcagcagccacaattcatc

SEQ ID NO: 72642 - DNA, 38 bp, Artificial Sequence
  primer
gtaaaacgacggccagtgaggccaatccaagaaagatg

SEQ ID NO: 72643 - DNA, 28 bp, Artificial Sequence
  primer
tttatgacaagacctaagacgacagtaa

SEQ ID NO: 72644 - DNA, 39 bp, Artificial Sequence
  primer
gtaaaacgacggccagtcctgacactaggcagagagatg

SEQ ID NO: 72645 - DNA, 38 bp, Artificial Sequence
  primer
gtaaaacgacggccagtccgtatcaccaatttgcacag

SEQ ID NO: 72646 - DNA, 38 bp, Artificial Sequence
  primer
gtaaaacgacggccagtgcaccaagatctaacagtggg

SEQ ID NO: 72647 - DNA, 21 bp, Artificial Sequence
  primer
agatacttgggttctgggctg

SEQ ID NO: 72648 - DNA, 21 bp, Artificial Sequence
  primer
tgaacaggaggtctttcaggg

SEQ ID NO: 72649 - DNA, 38 bp, Artificial Sequence
  primer
gtaaaacgacggccagtgtctcggaaccacacttctcc

SEQ ID NO: 72650 - DNA, 37 bp, Artificial Sequence
  primer
gtaaaacgacggccagtctagatggtcccacgagctg

SEQ ID NO: 72651 - DNA, 37 bp, Artificial Sequence
  primer
gtaaaacgacggccagtagagataagcaggaaggccc

SEQ ID NO: 72652 - DNA, 21 bp, Artificial Sequence
  primer
cagcccttccagatcactttc

SEQ ID NO: 72653 - DNA, 21 bp, Artificial Sequence
  primer
tcatacagaacgctgacgctc

SEQ ID NO: 72654 - DNA, 35 bp, Artificial Sequence
  primer
gtaaaacgacggccagtcttggaggcagaggtggg

SEQ ID NO: 72655 - DNA, 37 bp, Artificial Sequence
  primer
gtaaaacgacggccagtaactcatacctcccgcaagc

SEQ ID NO: 72656 - DNA, 35 bp, Artificial Sequence
  primer
gtaaaacgacggccagtcaactgcagccaagagcc

SEQ ID NO: 72657 - DNA, 21 bp, Artificial Sequence
  primer
agcctggagccataagtcatc

SEQ ID NO: 72658 - DNA, 35 bp, Artificial Sequence
  primer
gtaaaacgacggccagtagtcgagtgggaggctgg

SEQ ID NO: 72659 - DNA, 20 bp, Artificial Sequence
  primer
aggttggaagcctggtaagc

SEQ ID NO: 72660 - DNA, 21 bp, Artificial Sequence
  primer
aagaacctttgcgaacagtgg

SEQ ID NO: 72661 - DNA, 21 bp, Artificial Sequence
  primer
tataagggccacaaccacctc

SEQ ID NO: 72662 - DNA, 21 bp, Artificial Sequence
  primer
ctctcacagctgaggttctgg

SEQ ID NO: 72663 - DNA, 38 bp, Artificial Sequence
  primer
gtaaaacgacggccagttcttccacgtagtccctctcc

SEQ ID NO: 72664 - DNA, 20 bp, Artificial Sequence
  primer
aggttggaaccctggtaagc

SEQ ID NO: 72665 - DNA, 21 bp, Artificial Sequence
  primer
tggtgtagacacctgtggtcc

SEQ ID NO: 72666 - DNA, 21 bp, Artificial Sequence
  primer
gaaagtgccacagtctcatgg

SEQ ID NO: 72667 - DNA, 37 bp, Artificial Sequence
  primer
gtaaaacgacggccagtttatccctgtccctcccaac

SEQ ID NO: 72668 - DNA, 38 bp, Artificial Sequence
  primer
gtaaaacgacggccagtcatttgtttgcatgctttgtg

SEQ ID NO: 72669 - DNA, 21 bp, Artificial Sequence
  primer
gacatggcttggactagggag

SEQ ID NO: 72670 - DNA, 21 bp, Artificial Sequence
  primer
agagcatgaaaggaagatggg

SEQ ID NO: 72671 - DNA, 21 bp, Artificial Sequence
  primer
agcgagtagatgcctcctctg

SEQ ID NO: 72672 - DNA, 20 bp, Artificial Sequence
  primer
agagcaggaccaaacccttc

SEQ ID NO: 72673 - DNA, 36 bp, Artificial Sequence
  primer
gtaaaacgacggccagtctggacggctcttccagtc

SEQ ID NO: 72674 - DNA, 20 bp, Artificial Sequence
  primer
gtcctgacctcttgcctcag

SEQ ID NO: 72675 - DNA, 38 bp, Artificial Sequence
  primer
gtaaaacgacggccagtccttcgatccctgtcacaatc

SEQ ID NO: 72676 - DNA, 21 bp, Artificial Sequence
  primer
accattgagggagtcaagagc

SEQ ID NO: 72677 - DNA, 38 bp, Artificial Sequence
  primer
gtaaaacgacggccagtgttcaagggccagtttctacc

SEQ ID NO: 72678 - DNA, 36 bp, Artificial Sequence
  primer
gtaaaacgacggccagtcactgcctacacccagcag

SEQ ID NO: 72679 - DNA, 38 bp, Artificial Sequence
  primer
gtaaaacgacggccagttgtgactggtgcctgaaagag

SEQ ID NO: 72680 - DNA, 21 bp, Artificial Sequence
  primer
agaccctcacttaggacaggc

SEQ ID NO: 72681 - DNA, 38 bp, Artificial Sequence
  primer
gtaaaacgacggccagttagcacagaacctggcacttg

SEQ ID NO: 72682 - DNA, 19 bp, Artificial Sequence
  primer
caacagggcaaaggtgtgg

SEQ ID NO: 72683 - DNA, 21 bp, Artificial Sequence
  primer
ttgaacacccatgctctcttg

SEQ ID NO: 72684 - DNA, 21 bp, Artificial Sequence
  primer
ggatatccttggtaacctggc

SEQ ID NO: 72685 - DNA, 20 bp, Artificial Sequence
  primer
agcaccgaacatcctacaaa

SEQ ID NO: 72686 - DNA, 21 bp, Artificial Sequence
  primer
agctgataaatctcttcgcgg

SEQ ID NO: 72687 - DNA, 22 bp, Artificial Sequence
  primer
gcaaactggaaggcagaataac

SEQ ID NO: 72688 - DNA, 39 bp, Artificial Sequence
  primer
gtaaaacgacggccagtgatttgacaccactctgccttc

SEQ ID NO: 72689 - DNA, 21 bp, Artificial Sequence
  primer
catgtcatctctgggacatgc

SEQ ID NO: 72690 - DNA, 22 bp, Artificial Sequence
  primer
tggattgcaagactgacatctg

SEQ ID NO: 72691 - DNA, 22 bp, Artificial Sequence
  primer
ccacaaacttctggctaggaaa

SEQ ID NO: 72692 - DNA, 44 bp, Artificial Sequence
  primer
gtaaaacgacggccagtttacttcttggttcttccaatctttag

SEQ ID NO: 72693 - DNA, 39 bp, Artificial Sequence
  primer
gtaaaacgacggccagtaatgctaggacttggctgtttc

SEQ ID NO: 72694 - DNA, 22 bp, Artificial Sequence
  primer
cgtattatgcctgaaggctacg

SEQ ID NO: 72695 - DNA, 24 bp, Artificial Sequence
  primer
tgtacttactgatggaccttgtgg

SEQ ID NO: 72696 - DNA, 43 bp, Artificial Sequence
  primer
gtaaaacgacggccagtaaatccaatcctgggagctatattac

SEQ ID NO: 72697 - DNA, 40 bp, Artificial Sequence
  primer
gtaaaacgacggccagtaagtaattctcacaggcacatcc

SEQ ID NO: 72698 - DNA, 21 bp, Artificial Sequence
  primer
aaggcacgtacaacattcctg

SEQ ID NO: 72699 - DNA, 38 bp, Artificial Sequence
  primer
gtaaaacgacggccagtccaaataggaagtttgcctcc

SEQ ID NO: 72700 - DNA, 38 bp, Artificial Sequence
  primer
gtaaaacgacggccagtagacgtctcttgcagccagtc

SEQ ID NO: 72701 - DNA, 21 bp, Artificial Sequence
  primer
gtttcctggcatggatgtttg

SEQ ID NO: 72702 - DNA, 39 bp, Artificial Sequence
  primer
gtaaaacgacggccagtcccttagaaccttgctctgatg

SEQ ID NO: 72703 - DNA, 21 bp, Artificial Sequence
  primer
caaaggatcccataatcccag

SEQ ID NO: 72704 - DNA, 21 bp, Artificial Sequence
  primer
agcagagatctgcaacttccc

SEQ ID NO: 72705 - DNA, 38 bp, Artificial Sequence
  primer
gtaaaacgacggccagtgagggagctgaggacatcaag

SEQ ID NO: 72706 - DNA, 38 bp, Artificial Sequence
  primer
gtaaaacgacggccagtctgtgcttacccactccactg

SEQ ID NO: 72707 - DNA, 21 bp, Artificial Sequence
  primer
ccctgagacacatggcagtag

SEQ ID NO: 72708 - DNA, 21 bp, Artificial Sequence
  primer
agtccaggtggcagaatcaag

SEQ ID NO: 72709 - DNA, 38 bp, Artificial Sequence
  primer
gtaaaacgacggccagttttctcagtccagcccttgag

SEQ ID NO: 72710 - DNA, 38 bp, Artificial Sequence
  primer
gtaaaacgacggccagtaattcgcaggtggtttactgg

SEQ ID NO: 72711 - DNA, 39 bp, Artificial Sequence
  primer
gtaaaacgacggccagtagtccagaactcagctctccag

SEQ ID NO: 72712 - DNA, 38 bp, Artificial Sequence
  primer
gtaaaacgacggccagtctccgccaccctgttagttac

SEQ ID NO: 72713 - DNA, 38 bp, Artificial Sequence
  primer
gtaaaacgacggccagtactgaaagctgagggaactcg

SEQ ID NO: 72714 - DNA, 44 bp, Artificial Sequence
  primer
gtaaaacgacggccagtcaactgagaggaacttaactgtttcac

SEQ ID NO: 72715 - DNA, 21 bp, Artificial Sequence
  primer
aacaccttaccacgtgtttgc

SEQ ID NO: 72716 - DNA, 21 bp, Artificial Sequence
  primer
cttaagcctgggatgttgagg

SEQ ID NO: 72717 - DNA, 21 bp, Artificial Sequence
  primer
ctgattacccgactctctggg

SEQ ID NO: 72718 - DNA, 42 bp, Artificial Sequence
  primer
gtaaaacgacggccagtcaaactagcacttgttaccctgaac

SEQ ID NO: 72719 - DNA, 40 bp, Artificial Sequence
  primer
gtaaaacgacggccagtaattctggttctggagtgatgtg

SEQ ID NO: 72720 - DNA, 38 bp, Artificial Sequence
  primer
gtaaaacgacggccagtaggcctcactgtctcatttcc

SEQ ID NO: 72721 - DNA, 21 bp, Artificial Sequence
  primer
tggtggttatggaaagcactg

SEQ ID NO: 72722 - DNA, 39 bp, Artificial Sequence
  primer
gtaaaacgacggccagttcctgaagtgtttcttcaaccc

SEQ ID NO: 72723 - DNA, 38 bp, Artificial Sequence
  primer
gtaaaacgacggccagtcttaaactgggaagctggtgg

SEQ ID NO: 72724 - DNA, 21 bp, Artificial Sequence
  primer
cccattaatgtctgcatgtgg

SEQ ID NO: 72725 - DNA, 38 bp, Artificial Sequence
  primer
gtaaaacgacggccagtcggagaccttagaactctggg

SEQ ID NO: 72726 - DNA, 23 bp, Artificial Sequence
  primer
gccaaatggtgaatttgtatgac

SEQ ID NO: 72727 - DNA, 38 bp, Artificial Sequence
  primer
gtaaaacgacggccagtcccattaatgtctgcatgtgg

SEQ ID NO: 72728 - DNA, 19 bp, Artificial Sequence
  primer
actgccccttaaccccttc

SEQ ID NO: 72729 - DNA, 21 bp, Artificial Sequence
  primer
caactggcgaatctggataaa

SEQ ID NO: 72730 - DNA, 39 bp, Artificial Sequence
  primer
gtaaaacgacggccagttgctgtggctcattcacattac

SEQ ID NO: 72731 - DNA, 38 bp, Artificial Sequence
  primer
gtaaaacgacggccagtatccacctgtcatttcatggg

SEQ ID NO: 72732 - DNA, 19 bp, Artificial Sequence
  primer
tcccttcgtggttgaggtc

SEQ ID NO: 72733 - DNA, 36 bp, Artificial Sequence
  primer
gtaaaacgacggccagtagggtttgcagccacattc

SEQ ID NO: 72734 - DNA, 38 bp, Artificial Sequence
  primer
gtaaaacgacggccagtcccaatagttcaggcagaagg

SEQ ID NO: 72735 - DNA, 20 bp, Artificial Sequence
  primer
aaggccaggctgaggtaatg

SEQ ID NO: 72736 - DNA, 36 bp, Artificial Sequence
  primer
gtaaaacgacggccagtgccatggagtgaaatgtcg

SEQ ID NO: 72737 - DNA, 38 bp, Artificial Sequence
  primer
gtaaaacgacggccagtaaggtcatatacccggcacac

SEQ ID NO: 72738 - DNA, 20 bp, Artificial Sequence
  primer
aagggcaggctggtgtagag

SEQ ID NO: 72739 - DNA, 38 bp, Artificial Sequence
  primer
gtaaaacgacggccagtcagcctgatttgctacccttc

SEQ ID NO: 72740 - DNA, 21 bp, Artificial Sequence
  primer
aagagaagacggcctgacaac

SEQ ID NO: 72741 - DNA, 38 bp, Artificial Sequence
  primer
gtaaaacgacggccagtttatacagcggcaatgcagtc

SEQ ID NO: 72742 - DNA, 39 bp, Artificial Sequence
  primer
gtaaaacgacggccagttgttctttccctcctaattccc

SEQ ID NO: 72743 - DNA, 21 bp, Artificial Sequence
  primer
cctaggaacaagaccacagcc

SEQ ID NO: 72744 - DNA, 38 bp, Artificial Sequence
  primer
gtaaaacgacggccagtgccactggttctacgctgttc

SEQ ID NO: 72745 - DNA, 19 bp, Artificial Sequence
  primer
tactcagccgggagtctgc

SEQ ID NO: 72746 - DNA, 19 bp, Artificial Sequence
  primer
gtggcgactcctcgagttc

SEQ ID NO: 72747 - DNA, 18 bp, Artificial Sequence
  primer
agtgggcctcagcagcag

SEQ ID NO: 72748 - DNA, 21 bp, Artificial Sequence
  primer
caattgttggcctggtaggtc

SEQ ID NO: 72749 - DNA, 39 bp, Artificial Sequence
  primer
gtaaaacgacggccagtggtccgaataaatatgggaagg

SEQ ID NO: 72750 - DNA, 21 bp, Artificial Sequence
  primer
tggtaaagccacaggaggaag

SEQ ID NO: 72751 - DNA, 38 bp, Artificial Sequence
  primer
gtaaaacgacggccagtccttctctatcagaggcgtcc

SEQ ID NO: 72752 - DNA, 38 bp, Artificial Sequence
  primer
gtaaaacgacggccagtgggagtagggtgagaactggc

SEQ ID NO: 72753 - DNA, 38 bp, Artificial Sequence
  primer
gtaaaacgacggccagtagctttgtgagaggtcatggg

SEQ ID NO: 72754 - DNA, 21 bp, Artificial Sequence
  primer
ctgagctataacagggccagg

SEQ ID NO: 72755 - DNA, 21 bp, Artificial Sequence
  primer
tcgaaagcagaagcaatcaac

SEQ ID NO: 72756 - DNA, 37 bp, Artificial Sequence
  primer
gtaaaacgacggccagtgcctcgatctcctgaccttg

SEQ ID NO: 72757 - DNA, 38 bp, Artificial Sequence
  primer
gtaaaacgacggccagtcaactgttgacacacaatggc

SEQ ID NO: 72758 - DNA, 21 bp, Artificial Sequence
  primer
aaagggcaagacagggaagag

SEQ ID NO: 72759 - DNA, 21 bp, Artificial Sequence
  primer
agcatgaaccaaggagtgatg

SEQ ID NO: 72760 - DNA, 38 bp, Artificial Sequence
  primer
gtaaaacgacggccagtgaactgatgtggactggatgc

SEQ ID NO: 72761 - DNA, 21 bp, Artificial Sequence
  primer
atctggctccctcctcctatc

SEQ ID NO: 72762 - DNA, 22 bp, Artificial Sequence
  primer
cctgatgcctgactcttacacc

SEQ ID NO: 72763 - DNA, 22 bp, Artificial Sequence
  primer
caaaggctggcatttactcaag

SEQ ID NO: 72764 - DNA, 21 bp, Artificial Sequence
  primer
acctcctcatgtgcctgattc

SEQ ID NO: 72765 - DNA, 21 bp, Artificial Sequence
  primer
ctctccggcctcactctagtc

SEQ ID NO: 72766 - DNA, 21 bp, Artificial Sequence
  primer
cacagtaagcaaagtgggcag

SEQ ID NO: 72767 - DNA, 37 bp, Artificial Sequence
  primer
gtaaaacgacggccagtaagctgcgacatacaatggg

SEQ ID NO: 72768 - DNA, 21 bp, Artificial Sequence
  primer
cctttaatccttgagcttggg

SEQ ID NO: 72769 - DNA, 21 bp, Artificial Sequence
  primer
agagcgggagtctgaaatcac

SEQ ID NO: 72770 - DNA, 21 bp, Artificial Sequence
  primer
ccaaagaccttgagcttctcc

SEQ ID NO: 72771 - DNA, 21 bp, Artificial Sequence
  primer
agctctctcttgaccctggag

SEQ ID NO: 72772 - DNA, 38 bp, Artificial Sequence
  primer
gtaaaacgacggccagtagccagcagctctgagtaacc

SEQ ID NO: 72773 - DNA, 21 bp, Artificial Sequence
  primer
ttctctgccctgagcaaattc

SEQ ID NO: 72774 - DNA, 21 bp, Artificial Sequence
  primer
atgttcacggcctcttctgag

SEQ ID NO: 72775 - DNA, 20 bp, Artificial Sequence
  primer
gagctgttgggaagaaaggg

SEQ ID NO: 72776 - DNA, 21 bp, Artificial Sequence
  primer
gttctagtggccaggtatggg

SEQ ID NO: 72777 - DNA, 21 bp, Artificial Sequence
  primer
tgcatttctagccaccacatc

SEQ ID NO: 72778 - DNA, 21 bp, Artificial Sequence
  primer
tgtgtaactgggcaaggaatg

SEQ ID NO: 72779 - DNA, 21 bp, Artificial Sequence
  primer
gatccaggagcgttagtttgg

SEQ ID NO: 72780 - DNA, 38 bp, Artificial Sequence
  primer
gtaaaacgacggccagtacactcactgtgccattggtc

SEQ ID NO: 72781 - DNA, 38 bp, Artificial Sequence
  primer
gtaaaacgacggccagttgggtgtggtactaagcatgg

SEQ ID NO: 72782 - DNA, 39 bp, Artificial Sequence
  primer
gtaaaacgacggccagtaagaccgagctgactgattctg

SEQ ID NO: 72783 - DNA, 38 bp, Artificial Sequence
  primer
gtaaaacgacggccagtgaccaattcccttgaggtcag

SEQ ID NO: 72784 - DNA, 21 bp, Artificial Sequence
  primer
acgctgaaggatcgagatagg

SEQ ID NO: 72785 - DNA, 21 bp, Artificial Sequence
  primer
ctggagcagaagtacctgacg

SEQ ID NO: 72786 - DNA, 20 bp, Artificial Sequence
  primer
gacccacccagatgaaatcc

SEQ ID NO: 72787 - DNA, 38 bp, Artificial Sequence
  primer
gtaaaacgacggccagtactgagaatcgatgaatgggc

SEQ ID NO: 72788 - DNA, 21 bp, Artificial Sequence
  primer
tggactttaggatgccctcag

SEQ ID NO: 72789 - DNA, 40 bp, Artificial Sequence
  primer
gtaaaacgacggccagtaaacaacacaatttctgtcctgc

SEQ ID NO: 72790 - DNA, 21 bp, Artificial Sequence
  primer
tgatagatcgagcagcctcag

SEQ ID NO: 72791 - DNA, 38 bp, Artificial Sequence
  primer
gtaaaacgacggccagttagaggccgttcttgaggaag

SEQ ID NO: 72792 - DNA, 21 bp, Artificial Sequence
  primer
gacgctggtgttgcagtaaag

SEQ ID NO: 72793 - DNA, 38 bp, Artificial Sequence
  primer
gtaaaacgacggccagtgtagagcagcacgagcacaag

SEQ ID NO: 72794 - DNA, 21 bp, Artificial Sequence
  primer
cctccagggttgtagagatcg

SEQ ID NO: 72795 - DNA, 38 bp, Artificial Sequence
  primer
gtaaaacgacggccagtcagttctctggaccgaagcag

SEQ ID NO: 72796 - DNA, 23 bp, Artificial Sequence
  primer
aacctgacatgaaggaagacaag

SEQ ID NO: 72797 - DNA, 21 bp, Artificial Sequence
  primer
gggattataacaacacgtggc

SEQ ID NO: 72798 - DNA, 21 bp, Artificial Sequence
  primer
tgcagggattcaacttctgtg

SEQ ID NO: 72799 - DNA, 21 bp, Artificial Sequence
  primer
ctgccattcatttccactctg

SEQ ID NO: 72800 - DNA, 21 bp, Artificial Sequence
  primer
accatggcaacggaaactatc

SEQ ID NO: 72801 - DNA, 20 bp, Artificial Sequence
  primer
aagatcttcaccctccaggc

SEQ ID NO: 72802 - DNA, 21 bp, Artificial Sequence
  primer
acaccatctgcaggaagaagc

SEQ ID NO: 72803 - DNA, 20 bp, Artificial Sequence
  primer
ttctccagaggccaaagtcc

SEQ ID NO: 72804 - DNA, 18 bp, Artificial Sequence
  primer
tccgccactccctaaacc

SEQ ID NO: 72805 - DNA, 21 bp, Artificial Sequence
  primer
ccgaggaagagacttcacctg

SEQ ID NO: 72806 - DNA, 21 bp, Artificial Sequence
  primer
cgcttaccacagaggtcacag

SEQ ID NO: 72807 - DNA, 36 bp, Artificial Sequence
  primer
gtaaaacgacggccagtgtcagcaacacaacggctc

SEQ ID NO: 72808 - DNA, 21 bp, Artificial Sequence
  primer
cagaggcagatagtgggcaag

SEQ ID NO: 72809 - DNA, 35 bp, Artificial Sequence
  primer
gtaaaacgacggccagtcatggtcgcctccaggac

SEQ ID NO: 72810 - DNA, 18 bp, Artificial Sequence
  primer
tccacctgagggcgtagc

SEQ ID NO: 72811 - DNA, 21 bp, Artificial Sequence
  primer
gtaactgtggctggtgctgtc

SEQ ID NO: 72812 - DNA, 39 bp, Artificial Sequence
  primer
gtaaaacgacggccagtcaggtgcaggaaacacctttac

SEQ ID NO: 72813 - DNA, 20 bp, Artificial Sequence
  primer
gctgggattcacaactggag

SEQ ID NO: 72814 - DNA, 38 bp, Artificial Sequence
  primer
gtaaaacgacggccagtctagttggatcctgctcagcc

SEQ ID NO: 72815 - DNA, 21 bp, Artificial Sequence
  primer
ggtgatattgactctgccctg

SEQ ID NO: 72816 - DNA, 20 bp, Artificial Sequence
  primer
acaatgtggagcccagtgtc

SEQ ID NO: 72817 - DNA, 21 bp, Artificial Sequence
  primer
tgagcaagtgtgtgctttcag

SEQ ID NO: 72818 - DNA, 21 bp, Artificial Sequence
  primer
tctctacagccgttcattccc

SEQ ID NO: 72819 - DNA, 21 bp, Artificial Sequence
  primer
cacctttaagtgacaggctgg

SEQ ID NO: 72820 - DNA, 21 bp, Artificial Sequence
  primer
tagaacctggaccatcatccc

SEQ ID NO: 72821 - DNA, 20 bp, Artificial Sequence
  primer
agcaacagcaactggagcag

SEQ ID NO: 72822 - DNA, 21 bp, Artificial Sequence
  primer
gtagctggacttgcaggaacc

SEQ ID NO: 72823 - DNA, 20 bp, Artificial Sequence
  primer
ggattgcaggtcaaacttgg

SEQ ID NO: 72824 - DNA, 39 bp, Artificial Sequence
  primer
gtaaaacgacggccagtccatcttggtggatgagaagtc

SEQ ID NO: 72825 - DNA, 37 bp, Artificial Sequence
  primer
gtaaaacgacggccagtcacaacccttgtcctcaccc

SEQ ID NO: 72826 - DNA, 37 bp, Artificial Sequence
  primer
gtaaaacgacggccagtacaatctgggatctcagccc

SEQ ID NO: 72827 - DNA, 27 bp, Artificial Sequence
  primer
tgaacagacaatcaataatccaatatg

SEQ ID NO: 72828 - DNA, 21 bp, Artificial Sequence
  primer
aagaactgcgactgtgctttg

SEQ ID NO: 72829 - DNA, 21 bp, Artificial Sequence
  primer
gagggtccagcactttacctg

SEQ ID NO: 72830 - DNA, 20 bp, Artificial Sequence
  primer
acggccacatctgttctcac

SEQ ID NO: 72831 - DNA, 38 bp, Artificial Sequence
  primer
gtaaaacgacggccagttccctcagttgccctctactc

SEQ ID NO: 72832 - DNA, 22 bp, Artificial Sequence
  primer
gcaagtcagtcagtgcatcaac

SEQ ID NO: 72833 - DNA, 20 bp, Artificial Sequence
  primer
actctggccttgaagtcgtg

SEQ ID NO: 72834 - DNA, 21 bp, Artificial Sequence
  primer
gtgacctcagctttgtctcgg

SEQ ID NO: 72835 - DNA, 21 bp, Artificial Sequence
  primer
aactccttggaattggctctg

SEQ ID NO: 72836 - DNA, 21 bp, Artificial Sequence
  primer
tctggcccatggtagaacatc

SEQ ID NO: 72837 - DNA, 38 bp, Artificial Sequence
  primer
gtaaaacgacggccagtccttggacctctctggatagc

SEQ ID NO: 72838 - DNA, 21 bp, Artificial Sequence
  primer
acctcatgctcacagcctttc

SEQ ID NO: 72839 - DNA, 20 bp, Artificial Sequence
  primer
gtgtcccatgagtggcagag

SEQ ID NO: 72840 - DNA, 37 bp, Artificial Sequence
  primer
gtaaaacgacggccagtagtaagagctgatgggtgcc

SEQ ID NO: 72841 - DNA, 21 bp, Artificial Sequence
  primer
cacgcctcttctctcttccac

SEQ ID NO: 72842 - DNA, 21 bp, Artificial Sequence
  primer
tagtactgcgagtgggctttg

SEQ ID NO: 72843 - DNA, 21 bp, Artificial Sequence
  primer
ctccagggacaactgaaggag

SEQ ID NO: 72844 - DNA, 38 bp, Artificial Sequence
  primer
gtaaaacgacggccagtatcttgaggctctcctccctg

SEQ ID NO: 72845 - DNA, 21 bp, Artificial Sequence
  primer
cctctccttggactacccact

SEQ ID NO: 72846 - DNA, 21 bp, Artificial Sequence
  primer
gcctggctctctgagttcatc

SEQ ID NO: 72847 - DNA, 38 bp, Artificial Sequence
  primer
gtaaaacgacggccagtgcagtaaacctgctcccaaag

SEQ ID NO: 72848 - DNA, 38 bp, Artificial Sequence
  primer
gtaaaacgacggccagtctggcctccaaacctacagtc

SEQ ID NO: 72849 - DNA, 21 bp, Artificial Sequence
  primer
tgtttatcagggatcaagggc

SEQ ID NO: 72850 - DNA, 21 bp, Artificial Sequence
  primer
gaggaaaggtctggcaatctg

SEQ ID NO: 72851 - DNA, 21 bp, Artificial Sequence
  primer
gccttgtgttccagttcacac

SEQ ID NO: 72852 - DNA, 21 bp, Artificial Sequence
  primer
tgctctcacagctctcctctc

SEQ ID NO: 72853 - DNA, 25 bp, Artificial Sequence
  primer
ttaaagctatcacgaaccctaaatg

SEQ ID NO: 72854 - DNA, 23 bp, Artificial Sequence
  primer
gagcttatttgctatgctatggg

SEQ ID NO: 72855 - DNA, 21 bp, Artificial Sequence
  primer
ttgaaccatatcttccctggc

SEQ ID NO: 72856 - DNA, 38 bp, Artificial Sequence
  primer
gtaaaacgacggccagtacctccctcaacaggaaagag

SEQ ID NO: 72857 - DNA, 38 bp, Artificial Sequence
  primer
gtaaaacgacggccagtgattggacacgtgaggaaatg

SEQ ID NO: 72858 - DNA, 38 bp, Artificial Sequence
  primer
gtaaaacgacggccagtaaggaacaatgtgcatgaagg

SEQ ID NO: 72859 - DNA, 22 bp, Artificial Sequence
  primer
ccctaacccattggacataatc

SEQ ID NO: 72860 - DNA, 38 bp, Artificial Sequence
  primer
gtaaaacgacggccagtctgagaagggagggcttgtag

SEQ ID NO: 72861 - DNA, 38 bp, Artificial Sequence
  primer
gtaaaacgacggccagtcatttgtgtagtgtttggccc

SEQ ID NO: 72862 - DNA, 39 bp, Artificial Sequence
  primer
gtaaaacgacggccagtgcaacacgttccttgttcatac

SEQ ID NO: 72863 - DNA, 38 bp, Artificial Sequence
  primer
gtaaaacgacggccagtcaaactttcaggtccaaaggc

SEQ ID NO: 72864 - DNA, 20 bp, Artificial Sequence
  primer
cacagtaatgcatgaggccc

SEQ ID NO: 72865 - DNA, 23 bp, Artificial Sequence
  primer
tgcagtgtcgataatgacttgtg

SEQ ID NO: 72866 - DNA, 38 bp, Artificial Sequence
  primer
gtaaaacgacggccagttgactttcaaattctggacgg

SEQ ID NO: 72867 - DNA, 40 bp, Artificial Sequence
  primer
gtaaaacgacggccagttcccttctagtccctgtccatag

SEQ ID NO: 72868 - DNA, 25 bp, Artificial Sequence
  primer
gtggaacatctaatactttccttgg

SEQ ID NO: 72869 - DNA, 20 bp, Artificial Sequence
  primer
gcaccaccacagagaggatg

SEQ ID NO: 72870 - DNA, 21 bp, Artificial Sequence
  primer
tgtctctgcacactctggctc

SEQ ID NO: 72871 - DNA, 36 bp, Artificial Sequence
  primer
gtaaaacgacggccagtggacagcttgaggtgaggg

SEQ ID NO: 72872 - DNA, 20 bp, Artificial Sequence
  primer
ccactctatgctccctgtgc

SEQ ID NO: 72873 - DNA, 21 bp, Artificial Sequence
  primer
ccctcaccctgttccttgtag

SEQ ID NO: 72874 - DNA, 21 bp, Artificial Sequence
  primer
aaagagaaacgccctttccag

SEQ ID NO: 72875 - DNA, 20 bp, Artificial Sequence
  primer
agcctgggttgtagggagag

SEQ ID NO: 72876 - DNA, 21 bp, Artificial Sequence
  primer
attcctgcaggtcagggtatg

SEQ ID NO: 72877 - DNA, 38 bp, Artificial Sequence
  primer
gtaaaacgacggccagtagacaccaggtgatgggagtc

SEQ ID NO: 72878 - DNA, 21 bp, Artificial Sequence
  primer
ctgtactggatgctgtgtggg

SEQ ID NO: 72879 - DNA, 21 bp, Artificial Sequence
  primer
tcaaagcgatggaaagtgttc

SEQ ID NO: 72880 - DNA, 21 bp, Artificial Sequence
  primer
gtcatctgcctaccctccttg

SEQ ID NO: 72881 - DNA, 21 bp, Artificial Sequence
  primer
gaaagcaaggatacccaggtg

SEQ ID NO: 72882 - DNA, 22 bp, Artificial Sequence
  primer
tccacctaatacagaaccctgg

SEQ ID NO: 72883 - DNA, 21 bp, Artificial Sequence
  primer
ggtgggtcagaggtctagtgg

SEQ ID NO: 72884 - DNA, 21 bp, Artificial Sequence
  primer
tacattgggaaggcagaatcc

SEQ ID NO: 72885 - DNA, 21 bp, Artificial Sequence
  primer
agctatgctctaccagcaggg

SEQ ID NO: 72886 - DNA, 21 bp, Artificial Sequence
  primer
tcagggccttccttggtatag

SEQ ID NO: 72887 - DNA, 21 bp, Artificial Sequence
  primer
gaatggagacatgcagagacc

SEQ ID NO: 72888 - DNA, 21 bp, Artificial Sequence
  primer
tagggacagggacaggaacag

SEQ ID NO: 72889 - DNA, 22 bp, Artificial Sequence
  primer
tcatatcaggacacacacccac

SEQ ID NO: 72890 - DNA, 38 bp, Artificial Sequence
  primer
gtaaaacgacggccagtttcaccttctcccagacatcc

SEQ ID NO: 72891 - DNA, 22 bp, Artificial Sequence
  primer
gaaccatcaaacatcagtgtgg

SEQ ID NO: 72892 - DNA, 38 bp, Artificial Sequence
  primer
gtaaaacgacggccagtggtgaggcctttctcatctcc

SEQ ID NO: 72893 - DNA, 38 bp, Artificial Sequence
  primer
gtaaaacgacggccagtggagccctgaagttctcacag

SEQ ID NO: 72894 - DNA, 37 bp, Artificial Sequence
  primer
gtaaaacgacggccagtcacaatcatggtggctttcc

SEQ ID NO: 72895 - DNA, 21 bp, Artificial Sequence
  primer
ttccctgagctgatggtacac

SEQ ID NO: 72896 - DNA, 21 bp, Artificial Sequence
  primer
gtaagctggcaccagaacagg

SEQ ID NO: 72897 - DNA, 21 bp, Artificial Sequence
  primer
agataccatcgtgaagggcag

SEQ ID NO: 72898 - DNA, 21 bp, Artificial Sequence
  primer
atgcctcatatagcaggctgg

SEQ ID NO: 72899 - DNA, 38 bp, Artificial Sequence
  primer
gtaaaacgacggccagtataaggacagacatcccagcc

SEQ ID NO: 72900 - DNA, 37 bp, Artificial Sequence
  primer
gtaaaacgacggccagtcaacagtggcttccttcctg

SEQ ID NO: 72901 - DNA, 38 bp, Artificial Sequence
  primer
gtaaaacgacggccagttgtgcctgagtgtctcagagg

SEQ ID NO: 72902 - DNA, 38 bp, Artificial Sequence
  primer
gtaaaacgacggccagttcagaggcatcctcttcacag

SEQ ID NO: 72903 - DNA, 18 bp, Artificial Sequence
  primer
gcagtcaccgagctgagg

SEQ ID NO: 72904 - DNA, 22 bp, Artificial Sequence
  primer
tcaagttagtgccaactccatc

SEQ ID NO: 72905 - DNA, 38 bp, Artificial Sequence
  primer
gtaaaacgacggccagtacctgtgttcaagcatccatc

SEQ ID NO: 72906 - DNA, 38 bp, Artificial Sequence
  primer
gtaaaacgacggccagtagtggaaagagcaagtcaggg

SEQ ID NO: 72907 - DNA, 43 bp, Artificial Sequence
  primer
gtaaaacgacggccagtcaactatctttgatgtcagtttgagg

SEQ ID NO: 72908 - DNA, 21 bp, Artificial Sequence
  primer
ccgcaacattgtaggtcaaag

SEQ ID NO: 72909 - DNA, 21 bp, Artificial Sequence
  primer
ccaagcaatcaatacccactg

SEQ ID NO: 72910 - DNA, 43 bp, Artificial Sequence
  primer
gtaaaacgacggccagttggataattctatcccatttcatttg

SEQ ID NO: 72911 - DNA, 21 bp, Artificial Sequence
  primer
tacaggctggtccacagattg

SEQ ID NO: 72912 - DNA, 21 bp, Artificial Sequence
  primer
agcctcacatctcagtctccc

SEQ ID NO: 72913 - DNA, 21 bp, Artificial Sequence
  primer
tggaaccgccactttctttag

SEQ ID NO: 72914 - DNA, 41 bp, Artificial Sequence
  primer
gtaaaacgacggccagtcatgaaaggtatagggatcattgg

SEQ ID NO: 72915 - DNA, 38 bp, Artificial Sequence
  primer
gtaaaacgacggccagtgctcaagactttcagtggcct

SEQ ID NO: 72916 - DNA, 38 bp, Artificial Sequence
  primer
gtaaaacgacggccagtagctcttcaggcgagtagcac

SEQ ID NO: 72917 - DNA, 21 bp, Artificial Sequence
  primer
ctagcctgctgggctaaacac

SEQ ID NO: 72918 - DNA, 38 bp, Artificial Sequence
  primer
gtaaaacgacggccagtcaggatccagaaaccacattc

SEQ ID NO: 72919 - DNA, 21 bp, Artificial Sequence
  primer
cagatatggagcatgtttggc

SEQ ID NO: 72920 - DNA, 23 bp, Artificial Sequence
  primer
ccaaagagttatcaccatgaacc

SEQ ID NO: 72921 - DNA, 21 bp, Artificial Sequence
  primer
gtggtgaagggaaagcagttc

SEQ ID NO: 72922 - DNA, 21 bp, Artificial Sequence
  primer
gatctatgctgtcacaagccc

SEQ ID NO: 72923 - DNA, 21 bp, Artificial Sequence
  primer
aaggtttgtctggcatcagtc

SEQ ID NO: 72924 - DNA, 39 bp, Artificial Sequence
  primer
gtaaaacgacggccagtaagacaaccacacagatggatg

SEQ ID NO: 72925 - DNA, 21 bp, Artificial Sequence
  primer
ctgatacccaaactgccacat

SEQ ID NO: 72926 - DNA, 21 bp, Artificial Sequence
  primer
tcttgcgctcaaactctcaag

SEQ ID NO: 72927 - DNA, 43 bp, Artificial Sequence
  primer
gtaaaacgacggccagtacattgctttgttagatattgtaggg

SEQ ID NO: 72928 - DNA, 37 bp, Artificial Sequence
  primer
gtaaaacgacggccagtgagaaggaccctcccagatg

SEQ ID NO: 72929 - DNA, 27 bp, Artificial Sequence
  primer
gaaatctgaagacctatatttcgtacc

SEQ ID NO: 72930 - DNA, 22 bp, Artificial Sequence
  primer
tccagatttgacaggtttaggc

SEQ ID NO: 72931 - DNA, 38 bp, Artificial Sequence
  primer
gtaaaacgacggccagttgccaatccaagtaccacaac

SEQ ID NO: 72932 - DNA, 26 bp, Artificial Sequence
  primer
tctgctacagaaatactgatgtttcc

SEQ ID NO: 72933 - DNA, 38 bp, Artificial Sequence
  primer
gtaaaacgacggccagttctcttgacacagagcaaccc

SEQ ID NO: 72934 - DNA, 21 bp, Artificial Sequence
  primer
ggccaggtggaagtcatagag

SEQ ID NO: 72935 - DNA, 21 bp, Artificial Sequence
  primer
gctgtccttggaatccagttc

SEQ ID NO: 72936 - DNA, 21 bp, Artificial Sequence
  primer
ccctaagcctgaggtagggac

SEQ ID NO: 72937 - DNA, 20 bp, Artificial Sequence
  primer
ttccaggtcccttgtctgtg

SEQ ID NO: 72938 - DNA, 38 bp, Artificial Sequence
  primer
gtaaaacgacggccagttggtatggcctctgtgctaag

SEQ ID NO: 72939 - DNA, 20 bp, Artificial Sequence
  primer
gaaacaccagagggcagatg

SEQ ID NO: 72940 - DNA, 38 bp, Artificial Sequence
  primer
gtaaaacgacggccagtaacctttggatgagtcatggg

SEQ ID NO: 72941 - DNA, 38 bp, Artificial Sequence
  primer
gtaaaacgacggccagttgtcaagcaagcataagccac

SEQ ID NO: 72942 - DNA, 37 bp, Artificial Sequence
  primer
gtaaaacgacggccagtcccagtgagttctgcctcag

SEQ ID NO: 72943 - DNA, 21 bp, Artificial Sequence
  primer
tgcccaagcttcacagataag

SEQ ID NO: 72944 - DNA, 23 bp, Artificial Sequence
  primer
gcacacacacaaatattcacaaa

SEQ ID NO: 72945 - DNA, 27 bp, Artificial Sequence
  primer
tcaaacttgttaacttctgtccctaag

SEQ ID NO: 72946 - DNA, 43 bp, Artificial Sequence
  primer
gtaaaacgacggccagtgatatgctgtatgtgaagaagaggag

SEQ ID NO: 72947 - DNA, 39 bp, Artificial Sequence
  primer
gtaaaacgacggccagtgcgttcctagacatattgcctt

SEQ ID NO: 72948 - DNA, 22 bp, Artificial Sequence
  primer
ttgcctaagcttcacggataag

SEQ ID NO: 72949 - DNA, 21 bp, Artificial Sequence
  primer
aagctgaacataaggcaacgg

SEQ ID NO: 72950 - DNA, 25 bp, Artificial Sequence
  primer
tgtgtccctaagagatctaaattcg

SEQ ID NO: 72951 - DNA, 24 bp, Artificial Sequence
  primer
gatatgctgtatgtgaagaggagg

SEQ ID NO: 72952 - DNA, 40 bp, Artificial Sequence
  primer
gtaaaacgacggccagttccagaagataactcacactggg

SEQ ID NO: 72953 - DNA, 38 bp, Artificial Sequence
  primer
gtaaaacgacggccagtgccaacggtagcttgacatta

SEQ ID NO: 72954 - DNA, 23 bp, Artificial Sequence
  primer
tttaatccctgtgcctagctctt

SEQ ID NO: 72955 - DNA, 38 bp, Artificial Sequence
  primer
gtaaaacgacggccagttgcggaaattaaccatgttcc

SEQ ID NO: 72956 - DNA, 39 bp, Artificial Sequence
  primer
gtaaaacgacggccagttgaaggagtaacagccatcatc

SEQ ID NO: 72957 - DNA, 25 bp, Artificial Sequence
  primer
tcttctaaagcataacaacttgctg

SEQ ID NO: 72958 - DNA, 21 bp, Artificial Sequence
  primer
cttccctcatttcagtcctgc

SEQ ID NO: 72959 - DNA, 21 bp, Artificial Sequence
  primer
cacctgggaaatggatgtttc

SEQ ID NO: 72960 - DNA, 21 bp, Artificial Sequence
  primer
catgcacaggtgttgacttcc

SEQ ID NO: 72961 - DNA, 38 bp, Artificial Sequence
  primer
gtaaaacgacggccagtcagtgtaacagaccgaggcac

SEQ ID NO: 72962 - DNA, 36 bp, Artificial Sequence
  primer
gtaaaacgacggccagtttgacaaagcctgtgtgcg

SEQ ID NO: 72963 - DNA, 20 bp, Artificial Sequence
  primer
accgttcatgctccttgatg

SEQ ID NO: 72964 - DNA, 38 bp, Artificial Sequence
  primer
gtaaaacgacggccagtttagggaaggagacgtagggc

SEQ ID NO: 72965 - DNA, 38 bp, Artificial Sequence
  primer
gtaaaacgacggccagttagtggcctcagctactggac

SEQ ID NO: 72966 - DNA, 38 bp, Artificial Sequence
  primer
gtaaaacgacggccagtcgacagcttcaccttgaactc

SEQ ID NO: 72967 - DNA, 21 bp, Artificial Sequence
  primer
agagtacggcacttggagacc

SEQ ID NO: 72968 - DNA, 21 bp, Artificial Sequence
  primer
gctgctgagatcattaggctg

SEQ ID NO: 72969 - DNA, 22 bp, Artificial Sequence
  primer
tttccctcaaaggagttcaatc

SEQ ID NO: 72970 - DNA, 21 bp, Artificial Sequence
  primer
taagccactaaagctgccaaa

SEQ ID NO: 72971 - DNA, 22 bp, Artificial Sequence
  primer
gcaaccctaatttgagaatcca

SEQ ID NO: 72972 - DNA, 25 bp, Artificial Sequence
  primer
tcatataagcgcctttataacctcc

SEQ ID NO: 72973 - DNA, 18 bp, Artificial Sequence
  primer
aagtgatccgcctgcctt

SEQ ID NO: 72974 - DNA, 21 bp, Artificial Sequence
  primer
gacacagcaagactccgtctc

SEQ ID NO: 72975 - DNA, 21 bp, Artificial Sequence
  primer
gggtcatggtgatggttgtat

SEQ ID NO: 72976 - DNA, 38 bp, Artificial Sequence
  primer
gtaaaacgacggccagttgcatttaacagcagtgagcc

SEQ ID NO: 72977 - DNA, 38 bp, Artificial Sequence
  primer
gtaaaacgacggccagtcatcacaagggaggtcagtgt

SEQ ID NO: 72978 - DNA, 21 bp, Artificial Sequence
  primer
gtactccagccttagagcgca

SEQ ID NO: 72979 - DNA, 42 bp, Artificial Sequence
  primer
gtaaaacgacggccagttggtacgcctattatgtagtctcaa

SEQ ID NO: 72980 - DNA, 24 bp, Artificial Sequence
  primer
tgtctacaaacccaaactgaaatc

SEQ ID NO: 72981 - DNA, 43 bp, Artificial Sequence
  primer
gtaaaacgacggccagtggtccctatatgatacaaggttccta

SEQ ID NO: 72982 - DNA, 38 bp, Artificial Sequence
  primer
gtaaaacgacggccagtccctggaagctttctctgact

SEQ ID NO: 72983 - DNA, 24 bp, Artificial Sequence
  primer
aggaaacaacttggataagtctcg

SEQ ID NO: 72984 - DNA, 38 bp, Artificial Sequence
  primer
gtaaaacgacggccagtgtggacccacacaactcaaac

SEQ ID NO: 72985 - DNA, 38 bp, Artificial Sequence
  primer
gtaaaacgacggccagtagctagtctggaggaagcacg

SEQ ID NO: 72986 - DNA, 23 bp, Artificial Sequence
  primer
ccataatctcaatcttgtgaggc

SEQ ID NO: 72987 - DNA, 41 bp, Artificial Sequence
  primer
gtaaaacgacggccagtgctaacacacgtggtttgttgaag

SEQ ID NO: 72988 - DNA, 40 bp, Artificial Sequence
  primer
gtaaaacgacggccagtgctttgataaccactacagcagc

SEQ ID NO: 72989 - DNA, 20 bp, Artificial Sequence
  primer
ggcattgcttgggtgttact

SEQ ID NO: 72990 - DNA, 21 bp, Artificial Sequence
  primer
tgtttgccattcattcattca

SEQ ID NO: 72991 - DNA, 19 bp, Artificial Sequence
  primer
agagaaggcggtggtctgt

SEQ ID NO: 72992 - DNA, 41 bp, Artificial Sequence
  primer
gtaaaacgacggccagtgagggcaagagctctatacttcag

SEQ ID NO: 72993 - DNA, 21 bp, Artificial Sequence
  primer
acaacagaagcattaggtgcg

SEQ ID NO: 72994 - DNA, 18 bp, Artificial Sequence
  primer
ctgtgcatccttccaggg

SEQ ID NO: 72995 - DNA, 40 bp, Artificial Sequence
  primer
gtaaaacgacggccagtggcctggcaggatatacaataac

SEQ ID NO: 72996 - DNA, 21 bp, Artificial Sequence
  primer
taacagccagaaacaggcatc

SEQ ID NO: 72997 - DNA, 21 bp, Artificial Sequence
  primer
agggtgatgagtcacattcca

SEQ ID NO: 72998 - DNA, 38 bp, Artificial Sequence
  primer
gtaaaacgacggccagtaaggaagcagatccacctttg

SEQ ID NO: 72999 - DNA, 22 bp, Artificial Sequence
  primer
gcactcctgtcaacataaagcc

SEQ ID NO: 73000 - DNA, 41 bp, Artificial Sequence
  primer
gtaaaacgacggccagtgctggaaacgttaaatctatagcc

SEQ ID NO: 73001 - DNA, 38 bp, Artificial Sequence
  primer
gtaaaacgacggccagttccctaacaatgacactgcaa

SEQ ID NO: 73002 - DNA, 21 bp, Artificial Sequence
  primer
gaggtttgtgcagctcatttc

SEQ ID NO: 73003 - DNA, 38 bp, Artificial Sequence
  primer
gtaaaacgacggccagtcactgggagtcctggaatgta

SEQ ID NO: 73004 - DNA, 26 bp, Artificial Sequence
  primer
ggaactatgcaacataccataagaaa

SEQ ID NO: 73005 - DNA, 25 bp, Artificial Sequence
  primer
gaagtgagtatactggcattcactg

SEQ ID NO: 73006 - DNA, 42 bp, Artificial Sequence
  primer
gtaaaacgacggccagtgatataacggatgccttgttcaata

SEQ ID NO: 73007 - DNA, 21 bp, Artificial Sequence
  primer
aaacacaccgagaccacatct

SEQ ID NO: 73008 - DNA, 38 bp, Artificial Sequence
  primer
gtaaaacgacggccagtcagctttgatttctttgccac

SEQ ID NO: 73009 - DNA, 40 bp, Artificial Sequence
  primer
gtaaaacgacggccagtcaaaggtttgaatttggagactg

SEQ ID NO: 73010 - DNA, 37 bp, Artificial Sequence
  primer
gtaaaacgacggccagtccgtatgaacccgagggtag

SEQ ID NO: 73011 - DNA, 38 bp, Artificial Sequence
  primer
gtaaaacgacggccagtgcgcaacatagtgtggacttc

SEQ ID NO: 73012 - DNA, 38 bp, Artificial Sequence
  primer
gtaaaacgacggccagtcactgttgcttgtcactgctg

SEQ ID NO: 73013 - DNA, 37 bp, Artificial Sequence
  primer
gtaaaacgacggccagttcaccagctttctgctgagg

SEQ ID NO: 73014 - DNA, 37 bp, Artificial Sequence
  primer
gtaaaacgacggccagtgaagccaggtgtcaggtttg

SEQ ID NO: 73015 - DNA, 38 bp, Artificial Sequence
  primer
gtaaaacgacggccagtggacctcaccaattgcttctc

SEQ ID NO: 73016 - DNA, 20 bp, Artificial Sequence
  primer
ggagaccttgtgtcctgacg

SEQ ID NO: 73017 - DNA, 38 bp, Artificial Sequence
  primer
gtaaaacgacggccagttgtgacaagggatgagtccag

SEQ ID NO: 73018 - DNA, 19 bp, Artificial Sequence
  primer
aagcacagctccaaccagg

SEQ ID NO: 73019 - DNA, 38 bp, Artificial Sequence
  primer
gtaaaacgacggccagtctcactggacaggatgacagc

SEQ ID NO: 73020 - DNA, 21 bp, Artificial Sequence
  primer
cagagacactcgggtgacaac

SEQ ID NO: 73021 - DNA, 18 bp, Artificial Sequence
  primer
cccaaaccacaccctcac

SEQ ID NO: 73022 - DNA, 19 bp, Artificial Sequence
  primer
ccagaagagctgcggacac

SEQ ID NO: 73023 - DNA, 37 bp, Artificial Sequence
  primer
gtaaaacgacggccagtagcagtgcattctgggacac

SEQ ID NO: 73024 - DNA, 20 bp, Artificial Sequence
  primer
aagtttactgccgtcctggg

SEQ ID NO: 73025 - DNA, 23 bp, Artificial Sequence
  primer
tctttgccaagaaacaagatagc

SEQ ID NO: 73026 - DNA, 39 bp, Artificial Sequence
  primer
gtaaaacgacggccagtcgcacatacacccaatactcag

SEQ ID NO: 73027 - DNA, 43 bp, Artificial Sequence
  primer
gtaaaacgacggccagttgttgctatagctagaaggaaacaga

SEQ ID NO: 73028 - DNA, 43 bp, Artificial Sequence
  primer
gtaaaacgacggccagttcccaagagcttaataatttcatcag

SEQ ID NO: 73029 - DNA, 42 bp, Artificial Sequence
  primer
gtaaaacgacggccagtaaaggatttgctcttaaagcttctg

SEQ ID NO: 73030 - DNA, 21 bp, Artificial Sequence
  primer
ttccacaaatagctcccaatc

SEQ ID NO: 73031 - DNA, 23 bp, Artificial Sequence
  primer
ggagcatgggaagaataatatgg

SEQ ID NO: 73032 - DNA, 21 bp, Artificial Sequence
  primer
atagggtgcggtgaaagtagg

SEQ ID NO: 73033 - DNA, 39 bp, Artificial Sequence
  primer
gtaaaacgacggccagtcagtttgaagtcagacgaagcc

SEQ ID NO: 73034 - DNA, 41 bp, Artificial Sequence
  primer
gtaaaacgacggccagttttaaatttcgaagcacaaacaag

SEQ ID NO: 73035 - DNA, 22 bp, Artificial Sequence
  primer
aacgccaggtatgtgtggatac

SEQ ID NO: 73036 - DNA, 38 bp, Artificial Sequence
  primer
gtaaaacgacggccagttcttctcaaatgccatgcaac

SEQ ID NO: 73037 - DNA, 23 bp, Artificial Sequence
  primer
tgaagaagttcatttgccttgag

SEQ ID NO: 73038 - DNA, 38 bp, Artificial Sequence
  primer
gtaaaacgacggccagtcctgaggtaaggatgaccagg

SEQ ID NO: 73039 - DNA, 21 bp, Artificial Sequence
  primer
tgcccatgtgttgataactgc

SEQ ID NO: 73040 - DNA, 40 bp, Artificial Sequence
  primer
gtaaaacgacggccagtaacgtctacatcctgacatcctg

SEQ ID NO: 73041 - DNA, 20 bp, Artificial Sequence
  primer
tcaagagagctgtgagtggc

SEQ ID NO: 73042 - DNA, 35 bp, Artificial Sequence; identical to SEQ ID NO: 68166
  primer

SEQ ID NO: 73043 - DNA, 44 bp, Artificial Sequence
  primer
gtaaaacgacggccagtaaactgttagcagaactattcaagacc

SEQ ID NO: 73044 - DNA, 24 bp, Artificial Sequence
  primer
tgtttacaatgaatttcttctggg

SEQ ID NO: 73045 - DNA, 26 bp, Artificial Sequence
  primer
ttgttcactcaagatagggaagaaat

SEQ ID NO: 73046 - DNA, 21 bp, Artificial Sequence
  primer
aaatctgaaatgctggaaggc

SEQ ID NO: 73047 - DNA, 38 bp, Artificial Sequence
  primer
gtaaaacgacggccagtaaatctgaaatgctggaaggc

SEQ ID NO: 73048 - DNA, 39 bp, Artificial Sequence
  primer
gtaaaacgacggccagtccaccgtaactgagtctgatcc

SEQ ID NO: 73049 - DNA, 26 bp, Artificial Sequence
  primer
acgaaataaccattatctagcgtacc

SEQ ID NO: 73050 - DNA, 21 bp, Artificial Sequence
  primer
aacaacagtggcaatttcgtg

SEQ ID NO: 73051 - DNA, 22 bp, Artificial Sequence
  primer
cacaaaggtggtccaagacatc

SEQ ID NO: 73052 - DNA, 38 bp, Artificial Sequence
  primer
gtaaaacgacggccagtggcagggagagtatctgatgg

SEQ ID NO: 73053 - DNA, 19 bp, Artificial Sequence
  primer
gggcaacagaatgagaccc

SEQ ID NO: 73054 - DNA, 26 bp, Artificial Sequence
  primer
tgtgtctgttcacagatatagcagaa

SEQ ID NO: 73055 - DNA, 37 bp, Artificial Sequence
  primer
gtaaaacgacggccagtgccaatcacaagtcagaggg

SEQ ID NO: 73056 - DNA, 38 bp, Artificial Sequence
  primer
gtaaaacgacggccagtgcctatgccacaacacacatc

SEQ ID NO: 73057 - DNA, 18 bp, Artificial Sequence
  primer
agtgagccaaggtcgtgc

SEQ ID NO: 73058 - DNA, 36 bp, Artificial Sequence
  primer
gtaaaacgacggccagtaccaggccaaacagcagac

SEQ ID NO: 73059 - DNA, 21 bp, Artificial Sequence
  primer
tgctgctgaagatctctgctc

SEQ ID NO: 73060 - DNA, 38 bp, Artificial Sequence
  primer
gtaaaacgacggccagtcgctggttaatgacagaggtg

SEQ ID NO: 73061 - DNA, 22 bp, Artificial Sequence
  primer
cctgcaggaacaacatctatcc

SEQ ID NO: 73062 - DNA, 21 bp, Artificial Sequence
  primer
cagtgtcgagcagaactgtcc

SEQ ID NO: 73063 - DNA, 41 bp, Artificial Sequence
  primer
gtaaaacgacggccagtttgtaagcatcctttgacaagttc

SEQ ID NO: 73064 - DNA, 36 bp, Artificial Sequence
  primer
gtaaaacgacggccagtaccatgcccagctgcttac

SEQ ID NO: 73065 - DNA, 21 bp, Artificial Sequence
  primer
gaggaagatcgccagtacagc

SEQ ID NO: 73066 - DNA, 21 bp, Artificial Sequence
  primer
gggcttgcacaggaagactac

SEQ ID NO: 73067 - DNA, 24 bp, Artificial Sequence
  primer
cactcagaacttaaatgctgtccc

SEQ ID NO: 73068 - DNA, 44 bp, Artificial Sequence
  primer
gtaaaacgacggccagtggtgtcacaaatacatcatttataggg

SEQ ID NO: 73069 - DNA, 19 bp, Artificial Sequence
  primer
gaagtctgctccgctccag

SEQ ID NO: 73070 - DNA, 22 bp, Artificial Sequence
  primer
gggaccctgttctaaattcttg

SEQ ID NO: 73071 - DNA, 38 bp, Artificial Sequence
  primer
gtaaaacgacggccagtttcacacggactccttaatgc

SEQ ID NO: 73072 - DNA, 20 bp, Artificial Sequence
  primer
acaggtgtaagccaccatgc

SEQ ID NO: 73073 - DNA, 37 bp, Artificial Sequence
  primer
gtaaaacgacggccagtagcaccaacagcaaagcatc

SEQ ID NO: 73074 - DNA, 25 bp, Artificial Sequence
  primer
accatttctatgaaacttggtatcg

SEQ ID NO: 73075 - DNA, 22 bp, Artificial Sequence
  primer
caatccacctgtctcagtctcc

SEQ ID NO: 73076 - DNA, 38 bp, Artificial Sequence
  primer
gtaaaacgacggccagttgctggcctaatgaaaccttc

SEQ ID NO: 73077 - DNA, 21 bp, Artificial Sequence
  primer
tgtaactagctgggacaaggg

SEQ ID NO: 73078 - DNA, 21 bp, Artificial Sequence
  primer
tctgctttcaaccatggacac

SEQ ID NO: 73079 - DNA, 21 bp, Artificial Sequence
  primer
ctcctacggttccttcagtcc

SEQ ID NO: 73080 - DNA, 21 bp, Artificial Sequence
  primer
atccaagtggacaggtaagcc

SEQ ID NO: 73081 - DNA, 37 bp, Artificial Sequence
  primer
gtaaaacgacggccagtcactgttctgggtgcagagg

SEQ ID NO: 73082 - DNA, 24 bp, Artificial Sequence
  primer
aaaggtaaatacacaaatgctccc

SEQ ID NO: 73083 - DNA, 21 bp, Artificial Sequence
  primer
tcacagtgctgaaatgtgctc

SEQ ID NO: 73084 - DNA, 26 bp, Artificial Sequence
  primer
tcaaccttatttgtttaagagttggc

SEQ ID NO: 73085 - DNA, 43 bp, Artificial Sequence
  primer
gtaaaacgacggccagttgattctaaccataaagttcttctgc

SEQ ID NO: 73086 - DNA, 38 bp, Artificial Sequence
  primer
gtaaaacgacggccagtttcatcctttatggacctggg

SEQ ID NO: 73087 - DNA, 41 bp, Artificial Sequence
  primer
gtaaaacgacggccagtcacgtggaaatcatttactgaaag

SEQ ID NO: 73088 - DNA, 21 bp, Artificial Sequence
  primer
ttgacttcattcaccattccc

SEQ ID NO: 73089 - DNA, 38 bp, Artificial Sequence
  primer
gtaaaacgacggccagtagaacgcagggtaaattcgtg

SEQ ID NO: 73090 - DNA, 38 bp, Artificial Sequence
  primer
gtaaaacgacggccagttcaaacagtttctcacctggc

SEQ ID NO: 73091 - DNA, 25 bp, Artificial Sequence
  primer
gctctaatcctcttcatcctccttc

SEQ ID NO: 73092 - DNA, 20 bp, Artificial Sequence
  primer
tctcctgtggtggtgctttc

SEQ ID NO: 73093 - DNA, 40 bp, Artificial Sequence
  primer
gtaaaacgacggccagtttcatcatttgagaccgactttc

SEQ ID NO: 73094 - DNA, 25 bp, Artificial Sequence
  primer
tgaaatatatgagaaatagcgcctt

SEQ ID NO: 73095 - DNA, 21 bp, Artificial Sequence
  primer
tttgtactgtgtgaggctggg

SEQ ID NO: 73096 - DNA, 39 bp, Artificial Sequence
  primer
gtaaaacgacggccagttcattggttagtttgggattgg

SEQ ID NO: 73097 - DNA, 20 bp, Artificial Sequence
  primer
ttgccaggatggtctcaatc

SEQ ID NO: 73098 - DNA, 37 bp, Artificial Sequence
  primer
gtaaaacgacggccagttgtagtccaaattgccagcc

SEQ ID NO: 73099 - DNA, 21 bp, Artificial Sequence
  primer
ctgtggtggaagaggacacag

SEQ ID NO: 73100 - DNA, 20 bp, Artificial Sequence
  primer
cactccacctgctgattgtg

SEQ ID NO: 73101 - DNA, 37 bp, Artificial Sequence
  primer
gtaaaacgacggccagtaggccttgaccctactcagg

SEQ ID NO: 73102 - DNA, 21 bp, Artificial Sequence
  primer
caaccctggtttcagtccttc

SEQ ID NO: 73103 - DNA, 21 bp, Artificial Sequence
  primer
tctatttcacagatggtcggg

SEQ ID NO: 73104 - DNA, 38 bp, Artificial Sequence
  primer
gtaaaacgacggccagttactggacaaagcctgatccc

SEQ ID NO: 73105 - DNA, 20 bp, Artificial Sequence
  primer
gaatgagggcaaagcagtcc

SEQ ID NO: 73106 - DNA, 21 bp, Artificial Sequence
  primer
agactgaccgttggagcagac

SEQ ID NO: 73107 - DNA, 21 bp, Artificial Sequence
  primer
gggacttcaaggactcaatgg

SEQ ID NO: 73108 - DNA, 21 bp, Artificial Sequence
  primer
acagtgtcttgcatctgggtc

SEQ ID NO: 73109 - DNA, 38 bp, Artificial Sequence
  primer
gtaaaacgacggccagttctacatccaccaccagttgc

SEQ ID NO: 73110 - DNA, 21 bp, Artificial Sequence
  primer
agacacatgggtgtcttgtcg

SEQ ID NO: 73111 - DNA, 21 bp, Artificial Sequence
  primer
gggataacctggatccctctg

SEQ ID NO: 73112 - DNA, 44 bp, Artificial Sequence
  primer
gtaaaacgacggccagttgtgtgtcttatttattgcatagcatc

SEQ ID NO: 73113 - DNA, 21 bp, Artificial Sequence
  primer
tggttgtatttcctgccacag

SEQ ID NO: 73114 - DNA, 40 bp, Artificial Sequence
  primer
gtaaaacgacggccagttctgcagtaattgacgacagatg

SEQ ID NO: 73115 - DNA, 21 bp, Artificial Sequence
  primer
tagctcctgcttatgcactcg

SEQ ID NO: 73116 - DNA, 38 bp, Artificial Sequence
  primer
gtaaaacgacggccagtgtgcaggagctgcatgtagag

SEQ ID NO: 73117 - DNA, 21 bp, Artificial Sequence
  primer
acgatcccagaagcacttacc

SEQ ID NO: 73118 - DNA, 37 bp, Artificial Sequence
  primer
gtaaaacgacggccagtatttgtggacacagccaagg

SEQ ID NO: 73119 - DNA, 22 bp, Artificial Sequence
  primer
tctgagtgggctcttctattgg

SEQ ID NO: 73120 - DNA, 19 bp, Artificial Sequence
  primer
atcttcccgtttccaagcc

SEQ ID NO: 73121 - DNA, 38 bp, Artificial Sequence
  primer
gtaaaacgacggccagtgcctcaggatgaactggtgag

SEQ ID NO: 73122 - DNA, 38 bp, Artificial Sequence
  primer
gtaaaacgacggccagtttctgggtgttctggagtttc

SEQ ID NO: 73123 - DNA, 40 bp, Artificial Sequence
  primer
gtaaaacgacggccagttgcaacaaagtatttcaaatggc

SEQ ID NO: 73124 - DNA, 22 bp, Artificial Sequence
  primer
ttagcttcagagcctgcaattt

SEQ ID NO: 73125 - DNA, 41 bp, Artificial Sequence
  primer
gtaaaacgacggccagtccagcatccagtttaggttgatac

SEQ ID NO: 73126 - DNA, 41 bp, Artificial Sequence
  primer
gtaaaacgacggccagtaaccaggttaatcttcctaatacg

SEQ ID NO: 73127 - DNA, 39 bp, Artificial Sequence
  primer
gtaaaacgacggccagtcctggtccataagaggttctca

SEQ ID NO: 73128 - DNA, 37 bp, Artificial Sequence
  primer
gtaaaacgacggccagtaacgcttatttgggattcgg

SEQ ID NO: 73129 - DNA, 45 bp, Artificial Sequence
  primer
gtaaaacgacggccagtggatttaataccagattattagaccaca

SEQ ID NO: 73130 - DNA, 18 bp, Artificial Sequence
  primer
cccagggagccacagttg

SEQ ID NO: 73131 - DNA, 21 bp, Artificial Sequence
  primer
tcatggtctaggtgcttgtgg

SEQ ID NO: 73132 - DNA, 21 bp, Artificial Sequence
  primer
acctgacaaggagaggaccag

SEQ ID NO: 73133 - DNA, 37 bp, Artificial Sequence
  primer
gtaaaacgacggccagtggcaacatagcaagaccctg

SEQ ID NO: 73134 - DNA, 21 bp, Artificial Sequence
  primer
gctatgcaccttctccagacc

SEQ ID NO: 73135 - DNA, 21 bp, Artificial Sequence
  primer
caggaaacagatgcaatgtgg

SEQ ID NO: 73136 - DNA, 21 bp, Artificial Sequence
  primer
gcttctccagtcgtggtcttc

SEQ ID NO: 73137 - DNA, 27 bp, Artificial Sequence
  primer
tgaatcaatcctcagtttatagtttcc

SEQ ID NO: 73138 - DNA, 38 bp, Artificial Sequence
  primer
gtaaaacgacggccagtttctggcctaggatgatcagg

SEQ ID NO: 73139 - DNA, 27 bp, Artificial Sequence
  primer
tttgtttgcctaaagtttactatggtg

SEQ ID NO: 73140 - DNA, 21 bp, Artificial Sequence
  primer
gcaggtattagccctccagtc

SEQ ID NO: 73141 - DNA, 24 bp, Artificial Sequence
  primer
taaccatggaaactcaaatagaaa

SEQ ID NO: 73142 - DNA, 26 bp, Artificial Sequence
  primer
aaataaagatttccagatctccactg

SEQ ID NO: 73143 - DNA, 38 bp, Artificial Sequence
  primer
gtaaaacgacggccagtctcaagacttggccagctttc

SEQ ID NO: 73144 - DNA, 43 bp, Artificial Sequence
  primer
gtaaaacgacggccagtacatctaaatgccatctacagttaaa

SEQ ID NO: 73145 - DNA, 20 bp, Artificial Sequence
  primer
agctcgcgtaacagctcctc

SEQ ID NO: 73146 - DNA, 38 bp, Artificial Sequence
  primer
gtaaaacgacggccagtatttcacagacgatgctgctc

SEQ ID NO: 73147 - DNA, 22 bp, Artificial Sequence
  primer
cacaatgagagaaatctgccac

SEQ ID NO: 73148 - DNA, 38 bp, Artificial Sequence
  primer
gtaaaacgacggccagtagctgatacacgggttcaagg

SEQ ID NO: 73149 - DNA, 38 bp, Artificial Sequence
  primer
gtaaaacgacggccagtctcctttcattccctcaccag

SEQ ID NO: 73150 - DNA, 38 bp, Artificial Sequence
  primer
gtaaaacgacggccagttccacagtgggaagttctgtg

SEQ ID NO: 73151 - DNA, 20 bp, Artificial Sequence
  primer
actggtctccttacctgcgg

SEQ ID NO: 73152 - DNA, 38 bp, Artificial Sequence
  primer
gtaaaacgacggccagtgagacccgtgaaggtgttagg

SEQ ID NO: 73153 - DNA, 21 bp, Artificial Sequence
  primer
tgaatggccctgttgttgtag

SEQ ID NO: 73154 - DNA, 21 bp, Artificial Sequence
  primer
atcagaataggaatggcaccc

SEQ ID NO: 73155 - DNA, 21 bp, Artificial Sequence
  primer
aggagttagagccagggtcag

SEQ ID NO: 73156 - DNA, 20 bp, Artificial Sequence
  primer
tcttcctgtcctcatctgcc

SEQ ID NO: 73157 - DNA, 20 bp, Artificial Sequence
  primer
cgcctcagtaccttggagtg

SEQ ID NO: 73158 - DNA, 37 bp, Artificial Sequence
  primer
gtaaaacgacggccagtcagccactccactgaagacc

SEQ ID NO: 73159 - DNA, 20 bp, Artificial Sequence
  primer
ctatgctaaggcagggagcc

SEQ ID NO: 73160 - DNA, 21 bp, Artificial Sequence
  primer
ggcagtttcaaagctctcagg

SEQ ID NO: 73161 - DNA, 21 bp, Artificial Sequence
  primer
ttcagatgcatgcctgagttc

SEQ ID NO: 73162 - DNA, 21 bp, Artificial Sequence
  primer
aggacaccttcaccactgctc

SEQ ID NO: 73163 - DNA, 38 bp, Artificial Sequence
  primer
gtaaaacgacggccagtgattagtgcagcgacctgaag

SEQ ID NO: 73164 - DNA, 38 bp, Artificial Sequence
  primer
gtaaaacgacggccagtgcatctgccagggatttagag

SEQ ID NO: 73165 - DNA, 21 bp, Artificial Sequence
  primer
tttaacccacaggcacttctg

SEQ ID NO: 73166 - DNA, 38 bp, Artificial Sequence
  primer
gtaaaacgacggccagtcctaactaggtcaccaagggc

SEQ ID NO: 73167 - DNA, 39 bp, Artificial Sequence
  primer
gtaaaacgacggccagtgtctcctacgtgataggccttg

SEQ ID NO: 73168 - DNA, 19 bp, Artificial Sequence
  primer
cagccatgcctctctgctc

SEQ ID NO: 73169 - DNA, 38 bp, Artificial Sequence
  primer
gtaaaacgacggccagtgagcgactcttggagaaggtg

SEQ ID NO: 73170 - DNA, 38 bp, Artificial Sequence
  primer
gtaaaacgacggccagtgagtaggactgggagcactgg

SEQ ID NO: 73171 - DNA, 38 bp, Artificial Sequence
  primer
gtaaaacgacggccagtgaatgaggatgggttctctgc

SEQ ID NO: 73172 - DNA, 37 bp, Artificial Sequence
  primer
gtaaaacgacggccagtctgcttgcagcatcattgag

SEQ ID NO: 73173 - DNA, 21 bp, Artificial Sequence
  primer
aacaacacaggcaagagatgg

SEQ ID NO: 73174 - DNA, 21 bp, Artificial Sequence
  primer
gaaagtgaggcgtgatttctg

SEQ ID NO: 73175 - DNA, 21 bp, Artificial Sequence
  primer
cctaactcagaacctgggcac

SEQ ID NO: 73176 - DNA, 20 bp, Artificial Sequence
  primer
tttcaaactccactgccagc

SEQ ID NO: 73177 - DNA, 21 bp, Artificial Sequence
  primer
tacacatgatagtgcctgccc

SEQ ID NO: 73178 - DNA, 21 bp, Artificial Sequence
  primer
cacgtgcattaacctctacgg

SEQ ID NO: 73179 - DNA, 20 bp, Artificial Sequence
  primer
gaaggaggacaagctcccac

SEQ ID NO: 73180 - DNA, 38 bp, Artificial Sequence
  primer
gtaaaacgacggccagtgtagaaccacgctccgatttc

SEQ ID NO: 73181 - DNA, 21 bp, Artificial Sequence
  primer
gctcatcctaaggtgcaaacc

SEQ ID NO: 73182 - DNA, 21 bp, Artificial Sequence
  primer
gacagtgagtggcatgtgagc

SEQ ID NO: 73183 - DNA, 38 bp, Artificial Sequence
  primer
gtaaaacgacggccagtgtcaaccatgaagctcaccag

SEQ ID NO: 73184 - DNA, 21 bp, Artificial Sequence
  primer
atcaggacagatggaaatggc

SEQ ID NO: 73185 - DNA, 20 bp, Artificial Sequence
  primer
acttcaggtggccctcaaag

SEQ ID NO: 73186 - DNA, 38 bp, Artificial Sequence
  primer
gtaaaacgacggccagtttatcagggagcttccacctc

SEQ ID NO: 73187 - DNA, 21 bp, Artificial Sequence
  primer
cttggaagagcacctcactcc

SEQ ID NO: 73188 - DNA, 21 bp, Artificial Sequence
  primer
tggctactattgccacacctg

SEQ ID NO: 73189 - DNA, 38 bp, Artificial Sequence
  primer
gtaaaacgacggccagtcgtctacagagggaggactgc

SEQ ID NO: 73190 - DNA, 39 bp, Artificial Sequence
  primer
gtaaaacgacggccagttgtctggtttagggaattctgc

SEQ ID NO: 73191 - DNA, 21 bp, Artificial Sequence
  primer
gggactctaagcttccaccag

SEQ ID NO: 73192 - DNA, 21 bp, Artificial Sequence
  primer
agttgacaggcctgaggacac

SEQ ID NO: 73193 - DNA, 38 bp, Artificial Sequence
  primer
gtaaaacgacggccagtgaaatgcctcattcattgctc

SEQ ID NO: 73194 - DNA, 21 bp, Artificial Sequence
  primer
aggatgtgagaaaggctgagg

SEQ ID NO: 73195 - DNA, 38 bp, Artificial Sequence
  primer
gtaaaacgacggccagtttgagggatgacgtattgtgg

SEQ ID NO: 73196 - DNA, 21 bp, Artificial Sequence
  primer
tctgacctctgaccttcctcc

SEQ ID NO: 73197 - DNA, 38 bp, Artificial Sequence
  primer
gtaaaacgacggccagttcgacacctctgtcctcactg

SEQ ID NO: 73198 - DNA, 38 bp, Artificial Sequence
  primer
gtaaaacgacggccagtgggatatgcttagctcagggc

SEQ ID NO: 73199 - DNA, 20 bp, Artificial Sequence
  primer
ggactgcagatgaccaaagc

SEQ ID NO: 73200 - DNA, 21 bp, Artificial Sequence
  primer
cccaccagggagaagagagac

SEQ ID NO: 73201 - DNA, 38 bp, Artificial Sequence
  primer
gtaaaacgacggccagttcagtcattcatgccaagagg

SEQ ID NO: 73202 - DNA, 36 bp, Artificial Sequence
  primer
gtaaaacgacggccagtcgtctcccaactctgggtc

SEQ ID NO: 73203 - DNA, 21 bp, Artificial Sequence
  primer
aggcttggcactgttatcgtc

SEQ ID NO: 73204 - DNA, 41 bp, Artificial Sequence
  primer
gtaaaacgacggccagtggatttcagaagtctgagtcactg

SEQ ID NO: 73205 - DNA, 21 bp, Artificial Sequence
  primer
gagttgggagggtcacttgag

SEQ ID NO: 73206 - DNA, 27 bp, Artificial Sequence
  primer
gctaaacacattaaatcaatttcacaa

SEQ ID NO: 73207 - DNA, 39 bp, Artificial Sequence
  primer
gtaaaacgacggccagtcatttgttcacagccactgttg

SEQ ID NO: 73208 - DNA, 21 bp, Artificial Sequence
  primer
tgcattatcaccatggcctac

SEQ ID NO: 73209 - DNA, 21 bp, Artificial Sequence
  primer
tcagtttgccttcattatggg

SEQ ID NO: 73210 - DNA, 23 bp, Artificial Sequence
  primer
tctagtatctccagcacagaccc

SEQ ID NO: 73211 - DNA, 22 bp, Artificial Sequence
  primer
aatgacctggtgtcttgaggtg

SEQ ID NO: 73212 - DNA, 38 bp, Artificial Sequence
  primer
gtaaaacgacggccagtaatgcttgcctgatgtttcaa

SEQ ID NO: 73213 - DNA, 38 bp, Artificial Sequence
  primer
gtaaaacgacggccagtgctggtgtatgcatgttggtc

SEQ ID NO: 73214 - DNA, 38 bp, Artificial Sequence
  primer
gtaaaacgacggccagtgactgcgaaacaaagcaacag

SEQ ID NO: 73215 - DNA, 21 bp, Artificial Sequence
  primer
cgatgacatacacgcaaacac

SEQ ID NO: 73216 - DNA, 38 bp, Artificial Sequence
  primer
gtaaaacgacggccagtactgaagggcaacaccctctc

SEQ ID NO: 73217 - DNA, 25 bp, Artificial Sequence
  primer
gaggagatctaccctcttgattctg

SEQ ID NO: 73218 - DNA, 38 bp, Artificial Sequence
  primer
gtaaaacgacggccagtcatcgccaccatgtctatttg

SEQ ID NO: 73219 - DNA, 21 bp, Artificial Sequence
  primer
cgcaactggcagaaatacaag

SEQ ID NO: 73220 - DNA, 21 bp, Artificial Sequence
  primer
caaactgtctgcgattggttc

SEQ ID NO: 73221 - DNA, 38 bp, Artificial Sequence
  primer
gtaaaacgacggccagtactcttgaggagggaagaccc

SEQ ID NO: 73222 - DNA, 22 bp, Artificial Sequence
  primer
agttcgaagctaaccttcatgg

SEQ ID NO: 73223 - DNA, 22 bp, Artificial Sequence
  primer
gaggaatctgacctcactcagc

SEQ ID NO: 73224 - DNA, 38 bp, Artificial Sequence
  primer
gtaaaacgacggccagtcgaagccctgtattccttgtg

SEQ ID NO: 73225 - DNA, 22 bp, Artificial Sequence
  primer
ttctgtcatccacataaccagc

SEQ ID NO: 73226 - DNA, 26 bp, Artificial Sequence
  primer
catgctaactgctgagattaataagg

SEQ ID NO: 73227 - DNA, 40 bp, Artificial Sequence
  primer
gtaaaacgacggccagtttctcaggacatttctagcatcc

SEQ ID NO: 73228 - DNA, 39 bp, Artificial Sequence
  primer
gtaaaacgacggccagtccaccagctaaagctactggac

SEQ ID NO: 73229 - DNA, 41 bp, Artificial Sequence
  primer
gtaaaacgacggccagttttccattccatcctagtgatttc

SEQ ID NO: 73230 - DNA, 21 bp, Artificial Sequence
  primer
ccacaagggtcagaaatggtc

SEQ ID NO: 73231 - DNA, 20 bp, Artificial Sequence
  primer
accacaagggacacacacac

SEQ ID NO: 73232 - DNA, 24 bp, Artificial Sequence
  primer
aaaggtaacagtccttgacaaagc

SEQ ID NO: 73233 - DNA, 38 bp, Artificial Sequence
  primer
gtaaaacgacggccagtgcatatgaccctgcagacatc

SEQ ID NO: 73234 - DNA, 21 bp, Artificial Sequence
  primer
tacaggcaaagcagacaatcg

SEQ ID NO: 73235 - DNA, 21 bp, Artificial Sequence
  primer
ccttctcacatgcacagatca

SEQ ID NO: 73236 - DNA, 18 bp, Artificial Sequence
  primer
tgatttgtttcccagggc

SEQ ID NO: 73237 - DNA, 23 bp, Artificial Sequence
  primer
cacatgctttcaatcagtctttg

SEQ ID NO: 73238 - DNA, 39 bp, Artificial Sequence
  primer
gtaaaacgacggccagtttcccttaagttgctccacaag

SEQ ID NO: 73239 - DNA, 21 bp, Artificial Sequence
  primer
taatttaactggccaagctgc

SEQ ID NO: 73240 - DNA, 21 bp, Artificial Sequence
  primer
tgtgcaggttccacttctcag

SEQ ID NO: 73241 - DNA, 21 bp, Artificial Sequence
  primer
gcttggtttgtgctgtttctg

SEQ ID NO: 73242 - DNA, 21 bp, Artificial Sequence
  primer
cctttatggaaccaatgggag

SEQ ID NO: 73243 - DNA, 38 bp, Artificial Sequence
  primer
gtaaaacgacggccagttttactcgatgatgacgcagg

SEQ ID NO: 73244 - DNA, 20 bp, Artificial Sequence
  primer
gttcttccggagggtgaaac

SEQ ID NO: 73245 - DNA, 21 bp, Artificial Sequence
  primer
gactggaaagccttcatcagc

SEQ ID NO: 73246 - DNA, 38 bp, Artificial Sequence
  primer
gtaaaacgacggccagttggaggaaacacgaactcctc

SEQ ID NO: 73247 - DNA, 38 bp, Artificial Sequence
  primer
gtaaaacgacggccagtaggcggaattgttggtatttg

SEQ ID NO: 73248 - DNA, 22 bp, Artificial Sequence
  primer
ccctcattctttaggctttcag

SEQ ID NO: 73249 - DNA, 38 bp, Artificial Sequence
  primer
gtaaaacgacggccagtactacagctgcctgtgcaatc

SEQ ID NO: 73250 - DNA, 21 bp, Artificial Sequence
  primer
tctttcagaggacttggctcc

SEQ ID NO: 73251 - DNA, 21 bp, Artificial Sequence
  primer
acagctgcaggaagaggaaag

SEQ ID NO: 73252 - DNA, 21 bp, Artificial Sequence
  primer
gctgacttcttcagagctggg

SEQ ID NO: 73253 - DNA, 21 bp, Artificial Sequence
  primer
acagggacaccactttcatcc

SEQ ID NO: 73254 - DNA, 39 bp, Artificial Sequence
  primer
gtaaaacgacggccagtacttcttctggactggaattgg

SEQ ID NO: 73255 - DNA, 38 bp, Artificial Sequence
  primer
gtaaaacgacggccagtatcaacatcatcaccagtcgg

SEQ ID NO: 73256 - DNA, 38 bp, Artificial Sequence
  primer
gtaaaacgacggccagtccaaacaatgaggcaaagagg

SEQ ID NO: 73257 - DNA, 21 bp, Artificial Sequence
  primer
taggtcagacacgggaacatc

SEQ ID NO: 73258 - DNA, 21 bp, Artificial Sequence
  primer
gttccactagaggagcttgcc

SEQ ID NO: 73259 - DNA, 38 bp, Artificial Sequence
  primer
gtaaaacgacggccagtcttcccgaatttcactccaag

SEQ ID NO: 73260 - DNA, 38 bp, Artificial Sequence
  primer
gtaaaacgacggccagtggtcctagcaggagtggtgtc

SEQ ID NO: 73261 - DNA, 38 bp, Artificial Sequence
  primer
gtaaaacgacggccagtgggagttaagttgagcatccg

SEQ ID NO: 73262 - DNA, 38 bp, Artificial Sequence
  primer
gtaaaacgacggccagtattctccatgggtgcagtagg

SEQ ID NO: 73263 - DNA, 38 bp, Artificial Sequence
  primer
gtaaaacgacggccagtgctgttcaactctttggaggg

SEQ ID NO: 73264 - DNA, 38 bp, Artificial Sequence
  primer
gtaaaacgacggccagtaactggcaatcgggatgtaag

SEQ ID NO: 73265 - DNA, 39 bp, Artificial Sequence
  primer
gtaaaacgacggccagttctgaaactatttcctgctccc

SEQ ID NO: 73266 - DNA, 21 bp, Artificial Sequence
  primer
gtggctggcaaataccttcag

SEQ ID NO: 73267 - DNA, 39 bp, Artificial Sequence
  primer
gtaaaacgacggccagtcacaaagggcttacacaaacac

SEQ ID NO: 73268 - DNA, 21 bp, Artificial Sequence
  primer
tgccctgggctataccattag

SEQ ID NO: 73269 - DNA, 37 bp, Artificial Sequence
  primer
gtaaaacgacggccagtgaatttgcaagatgcggttg

SEQ ID NO: 73270 - DNA, 21 bp, Artificial Sequence
  primer
ggtccagtgcctcaattaacc

SEQ ID NO: 73271 - DNA, 38 bp, Artificial Sequence
  primer
gtaaaacgacggccagtgcacttgtgtttggtagggtc

SEQ ID NO: 73272 - DNA, 24 bp, Artificial Sequence
  primer
aaccatcatagaaatggaaactgg

SEQ ID NO: 73273 - DNA, 20 bp, Artificial Sequence
  primer
gcattccctgcaccataatc

SEQ ID NO: 73274 - DNA, 39 bp, Artificial Sequence
  primer
gtaaaacgacggccagtcacatgaaagggagaagtgagg

SEQ ID NO: 73275 - DNA, 39 bp, Artificial Sequence
  primer
gtaaaacgacggccagttgagtgaatgtgtggtttctgg

SEQ ID NO: 73276 - DNA, 25 bp, Artificial Sequence
  primer
aaacagatcaactttctactgctgc

SEQ ID NO: 73277 - DNA, 38 bp, Artificial Sequence
  primer
gtaaaacgacggccagtctcctgctgctcagagcttac

SEQ ID NO: 73278 - DNA, 39 bp, Artificial Sequence
  primer
gtaaaacgacggccagttctgttcccaatttacacaccc

SEQ ID NO: 73279 - DNA, 26 bp, Artificial Sequence
  primer
gacatttctgaatgttcctctaacag

SEQ ID NO: 73280 - DNA, 21 bp, Artificial Sequence
  primer
tgcaatgctgtgtttcctttc

SEQ ID NO: 73281 - DNA, 38 bp, Artificial Sequence
  primer
gtaaaacgacggccagtaactaagcaagcacctgaccc

SEQ ID NO: 73282 - DNA, 38 bp, Artificial Sequence
  primer
gtaaaacgacggccagtggacaaattcacaactccagg

SEQ ID NO: 73283 - DNA, 21 bp, Artificial Sequence
  primer
taagcttgcgaagagggagac

SEQ ID NO: 73284 - DNA, 21 bp, Artificial Sequence
  primer
ctcctgctaggaaacaggcac

SEQ ID NO: 73285 - DNA, 24 bp, Artificial Sequence
  primer
acaaagctcatgttgtatcagtgc

SEQ ID NO: 73286 - DNA, 23 bp, Artificial Sequence
  primer
agcccaaacttattctgaggttc

SEQ ID NO: 73287 - DNA, 38 bp, Artificial Sequence
  primer
gtaaaacgacggccagttcccttcacatacagaggcag

SEQ ID NO: 73288 - DNA, 38 bp, Artificial Sequence
  primer
gtaaaacgacggccagtgcaaacaaactagctggtccc

SEQ ID NO: 73289 - DNA, 21 bp, Artificial Sequence
  primer
ggctgcagtgagctatgattg

SEQ ID NO: 73290 - DNA, 21 bp, Artificial Sequence
  primer
atgaacaaatgtgcagggaag

SEQ ID NO: 73291 - DNA, 20 bp, Artificial Sequence
  primer
tggacctgttactatgcggg

SEQ ID NO: 73292 - DNA, 38 bp, Artificial Sequence
  primer
gtaaaacgacggccagttttacattccggtttccacag

SEQ ID NO: 73293 - DNA, 20 bp, Artificial Sequence
  primer
aactaggagggtgctcctgc

SEQ ID NO: 73294 - DNA, 26 bp, Artificial Sequence
  primer
acacatcctatttgactcagatcttc

SEQ ID NO: 73295 - DNA, 40 bp, Artificial Sequence
  primer
gtaaaacgacggccagttgattaaagggtttgttctcctg

SEQ ID NO: 73296 - DNA, 38 bp, Artificial Sequence
  primer
gtaaaacgacggccagtctgtgctgcttgatgtaatgg

SEQ ID NO: 73297 - DNA, 42 bp, Artificial Sequence
  primer
gtaaaacgacggccagtttgtccttctttcctcattctactg

SEQ ID NO: 73298 - DNA, 39 bp, Artificial Sequence
  primer
gtaaaacgacggccagttggtgcttagtttatgaatggg

SEQ ID NO: 73299 - DNA, 38 bp, Artificial Sequence
  primer
gtaaaacgacggccagtttgcaatggactttcttcagg

SEQ ID NO: 73300 - DNA, 22 bp, Artificial Sequence
  primer
ggaaacaggttcaaggaaagag

SEQ ID NO: 73301 - DNA, 40 bp, Artificial Sequence
  primer
gtaaaacgacggccagttcgctaaattcacatcttcatcc

SEQ ID NO: 73302 - DNA, 21 bp, Artificial Sequence
  primer
cttcctcacctgcagaagaca

SEQ ID NO: 73303 - DNA, 22 bp, Artificial Sequence
  primer
aacagccaggaaagtttgttgt

SEQ ID NO: 73304 - DNA, 25 bp, Artificial Sequence
  primer
tctccttgagttaacaagggtaaag

SEQ ID NO: 73305 - DNA, 39 bp, Artificial Sequence
  primer
gtaaaacgacggccagtcaaatgtgtgaaattcaggtcc

SEQ ID NO: 73306 - DNA, 44 bp, Artificial Sequence
  primer
gtaaaacgacggccagttgttagaataactctttccagagcaaa

SEQ ID NO: 73307 - DNA, 39 bp, Artificial Sequence
  primer
gtaaaacgacggccagtttggcatggatatttcaaaggt

SEQ ID NO: 73308 - DNA, 24 bp, Artificial Sequence
  primer
tgtatcaaacacagaaaccctctg

SEQ ID NO: 73309 - DNA, 19 bp, Artificial Sequence
  primer
acagagcaaggctccgtct

SEQ ID NO: 73310 - DNA, 27 bp, Artificial Sequence
  primer
ggcttgaaagtatactctggtagaacc

SEQ ID NO: 73311 - DNA, 39 bp, Artificial Sequence
  primer
gtaaaacgacggccagttccttaattgcataccaaaggc

SEQ ID NO: 73312 - DNA, 22 bp, Artificial Sequence
  primer
acgtgtggaagaagagtgaacc

SEQ ID NO: 73313 - DNA, 46 bp, Artificial Sequence
  primer
gtaaaacgacggccagtaaatattacttaggttgtatgacagggtt

SEQ ID NO: 73314 - DNA, 21 bp, Artificial Sequence
  primer
taattggagatgccacgtcac

SEQ ID NO: 73315 - DNA, 21 bp, Artificial Sequence
  primer
aacgtagaattggatgccagc

SEQ ID NO: 73316 - DNA, 40 bp, Artificial Sequence
  primer
gtaaaacgacggccagttgatttaactggagacaccactg

SEQ ID NO: 73317 - DNA, 38 bp, Artificial Sequence
  primer
gtaaaacgacggccagtatattgacgacccaagggatg

SEQ ID NO: 73318 - DNA, 21 bp, Artificial Sequence
  primer
gttggaatggcttctcctcag

SEQ ID NO: 73319 - DNA, 38 bp, Artificial Sequence
  primer
gtaaaacgacggccagtcactctttggtgatttgggtg

SEQ ID NO: 73320 - DNA, 20 bp, Artificial Sequence
  primer
ctggcagagatggagactgg

SEQ ID NO: 73321 - DNA, 21 bp, Artificial Sequence
  primer
tctcctcaccatccttctttg

SEQ ID NO: 73322 - DNA, 24 bp, Artificial Sequence
  primer
aattctttctcagaggtggaagtc

SEQ ID NO: 73323 - DNA, 23 bp, Artificial Sequence
  primer
ttcacttcttgtttcaaagccac

SEQ ID NO: 73324 - DNA, 21 bp, Artificial Sequence
  primer
aacccgattgtggtcatcttc

SEQ ID NO: 73325 - DNA, 21 bp, Artificial Sequence
  primer
ggtttcagcagcagacttgtg

SEQ ID NO: 73326 - DNA, 38 bp, Artificial Sequence
  primer
gtaaaacgacggccagttgcatggtctgtaaccgattc

SEQ ID NO: 73327 - DNA, 38 bp, Artificial Sequence
  primer
gtaaaacgacggccagtcttcagcctccttcacagtcc

SEQ ID NO: 73328 - DNA, 38 bp, Artificial Sequence
  primer
gtaaaacgacggccagtctgtcctcagtctgttgggag

SEQ ID NO: 73329 - DNA, 21 bp, Artificial Sequence
  primer
ctggccatctgactttctgtc

SEQ ID NO: 73330 - DNA, 38 bp, Artificial Sequence
  primer
gtaaaacgacggccagtacaacaatttcgttgctttgg

SEQ ID NO: 73331 - DNA, 21 bp, Artificial Sequence
  primer
ttgttagtggctcccgaactc

SEQ ID NO: 73332 - DNA, 38 bp, Artificial Sequence
  primer
gtaaaacgacggccagttttctgagagagagccgtttg

SEQ ID NO: 73333 - DNA, 37 bp, Artificial Sequence
  primer
gtaaaacgacggccagttggaaatgccgactgttcac

SEQ ID NO: 73334 - DNA, 41 bp, Artificial Sequence
  primer
gtaaaacgacggccagtaaagtgctgtgtctcaactgtctc

SEQ ID NO: 73335 - DNA, 21 bp, Artificial Sequence
  primer
aatccatcaatgggactgtgg

SEQ ID NO: 73336 - DNA, 20 bp, Artificial Sequence
  primer
tctttccctccctctgtctg

SEQ ID NO: 73337 - DNA, 22 bp, Artificial Sequence
  primer
tcatcttctggactaccttggg

SEQ ID NO: 73338 - DNA, 38 bp, Artificial Sequence
  primer
gtaaaacgacggccagtcaactgctgtttcctccactg

SEQ ID NO: 73339 - DNA, 38 bp, Artificial Sequence
  primer
gtaaaacgacggccagtctaatgacaggttcagccagc

SEQ ID NO: 73340 - DNA, 38 bp, Artificial Sequence
  primer
gtaaaacgacggccagtgtgatggactggtcgttgttc

SEQ ID NO: 73341 - DNA, 38 bp, Artificial Sequence
  primer
gtaaaacgacggccagtagaaggtggcttgtcctcatc

SEQ ID NO: 73342 - DNA, 21 bp, Artificial Sequence
  primer
ttccttcatgaaatgggaagg

SEQ ID NO: 73343 - DNA, 40 bp, Artificial Sequence
  primer
gtaaaacgacggccagtgattggtttctacagtggtgtcc

SEQ ID NO: 73344 - DNA, 21 bp, Artificial Sequence
  primer
atttctccagggccttctttc

SEQ ID NO: 73345 - DNA, 23 bp, Artificial Sequence
  primer
tggaagaatccaaattgttgttg

SEQ ID NO: 73346 - DNA, 38 bp, Artificial Sequence
  primer
gtaaaacgacggccagtgacatatggttcggtgggaag

SEQ ID NO: 73347 - DNA, 38 bp, Artificial Sequence
  primer
gtaaaacgacggccagtctttaactgtgcagctggtgg

SEQ ID NO: 73348 - DNA, 38 bp, Artificial Sequence
  primer
gtaaaacgacggccagtttcttcttcagagaggcggtc

SEQ ID NO: 73349 - DNA, 38 bp, Artificial Sequence
  primer
gtaaaacgacggccagtggcaatcacaacagttcatgc

SEQ ID NO: 73350 - DNA, 28 bp, Artificial Sequence
  primer
acaaggtacaatcagtatttatctctgg

SEQ ID NO: 73351 - DNA, 21 bp, Artificial Sequence
  primer
tggatgaacctaacagttggc

SEQ ID NO: 73352 - DNA, 39 bp, Artificial Sequence
  primer
gtaaaacgacggccagtaagtgactgccttgtctgactg

SEQ ID NO: 73353 - DNA, 25 bp, Artificial Sequence
  primer
tccagattagcataatgaactggtc

SEQ ID NO: 73354 - DNA, 37 bp, Artificial Sequence
  primer
gtaaaacgacggccagttttgctcagacccactggac

SEQ ID NO: 73355 - DNA, 38 bp, Artificial Sequence
  primer
gtaaaacgacggccagtggctgcaagatcaatccaaag

SEQ ID NO: 73356 - DNA, 22 bp, Artificial Sequence
  primer
ggactgtgaaaccgaagtcaag

SEQ ID NO: 73357 - DNA, 37 bp, Artificial Sequence
  primer
gtaaaacgacggccagtttcactcgcccactcaactc

SEQ ID NO: 73358 - DNA, 21 bp, Artificial Sequence
  primer
ctgcttccaaattggtttctg

SEQ ID NO: 73359 - DNA, 38 bp, Artificial Sequence
  primer
gtaaaacgacggccagtaccacctgcagctaactttgg

SEQ ID NO: 73360 - DNA, 39 bp, Artificial Sequence
  primer
gtaaaacgacggccagtaaattgcaagcatcaacttctg

SEQ ID NO: 73361 - DNA, 38 bp, Artificial Sequence
  primer
gtaaaacgacggccagttgctctgaaagtcagcaatgg

SEQ ID NO: 73362 - DNA, 38 bp, Artificial Sequence
  primer
gtaaaacgacggccagttgctccatacaggctgacaac

SEQ ID NO: 73363 - DNA, 21 bp, Artificial Sequence
  primer
tgaaatgacagcctggtcttg

SEQ ID NO: 73364 - DNA, 37 bp, Artificial Sequence
  primer
gtaaaacgacggccagtaatgagtggcagttgttgcc

SEQ ID NO: 73365 - DNA, 21 bp, Artificial Sequence
  primer
tcttatgggttgcaagcagtg

SEQ ID NO: 73366 - DNA, 39 bp, Artificial Sequence
  primer
gtaaaacgacggccagtctctccctgatgaatgagaagg

SEQ ID NO: 73367 - DNA, 24 bp, Artificial Sequence
  primer
acctaggaacgtattcctgctaag

SEQ ID NO: 73368 - DNA, 38 bp, Artificial Sequence
  primer
gtaaaacgacggccagtaaactctgatcgctggagacc

SEQ ID NO: 73369 - DNA, 21 bp, Artificial Sequence
  primer
ggtctgaaagagaagggagcc

SEQ ID NO: 73370 - DNA, 22 bp, Artificial Sequence
  primer
tgcatatgtaaatggctcttgc

SEQ ID NO: 73371 - DNA, 38 bp, Artificial Sequence
  primer
gtaaaacgacggccagttcagtttccttctggcacatc

SEQ ID NO: 73372 - DNA, 23 bp, Artificial Sequence
  primer
gcacttgcaaagtggtgtttaag

SEQ ID NO: 73373 - DNA, 38 bp, Artificial Sequence
  primer
gtaaaacgacggccagtttattgaccctccactgggac

SEQ ID NO: 73374 - DNA, 20 bp, Artificial Sequence
  primer
ctccggagaggctagacagg

SEQ ID NO: 73375 - DNA, 23 bp, Artificial Sequence
  primer
agggaatcgatttgctaatatcc

SEQ ID NO: 73376 - DNA, 39 bp, Artificial Sequence
  primer
gtaaaacgacggccagttggttgccatcaattgcttaat

SEQ ID NO: 73377 - DNA, 39 bp, Artificial Sequence
  primer
gtaaaacgacggccagtcaagggaggtaacatctgtccc

SEQ ID NO: 73378 - DNA, 37 bp, Artificial Sequence
  primer
gtaaaacgacggccagtaaccaggtgccagagaggtc

SEQ ID NO: 73379 - DNA, 20 bp, Artificial Sequence
  primer
atggctcggaaggaagtgag

SEQ ID NO: 73380 - DNA, 21 bp, Artificial Sequence
  primer
tttgggaacaaggtcagaaag

SEQ ID NO: 73381 - DNA, 27 bp, Artificial Sequence
  primer
aataatgccaaactaaagaacatgaac

SEQ ID NO: 73382 - DNA, 21 bp, Artificial Sequence
  primer
agcagaagcagtgtcaacagc

SEQ ID NO: 73383 - DNA, 44 bp, Artificial Sequence
  primer
gtaaaacgacggccagtaataattatcctcatagtatgccgttc

SEQ ID NO: 73384 - DNA, 21 bp, Artificial Sequence
  primer
ttaggaaatggctgctgaatg

SEQ ID NO: 73385 - DNA, 20 bp, Artificial Sequence
  primer
aagcagcagtcaagagccag

SEQ ID NO: 73386 - DNA, 37 bp, Artificial Sequence
  primer
gtaaaacgacggccagtctttctcgctccctctgtcc

SEQ ID NO: 73387 - DNA, 21 bp, Artificial Sequence
  primer
ttcctttccgccattacaatc

SEQ ID NO: 73388 - DNA, 21 bp, Artificial Sequence
  primer
aactgcttgtccttgtcccac

SEQ ID NO: 73389 - DNA, 21 bp, Artificial Sequence
  primer
gcatgccaagactatagacgg

SEQ ID NO: 73390 - DNA, 22 bp, Artificial Sequence
  primer
gaagcacagtcagcctgaaatc

SEQ ID NO: 73391 - DNA, 22 bp, Artificial Sequence
  primer
cagccacatcttaggacaggag

SEQ ID NO: 73392 - DNA, 21 bp, Artificial Sequence
  primer
gcacctgtgatgagattctgc

SEQ ID NO: 73393 - DNA, 38 bp, Artificial Sequence
  primer
gtaaaacgacggccagtcttcctgtcacagctttgctc

SEQ ID NO: 73394 - DNA, 37 bp, Artificial Sequence
  primer
gtaaaacgacggccagtagtacccgaagctggtgagg

SEQ ID NO: 73395 - DNA, 21 bp, Artificial Sequence
  primer
ctcagataacgacgtgtgcct

SEQ ID NO: 73396 - DNA, 20 bp, Artificial Sequence
  primer
aaatggtcccagctactgcc

SEQ ID NO: 73397 - DNA, 21 bp, Artificial Sequence
  primer
cctgccttccctacatctctg

SEQ ID NO: 73398 - DNA, 20 bp, Artificial Sequence
  primer
cagtctattgccgcaggaag

SEQ ID NO: 73399 - DNA, 21 bp, Artificial Sequence
  primer
tgctcaattgtttgaagcaca

SEQ ID NO: 73400 - DNA, 38 bp, Artificial Sequence
  primer
gtaaaacgacggccagttcaggataaagagggactcgg

SEQ ID NO: 73401 - DNA, 21 bp, Artificial Sequence
  primer
cacaagcgctttccttctatc

SEQ ID NO: 73402 - DNA, 22 bp, Artificial Sequence
  primer
tgtacttcctgccattaagctg

SEQ ID NO: 73403 - DNA, 20 bp, Artificial Sequence
  primer
aaaccaggtcgaatgcagag

SEQ ID NO: 73404 - DNA, 38 bp, Artificial Sequence
  primer
gtaaaacgacggccagtcctctgggtatgacatcctgg

SEQ ID NO: 73405 - DNA, 21 bp, Artificial Sequence
  primer
ctggaaatcagtttcagcacc

SEQ ID NO: 73406 - DNA, 21 bp, Artificial Sequence
  primer
acaaagggaagcaggactgag

SEQ ID NO: 73407 - DNA, 21 bp, Artificial Sequence
  primer
ggcctccttgaataacaatcg

SEQ ID NO: 73408 - DNA, 22 bp, Artificial Sequence
  primer
tttgcatctttctaagccacag

SEQ ID NO: 73409 - DNA, 20 bp, Artificial Sequence
  primer
tccgattctagacgtgcctg

SEQ ID NO: 73410 - DNA, 20 bp, Artificial Sequence
  primer
gtcagtggctgctcaggttc

SEQ ID NO: 73411 - DNA, 21 bp, Artificial Sequence
  primer
aaatacgatgggagagggaag

SEQ ID NO: 73412 - DNA, 22 bp, Artificial Sequence
  primer
tcaaatttccattgctaaagcc

SEQ ID NO: 73413 - DNA, 38 bp, Artificial Sequence
  primer
gtaaaacgacggccagtgggtggaattcagaaataccg

SEQ ID NO: 73414 - DNA, 21 bp, Artificial Sequence
  primer
ggtcaggcaggtggataattc

SEQ ID NO: 73415 - DNA, 20 bp, Artificial Sequence
  primer
ctctccagccagagtcctcc

SEQ ID NO: 73416 - DNA, 21 bp, Artificial Sequence
  primer
agttccacacaaacctgcaac

SEQ ID NO: 73417 - DNA, 20 bp, Artificial Sequence
  primer
ctgcatagctcccaggagtg

SEQ ID NO: 73418 - DNA, 21 bp, Artificial Sequence
  primer
tgcatgagtgctcagtgtctg

SEQ ID NO: 73419 - DNA, 38 bp, Artificial Sequence
  primer
gtaaaacgacggccagtaaccctggatgtgtgataggc

SEQ ID NO: 73420 - DNA, 21 bp, Artificial Sequence
  primer
gtctggcagtccacgtctacc

SEQ ID NO: 73421 - DNA, 21 bp, Artificial Sequence
  primer
tctctgctgagcatccaactc

SEQ ID NO: 73422 - DNA, 19 bp, Artificial Sequence
  primer
cctgagcagcatcttgcag

SEQ ID NO: 73423 - DNA, 38 bp, Artificial Sequence
  primer
gtaaaacgacggccagtgtggacatttgcgtgatgttc

SEQ ID NO: 73424 - DNA, 39 bp, Artificial Sequence
  primer
gtaaaacgacggccagtttgtctaaatttccatctcggc

SEQ ID NO: 73425 - DNA, 35 bp, Artificial Sequence
  primer
gtaaaacgacggccagtacgtgccaccatacccag

SEQ ID NO: 73426 - DNA, 21 bp, Artificial Sequence
  primer
tttggaagttgggaaagatgc

SEQ ID NO: 73427 - DNA, 38 bp, Artificial Sequence
  primer
gtaaaacgacggccagtatttcattgaggaagatgcgg

SEQ ID NO: 73428 - DNA, 22 bp, Artificial Sequence
  primer
ggagtgtgtttaggtcaccctg

SEQ ID NO: 73429 - DNA, 21 bp, Artificial Sequence
  primer
tgtacctcagctctgctcctg

SEQ ID NO: 73430 - DNA, 21 bp, Artificial Sequence
  primer
ggcttctgcctaagactcagc

SEQ ID NO: 73431 - DNA, 38 bp, Artificial Sequence
  primer
gtaaaacgacggccagtaacttcaaatcccaatgacgg

SEQ ID NO: 73432 - DNA, 36 bp, Artificial Sequence
  primer
gtaaaacgacggccagtccttaaggagaatcccggc

SEQ ID NO: 73433 - DNA, 21 bp, Artificial Sequence
  primer
tttagcctagcacccttcctg

SEQ ID NO: 73434 - DNA, 21 bp, Artificial Sequence
  primer
atttgctggtatccctctggg

SEQ ID NO: 73435 - DNA, 21 bp, Artificial Sequence
  primer
ctgtacaagcctggtccacac

SEQ ID NO: 73436 - DNA, 21 bp, Artificial Sequence
  primer
agctgctcctgtggtctatgg

SEQ ID NO: 73437 - DNA, 37 bp, Artificial Sequence
  primer
gtaaaacgacggccagtgaagagacgtgggtctgctg

SEQ ID NO: 73438 - DNA, 20 bp, Artificial Sequence
  primer
ctcggtgtccaaatcctgtc

SEQ ID NO: 73439 - DNA, 21 bp, Artificial Sequence
  primer
gcagagtgtgtgaatccatcc

SEQ ID NO: 73440 - DNA, 19 bp, Artificial Sequence
  primer
ccacccagcccttataccc

SEQ ID NO: 73441 - DNA, 20 bp, Artificial Sequence
  primer
gctaggaaccttgagcccag

SEQ ID NO: 73442 - DNA, 21 bp, Artificial Sequence
  primer
gatctccagggataacagccc

SEQ ID NO: 73443 - DNA, 38 bp, Artificial Sequence
  primer
gtaaaacgacggccagtacttcctagaggaggccatgc

SEQ ID NO: 73444 - DNA, 21 bp, Artificial Sequence
  primer
gaaagtggcctgaatctggag

SEQ ID NO: 73445 - DNA, 21 bp, Artificial Sequence
  primer
taggctggaagattccctgag

SEQ ID NO: 73446 - DNA, 20 bp, Artificial Sequence
  primer
ctttcccagaccaaagggag

SEQ ID NO: 73447 - DNA, 20 bp, Artificial Sequence
  primer
aaattgtgccactgcattcc

SEQ ID NO: 73448 - DNA, 21 bp, Artificial Sequence
  primer
caattgccatcattcctttcc

SEQ ID NO: 73449 - DNA, 20 bp, Artificial Sequence
  primer
accatgagaagcaaagtggg

SEQ ID NO: 73450 - DNA, 43 bp, Artificial Sequence
  primer
gtaaaacgacggccagtcccaagacaattatgatcctgtataa

SEQ ID NO: 73451 - DNA, 26 bp, Artificial Sequence
  primer
tgtcaaagactaaatgtgagtccaac

SEQ ID NO: 73452 - DNA, 39 bp, Artificial Sequence
  primer
gtaaaacgacggccagtggcaaacctatctccacctttg

SEQ ID NO: 73453 - DNA, 38 bp, Artificial Sequence
  primer
gtaaaacgacggccagtagcaaagaggcaaaggaagac

SEQ ID NO: 73454 - DNA, 21 bp, Artificial Sequence
  primer
ccagagaagacgcagtttcag

SEQ ID NO: 73455 - DNA, 38 bp, Artificial Sequence
  primer
gtaaaacgacggccagtgtgccacgcaggtataacaag

SEQ ID NO: 73456 - DNA, 22 bp, Artificial Sequence
  primer
aaactgtcttcccaaactcaaa

SEQ ID NO: 73457 - DNA, 21 bp, Artificial Sequence
  primer
tcatccatgtgtcaccaagtg

SEQ ID NO: 73458 - DNA, 20 bp, Artificial Sequence
  primer
aaaggcaacggtggtaaagg

SEQ ID NO: 73459 - DNA, 21 bp, Artificial Sequence
  primer
gccttcccaactagatccaag

SEQ ID NO: 73460 - DNA, 21 bp, Artificial Sequence
  primer
ttctgggctcaagctatcctc

SEQ ID NO: 73461 - DNA, 21 bp, Artificial Sequence
  primer
gcaggtgctctaagggtgaag

SEQ ID NO: 73462 - DNA, 39 bp, Artificial Sequence
  primer
gtaaaacgacggccagtaaagatggtttggagtactggc

SEQ ID NO: 73463 - DNA, 25 bp, Artificial Sequence
  primer
aaaccagtaaatattgcaactgagg

SEQ ID NO: 73464 - DNA, 39 bp, Artificial Sequence
  primer
gtaaaacgacggccagtgagttcccttgcattacacctg

SEQ ID NO: 73465 - DNA, 21 bp, Artificial Sequence
  primer
ttctccttccctgacatttcc

SEQ ID NO: 73466 - DNA, 21 bp, Artificial Sequence
  primer
cttgccagcattcaatcaaac

SEQ ID NO: 73467 - DNA, 39 bp, Artificial Sequence
  primer
gtaaaacgacggccagttgtttcaggtggaaggactttg

SEQ ID NO: 73468 - DNA, 37 bp, Artificial Sequence
  primer
gtaaaacgacggccagttttcaatccaatcagctcgg

SEQ ID NO: 73469 - DNA, 20 bp, Artificial Sequence
  primer
gggaagagtgggagaagtgg

SEQ ID NO: 73470 - DNA, 21 bp, Artificial Sequence
  primer
agtcaacaggttcaaggtggg

SEQ ID NO: 73471 - DNA, 21 bp, Artificial Sequence
  primer
ctcaaatactgccattgtggg

SEQ ID NO: 73472 - DNA, 39 bp, Artificial Sequence
  primer
gtaaaacgacggccagtgctagtgtctcttctcttgggc

SEQ ID NO: 73473 - DNA, 18 bp, Artificial Sequence
  primer
acctcagacccgctttcc

SEQ ID NO: 73474 - DNA, 39 bp, Artificial Sequence
  primer
gtaaaacgacggccagtgcctcgatttaaagcaataccg

SEQ ID NO: 73475 - DNA, 38 bp, Artificial Sequence
  primer
gtaaaacgacggccagttttgcctgcttatgtactgcc

SEQ ID NO: 73476 - DNA, 21 bp, Artificial Sequence
  primer
aaggtctcatctcgaaggtgc

SEQ ID NO: 73477 - DNA, 38 bp, Artificial Sequence
  primer
gtaaaacgacggccagttgcatactgattcctgcaacg

SEQ ID NO: 73478 - DNA, 20 bp, Artificial Sequence
  primer
agctggctaccaggaaggac

SEQ ID NO: 73479 - DNA, 38 bp, Artificial Sequence
  primer
gtaaaacgacggccagtttcaagttgctgctacatggg

SEQ ID NO: 73480 - DNA, 38 bp, Artificial Sequence
  primer
gtaaaacgacggccagttgggaaagatcactcctcacc

SEQ ID NO: 73481 - DNA, 19 bp, Artificial Sequence
  primer
cgtgcagggtgctagagtg

SEQ ID NO: 73482 - DNA, 38 bp, Artificial Sequence
  primer
gtaaaacgacggccagtttgtccaatcttcaagagccc

SEQ ID NO: 73483 - DNA, 20 bp, Artificial Sequence
  primer
ggaggctcaggactccactg

SEQ ID NO: 73484 - DNA, 20 bp, Artificial Sequence
  primer
cttgctgggaaacctgtgag

SEQ ID NO: 73485 - DNA, 21 bp, Artificial Sequence
  primer
gcaacactgtgcaaacaccac

SEQ ID NO: 73486 - DNA, 38 bp, Artificial Sequence
  primer
gtaaaacgacggccagttctgctgcttggcattagaag

SEQ ID NO: 73487 - DNA, 21 bp, Artificial Sequence
  primer
ctctctgaggactcgctctcc

SEQ ID NO: 73488 - DNA, 21 bp, Artificial Sequence
  primer
ttgtcagtctcgtccttgtgg

SEQ ID NO: 73489 - DNA, 21 bp, Artificial Sequence
  primer
atggaacactgtcccttctcc

SEQ ID NO: 73490 - DNA, 21 bp, Artificial Sequence
  primer
cgaacggtctttctcttctcg

SEQ ID NO: 73491 - DNA, 38 bp, Artificial Sequence
  primer
gtaaaacgacggccagttagtccctgtccttctttcgg

SEQ ID NO: 73492 - DNA, 37 bp, Artificial Sequence
  primer
gtaaaacgacggccagttgtccttgaagccactctcg

SEQ ID NO: 73493 - DNA, 38 bp, Artificial Sequence
  primer
gtaaaacgacggccagttctttcccttggtcgagagac

SEQ ID NO: 73494 - DNA, 36 bp, Artificial Sequence
  primer
gtaaaacgacggccagtcataggcctcccgtccttc

SEQ ID NO: 73495 - DNA, 21 bp, Artificial Sequence
  primer
actgaggctctgtccttcctg

SEQ ID NO: 73496 - DNA, 21 bp, Artificial Sequence
  primer
tcatggagagcctcttcttcc

SEQ ID NO: 73497 - DNA, 21 bp, Artificial Sequence
  primer
tccttgtaatcttcgcccttc

SEQ ID NO: 73498 - DNA, 21 bp, Artificial Sequence
  primer
ctggacttgtctttgagcacg

SEQ ID NO: 73499 - DNA, 36 bp, Artificial Sequence
  primer
gtaaaacgacggccagttccttctgggacagcatcc

SEQ ID NO: 73500 - DNA, 21 bp, Artificial Sequence
  primer
ttagcaggaatgtccagaccc

SEQ ID NO: 73501 - DNA, 21 bp, Artificial Sequence
  primer
gtgtgcatcacctcctcgtag

SEQ ID NO: 73502 - DNA, 38 bp, Artificial Sequence
  primer
gtaaaacgacggccagtagtagtaccctggcgacaagc

SEQ ID NO: 73503 - DNA, 20 bp, Artificial Sequence
  primer
agaagacgccctctggagac

SEQ ID NO: 73504 - DNA, 35 bp, Artificial Sequence
  primer
gtaaaacgacggccagtgctgaagggaccctcgtc

SEQ ID NO: 73505 - DNA, 19 bp, Artificial Sequence
  primer
gacttcagcaggaggtccg

SEQ ID NO: 73506 - DNA, 37 bp, Artificial Sequence
  primer
gtaaaacgacggccagtactccgtccttgacgtcctc

SEQ ID NO: 73507 - DNA, 38 bp, Artificial Sequence
  primer
gtaaaacgacggccagtgagcaagactttcttccacgg

SEQ ID NO: 73508 - DNA, 38 bp, Artificial Sequence
  primer
gtaaaacgacggccagtctagagccacgtccagctttg

SEQ ID NO: 73509 - DNA, 36 bp, Artificial Sequence
  primer
gtaaaacgacggccagtcttgtgccacagtgttcgg

SEQ ID NO: 73510 - DNA, 19 bp, Artificial Sequence
  primer
aggcctcagtgtcgtcctc

SEQ ID NO: 73511 - DNA, 19 bp, Artificial Sequence
  primer
agggatctcctccactcgg

SEQ ID NO: 73512 - DNA, 35 bp, Artificial Sequence
  primer
gtaaaacgacggccagtgatcacctcccgcgtctg

SEQ ID NO: 73513 - DNA, 21 bp, Artificial Sequence
  primer
taggtgacgtactcggcgtag

SEQ ID NO: 73514 - DNA, 37 bp, Artificial Sequence
  primer
gtaaaacgacggccagtaggtcgagagaggtcaaggg

SEQ ID NO: 73515 - DNA, 22 bp, Artificial Sequence
  primer
ggagtagagtgagctgggacac

SEQ ID NO: 73516 - DNA, 38 bp, Artificial Sequence
  primer
gtaaaacgacggccagttcctggtcaaagtgcagaatc

SEQ ID NO: 73517 - DNA, 21 bp, Artificial Sequence
  primer
gaaagcatcggccagattaag

SEQ ID NO: 73518 - DNA, 37 bp, Artificial Sequence
  primer
gtaaaacgacggccagtgtggccaagtgcagtctctc

SEQ ID NO: 73519 - DNA, 39 bp, Artificial Sequence
  primer
gtaaaacgacggccagttggtttggatttatctggcatc

SEQ ID NO: 73520 - DNA, 20 bp, Artificial Sequence
  primer
gggtgtcaagaggagtggtg

SEQ ID NO: 73521 - DNA, 38 bp, Artificial Sequence
  primer
gtaaaacgacggccagtgtggtgtcacccacgtagttc

SEQ ID NO: 73522 - DNA, 43 bp, Artificial Sequence
  primer
gtaaaacgacggccagtggatacagatgataaactgtcacaca

SEQ ID NO: 73523 - DNA, 29 bp, Artificial Sequence
  primer
aaatatgagtaattattgacatggaattg

SEQ ID NO: 73524 - DNA, 40 bp, Artificial Sequence
  primer
gtaaaacgacggccagtgcaatgagtggaatatgacacag

SEQ ID NO: 73525 - DNA, 21 bp, Artificial Sequence
  primer
gggcaatggcattatgacttc

SEQ ID NO: 73526 - DNA, 39 bp, Artificial Sequence
  primer
gtaaaacgacggccagtttcttgctttagctcttggttc

SEQ ID NO: 73527 - DNA, 22 bp, Artificial Sequence
  primer
gggatgacggaacatgaagtag

SEQ ID NO: 73528 - DNA, 21 bp, Artificial Sequence
  primer
tcataccgaacaagatcaggc

SEQ ID NO: 73529 - DNA, 20 bp, Artificial Sequence
  primer
cctctgcagttctttggcac

SEQ ID NO: 73530 - DNA, 21 bp, Artificial Sequence
  primer
actcctctgcagttctttggc

SEQ ID NO: 73531 - DNA, 21 bp, Artificial Sequence
  primer
tggcactcatacccaaagaag

SEQ ID NO: 73532 - DNA, 23 bp, Artificial Sequence
  primer
ctgtgtgatgcgaatatagcttg

SEQ ID NO: 73533 - DNA, 21 bp, Artificial Sequence
  primer
gtttcggtttctcaaccgttc

SEQ ID NO: 73534 - DNA, 41 bp, Artificial Sequence
  primer
gtaaaacgacggccagtctccttggtatatgcatcagtcac

SEQ ID NO: 73535 - DNA, 40 bp, Artificial Sequence
  primer
gtaaaacgacggccagttgaactagcaacagaaatcatgg

SEQ ID NO: 73536 - DNA, 21 bp, Artificial Sequence
  primer
tatggtggtttaatccgctcc

SEQ ID NO: 73537 - DNA, 21 bp, Artificial Sequence
  primer
agctccagttggagaagttgc

SEQ ID NO: 73538 - DNA, 38 bp, Artificial Sequence
  primer
gtaaaacgacggccagtcagcatctgaaagtgattggc

SEQ ID NO: 73539 - DNA, 21 bp, Artificial Sequence
  primer
ctgggtagaggcatcacttcc

SEQ ID NO: 73540 - DNA, 20 bp, Artificial Sequence
  primer
cttcatggccactggaagac

SEQ ID NO: 73541 - DNA, 38 bp, Artificial Sequence
  primer
gtaaaacgacggccagtgtttgctttgatttgccattg

SEQ ID NO: 73542 - DNA, 42 bp, Artificial Sequence
  primer
gtaaaacgacggccagtttgcttgtagtaaagagggactcac

SEQ ID NO: 73543 - DNA, 41 bp, Artificial Sequence
  primer
gtaaaacgacggccagtcgactcactgacagattattttgc

SEQ ID NO: 73544 - DNA, 41 bp, Artificial Sequence
  primer
gtaaaacgacggccagtcgtcatagtactgaggtgcttgag

SEQ ID NO: 73545 - DNA, 21 bp, Artificial Sequence
  primer
ccatccaggagatatgatccg

SEQ ID NO: 73546 - DNA, 38 bp, Artificial Sequence
  primer
gtaaaacgacggccagtggaaagccaaatgttccacta

SEQ ID NO: 73547 - DNA, 40 bp, Artificial Sequence
  primer
gtaaaacgacggccagttgatctggaagtactctggcttg

SEQ ID NO: 73548 - DNA, 21 bp, Artificial Sequence
  primer
ttatctttccaattgtggccc

SEQ ID NO: 73549 - DNA, 29 bp, Artificial Sequence
  primer
ttactaacaattgtaaaggcatgagtatt

SEQ ID NO: 73550 - DNA, 21 bp, Artificial Sequence
  primer
acctacccaccagcgttattg

SEQ ID NO: 73551 - DNA, 21 bp, Artificial Sequence
  primer
tactacagacatgcaccaccg

SEQ ID NO: 73552 - DNA, 21 bp, Artificial Sequence
  primer
gcacacaaggatgtcaaactg

SEQ ID NO: 73553 - DNA, 40 bp, Artificial Sequence
  primer
gtaaaacgacggccagtcacccaaagcattaacagttgtg

SEQ ID NO: 73554 - DNA, 38 bp, Artificial Sequence
  primer
gtaaaacgacggccagtacatgccctaggaaggatcag

SEQ ID NO: 73555 - DNA, 21 bp, Artificial Sequence
  primer
atggatggtgtcgagtgtcag

SEQ ID NO: 73556 - DNA, 38 bp, Artificial Sequence
  primer
gtaaaacgacggccagttgggaacagattcctcatttg

SEQ ID NO: 73557 - DNA, 22 bp, Artificial Sequence
  primer
aggcttaacacaacccaatcac

SEQ ID NO: 73558 - DNA, 38 bp, Artificial Sequence
  primer
gtaaaacgacggccagtatccagtaaatgccatcccag

SEQ ID NO: 73559 - DNA, 22 bp, Artificial Sequence
  primer
tggaatgatccaacataacacc

SEQ ID NO: 73560 - DNA, 38 bp, Artificial Sequence
  primer
gtaaaacgacggccagtaagcactccaattccctgaag

SEQ ID NO: 73561 - DNA, 19 bp, Artificial Sequence
  primer
aggcataagccaccacgtc

SEQ ID NO: 73562 - DNA, 37 bp, Artificial Sequence
  primer
gtaaaacgacggccagtccaaacactgaggctaaccc

SEQ ID NO: 73563 - DNA, 38 bp, Artificial Sequence
  primer
gtaaaacgacggccagtaccgtacatctgcctgaggac

SEQ ID NO: 73564 - DNA, 22 bp, Artificial Sequence
  primer
ggttctgcacctctgcataaag

SEQ ID NO: 73565 - DNA, 38 bp, Artificial Sequence
  primer
gtaaaacgacggccagtagacagacctccttgctggtg

SEQ ID NO: 73566 - DNA, 37 bp, Artificial Sequence
  primer
gtaaaacgacggccagtcgcttgggcacatcttagac

SEQ ID NO: 73567 - DNA, 21 bp, Artificial Sequence
  primer
ccacatctggaaagtggagag

SEQ ID NO: 73568 - DNA, 21 bp, Artificial Sequence
  primer
cctgaaccaggatcttcaagg

SEQ ID NO: 73569 - DNA, 21 bp, Artificial Sequence
  primer
tgagttcccacaaatgctcag

SEQ ID NO: 73570 - DNA, 20 bp, Artificial Sequence
  primer
ccctggagcctactgtctgg

SEQ ID NO: 73571 - DNA, 21 bp, Artificial Sequence
  primer
tcagccatcaaggtgacagag

SEQ ID NO: 73572 - DNA, 38 bp, Artificial Sequence
  primer
gtaaaacgacggccagtccctaactatgacaggcccag

SEQ ID NO: 73573 - DNA, 19 bp, Artificial Sequence
  primer
tgtgagaagacagccacgc

SEQ ID NO: 73574 - DNA, 37 bp, Artificial Sequence
  primer
gtaaaacgacggccagtgaaagggttccctaggcagg

SEQ ID NO: 73575 - DNA, 21 bp, Artificial Sequence
  primer
gctgttcctcataaaccgtgg

SEQ ID NO: 73576 - DNA, 21 bp, Artificial Sequence
  primer
accacctttggtggcagatag

SEQ ID NO: 73577 - DNA, 18 bp, Artificial Sequence
  primer
ctgcctgctcattcctgg

SEQ ID NO: 73578 - DNA, 37 bp, Artificial Sequence
  primer
gtaaaacgacggccagttcaggcgtttcagagcaatg

SEQ ID NO: 73579 - DNA, 21 bp, Artificial Sequence
  primer
gcatgtctgctgtaagttgcc

SEQ ID NO: 73580 - DNA, 38 bp, Artificial Sequence
  primer
gtaaaacgacggccagtctgctgttgcagctcaatttc

SEQ ID NO: 73581 - DNA, 38 bp, Artificial Sequence
  primer
gtaaaacgacggccagtacatttccacagacctcccag

SEQ ID NO: 73582 - DNA, 38 bp, Artificial Sequence
  primer
gtaaaacgacggccagttaacagcctcagtgttcacgc

SEQ ID NO: 73583 - DNA, 21 bp, Artificial Sequence
  primer
gtggcccacaagctatagtcc

SEQ ID NO: 73584 - DNA, 38 bp, Artificial Sequence
  primer
gtaaaacgacggccagtcctcagggtaccacctacctg

SEQ ID NO: 73585 - DNA, 38 bp, Artificial Sequence
  primer
gtaaaacgacggccagtcttccagcgttagtcctcagc

SEQ ID NO: 73586 - DNA, 38 bp, Artificial Sequence
  primer
gtaaaacgacggccagttgggcctaccttccaaataac

SEQ ID NO: 73587 - DNA, 38 bp, Artificial Sequence
  primer
gtaaaacgacggccagtagggaatctttcatcactgcg

SEQ ID NO: 73588 - DNA, 22 bp, Artificial Sequence
  primer
tctgaactggccaactctattg

SEQ ID NO: 73589 - DNA, 37 bp, Artificial Sequence
  primer
gtaaaacgacggccagtagctggccttgacaatgaac

SEQ ID NO: 73590 - DNA, 38 bp, Artificial Sequence
  primer
gtaaaacgacggccagtgagtggctcaaccaggttctc

SEQ ID NO: 73591 - DNA, 38 bp, Artificial Sequence
  primer
gtaaaacgacggccagtacaagtgcactgtggtggaag

SEQ ID NO: 73592 - DNA, 21 bp, Artificial Sequence
  primer
cctagatggcgacacaaatcc

SEQ ID NO: 73593 - DNA, 21 bp, Artificial Sequence
  primer
aatctgtctcccgtcaattcc

SEQ ID NO: 73594 - DNA, 38 bp, Artificial Sequence
  primer
gtaaaacgacggccagttggtgagctcaggcacaatac

SEQ ID NO: 73595 - DNA, 21 bp, Artificial Sequence
  primer
aggagctgagaacagctacgg

SEQ ID NO: 73596 - DNA, 20 bp, Artificial Sequence
  primer
acctgaacaagatgcggttg

SEQ ID NO: 73597 - DNA, 20 bp, Artificial Sequence
  primer
gagccaccgagcactaaatg

SEQ ID NO: 73598 - DNA, 37 bp, Artificial Sequence
  primer
gtaaaacgacggccagtggaatggaacctgggatctg

SEQ ID NO: 73599 - DNA, 38 bp, Artificial Sequence
  primer
gtaaaacgacggccagtcaaagaaaccaggctgcagag

SEQ ID NO: 73600 - DNA, 21 bp, Artificial Sequence
  primer
tcttgtctcaacaccaccacc

SEQ ID NO: 73601 - DNA, 21 bp, Artificial Sequence
  primer
caactggtttcgctgaatctg

SEQ ID NO: 73602 - DNA, 38 bp, Artificial Sequence; identical to SEQ ID NO: 73599
  primer

SEQ ID NO: 73603 - DNA, 21 bp, Artificial Sequence
  primer
tcttgtctcaacaccaccacc

SEQ ID NO: 73604 - DNA, 21 bp, Artificial Sequence
  primer
caactggtttcgctgaatctg

SEQ ID NO: 73605 - DNA, 38 bp, Artificial Sequence
  primer
gtaaaacgacggccagtcactggaatctgtcccactcc

SEQ ID NO: 73606 - DNA, 42 bp, Artificial Sequence
  primer
gtaaaacgacggccagtcaactgtagcacatggactttactc

SEQ ID NO: 73607 - DNA, 37 bp, Artificial Sequence
  primer
gtaaaacgacggccagtgttagcacagtgccagccag

SEQ ID NO: 73608 - DNA, 23 bp, Artificial Sequence
  primer
aatcctaatggttggaaggattt

SEQ ID NO: 73609 - DNA, 42 bp, Artificial Sequence
  primer
gtaaaacgacggccagtttagcactaaacatcactttcatgc

SEQ ID NO: 73610 - DNA, 23 bp, Artificial Sequence
  primer
aactgcaacactgcaaacactta

SEQ ID NO: 73611 - DNA, 20 bp, Artificial Sequence
  primer
atagcacccattggaaaggc

SEQ ID NO: 73612 - DNA, 44 bp, Artificial Sequence
  primer
gtaaaacgacggccagtttgtgtaatagctcattgcaactctac

SEQ ID NO: 73613 - DNA, 26 bp, Artificial Sequence
  primer
tcacacattcagtgtatcatagcatc

SEQ ID NO: 73614 - DNA, 24 bp, Artificial Sequence
  primer
tgactaagtgagagaaagaatggc

SEQ ID NO: 73615 - DNA, 39 bp, Artificial Sequence
  primer
gtaaaacgacggccagtcatccctcctcatatgataccc

SEQ ID NO: 73616 - DNA, 21 bp, Artificial Sequence
  primer
gataaagccaacaggtcccag

SEQ ID NO: 73617 - DNA, 21 bp, Artificial Sequence
  primer
tggcaccaaattgtttaccac

SEQ ID NO: 73618 - DNA, 28 bp, Artificial Sequence
  primer
aatgccaacttagtaaacttctttgttt

SEQ ID NO: 73619 - DNA, 21 bp, Artificial Sequence
  primer
aggatccacttgctgtaaccg

SEQ ID NO: 73620 - DNA, 38 bp, Artificial Sequence
  primer
gtaaaacgacggccagtgtcatccagcgtgtcattgag

SEQ ID NO: 73621 - DNA, 38 bp, Artificial Sequence
  primer
gtaaaacgacggccagtgttctcaagttgggtaacggc

SEQ ID NO: 73622 - DNA, 24 bp, Artificial Sequence
  primer
tttgcctagagacaaagcagtctt

SEQ ID NO: 73623 - DNA, 21 bp, Artificial Sequence
  primer
cacaacaccaacatgaccagc

SEQ ID NO: 73624 - DNA, 42 bp, Artificial Sequence
  primer
gtaaaacgacggccagtaaatctaaacgtcaaagcattgttc

SEQ ID NO: 73625 - DNA, 41 bp, Artificial Sequence
  primer
gtaaaacgacggccagtgaatgccaaatttgtaataaaggg

SEQ ID NO: 73626 - DNA, 44 bp, Artificial Sequence
  primer
gtaaaacgacggccagttttgactgagttatacagaatgatttc

SEQ ID NO: 73627 - DNA, 21 bp, Artificial Sequence
  primer
tagcatagctctggagggttg

SEQ ID NO: 73628 - DNA, 42 bp, Artificial Sequence
  primer
gtaaaacgacggccagttttgcatattattgctttcatcaca

SEQ ID NO: 73629 - DNA, 23 bp, Artificial Sequence
  primer
tcgcatacttcattcccaaatac

SEQ ID NO: 73630 - DNA, 21 bp, Artificial Sequence
  primer
attctctccacgatttgagcc

SEQ ID NO: 73631 - DNA, 38 bp, Artificial Sequence
  primer
gtaaaacgacggccagtctgtgcctggcctatgttaag

SEQ ID NO: 73632 - DNA, 36 bp, Artificial Sequence
  primer
gtaaaacgacggccagtgctgcagctggaaatcctc

SEQ ID NO: 73633 - DNA, 39 bp, Artificial Sequence
  primer
gtaaaacgacggccagtttattgaagccttgccagaaac

SEQ ID NO: 73634 - DNA, 38 bp, Artificial Sequence
  primer
gtaaaacgacggccagtaatcccttggaaaccacaatc

SEQ ID NO: 73635 - DNA, 41 bp, Artificial Sequence
  primer
gtaaaacgacggccagttgcaacctttagaagagtaggagg

SEQ ID NO: 73636 - DNA, 40 bp, Artificial Sequence
  primer
gtaaaacgacggccagttgctacacatgcatacaaattcc

SEQ ID NO: 73637 - DNA, 38 bp, Artificial Sequence
  primer
gtaaaacgacggccagtacggatctgctggaaagtctg

SEQ ID NO: 73638 - DNA, 21 bp, Artificial Sequence
  primer
gatatgtggcatttgtgggtg

SEQ ID NO: 73639 - DNA, 38 bp, Artificial Sequence
  primer
gtaaaacgacggccagtgaggtggtcttggttcctgag

SEQ ID NO: 73640 - DNA, 38 bp, Artificial Sequence
  primer
gtaaaacgacggccagttcaaacaatgtgctaaagggc

SEQ ID NO: 73641 - DNA, 38 bp, Artificial Sequence
  primer
gtaaaacgacggccagtaaactcacctgagggacttgg

SEQ ID NO: 73642 - DNA, 40 bp, Artificial Sequence
  primer
gtaaaacgacggccagtaaacacaaacaacagcatctgag

SEQ ID NO: 73643 - DNA, 45 bp, Artificial Sequence
  primer
gtaaaacgacggccagttgaaattccagacttctaagagtacaaa

SEQ ID NO: 73644 - DNA, 21 bp, Artificial Sequence
  primer
agcctgagcaacaagtgaaac

SEQ ID NO: 73645 - DNA, 38 bp, Artificial Sequence
  primer
gtaaaacgacggccagtgaaagttcacctcatcctggg

SEQ ID NO: 73646 - DNA, 38 bp, Artificial Sequence
  primer
gtaaaacgacggccagtctttggtaccactgcccacag

SEQ ID NO: 73647 - DNA, 21 bp, Artificial Sequence
  primer
aatgggcagtcacaaatgttc

SEQ ID NO: 73648 - DNA, 38 bp, Artificial Sequence
  primer
gtaaaacgacggccagtagcagtctgaggctccatttg

SEQ ID NO: 73649 - DNA, 38 bp, Artificial Sequence
  primer
gtaaaacgacggccagtaagcctcttcctggcagtgta

SEQ ID NO: 73650 - DNA, 26 bp, Artificial Sequence
  primer
gcttaacaaattcacaaatatttccc

SEQ ID NO: 73651 - DNA, 25 bp, Artificial Sequence
  primer
ctgttaccactctagaacattcagg

SEQ ID NO: 73652 - DNA, 21 bp, Artificial Sequence
  primer
tgccattccaaactacctcaa

SEQ ID NO: 73653 - DNA, 18 bp, Artificial Sequence
  primer
aggtgtgagccaccatgc

SEQ ID NO: 73654 - DNA, 21 bp, Artificial Sequence
  primer
tagcagacaggatctccctcc

SEQ ID NO: 73655 - DNA, 20 bp, Artificial Sequence
  primer
agggctagcaagctctaccg

SEQ ID NO: 73656 - DNA, 38 bp, Artificial Sequence
  primer
gtaaaacgacggccagtgaaggtctcctcatccacagg

SEQ ID NO: 73657 - DNA, 21 bp, Artificial Sequence
  primer
aaataggctcacagtgggctg

SEQ ID NO: 73658 - DNA, 38 bp, Artificial Sequence
  primer
gtaaaacgacggccagtttatgcttcaggttggcacag

SEQ ID NO: 73659 - DNA, 21 bp, Artificial Sequence
  primer
tagctcactaccttcctgccc

SEQ ID NO: 73660 - DNA, 20 bp, Artificial Sequence
  primer
tcaggagccaagtcctgaag

SEQ ID NO: 73661 - DNA, 21 bp, Artificial Sequence
  primer
atgatacatgtccctaggcgg

SEQ ID NO: 73662 - DNA, 21 bp, Artificial Sequence
  primer
gtatgtgctcctggatcatgc

SEQ ID NO: 73663 - DNA, 20 bp, Artificial Sequence
  primer
catggtctccagaagtgccc

SEQ ID NO: 73664 - DNA, 38 bp, Artificial Sequence
  primer
gtaaaacgacggccagttgtttataaagggacctgggc

SEQ ID NO: 73665 - DNA, 21 bp, Artificial Sequence
  primer
catcttcctggcattgtatgg

SEQ ID NO: 73666 - DNA, 39 bp, Artificial Sequence
  primer
gtaaaacgacggccagtttcaggttatgcttgagcttcc

SEQ ID NO: 73667 - DNA, 22 bp, Artificial Sequence
  primer
agttctttatgttgcccagtcc

SEQ ID NO: 73668 - DNA, 20 bp, Artificial Sequence
  primer
ggactaactcacggccaatc

SEQ ID NO: 73669 - DNA, 36 bp, Artificial Sequence
  primer
gtaaaacgacggccagtccagcccatggaaagactg

SEQ ID NO: 73670 - DNA, 42 bp, Artificial Sequence
  primer
gtaaaacgacggccagttctgaaaggtaatttcatttggact

SEQ ID NO: 73671 - DNA, 21 bp, Artificial Sequence
  primer
caccattcaggattgttccat

SEQ ID NO: 73672 - DNA, 38 bp, Artificial Sequence
  primer
gtaaaacgacggccagttgattaacaggcaaggctgaa

SEQ ID NO: 73673 - DNA, 23 bp, Artificial Sequence
  primer
tgaccaaggatatacagggtgtg

SEQ ID NO: 73674 - DNA, 24 bp, Artificial Sequence
  primer
tttgatcacaatcatgtagagcag

SEQ ID NO: 73675 - DNA, 26 bp, Artificial Sequence
  primer
tgcaaacatccagatactatgaaatg

SEQ ID NO: 73676 - DNA, 41 bp, Artificial Sequence
  primer
gtaaaacgacggccagttgcaccacttctagtgattcaaag

SEQ ID NO: 73677 - DNA, 37 bp, Artificial Sequence
  primer
gtaaaacgacggccagtgcctggcaagagtcaatgag

SEQ ID NO: 73678 - DNA, 23 bp, Artificial Sequence
  primer
aaataacctcaaggttgcctgtc

SEQ ID NO: 73679 - DNA, 21 bp, Artificial Sequence
  primer
gactctctgtgttggcaaggg

SEQ ID NO: 73680 - DNA, 39 bp, Artificial Sequence
  primer
gtaaaacgacggccagttttcccttagaaggattacggc

SEQ ID NO: 73681 - DNA, 38 bp, Artificial Sequence
  primer
gtaaaacgacggccagtatgcttccctgcacctaagac

SEQ ID NO: 73682 - DNA, 21 bp, Artificial Sequence
  primer
cagaagacaagaccatgccag

SEQ ID NO: 73683 - DNA, 21 bp, Artificial Sequence
  primer
tctggagtggatttaatgggc

SEQ ID NO: 73684 - DNA, 21 bp, Artificial Sequence
  primer
cctaggccaggacttgaacac

SEQ ID NO: 73685 - DNA, 21 bp, Artificial Sequence
  primer
cagctgtttgaggatgaccag

SEQ ID NO: 73686 - DNA, 38 bp, Artificial Sequence
  primer
gtaaaacgacggccagtctaacccatgggactacgtgc

SEQ ID NO: 73687 - DNA, 38 bp, Artificial Sequence
  primer
gtaaaacgacggccagtctcctcatgcaggaaggtcag

SEQ ID NO: 73688 - DNA, 19 bp, Artificial Sequence
  primer
ggtgtgggtcagtcccttg

SEQ ID NO: 73689 - DNA, 21 bp, Artificial Sequence
  primer
aggaaccacagaggtgcagac

SEQ ID NO: 73690 - DNA, 21 bp, Artificial Sequence
  primer
tttccggtaagactctgcctc

SEQ ID NO: 73691 - DNA, 21 bp, Artificial Sequence
  primer
ctccagagcaccatactgagg

SEQ ID NO: 73692 - DNA, 38 bp, Artificial Sequence
  primer
gtaaaacgacggccagtgagcacagggatcagcttcac

SEQ ID NO: 73693 - DNA, 19 bp, Artificial Sequence
  primer
agtgccactgggtcctctg

SEQ ID NO: 73694 - DNA, 38 bp, Artificial Sequence
  primer
gtaaaacgacggccagttcttcaccatatggacgttgc

SEQ ID NO: 73695 - DNA, 37 bp, Artificial Sequence
  primer
gtaaaacgacggccagtgagccatgggaagaaagagg

SEQ ID NO: 73696 - DNA, 19 bp, Artificial Sequence
  primer
gagagtccttcagggccag

SEQ ID NO: 73697 - DNA, 21 bp, Artificial Sequence
  primer
taattaggaggctctcgtgcg

SEQ ID NO: 73698 - DNA, 21 bp, Artificial Sequence
  primer
gcatgactgataggagggtcc

SEQ ID NO: 73699 - DNA, 21 bp, Artificial Sequence
  primer
tcactgaggatgaggagaggc

SEQ ID NO: 73700 - DNA, 21 bp, Artificial Sequence
  primer
catcagactgggagagaggtg

SEQ ID NO: 73701 - DNA, 21 bp, Artificial Sequence
  primer
agttagaccacctgggtttgg

SEQ ID NO: 73702 - DNA, 21 bp, Artificial Sequence
  primer
tatccggtgctatgaatgacg

SEQ ID NO: 73703 - DNA, 20 bp, Artificial Sequence
  primer
tggtgcacacctgttatccc

SEQ ID NO: 73704 - DNA, 38 bp, Artificial Sequence
  primer
gtaaaacgacggccagtacttggagctggagtcctgtg

SEQ ID NO: 73705 - DNA, 35 bp, Artificial Sequence
  primer
gtaaaacgacggccagtaaggtgtcaccgtcccag

SEQ ID NO: 73706 - DNA, 21 bp, Artificial Sequence
  primer
ctcttcctggcattgtacagc

SEQ ID NO: 73707 - DNA, 21 bp, Artificial Sequence
  primer
aatgcttgcgcttccaaatac

SEQ ID NO: 73708 - DNA, 21 bp, Artificial Sequence
  primer
acaccaacgaatcactgttgc

SEQ ID NO: 73709 - DNA, 24 bp, Artificial Sequence
  primer
tttcagatagtaccatttggcatc

SEQ ID NO: 73710 - DNA, 21 bp, Artificial Sequence
  primer
tctctgaaccacacagttggg

SEQ ID NO: 73711 - DNA, 21 bp, Artificial Sequence
  primer
ccctgaccacctttccattac

SEQ ID NO: 73712 - DNA, 39 bp, Artificial Sequence
  primer
gtaaaacgacggccagttcacagtgccatatgttgcttc

SEQ ID NO: 73713 - DNA, 20 bp, Artificial Sequence
  primer
ttcatttcaaggatgcaggg

SEQ ID NO: 73714 - DNA, 35 bp, Artificial Sequence
  primer
gtaaaacgacggccagtataggcacgcaccaccac

SEQ ID NO: 73715 - DNA, 44 bp, Artificial Sequence
  primer
gtaaaacgacggccagtaaagtcaagtcaaagcatctctttatg

SEQ ID NO: 73716 - DNA, 24 bp, Artificial Sequence
  primer
tggcactagcaatttaatctgttg

SEQ ID NO: 73717 - DNA, 39 bp, Artificial Sequence
  primer
gtaaaacgacggccagttgttctgaattgatcagcttgg

SEQ ID NO: 73718 - DNA, 38 bp, Artificial Sequence
  primer
gtaaaacgacggccagttgcaacatttacctgctttgg

SEQ ID NO: 73719 - DNA, 21 bp, Artificial Sequence
  primer
acagagcaagactcggtctca

SEQ ID NO: 73720 - DNA, 21 bp, Artificial Sequence
  primer
tttctggcttcaattccaagg

SEQ ID NO: 73721 - DNA, 38 bp, Artificial Sequence
  primer
gtaaaacgacggccagtaaggttgcatatcccttgcat

SEQ ID NO: 73722 - DNA, 38 bp, Artificial Sequence
  primer
gtaaaacgacggccagttgaaatggctgcttgtcaaag

SEQ ID NO: 73723 - DNA, 37 bp, Artificial Sequence
  primer
gtaaaacgacggccagtaagcaatcctcccgctttag

SEQ ID NO: 73724 - DNA, 38 bp, Artificial Sequence
  primer
gtaaaacgacggccagtatagccaccaatgaagcactg

SEQ ID NO: 73725 - DNA, 36 bp, Artificial Sequence
  primer
gtaaaacgacggccagttttcttccctgctaagccc

SEQ ID NO: 73726 - DNA, 22 bp, Artificial Sequence
  primer
aaaggtcacaggtcagcttgag

SEQ ID NO: 73727 - DNA, 21 bp, Artificial Sequence
  primer
tgcagacaagtggagctgaat

SEQ ID NO: 73728 - DNA, 38 bp, Artificial Sequence
  primer
gtaaaacgacggccagtctgcttccagtctttccttgc

SEQ ID NO: 73729 - DNA, 21 bp, Artificial Sequence
  primer
acccgttctaaacccaaagtc

SEQ ID NO: 73730 - DNA, 40 bp, Artificial Sequence
  primer
gtaaaacgacggccagtcaatagcatgaaactggtcttgg

SEQ ID NO: 73731 - DNA, 19 bp, Artificial Sequence
  primer
ccactgtgccactgcactc

SEQ ID NO: 73732 - DNA, 21 bp, Artificial Sequence
  primer
agcaaacacctgaaggcataa

SEQ ID NO: 73733 - DNA, 21 bp, Artificial Sequence
  primer
tttcatgttaggcttgggtcc

SEQ ID NO: 73734 - DNA, 39 bp, Artificial Sequence
  primer
gtaaaacgacggccagtttcagattgtgctgcaactttc

SEQ ID NO: 73735 - DNA, 21 bp, Artificial Sequence
  primer
aacaaacacccgtgacacaag

SEQ ID NO: 73736 - DNA, 21 bp, Artificial Sequence
  primer
aacagatgccatcatccttct

SEQ ID NO: 73737 - DNA, 42 bp, Artificial Sequence
  primer
gtaaaacgacggccagtaagacataaactgtcctggactcac

SEQ ID NO: 73738 - DNA, 18 bp, Artificial Sequence
  primer
ccaagatggcaccactgc

SEQ ID NO: 73739 - DNA, 23 bp, Artificial Sequence
  primer
aagaggtgcaaagatttcttgag

SEQ ID NO: 73740 - DNA, 21 bp, Artificial Sequence
  primer
tcacatttgggcagtttgagt

SEQ ID NO: 73741 - DNA, 41 bp, Artificial Sequence
  primer
gtaaaacgacggccagtcaaactgagccttagtctaccacg

SEQ ID NO: 73742 - DNA, 38 bp, Artificial Sequence
  primer
gtaaaacgacggccagtctgagaacgggactctcttcc

SEQ ID NO: 73743 - DNA, 20 bp, Artificial Sequence
  primer
ccggccttgtttaacctttc

SEQ ID NO: 73744 - DNA, 21 bp, Artificial Sequence
  primer
caccatgcccggttaaactac

SEQ ID NO: 73745 - DNA, 38 bp, Artificial Sequence
  primer
gtaaaacgacggccagtaaagcacagtgaaagggcttg

SEQ ID NO: 73746 - DNA, 21 bp, Artificial Sequence
  primer
gaacctacctcacttgcctcc

SEQ ID NO: 73747 - DNA, 21 bp, Artificial Sequence
  primer
taaaggccgcatcctaacaac

SEQ ID NO: 73748 - DNA, 21 bp, Artificial Sequence
  primer
cgctgctcctcagaactaacc

SEQ ID NO: 73749 - DNA, 20 bp, Artificial Sequence
  primer
acagaggtgagccactgcac

SEQ ID NO: 73750 - DNA, 35 bp, Artificial Sequence; identical to SEQ ID NO: 5167
  primer

SEQ ID NO: 73751 - DNA, 38 bp, Artificial Sequence
  primer
gtaaaacgacggccagtagaatccgtctgcccacatac

SEQ ID NO: 73752 - DNA, 37 bp, Artificial Sequence
  primer
gtaaaacgacggccagttcaggttatcacccacctcg

SEQ ID NO: 73753 - DNA, 37 bp, Artificial Sequence
  primer
gtaaaacgacggccagtgcacagtggagaaggtccag

SEQ ID NO: 73754 - DNA, 21 bp, Artificial Sequence
  primer
gtggaacgtttgctcctcttc

SEQ ID NO: 73755 - DNA, 20 bp, Artificial Sequence
  primer
cagagctggtgtggaacgag

SEQ ID NO: 73756 - DNA, 18 bp, Artificial Sequence
  primer
tgatctgcccacctcagc

SEQ ID NO: 73757 - DNA, 37 bp, Artificial Sequence
  primer
gtaaaacgacggccagtaaagggtgcaagccaagttc

SEQ ID NO: 73758 - DNA, 21 bp, Artificial Sequence
  primer
ggactcttggctgatggagtc

SEQ ID NO: 73759 - DNA, 38 bp, Artificial Sequence
  primer
gtaaaacgacggccagtccacactaattgctgctcagg

SEQ ID NO: 73760 - DNA, 21 bp, Artificial Sequence
  primer
gcacaactgtggtcccatcta

SEQ ID NO: 73761 - DNA, 37 bp, Artificial Sequence
  primer
gtaaaacgacggccagtggtgacagaacgagaccctg

SEQ ID NO: 73762 - DNA, 21 bp, Artificial Sequence
  primer
agcgttcctaccaagcacaag

SEQ ID NO: 73763 - DNA, 19 bp, Artificial Sequence
  primer
ggcaccatctgttcccatc

SEQ ID NO: 73764 - DNA, 39 bp, Artificial Sequence
  primer
gtaaaacgacggccagtcagcttaaacaaagggatccag

SEQ ID NO: 73765 - DNA, 38 bp, Artificial Sequence
  primer
gtaaaacgacggccagttttggtgcctgtatctcctcc

SEQ ID NO: 73766 - DNA, 21 bp, Artificial Sequence
  primer
attgaagcagcttacgtgcag

SEQ ID NO: 73767 - DNA, 22 bp, Artificial Sequence
  primer
aactgctgctaactcatacggc

SEQ ID NO: 73768 - DNA, 21 bp, Artificial Sequence
  primer
ctcaagccagtctcatggaag

SEQ ID NO: 73769 - DNA, 18 bp, Artificial Sequence
  primer
gtttccctcgcaaccacc

SEQ ID NO: 73770 - DNA, 38 bp, Artificial Sequence
  primer
gtaaaacgacggccagttttgcctcaataccttcctgc

SEQ ID NO: 73771 - DNA, 38 bp, Artificial Sequence
  primer
gtaaaacgacggccagttatgaacaacaggccatgcag

SEQ ID NO: 73772 - DNA, 43 bp, Artificial Sequence
  primer
gtaaaacgacggccagtcatagaatttgaatatggattcaggg

SEQ ID NO: 73773 - DNA, 41 bp, Artificial Sequence
  primer
gtaaaacgacggccagtgttctgtatgcctttactatgcaa

SEQ ID NO: 73774 - DNA, 21 bp, Artificial Sequence
  primer
ccagtgtactccaaacctccc

SEQ ID NO: 73775 - DNA, 40 bp, Artificial Sequence
  primer
gtaaaacgacggccagtcatgccttgatcataaatcagtg

SEQ ID NO: 73776 - DNA, 40 bp, Artificial Sequence
  primer
gtaaaacgacggccagttttattgctcaatggtattcacc

SEQ ID NO: 73777 - DNA, 23 bp, Artificial Sequence
  primer
tcctcaataccattcatttggtg

SEQ ID NO: 73778 - DNA, 42 bp, Artificial Sequence
  primer
gtaaaacgacggccagtcaagcaattaatacaacattgagga

SEQ ID NO: 73779 - DNA, 21 bp, Artificial Sequence
  primer
agacctgaacccaacacgttc

SEQ ID NO: 73780 - DNA, 20 bp, Artificial Sequence
  primer
aaagtattctgccaccctgg

SEQ ID NO: 73781 - DNA, 37 bp, Artificial Sequence
  primer
gtaaaacgacggccagtgctagggctgtggtagggac

SEQ ID NO: 73782 - DNA, 21 bp, Artificial Sequence
  primer
aaggctggtgctgagaatagg

SEQ ID NO: 73783 - DNA, 39 bp, Artificial Sequence
  primer
gtaaaacgacggccagtaatggaatttgttccttgatcc

SEQ ID NO: 73784 - DNA, 41 bp, Artificial Sequence
  primer
gtaaaacgacggccagtcaccaagtaaacatcttcctttcc

SEQ ID NO: 73785 - DNA, 21 bp, Artificial Sequence
  primer
gggaagcctaaggatcactgt

SEQ ID NO: 73786 - DNA, 26 bp, Artificial Sequence
  primer
tgtgtgaataaagttatttggtgagg

SEQ ID NO: 73787 - DNA, 19 bp, Artificial Sequence
  primer
aggcgtcctgagcaacaac

SEQ ID NO: 73788 - DNA, 27 bp, Artificial Sequence
  primer
gaaagaaatggtaaagactatttgacg

SEQ ID NO: 73789 - DNA, 20 bp, Artificial Sequence
  primer
acaaaggacaggagtgagcc

SEQ ID NO: 73790 - DNA, 38 bp, Artificial Sequence
  primer
gtaaaacgacggccagttcacaatgctggcacctaatg

SEQ ID NO: 73791 - DNA, 21 bp, Artificial Sequence
  primer
actgttgcctcaaactcctgg

SEQ ID NO: 73792 - DNA, 43 bp, Artificial Sequence
  primer
gtaaaacgacggccagtaactagttgaagtcagaagtcttggg

SEQ ID NO: 73793 - DNA, 39 bp, Artificial Sequence
  primer
gtaaaacgacggccagtgaggtttggtcctgagttgttc

SEQ ID NO: 73794 - DNA, 27 bp, Artificial Sequence
  primer
gcttctatgactaatgaaacctattcc

SEQ ID NO: 73795 - DNA, 20 bp, Artificial Sequence
  primer
tttgcccttattcctttgcc

SEQ ID NO: 73796 - DNA, 21 bp, Artificial Sequence
  primer
gctcactgtgggatctttcct

SEQ ID NO: 73797 - DNA, 18 bp, Artificial Sequence
  primer
caaaccgcaaacccacag

SEQ ID NO: 73798 - DNA, 21 bp, Artificial Sequence
  primer
gggaatgtattcctgaggtgc

SEQ ID NO: 73799 - DNA, 21 bp, Artificial Sequence
  primer
tctgcaatgggctttaatgtg

SEQ ID NO: 73800 - DNA, 43 bp, Artificial Sequence
  primer
gtaaaacgacggccagttgaggaaatccacttacttaggtttg

SEQ ID NO: 73801 - DNA, 21 bp, Artificial Sequence
  primer
tcttgactcagacccaagtcc

SEQ ID NO: 73802 - DNA, 38 bp, Artificial Sequence
  primer
gtaaaacgacggccagtaggatgccttgagcttactgg

SEQ ID NO: 73803 - DNA, 21 bp, Artificial Sequence
  primer
agcaccgaatcagaccttgac

SEQ ID NO: 73804 - DNA, 21 bp, Artificial Sequence
  primer
gggatctccagcatcaagaag

SEQ ID NO: 73805 - DNA, 39 bp, Artificial Sequence
  primer
gtaaaacgacggccagtccagggagatgtttatccttcc

SEQ ID NO: 73806 - DNA, 20 bp, Artificial Sequence
  primer
tctttgtcagggacccacag

SEQ ID NO: 73807 - DNA, 20 bp, Artificial Sequence
  primer
aggaagaaggcctagacccg

SEQ ID NO: 73808 - DNA, 21 bp, Artificial Sequence
  primer
agcctcctgatggcattgtag

SEQ ID NO: 73809 - DNA, 40 bp, Artificial Sequence
  primer
gtaaaacgacggccagttttcattcaaggaatgtttgagc

SEQ ID NO: 73810 - DNA, 25 bp, Artificial Sequence
  primer
ccactttagaagataatgcaaccaa

SEQ ID NO: 73811 - DNA, 21 bp, Artificial Sequence
  primer
gaatcctggacccaatactcc

SEQ ID NO: 73812 - DNA, 26 bp, Artificial Sequence
  primer
ggatttagggaccataattaaacaaa

SEQ ID NO: 73813 - DNA, 21 bp, Artificial Sequence
  primer
tgtcgctttctccaaacattg

SEQ ID NO: 73814 - DNA, 38 bp, Artificial Sequence
  primer
gtaaaacgacggccagtgcatcttaccattggcacttg

SEQ ID NO: 73815 - DNA, 21 bp, Artificial Sequence
  primer
tacggccagaagaattgtgag

SEQ ID NO: 73816 - DNA, 38 bp, Artificial Sequence
  primer
gtaaaacgacggccagttcttctgagcataggcagtgg

SEQ ID NO: 73817 - DNA, 22 bp, Artificial Sequence
  primer
tcctgactttcgtcatgtccta

SEQ ID NO: 73818 - DNA, 20 bp, Artificial Sequence
  primer
ttcaatggcaggctaaatgg

SEQ ID NO: 73819 - DNA, 25 bp, Artificial Sequence
  primer
aaacattacagtttcgggatacaaa

SEQ ID NO: 73820 - DNA, 23 bp, Artificial Sequence
  primer
cccagaatttcactatgaagcag

SEQ ID NO: 73821 - DNA, 38 bp, Artificial Sequence
  primer
gtaaaacgacggccagtccatggtttgcatttaggagg

SEQ ID NO: 73822 - DNA, 38 bp, Artificial Sequence
  primer
gtaaaacgacggccagtaactttcattccgcaggtagc

SEQ ID NO: 73823 - DNA, 25 bp, Artificial Sequence
  primer
aaagtagaaccacatgaggtaaagc

SEQ ID NO: 73824 - DNA, 21 bp, Artificial Sequence
  primer
ccaaggctttatttgggacag

SEQ ID NO: 73825 - DNA, 21 bp, Artificial Sequence
  primer
ccattgggtacagaaagacca

SEQ ID NO: 73826 - DNA, 25 bp, Artificial Sequence
  primer
ccactttggcttcttaaattaatcg

SEQ ID NO: 73827 - DNA, 21 bp, Artificial Sequence
  primer
agtaattcagctccgcttcag

SEQ ID NO: 73828 - DNA, 38 bp, Artificial Sequence
  primer
gtaaaacgacggccagtgaaactttcattctgcaggga

SEQ ID NO: 73829 - DNA, 22 bp, Artificial Sequence
  primer
cacgggcttcttaaattaatcc

SEQ ID NO: 73830 - DNA, 38 bp, Artificial Sequence; identical to SEQ ID NO: 73821
  primer

SEQ ID NO: 73831 - DNA, 44 bp, Artificial Sequence
  primer
gtaaaacgacggccagtcctcagaaggtaagtcagctattacaa

SEQ ID NO: 73832 - DNA, 44 bp, Artificial Sequence
  primer
gtaaaacgacggccagtctgaaataagatactacttggatgtca

SEQ ID NO: 73833 - DNA, 21 bp, Artificial Sequence
  primer
tcagaaagtggttgatggagc

SEQ ID NO: 73834 - DNA, 40 bp, Artificial Sequence
  primer
gtaaaacgacggccagttgtgcatgaactaattgctgttg

SEQ ID NO: 73835 - DNA, 37 bp, Artificial Sequence
  primer
gtaaaacgacggccagttcatttggtggaaatgaggc

SEQ ID NO: 73836 - DNA, 40 bp, Artificial Sequence
  primer
gtaaaacgacggccagttctgtaggcttcaggaagaaatc

SEQ ID NO: 73837 - DNA, 36 bp, Artificial Sequence
  primer
gtaaaacgacggccagtccagccaccactctgaagg

SEQ ID NO: 73838 - DNA, 21 bp, Artificial Sequence
  primer
tctcgcattgtagagcctgtc

SEQ ID NO: 73839 - DNA, 40 bp, Artificial Sequence
  primer
gtaaaacgacggccagtactcaaggaatgtttgtgtttcc

SEQ ID NO: 73840 - DNA, 23 bp, Artificial Sequence
  primer
aactgatgcagaaccactttagc

SEQ ID NO: 73841 - DNA, 23 bp, Artificial Sequence
  primer
agggataaagctgttgaaagtcc

SEQ ID NO: 73842 - DNA, 20 bp, Artificial Sequence
  primer
tgctatttgcacattgcttt

SEQ ID NO: 73843 - DNA, 21 bp, Artificial Sequence
  primer
aagacattcccaacaactccc

SEQ ID NO: 73844 - DNA, 21 bp, Artificial Sequence
  primer
tctctgaaccacatttgcctg

SEQ ID NO: 73845 - DNA, 24 bp, Artificial Sequence
  primer
cctcacaccctcaaagtatttacc

SEQ ID NO: 73846 - DNA, 39 bp, Artificial Sequence
  primer
gtaaaacgacggccagtgcctttgttcttccgtgttatg

SEQ ID NO: 73847 - DNA, 23 bp, Artificial Sequence
  primer
tgcagtggtaagagaaccaagtc

SEQ ID NO: 73848 - DNA, 22 bp, Artificial Sequence
  primer
tgccttccttagtcttcattcc

SEQ ID NO: 73849 - DNA, 21 bp, Artificial Sequence
  primer
caggctaaatgggtttggaag

SEQ ID NO: 73850 - DNA, 26 bp, Artificial Sequence
  primer
aaagtagaaacacctgagattaaggc

SEQ ID NO: 73851 - DNA, 25 bp, Artificial Sequence
  primer
agaatttcaccatgaagtggtaatc

SEQ ID NO: 73852 - DNA, 38 bp, Artificial Sequence
  primer
gtaaaacgacggccagtctgtgctttgcattaaggagg

SEQ ID NO: 73853 - DNA, 37 bp, Artificial Sequence
  primer
gtaaaacgacggccagtcattgtattgcaggctgctg

SEQ ID NO: 73854 - DNA, 38 bp, Artificial Sequence
  primer
gtaaaacgacggccagtaatctatgtgtgcgtgcatcc

SEQ ID NO: 73855 - DNA, 18 bp, Artificial Sequence
  primer
tacagtgagccgcgattg

SEQ ID NO: 73856 - DNA, 24 bp, Artificial Sequence
  primer
ggaagcacttagaaagcatgtacc

SEQ ID NO: 73857 - DNA, 38 bp, Artificial Sequence
  primer
gtaaaacgacggccagtattcatcagggcaaatgtgtg

SEQ ID NO: 73858 - DNA, 27 bp, Artificial Sequence
  primer
agggtgtaatcatatttctaccttaaa

SEQ ID NO: 73859 - DNA, 23 bp, Artificial Sequence
  primer
tgctatctacctctgcaggattc

SEQ ID NO: 73860 - DNA, 38 bp, Artificial Sequence
  primer
gtaaaacgacggccagtaactccatgactgaccgacac

SEQ ID NO: 73861 - DNA, 21 bp, Artificial Sequence
  primer
ttagcaaggctgcaaagtctg

SEQ ID NO: 73862 - DNA, 21 bp, Artificial Sequence
  primer
tccaccctgagaaaggacaag

SEQ ID NO: 73863 - DNA, 22 bp, Artificial Sequence
  primer
ttaggactgcaggaggtattgc

SEQ ID NO: 73864 - DNA, 21 bp, Artificial Sequence
  primer
gtagaacaccgtgcaacaagg

SEQ ID NO: 73865 - DNA, 21 bp, Artificial Sequence
  primer
gctgacttagtgtctggtggg

SEQ ID NO: 73866 - DNA, 20 bp, Artificial Sequence
  primer
ctaacagctctggcacggac

SEQ ID NO: 73867 - DNA, 21 bp, Artificial Sequence
  primer
ccctacttctgtgccattctg

SEQ ID NO: 73868 - DNA, 39 bp, Artificial Sequence
  primer
gtaaaacgacggccagtttacttaggcagaggtggatgg

SEQ ID NO: 73869 - DNA, 21 bp, Artificial Sequence
  primer
taatcggtctgcgatattggg

SEQ ID NO: 73870 - DNA, 21 bp, Artificial Sequence
  primer
gtcccgcttctcctcttcttc

SEQ ID NO: 73871 - DNA, 20 bp, Artificial Sequence
  primer
gctagtcactttctccgccc

SEQ ID NO: 73872 - DNA, 37 bp, Artificial Sequence
  primer
gtaaaacgacggccagtgcttagcggagatactgccc

SEQ ID NO: 73873 - DNA, 36 bp, Artificial Sequence
  primer
gtaaaacgacggccagtcgaatgtcagggatgggag

SEQ ID NO: 73874 - DNA, 21 bp, Artificial Sequence
  primer
ctgctcagtctgcatggagtg

SEQ ID NO: 73875 - DNA, 38 bp, Artificial Sequence
  primer
gtaaaacgacggccagtgtgtgtgtgagctggttctcc

SEQ ID NO: 73876 - DNA, 20 bp, Artificial Sequence
  primer
aaaggcgatgatgcattgag

SEQ ID NO: 73877 - DNA, 38 bp, Artificial Sequence
  primer
gtaaaacgacggccagtgtggtgtcaatctgggttgtg

SEQ ID NO: 73878 - DNA, 21 bp, Artificial Sequence
  primer
ggccacagtaggaatgtccag

SEQ ID NO: 73879 - DNA, 38 bp, Artificial Sequence
  primer
gtaaaacgacggccagtggatgaggcgagtacatttgg

SEQ ID NO: 73880 - DNA, 20 bp, Artificial Sequence
  primer
gtcacacagcaggagcacac

SEQ ID NO: 73881 - DNA, 21 bp, Artificial Sequence
  primer
agccctaggtcatggaagttg

SEQ ID NO: 73882 - DNA, 22 bp, Artificial Sequence
  primer
aagaccaacctgacttcttccc

SEQ ID NO: 73883 - DNA, 21 bp, Artificial Sequence
  primer
ccatggaaacaaatgggactc

SEQ ID NO: 73884 - DNA, 38 bp, Artificial Sequence
  primer
gtaaaacgacggccagtacgaactgagccctaggagtg

SEQ ID NO: 73885 - DNA, 21 bp, Artificial Sequence
  primer
gtactctcagccagcaggtcc

SEQ ID NO: 73886 - DNA, 21 bp, Artificial Sequence
  primer
cccattggtagtcagttgctg

SEQ ID NO: 73887 - DNA, 38 bp, Artificial Sequence
  primer
gtaaaacgacggccagtggtttcacctgtagtcctgcc

SEQ ID NO: 73888 - DNA, 38 bp, Artificial Sequence
  primer
gtaaaacgacggccagtcaactgctgtagctggacctg

SEQ ID NO: 73889 - DNA, 38 bp, Artificial Sequence
  primer
gtaaaacgacggccagtactcctctcgcccactaggtc

SEQ ID NO: 73890 - DNA, 38 bp, Artificial Sequence
  primer
gtaaaacgacggccagtagctcagccacttcctctgtg

SEQ ID NO: 73891 - DNA, 38 bp, Artificial Sequence
  primer
gtaaaacgacggccagttccaacagagcctttagctcc

SEQ ID NO: 73892 - DNA, 38 bp, Artificial Sequence
  primer
gtaaaacgacggccagttcaccttggcttccttgtctc

SEQ ID NO: 73893 - DNA, 38 bp, Artificial Sequence
  primer
gtaaaacgacggccagtcactgctgcaataaaggttgc

SEQ ID NO: 73894 - DNA, 21 bp, Artificial Sequence
  primer
agtggtcagcagtaccaggtg

SEQ ID NO: 73895 - DNA, 21 bp, Artificial Sequence
  primer
ggaccctggagaagagagagg

SEQ ID NO: 73896 - DNA, 38 bp, Artificial Sequence
  primer
gtaaaacgacggccagttcacctcaaatgctctatgcc

SEQ ID NO: 73897 - DNA, 18 bp, Artificial Sequence
  primer
agccctcagcctggaaag

SEQ ID NO: 73898 - DNA, 20 bp, Artificial Sequence
  primer
agcctcctgcctcagttgta

SEQ ID NO: 73899 - DNA, 38 bp, Artificial Sequence
  primer
gtaaaacgacggccagtcttgagggactgctaccacac

SEQ ID NO: 73900 - DNA, 21 bp, Artificial Sequence
  primer
tttgcttgatttctggctgat

SEQ ID NO: 73901 - DNA, 21 bp, Artificial Sequence
  primer
agcctgagtgggatttgaaac

SEQ ID NO: 73902 - DNA, 38 bp, Artificial Sequence
  primer
gtaaaacgacggccagtcgtcacccgagaacttatcac

SEQ ID NO: 73903 - DNA, 22 bp, Artificial Sequence
  primer
tgtcacttgtatcctgagtggg

SEQ ID NO: 73904 - DNA, 21 bp, Artificial Sequence
  primer
tccaattgttcttcttcccaa

SEQ ID NO: 73905 - DNA, 21 bp, Artificial Sequence
  primer
tgatggtcaaatcatcggttg

SEQ ID NO: 73906 - DNA, 21 bp, Artificial Sequence
  primer
aaagcattcccgaacatcatt

SEQ ID NO: 73907 - DNA, 21 bp, Artificial Sequence
  primer
gaggctaaggcaggagaatca

SEQ ID NO: 73908 - DNA, 21 bp, Artificial Sequence
  primer
caggcagcatgatggtctaat

SEQ ID NO: 73909 - DNA, 22 bp, Artificial Sequence
  primer
cctctgttgtgggaaagtgttc

SEQ ID NO: 73910 - DNA, 21 bp, Artificial Sequence
  primer
gcctgggcaacagtgagtaac

SEQ ID NO: 73911 - DNA, 21 bp, Artificial Sequence
  primer
aagacagggagatggcaagtg

SEQ ID NO: 73912 - DNA, 22 bp, Artificial Sequence
  primer
caaatccttccatctcacttgg

SEQ ID NO: 73913 - DNA, 43 bp, Artificial Sequence
  primer
gtaaaacgacggccagttaagcatagacactaacaacagcatc

SEQ ID NO: 73914 - DNA, 23 bp, Artificial Sequence
  primer
cagtgtcctgagaaacagtctgg

SEQ ID NO: 73915 - DNA, 22 bp, Artificial Sequence
  primer
cctgactagacagccaggaatc

SEQ ID NO: 73916 - DNA, 21 bp, Artificial Sequence
  primer
ccactcagcactatgtctggc

SEQ ID NO: 73917 - DNA, 23 bp, Artificial Sequence
  primer
tcagcaagaagatcagtttccac

SEQ ID NO: 73918 - DNA, 21 bp, Artificial Sequence
  primer
ttcattcaattgcaacccaag

SEQ ID NO: 73919 - DNA, 23 bp, Artificial Sequence
  primer
ccttgaattaaagtgcaaacagg

SEQ ID NO: 73920 - DNA, 21 bp, Artificial Sequence
  primer
acatggcataatttgcagcag

SEQ ID NO: 73921 - DNA, 39 bp, Artificial Sequence
  primer
gtaaaacgacggccagttcatatgcaggtgactgacagc

SEQ ID NO: 73922 - DNA, 38 bp, Artificial Sequence
  primer
gtaaaacgacggccagttgggaactatctactgcacgg

SEQ ID NO: 73923 - DNA, 21 bp, Artificial Sequence
  primer
aatgacatgaagcacaggcag

SEQ ID NO: 73924 - DNA, 24 bp, Artificial Sequence
  primer
actatttgctatttgaaatgggct

SEQ ID NO: 73925 - DNA, 21 bp, Artificial Sequence
  primer
ccagctaacttcccggtttac

SEQ ID NO: 73926 - DNA, 20 bp, Artificial Sequence
  primer
gcccaggtttggaattaagc

SEQ ID NO: 73927 - DNA, 39 bp, Artificial Sequence
  primer
gtaaaacgacggccagtaaatagtaaggcaggcaacgtg

SEQ ID NO: 73928 - DNA, 21 bp, Artificial Sequence
  primer
aatcctgattcatggacccac

SEQ ID NO: 73929 - DNA, 23 bp, Artificial Sequence
  primer
ccacggactactttcactaccac

SEQ ID NO: 73930 - DNA, 21 bp, Artificial Sequence
  primer
ttggaagtgtggaagtgcatc

SEQ ID NO: 73931 - DNA, 37 bp, Artificial Sequence
  primer
gtaaaacgacggccagtccgcagtcagccttgtaatg

SEQ ID NO: 73932 - DNA, 38 bp, Artificial Sequence
  primer
gtaaaacgacggccagtaggccctttgtaattgtttgc

SEQ ID NO: 73933 - DNA, 39 bp, Artificial Sequence
  primer
gtaaaacgacggccagtcataaggctctcacctccactg

SEQ ID NO: 73934 - DNA, 20 bp, Artificial Sequence
  primer
ctttggaactgtggcactcc

SEQ ID NO: 73935 - DNA, 21 bp, Artificial Sequence
  primer
tgtttggctactctgcaactg

SEQ ID NO: 73936 - DNA, 21 bp, Artificial Sequence
  primer
cgcttgagcaggtagaatcag

SEQ ID NO: 73937 - DNA, 37 bp, Artificial Sequence
  primer
gtaaaacgacggccagtagccatgctacacagttccg

SEQ ID NO: 73938 - DNA, 38 bp, Artificial Sequence
  primer
gtaaaacgacggccagtagctagtctggcacacagcag

SEQ ID NO: 73939 - DNA, 44 bp, Artificial Sequence
  primer
gtaaaacgacggccagtccataagtaattcacttctaaagttgg

SEQ ID NO: 73940 - DNA, 45 bp, Artificial Sequence
  primer
gtaaaacgacggccagttgaacagtctatcagctaacaggataat

SEQ ID NO: 73941 - DNA, 21 bp, Artificial Sequence
  primer
tggggaaatcaagatgaaaac

SEQ ID NO: 73942 - DNA, 22 bp, Artificial Sequence
  primer
gacaagtgataggcccaaattc

SEQ ID NO: 73943 - DNA, 21 bp, Artificial Sequence
  primer
acgaagtcgttcttgctgatg

SEQ ID NO: 73944 - DNA, 39 bp, Artificial Sequence
  primer
gtaaaacgacggccagtaaacagagtcatcctgaatggg

SEQ ID NO: 73945 - DNA, 43 bp, Artificial Sequence
  primer
gtaaaacgacggccagtgtcatcttttcacttccttgaaatgt

SEQ ID NO: 73946 - DNA, 37 bp, Artificial Sequence
  primer
gtaaaacgacggccagtaaatttaggccacacccgac

SEQ ID NO: 73947 - DNA, 21 bp, Artificial Sequence
  primer
cagtggacaatgcaagcctac

SEQ ID NO: 73948 - DNA, 21 bp, Artificial Sequence
  primer
aaatagtgcttctgccttccc

SEQ ID NO: 73949 - DNA, 39 bp, Artificial Sequence
  primer
gtaaaacgacggccagtcaaactgtgcagatttgtttgg

SEQ ID NO: 73950 - DNA, 44 bp, Artificial Sequence
  primer
gtaaaacgacggccagtgctttgatggaaatatctactttctcc

SEQ ID NO: 73951 - DNA, 21 bp, Artificial Sequence
  primer
aggctgtaagaggctttggac

SEQ ID NO: 73952 - DNA, 21 bp, Artificial Sequence
  primer
taaggccaaatgtacagcacc

SEQ ID NO: 73953 - DNA, 38 bp, Artificial Sequence
  primer
gtaaaacgacggccagtcgcagatgttcaactgcatac

SEQ ID NO: 73954 - DNA, 21 bp, Artificial Sequence
  primer
ttgtcgcaaagcttcttcttg

SEQ ID NO: 73955 - DNA, 42 bp, Artificial Sequence
  primer
gtaaaacgacggccagttggtccatactgcgtgatataattc

SEQ ID NO: 73956 - DNA, 22 bp, Artificial Sequence
  primer
acagtgtttcacatccagaagc

SEQ ID NO: 73957 - DNA, 21 bp, Artificial Sequence
  primer
gatgtgcgatcgtcttcactg

SEQ ID NO: 73958 - DNA, 38 bp, Artificial Sequence
  primer
gtaaaacgacggccagtaaccaccttggtatgtccctg

SEQ ID NO: 73959 - DNA, 21 bp, Artificial Sequence
  primer
ccatggtccagtaggtgttcc

SEQ ID NO: 73960 - DNA, 38 bp, Artificial Sequence
  primer
gtaaaacgacggccagtgggtgtacggccattgttatc

SEQ ID NO: 73961 - DNA, 21 bp, Artificial Sequence
  primer
aaagggattcgtccatcattg

SEQ ID NO: 73962 - DNA, 21 bp, Artificial Sequence
  primer
aagtgctgtccttccttcagc

SEQ ID NO: 73963 - DNA, 21 bp, Artificial Sequence
  primer
gatcagcatggtttggatcag

SEQ ID NO: 73964 - DNA, 38 bp, Artificial Sequence
  primer
gtaaaacgacggccagtggtaaaccacgtaacgaaggc

SEQ ID NO: 73965 - DNA, 38 bp, Artificial Sequence
  primer
gtaaaacgacggccagtgacttctactgcgtggcaatg

SEQ ID NO: 73966 - DNA, 21 bp, Artificial Sequence
  primer
agatcgaccaatttcctgctg

SEQ ID NO: 73967 - DNA, 21 bp, Artificial Sequence
  primer
tcctgatgccctctatcttgc

SEQ ID NO: 73968 - DNA, 38 bp, Artificial Sequence
  primer
gtaaaacgacggccagttaactgagggaattggccttg

SEQ ID NO: 73969 - DNA, 22 bp, Artificial Sequence
  primer
ttgaaagctgtgaaccaaacac

SEQ ID NO: 73970 - DNA, 21 bp, Artificial Sequence
  primer
ccctcccatctcacagcttac

SEQ ID NO: 73971 - DNA, 20 bp, Artificial Sequence
  primer
ggcaacagagtgagaccctc

SEQ ID NO: 73972 - DNA, 38 bp, Artificial Sequence
  primer
gtaaaacgacggccagtttctcactggaagaaggctcc

SEQ ID NO: 73973 - DNA, 38 bp, Artificial Sequence
  primer
gtaaaacgacggccagttctcacatgcctgaatgatcc

SEQ ID NO: 73974 - DNA, 38 bp, Artificial Sequence
  primer
gtaaaacgacggccagttcccgtttgcactaacagacc

SEQ ID NO: 73975 - DNA, 20 bp, Artificial Sequence
  primer
ggtacccttcaagtccaccc

SEQ ID NO: 73976 - DNA, 21 bp, Artificial Sequence
  primer
gacttgatgcctttgactccc

SEQ ID NO: 73977 - DNA, 38 bp, Artificial Sequence
  primer
gtaaaacgacggccagtccgaagcagggagatagtttc

SEQ ID NO: 73978 - DNA, 20 bp, Artificial Sequence
  primer
tctgtgctctggctccaaac

SEQ ID NO: 73979 - DNA, 38 bp, Artificial Sequence
  primer
gtaaaacgacggccagttgcctaaagtgcctatcagcc

SEQ ID NO: 73980 - DNA, 39 bp, Artificial Sequence
  primer
gtaaaacgacggccagtgggtgtgctaaagtcgaagttg

SEQ ID NO: 73981 - DNA, 21 bp, Artificial Sequence
  primer
ttcagccacggacataaacag

SEQ ID NO: 73982 - DNA, 38 bp, Artificial Sequence
  primer
gtaaaacgacggccagtgagtacaagagctgctggtcg

SEQ ID NO: 73983 - DNA, 20 bp, Artificial Sequence
  primer
cagatctggctgcctcattc

SEQ ID NO: 73984 - DNA, 21 bp, Artificial Sequence
  primer
tgtagccttatcttgctgggc

SEQ ID NO: 73985 - DNA, 38 bp, Artificial Sequence
  primer
gtaaaacgacggccagtagttgactccttgggcatagc

SEQ ID NO: 73986 - DNA, 21 bp, Artificial Sequence
  primer
gtgtttctttggaggtcagga

SEQ ID NO: 73987 - DNA, 22 bp, Artificial Sequence
  primer
catcctacgggtcttatggttc

SEQ ID NO: 73988 - DNA, 21 bp, Artificial Sequence
  primer
gttgagcctattccagccttg

SEQ ID NO: 73989 - DNA, 20 bp, Artificial Sequence
  primer
caccagcatggcacatgtat

SEQ ID NO: 73990 - DNA, 19 bp, Artificial Sequence
  primer
acgtggccagcaggtaatg

SEQ ID NO: 73991 - DNA, 18 bp, Artificial Sequence
  primer
cagctcgagaggcgtgag

SEQ ID NO: 73992 - DNA, 21 bp, Artificial Sequence
  primer
cactggaacttgtcctcaccc

SEQ ID NO: 73993 - DNA, 21 bp, Artificial Sequence
  primer
aactcacctgaccatccaagc

SEQ ID NO: 73994 - DNA, 18 bp, Artificial Sequence
  primer
agcgtggactcggacctg

SEQ ID NO: 73995 - DNA, 38 bp, Artificial Sequence
  primer
gtaaaacgacggccagtagcttcatgtgatcctcccac

SEQ ID NO: 73996 - DNA, 21 bp, Artificial Sequence
  primer
agaggtggttccatgctaagg

SEQ ID NO: 73997 - DNA, 37 bp, Artificial Sequence
  primer
gtaaaacgacggccagtcatggtccttgtgccttctg

SEQ ID NO: 73998 - DNA, 21 bp, Artificial Sequence
  primer
ttgagttcaaacacagccagc

SEQ ID NO: 73999 - DNA, 22 bp, Artificial Sequence
  primer
catactggagatgagaggtggc

SEQ ID NO: 74000 - DNA, 38 bp, Artificial Sequence
  primer
gtaaaacgacggccagtgtaggaaagaggcccacagtc

SEQ ID NO: 74001 - DNA, 37 bp, Artificial Sequence
  primer
gtaaaacgacggccagtagggatcacacttcccttcc

SEQ ID NO: 74002 - DNA, 38 bp, Artificial Sequence
  primer
gtaaaacgacggccagtatcaatactgggcctgtctgc

SEQ ID NO: 74003 - DNA, 38 bp, Artificial Sequence
  primer
gtaaaacgacggccagtcagatcatcgtgaaacccaac

SEQ ID NO: 74004 - DNA, 38 bp, Artificial Sequence
  primer
gtaaaacgacggccagttaaggactcactccgactccc

SEQ ID NO: 74005 - DNA, 38 bp, Artificial Sequence
  primer
gtaaaacgacggccagtgctcgcctcttcttacgattg

SEQ ID NO: 74006 - DNA, 21 bp, Artificial Sequence
  primer
atgacgtggtctgaagctgac

SEQ ID NO: 74007 - DNA, 38 bp, Artificial Sequence
  primer
gtaaaacgacggccagtcataccacctggctgacttcc

SEQ ID NO: 74008 - DNA, 20 bp, Artificial Sequence
  primer
aggtcctgctatgatgtgcg

SEQ ID NO: 74009 - DNA, 38 bp, Artificial Sequence
  primer
gtaaaacgacggccagtcaactcactcacagtccgctc

SEQ ID NO: 74010 - DNA, 22 bp, Artificial Sequence
  primer
ttcttgttggagctgctttctc

SEQ ID NO: 74011 - DNA, 21 bp, Artificial Sequence
  primer
ggctagtgcctcctgactctg

SEQ ID NO: 74012 - DNA, 38 bp, Artificial Sequence
  primer
gtaaaacgacggccagtgctgtcaagagtggctgagag

SEQ ID NO: 74013 - DNA, 21 bp, Artificial Sequence
  primer
cagcttccttcccatccttac

SEQ ID NO: 74014 - DNA, 40 bp, Artificial Sequence
  primer
gtaaaacgacggccagtgggagataagagatgagacaggg

SEQ ID NO: 74015 - DNA, 21 bp, Artificial Sequence
  primer
ttcatgaaccaaacatttgcc

SEQ ID NO: 74016 - DNA, 20 bp, Artificial Sequence
  primer
gaagtgccagaagaccctcc

SEQ ID NO: 74017 - DNA, 21 bp, Artificial Sequence
  primer
cagaaagatcggatggcaaag

SEQ ID NO: 74018 - DNA, 37 bp, Artificial Sequence
  primer
gtaaaacgacggccagtcctggagtgcttctccacag

SEQ ID NO: 74019 - DNA, 38 bp, Artificial Sequence
  primer
gtaaaacgacggccagtaggtgcaataaccgtgaggag

SEQ ID NO: 74020 - DNA, 21 bp, Artificial Sequence
  primer
tttccaaattcacctaagccc

SEQ ID NO: 74021 - DNA, 20 bp, Artificial Sequence
  primer
ggcctttgggcaaggtaaag

SEQ ID NO: 74022 - DNA, 23 bp, Artificial Sequence
  primer
aggtggcatagtaccttgaactc

SEQ ID NO: 74023 - DNA, 38 bp, Artificial Sequence
  primer
gtaaaacgacggccagtaaggcaagagggtgatttgtg

SEQ ID NO: 74024 - DNA, 40 bp, Artificial Sequence
  primer
gtaaaacgacggccagtaagccctaatcagtaacaggagc

SEQ ID NO: 74025 - DNA, 21 bp, Artificial Sequence
  primer
tgataatgcaccacatcccat

SEQ ID NO: 74026 - DNA, 42 bp, Artificial Sequence
  primer
gtaaaacgacggccagtcaaagtgaacaagatcctaatttga

SEQ ID NO: 74027 - DNA, 23 bp, Artificial Sequence
  primer
ccttctgacctacctggactcac

SEQ ID NO: 74028 - DNA, 22 bp, Artificial Sequence
  primer
tccaggcattgcaatataagtg

SEQ ID NO: 74029 - DNA, 40 bp, Artificial Sequence
  primer
gtaaaacgacggccagtacgaagactcctcctaattcctc

SEQ ID NO: 74030 - DNA, 21 bp, Artificial Sequence
  primer
tcattggaaggataggcaatg

SEQ ID NO: 74031 - DNA, 38 bp, Artificial Sequence
  primer
gtaaaacgacggccagtcccacagaaccatttcattcc

SEQ ID NO: 74032 - DNA, 25 bp, Artificial Sequence
  primer
gttgttagatctgagagtggaagga

SEQ ID NO: 74033 - DNA, 21 bp, Artificial Sequence
  primer
tgcctctgagccatgtaagac

SEQ ID NO: 74034 - DNA, 21 bp, Artificial Sequence
  primer
gtctgaatgtgcagttggacc

SEQ ID NO: 74035 - DNA, 20 bp, Artificial Sequence
  primer
cccattggatgtccaaacac

SEQ ID NO: 74036 - DNA, 38 bp, Artificial Sequence
  primer
gtaaaacgacggccagtggactacagacaggcacaacc

SEQ ID NO: 74037 - DNA, 20 bp, Artificial Sequence
  primer
aggcacggacaataagcatc

SEQ ID NO: 74038 - DNA, 23 bp, Artificial Sequence
  primer
tcaatgtaaatgcaaacaagctg

SEQ ID NO: 74039 - DNA, 38 bp, Artificial Sequence
  primer
gtaaaacgacggccagttcagcagaccaacagatggag

SEQ ID NO: 74040 - DNA, 38 bp, Artificial Sequence
  primer
gtaaaacgacggccagtcattcatcaccagtcaccagc

SEQ ID NO: 74041 - DNA, 38 bp, Artificial Sequence
  primer
gtaaaacgacggccagtgtaggaagcatgaaggttggg

SEQ ID NO: 74042 - DNA, 21 bp, Artificial Sequence
  primer
ccatttaagcctctcggtctg

SEQ ID NO: 74043 - DNA, 20 bp, Artificial Sequence
  primer
gttctaatggcacccacacc

SEQ ID NO: 74044 - DNA, 40 bp, Artificial Sequence
  primer
gtaaaacgacggccagtccactaaagtgaaggattcaagc

SEQ ID NO: 74045 - DNA, 38 bp, Artificial Sequence
  primer
gtaaaacgacggccagttgcctctgagccatgtaagac

SEQ ID NO: 74046 - DNA, 39 bp, Artificial Sequence
  primer
gtaaaacgacggccagtcaaagagtctcggagtcaccag

SEQ ID NO: 74047 - DNA, 38 bp, Artificial Sequence
  primer
gtaaaacgacggccagtctcagagcagtcttcctcctg

SEQ ID NO: 74048 - DNA, 38 bp, Artificial Sequence
  primer
gtaaaacgacggccagtatttgtattgacgtccctgcc

SEQ ID NO: 74049 - DNA, 21 bp, Artificial Sequence
  primer
ttcctccttgctgtaggtgtg

SEQ ID NO: 74050 - DNA, 38 bp, Artificial Sequence
  primer
gtaaaacgacggccagtttgagaatggattcatggtgc

SEQ ID NO: 74051 - DNA, 38 bp, Artificial Sequence
  primer
gtaaaacgacggccagtggaattcttccaggtgctgag

SEQ ID NO: 74052 - DNA, 21 bp, Artificial Sequence
  primer
catttccgatgccctagaatc

SEQ ID NO: 74053 - DNA, 21 bp, Artificial Sequence
  primer
gagatcatttgagcccaggag

SEQ ID NO: 74054 - DNA, 38 bp, Artificial Sequence
  primer
gtaaaacgacggccagttccttaactcttcacctcccg

SEQ ID NO: 74055 - DNA, 38 bp, Artificial Sequence
  primer
gtaaaacgacggccagtctacaaggtccctgtgcttgc

SEQ ID NO: 74056 - DNA, 38 bp, Artificial Sequence
  primer
gtaaaacgacggccagttccagtagagcaatcctcagc

SEQ ID NO: 74057 - DNA, 21 bp, Artificial Sequence
  primer
tttctcaaataccctgggtgg

SEQ ID NO: 74058 - DNA, 21 bp, Artificial Sequence
  primer
cattgggaacctccatctcag

SEQ ID NO: 74059 - DNA, 38 bp, Artificial Sequence
  primer
gtaaaacgacggccagtaggaggtgcctgtcttgactc

SEQ ID NO: 74060 - DNA, 21 bp, Artificial Sequence
  primer
taaaccagcctgggtgcatag

SEQ ID NO: 74061 - DNA, 21 bp, Artificial Sequence
  primer
acccaggaggtaggatgaagg

SEQ ID NO: 74062 - DNA, 39 bp, Artificial Sequence
  primer
gtaaaacgacggccagtcaaacacctacatccctccttg

SEQ ID NO: 74063 - DNA, 21 bp, Artificial Sequence
  primer
ctctggattcgtcggtttgag

SEQ ID NO: 74064 - DNA, 21 bp, Artificial Sequence
  primer
ggtcatttctgcgactgtctg

SEQ ID NO: 74065 - DNA, 21 bp, Artificial Sequence
  primer
gtcctgtcccatgactaaggc

SEQ ID NO: 74066 - DNA, 21 bp, Artificial Sequence
  primer
aggtcaccttgcagttccttg

SEQ ID NO: 74067 - DNA, 38 bp, Artificial Sequence
  primer
gtaaaacgacggccagtgaactaatcccgctaagcacg

SEQ ID NO: 74068 - DNA, 38 bp, Artificial Sequence
  primer
gtaaaacgacggccagtaagaccttcccaagatcccag

SEQ ID NO: 74069 - DNA, 21 bp, Artificial Sequence
  primer
tactaccaatgaatgccgtcg

SEQ ID NO: 74070 - DNA, 21 bp, Artificial Sequence
  primer
gcctcctaagctcgggaatac

SEQ ID NO: 74071 - DNA, 38 bp, Artificial Sequence
  primer
gtaaaacgacggccagtcaccaactgcctcagtcaaag

SEQ ID NO: 74072 - DNA, 21 bp, Artificial Sequence
  primer
gtcctcctcactggctgagtc

SEQ ID NO: 74073 - DNA, 21 bp, Artificial Sequence
  primer
agcagggagaaatgcactagg

SEQ ID NO: 74074 - DNA, 23 bp, Artificial Sequence
  primer
cagactcagtactggagaccagc

SEQ ID NO: 74075 - DNA, 21 bp, Artificial Sequence
  primer
tagaggactaaggctcctggg

SEQ ID NO: 74076 - DNA, 38 bp, Artificial Sequence
  primer
gtaaaacgacggccagtgaatggaggcttaggttggag

SEQ ID NO: 74077 - DNA, 21 bp, Artificial Sequence
  primer
atctcagaggaacccaccaac

SEQ ID NO: 74078 - DNA, 21 bp, Artificial Sequence
  primer
tcccaaagagcttggttcttc

SEQ ID NO: 74079 - DNA, 38 bp, Artificial Sequence
  primer
gtaaaacgacggccagtaaaccatatgcaagcaaagga

SEQ ID NO: 74080 - DNA, 38 bp, Artificial Sequence
  primer
gtaaaacgacggccagttccacctgcacatacacacag

SEQ ID NO: 74081 - DNA, 21 bp, Artificial Sequence
  primer
ggcaaatcattgctgtaccat

SEQ ID NO: 74082 - DNA, 38 bp, Artificial Sequence
  primer
gtaaaacgacggccagtaagactggcatcagaacccat

SEQ ID NO: 74083 - DNA, 25 bp, Artificial Sequence
  primer
aagagttggtacacacatttaaggg

SEQ ID NO: 74084 - DNA, 21 bp, Artificial Sequence
  primer
gggcaagaatccatctcaaag

SEQ ID NO: 74085 - DNA, 37 bp, Artificial Sequence
  primer
gtaaaacgacggccagtaccacactttcacaggtgcc

SEQ ID NO: 74086 - DNA, 38 bp, Artificial Sequence
  primer
gtaaaacgacggccagtgccaaatgtccatctgtcaac

SEQ ID NO: 74087 - DNA, 38 bp, Artificial Sequence
  primer
gtaaaacgacggccagtctcatttggtgaaagagaggc

SEQ ID NO: 74088 - DNA, 38 bp, Artificial Sequence
  primer
gtaaaacgacggccagttaagtaaggctgggccctttg

SEQ ID NO: 74089 - DNA, 21 bp, Artificial Sequence
  primer
atgcctttcggttgcttctac

SEQ ID NO: 74090 - DNA, 24 bp, Artificial Sequence
  primer
aaaggacctaaaggccaaagatac

SEQ ID NO: 74091 - DNA, 38 bp, Artificial Sequence
  primer
gtaaaacgacggccagttgccacctgaatgctttagac

SEQ ID NO: 74092 - DNA, 21 bp, Artificial Sequence
  primer
ttctcaccttggacttggatg

SEQ ID NO: 74093 - DNA, 23 bp, Artificial Sequence
  primer
aaattggaacatgaaactgatcc

SEQ ID NO: 74094 - DNA, 38 bp, Artificial Sequence
  primer
gtaaaacgacggccagttttccacagtgctcaaggttc

SEQ ID NO: 74095 - DNA, 40 bp, Artificial Sequence
  primer
gtaaaacgacggccagtaaacattcacaaatcaagatggc

SEQ ID NO: 74096 - DNA, 37 bp, Artificial Sequence
  primer
gtaaaacgacggccagtgcattgtggcatttccattg

SEQ ID NO: 74097 - DNA, 24 bp, Artificial Sequence
  primer
cagcacagtgattggcatataaag

SEQ ID NO: 74098 - DNA, 38 bp, Artificial Sequence
  primer
gtaaaacgacggccagtagggaacatttgcatgaacac

SEQ ID NO: 74099 - DNA, 21 bp, Artificial Sequence
  primer
ttcaacgtcaaggaccatctg

SEQ ID NO: 74100 - DNA, 21 bp, Artificial Sequence
  primer
atattggcacaaaccctttcg

SEQ ID NO: 74101 - DNA, 21 bp, Artificial Sequence
  primer
acgcacaggtagtcacacacc

SEQ ID NO: 74102 - DNA, 21 bp, Artificial Sequence
  primer
caattgtctggcatgttggtg

SEQ ID NO: 74103 - DNA, 21 bp, Artificial Sequence
  primer
tgggcctcagtttctctatgg

SEQ ID NO: 74104 - DNA, 21 bp, Artificial Sequence
  primer
agacagccagccttcagtagc

SEQ ID NO: 74105 - DNA, 38 bp, Artificial Sequence
  primer
gtaaaacgacggccagttgccaagactgatcacagagg

SEQ ID NO: 74106 - DNA, 38 bp, Artificial Sequence
  primer
gtaaaacgacggccagtgaaaccgaggcaagacatctg

SEQ ID NO: 74107 - DNA, 21 bp, Artificial Sequence
  primer
tcccacagcaacgttacaatc

SEQ ID NO: 74108 - DNA, 21 bp, Artificial Sequence
  primer
ggcggcaaagagttaatcctc

SEQ ID NO: 74109 - DNA, 38 bp, Artificial Sequence
  primer
gtaaaacgacggccagtaattcaatcccatatctgccc

SEQ ID NO: 74110 - DNA, 38 bp, Artificial Sequence
  primer
gtaaaacgacggccagtgccaccactttctcaaccaat

SEQ ID NO: 74111 - DNA, 38 bp, Artificial Sequence
  primer
gtaaaacgacggccagtgattacggttgtgtgccactg

SEQ ID NO: 74112 - DNA, 21 bp, Artificial Sequence
  primer
gaacttaccttgcacagccag

SEQ ID NO: 74113 - DNA, 21 bp, Artificial Sequence
  primer
gcacagacacactgatgggac

SEQ ID NO: 74114 - DNA, 22 bp, Artificial Sequence
  primer
gagggactacatggaaggaagg

SEQ ID NO: 74115 - DNA, 21 bp, Artificial Sequence
  primer
tactcctcctcatgctcaccc

SEQ ID NO: 74116 - DNA, 21 bp, Artificial Sequence
  primer
tcatcttcctcgccatctacc

SEQ ID NO: 74117 - DNA, 39 bp, Artificial Sequence
  primer
gtaaaacgacggccagtcccacagcaatgttacaatcag

SEQ ID NO: 74118 - DNA, 21 bp, Artificial Sequence
  primer
agccctcaccatccgagttag

SEQ ID NO: 74119 - DNA, 20 bp, Artificial Sequence
  primer
acccaggaccaccagaaatc

SEQ ID NO: 74120 - DNA, 38 bp, Artificial Sequence
  primer
gtaaaacgacggccagtagaatggtcattccatttggc

SEQ ID NO: 74121 - DNA, 42 bp, Artificial Sequence
  primer
gtaaaacgacggccagtaactgcctagatcacaacatacaaa

SEQ ID NO: 74122 - DNA, 38 bp, Artificial Sequence
  primer
gtaaaacgacggccagtcctaaatttccaggcccaatc

SEQ ID NO: 74123 - DNA, 22 bp, Artificial Sequence
  primer
tgcacacccacaacttagaaac

SEQ ID NO: 74124 - DNA, 22 bp, Artificial Sequence
  primer
tgagctcaaggttccattcatc

SEQ ID NO: 74125 - DNA, 21 bp, Artificial Sequence
  primer
tagggaattccacaatgggag

SEQ ID NO: 74126 - DNA, 21 bp, Artificial Sequence
  primer
gtgaggtacggtctcagcgtc

SEQ ID NO: 74127 - DNA, 38 bp, Artificial Sequence
  primer
gtaaaacgacggccagtctaagtccttccttggccctc

SEQ ID NO: 74128 - DNA, 21 bp, Artificial Sequence
  primer
ggagcatgtgtgtgtgaggac

SEQ ID NO: 74129 - DNA, 37 bp, Artificial Sequence
  primer
gtaaaacgacggccagtgggatgaagagaacgggaag

SEQ ID NO: 74130 - DNA, 36 bp, Artificial Sequence
  primer
gtaaaacgacggccagtagtctggcaggccaatctg

SEQ ID NO: 74131 - DNA, 21 bp, Artificial Sequence
  primer
gatttcaacaccatcgtgacc

SEQ ID NO: 74132 - DNA, 21 bp, Artificial Sequence
  primer
cagcaccatgaggtctttctg

SEQ ID NO: 74133 - DNA, 37 bp, Artificial Sequence
  primer
gtaaaacgacggccagtcagaccctgccttcagtgag

SEQ ID NO: 74134 - DNA, 21 bp, Artificial Sequence
  primer
gtaggactgtggaaagacggg

SEQ ID NO: 74135 - DNA, 38 bp, Artificial Sequence
  primer
gtaaaacgacggccagtagctggacccattctcttacg

SEQ ID NO: 74136 - DNA, 39 bp, Artificial Sequence
  primer
gtaaaacgacggccagtggaggccagtcctactatggtc

SEQ ID NO: 74137 - DNA, 39 bp, Artificial Sequence
  primer
gtaaaacgacggccagttggaaccaaagaagtcaagtcc

SEQ ID NO: 74138 - DNA, 21 bp, Artificial Sequence
  primer
ttaatgatctgtgcccgattg

SEQ ID NO: 74139 - DNA, 21 bp, Artificial Sequence
  primer
atctgtgaaatgggtgtgtgg

SEQ ID NO: 74140 - DNA, 38 bp, Artificial Sequence
  primer
gtaaaacgacggccagtccctgaccaggagtccagtag

SEQ ID NO: 74141 - DNA, 38 bp, Artificial Sequence
  primer
gtaaaacgacggccagtgtataaagaggtccgatgggc

SEQ ID NO: 74142 - DNA, 38 bp, Artificial Sequence
  primer
gtaaaacgacggccagtatagcgttgcagtagacggtg

SEQ ID NO: 74143 - DNA, 21 bp, Artificial Sequence
  primer
tttggaaatactgcctccacc

SEQ ID NO: 74144 - DNA, 21 bp, Artificial Sequence
  primer
tctcttctggagaatacgccc

SEQ ID NO: 74145 - DNA, 38 bp, Artificial Sequence
  primer
gtaaaacgacggccagtttccaaagtctggctactcgg

SEQ ID NO: 74146 - DNA, 21 bp, Artificial Sequence
  primer
ctcacaggcagagagaacgtg

SEQ ID NO: 74147 - DNA, 19 bp, Artificial Sequence
  primer
ctctgtggccctggagatg

SEQ ID NO: 74148 - DNA, 21 bp, Artificial Sequence
  primer
gtaaccagatttggctcctcc

SEQ ID NO: 74149 - DNA, 21 bp, Artificial Sequence
  primer
gcaccagagcacaaatctcag

SEQ ID NO: 74150 - DNA, 40 bp, Artificial Sequence
  primer
gtaaaacgacggccagttcttgctattgggtgctagtcag

SEQ ID NO: 74151 - DNA, 21 bp, Artificial Sequence
  primer
acccaatacatgccacctttc

SEQ ID NO: 74152 - DNA, 21 bp, Artificial Sequence
  primer
tgaatagagagagtgtggccc

SEQ ID NO: 74153 - DNA, 21 bp, Artificial Sequence
  primer
ttccctctgcactgactgaac

SEQ ID NO: 74154 - DNA, 21 bp, Artificial Sequence
  primer
ggctttgagagatggaattgg

SEQ ID NO: 74155 - DNA, 21 bp, Artificial Sequence
  primer
cttcctgttcctctttcccac

SEQ ID NO: 74156 - DNA, 21 bp, Artificial Sequence
  primer
gactggaaccactgtaagggc

SEQ ID NO: 74157 - DNA, 21 bp, Artificial Sequence
  primer
tcactgtaaacactggctccg

SEQ ID NO: 74158 - DNA, 20 bp, Artificial Sequence
  primer
gtgctgggatcaaagctcag

SEQ ID NO: 74159 - DNA, 21 bp, Artificial Sequence
  primer
tgtggatcttccctaagcacc

SEQ ID NO: 74160 - DNA, 21 bp, Artificial Sequence
  primer
gtttcctcccttctgcttcac

SEQ ID NO: 74161 - DNA, 38 bp, Artificial Sequence
  primer
gtaaaacgacggccagttagaggctaagcagggtcagg

SEQ ID NO: 74162 - DNA, 23 bp, Artificial Sequence
  primer
caacccagattatgtggaaattg

SEQ ID NO: 74163 - DNA, 23 bp, Artificial Sequence
  primer
ttgcaacatgaaataatagctgg

SEQ ID NO: 74164 - DNA, 21 bp, Artificial Sequence
  primer
tgggctttatcaccactcctc

SEQ ID NO: 74165 - DNA, 36 bp, Artificial Sequence
  primer
gtaaaacgacggccagtcgggtttccaacaccactc

SEQ ID NO: 74166 - DNA, 21 bp, Artificial Sequence
  primer
catgtgtgcaatacgaccttg

SEQ ID NO: 74167 - DNA, 21 bp, Artificial Sequence
  primer
tctgtgcatctgcttgattcc

SEQ ID NO: 74168 - DNA, 40 bp, Artificial Sequence
  primer
gtaaaacgacggccagtggttactgagctttgctagaggg

SEQ ID NO: 74169 - DNA, 21 bp, Artificial Sequence
  primer
tgcctatggagaatgaggagg

SEQ ID NO: 74170 - DNA, 39 bp, Artificial Sequence
  primer
gtaaaacgacggccagtcgaccagtgtcacaatgtcatc

SEQ ID NO: 74171 - DNA, 21 bp, Artificial Sequence
  primer
accacaaacccagtctcacag

SEQ ID NO: 74172 - DNA, 40 bp, Artificial Sequence
  primer
gtaaaacgacggccagtaaagcctgtcacacaatatgctc

SEQ ID NO: 74173 - DNA, 38 bp, Artificial Sequence
  primer
gtaaaacgacggccagtgaagttaggacagggtccagc

SEQ ID NO: 74174 - DNA, 18 bp, Artificial Sequence
  primer
ggcttgcccaaggcttac

SEQ ID NO: 74175 - DNA, 40 bp, Artificial Sequence
  primer
gtaaaacgacggccagttggtctccaatgttattgtttgc

SEQ ID NO: 74176 - DNA, 41 bp, Artificial Sequence
  primer
gtaaaacgacggccagttggcatttattcatatttcagacc

SEQ ID NO: 74177 - DNA, 22 bp, Artificial Sequence
  primer
aattgattaaatttgggcatgg

SEQ ID NO: 74178 - DNA, 23 bp, Artificial Sequence
  primer
agacccagtgttaagcacaaatg

SEQ ID NO: 74179 - DNA, 21 bp, Artificial Sequence
  primer
accctctttcaagtagctggg

SEQ ID NO: 74180 - DNA, 21 bp, Artificial Sequence
  primer
cttcctcaagtgcaatagggc

SEQ ID NO: 74181 - DNA, 39 bp, Artificial Sequence
  primer
gtaaaacgacggccagtcgactgagaggaattaagctgc

SEQ ID NO: 74182 - DNA, 40 bp, Artificial Sequence
  primer
gtaaaacgacggccagtaaatgttggagagagggagtagg

SEQ ID NO: 74183 - DNA, 43 bp, Artificial Sequence
  primer
gtaaaacgacggccagtccaaactaatgcatctaaagttcagg

SEQ ID NO: 74184 - DNA, 22 bp, Artificial Sequence
  primer
gttccagcctctaggcatttag

SEQ ID NO: 74185 - DNA, 20 bp, Artificial Sequence
  primer
ggcaggaatgagatgcatga

SEQ ID NO: 74186 - DNA, 38 bp, Artificial Sequence
  primer
gtaaaacgacggccagtgaccaacagacctcattgctg

SEQ ID NO: 74187 - DNA, 21 bp, Artificial Sequence
  primer
agatgctgctctggagctttc

SEQ ID NO: 74188 - DNA, 38 bp, Artificial Sequence
  primer
gtaaaacgacggccagtgaaggctgtagcttcccaaac

SEQ ID NO: 74189 - DNA, 38 bp, Artificial Sequence
  primer
gtaaaacgacggccagtggaggtttgtagacagcccag

SEQ ID NO: 74190 - DNA, 21 bp, Artificial Sequence
  primer
gctggaggtttgtagacagcc

SEQ ID NO: 74191 - DNA, 37 bp, Artificial Sequence
  primer
gtaaaacgacggccagtgagcccaggagtttgaggag

SEQ ID NO: 74192 - DNA, 21 bp, Artificial Sequence
  primer
tgccacagagaaggttcttcc

SEQ ID NO: 74193 - DNA, 27 bp, Artificial Sequence
  primer
gctatctacttgttctttacttcagcc

SEQ ID NO: 74194 - DNA, 40 bp, Artificial Sequence
  primer
gtaaaacgacggccagtttgttctccaacagtatgcattg

SEQ ID NO: 74195 - DNA, 21 bp, Artificial Sequence
  primer
cgaggatggattgaaggtagg

SEQ ID NO: 74196 - DNA, 39 bp, Artificial Sequence
  primer
gtaaaacgacggccagttgaaacagattctttccattgc

SEQ ID NO: 74197 - DNA, 38 bp, Artificial Sequence
  primer
gtaaaacgacggccagtggtaactgtgcttccgaatcc

SEQ ID NO: 74198 - DNA, 39 bp, Artificial Sequence
  primer
gtaaaacgacggccagtcaaactcccactgattgacagg

SEQ ID NO: 74199 - DNA, 41 bp, Artificial Sequence
  primer
gtaaaacgacggccagtccaaagctgccataattaccatag

SEQ ID NO: 74200 - DNA, 39 bp, Artificial Sequence
  primer
gtaaaacgacggccagtcccaaacttgaatttgttagcc

SEQ ID NO: 74201 - DNA, 23 bp, Artificial Sequence
  primer
tgaacattaagaagccattggtc

SEQ ID NO: 74202 - DNA, 21 bp, Artificial Sequence
  primer
aaattatgttccacatgccca

SEQ ID NO: 74203 - DNA, 18 bp, Artificial Sequence
  primer
gcccagcctggtacattg

SEQ ID NO: 74204 - DNA, 21 bp, Artificial Sequence
  primer
aagtacatcacccttcccgtg

SEQ ID NO: 74205 - DNA, 46 bp, Artificial Sequence
  primer
gtaaaacgacggccagttagatacaataagtcaactcttctccttg

SEQ ID NO: 74206 - DNA, 44 bp, Artificial Sequence
  primer
gtaaaacgacggccagtggtagctacactgtaatcctgttgaag

SEQ ID NO: 74207 - DNA, 26 bp, Artificial Sequence
  primer
gaagcatagcaaataattgcattaaa

SEQ ID NO: 74208 - DNA, 23 bp, Artificial Sequence
  primer
tgaggcacttatggatttaaggc

SEQ ID NO: 74209 - DNA, 22 bp, Artificial Sequence
  primer
ggaaagaacttgtggtcactgg

SEQ ID NO: 74210 - DNA, 38 bp, Artificial Sequence
  primer
gtaaaacgacggccagtaggaggctccaccttcctaac

SEQ ID NO: 74211 - DNA, 25 bp, Artificial Sequence
  primer
tgagttaattggtcctcagtgaatc

SEQ ID NO: 74212 - DNA, 23 bp, Artificial Sequence
  primer
tttgaacatggcttcagtaaatg

SEQ ID NO: 74213 - DNA, 38 bp, Artificial Sequence
  primer
gtaaaacgacggccagttagcatcagaaccactccagc

SEQ ID NO: 74214 - DNA, 21 bp, Artificial Sequence
  primer
tgactttccgctatttccttg

SEQ ID NO: 74215 - DNA, 26 bp, Artificial Sequence
  primer
tcaagagcttactcatgcatctttag

SEQ ID NO: 74216 - DNA, 42 bp, Artificial Sequence
  primer
gtaaaacgacggccagtttccctaaatttgatacagaaagca

SEQ ID NO: 74217 - DNA, 22 bp, Artificial Sequence
  primer
cacctgccgatgttctaaagac

SEQ ID NO: 74218 - DNA, 41 bp, Artificial Sequence
  primer
gtaaaacgacggccagtgtaggcaaattcaggatagtaggc

SEQ ID NO: 74219 - DNA, 21 bp, Artificial Sequence
  primer
actcctgttgtcctctcctcc

SEQ ID NO: 74220 - DNA, 22 bp, Artificial Sequence
  primer
caccacagcaacacacacatag

SEQ ID NO: 74221 - DNA, 20 bp, Artificial Sequence
  primer
catgtgtctccagcctttgg

SEQ ID NO: 74222 - DNA, 21 bp, Artificial Sequence
  primer
cccacatccaccttctatcac

SEQ ID NO: 74223 - DNA, 21 bp, Artificial Sequence
  primer
ctgctccttactgtccatccg

SEQ ID NO: 74224 - DNA, 20 bp, Artificial Sequence
  primer
ctccttctgggctgtgtgtc

SEQ ID NO: 74225 - DNA, 20 bp, Artificial Sequence
  primer
gggttgataagaaggccagg

SEQ ID NO: 74226 - DNA, 21 bp, Artificial Sequence
  primer
tgaaaggaagcaggtgtatgg

SEQ ID NO: 74227 - DNA, 38 bp, Artificial Sequence
  primer
gtaaaacgacggccagtccctagggtacctctctcagg

SEQ ID NO: 74228 - DNA, 38 bp, Artificial Sequence
  primer
gtaaaacgacggccagtgttcccatagctttgtttccc

SEQ ID NO: 74229 - DNA, 21 bp, Artificial Sequence
  primer
gacacctccaggacagctagg

SEQ ID NO: 74230 - DNA, 36 bp, Artificial Sequence
  primer
gtaaaacgacggccagtcctccctacccaggtcctc

SEQ ID NO: 74231 - DNA, 37 bp, Artificial Sequence
  primer
gtaaaacgacggccagtcactccaaggagggaggttc

SEQ ID NO: 74232 - DNA, 21 bp, Artificial Sequence
  primer
ctctaggacggtgaatctcgg

SEQ ID NO: 74233 - DNA, 19 bp, Artificial Sequence
  primer
actctggccttgcaaagtg

SEQ ID NO: 74234 - DNA, 38 bp, Artificial Sequence
  primer
gtaaaacgacggccagtccaacatgacagatcactggg

SEQ ID NO: 74235 - DNA, 21 bp, Artificial Sequence
  primer
tcagcttcctaacatcatggg

SEQ ID NO: 74236 - DNA, 20 bp, Artificial Sequence
  primer
agatattctgcgtggcctgg

SEQ ID NO: 74237 - DNA, 21 bp, Artificial Sequence
  primer
gaatgctgggaagtagggtcc

SEQ ID NO: 74238 - DNA, 38 bp, Artificial Sequence
  primer
gtaaaacgacggccagttacctgcagcagagacaccag

SEQ ID NO: 74239 - DNA, 21 bp, Artificial Sequence
  primer
ataatttcaccagagctgggc

SEQ ID NO: 74240 - DNA, 23 bp, Artificial Sequence
  primer
tttcccaagtaactcctctttgc

SEQ ID NO: 74241 - DNA, 22 bp, Artificial Sequence
  primer
ccttattgcagatcttggcttc

SEQ ID NO: 74242 - DNA, 21 bp, Artificial Sequence
  primer
gctgcttagacctgttgaccc

SEQ ID NO: 74243 - DNA, 22 bp, Artificial Sequence
  primer
aatgtcttctgcaaattctggg

SEQ ID NO: 74244 - DNA, 38 bp, Artificial Sequence
  primer
gtaaaacgacggccagtgccaagaaagtaatccgggac

SEQ ID NO: 74245 - DNA, 22 bp, Artificial Sequence
  primer
tttccagtgccatgatatttcc

SEQ ID NO: 74246 - DNA, 38 bp, Artificial Sequence
  primer
gtaaaacgacggccagtatggcgatttgagggagaata

SEQ ID NO: 74247 - DNA, 38 bp, Artificial Sequence
  primer
gtaaaacgacggccagttatccaagggtcccacaagtc

SEQ ID NO: 74248 - DNA, 21 bp, Artificial Sequence
  primer
aattgcccaggtgctgagtag

SEQ ID NO: 74249 - DNA, 38 bp, Artificial Sequence
  primer
gtaaaacgacggccagtctaatgcaggcatcttagccc

SEQ ID NO: 74250 - DNA, 21 bp, Artificial Sequence
  primer
cagctgaatttctgatgcagg

SEQ ID NO: 74251 - DNA, 21 bp, Artificial Sequence
  primer
gccagaacaattgggctaatc

SEQ ID NO: 74252 - DNA, 37 bp, Artificial Sequence
  primer
gtaaaacgacggccagtattctggcagactccatccc

SEQ ID NO: 74253 - DNA, 38 bp, Artificial Sequence
  primer
gtaaaacgacggccagttagaagccacacctcccaaac

SEQ ID NO: 74254 - DNA, 21 bp, Artificial Sequence
  primer
cagacacgactaccatgtcgc

SEQ ID NO: 74255 - DNA, 21 bp, Artificial Sequence
  primer
gccactctgtcatcattctgc

SEQ ID NO: 74256 - DNA, 38 bp, Artificial Sequence
  primer
gtaaaacgacggccagtatgctaacgtcaccctcacag

SEQ ID NO: 74257 - DNA, 21 bp, Artificial Sequence
  primer
ccgccttggtgtcatcataag

SEQ ID NO: 74258 - DNA, 20 bp, Artificial Sequence
  primer
agtctggataccagccaggg

SEQ ID NO: 74259 - DNA, 21 bp, Artificial Sequence
  primer
gcacagggcatcttctgttac

SEQ ID NO: 74260 - DNA, 37 bp, Artificial Sequence
  primer
gtaaaacgacggccagttcacaagtgtgcactgcaag

SEQ ID NO: 74261 - DNA, 22 bp, Artificial Sequence
  primer
tgcctcatgaagagattgagag

SEQ ID NO: 74262 - DNA, 24 bp, Artificial Sequence
  primer
tgtgaactcattgtctcagtttgg

SEQ ID NO: 74263 - DNA, 22 bp, Artificial Sequence
  primer
ccaagcttcaggcttctctttc

SEQ ID NO: 74264 - DNA, 24 bp, Artificial Sequence
  primer
tgtgaataactggaacagacttcg

SEQ ID NO: 74265 - DNA, 38 bp, Artificial Sequence
  primer
gtaaaacgacggccagtgatcagtcaggattcttgccc

SEQ ID NO: 74266 - DNA, 44 bp, Artificial Sequence
  primer
gtaaaacgacggccagtaaattatttcataaacccaggtctgtt

SEQ ID NO: 74267 - DNA, 27 bp, Artificial Sequence
  primer
acaacacatttatacattgacaaggag

SEQ ID NO: 74268 - DNA, 23 bp, Artificial Sequence
  primer
ttcctgttaggaacacaagttgc

SEQ ID NO: 74269 - DNA, 21 bp, Artificial Sequence
  primer
aggtcaagttgcttaccaccc

SEQ ID NO: 74270 - DNA, 38 bp, Artificial Sequence
  primer
gtaaaacgacggccagttaaaggaagacccacgtgatg

SEQ ID NO: 74271 - DNA, 38 bp, Artificial Sequence
  primer
gtaaaacgacggccagtacacctggcctcaagaacatc

SEQ ID NO: 74272 - DNA, 25 bp, Artificial Sequence
  primer
gtctttcttattgggtgacagtttc

SEQ ID NO: 74273 - DNA, 20 bp, Artificial Sequence
  primer
aaacaacaacccgctgctac

SEQ ID NO: 74274 - DNA, 21 bp, Artificial Sequence
  primer
caggcaggattagccagagtc

SEQ ID NO: 74275 - DNA, 38 bp, Artificial Sequence
  primer
gtaaaacgacggccagtttgctatccacccactaaggc

SEQ ID NO: 74276 - DNA, 39 bp, Artificial Sequence
  primer
gtaaaacgacggccagttgtaccaactgaaggaggaagg

SEQ ID NO: 74277 - DNA, 38 bp, Artificial Sequence
  primer
gtaaaacgacggccagtcatggcacaatagcaatcagg

SEQ ID NO: 74278 - DNA, 39 bp, Artificial Sequence
  primer
gtaaaacgacggccagttcagagcaaagtttggataggg

SEQ ID NO: 74279 - DNA, 21 bp, Artificial Sequence
  primer
gagactggaaatatcgggagc

SEQ ID NO: 74280 - DNA, 38 bp, Artificial Sequence
  primer
gtaaaacgacggccagtttctaggaggcagctgtaggc

SEQ ID NO: 74281 - DNA, 21 bp, Artificial Sequence
  primer
caaagcaggttccctttcctc

SEQ ID NO: 74282 - DNA, 39 bp, Artificial Sequence
  primer
gtaaaacgacggccagtgcccaagataattcttccaatg

SEQ ID NO: 74283 - DNA, 21 bp, Artificial Sequence
  primer
gtgaggataagctgggtgagc

SEQ ID NO: 74284 - DNA, 21 bp, Artificial Sequence
  primer
tttgtctgccaagcaactctc

SEQ ID NO: 74285 - DNA, 21 bp, Artificial Sequence
  primer
tcatccatcatttactgcgtg

SEQ ID NO: 74286 - DNA, 21 bp, Artificial Sequence
  primer
acacaaacaagcacaggcaac

SEQ ID NO: 74287 - DNA, 30 bp, Artificial Sequence
  primer
ccattaacaagattatcactagaagctatt

SEQ ID NO: 74288 - DNA, 21 bp, Artificial Sequence
  primer
gaagggtggactcaggatctc

SEQ ID NO: 74289 - DNA, 38 bp, Artificial Sequence
  primer
gtaaaacgacggccagtaaatttgggagtttgcttccc

SEQ ID NO: 74290 - DNA, 21 bp, Artificial Sequence
  primer
acataggatcaaatgctcccg

SEQ ID NO: 74291 - DNA, 37 bp, Artificial Sequence
  primer
gtaaaacgacggccagtcacttgggagccatcatctc

SEQ ID NO: 74292 - DNA, 22 bp, Artificial Sequence
  primer
ggcatacaaatgcagctaaagg

SEQ ID NO: 74293 - DNA, 21 bp, Artificial Sequence
  primer
gaaacacttgcctggcctatc

SEQ ID NO: 74294 - DNA, 38 bp, Artificial Sequence
  primer
gtaaaacgacggccagtttcaagctgaaggtaccaggg

SEQ ID NO: 74295 - DNA, 37 bp, Artificial Sequence
  primer
gtaaaacgacggccagtcctaccaccaccaccagaag

SEQ ID NO: 74296 - DNA, 21 bp, Artificial Sequence
  primer
agagcagggtaaggtgtcagc

SEQ ID NO: 74297 - DNA, 20 bp, Artificial Sequence
  primer
acatgtgctgggtgggtatg

SEQ ID NO: 74298 - DNA, 21 bp, Artificial Sequence
  primer
ggtggacaaatggatcagagg

SEQ ID NO: 74299 - DNA, 21 bp, Artificial Sequence
  primer
ctgaccagaccctggacattc

SEQ ID NO: 74300 - DNA, 21 bp, Artificial Sequence
  primer
tgcaaatgacttcacctccag

SEQ ID NO: 74301 - DNA, 38 bp, Artificial Sequence
  primer
gtaaaacgacggccagtttgggttgggaatgaagtagg

SEQ ID NO: 74302 - DNA, 38 bp, Artificial Sequence
  primer
gtaaaacgacggccagtaacctttagaattcacggccc

SEQ ID NO: 74303 - DNA, 38 bp, Artificial Sequence
  primer
gtaaaacgacggccagtttcctggctctacagctcacc

SEQ ID NO: 74304 - DNA, 21 bp, Artificial Sequence
  primer
gtccaagagactcccacttcc

SEQ ID NO: 74305 - DNA, 21 bp, Artificial Sequence
  primer
cacaagcacagcagctaccag

SEQ ID NO: 74306 - DNA, 38 bp, Artificial Sequence
  primer
gtaaaacgacggccagtatgtgagaatcaacgtgtcgg

SEQ ID NO: 74307 - DNA, 38 bp, Artificial Sequence
  primer
gtaaaacgacggccagttttgaaacctcactccatccc

SEQ ID NO: 74308 - DNA, 21 bp, Artificial Sequence
  primer
gatatgtctgcccaaacccag

SEQ ID NO: 74309 - DNA, 38 bp, Artificial Sequence
  primer
gtaaaacgacggccagtttacagctaatccacctgggc

SEQ ID NO: 74310 - DNA, 21 bp, Artificial Sequence
  primer
tcaaggactgagggaaaggag

SEQ ID NO: 74311 - DNA, 21 bp, Artificial Sequence
  primer
taccacgccaactttgacaag

SEQ ID NO: 74312 - DNA, 38 bp, Artificial Sequence
  primer
gtaaaacgacggccagttcaaccaatcaaaccaaccac

SEQ ID NO: 74313 - DNA, 21 bp, Artificial Sequence
  primer
cgctactgctgggttaaggag

SEQ ID NO: 74314 - DNA, 21 bp, Artificial Sequence
  primer
gaggctgccaaggttctattc

SEQ ID NO: 74315 - DNA, 21 bp, Artificial Sequence
  primer
catcctagagccagacaaggg

SEQ ID NO: 74316 - DNA, 21 bp, Artificial Sequence
  primer
tatcctggctgttctaagcgg

SEQ ID NO: 74317 - DNA, 38 bp, Artificial Sequence
  primer
gtaaaacgacggccagtagataagagcccaacccaacc

SEQ ID NO: 74318 - DNA, 39 bp, Artificial Sequence
  primer
gtaaaacgacggccagtcacaattgcctttcctcacttc

SEQ ID NO: 74319 - DNA, 22 bp, Artificial Sequence
  primer
gcaggaatgaagaggataaagg

SEQ ID NO: 74320 - DNA, 40 bp, Artificial Sequence
  primer
gtaaaacgacggccagtaaactaagttccctcaatggtga

SEQ ID NO: 74321 - DNA, 39 bp, Artificial Sequence
  primer
gtaaaacgacggccagtggaaacctcagcaaaggatagg

SEQ ID NO: 74322 - DNA, 21 bp, Artificial Sequence
  primer
cacccaggctgacacataaac

SEQ ID NO: 74323 - DNA, 38 bp, Artificial Sequence
  primer
gtaaaacgacggccagttgttggtgcgagacttcatct

SEQ ID NO: 74324 - DNA, 44 bp, Artificial Sequence
  primer
gtaaaacgacggccagtaaattcagaactgtcataatttgtacg

SEQ ID NO: 74325 - DNA, 39 bp, Artificial Sequence
  primer
gtaaaacgacggccagtggaataaagaatgctcactggc

SEQ ID NO: 74326 - DNA, 38 bp, Artificial Sequence
  primer
gtaaaacgacggccagtctcgattagccatctgcaaac

SEQ ID NO: 74327 - DNA, 21 bp, Artificial Sequence
  primer
agatgaaggccaaataatccc

SEQ ID NO: 74328 - DNA, 21 bp, Artificial Sequence
  primer
taatgcaagcttctcccacag

SEQ ID NO: 74329 - DNA, 22 bp, Artificial Sequence
  primer
cattaccctgatacggtccttg

SEQ ID NO: 74330 - DNA, 21 bp, Artificial Sequence
  primer
tgccaacagtgaaactccatc

SEQ ID NO: 74331 - DNA, 38 bp, Artificial Sequence
  primer
gtaaaacgacggccagtctatagggagctgagctgggt

SEQ ID NO: 74332 - DNA, 21 bp, Artificial Sequence
  primer
gacttgacaaggcagaagcac

SEQ ID NO: 74333 - DNA, 38 bp, Artificial Sequence
  primer
gtaaaacgacggccagtactcatgcagacacatccaca

SEQ ID NO: 74334 - DNA, 21 bp, Artificial Sequence
  primer
tgggtttcaggtgtggaacta

SEQ ID NO: 74335 - DNA, 38 bp, Artificial Sequence
  primer
gtaaaacgacggccagtataacctcagggcctgtcctc

SEQ ID NO: 74336 - DNA, 21 bp, Artificial Sequence
  primer
ctactgtggcgcctgacatac

SEQ ID NO: 74337 - DNA, 21 bp, Artificial Sequence
  primer
ctgttgctgtctctcgagtcc

SEQ ID NO: 74338 - DNA, 21 bp, Artificial Sequence
  primer
acaatatgggacgacgagagg

SEQ ID NO: 74339 - DNA, 21 bp, Artificial Sequence
  primer
cctgagagactgaggcactgg

SEQ ID NO: 74340 - DNA, 21 bp, Artificial Sequence
  primer
cttcagaccaacaagcgaagg

SEQ ID NO: 74341 - DNA, 38 bp, Artificial Sequence
  primer
gtaaaacgacggccagtacgtaggtcaccggctctaag

SEQ ID NO: 74342 - DNA, 22 bp, Artificial Sequence
  primer
cacttgtgtgtgtaggaggcag

SEQ ID NO: 74343 - DNA, 38 bp, Artificial Sequence
  primer
gtaaaacgacggccagtggaaggatggaggttcacaac

SEQ ID NO: 74344 - DNA, 20 bp, Artificial Sequence
  primer
gtgtaagccctgggaaggag

SEQ ID NO: 74345 - DNA, 38 bp, Artificial Sequence
  primer
gtaaaacgacggccagtatatgctcagctgtgtgcagg

SEQ ID NO: 74346 - DNA, 38 bp, Artificial Sequence
  primer
gtaaaacgacggccagtgttccagcctcaacaagaagc

SEQ ID NO: 74347 - DNA, 38 bp, Artificial Sequence
  primer
gtaaaacgacggccagtggttactggtgccttacctgg

SEQ ID NO: 74348 - DNA, 21 bp, Artificial Sequence
  primer
gaatgtcagggagaagttgcc

SEQ ID NO: 74349 - DNA, 38 bp, Artificial Sequence
  primer
gtaaaacgacggccagtaataacacctcgagccctgtc

SEQ ID NO: 74350 - DNA, 21 bp, Artificial Sequence
  primer
caatggctgaacagcaaagac

SEQ ID NO: 74351 - DNA, 21 bp, Artificial Sequence
  primer
catgttgcaggcttatatccg

SEQ ID NO: 74352 - DNA, 39 bp, Artificial Sequence
  primer
gtaaaacgacggccagtaacactctcaccttcagggatg

SEQ ID NO: 74353 - DNA, 37 bp, Artificial Sequence
  primer
gtaaaacgacggccagtcagtgagtggagaccatgcc

SEQ ID NO: 74354 - DNA, 38 bp, Artificial Sequence
  primer
gtaaaacgacggccagtgcatttctcggacaaacgaac

SEQ ID NO: 74355 - DNA, 37 bp, Artificial Sequence
  primer
gtaaaacgacggccagtgccatgactgagaaagcctc

SEQ ID NO: 74356 - DNA, 40 bp, Artificial Sequence
  primer
gtaaaacgacggccagtcatcaagcacgttctgacttagg

SEQ ID NO: 74357 - DNA, 21 bp, Artificial Sequence
  primer
gaaatttgcacctgtgtggag

SEQ ID NO: 74358 - DNA, 39 bp, Artificial Sequence
  primer
gtaaaacgacggccagttcgcatttcaacatcttggtag

SEQ ID NO: 74359 - DNA, 37 bp, Artificial Sequence
  primer
gtaaaacgacggccagtaatggctttaagcacagggc

SEQ ID NO: 74360 - DNA, 21 bp, Artificial Sequence
  primer
actttctatgctcactggccc

SEQ ID NO: 74361 - DNA, 21 bp, Artificial Sequence
  primer
aatggagtggagttggtgagg

SEQ ID NO: 74362 - DNA, 38 bp, Artificial Sequence
  primer
gtaaaacgacggccagtttgcctttatcaaccctgacc

SEQ ID NO: 74363 - DNA, 38 bp, Artificial Sequence
  primer
gtaaaacgacggccagtgaagtgagagtccgcaacgtc

SEQ ID NO: 74364 - DNA, 21 bp, Artificial Sequence
  primer
tggctgagaaacacagtcagc

SEQ ID NO: 74365 - DNA, 38 bp, Artificial Sequence
  primer
gtaaaacgacggccagtcactggctctattgcatcagg

SEQ ID NO: 74366 - DNA, 38 bp, Artificial Sequence
  primer
gtaaaacgacggccagtccctatggtcccaaatttcac

SEQ ID NO: 74367 - DNA, 38 bp, Artificial Sequence
  primer
gtaaaacgacggccagtgctgaagaagagtcctttggg

SEQ ID NO: 74368 - DNA, 21 bp, Artificial Sequence
  primer
gagaagatgcagttgtccgag

SEQ ID NO: 74369 - DNA, 21 bp, Artificial Sequence
  primer
gccagggtagagccattgtag

SEQ ID NO: 74370 - DNA, 21 bp, Artificial Sequence
  primer
tgaccagagggaggataccac

SEQ ID NO: 74371 - DNA, 38 bp, Artificial Sequence
  primer
gtaaaacgacggccagtcctgggcttcctcaaatacac

SEQ ID NO: 74372 - DNA, 38 bp, Artificial Sequence
  primer
gtaaaacgacggccagtgaagtggaaggcatgtgtgtg

SEQ ID NO: 74373 - DNA, 38 bp, Artificial Sequence
  primer
gtaaaacgacggccagttcagcttgacctgggagattc

SEQ ID NO: 74374 - DNA, 21 bp, Artificial Sequence
  primer
gaagggagtttgtctccaagg

SEQ ID NO: 74375 - DNA, 38 bp, Artificial Sequence
  primer
gtaaaacgacggccagtaaactccatggcctctgaatc

SEQ ID NO: 74376 - DNA, 21 bp, Artificial Sequence
  primer
cgtgtgagaggaacattgagg

SEQ ID NO: 74377 - DNA, 21 bp, Artificial Sequence
  primer
gaagacacagttgtccgaggg

SEQ ID NO: 74378 - DNA, 21 bp, Artificial Sequence
  primer
aagcaacagtggtggagaagc

SEQ ID NO: 74379 - DNA, 38 bp, Artificial Sequence
  primer
gtaaaacgacggccagtgtggtcattgtcaccaggttc

SEQ ID NO: 74380 - DNA, 38 bp, Artificial Sequence
  primer
gtaaaacgacggccagtccaaagcctccatccacatag

SEQ ID NO: 74381 - DNA, 21 bp, Artificial Sequence
  primer
aggcatcacgtattgtcttgg

SEQ ID NO: 74382 - DNA, 21 bp, Artificial Sequence
  primer
cctgctacatccagatccacc

SEQ ID NO: 74383 - DNA, 38 bp, Artificial Sequence
  primer
gtaaaacgacggccagtactcagcagccaactctctcc

SEQ ID NO: 74384 - DNA, 19 bp, Artificial Sequence
  primer
gagctgagtgtccgccaac

SEQ ID NO: 74385 - DNA, 21 bp, Artificial Sequence
  primer
gaagtgcagaaggcaggaatc

SEQ ID NO: 74386 - DNA, 20 bp, Artificial Sequence
  primer
acaggaaagagggaaccagg

SEQ ID NO: 74387 - DNA, 22 bp, Artificial Sequence
  primer
aatacaagcaacttgagggctg

SEQ ID NO: 74388 - DNA, 21 bp, Artificial Sequence
  primer
ggataagtagggagggccttg

SEQ ID NO: 74389 - DNA, 37 bp, Artificial Sequence
  primer
gtaaaacgacggccagtcacaggcatggctgaaagag

SEQ ID NO: 74390 - DNA, 38 bp, Artificial Sequence
  primer
gtaaaacgacggccagtcaccaaacccagcctagtttc

SEQ ID NO: 74391 - DNA, 22 bp, Artificial Sequence
  primer
tgcatgcaaatacaaccttgac

SEQ ID NO: 74392 - DNA, 21 bp, Artificial Sequence
  primer
aggcaggagagctgtgtcttc

SEQ ID NO: 74393 - DNA, 39 bp, Artificial Sequence
  primer
gtaaaacgacggccagtcgaaagccttgcttctgttaag

SEQ ID NO: 74394 - DNA, 27 bp, Artificial Sequence
  primer
tccaaagctgtgagaatttctatttac

SEQ ID NO: 74395 - DNA, 39 bp, Artificial Sequence
  primer
gtaaaacgacggccagtctgctttgcataggagatgagg

SEQ ID NO: 74396 - DNA, 38 bp, Artificial Sequence
  primer
gtaaaacgacggccagtgaccctggctaaacaccaaag

SEQ ID NO: 74397 - DNA, 38 bp, Artificial Sequence
  primer
gtaaaacgacggccagtgaaagatttgtccttccctcc

SEQ ID NO: 74398 - DNA, 21 bp, Artificial Sequence
  primer
agacctcagccagctctcctc

SEQ ID NO: 74399 - DNA, 22 bp, Artificial Sequence
  primer
gggtctccatgatgttcgttag

SEQ ID NO: 74400 - DNA, 18 bp, Artificial Sequence
  primer
tgggcttcacacctgctc

SEQ ID NO: 74401 - DNA, 20 bp, Artificial Sequence
  primer
aaggcttctgctgtctgtgg

SEQ ID NO: 74402 - DNA, 25 bp, Artificial Sequence
  primer
tcatatcgccttagaaacatttcag

SEQ ID NO: 74403 - DNA, 38 bp, Artificial Sequence
  primer
gtaaaacgacggccagtcctccggagtctctgctattc

SEQ ID NO: 74404 - DNA, 35 bp, Artificial Sequence
  primer
gtaaaacgacggccagtggaggtctgagtggtcgc

SEQ ID NO: 74405 - DNA, 38 bp, Artificial Sequence
  primer
gtaaaacgacggccagtcaaagacacacatggcaggag

SEQ ID NO: 74406 - DNA, 20 bp, Artificial Sequence
  primer
accacgcccagcctaaataa

SEQ ID NO: 74407 - DNA, 21 bp, Artificial Sequence
  primer
tggatcaaagctggacaacag

SEQ ID NO: 74408 - DNA, 25 bp, Artificial Sequence
  primer
gggaaatgcacatttattaagagac

SEQ ID NO: 74409 - DNA, 44 bp, Artificial Sequence
  primer
gtaaaacgacggccagtttgtataattctttaatttgcaacaga

SEQ ID NO: 74410 - DNA, 23 bp, Artificial Sequence
  primer
cctctcactaaacggaagatgac

SEQ ID NO: 74411 - DNA, 38 bp, Artificial Sequence
  primer
gtaaaacgacggccagttgctcatccataccattctcc

SEQ ID NO: 74412 - DNA, 25 bp, Artificial Sequence
  primer
aactttggattcaatggtttcatac

SEQ ID NO: 74413 - DNA, 38 bp, Artificial Sequence
  primer
gtaaaacgacggccagtgtcccagctgtgcagactttc

SEQ ID NO: 74414 - DNA, 21 bp, Artificial Sequence
  primer
cacttgtgattggctagtggc

SEQ ID NO: 74415 - DNA, 22 bp, Artificial Sequence
  primer
cagatcttacggagaaaggctc

SEQ ID NO: 74416 - DNA, 23 bp, Artificial Sequence
  primer
gggattaactacaaagaggcagg

SEQ ID NO: 74417 - DNA, 39 bp, Artificial Sequence
  primer
gtaaaacgacggccagtggaaatgtacctgataggtcgc

SEQ ID NO: 74418 - DNA, 22 bp, Artificial Sequence
  primer
cctcctcaccaagtaaacaacg

SEQ ID NO: 74419 - DNA, 21 bp, Artificial Sequence
  primer
cctactgccctgttctaagcc

SEQ ID NO: 74420 - DNA, 21 bp, Artificial Sequence
  primer
gtcctgaccaagaacatgctg

SEQ ID NO: 74421 - DNA, 21 bp, Artificial Sequence
  primer
ttggttatctgaaagggtccg

SEQ ID NO: 74422 - DNA, 37 bp, Artificial Sequence
  primer
gtaaaacgacggccagtaggaggcaagctcctttgtc

SEQ ID NO: 74423 - DNA, 21 bp, Artificial Sequence
  primer
tgttacgggagaaagccagtc

SEQ ID NO: 74424 - DNA, 20 bp, Artificial Sequence
  primer
aaattggttcttctgacggc

SEQ ID NO: 74425 - DNA, 22 bp, Artificial Sequence
  primer
ttgttcatcattgtacgccaag

SEQ ID NO: 74426 - DNA, 21 bp, Artificial Sequence
  primer
ccaatatgccaggcttcactc

SEQ ID NO: 74427 - DNA, 18 bp, Artificial Sequence
  primer
cccgggcaacagagtgag

SEQ ID NO: 74428 - DNA, 21 bp, Artificial Sequence
  primer
gaatgaggttaagtgccctgc

SEQ ID NO: 74429 - DNA, 38 bp, Artificial Sequence
  primer
gtaaaacgacggccagtatggagtgagaatgggagagg

SEQ ID NO: 74430 - DNA, 21 bp, Artificial Sequence
  primer
agagaggcctcacctatttgc

SEQ ID NO: 74431 - DNA, 21 bp, Artificial Sequence
  primer
gctccaataagaggcaagagg

SEQ ID NO: 74432 - DNA, 36 bp, Artificial Sequence
  primer
gtaaaacgacggccagttttctgcttgtctgctggg

SEQ ID NO: 74433 - DNA, 21 bp, Artificial Sequence
  primer
ggattaagcaaggctttggag

SEQ ID NO: 74434 - DNA, 38 bp, Artificial Sequence
  primer
gtaaaacgacggccagttttcaagactggatttcctgc

SEQ ID NO: 74435 - DNA, 21 bp, Artificial Sequence
  primer
tcccacataaacacttcaccc

SEQ ID NO: 74436 - DNA, 25 bp, Artificial Sequence
  primer
cccagccattaaatagaaaggtatg

SEQ ID NO: 74437 - DNA, 21 bp, Artificial Sequence
  primer
atttggtagggagtcattgcc

SEQ ID NO: 74438 - DNA, 21 bp, Artificial Sequence
  primer
gagacagtgggaatgtccagg

SEQ ID NO: 74439 - DNA, 38 bp, Artificial Sequence
  primer
gtaaaacgacggccagttggtctgcattggatatcacc

SEQ ID NO: 74440 - DNA, 38 bp, Artificial Sequence
  primer
gtaaaacgacggccagtctggagtctttcatggtgtgc

SEQ ID NO: 74441 - DNA, 38 bp, Artificial Sequence
  primer
gtaaaacgacggccagtcttgtattgtgggcagcagag

SEQ ID NO: 74442 - DNA, 21 bp, Artificial Sequence
  primer
catttgtgaatgaggtgcctg

SEQ ID NO: 74443 - DNA, 19 bp, Artificial Sequence
  primer
cctgggttcaagcaatccc

SEQ ID NO: 74444 - DNA, 38 bp, Artificial Sequence
  primer
gtaaaacgacggccagttaatcttggcccaggttcttc

SEQ ID NO: 74445 - DNA, 38 bp, Artificial Sequence
  primer
gtaaaacgacggccagtgagtagccaaagactgccctg

SEQ ID NO: 74446 - DNA, 38 bp, Artificial Sequence
  primer
gtaaaacgacggccagtctttgggcaccaggaagtaac

SEQ ID NO: 74447 - DNA, 21 bp, Artificial Sequence
  primer
tgggtctcaaattcctcaacc

SEQ ID NO: 74448 - DNA, 38 bp, Artificial Sequence
  primer
gtaaaacgacggccagttaacaattgggcattgcaacc

SEQ ID NO: 74449 - DNA, 21 bp, Artificial Sequence
  primer
ctcacccagcttcctatcctg

SEQ ID NO: 74450 - DNA, 38 bp, Artificial Sequence
  primer
gtaaaacgacggccagttgctgtaccactgactgaggg

SEQ ID NO: 74451 - DNA, 21 bp, Artificial Sequence
  primer
tacctttgcaaatgccctttc

SEQ ID NO: 74452 - DNA, 39 bp, Artificial Sequence
  primer
gtaaaacgacggccagttgcaagggaactgaaactcttc

SEQ ID NO: 74453 - DNA, 21 bp, Artificial Sequence
  primer
acgatgctgccactcactaag

SEQ ID NO: 74454 - DNA, 38 bp, Artificial Sequence
  primer
gtaaaacgacggccagtttgagctctgcagttggtctg

SEQ ID NO: 74455 - DNA, 38 bp, Artificial Sequence
  primer
gtaaaacgacggccagtaatcccaaacagccaagagag

SEQ ID NO: 74456 - DNA, 35 bp, Artificial Sequence
  primer
gtaaaacgacggccagtagccacagcagtgcgttc

SEQ ID NO: 74457 - DNA, 39 bp, Artificial Sequence
  primer
gtaaaacgacggccagttgggatgatttctgaactgtgg

SEQ ID NO: 74458 - DNA, 23 bp, Artificial Sequence
  primer
tggagctaatgttcttccctttc

SEQ ID NO: 74459 - DNA, 38 bp, Artificial Sequence
  primer
gtaaaacgacggccagttcactccataaccacctgacc

SEQ ID NO: 74460 - DNA, 21 bp, Artificial Sequence
  primer
aggtctggactccatccagtg

SEQ ID NO: 74461 - DNA, 39 bp, Artificial Sequence
  primer
gtaaaacgacggccagtggtgaagagtcaagccaatgtc

SEQ ID NO: 74462 - DNA, 21 bp, Artificial Sequence
  primer
gtgtctgagggtgggttatgg

SEQ ID NO: 74463 - DNA, 39 bp, Artificial Sequence
  primer
gtaaaacgacggccagtggtgacaggtcagtttcctttg

SEQ ID NO: 74464 - DNA, 38 bp, Artificial Sequence
  primer
gtaaaacgacggccagtatggtgagactggtcacctgg

SEQ ID NO: 74465 - DNA, 21 bp, Artificial Sequence
  primer
cagcaactcgaaggcctaaag

SEQ ID NO: 74466 - DNA, 38 bp, Artificial Sequence
  primer
gtaaaacgacggccagtgcttgtggccaagaagtaagg

SEQ ID NO: 74467 - DNA, 21 bp, Artificial Sequence
  primer
gagggtttcatggcagtatgg

SEQ ID NO: 74468 - DNA, 21 bp, Artificial Sequence
  primer
cccacccacaagatacctgtc

SEQ ID NO: 74469 - DNA, 18 bp, Artificial Sequence
  primer
gcctgagtgcctgtgctg

SEQ ID NO: 74470 - DNA, 21 bp, Artificial Sequence
  primer
atcacctccaagggtaaatgg

SEQ ID NO: 74471 - DNA, 38 bp, Artificial Sequence
  primer
gtaaaacgacggccagtacatcagagaagggttgtggg

SEQ ID NO: 74472 - DNA, 21 bp, Artificial Sequence
  primer
cttagctcctcttcctcggtg

SEQ ID NO: 74473 - DNA, 37 bp, Artificial Sequence
  primer
gtaaaacgacggccagtccagaacagactccgagtgg

SEQ ID NO: 74474 - DNA, 38 bp, Artificial Sequence
  primer
gtaaaacgacggccagtcgcagacacgaccttctactg

SEQ ID NO: 74475 - DNA, 38 bp, Artificial Sequence
  primer
gtaaaacgacggccagtcatctggaccttggtaaaggc

SEQ ID NO: 74476 - DNA, 21 bp, Artificial Sequence
  primer
ctcttggcgacagtgaagatg

SEQ ID NO: 74477 - DNA, 19 bp, Artificial Sequence
  primer
cttgaagggacgcttggac

SEQ ID NO: 74478 - DNA, 21 bp, Artificial Sequence
  primer
cagggtgcagttaggaagtgg

SEQ ID NO: 74479 - DNA, 37 bp, Artificial Sequence
  primer
gtaaaacgacggccagtgaggaggaagatgtgctgcc

SEQ ID NO: 74480 - DNA, 21 bp, Artificial Sequence
  primer
gcaatatcatgcctttccagg

SEQ ID NO: 74481 - DNA, 37 bp, Artificial Sequence
  primer
gtaaaacgacggccagttggcaggtgcctataatccc

SEQ ID NO: 74482 - DNA, 25 bp, Artificial Sequence
  primer
aatctgttcataatcaccttgctgt

SEQ ID NO: 74483 - DNA, 38 bp, Artificial Sequence
  primer
gtaaaacgacggccagtagaaacgcgactccactgttc

SEQ ID NO: 74484 - DNA, 20 bp, Artificial Sequence
  primer
cctaaatctggcttccaggc

SEQ ID NO: 74485 - DNA, 22 bp, Artificial Sequence
  primer
caaggccatgaataatttcctc

SEQ ID NO: 74486 - DNA, 39 bp, Artificial Sequence
  primer
gtaaaacgacggccagtgcctaagtgacagagcaagacc

SEQ ID NO: 74487 - DNA, 26 bp, Artificial Sequence
  primer
aaacatattcacaggtaacaagaggc

SEQ ID NO: 74488 - DNA, 24 bp, Artificial Sequence
  primer
tccaaatggaatacaattctgaag

SEQ ID NO: 74489 - DNA, 25 bp, Artificial Sequence
  primer
tttgctgactcctgatttacagaac

SEQ ID NO: 74490 - DNA, 21 bp, Artificial Sequence
  primer
acaaagtatcacatggcagcg

SEQ ID NO: 74491 - DNA, 19 bp, Artificial Sequence
  primer
ctgagactgcaggcgtgtg

SEQ ID NO: 74492 - DNA, 38 bp, Artificial Sequence
  primer
gtaaaacgacggccagtattcctccatgctgctttagg

SEQ ID NO: 74493 - DNA, 21 bp, Artificial Sequence
  primer
gccacttgtaccaaaggttgc

SEQ ID NO: 74494 - DNA, 36 bp, Artificial Sequence
  primer
gtaaaacgacggccagtcatctcagcctcccaaagc

SEQ ID NO: 74495 - DNA, 22 bp, Artificial Sequence
  primer
gagagggaacaaagtgctgatg

SEQ ID NO: 74496 - DNA, 42 bp, Artificial Sequence
  primer
gtaaaacgacggccagtcgaggaacaattaataaagcacaag

SEQ ID NO: 74497 - DNA, 39 bp, Artificial Sequence
  primer
gtaaaacgacggccagtcccaggaacattaaagggactc

SEQ ID NO: 74498 - DNA, 21 bp, Artificial Sequence
  primer
tgattcacgtgctggaaagtc

SEQ ID NO: 74499 - DNA, 21 bp, Artificial Sequence
  primer
actgtatgctgtgatggaggg

SEQ ID NO: 74500 - DNA, 21 bp, Artificial Sequence
  primer
atgcttccatgaaccataagc

SEQ ID NO: 74501 - DNA, 38 bp, Artificial Sequence
  primer
gtaaaacgacggccagtagcaaggaagttagaccaggc

SEQ ID NO: 74502 - DNA, 21 bp, Artificial Sequence
  primer
tcctcagcagttctcttcagc

SEQ ID NO: 74503 - DNA, 39 bp, Artificial Sequence; identical to SEQ ID NO: 74486
  primer

SEQ ID NO: 74504 - DNA, 20 bp, Artificial Sequence
  primer
ccagctgatgaccagtaggg

SEQ ID NO: 74505 - DNA, 21 bp, Artificial Sequence
  primer
gaggacggtcagtcaaacctc

SEQ ID NO: 74506 - DNA, 21 bp, Artificial Sequence
  primer
gaatagcctgcagaggtcagg

SEQ ID NO: 74507 - DNA, 21 bp, Artificial Sequence
  primer
gtgcactacccttctcctgtg

SEQ ID NO: 74508 - DNA, 38 bp, Artificial Sequence
  primer
gtaaaacgacggccagtggagtatcccattgtcaccag

SEQ ID NO: 74509 - DNA, 21 bp, Artificial Sequence
  primer
gaaccagtgttctctgggagg

SEQ ID NO: 74510 - DNA, 21 bp, Artificial Sequence
  primer
cagtgacgagtcatgtgaggg

SEQ ID NO: 74511 - DNA, 38 bp, Artificial Sequence
  primer
gtaaaacgacggccagttaggagggagaaaccagcaag

SEQ ID NO: 74512 - DNA, 37 bp, Artificial Sequence
  primer
gtaaaacgacggccagtaatggatcaggaggctctgg

SEQ ID NO: 74513 - DNA, 21 bp, Artificial Sequence
  primer
ctccagctgctctaaactggc

SEQ ID NO: 74514 - DNA, 21 bp, Artificial Sequence
  primer
gtgtctatgtgccagcgtttg

SEQ ID NO: 74515 - DNA, 21 bp, Artificial Sequence
  primer
gcgcacagagtaggcatgtag

SEQ ID NO: 74516 - DNA, 38 bp, Artificial Sequence
  primer
gtaaaacgacggccagttgcactgtgtaagcagctgtg

SEQ ID NO: 74517 - DNA, 38 bp, Artificial Sequence
  primer
gtaaaacgacggccagtggatacagttagtggccctgg

SEQ ID NO: 74518 - DNA, 22 bp, Artificial Sequence
  primer
gcatgtatgcctggaaagaaac

SEQ ID NO: 74519 - DNA, 21 bp, Artificial Sequence
  primer
aagctctcaccgtggatatgg

SEQ ID NO: 74520 - DNA, 38 bp, Artificial Sequence
  primer
gtaaaacgacggccagtaggtcaagcaggtgtaccagg

SEQ ID NO: 74521 - DNA, 20 bp, Artificial Sequence
  primer
ctcagcccttggcttaggag

SEQ ID NO: 74522 - DNA, 38 bp, Artificial Sequence
  primer
gtaaaacgacggccagtatctcacactgtctcccaccc

SEQ ID NO: 74523 - DNA, 21 bp, Artificial Sequence
  primer
tggtgaaagtggtcgtaggtg

SEQ ID NO: 74524 - DNA, 38 bp, Artificial Sequence
  primer
gtaaaacgacggccagtgctggtagccctcaggtgtag

SEQ ID NO: 74525 - DNA, 38 bp, Artificial Sequence
  primer
gtaaaacgacggccagtaaactgccataactgccaagc

SEQ ID NO: 74526 - DNA, 21 bp, Artificial Sequence
  primer
gtttgggagaaacgaggagtg

SEQ ID NO: 74527 - DNA, 24 bp, Artificial Sequence
  primer
ttgaaggaagccatttatttatgc

SEQ ID NO: 74528 - DNA, 21 bp, Artificial Sequence
  primer
ttataggcatgaaccactggg

SEQ ID NO: 74529 - DNA, 39 bp, Artificial Sequence
  primer
gtaaaacgacggccagtaagaatcaatcacagcctcagc

SEQ ID NO: 74530 - DNA, 38 bp, Artificial Sequence
  primer
gtaaaacgacggccagtatggcgaggtaaagaaacagg

SEQ ID NO: 74531 - DNA, 21 bp, Artificial Sequence
  primer
caagcagcattcatttgaaga

SEQ ID NO: 74532 - DNA, 22 bp, Artificial Sequence
  primer
gaggcagtcttatgaaacacga

SEQ ID NO: 74533 - DNA, 37 bp, Artificial Sequence
  primer
gtaaaacgacggccagtgagatctcgccactgcactc

SEQ ID NO: 74534 - DNA, 25 bp, Artificial Sequence
  primer
tgctcaccataatccagtaacctac

SEQ ID NO: 74535 - DNA, 24 bp, Artificial Sequence
  primer
tcacacctagccttcctattatgg

SEQ ID NO: 74536 - DNA, 38 bp, Artificial Sequence
  primer
gtaaaacgacggccagtctccaggaagtgaggcagatt

SEQ ID NO: 74537 - DNA, 20 bp, Artificial Sequence
  primer
acccagcctaaacacggttg

SEQ ID NO: 74538 - DNA, 20 bp, Artificial Sequence
  primer
tgctgccaatgctgtcatag

SEQ ID NO: 74539 - DNA, 21 bp, Artificial Sequence
  primer
tccagacccttccagagaaag

SEQ ID NO: 74540 - DNA, 39 bp, Artificial Sequence
  primer
gtaaaacgacggccagtccaatggaagggagatctaagg

SEQ ID NO: 74541 - DNA, 38 bp, Artificial Sequence
  primer
gtaaaacgacggccagtcatgtaaatcaacacccgcag

SEQ ID NO: 74542 - DNA, 20 bp, Artificial Sequence
  primer
aactggcaagagctgggaag

SEQ ID NO: 74543 - DNA, 40 bp, Artificial Sequence
  primer
gtaaaacgacggccagttggaagctactcaccttgaacag

SEQ ID NO: 74544 - DNA, 21 bp, Artificial Sequence
  primer
atttcctgcgaaaccagagag

SEQ ID NO: 74545 - DNA, 21 bp, Artificial Sequence
  primer
gctgacagcattctttcttgg

SEQ ID NO: 74546 - DNA, 38 bp, Artificial Sequence
  primer
gtaaaacgacggccagtgcctcaccttagatgcatgac

SEQ ID NO: 74547 - DNA, 24 bp, Artificial Sequence
  primer
tgtcttacccacaaatacagatgc

SEQ ID NO: 74548 - DNA, 38 bp, Artificial Sequence
  primer
gtaaaacgacggccagtataacatgctccagttggcac

SEQ ID NO: 74549 - DNA, 22 bp, Artificial Sequence
  primer
caaactctgcagtaaagtgggc

SEQ ID NO: 74550 - DNA, 21 bp, Artificial Sequence
  primer
agaatcatccaatttgccctc

SEQ ID NO: 74551 - DNA, 21 bp, Artificial Sequence
  primer
gattcagggaagcgaactgtg

SEQ ID NO: 74552 - DNA, 38 bp, Artificial Sequence
  primer
gtaaaacgacggccagtggctcataagccggttaccta

SEQ ID NO: 74553 - DNA, 21 bp, Artificial Sequence
  primer
cacatgtcatcgtgcattgtc

SEQ ID NO: 74554 - DNA, 21 bp, Artificial Sequence
  primer
tctgtagggtggccaggtatg

SEQ ID NO: 74555 - DNA, 21 bp, Artificial Sequence
  primer
aacatgaacacaaatttgccc

SEQ ID NO: 74556 - DNA, 20 bp, Artificial Sequence
  primer
cacatttcaatgagtggccc

SEQ ID NO: 74557 - DNA, 21 bp, Artificial Sequence
  primer
caaccaagtgcttgaaaccag

SEQ ID NO: 74558 - DNA, 38 bp, Artificial Sequence
  primer
gtaaaacgacggccagtcccaagtcctcagactccatc

SEQ ID NO: 74559 - DNA, 21 bp, Artificial Sequence
  primer
caggtcactcctgcatctgag

SEQ ID NO: 74560 - DNA, 20 bp, Artificial Sequence
  primer
cccaggtgtggaagacacag

SEQ ID NO: 74561 - DNA, 21 bp, Artificial Sequence
  primer
agctggctgcattgatatctg

SEQ ID NO: 74562 - DNA, 21 bp, Artificial Sequence
  primer
ccggagctggtaatctaggag

SEQ ID NO: 74563 - DNA, 18 bp, Artificial Sequence
  primer
gtgggtttggcaggtgtg

SEQ ID NO: 74564 - DNA, 38 bp, Artificial Sequence
  primer
gtaaaacgacggccagtgtgttcccagacctcttcctg

SEQ ID NO: 74565 - DNA, 20 bp, Artificial Sequence
  primer
gtgcaactcctgtcctcagc

SEQ ID NO: 74566 - DNA, 21 bp, Artificial Sequence
  primer
ctgggcaatatagcaagaccc

SEQ ID NO: 74567 - DNA, 38 bp, Artificial Sequence
  primer
gtaaaacgacggccagtagtgatgtacctggagggagg

SEQ ID NO: 74568 - DNA, 21 bp, Artificial Sequence
  primer
gagggaggacgttgggtatag

SEQ ID NO: 74569 - DNA, 21 bp, Artificial Sequence
  primer
catgaaacagcctttgcagtc

SEQ ID NO: 74570 - DNA, 35 bp, Artificial Sequence
  primer
gtaaaacgacggccagttgatccacccgactcagc

SEQ ID NO: 74571 - DNA, 37 bp, Artificial Sequence
  primer
gtaaaacgacggccagtgctggtctcaaagtcctggg

SEQ ID NO: 74572 - DNA, 37 bp, Artificial Sequence
  primer
gtaaaacgacggccagtctgccttgttctcatggctc

SEQ ID NO: 74573 - DNA, 21 bp, Artificial Sequence
  primer
cagaggagtgttgacacaggc

SEQ ID NO: 74574 - DNA, 21 bp, Artificial Sequence
  primer
tttctgagccagaatgtggtg

SEQ ID NO: 74575 - DNA, 20 bp, Artificial Sequence
  primer
acctgccctcacacagacac

SEQ ID NO: 74576 - DNA, 20 bp, Artificial Sequence
  primer
agtaagctggagagctgggc

SEQ ID NO: 74577 - DNA, 21 bp, Artificial Sequence
  primer
gagggagggaatgtttgaagg

SEQ ID NO: 74578 - DNA, 38 bp, Artificial Sequence
  primer
gtaaaacgacggccagttctgaggaccagagggaagac

SEQ ID NO: 74579 - DNA, 38 bp, Artificial Sequence
  primer
gtaaaacgacggccagtcaggacgaccatttctcagac

SEQ ID NO: 74580 - DNA, 21 bp, Artificial Sequence
  primer
aaacttccagggcagagactg

SEQ ID NO: 74581 - DNA, 20 bp, Artificial Sequence
  primer
agtaagctggagagctgggc

SEQ ID NO: 74582 - DNA, 21 bp, Artificial Sequence
  primer
tgacatcagttctgcaaaggc

SEQ ID NO: 74583 - DNA, 21 bp, Artificial Sequence
  primer
ccctgcctttatcatttcagc

SEQ ID NO: 74584 - DNA, 36 bp, Artificial Sequence
  primer
gtaaaacgacggccagtctctcccgcggttagaatc

SEQ ID NO: 74585 - DNA, 38 bp, Artificial Sequence
  primer
gtaaaacgacggccagtaaactgcacatggatggacac

SEQ ID NO: 74586 - DNA, 20 bp, Artificial Sequence
  primer
gcatgaatgaagcggcttag

SEQ ID NO: 74587 - DNA, 21 bp, Artificial Sequence
  primer
atcgaatgaatgaatggagcc

SEQ ID NO: 74588 - DNA, 38 bp, Artificial Sequence
  primer
gtaaaacgacggccagtcccagccttcaaagatttcag

SEQ ID NO: 74589 - DNA, 20 bp, Artificial Sequence
  primer
aggccaagagttcaagaccc

SEQ ID NO: 74590 - DNA, 38 bp, Artificial Sequence
  primer
gtaaaacgacggccagtatgccctgagatatctggctg

SEQ ID NO: 74591 - DNA, 23 bp, Artificial Sequence
  primer
gcccatctatgctgtccctatac

SEQ ID NO: 74592 - DNA, 38 bp, Artificial Sequence
  primer
gtaaaacgacggccagtacaggataggtcacaggagcc

SEQ ID NO: 74593 - DNA, 19 bp, Artificial Sequence
  primer
cctcctccctcagaatggg

SEQ ID NO: 74594 - DNA, 21 bp, Artificial Sequence
  primer
ctctctgagcctcacacttgg

SEQ ID NO: 74595 - DNA, 38 bp, Artificial Sequence
  primer
gtaaaacgacggccagtgtttgtaaaccttgggctggg

SEQ ID NO: 74596 - DNA, 21 bp, Artificial Sequence
  primer
gagaaatcctgacccagaccc

SEQ ID NO: 74597 - DNA, 38 bp, Artificial Sequence
  primer
gtaaaacgacggccagtcacaggtgacacttcacagcc

SEQ ID NO: 74598 - DNA, 21 bp, Artificial Sequence
  primer
acacatggcgtagaggaggtc

SEQ ID NO: 74599 - DNA, 38 bp, Artificial Sequence
  primer
gtaaaacgacggccagtgctttcactcacctggatctg

SEQ ID NO: 74600 - DNA, 38 bp, Artificial Sequence
  primer
gtaaaacgacggccagtatcaggcccatgagaccatag

SEQ ID NO: 74601 - DNA, 21 bp, Artificial Sequence
  primer
gtccacgatcctgggactaag

SEQ ID NO: 74602 - DNA, 37 bp, Artificial Sequence
  primer
gtaaaacgacggccagtaggtcagttcgggtcaggag

SEQ ID NO: 74603 - DNA, 38 bp, Artificial Sequence
  primer
gtaaaacgacggccagtactgtaggaagcgcaggtcac

SEQ ID NO: 74604 - DNA, 20 bp, Artificial Sequence
  primer
aggatggagagaggagcgag

SEQ ID NO: 74605 - DNA, 38 bp, Artificial Sequence
  primer
gtaaaacgacggccagtcaccaagtttccctttcctcc

SEQ ID NO: 74606 - DNA, 21 bp, Artificial Sequence
  primer
tctgacttgactccgatctgc

SEQ ID NO: 74607 - DNA, 38 bp, Artificial Sequence
  primer
gtaaaacgacggccagtaccgaggtcttgttgccatag

SEQ ID NO: 74608 - DNA, 38 bp, Artificial Sequence
  primer
gtaaaacgacggccagtgaagagaagtgtggacctggg

SEQ ID NO: 74609 - DNA, 21 bp, Artificial Sequence
  primer
cttgttgatggtcactgggag

SEQ ID NO: 74610 - DNA, 37 bp, Artificial Sequence
  primer
gtaaaacgacggccagtaccgggaaggttcaagtcag

SEQ ID NO: 74611 - DNA, 21 bp, Artificial Sequence
  primer
agttaccacacagtggcatcc

SEQ ID NO: 74612 - DNA, 38 bp, Artificial Sequence
  primer
gtaaaacgacggccagtaagaacagtgaggcaggaagg

SEQ ID NO: 74613 - DNA, 22 bp, Artificial Sequence
  primer
cccagaatgtaaacagcagcag

SEQ ID NO: 74614 - DNA, 39 bp, Artificial Sequence
  primer
gtaaaacgacggccagtcatttcctaattctgacagggc

SEQ ID NO: 74615 - DNA, 38 bp, Artificial Sequence
  primer
gtaaaacgacggccagtcaggtgctaacaaggactggg

SEQ ID NO: 74616 - DNA, 21 bp, Artificial Sequence
  primer
attctggatcccaccttaggc

SEQ ID NO: 74617 - DNA, 38 bp, Artificial Sequence
  primer
gtaaaacgacggccagtcggagtcttactcatccagcc

SEQ ID NO: 74618 - DNA, 38 bp, Artificial Sequence
  primer
gtaaaacgacggccagtaaggctgacagagaagccaag

SEQ ID NO: 74619 - DNA, 21 bp, Artificial Sequence
  primer
aataactgctccacgaaagcc

SEQ ID NO: 74620 - DNA, 19 bp, Artificial Sequence
  primer
acatgatccgcccagtctc

SEQ ID NO: 74621 - DNA, 38 bp, Artificial Sequence
  primer
gtaaaacgacggccagtaagagtaggtgacaggcggag

SEQ ID NO: 74622 - DNA, 20 bp, Artificial Sequence
  primer
aagtcctgctggacggaatc

SEQ ID NO: 74623 - DNA, 21 bp, Artificial Sequence
  primer
ctggaaccactcactgctcac

SEQ ID NO: 74624 - DNA, 21 bp, Artificial Sequence
  primer
cactaagtcagccatcaaccc

SEQ ID NO: 74625 - DNA, 38 bp, Artificial Sequence
  primer
gtaaaacgacggccagtaaagaacacagggtgggactg

SEQ ID NO: 74626 - DNA, 21 bp, Artificial Sequence
  primer
ctcagtacatgctcctccctg

SEQ ID NO: 74627 - DNA, 36 bp, Artificial Sequence
  primer
gtaaaacgacggccagttgggaggtaaactccgctg

SEQ ID NO: 74628 - DNA, 38 bp, Artificial Sequence
  primer
gtaaaacgacggccagtttgggctgctttcttactgag

SEQ ID NO: 74629 - DNA, 38 bp, Artificial Sequence
  primer
gtaaaacgacggccagtcagcaccataggcagattacg

SEQ ID NO: 74630 - DNA, 19 bp, Artificial Sequence
  primer
ggaggcacagtcatggagc

SEQ ID NO: 74631 - DNA, 21 bp, Artificial Sequence
  primer
aaacagcaaaggcgagtgttc

SEQ ID NO: 74632 - DNA, 18 bp, Artificial Sequence
  primer
gtcatgggctgcgtgttc

SEQ ID NO: 74633 - DNA, 23 bp, Artificial Sequence
  primer
aaagagctacacatctcaccacg

SEQ ID NO: 74634 - DNA, 21 bp, Artificial Sequence
  primer
gatcccaagatccaccttctg

SEQ ID NO: 74635 - DNA, 21 bp, Artificial Sequence
  primer
ataatgtgcatcacagccctc

SEQ ID NO: 74636 - DNA, 22 bp, Artificial Sequence
  primer
gggacaaacccattcttagagg

SEQ ID NO: 74637 - DNA, 38 bp, Artificial Sequence
  primer
gtaaaacgacggccagttgccaacacttccctacactc

SEQ ID NO: 74638 - DNA, 22 bp, Artificial Sequence
  primer
cccataacccagtattccaaag

SEQ ID NO: 74639 - DNA, 21 bp, Artificial Sequence
  primer
cagaagccactgaccttcctc

SEQ ID NO: 74640 - DNA, 19 bp, Artificial Sequence
  primer
cctcctggtgctaggcaag

SEQ ID NO: 74641 - DNA, 22 bp, Artificial Sequence
  primer
agcaatctcacagcctagcttc

SEQ ID NO: 74642 - DNA, 20 bp, Artificial Sequence
  primer
ggaagggaggaaccagagac

SEQ ID NO: 74643 - DNA, 38 bp, Artificial Sequence
  primer
gtaaaacgacggccagttgcatattcaggcagagcttc

SEQ ID NO: 74644 - DNA, 38 bp, Artificial Sequence
  primer
gtaaaacgacggccagtaagagacatccctgttgggag

SEQ ID NO: 74645 - DNA, 24 bp, Artificial Sequence
  primer
ggatctaaaggccatacttccttc

SEQ ID NO: 74646 - DNA, 39 bp, Artificial Sequence
  primer
gtaaaacgacggccagttggtcactggtattcagatgga

SEQ ID NO: 74647 - DNA, 24 bp, Artificial Sequence
  primer
gctcatcaaggaaaggtctagttc

SEQ ID NO: 74648 - DNA, 38 bp, Artificial Sequence
  primer
gtaaaacgacggccagtcccaacaattccaagtaaccc

SEQ ID NO: 74649 - DNA, 40 bp, Artificial Sequence
  primer
gtaaaacgacggccagtgcccaaacctttgatttattacc

SEQ ID NO: 74650 - DNA, 40 bp, Artificial Sequence
  primer
gtaaaacgacggccagtccagtgctaaatggaatgttctc

SEQ ID NO: 74651 - DNA, 36 bp, Artificial Sequence
  primer
gtaaaacgacggccagtagcaccatttgaacccagg

SEQ ID NO: 74652 - DNA, 36 bp, Artificial Sequence
  primer
gtaaaacgacggccagtgggctatgctctgcctgac

SEQ ID NO: 74653 - DNA, 21 bp, Artificial Sequence
  primer
aagaaatgggtagatgggtcg

SEQ ID NO: 74654 - DNA, 38 bp, Artificial Sequence
  primer
gtaaaacgacggccagtttaaagcacctcctccaggtc

SEQ ID NO: 74655 - DNA, 38 bp, Artificial Sequence
  primer
gtaaaacgacggccagttgtgttcagattctacgcagc

SEQ ID NO: 74656 - DNA, 21 bp, Artificial Sequence
  primer
actagctgagcttccagggtg

SEQ ID NO: 74657 - DNA, 21 bp, Artificial Sequence
  primer
gtaccagagcctcggacctac

SEQ ID NO: 74658 - DNA, 21 bp, Artificial Sequence
  primer
tagagatgctgaattggctgc

SEQ ID NO: 74659 - DNA, 21 bp, Artificial Sequence
  primer
ggtagctcttcatcaccaccc

SEQ ID NO: 74660 - DNA, 22 bp, Artificial Sequence
  primer
cagtgggaatgaaatccagaag

SEQ ID NO: 74661 - DNA, 38 bp, Artificial Sequence
  primer
gtaaaacgacggccagttgggaagcaaggttaccaaag

SEQ ID NO: 74662 - DNA, 22 bp, Artificial Sequence
  primer
ggttgggatcctcacctagaag

SEQ ID NO: 74663 - DNA, 37 bp, Artificial Sequence
  primer
gtaaaacgacggccagtataagcacgtgcatgaaccc

SEQ ID NO: 74664 - DNA, 38 bp, Artificial Sequence
  primer
gtaaaacgacggccagttaaggtgcagcagtttatcgg

SEQ ID NO: 74665 - DNA, 21 bp, Artificial Sequence
  primer
aggagggaggagacactgatg

SEQ ID NO: 74666 - DNA, 21 bp, Artificial Sequence
  primer
ggtagctcttcatcaccaccc

SEQ ID NO: 74667 - DNA, 21 bp, Artificial Sequence
  primer
ccatctacaacgtttcccacc

SEQ ID NO: 74668 - DNA, 38 bp, Artificial Sequence
  primer
gtaaaacgacggccagttcttgcaactagaagctgggc

SEQ ID NO: 74669 - DNA, 21 bp, Artificial Sequence
  primer
acgaccgtgtaaacctgtgtg

SEQ ID NO: 74670 - DNA, 38 bp, Artificial Sequence
  primer
gtaaaacgacggccagtccttcctcctaggcagctgag

SEQ ID NO: 74671 - DNA, 35 bp, Artificial Sequence
  primer
gtaaaacgacggccagtgctcctctccaggaagcc

SEQ ID NO: 74672 - DNA, 24 bp, Artificial Sequence
  primer
gggcaaacagaatattagacttgg

SEQ ID NO: 74673 - DNA, 38 bp, Artificial Sequence
  primer
gtaaaacgacggccagtatccaaagctaggattgtgcc

SEQ ID NO: 74674 - DNA, 41 bp, Artificial Sequence
  primer
gtaaaacgacggccagttgctatttagtggattatcgctcc

SEQ ID NO: 74675 - DNA, 21 bp, Artificial Sequence
  primer
gtaaggaacatttgcagcagg

SEQ ID NO: 74676 - DNA, 25 bp, Artificial Sequence
  primer
ctccaaatgcagtctttctcattac

SEQ ID NO: 74677 - DNA, 26 bp, Artificial Sequence
  primer
aagaacaagagacaaatgagtcttcc

SEQ ID NO: 74678 - DNA, 21 bp, Artificial Sequence
  primer
caaatgctccattagcacaca

SEQ ID NO: 74679 - DNA, 22 bp, Artificial Sequence
  primer
ttcaatatctttgggcttgagg

SEQ ID NO: 74680 - DNA, 42 bp, Artificial Sequence
  primer
gtaaaacgacggccagtctcttcagataaggttcaaacatcc

SEQ ID NO: 74681 - DNA, 18 bp, Artificial Sequence
  primer
actgcatcccacaggtgc

SEQ ID NO: 74682 - DNA, 22 bp, Artificial Sequence
  primer
ttgtcagtcttgtcccaatcac

SEQ ID NO: 74683 - DNA, 41 bp, Artificial Sequence
  primer
gtaaaacgacggccagtgcatatttatgtgcattcaaggat

SEQ ID NO: 74684 - DNA, 21 bp, Artificial Sequence
  primer
ccattaccctttaggctgacc

SEQ ID NO: 74685 - DNA, 38 bp, Artificial Sequence
  primer
gtaaaacgacggccagtgactaatgaaggcacagaccc

SEQ ID NO: 74686 - DNA, 24 bp, Artificial Sequence
  primer
tttaagcacattagaaatggcaac

SEQ ID NO: 74687 - DNA, 22 bp, Artificial Sequence
  primer
ggcactgatgcagagaattcag

SEQ ID NO: 74688 - DNA, 22 bp, Artificial Sequence
  primer
tggattaggccttgtttctgag

SEQ ID NO: 74689 - DNA, 20 bp, Artificial Sequence
  primer
aagaaacatctctgcctggg

SEQ ID NO: 74690 - DNA, 39 bp, Artificial Sequence
  primer
gtaaaacgacggccagtagttgggttataagggaaaggc

SEQ ID NO: 74691 - DNA, 43 bp, Artificial Sequence
  primer
gtaaaacgacggccagtgaaagaaacaaataccactgatttcc

SEQ ID NO: 74692 - DNA, 22 bp, Artificial Sequence
  primer
ggtcttagctaaattgggcttg

SEQ ID NO: 74693 - DNA, 38 bp, Artificial Sequence
  primer
gtaaaacgacggccagtgggacctgattcactaagagc

SEQ ID NO: 74694 - DNA, 24 bp, Artificial Sequence
  primer
ttgtacaactattccaaggcagtc

SEQ ID NO: 74695 - DNA, 22 bp, Artificial Sequence
  primer
ttgacaagcaacaactctcagc

SEQ ID NO: 74696 - DNA, 39 bp, Artificial Sequence
  primer
gtaaaacgacggccagtaaatgaaaggcagcagtagtgg

SEQ ID NO: 74697 - DNA, 21 bp, Artificial Sequence
  primer
ctcctctcgaaactgagctgg

SEQ ID NO: 74698 - DNA, 21 bp, Artificial Sequence
  primer
tctgaagcattctttcctcgg

SEQ ID NO: 74699 - DNA, 21 bp, Artificial Sequence
  primer
agacatttctcagcaggtcgg

SEQ ID NO: 74700 - DNA, 38 bp, Artificial Sequence
  primer
gtaaaacgacggccagtacccacttcatctcttacgcc

SEQ ID NO: 74701 - DNA, 38 bp, Artificial Sequence
  primer
gtaaaacgacggccagtcagccttcccaatatctgtcc

SEQ ID NO: 74702 - DNA, 21 bp, Artificial Sequence
  primer
acaaagacgagagggtgaacg

SEQ ID NO: 74703 - DNA, 21 bp, Artificial Sequence
  primer
tcctcctctgagccgtagaag

SEQ ID NO: 74704 - DNA, 38 bp, Artificial Sequence
  primer
gtaaaacgacggccagtggactacggtcagtgtggagc

SEQ ID NO: 74705 - DNA, 21 bp, Artificial Sequence
  primer
agggtattcctccatcttccc

SEQ ID NO: 74706 - DNA, 39 bp, Artificial Sequence
  primer
gtaaaacgacggccagtgggccactgtgagttatttgag

SEQ ID NO: 74707 - DNA, 21 bp, Artificial Sequence
  primer
aaacacattggaacgggaatg

SEQ ID NO: 74708 - DNA, 21 bp, Artificial Sequence
  primer
tgtgtctaggcagactggtgg

SEQ ID NO: 74709 - DNA, 38 bp, Artificial Sequence
  primer
gtaaaacgacggccagtagtgtctctgctccttccacc

SEQ ID NO: 74710 - DNA, 20 bp, Artificial Sequence
  primer
agctagagttcagccctgcc

SEQ ID NO: 74711 - DNA, 37 bp, Artificial Sequence
  primer
gtaaaacgacggccagtgactgtccacagaagcctgg

SEQ ID NO: 74712 - DNA, 21 bp, Artificial Sequence
  primer
tcttcttcctgtgtgtgtggg

SEQ ID NO: 74713 - DNA, 21 bp, Artificial Sequence
  primer
cacctggaacatgaatccctc

SEQ ID NO: 74714 - DNA, 21 bp, Artificial Sequence
  primer
cgaaagtaggcgtcatgtgag

SEQ ID NO: 74715 - DNA, 38 bp, Artificial Sequence
  primer
gtaaaacgacggccagtgagatagatgtctgggcctgg

SEQ ID NO: 74716 - DNA, 21 bp, Artificial Sequence
  primer
cagagtccctatgggctgttc

SEQ ID NO: 74717 - DNA, 20 bp, Artificial Sequence
  primer
acatcctccatcacacccac

SEQ ID NO: 74718 - DNA, 38 bp, Artificial Sequence
  primer
gtaaaacgacggccagtacaaggagggtatcagcaacc

SEQ ID NO: 74719 - DNA, 21 bp, Artificial Sequence
  primer
ctaagcaccacctccatttcc

SEQ ID NO: 74720 - DNA, 21 bp, Artificial Sequence
  primer
gacaccaccattctccctacc

SEQ ID NO: 74721 - DNA, 21 bp, Artificial Sequence
  primer
gcaaacctgaggtgggaatag

SEQ ID NO: 74722 - DNA, 21 bp, Artificial Sequence
  primer
tgaatgctatctggcatgagg

SEQ ID NO: 74723 - DNA, 21 bp, Artificial Sequence
  primer
cgggacctccaactaagacag

SEQ ID NO: 74724 - DNA, 21 bp, Artificial Sequence
  primer
accaatgactgacaggtggac

SEQ ID NO: 74725 - DNA, 38 bp, Artificial Sequence
  primer
gtaaaacgacggccagttgaatccaccttgggtaacag

SEQ ID NO: 74726 - DNA, 36 bp, Artificial Sequence
  primer
gtaaaacgacggccagtgtgtgggaaccagacgctc

SEQ ID NO: 74727 - DNA, 38 bp, Artificial Sequence
  primer
gtaaaacgacggccagtccaccagctgacagtgatttg

SEQ ID NO: 74728 - DNA, 37 bp, Artificial Sequence
  primer
gtaaaacgacggccagtgttcctggactgagcccttc

SEQ ID NO: 74729 - DNA, 21 bp, Artificial Sequence
  primer
gcggttccaaaggagtaagag

SEQ ID NO: 74730 - DNA, 38 bp, Artificial Sequence
  primer
gtaaaacgacggccagtgccagctttccttctcagttc

SEQ ID NO: 74731 - DNA, 21 bp, Artificial Sequence
  primer
tcgggtaggtagtgcacacag

SEQ ID NO: 74732 - DNA, 38 bp, Artificial Sequence
  primer
gtaaaacgacggccagtctcagaggagctggtgtttcc

SEQ ID NO: 74733 - DNA, 38 bp, Artificial Sequence
  primer
gtaaaacgacggccagttaactgatggccgagtgtgag

SEQ ID NO: 74734 - DNA, 21 bp, Artificial Sequence
  primer
aggatgctgatgtacctgtgg

SEQ ID NO: 74735 - DNA, 21 bp, Artificial Sequence
  primer
gagacggtaggaaggatctgc

SEQ ID NO: 74736 - DNA, 21 bp, Artificial Sequence
  primer
gaatctcagtgagtggcttcg

SEQ ID NO: 74737 - DNA, 20 bp, Artificial Sequence
  primer
gagggatatacccgcctgag

SEQ ID NO: 74738 - DNA, 38 bp, Artificial Sequence
  primer
gtaaaacgacggccagtctgacctgcctcaaagactcc

SEQ ID NO: 74739 - DNA, 38 bp, Artificial Sequence
  primer
gtaaaacgacggccagtaacccgaaactcagatggatg

SEQ ID NO: 74740 - DNA, 20 bp, Artificial Sequence
  primer
tgatctgacataggcagccc

SEQ ID NO: 74741 - DNA, 21 bp, Artificial Sequence
  primer
gcctctcctcctatgctctcc

SEQ ID NO: 74742 - DNA, 38 bp, Artificial Sequence
  primer
gtaaaacgacggccagttaagagtcttggttgggaggg

SEQ ID NO: 74743 - DNA, 37 bp, Artificial Sequence
  primer
gtaaaacgacggccagtcagactcacagccatttccc

SEQ ID NO: 74744 - DNA, 36 bp, Artificial Sequence
  primer
gtaaaacgacggccagttcagttctctcccgcatgg

SEQ ID NO: 74745 - DNA, 21 bp, Artificial Sequence
  primer
agggcatgtctccaaccttac

SEQ ID NO: 74746 - DNA, 21 bp, Artificial Sequence
  primer
tcaggaggtactgaggtgcag

SEQ ID NO: 74747 - DNA, 21 bp, Artificial Sequence
  primer
cagcctgaagtccagcttctc

SEQ ID NO: 74748 - DNA, 21 bp, Artificial Sequence
  primer
tctaaagtcctgcccagaagc

SEQ ID NO: 74749 - DNA, 38 bp, Artificial Sequence
  primer
gtaaaacgacggccagtggctccaataggaagggacag

SEQ ID NO: 74750 - DNA, 21 bp, Artificial Sequence
  primer
gagccctctaagtcccaaagc

SEQ ID NO: 74751 - DNA, 40 bp, Artificial Sequence
  primer
gtaaaacgacggccagtgggtacagtacacacgactgagg

SEQ ID NO: 74752 - DNA, 25 bp, Artificial Sequence
  primer
cgcttaaacagagagagacagacag

SEQ ID NO: 74753 - DNA, 39 bp, Artificial Sequence
  primer
gtaaaacgacggccagtaaggtctagcctctttccatga

SEQ ID NO: 74754 - DNA, 38 bp, Artificial Sequence
  primer
gtaaaacgacggccagtaactctgacctcatgttccgc

SEQ ID NO: 74755 - DNA, 38 bp, Artificial Sequence
  primer
gtaaaacgacggccagtcgctcatcatgtaagcgactg

SEQ ID NO: 74756 - DNA, 23 bp, Artificial Sequence
  primer
aagtgagcagtgatgacctcaag

SEQ ID NO: 74757 - DNA, 21 bp, Artificial Sequence
  primer
aaacaaggtgccaaacctttc

SEQ ID NO: 74758 - DNA, 37 bp, Artificial Sequence
  primer
gtaaaacgacggccagtaaaggcaaatgggctactgc

SEQ ID NO: 74759 - DNA, 22 bp, Artificial Sequence
  primer
ttactgttacaatgtgcagccg

SEQ ID NO: 74760 - DNA, 22 bp, Artificial Sequence
  primer
ggaggctttacacaatggaaac

SEQ ID NO: 74761 - DNA, 21 bp, Artificial Sequence
  primer
aaacaatgtgcgacactcgac

SEQ ID NO: 74762 - DNA, 21 bp, Artificial Sequence
  primer
taacgtccattcccagtaccc

SEQ ID NO: 74763 - DNA, 40 bp, Artificial Sequence
  primer
gtaaaacgacggccagtttcccactactctgtctttccag

SEQ ID NO: 74764 - DNA, 40 bp, Artificial Sequence
  primer
gtaaaacgacggccagtaacccaggtaactctagagcctg

SEQ ID NO: 74765 - DNA, 22 bp, Artificial Sequence
  primer
tcatctcaccttccaaacaagg

SEQ ID NO: 74766 - DNA, 38 bp, Artificial Sequence
  primer
gtaaaacgacggccagtccttgtaaacaggaagcccag

SEQ ID NO: 74767 - DNA, 21 bp, Artificial Sequence
  primer
gggactgacctaggagacagg

SEQ ID NO: 74768 - DNA, 35 bp, Artificial Sequence
  primer
gtaaaacgacggccagtcctgtccacacccaccag

SEQ ID NO: 74769 - DNA, 41 bp, Artificial Sequence
  primer
gtaaaacgacggccagtggtggcaattaattcacctaatcc

SEQ ID NO: 74770 - DNA, 24 bp, Artificial Sequence
  primer
tcagatcaaatgtttgcttgtttc

SEQ ID NO: 74771 - DNA, 37 bp, Artificial Sequence
  primer
gtaaaacgacggccagtgcacaaagcctggctcatag

SEQ ID NO: 74772 - DNA, 37 bp, Artificial Sequence
  primer
gtaaaacgacggccagtacggctgaacctaaagggtg

SEQ ID NO: 74773 - DNA, 22 bp, Artificial Sequence
  primer
agcaagaacagcaacattgaac

SEQ ID NO: 74774 - DNA, 38 bp, Artificial Sequence
  primer
gtaaaacgacggccagtagcctgcgcctagattaaatg

SEQ ID NO: 74775 - DNA, 21 bp, Artificial Sequence
  primer
tgagcagatcatggtgagacc

SEQ ID NO: 74776 - DNA, 21 bp, Artificial Sequence
  primer
tggacacaaggttctacaggc

SEQ ID NO: 74777 - DNA, 21 bp, Artificial Sequence
  primer
tagaggtggctacagatgccc

SEQ ID NO: 74778 - DNA, 21 bp, Artificial Sequence
  primer
ggtttcacagcaacacaaacc

SEQ ID NO: 74779 - DNA, 37 bp, Artificial Sequence
  primer
gtaaaacgacggccagtctgtttccagacgtgcttgc

SEQ ID NO: 74780 - DNA, 21 bp, Artificial Sequence
  primer
ggtactccaaagcagcaggac

SEQ ID NO: 74781 - DNA, 23 bp, Artificial Sequence
  primer
caggttattaagccaaagcagtg

SEQ ID NO: 74782 - DNA, 21 bp, Artificial Sequence
  primer
tctccagaagataccaagccc

SEQ ID NO: 74783 - DNA, 39 bp, Artificial Sequence
  primer
gtaaaacgacggccagtgcactccagcttagacaacaag

SEQ ID NO: 74784 - DNA, 21 bp, Artificial Sequence
  primer
ctggcgtacatgacaaagagc

SEQ ID NO: 74785 - DNA, 38 bp, Artificial Sequence
  primer
gtaaaacgacggccagttttcttgctggctggtctagg

SEQ ID NO: 74786 - DNA, 21 bp, Artificial Sequence
  primer
gccctttgctctctatggttc

SEQ ID NO: 74787 - DNA, 38 bp, Artificial Sequence
  primer
gtaaaacgacggccagtgcaacagatgatgatgcaagg

SEQ ID NO: 74788 - DNA, 21 bp, Artificial Sequence
  primer
agtgcccacttcaaacacagg

SEQ ID NO: 74789 - DNA, 22 bp, Artificial Sequence
  primer
agacgtgactcaccaaacaatg

SEQ ID NO: 74790 - DNA, 23 bp, Artificial Sequence
  primer
tcaggcaacagtctgaggtttag

SEQ ID NO: 74791 - DNA, 21 bp, Artificial Sequence
  primer
tattcagcgtctccgttcttg

SEQ ID NO: 74792 - DNA, 38 bp, Artificial Sequence
  primer
gtaaaacgacggccagttcctcaacgcatctccttacc

SEQ ID NO: 74793 - DNA, 37 bp, Artificial Sequence
  primer
gtaaaacgacggccagtgaaaggacgaaccgacacag

SEQ ID NO: 74794 - DNA, 21 bp, Artificial Sequence
  primer
ttctggtgcaaaccagtcaac

SEQ ID NO: 74795 - DNA, 21 bp, Artificial Sequence
  primer
tcatctaaccgccatcacaag

SEQ ID NO: 74796 - DNA, 21 bp, Artificial Sequence
  primer
ttctgcaagcccactttcttc

SEQ ID NO: 74797 - DNA, 22 bp, Artificial Sequence
  primer
tcctggatactaggcctcactg

SEQ ID NO: 74798 - DNA, 22 bp, Artificial Sequence
  primer
tgtgcctacaactcatgctctc

SEQ ID NO: 74799 - DNA, 42 bp, Artificial Sequence
  primer
gtaaaacgacggccagtgccaattaaacattggaagaatctg

SEQ ID NO: 74800 - DNA, 24 bp, Artificial Sequence
  primer
acatgccatgagttcaaattactc

SEQ ID NO: 74801 - DNA, 39 bp, Artificial Sequence
  primer
gtaaaacgacggccagtttgtcatctggtgttgaagagc

SEQ ID NO: 74802 - DNA, 21 bp, Artificial Sequence
  primer
aacatacacactgcccaccac

SEQ ID NO: 74803 - DNA, 23 bp, Artificial Sequence
  primer
attgctaggtctctgaactcgac

SEQ ID NO: 74804 - DNA, 43 bp, Artificial Sequence
  primer
gtaaaacgacggccagttgaactgcatagagtcttaattgctg

SEQ ID NO: 74805 - DNA, 22 bp, Artificial Sequence
  primer
gctgagtaaagcgaatggtttc

SEQ ID NO: 74806 - DNA, 24 bp, Artificial Sequence
  primer
cctgatatgtcacaaatgcaagaa

SEQ ID NO: 74807 - DNA, 27 bp, Artificial Sequence
  primer
gcctatgtctttagcaatatctcttgg

SEQ ID NO: 74808 - DNA, 36 bp, Artificial Sequence
  primer
gtaaaacgacggccagtcaggagcagaaggcaaatg

SEQ ID NO: 74809 - DNA, 21 bp, Artificial Sequence
  primer
gagctgggaaatgatggtgag

SEQ ID NO: 74810 - DNA, 38 bp, Artificial Sequence
  primer
gtaaaacgacggccagtgctgcagtagattgaggaggg

SEQ ID NO: 74811 - DNA, 43 bp, Artificial Sequence
  primer
gtaaaacgacggccagttcttattagtgactgaccagaccatc

SEQ ID NO: 74812 - DNA, 24 bp, Artificial Sequence
  primer
gggaagaaagagaactgatgtctg

SEQ ID NO: 74813 - DNA, 21 bp, Artificial Sequence
  primer
acccaacatagtgcctccatc

SEQ ID NO: 74814 - DNA, 45 bp, Artificial Sequence
  primer
gtaaaacgacggccagttgagaaatctgatacttgtaagagttga

SEQ ID NO: 74815 - DNA, 22 bp, Artificial Sequence
  primer
tcttgaccaggaatcacaaaga

SEQ ID NO: 74816 - DNA, 20 bp, Artificial Sequence
  primer
gactcgtctcctggcagtcc

SEQ ID NO: 74817 - DNA, 21 bp, Artificial Sequence
  primer
cccaagtggaatctaccaatg

SEQ ID NO: 74818 - DNA, 38 bp, Artificial Sequence
  primer
gtaaaacgacggccagtcgtataccagagccacattgc

SEQ ID NO: 74819 - DNA, 22 bp, Artificial Sequence
  primer
tgagctataactgcaccactgc

SEQ ID NO: 74820 - DNA, 21 bp, Artificial Sequence
  primer
ccaaagcaatcaatcatcagg

SEQ ID NO: 74821 - DNA, 21 bp, Artificial Sequence
  primer
ctctgaaactcctggcatcag

SEQ ID NO: 74822 - DNA, 38 bp, Artificial Sequence
  primer
gtaaaacgacggccagtcaagtaattctcccacctcgg

SEQ ID NO: 74823 - DNA, 38 bp, Artificial Sequence
  primer
gtaaaacgacggccagttcagcaatgccatggtttaag

SEQ ID NO: 74824 - DNA, 21 bp, Artificial Sequence
  primer
gaaacgagacttcatcgaccc

SEQ ID NO: 74825 - DNA, 38 bp, Artificial Sequence
  primer
gtaaaacgacggccagtaacccaggaaattgtctcacc

SEQ ID NO: 74826 - DNA, 38 bp, Artificial Sequence
  primer
gtaaaacgacggccagtcactctgcagtgagtcttggg

SEQ ID NO: 74827 - DNA, 39 bp, Artificial Sequence
  primer
gtaaaacgacggccagtccttcccaaattctacagcctc

SEQ ID NO: 74828 - DNA, 21 bp, Artificial Sequence
  primer
gacaggctggagtttggaaag

SEQ ID NO: 74829 - DNA, 38 bp, Artificial Sequence
  primer
gtaaaacgacggccagtgagaggaaggagggcaagaag

SEQ ID NO: 74830 - DNA, 38 bp, Artificial Sequence
  primer
gtaaaacgacggccagtactcttcctgcccagattcag

SEQ ID NO: 74831 - DNA, 22 bp, Artificial Sequence
  primer
aagaagccaagattcttccagg

SEQ ID NO: 74832 - DNA, 20 bp, Artificial Sequence
  primer
actccagactggtgacaggg

SEQ ID NO: 74833 - DNA, 19 bp, Artificial Sequence
  primer
catcgcgccctgctataag

SEQ ID NO: 74834 - DNA, 38 bp, Artificial Sequence
  primer
gtaaaacgacggccagtcacacctctggctgtcttgtc

SEQ ID NO: 74835 - DNA, 38 bp, Artificial Sequence
  primer
gtaaaacgacggccagtgagcaggtacgcactgatttg

SEQ ID NO: 74836 - DNA, 37 bp, Artificial Sequence
  primer
gtaaaacgacggccagtgctctttgctgttgagtggg

SEQ ID NO: 74837 - DNA, 22 bp, Artificial Sequence
  primer
ctcagcagtacagttcactggg

SEQ ID NO: 74838 - DNA, 21 bp, Artificial Sequence
  primer
gaagcttgtcctatccatccc

SEQ ID NO: 74839 - DNA, 22 bp, Artificial Sequence
  primer
ccgcaatggttctctcttatcc

SEQ ID NO: 74840 - DNA, 43 bp, Artificial Sequence
  primer
gtaaaacgacggccagtggactacatatttaggacctgcaaac

SEQ ID NO: 74841 - DNA, 24 bp, Artificial Sequence
  primer
gaggtcacatctgtgtctcacttc

SEQ ID NO: 74842 - DNA, 38 bp, Artificial Sequence
  primer
gtaaaacgacggccagtgcagagggatttctacaccca

SEQ ID NO: 74843 - DNA, 41 bp, Artificial Sequence
  primer
gtaaaacgacggccagtggtgaaggacttatgcacagaaac

SEQ ID NO: 74844 - DNA, 22 bp, Artificial Sequence
  primer
tgagaaacaaagtgagaccctg

SEQ ID NO: 74845 - DNA, 25 bp, Artificial Sequence
  primer
aaacttcaatcctacctactttccc

SEQ ID NO: 74846 - DNA, 22 bp, Artificial Sequence
  primer
tcctggagtgatcgtattcacc

SEQ ID NO: 74847 - DNA, 39 bp, Artificial Sequence
  primer
gtaaaacgacggccagtgttcaagagagctggattcctc

SEQ ID NO: 74848 - DNA, 20 bp, Artificial Sequence
  primer
ctatgatcatgccactgccc

SEQ ID NO: 74849 - DNA, 21 bp, Artificial Sequence
  primer
gagtcagctatgcctgaagcc

SEQ ID NO: 74850 - DNA, 39 bp, Artificial Sequence
  primer
gtaaaacgacggccagttcctggaaattgaaagaagcag

SEQ ID NO: 74851 - DNA, 21 bp, Artificial Sequence
  primer
gacaggttaggaagactgccc

SEQ ID NO: 74852 - DNA, 22 bp, Artificial Sequence
  primer
cagttaatggtttaagctgccc

SEQ ID NO: 74853 - DNA, 39 bp, Artificial Sequence
  primer
gtaaaacgacggccagtgcttacctcagtgctacccatc

SEQ ID NO: 74854 - DNA, 22 bp, Artificial Sequence
  primer
gcaacagaagagcagtgagatg

SEQ ID NO: 74855 - DNA, 39 bp, Artificial Sequence
  primer
gtaaaacgacggccagtgatcgtgtcactgtactcagcg

SEQ ID NO: 74856 - DNA, 22 bp, Artificial Sequence
  primer
cccataggtttcatctaagccc

SEQ ID NO: 74857 - DNA, 41 bp, Artificial Sequence
  primer
gtaaaacgacggccagtaaacacagcagatgtaggtgactg

SEQ ID NO: 74858 - DNA, 42 bp, Artificial Sequence
  primer
gtaaaacgacggccagtcatgtagagagcaactgttatgtcc

SEQ ID NO: 74859 - DNA, 21 bp, Artificial Sequence
  primer
ttcaggactatgcttccctgg

SEQ ID NO: 74860 - DNA, 38 bp, Artificial Sequence
  primer
gtaaaacgacggccagtgcccaactgagaaacaggaag

SEQ ID NO: 74861 - DNA, 25 bp, Artificial Sequence
  primer
tgtaatgaatgcaatactgcacaac

SEQ ID NO: 74862 - DNA, 25 bp, Artificial Sequence
  primer
tgtaatgaatgcaatactgcacaac

SEQ ID NO: 74863 - DNA, 19 bp, Artificial Sequence
  primer
acatagtgctgctgctgcg

SEQ ID NO: 74864 - DNA, 38 bp, Artificial Sequence
  primer
gtaaaacgacggccagttgcgtgtagacgtagcctgag

SEQ ID NO: 74865 - DNA, 36 bp, Artificial Sequence
  primer
gtaaaacgacggccagtgctcgtcgtaatggtgcag

SEQ ID NO: 74866 - DNA, 21 bp, Artificial Sequence
  primer
atgtcctcctcctgctcgtag

SEQ ID NO: 74867 - DNA, 21 bp, Artificial Sequence
  primer
cctccttgatgtccttgatgg

SEQ ID NO: 74868 - DNA, 38 bp, Artificial Sequence
  primer
gtaaaacgacggccagtaaagtcactacccaagggcac

SEQ ID NO: 74869 - DNA, 38 bp, Artificial Sequence
  primer
gtaaaacgacggccagtctcaccagggtaatgtgggtc

SEQ ID NO: 74870 - DNA, 21 bp, Artificial Sequence
  primer
tgaggaggatttctgagaggc

SEQ ID NO: 74871 - DNA, 21 bp, Artificial Sequence
  primer
gtggccagtgttgtagactgc

SEQ ID NO: 74872 - DNA, 21 bp, Artificial Sequence
  primer
tttgagaaacgctggcttatg

SEQ ID NO: 74873 - DNA, 38 bp, Artificial Sequence
  primer
gtaaaacgacggccagtaccaccttctagctcactggg

SEQ ID NO: 74874 - DNA, 21 bp, Artificial Sequence
  primer
ttgcgatgagtaccctgtctg

SEQ ID NO: 74875 - DNA, 38 bp, Artificial Sequence
  primer
gtaaaacgacggccagtattgatctcccttcacttccg

SEQ ID NO: 74876 - DNA, 21 bp, Artificial Sequence
  primer
tgtttgtgtcttccttggtgc

SEQ ID NO: 74877 - DNA, 18 bp, Artificial Sequence
  primer
acccactgaccggcactc

SEQ ID NO: 74878 - DNA, 37 bp, Artificial Sequence
  primer
gtaaaacgacggccagtagctttcctggaaggtctgc

SEQ ID NO: 74879 - DNA, 21 bp, Artificial Sequence
  primer
ggagtgcatacgaaacttccc

SEQ ID NO: 74880 - DNA, 38 bp, Artificial Sequence
  primer
gtaaaacgacggccagttccatgccctctaggtagctg

SEQ ID NO: 74881 - DNA, 21 bp, Artificial Sequence
  primer
agtcctggtagccctctttgc

SEQ ID NO: 74882 - DNA, 21 bp, Artificial Sequence
  primer
atgctggtcatgctcagactc

SEQ ID NO: 74883 - DNA, 38 bp, Artificial Sequence
  primer
gtaaaacgacggccagtgtaccctgaggtcccttgctc

SEQ ID NO: 74884 - DNA, 38 bp, Artificial Sequence
  primer
gtaaaacgacggccagtcattagaactgtgaggcaccc

SEQ ID NO: 74885 - DNA, 21 bp, Artificial Sequence
  primer
tggacaaagtgagcagaccac

SEQ ID NO: 74886 - DNA, 38 bp, Artificial Sequence
  primer
gtaaaacgacggccagtcgctttgtaaacaagctttgc

SEQ ID NO: 74887 - DNA, 21 bp, Artificial Sequence
  primer
cttgttaaggagctggttgcc

SEQ ID NO: 74888 - DNA, 21 bp, Artificial Sequence
  primer
ttcacctaccaagggaagagg

SEQ ID NO: 74889 - DNA, 38 bp, Artificial Sequence
  primer
gtaaaacgacggccagtgctgagaacgagggcctatac

SEQ ID NO: 74890 - DNA, 19 bp, Artificial Sequence
  primer
tccacctgagggtggtttc

SEQ ID NO: 74891 - DNA, 21 bp, Artificial Sequence
  primer
tctgataggaaggcaagggtg

SEQ ID NO: 74892 - DNA, 21 bp, Artificial Sequence
  primer
taccatcatcgaccagtcacc

SEQ ID NO: 74893 - DNA, 19 bp, Artificial Sequence
  primer
acaggccaggtcctaccag

SEQ ID NO: 74894 - DNA, 21 bp, Artificial Sequence
  primer
gaccttcagatgccctgtgtc

SEQ ID NO: 74895 - DNA, 20 bp, Artificial Sequence
  primer
aaatcaagtgggtggtgagg

SEQ ID NO: 74896 - DNA, 21 bp, Artificial Sequence
  primer
cacaagggcagaaaggtcaag

SEQ ID NO: 74897 - DNA, 38 bp, Artificial Sequence
  primer
gtaaaacgacggccagtactcttgacttcccacccaac

SEQ ID NO: 74898 - DNA, 21 bp, Artificial Sequence
  primer
cgggtaaagttggaactgagc

SEQ ID NO: 74899 - DNA, 21 bp, Artificial Sequence
  primer
cagccaagcaggccttatatc

SEQ ID NO: 74900 - DNA, 21 bp, Artificial Sequence
  primer
cacagctacaaagtgggagcc

SEQ ID NO: 74901 - DNA, 21 bp, Artificial Sequence
  primer
aaagccagtctcatttcaccc

SEQ ID NO: 74902 - DNA, 21 bp, Artificial Sequence
  primer
gtgctcagaatgaagtgaggg

SEQ ID NO: 74903 - DNA, 36 bp, Artificial Sequence
  primer
gtaaaacgacggccagtctgggctcaccaagtcagg

SEQ ID NO: 74904 - DNA, 38 bp, Artificial Sequence
  primer
gtaaaacgacggccagtagagaaaggtggtggttcctg

SEQ ID NO: 74905 - DNA, 21 bp, Artificial Sequence
  primer
actgtagggccaaagagatgg

SEQ ID NO: 74906 - DNA, 38 bp, Artificial Sequence
  primer
gtaaaacgacggccagtgagcagaattagaaccctggc

SEQ ID NO: 74907 - DNA, 20 bp, Artificial Sequence
  primer
agtccagaaggctccagagg

SEQ ID NO: 74908 - DNA, 21 bp, Artificial Sequence
  primer
aatagaaagcaagcagcccag

SEQ ID NO: 74909 - DNA, 35 bp, Artificial Sequence
  primer
gtaaaacgacggccagtagagggttggtgggcaac

SEQ ID NO: 74910 - DNA, 22 bp, Artificial Sequence
  primer
tctagaggctcttcaggaccag

SEQ ID NO: 74911 - DNA, 39 bp, Artificial Sequence
  primer
gtaaaacgacggccagtgggctctggaagaagatagagg

SEQ ID NO: 74912 - DNA, 20 bp, Artificial Sequence
  primer
atctgctcgaaaccaccctc

SEQ ID NO: 74913 - DNA, 21 bp, Artificial Sequence
  primer
cttggtggagacgaacaggtc

SEQ ID NO: 74914 - DNA, 21 bp, Artificial Sequence
  primer
gtaggagatggtatgcagggc

SEQ ID NO: 74915 - DNA, 38 bp, Artificial Sequence
  primer
gtaaaacgacggccagttatgggagggaggttaaatgc

SEQ ID NO: 74916 - DNA, 18 bp, Artificial Sequence
  primer
cacctgggacacacaggg

SEQ ID NO: 74917 - DNA, 37 bp, Artificial Sequence
  primer
gtaaaacgacggccagtggaggagacctctctgggac

SEQ ID NO: 74918 - DNA, 21 bp, Artificial Sequence
  primer
attgatctcaatgatgcggtg

SEQ ID NO: 74919 - DNA, 38 bp, Artificial Sequence
  primer
gtaaaacgacggccagtagctggcatcgtcttgatatg

SEQ ID NO: 74920 - DNA, 38 bp, Artificial Sequence
  primer
gtaaaacgacggccagtatacaggaccaagaaccgctg

SEQ ID NO: 74921 - DNA, 21 bp, Artificial Sequence
  primer
atctggtccaggtgtaggagg

SEQ ID NO: 74922 - DNA, 38 bp, Artificial Sequence
  primer
gtaaaacgacggccagttattagagcctcattgccctg

SEQ ID NO: 74923 - DNA, 20 bp, Artificial Sequence
  primer
tctcctctccctcatctggc

SEQ ID NO: 74924 - DNA, 38 bp, Artificial Sequence
  primer
gtaaaacgacggccagttcctaacctctgccctcacac

SEQ ID NO: 74925 - DNA, 36 bp, Artificial Sequence
  primer
gtaaaacgacggccagtctgtggcctcagggtatgg

SEQ ID NO: 74926 - DNA, 21 bp, Artificial Sequence
  primer
aacctgtccaggtgagctagg

SEQ ID NO: 74927 - DNA, 38 bp, Artificial Sequence
  primer
gtaaaacgacggccagttcatcactgggttcatccttg

SEQ ID NO: 74928 - DNA, 21 bp, Artificial Sequence
  primer
gctcccataaatggagctgtc

SEQ ID NO: 74929 - DNA, 21 bp, Artificial Sequence
  primer
gctctgtgctgagactggaag

SEQ ID NO: 74930 - DNA, 21 bp, Artificial Sequence
  primer
tctctcacattgactccaccg

SEQ ID NO: 74931 - DNA, 21 bp, Artificial Sequence
  primer
atctggtccaggtgtaggagg

SEQ ID NO: 74932 - DNA, 38 bp, Artificial Sequence; identical to SEQ ID NO: 74922
  primer

SEQ ID NO: 74933 - DNA, 37 bp, Artificial Sequence
  primer
gtaaaacgacggccagtctatcagcgctgtccaggag

SEQ ID NO: 74934 - DNA, 21 bp, Artificial Sequence
  primer
tattggaaggcagagggtagg

SEQ ID NO: 74935 - DNA, 21 bp, Artificial Sequence
  primer
ttccacatccatcttagcagc

SEQ ID NO: 74936 - DNA, 21 bp, Artificial Sequence
  primer
atccagacacttctggtagcg

SEQ ID NO: 74937 - DNA, 20 bp, Artificial Sequence
  primer
cctgaggcctaggaatagcc

SEQ ID NO: 74938 - DNA, 21 bp, Artificial Sequence
  primer
tccctttatttctcagacccg

SEQ ID NO: 74939 - DNA, 44 bp, Artificial Sequence
  primer
gtaaaacgacggccagttgtcttcttgactctctcaattcaatc

SEQ ID NO: 74940 - DNA, 22 bp, Artificial Sequence
  primer
tgatcacttcaaggaacatcag

SEQ ID NO: 74941 - DNA, 21 bp, Artificial Sequence
  primer
tctcctgacctcatgatccac

SEQ ID NO: 74942 - DNA, 21 bp, Artificial Sequence
  primer
gcagcatagtgagagcatgtg

SEQ ID NO: 74943 - DNA, 21 bp, Artificial Sequence
  primer
cctttcagaccctgtctccag

SEQ ID NO: 74944 - DNA, 24 bp, Artificial Sequence
  primer
ccagcttcatttatctaaagccac

SEQ ID NO: 74945 - DNA, 27 bp, Artificial Sequence
  primer
gcagcaacagagaatgtatttaacttg

SEQ ID NO: 74946 - DNA, 21 bp, Artificial Sequence
  primer
gttcagataggaggctttggg

SEQ ID NO: 74947 - DNA, 22 bp, Artificial Sequence
  primer
tgggcgaataaacctgataatg

SEQ ID NO: 74948 - DNA, 40 bp, Artificial Sequence
  primer
gtaaaacgacggccagttgctgtgtacaaagtcctgtttg

SEQ ID NO: 74949 - DNA, 39 bp, Artificial Sequence
  primer
gtaaaacgacggccagttgaagctcaagtgatcctcctg

SEQ ID NO: 74950 - DNA, 19 bp, Artificial Sequence
  primer
ggagctcagggtcatcgag

SEQ ID NO: 74951 - DNA, 21 bp, Artificial Sequence
  primer
atgcttctccctctggaacac

SEQ ID NO: 74952 - DNA, 38 bp, Artificial Sequence
  primer
gtaaaacgacggccagtgcagcttggaagggaagatac

SEQ ID NO: 74953 - DNA, 35 bp, Artificial Sequence
  primer
gtaaaacgacggccagtcccggccaagattcattt

SEQ ID NO: 74954 - DNA, 39 bp, Artificial Sequence
  primer
gtaaaacgacggccagtttatgttgatgactgcagtggg

SEQ ID NO: 74955 - DNA, 21 bp, Artificial Sequence
  primer
gatccttcttggtttctgggc

SEQ ID NO: 74956 - DNA, 38 bp, Artificial Sequence
  primer
gtaaaacgacggccagtagaggctcacgttcctctctg

SEQ ID NO: 74957 - DNA, 39 bp, Artificial Sequence
  primer
gtaaaacgacggccagtggcagaagcaaccagtgtaaag

SEQ ID NO: 74958 - DNA, 21 bp, Artificial Sequence
  primer
ttacaaaccttggcttctggg

SEQ ID NO: 74959 - DNA, 21 bp, Artificial Sequence
  primer
caggcagagtcttgatggttc

SEQ ID NO: 74960 - DNA, 38 bp, Artificial Sequence
  primer
gtaaaacgacggccagtcatgtgtcactgagctgtggg

SEQ ID NO: 74961 - DNA, 21 bp, Artificial Sequence
  primer
ggcagggaactagagacaagc

SEQ ID NO: 74962 - DNA, 21 bp, Artificial Sequence
  primer
tctgcctacttctccctgagc

SEQ ID NO: 74963 - DNA, 21 bp, Artificial Sequence
  primer
ccatctgagagccttcagtcc

SEQ ID NO: 74964 - DNA, 38 bp, Artificial Sequence
  primer
gtaaaacgacggccagttttgattcaagacaaggcgtg

SEQ ID NO: 74965 - DNA, 21 bp, Artificial Sequence
  primer
acaactccggccttgactatg

SEQ ID NO: 74966 - DNA, 21 bp, Artificial Sequence
  primer
gattctggccctaggaatgac

SEQ ID NO: 74967 - DNA, 20 bp, Artificial Sequence
  primer
aagcatcagcaactggatgg

SEQ ID NO: 74968 - DNA, 38 bp, Artificial Sequence
  primer
gtaaaacgacggccagtccagagtagcctttcggattc

SEQ ID NO: 74969 - DNA, 21 bp, Artificial Sequence
  primer
ctggagaaggatctccctttg

SEQ ID NO: 74970 - DNA, 38 bp, Artificial Sequence
  primer
gtaaaacgacggccagtttaagaacctgggacagagcc

SEQ ID NO: 74971 - DNA, 21 bp, Artificial Sequence
  primer
ttcaggtacctctacccagcc

SEQ ID NO: 74972 - DNA, 39 bp, Artificial Sequence
  primer
gtaaaacgacggccagtggtcattgccatgagaaatagg

SEQ ID NO: 74973 - DNA, 20 bp, Artificial Sequence
  primer
cagaggatctgtgtccaggg

SEQ ID NO: 74974 - DNA, 20 bp, Artificial Sequence
  primer
gctggaaagtcaggctaggg

SEQ ID NO: 74975 - DNA, 21 bp, Artificial Sequence
  primer
acacaatgaagccagcatgac

SEQ ID NO: 74976 - DNA, 21 bp, Artificial Sequence
  primer
gctcctccaactagtggcttg

SEQ ID NO: 74977 - DNA, 21 bp, Artificial Sequence
  primer
ctgatttgggaaggctggtag

SEQ ID NO: 74978 - DNA, 19 bp, Artificial Sequence
  primer
tttccgacagcaagcagtg

SEQ ID NO: 74979 - DNA, 19 bp, Artificial Sequence
  primer
ccggagcccaagtaaacag

SEQ ID NO: 74980 - DNA, 21 bp, Artificial Sequence
  primer
aaggcttcaaggagtgacagg

SEQ ID NO: 74981 - DNA, 21 bp, Artificial Sequence
  primer
acacaatgaagccagcatgac

SEQ ID NO: 74982 - DNA, 22 bp, Artificial Sequence
  primer
ggctagggatatagcagggatg

SEQ ID NO: 74983 - DNA, 47 bp, Artificial Sequence
  primer
gtaaaacgacggccagtagtaaagtgtcttacctcaagtttacaaga

SEQ ID NO: 74984 - DNA, 38 bp, Artificial Sequence
  primer
gtaaaacgacggccagtaacacccaaatcgagagaagc

SEQ ID NO: 74985 - DNA, 25 bp, Artificial Sequence
  primer
aatgtaagtgcaatcaataacatgc

SEQ ID NO: 74986 - DNA, 41 bp, Artificial Sequence
  primer
gtaaaacgacggccagtcctgaggtcctctagaattcaaac

SEQ ID NO: 74987 - DNA, 39 bp, Artificial Sequence
  primer
gtaaaacgacggccagtgcagaacagaacagtaccaggg

SEQ ID NO: 74988 - DNA, 26 bp, Artificial Sequence
  primer
cggtatttaaattctctgaaagaaca

SEQ ID NO: 74989 - DNA, 40 bp, Artificial Sequence
  primer
gtaaaacgacggccagttgcttctggaaatatgcattcag

SEQ ID NO: 74990 - DNA, 35 bp, Artificial Sequence; identical to SEQ ID NO: 46699
  primer

SEQ ID NO: 74991 - DNA, 19 bp, Artificial Sequence
  primer
ccgagcctctttactgccc

SEQ ID NO: 74992 - DNA, 41 bp, Artificial Sequence
  primer
gtaaaacgacggccagttgagtagcacaaatggctgatatg

SEQ ID NO: 74993 - DNA, 42 bp, Artificial Sequence
  primer
gtaaaacgacggccagttggtggccttatatcctaattcatc

SEQ ID NO: 74994 - DNA, 38 bp, Artificial Sequence
  primer
gtaaaacgacggccagttaagcgaatgtgaagcacagg

SEQ ID NO: 74995 - DNA, 22 bp, Artificial Sequence
  primer
gattgcacaactgccctctaag

SEQ ID NO: 74996 - DNA, 18 bp, Artificial Sequence
  primer
agcctgggcgagagaaag

SEQ ID NO: 74997 - DNA, 21 bp, Artificial Sequence
  primer
tttcctccacctatgggctac

SEQ ID NO: 74998 - DNA, 38 bp, Artificial Sequence
  primer
gtaaaacgacggccagtctgttgctggatggtagttgc

SEQ ID NO: 74999 - DNA, 21 bp, Artificial Sequence
  primer
ttccatgactttggcaatctg

SEQ ID NO: 75000 - DNA, 21 bp, Artificial Sequence
  primer
ctaggtcggctgggtattgac

SEQ ID NO: 75001 - DNA, 38 bp, Artificial Sequence
  primer
gtaaaacgacggccagtttgcccatctttcattctgtg

SEQ ID NO: 75002 - DNA, 19 bp, Artificial Sequence
  primer
ttctgaaccattggctccc

SEQ ID NO: 75003 - DNA, 38 bp, Artificial Sequence
  primer
gtaaaacgacggccagttggcattagatgaaggtgtgg

SEQ ID NO: 75004 - DNA, 21 bp, Artificial Sequence
  primer
cagaatctgcttcctgtgtcg

SEQ ID NO: 75005 - DNA, 21 bp, Artificial Sequence
  primer
gctggatttggttctagggtg

SEQ ID NO: 75006 - DNA, 21 bp, Artificial Sequence
  primer
cactcaggctggatgaacaag

SEQ ID NO: 75007 - DNA, 38 bp, Artificial Sequence
  primer
gtaaaacgacggccagtgtgatgactttgttggcatgg

SEQ ID NO: 75008 - DNA, 21 bp, Artificial Sequence
  primer
gcagctaactcatttggaggg

SEQ ID NO: 75009 - DNA, 20 bp, Artificial Sequence
  primer
cacacggaaaggcttgtgac

SEQ ID NO: 75010 - DNA, 19 bp, Artificial Sequence
  primer
agatgcttgctggacctgg

SEQ ID NO: 75011 - DNA, 38 bp, Artificial Sequence
  primer
gtaaaacgacggccagttatgggtttaggctgacctcg

SEQ ID NO: 75012 - DNA, 21 bp, Artificial Sequence
  primer
ttggttctccctgtgagtcag

SEQ ID NO: 75013 - DNA, 24 bp, Artificial Sequence
  primer
tttcattatcacccttgagtcttg

SEQ ID NO: 75014 - DNA, 38 bp, Artificial Sequence
  primer
gtaaaacgacggccagtctgatttcagggaaaggatgg

SEQ ID NO: 75015 - DNA, 38 bp, Artificial Sequence
  primer
gtaaaacgacggccagtgattgaaggcatgtttgcttg

SEQ ID NO: 75016 - DNA, 38 bp, Artificial Sequence
  primer
gtaaaacgacggccagtctgatttcacagatggcttgg

SEQ ID NO: 75017 - DNA, 21 bp, Artificial Sequence
  primer
gtcctttggaggcagactcac

SEQ ID NO: 75018 - DNA, 21 bp, Artificial Sequence
  primer
tcttcttaaggttgggcttgg

SEQ ID NO: 75019 - DNA, 21 bp, Artificial Sequence
  primer
gtgggactgagattaggtggg

SEQ ID NO: 75020 - DNA, 38 bp, Artificial Sequence
  primer
gtaaaacgacggccagtttcagcaccatttgtagcacc

SEQ ID NO: 75021 - DNA, 39 bp, Artificial Sequence
  primer
gtaaaacgacggccagttctgaaacactgtcaatcaccg

SEQ ID NO: 75022 - DNA, 21 bp, Artificial Sequence
  primer
ttggaatctcgcttctttgtg

SEQ ID NO: 75023 - DNA, 38 bp, Artificial Sequence
  primer
gtaaaacgacggccagtagaatggcgcttaggactttg

SEQ ID NO: 75024 - DNA, 38 bp, Artificial Sequence
  primer
gtaaaacgacggccagtgaagttgggatgggatgctac

SEQ ID NO: 75025 - DNA, 18 bp, Artificial Sequence
  primer
agccatcagccactgcac

SEQ ID NO: 75026 - DNA, 21 bp, Artificial Sequence
  primer
ttgtacaggctggtgatgtcc

SEQ ID NO: 75027 - DNA, 36 bp, Artificial Sequence
  primer
gtaaaacgacggccagtaattagagggcagagcccg

SEQ ID NO: 75028 - DNA, 37 bp, Artificial Sequence
  primer
gtaaaacgacggccagtatcgagaactgctggcaaag

SEQ ID NO: 75029 - DNA, 37 bp, Artificial Sequence
  primer
gtaaaacgacggccagtggaggcataagactcctccc

SEQ ID NO: 75030 - DNA, 19 bp, Artificial Sequence
  primer
ctcacccgtgatgatgtgg

SEQ ID NO: 75031 - DNA, 19 bp, Artificial Sequence
  primer
ccgctacgggacgtatttc

SEQ ID NO: 75032 - DNA, 21 bp, Artificial Sequence
  primer
ctgcgagaagacgatgttgtg

SEQ ID NO: 75033 - DNA, 38 bp, Artificial Sequence
  primer
gtaaaacgacggccagtaaaggctggaggtcctagtcg

SEQ ID NO: 75034 - DNA, 21 bp, Artificial Sequence
  primer
cagggaacttagggctgaaag

SEQ ID NO: 75035 - DNA, 20 bp, Artificial Sequence
  primer
aggctgggatgagttggaag

SEQ ID NO: 75036 - DNA, 38 bp, Artificial Sequence
  primer
gtaaaacgacggccagttgtgagtctgcagagagtcgg

SEQ ID NO: 75037 - DNA, 38 bp, Artificial Sequence
  primer
gtaaaacgacggccagtccgctaagcagtgagctgttc

SEQ ID NO: 75038 - DNA, 21 bp, Artificial Sequence
  primer
actcccaacctcaggtgatct

SEQ ID NO: 75039 - DNA, 19 bp, Artificial Sequence
  primer
ccatggcgatcatcttgtg

SEQ ID NO: 75040 - DNA, 18 bp, Artificial Sequence
  primer
ccctgcttctccaggtgc

SEQ ID NO: 75041 - DNA, 38 bp, Artificial Sequence
  primer
gtaaaacgacggccagtgagctgaggctgaagctatcg

SEQ ID NO: 75042 - DNA, 21 bp, Artificial Sequence
  primer
gagctgaggctgaagctatcg

SEQ ID NO: 75043 - DNA, 21 bp, Artificial Sequence
  primer
taggtaggcgacagcttgatg

SEQ ID NO: 75044 - DNA, 21 bp, Artificial Sequence
  primer
gaaccttgctcaggtggtctg

SEQ ID NO: 75045 - DNA, 20 bp, Artificial Sequence
  primer
ctcagcacaagcggtgtctc

SEQ ID NO: 75046 - DNA, 21 bp, Artificial Sequence
  primer
cttcacgtagctctcccactg

SEQ ID NO: 75047 - DNA, 18 bp, Artificial Sequence
  primer
agctccacgtcctgctgc

SEQ ID NO: 75048 - DNA, 20 bp, Artificial Sequence
  primer
agtcagtgcaggagtcgtcc

SEQ ID NO: 75049 - DNA, 37 bp, Artificial Sequence
  primer
gtaaaacgacggccagtctttgagccgtccttgtctg

SEQ ID NO: 75050 - DNA, 19 bp, Artificial Sequence
  primer
ctcctcgtccgagtcgttg

SEQ ID NO: 75051 - DNA, 19 bp, Artificial Sequence
  primer
gtctcgtcagcaatgaggc

SEQ ID NO: 75052 - DNA, 37 bp, Artificial Sequence
  primer
gtaaaacgacggccagtcactccacgctatccaggtc

SEQ ID NO: 75053 - DNA, 18 bp, Artificial Sequence
  primer
ggcactgcccatttctcc

SEQ ID NO: 75054 - DNA, 39 bp, Artificial Sequence
  primer
gtaaaacgacggccagtgacgtagatcactgttcgtccc

SEQ ID NO: 75055 - DNA, 18 bp, Artificial Sequence
  primer
ctccgaggtcttggcagg

SEQ ID NO: 75056 - DNA, 19 bp, Artificial Sequence
  primer
ggtctgggaggagctggag

SEQ ID NO: 75057 - DNA, 17 bp, Artificial Sequence
  primer
agcagaggaagacggcg

SEQ ID NO: 75058 - DNA, 19 bp, Artificial Sequence
  primer
cgaggagcagaggaagacg

SEQ ID NO: 75059 - DNA, 18 bp, Artificial Sequence
  primer
ctcctcggtctggaccac

SEQ ID NO: 75060 - DNA, 20 bp, Artificial Sequence
  primer
acgtgctggagttggtcttg

SEQ ID NO: 75061 - DNA, 21 bp, Artificial Sequence
  primer
cctaggccactattccaggag

SEQ ID NO: 75062 - DNA, 36 bp, Artificial Sequence
  primer
gtaaaacgacggccagtgggttctgagagtggtggg

SEQ ID NO: 75063 - DNA, 37 bp, Artificial Sequence
  primer
gtaaaacgacggccagtataaaaggtgtctgcgtggg

SEQ ID NO: 75064 - DNA, 24 bp, Artificial Sequence
  primer
ccataatttcaaagagtggtttgg

SEQ ID NO: 75065 - DNA, 21 bp, Artificial Sequence
  primer
gtagaacatcctctgggtggc

SEQ ID NO: 75066 - DNA, 38 bp, Artificial Sequence
  primer
gtaaaacgacggccagtccaagtcacagagcaagttgg

SEQ ID NO: 75067 - DNA, 38 bp, Artificial Sequence
  primer
gtaaaacgacggccagtccaatttctttcctgggaact

SEQ ID NO: 75068 - DNA, 21 bp, Artificial Sequence
  primer
atacaggctgcttccactgtc

SEQ ID NO: 75069 - DNA, 38 bp, Artificial Sequence
  primer
gtaaaacgacggccagtcttgctgttcatgactcaggg

SEQ ID NO: 75070 - DNA, 21 bp, Artificial Sequence
  primer
aagaggctgtaggcacgagag

SEQ ID NO: 75071 - DNA, 21 bp, Artificial Sequence
  primer
gactcccagctcacacagatg

SEQ ID NO: 75072 - DNA, 21 bp, Artificial Sequence
  primer
tgctctcgttgagtcaagacc

SEQ ID NO: 75073 - DNA, 44 bp, Artificial Sequence
  primer
gtaaaacgacggccagtgatatgggactatgacaagcactaaac

SEQ ID NO: 75074 - DNA, 18 bp, Artificial Sequence
  primer
gtgcaccgtccggtattg

SEQ ID NO: 75075 - DNA, 21 bp, Artificial Sequence
  primer
tacccttacgcactgtcaagc

SEQ ID NO: 75076 - DNA, 21 bp, Artificial Sequence
  primer
cccttctaggcacatggtgag

SEQ ID NO: 75077 - DNA, 21 bp, Artificial Sequence
  primer
atctgggcattaggctgtttg

SEQ ID NO: 75078 - DNA, 37 bp, Artificial Sequence
  primer
gtaaaacgacggccagtagtgtgtctccgagtgcgac

SEQ ID NO: 75079 - DNA, 38 bp, Artificial Sequence
  primer
gtaaaacgacggccagttgacaggcacagtatgggaag

SEQ ID NO: 75080 - DNA, 21 bp, Artificial Sequence
  primer
taaacaggatcaaagggcagg

SEQ ID NO: 75081 - DNA, 38 bp, Artificial Sequence
  primer
gtaaaacgacggccagtctggaaccacgagacagacac

SEQ ID NO: 75082 - DNA, 21 bp, Artificial Sequence
  primer
ccagatggaaacatgagcatc

SEQ ID NO: 75083 - DNA, 20 bp, Artificial Sequence
  primer
gctgcattgaggacagaagg

SEQ ID NO: 75084 - DNA, 21 bp, Artificial Sequence
  primer
gcttggtcctaccactccttg

SEQ ID NO: 75085 - DNA, 21 bp, Artificial Sequence
  primer
ctgatgagactttgtggctgg

SEQ ID NO: 75086 - DNA, 21 bp, Artificial Sequence
  primer
tctgttggttgggtaagggtc

SEQ ID NO: 75087 - DNA, 22 bp, Artificial Sequence
  primer
ttgtacggagcagattctagcc

SEQ ID NO: 75088 - DNA, 21 bp, Artificial Sequence
  primer
tagatgctacttcccatgccc

SEQ ID NO: 75089 - DNA, 20 bp, Artificial Sequence
  primer
ccaggcagtgacaaaggatg

SEQ ID NO: 75090 - DNA, 38 bp, Artificial Sequence
  primer
gtaaaacgacggccagttccttggaagtcccgagttag

SEQ ID NO: 75091 - DNA, 37 bp, Artificial Sequence
  primer
gtaaaacgacggccagtgcacctgttccactgcaaac

SEQ ID NO: 75092 - DNA, 20 bp, Artificial Sequence
  primer
aagacaccgagctgttgcag

SEQ ID NO: 75093 - DNA, 21 bp, Artificial Sequence
  primer
taatactccatgccctgcttg

SEQ ID NO: 75094 - DNA, 38 bp, Artificial Sequence
  primer
gtaaaacgacggccagtgcaggagcctgtagggattag

SEQ ID NO: 75095 - DNA, 21 bp, Artificial Sequence
  primer
acatagcccacattcctctgc

SEQ ID NO: 75096 - DNA, 21 bp, Artificial Sequence
  primer
aaagctggtggtttccaactg

SEQ ID NO: 75097 - DNA, 38 bp, Artificial Sequence
  primer
gtaaaacgacggccagtaaacagcctgaaggctaaacg

SEQ ID NO: 75098 - DNA, 21 bp, Artificial Sequence
  primer
aaagggaaagcaatcaagagg

SEQ ID NO: 75099 - DNA, 38 bp, Artificial Sequence
  primer
gtaaaacgacggccagtttcttggatcgagcattcatc

SEQ ID NO: 75100 - DNA, 20 bp, Artificial Sequence
  primer
tatcacaggagcctggttgg

SEQ ID NO: 75101 - DNA, 21 bp, Artificial Sequence
  primer
aagggacctgggtctaaggac

SEQ ID NO: 75102 - DNA, 38 bp, Artificial Sequence
  primer
gtaaaacgacggccagtctgtctggctccacagttcac

SEQ ID NO: 75103 - DNA, 21 bp, Artificial Sequence
  primer
aggaaaggcaaatttgggaac

SEQ ID NO: 75104 - DNA, 21 bp, Artificial Sequence
  primer
ttcaatggagcttgacacagg

SEQ ID NO: 75105 - DNA, 21 bp, Artificial Sequence
  primer
cataaaggaagctgtccctgg

SEQ ID NO: 75106 - DNA, 21 bp, Artificial Sequence
  primer
gaaagaggcctgaaaggtgtc

SEQ ID NO: 75107 - DNA, 21 bp, Artificial Sequence
  primer
atcagtggtaggctaggcagc

SEQ ID NO: 75108 - DNA, 21 bp, Artificial Sequence
  primer
actttgagggagaagcaggag

SEQ ID NO: 75109 - DNA, 27 bp, Artificial Sequence
  primer
aaattaagcaggttacgtaaggacttt

SEQ ID NO: 75110 - DNA, 38 bp, Artificial Sequence
  primer
gtaaaacgacggccagtggcaattggatctctctccag

SEQ ID NO: 75111 - DNA, 25 bp, Artificial Sequence
  primer
gaagtcttgataccctttctgaagc

SEQ ID NO: 75112 - DNA, 39 bp, Artificial Sequence
  primer
gtaaaacgacggccagtgagttggagagggaactagcag

SEQ ID NO: 75113 - DNA, 24 bp, Artificial Sequence
  primer
cctctgttctgtaacttcctcctc

SEQ ID NO: 75114 - DNA, 21 bp, Artificial Sequence
  primer
tggtgggatgagtctaaatgc

SEQ ID NO: 75115 - DNA, 20 bp, Artificial Sequence
  primer
atgcaggtctaggacaggcg

SEQ ID NO: 75116 - DNA, 21 bp, Artificial Sequence
  primer
ggagaaggttgcagtgtgtca

SEQ ID NO: 75117 - DNA, 27 bp, Artificial Sequence
  primer
tttatgagaatcatgaagatgactttg

SEQ ID NO: 75118 - DNA, 38 bp, Artificial Sequence
  primer
gtaaaacgacggccagtaagtctcttgccacaagcatc

SEQ ID NO: 75119 - DNA, 38 bp, Artificial Sequence
  primer
gtaaaacgacggccagttgatgccacatatggctaagg

SEQ ID NO: 75120 - DNA, 21 bp, Artificial Sequence
  primer
cataccagctcccacacacag

SEQ ID NO: 75121 - DNA, 23 bp, Artificial Sequence
  primer
aaagaattccctggtaaacctcc

SEQ ID NO: 75122 - DNA, 23 bp, Artificial Sequence
  primer
agttctgagtggtggaagaactg

SEQ ID NO: 75123 - DNA, 21 bp, Artificial Sequence
  primer
cacctctgtggtgtgttcgac

SEQ ID NO: 75124 - DNA, 21 bp, Artificial Sequence
  primer
ttagctgcaggcctagaaagg

SEQ ID NO: 75125 - DNA, 21 bp, Artificial Sequence
  primer
caattcacagtgcctgaaagc

SEQ ID NO: 75126 - DNA, 39 bp, Artificial Sequence
  primer
gtaaaacgacggccagtgcagaacccaagggtttatcag

SEQ ID NO: 75127 - DNA, 21 bp, Artificial Sequence
  primer
ttaagcacctgccagtttgtg

SEQ ID NO: 75128 - DNA, 21 bp, Artificial Sequence
  primer
taatgctgccaccctctaacc

SEQ ID NO: 75129 - DNA, 20 bp, Artificial Sequence
  primer
tgggaaagaacagccaagtg

SEQ ID NO: 75130 - DNA, 38 bp, Artificial Sequence
  primer
gtaaaacgacggccagtcaacagggcactgtcactgag

SEQ ID NO: 75131 - DNA, 21 bp, Artificial Sequence
  primer
ctggaaacataggttgggcac

SEQ ID NO: 75132 - DNA, 20 bp, Artificial Sequence
  primer
aggtctaaaccggatgaccc

SEQ ID NO: 75133 - DNA, 38 bp, Artificial Sequence
  primer
gtaaaacgacggccagtcttcagaaatcccattcacgg

SEQ ID NO: 75134 - DNA, 20 bp, Artificial Sequence
  primer
cacgcagcgagattaagagg

SEQ ID NO: 75135 - DNA, 38 bp, Artificial Sequence
  primer
gtaaaacgacggccagtagccctactgccttcctacac

SEQ ID NO: 75136 - DNA, 42 bp, Artificial Sequence
  primer
gtaaaacgacggccagtgagaaatatgagaagtggcaaactg

SEQ ID NO: 75137 - DNA, 42 bp, Artificial Sequence
  primer
gtaaaacgacggccagtcaaagaaccagaaggtcagacttag

SEQ ID NO: 75138 - DNA, 19 bp, Artificial Sequence
  primer
ttagggccctcttccttcg

SEQ ID NO: 75139 - DNA, 27 bp, Artificial Sequence
  primer
gaaataaatttggcatactctaaaggc

SEQ ID NO: 75140 - DNA, 21 bp, Artificial Sequence
  primer
aagagatgcattaggcagcag

SEQ ID NO: 75141 - DNA, 40 bp, Artificial Sequence
  primer
gtaaaacgacggccagtacactcactaggctgctaaatgc

SEQ ID NO: 75142 - DNA, 40 bp, Artificial Sequence
  primer
gtaaaacgacggccagttgaacttggaactcaaagctacg

SEQ ID NO: 75143 - DNA, 43 bp, Artificial Sequence
  primer
gtaaaacgacggccagttcatggacctaatgaagaagaaatta

SEQ ID NO: 75144 - DNA, 28 bp, Artificial Sequence
  primer
aaagatccatctattctataaacaccca

SEQ ID NO: 75145 - DNA, 43 bp, Artificial Sequence
  primer
gtaaaacgacggccagtttctaatcaactaagcaaggcataac

SEQ ID NO: 75146 - DNA, 24 bp, Artificial Sequence
  primer
aacaagtaaggctggtagtggaac

SEQ ID NO: 75147 - DNA, 37 bp, Artificial Sequence
  primer
gtaaaacgacggccagtgaacctgtttcatatggccg

SEQ ID NO: 75148 - DNA, 22 bp, Artificial Sequence
  primer
cattgagcaagacaatgctctg

SEQ ID NO: 75149 - DNA, 21 bp, Artificial Sequence
  primer
tgaacacttggaggtggtgtc

SEQ ID NO: 75150 - DNA, 21 bp, Artificial Sequence
  primer
gctttgttgacttgtcagccc

SEQ ID NO: 75151 - DNA, 38 bp, Artificial Sequence
  primer
gtaaaacgacggccagtgagccacatataaggcaaggg

SEQ ID NO: 75152 - DNA, 39 bp, Artificial Sequence
  primer
gtaaaacgacggccagtgattgcaagaatacctcggttg

SEQ ID NO: 75153 - DNA, 22 bp, Artificial Sequence
  primer
ccctctaatggtgttctccctc

SEQ ID NO: 75154 - DNA, 37 bp, Artificial Sequence
  primer
gtaaaacgacggccagtgctcacggatctctgtgctg

SEQ ID NO: 75155 - DNA, 38 bp, Artificial Sequence
  primer
gtaaaacgacggccagtcagttaggccggagacagaag

SEQ ID NO: 75156 - DNA, 21 bp, Artificial Sequence
  primer
gcaatctggataactcccagg

SEQ ID NO: 75157 - DNA, 23 bp, Artificial Sequence
  primer
cacctgatagtttctttgttgcc

SEQ ID NO: 75158 - DNA, 21 bp, Artificial Sequence
  primer
actgtccacagaaagcatggg

SEQ ID NO: 75159 - DNA, 38 bp, Artificial Sequence
  primer
gtaaaacgacggccagttgctattggcatatcaggcac

SEQ ID NO: 75160 - DNA, 38 bp, Artificial Sequence
  primer
gtaaaacgacggccagtgggctcagggaaagaagtgac

SEQ ID NO: 75161 - DNA, 21 bp, Artificial Sequence
  primer
gctttgttgacttgtcagccc

SEQ ID NO: 75162 - DNA, 40 bp, Artificial Sequence
  primer
gtaaaacgacggccagttgatacttggctctttcttcagg

SEQ ID NO: 75163 - DNA, 41 bp, Artificial Sequence
  primer
gtaaaacgacggccagtagttaacaagaaacccaaacaaca

SEQ ID NO: 75164 - DNA, 40 bp, Artificial Sequence
  primer
gtaaaacgacggccagttttgtaagctggaattcaaatgg

SEQ ID NO: 75165 - DNA, 22 bp, Artificial Sequence
  primer
gcaaatgaaagcgtctttatca

SEQ ID NO: 75166 - DNA, 24 bp, Artificial Sequence
  primer
aagacatggtccctaccttcataa

SEQ ID NO: 75167 - DNA, 22 bp, Artificial Sequence
  primer
tgtgctcttcaactcacattgg

SEQ ID NO: 75168 - DNA, 39 bp, Artificial Sequence
  primer
gtaaaacgacggccagttggaccaaatgacaaatgagtg

SEQ ID NO: 75169 - DNA, 42 bp, Artificial Sequence
  primer
gtaaaacgacggccagtaaagcatagctacctagcacatctc

SEQ ID NO: 75170 - DNA, 38 bp, Artificial Sequence
  primer
gtaaaacgacggccagtcgctaagattcctcaaatggc

SEQ ID NO: 75171 - DNA, 21 bp, Artificial Sequence
  primer
gggaaataggaatgcaaccag

SEQ ID NO: 75172 - DNA, 38 bp, Artificial Sequence
  primer
gtaaaacgacggccagtgaacaagggtgggataactgg

SEQ ID NO: 75173 - DNA, 21 bp, Artificial Sequence
  primer
gctggaaacgctgtatgtcac

SEQ ID NO: 75174 - DNA, 22 bp, Artificial Sequence
  primer
cccggctgaaactcttataaac

SEQ ID NO: 75175 - DNA, 38 bp, Artificial Sequence
  primer
gtaaaacgacggccagtgagaaacgtacaccaccaggc

SEQ ID NO: 75176 - DNA, 21 bp, Artificial Sequence
  primer
actatctcccactgcacaggc

SEQ ID NO: 75177 - DNA, 19 bp, Artificial Sequence
  primer
tgatgagggctgcacaaac

SEQ ID NO: 75178 - DNA, 21 bp, Artificial Sequence
  primer
agacagacgaggaaggctcag

SEQ ID NO: 75179 - DNA, 21 bp, Artificial Sequence
  primer
agacagacgaggaaggctcag

SEQ ID NO: 75180 - DNA, 38 bp, Artificial Sequence
  primer
gtaaaacgacggccagtgcctctgttcctctttcaccc

SEQ ID NO: 75181 - DNA, 21 bp, Artificial Sequence
  primer
taccatcatcactgccagagc

SEQ ID NO: 75182 - DNA, 26 bp, Artificial Sequence
  primer
tggtagcattagaggtgattatttcc

SEQ ID NO: 75183 - DNA, 40 bp, Artificial Sequence
  primer
gtaaaacgacggccagtcaattgtttcagggcactatacc

SEQ ID NO: 75184 - DNA, 23 bp, Artificial Sequence
  primer
aagtgtttctgccaagagttagg

SEQ ID NO: 75185 - DNA, 40 bp, Artificial Sequence
  primer
gtaaaacgacggccagttcaactactcacagggttatggc

SEQ ID NO: 75186 - DNA, 39 bp, Artificial Sequence
  primer
gtaaaacgacggccagtgccactgaaagacacagtttgg

SEQ ID NO: 75187 - DNA, 42 bp, Artificial Sequence
  primer
gtaaaacgacggccagtcctgttgtttataaatgtggaatgc

SEQ ID NO: 75188 - DNA, 38 bp, Artificial Sequence
  primer
gtaaaacgacggccagttccaccaaacctgattgaagc

SEQ ID NO: 75189 - DNA, 42 bp, Artificial Sequence
  primer
gtaaaacgacggccagttctctttctaaaggaaagctgacac

SEQ ID NO: 75190 - DNA, 38 bp, Artificial Sequence
  primer
gtaaaacgacggccagtttccctagtcctcctgtggtc

SEQ ID NO: 75191 - DNA, 21 bp, Artificial Sequence
  primer
acagaaggagacagctgggag

SEQ ID NO: 75192 - DNA, 21 bp, Artificial Sequence
  primer
aaaccacattccctgaacctg

SEQ ID NO: 75193 - DNA, 38 bp, Artificial Sequence
  primer
gtaaaacgacggccagtcttcatccagagaagtgcctg

SEQ ID NO: 75194 - DNA, 24 bp, Artificial Sequence
  primer
catcctttgaaggctaaggaaatc

SEQ ID NO: 75195 - DNA, 21 bp, Artificial Sequence
  primer
tgattacctggtttccatgcc

SEQ ID NO: 75196 - DNA, 38 bp, Artificial Sequence
  primer
gtaaaacgacggccagtcgaagtaggtgtctgcattgg

SEQ ID NO: 75197 - DNA, 21 bp, Artificial Sequence
  primer
gtgttggcctgacagaacttg

SEQ ID NO: 75198 - DNA, 20 bp, Artificial Sequence
  primer
ctgggagatggaaggcaatc

SEQ ID NO: 75199 - DNA, 38 bp, Artificial Sequence
  primer
gtaaaacgacggccagtctctttcttcaatgccacagg

SEQ ID NO: 75200 - DNA, 21 bp, Artificial Sequence
  primer
ggaagggaaggttagggacac

SEQ ID NO: 75201 - DNA, 39 bp, Artificial Sequence
  primer
gtaaaacgacggccagttcataaatgaaagggccaagtc

SEQ ID NO: 75202 - DNA, 21 bp, Artificial Sequence
  primer
tctcagcccaaagaaccagac

SEQ ID NO: 75203 - DNA, 21 bp, Artificial Sequence
  primer
tagggtggatatgaagtgggc

SEQ ID NO: 75204 - DNA, 38 bp, Artificial Sequence
  primer
gtaaaacgacggccagtttagttggtttcaagggctcc

SEQ ID NO: 75205 - DNA, 39 bp, Artificial Sequence
  primer
gtaaaacgacggccagtttgctgagggttattcgttctc

SEQ ID NO: 75206 - DNA, 38 bp, Artificial Sequence
  primer
gtaaaacgacggccagtgtggtatcttgaatcccgagc

SEQ ID NO: 75207 - DNA, 38 bp, Artificial Sequence
  primer
gtaaaacgacggccagtttcacctccgacttatcgtcc

SEQ ID NO: 75208 - DNA, 21 bp, Artificial Sequence
  primer
tagtgcctcctcttccaaacc

SEQ ID NO: 75209 - DNA, 22 bp, Artificial Sequence
  primer
caactttctttggaagtgacgg

SEQ ID NO: 75210 - DNA, 21 bp, Artificial Sequence
  primer
cagggaaggccaataaatcag

SEQ ID NO: 75211 - DNA, 21 bp, Artificial Sequence
  primer
ttcctcctcctcccaggtaag

SEQ ID NO: 75212 - DNA, 38 bp, Artificial Sequence
  primer
gtaaaacgacggccagtagacagagaatgtgggcaatg

SEQ ID NO: 75213 - DNA, 37 bp, Artificial Sequence
  primer
gtaaaacgacggccagttctgaaacgcaacaaggtcg

SEQ ID NO: 75214 - DNA, 39 bp, Artificial Sequence
  primer
gtaaaacgacggccagtggaaatgtaccaatctcttggc

SEQ ID NO: 75215 - DNA, 38 bp, Artificial Sequence
  primer
gtaaaacgacggccagttacaccaataggccaaggcag

SEQ ID NO: 75216 - DNA, 38 bp, Artificial Sequence
  primer
gtaaaacgacggccagtagtgcctcagagtatttcgcc

SEQ ID NO: 75217 - DNA, 21 bp, Artificial Sequence
  primer
cactgcaaataaacagcaggg

SEQ ID NO: 75218 - DNA, 21 bp, Artificial Sequence
  primer
cggagagcagttgtgtgaaag

SEQ ID NO: 75219 - DNA, 21 bp, Artificial Sequence
  primer
ctccctggtgaaaccagagtc

SEQ ID NO: 75220 - DNA, 20 bp, Artificial Sequence
  primer
gatgccatgccagaccatac

SEQ ID NO: 75221 - DNA, 38 bp, Artificial Sequence
  primer
gtaaaacgacggccagtaggtaggacctccagctctcc

SEQ ID NO: 75222 - DNA, 26 bp, Artificial Sequence
  primer
tcataaacatcttgacctaaggagac

SEQ ID NO: 75223 - DNA, 22 bp, Artificial Sequence
  primer
aagccacacataacattgacga

SEQ ID NO: 75224 - DNA, 24 bp, Artificial Sequence
  primer
ggacactactggaaaggtttaagg

SEQ ID NO: 75225 - DNA, 21 bp, Artificial Sequence
  primer
ctagggagattactggctggc

SEQ ID NO: 75226 - DNA, 38 bp, Artificial Sequence
  primer
gtaaaacgacggccagtacaacatgtggcctaggaagc

SEQ ID NO: 75227 - DNA, 38 bp, Artificial Sequence
  primer
gtaaaacgacggccagtccctccaatctgtatcactgg

SEQ ID NO: 75228 - DNA, 25 bp, Artificial Sequence
  primer
ctgggatgaagactgttaaattagg

SEQ ID NO: 75229 - DNA, 21 bp, Artificial Sequence
  primer
agaagaagtttgcatgcctcc

SEQ ID NO: 75230 - DNA, 20 bp, Artificial Sequence
  primer
gaaagttccagcgttgcctc

SEQ ID NO: 75231 - DNA, 24 bp, Artificial Sequence
  primer
tcattggatagaaccatgacactg

SEQ ID NO: 75232 - DNA, 42 bp, Artificial Sequence
  primer
gtaaaacgacggccagtgctgaagaatgctgatgtcttattc

SEQ ID NO: 75233 - DNA, 40 bp, Artificial Sequence
  primer
gtaaaacgacggccagtcaacaaactgatactagcccagc

SEQ ID NO: 75234 - DNA, 21 bp, Artificial Sequence
  primer
atgcctacctgtttcatgctg

SEQ ID NO: 75235 - DNA, 38 bp, Artificial Sequence
  primer
gtaaaacgacggccagtggctgaagggcattgatagat

SEQ ID NO: 75236 - DNA, 23 bp, Artificial Sequence
  primer
gcatcaaagagtacctggcatag

SEQ ID NO: 75237 - DNA, 22 bp, Artificial Sequence
  primer
ttcccttaggctgtcagtcttg

SEQ ID NO: 75238 - DNA, 37 bp, Artificial Sequence
  primer
gtaaaacgacggccagtgtaggaattgtcgtggcacc

SEQ ID NO: 75239 - DNA, 39 bp, Artificial Sequence
  primer
gtaaaacgacggccagtgctttggcagttaacaatgtgg

SEQ ID NO: 75240 - DNA, 21 bp, Artificial Sequence
  primer
ccacatctcacagccaagaag

SEQ ID NO: 75241 - DNA, 18 bp, Artificial Sequence
  primer
agtgcgaatagggcggag

SEQ ID NO: 75242 - DNA, 21 bp, Artificial Sequence
  primer
ctcttgccagctctaagcctc

SEQ ID NO: 75243 - DNA, 18 bp, Artificial Sequence
  primer
aaagaccgcgctttctgc

SEQ ID NO: 75244 - DNA, 21 bp, Artificial Sequence
  primer
tagttgcgcctctttattggc

SEQ ID NO: 75245 - DNA, 21 bp, Artificial Sequence
  primer
cccacttaggacacaagcacc

SEQ ID NO: 75246 - DNA, 20 bp, Artificial Sequence
  primer
cagactcctcggttctggtg

SEQ ID NO: 75247 - DNA, 20 bp, Artificial Sequence
  primer
tcctcttcctcgtcctcagc

SEQ ID NO: 75248 - DNA, 20 bp, Artificial Sequence
  primer
tctcctcagttgggcctttc

SEQ ID NO: 75249 - DNA, 21 bp, Artificial Sequence
  primer
ttagggagcctttggaggtag

SEQ ID NO: 75250 - DNA, 20 bp, Artificial Sequence
  primer
gctgagataggtgggaaggg

SEQ ID NO: 75251 - DNA, 36 bp, Artificial Sequence
  primer
gtaaaacgacggccagtgcctgtggaagggacacag

SEQ ID NO: 75252 - DNA, 39 bp, Artificial Sequence
  primer
gtaaaacgacggccagtggtccaagagacagaaagaggg

SEQ ID NO: 75253 - DNA, 21 bp, Artificial Sequence
  primer
tttcactgctaaggtctgggc

SEQ ID NO: 75254 - DNA, 21 bp, Artificial Sequence
  primer
ccagtcactgtggtggtgaag

SEQ ID NO: 75255 - DNA, 38 bp, Artificial Sequence
  primer
gtaaaacgacggccagtgatggaccctgtttccttctg

SEQ ID NO: 75256 - DNA, 38 bp, Artificial Sequence
  primer
gtaaaacgacggccagtcctcaggacaaggaatccaag

SEQ ID NO: 75257 - DNA, 37 bp, Artificial Sequence
  primer
gtaaaacgacggccagttctttgagggtcctgtgtgg

SEQ ID NO: 75258 - DNA, 21 bp, Artificial Sequence
  primer
gagggaaaggacagtgtggtg

SEQ ID NO: 75259 - DNA, 38 bp, Artificial Sequence
  primer
gtaaaacgacggccagttcacttcaagactccctgctg

SEQ ID NO: 75260 - DNA, 38 bp, Artificial Sequence; identical to SEQ ID NO: 75255
  primer

SEQ ID NO: 75261 - DNA, 35 bp, Artificial Sequence
  primer
gtaaaacgacggccagtctaagcactgcgccaagc

SEQ ID NO: 75262 - DNA, 38 bp, Artificial Sequence
  primer
gtaaaacgacggccagtgaggtctcagtcatgccacac

SEQ ID NO: 75263 - DNA, 38 bp, Artificial Sequence
  primer
gtaaaacgacggccagtgaggtcaaccactgacactcg

SEQ ID NO: 75264 - DNA, 21 bp, Artificial Sequence
  primer
aaagcatggtgagatttggag

SEQ ID NO: 75265 - DNA, 37 bp, Artificial Sequence
  primer
gtaaaacgacggccagtcagccaacagccgtctttac

SEQ ID NO: 75266 - DNA, 39 bp, Artificial Sequence
  primer
gtaaaacgacggccagtaccacacctttccttctgtgac

SEQ ID NO: 75267 - DNA, 20 bp, Artificial Sequence
  primer
acagatgcagccacgaagac

SEQ ID NO: 75268 - DNA, 21 bp, Artificial Sequence
  primer
gaaggcagctccactggtaac

SEQ ID NO: 75269 - DNA, 38 bp, Artificial Sequence
  primer
gtaaaacgacggccagttcctaatttcgttgggaatgg

SEQ ID NO: 75270 - DNA, 38 bp, Artificial Sequence
  primer
gtaaaacgacggccagttcagctttgccagaacttgtc

SEQ ID NO: 75271 - DNA, 38 bp, Artificial Sequence
  primer
gtaaaacgacggccagtgcagtgctggtcaaccattag

SEQ ID NO: 75272 - DNA, 21 bp, Artificial Sequence
  primer
tgaagccaggatgtgctaatg

SEQ ID NO: 75273 - DNA, 21 bp, Artificial Sequence
  primer
gctcaatgaatccagtctccc

SEQ ID NO: 75274 - DNA, 38 bp, Artificial Sequence
  primer
gtaaaacgacggccagtcgtgtcagaaggaatgaggtg

SEQ ID NO: 75275 - DNA, 38 bp, Artificial Sequence
  primer
gtaaaacgacggccagtctgacatcaggtcactcgctc

SEQ ID NO: 75276 - DNA, 21 bp, Artificial Sequence
  primer
cccaaagtagcaccaagatcc

SEQ ID NO: 75277 - DNA, 38 bp, Artificial Sequence
  primer
gtaaaacgacggccagtttaattccacaggttcccacc

SEQ ID NO: 75278 - DNA, 21 bp, Artificial Sequence
  primer
agtccaggaggtcaggatgtc

SEQ ID NO: 75279 - DNA, 36 bp, Artificial Sequence
  primer
gtaaaacgacggccagtccctcgtgttctctgtcgc

SEQ ID NO: 75280 - DNA, 21 bp, Artificial Sequence
  primer
aatagaccatattggcccagc

SEQ ID NO: 75281 - DNA, 38 bp, Artificial Sequence
  primer
gtaaaacgacggccagtgggtaatagatggttggctcg

SEQ ID NO: 75282 - DNA, 21 bp, Artificial Sequence
  primer
cctggaaacacgaaggaagag

SEQ ID NO: 75283 - DNA, 20 bp, Artificial Sequence
  primer
ttagacctggtgtgggcaag

SEQ ID NO: 75284 - DNA, 21 bp, Artificial Sequence
  primer
gggttggtctctgacttccac

SEQ ID NO: 75285 - DNA, 38 bp, Artificial Sequence
  primer
gtaaaacgacggccagtgatctttggatgggctttctg

SEQ ID NO: 75286 - DNA, 38 bp, Artificial Sequence
  primer
gtaaaacgacggccagtgggttcagacttctgtgggac

SEQ ID NO: 75287 - DNA, 21 bp, Artificial Sequence
  primer
gggacaggagctctaggactg

SEQ ID NO: 75288 - DNA, 21 bp, Artificial Sequence
  primer
aagctggtggttgagcttctc

SEQ ID NO: 75289 - DNA, 21 bp, Artificial Sequence
  primer
actaggtaatcagggcctggg

SEQ ID NO: 75290 - DNA, 20 bp, Artificial Sequence
  primer
ctcctttcctctgtcccagc

SEQ ID NO: 75291 - DNA, 20 bp, Artificial Sequence
  primer
aactgggccttggtgtcttc

SEQ ID NO: 75292 - DNA, 18 bp, Artificial Sequence
  primer
ccaggctctcggcgtatg

SEQ ID NO: 75293 - DNA, 21 bp, Artificial Sequence
  primer
gacctcctcagtctcctggtc

SEQ ID NO: 75294 - DNA, 21 bp, Artificial Sequence
  primer
tgagtgatgtcttcccacagg

SEQ ID NO: 75295 - DNA, 38 bp, Artificial Sequence
  primer
gtaaaacgacggccagtgccactttcaaggactgaacc

SEQ ID NO: 75296 - DNA, 21 bp, Artificial Sequence
  primer
caggtttcacctttcaggagg

SEQ ID NO: 75297 - DNA, 21 bp, Artificial Sequence
  primer
gaagagagttggcatcccttg

SEQ ID NO: 75298 - DNA, 21 bp, Artificial Sequence
  primer
tctgacttgcgaaatttggtg

SEQ ID NO: 75299 - DNA, 21 bp, Artificial Sequence
  primer
acttacagtcacatccgtgcc

SEQ ID NO: 75300 - DNA, 38 bp, Artificial Sequence
  primer
gtaaaacgacggccagtaccagtatttcacgccaatcc

SEQ ID NO: 75301 - DNA, 21 bp, Artificial Sequence
  primer
ctcaaaggtgcccactagctc

SEQ ID NO: 75302 - DNA, 36 bp, Artificial Sequence
  primer
gtaaaacgacggccagtgcacaggtttgcctggaac

SEQ ID NO: 75303 - DNA, 22 bp, Artificial Sequence
  primer
cagcagacatttaacagggctc

SEQ ID NO: 75304 - DNA, 21 bp, Artificial Sequence
  primer
tccaaatggtccctgagattc

SEQ ID NO: 75305 - DNA, 22 bp, Artificial Sequence
  primer
gagtttgaaagtggaaggaggg

SEQ ID NO: 75306 - DNA, 38 bp, Artificial Sequence
  primer
gtaaaacgacggccagtgtttggcccatatttccaatg

SEQ ID NO: 75307 - DNA, 22 bp, Artificial Sequence
  primer
ggaaggaaaggaaagaaacagc

SEQ ID NO: 75308 - DNA, 21 bp, Artificial Sequence
  primer
gtttcagaagcaagggcagac

SEQ ID NO: 75309 - DNA, 38 bp, Artificial Sequence
  primer
gtaaaacgacggccagtgtaggaagtgcctggtggttc

SEQ ID NO: 75310 - DNA, 21 bp, Artificial Sequence
  primer
gcagaggatactggcccttac

SEQ ID NO: 75311 - DNA, 20 bp, Artificial Sequence
  primer
gatcgtaagggagtctgggc

SEQ ID NO: 75312 - DNA, 21 bp, Artificial Sequence
  primer
tgaggtagtgcattctggtgg

SEQ ID NO: 75313 - DNA, 23 bp, Artificial Sequence
  primer
tctcaatcaactgtttagcctgg

SEQ ID NO: 75314 - DNA, 21 bp, Artificial Sequence
  primer
acccagaaggctagtgacagg

SEQ ID NO: 75315 - DNA, 38 bp, Artificial Sequence
  primer
gtaaaacgacggccagttagaataggcctgccgcttag

SEQ ID NO: 75316 - DNA, 38 bp, Artificial Sequence
  primer
gtaaaacgacggccagtatggcttggtcaggtatgaag

SEQ ID NO: 75317 - DNA, 21 bp, Artificial Sequence
  primer
tccacagggaaattggaagtc

SEQ ID NO: 75318 - DNA, 38 bp, Artificial Sequence
  primer
gtaaaacgacggccagtcatctttggaaaccttcctgc

SEQ ID NO: 75319 - DNA, 21 bp, Artificial Sequence
  primer
aagatgccacagtgtttgtgc

SEQ ID NO: 75320 - DNA, 38 bp, Artificial Sequence
  primer
gtaaaacgacggccagtaaagccaaagtcctttcctcc

SEQ ID NO: 75321 - DNA, 21 bp, Artificial Sequence
  primer
tgttatctggttggtgccttg

SEQ ID NO: 75322 - DNA, 43 bp, Artificial Sequence
  primer
gtaaaacgacggccagtgcttagagaaggtcatatccatcttg

SEQ ID NO: 75323 - DNA, 21 bp, Artificial Sequence
  primer
tgcattcagctcattctccag

SEQ ID NO: 75324 - DNA, 38 bp, Artificial Sequence
  primer
gtaaaacgacggccagttccagtgataagcctgcaatg

SEQ ID NO: 75325 - DNA, 21 bp, Artificial Sequence
  primer
taggttaccagccacatgcag

SEQ ID NO: 75326 - DNA, 38 bp, Artificial Sequence
  primer
gtaaaacgacggccagtcatcgatggtcatggtaaacg

SEQ ID NO: 75327 - DNA, 21 bp, Artificial Sequence
  primer
gttcaagagctgcactgatgc

SEQ ID NO: 75328 - DNA, 21 bp, Artificial Sequence
  primer
taggtcagccagagttcgtcc

SEQ ID NO: 75329 - DNA, 38 bp, Artificial Sequence
  primer
gtaaaacgacggccagtctccttggcatgtgaaacttg

SEQ ID NO: 75330 - DNA, 38 bp, Artificial Sequence
  primer
gtaaaacgacggccagttcatggactttggctctgaag

SEQ ID NO: 75331 - DNA, 23 bp, Artificial Sequence
  primer
cagcatcatcaataaatccaacc

SEQ ID NO: 75332 - DNA, 38 bp, Artificial Sequence
  primer
gtaaaacgacggccagtggtgtcctgtaggctttccag

SEQ ID NO: 75333 - DNA, 21 bp, Artificial Sequence
  primer
aacctggcctaccagagacag

SEQ ID NO: 75334 - DNA, 38 bp, Artificial Sequence
  primer
gtaaaacgacggccagtcccaaggatggtcttgatttc

SEQ ID NO: 75335 - DNA, 38 bp, Artificial Sequence
  primer
gtaaaacgacggccagtcagggtgattctcgctagagg

SEQ ID NO: 75336 - DNA, 21 bp, Artificial Sequence
  primer
ccctatgtcagcatttgcatc

SEQ ID NO: 75337 - DNA, 36 bp, Artificial Sequence
  primer
gtaaaacgacggccagtatttcactcccatgctccg

SEQ ID NO: 75338 - DNA, 38 bp, Artificial Sequence
  primer
gtaaaacgacggccagtcagtgtcttgatctcgttgcg

SEQ ID NO: 75339 - DNA, 38 bp, Artificial Sequence
  primer
gtaaaacgacggccagtacagtccaaaggaagtgaggg

SEQ ID NO: 75340 - DNA, 21 bp, Artificial Sequence
  primer
tcccagtaaactctgccttcc

SEQ ID NO: 75341 - DNA, 21 bp, Artificial Sequence
  primer
tcccttcattgtttgtggatg

SEQ ID NO: 75342 - DNA, 21 bp, Artificial Sequence
  primer
atttgtgatggaatgcctgtg

SEQ ID NO: 75343 - DNA, 40 bp, Artificial Sequence
  primer
gtaaaacgacggccagtcaacattgacaactggaacagtg

SEQ ID NO: 75344 - DNA, 38 bp, Artificial Sequence
  primer
gtaaaacgacggccagtctagggacatgaaggactggc

SEQ ID NO: 75345 - DNA, 40 bp, Artificial Sequence
  primer
gtaaaacgacggccagtcagcattggtattcagtgtgatg

SEQ ID NO: 75346 - DNA, 21 bp, Artificial Sequence
  primer
gctgtggctaacttcaatccc

SEQ ID NO: 75347 - DNA, 39 bp, Artificial Sequence
  primer
gtaaaacgacggccagtccatggaggaagagacagtagg

SEQ ID NO: 75348 - DNA, 21 bp, Artificial Sequence
  primer
tgcttgtatgttctccgttgg

SEQ ID NO: 75349 - DNA, 21 bp, Artificial Sequence
  primer
ggcagttgaaacacgaagatg

SEQ ID NO: 75350 - DNA, 21 bp, Artificial Sequence
  primer
gaagtcaagtttgcacgatgg

SEQ ID NO: 75351 - DNA, 38 bp, Artificial Sequence
  primer
gtaaaacgacggccagtgtgcagtcagtgcttgaaagg

SEQ ID NO: 75352 - DNA, 21 bp, Artificial Sequence
  primer
tccaagtggcattatacacgg

SEQ ID NO: 75353 - DNA, 37 bp, Artificial Sequence
  primer
gtaaaacgacggccagttccttcccattccctgaaag

SEQ ID NO: 75354 - DNA, 21 bp, Artificial Sequence
  primer
accgcctgtctttcacctagt

SEQ ID NO: 75355 - DNA, 21 bp, Artificial Sequence
  primer
cccttgataaacccactcagc

SEQ ID NO: 75356 - DNA, 38 bp, Artificial Sequence
  primer
gtaaaacgacggccagtaccgtccctacctcccttatg

SEQ ID NO: 75357 - DNA, 21 bp, Artificial Sequence
  primer
cgtagcacctctgtggtcttg

SEQ ID NO: 75358 - DNA, 38 bp, Artificial Sequence
  primer
gtaaaacgacggccagtttatttcctgagcagtggcag

SEQ ID NO: 75359 - DNA, 21 bp, Artificial Sequence
  primer
atgactgtggttgattgcagc

SEQ ID NO: 75360 - DNA, 38 bp, Artificial Sequence
  primer
gtaaaacgacggccagtaggagtctgcctgaacctgag

SEQ ID NO: 75361 - DNA, 20 bp, Artificial Sequence
  primer
tcacttcctgctcatgggac

SEQ ID NO: 75362 - DNA, 21 bp, Artificial Sequence
  primer
atgccaggtccactctgactc

SEQ ID NO: 75363 - DNA, 21 bp, Artificial Sequence
  primer
gagattgtcctggcttcctcc

SEQ ID NO: 75364 - DNA, 35 bp, Artificial Sequence
  primer
gtaaaacgacggccagtgcctgaggttgtccaggc

SEQ ID NO: 75365 - DNA, 38 bp, Artificial Sequence
  primer
gtaaaacgacggccagtgtaccagctcttccatcctgg

SEQ ID NO: 75366 - DNA, 38 bp, Artificial Sequence
  primer
gtaaaacgacggccagttttcctcgggttgcttagttg

SEQ ID NO: 75367 - DNA, 21 bp, Artificial Sequence
  primer
agactctcggtctccttcagc

SEQ ID NO: 75368 - DNA, 38 bp, Artificial Sequence
  primer
gtaaaacgacggccagtcttctggatgttctgtcagcc

SEQ ID NO: 75369 - DNA, 38 bp, Artificial Sequence
  primer
gtaaaacgacggccagtataatcccagcagccacagag

SEQ ID NO: 75370 - DNA, 38 bp, Artificial Sequence
  primer
gtaaaacgacggccagtacagcctcttcttccaacagc

SEQ ID NO: 75371 - DNA, 21 bp, Artificial Sequence
  primer
gacatgttccaggctttctgg

SEQ ID NO: 75372 - DNA, 38 bp, Artificial Sequence
  primer
gtaaaacgacggccagtggacagagacgtctaggaggg

SEQ ID NO: 75373 - DNA, 37 bp, Artificial Sequence
  primer
gtaaaacgacggccagtagtcaggcccgtgagaacag

SEQ ID NO: 75374 - DNA, 21 bp, Artificial Sequence
  primer
ccttaagttcacggtcttccc

SEQ ID NO: 75375 - DNA, 21 bp, Artificial Sequence
  primer
gcaagaatcagcaggacacac

SEQ ID NO: 75376 - DNA, 21 bp, Artificial Sequence
  primer
ggtgcaatcatagctcactgc

SEQ ID NO: 75377 - DNA, 21 bp, Artificial Sequence
  primer
ggtgccgactcagaaactctc

SEQ ID NO: 75378 - DNA, 37 bp, Artificial Sequence
  primer
gtaaaacgacggccagtgggctaaccaatcttctggc

SEQ ID NO: 75379 - DNA, 21 bp, Artificial Sequence
  primer
aagtgtgcaccaccatacctg

SEQ ID NO: 75380 - DNA, 36 bp, Artificial Sequence
  primer
gtaaaacgacggccagtccacagaaactgccagagg

SEQ ID NO: 75381 - DNA, 37 bp, Artificial Sequence
  primer
gtaaaacgacggccagtcaagaaccaggtgatggagc

SEQ ID NO: 75382 - DNA, 38 bp, Artificial Sequence
  primer
gtaaaacgacggccagtagggttgtagctgtccctgac

SEQ ID NO: 75383 - DNA, 38 bp, Artificial Sequence
  primer
gtaaaacgacggccagtagacgcaggttcttggtcttg

SEQ ID NO: 75384 - DNA, 38 bp, Artificial Sequence
  primer
gtaaaacgacggccagtaaagcccagttgccctacttc

SEQ ID NO: 75385 - DNA, 38 bp, Artificial Sequence
  primer
gtaaaacgacggccagtgcagagaaatgaaacccttcc

SEQ ID NO: 75386 - DNA, 21 bp, Artificial Sequence
  primer
gtccagagagagggtcaggag

SEQ ID NO: 75387 - DNA, 38 bp, Artificial Sequence
  primer
gtaaaacgacggccagttgacaaacactgcaggaaacc

SEQ ID NO: 75388 - DNA, 21 bp, Artificial Sequence
  primer
agagtccagccatcgtttctg

SEQ ID NO: 75389 - DNA, 21 bp, Artificial Sequence
  primer
acagtgacaatgacgggagag

SEQ ID NO: 75390 - DNA, 38 bp, Artificial Sequence
  primer
gtaaaacgacggccagttgatcgggagcatactgcttt

SEQ ID NO: 75391 - DNA, 38 bp, Artificial Sequence
  primer
gtaaaacgacggccagtaccacacagcaggacaaagag

SEQ ID NO: 75392 - DNA, 39 bp, Artificial Sequence
  primer
gtaaaacgacggccagtcctcctgtctcacccatatcag

SEQ ID NO: 75393 - DNA, 37 bp, Artificial Sequence
  primer
gtaaaacgacggccagtggctgtcagttgcagtcagt

SEQ ID NO: 75394 - DNA, 21 bp, Artificial Sequence
  primer
ggcctcttactcacaggaagg

SEQ ID NO: 75395 - DNA, 38 bp, Artificial Sequence; identical to SEQ ID NO: 75387
  primer

SEQ ID NO: 75396 - DNA, 21 bp, Artificial Sequence
  primer
agagtccagccatcgtttctg

SEQ ID NO: 75397 - DNA, 21 bp, Artificial Sequence
  primer
acagtgacaatgacgggagag

SEQ ID NO: 75398 - DNA, 38 bp, Artificial Sequence
  primer
gtaaaacgacggccagtacggtctgtttgcatttcttg

SEQ ID NO: 75399 - DNA, 20 bp, Artificial Sequence
  primer
cccattcagaagcagcagtc

SEQ ID NO: 75400 - DNA, 36 bp, Artificial Sequence
  primer
gtaaaacgacggccagtgcaggaaagtgcacacagg

SEQ ID NO: 75401 - DNA, 21 bp, Artificial Sequence
  primer
acagcattggagaaccatctg

SEQ ID NO: 75402 - DNA, 36 bp, Artificial Sequence
  primer
gtaaaacgacggccagtagaaacagagcgggtccag

SEQ ID NO: 75403 - DNA, 36 bp, Artificial Sequence
  primer
gtaaaacgacggccagtcctggccatgactttcagg

SEQ ID NO: 75404 - DNA, 18 bp, Artificial Sequence
  primer
ccaagaggtggaggttgc

SEQ ID NO: 75405 - DNA, 21 bp, Artificial Sequence
  primer
gtcagttgcaatcagtgccag

SEQ ID NO: 75406 - DNA, 21 bp, Artificial Sequence
  primer
gaagaggtgggaagcactcag

SEQ ID NO: 75407 - DNA, 21 bp, Artificial Sequence
  primer
agggagatagaaggagccagg

SEQ ID NO: 75408 - DNA, 38 bp, Artificial Sequence
  primer
gtaaaacgacggccagtgtgcaccaagacatgagcttc

SEQ ID NO: 75409 - DNA, 38 bp, Artificial Sequence
  primer
gtaaaacgacggccagtagtgtgggagagaaggacaca

SEQ ID NO: 75410 - DNA, 38 bp, Artificial Sequence
  primer
gtaaaacgacggccagtctgtcagttgctgtcagtgct

SEQ ID NO: 75411 - DNA, 21 bp, Artificial Sequence
  primer
aaagagggaggaggcaagaag

SEQ ID NO: 75412 - DNA, 38 bp, Artificial Sequence
  primer
gtaaaacgacggccagtccaggcacgtcacttattgtg

SEQ ID NO: 75413 - DNA, 19 bp, Artificial Sequence
  primer
cattgcagacacacctgcc

SEQ ID NO: 75414 - DNA, 37 bp, Artificial Sequence
  primer
gtaaaacgacggccagtcactatggaatggccctgag

SEQ ID NO: 75415 - DNA, 20 bp, Artificial Sequence
  primer
ccattcagaagcagcagtgg

SEQ ID NO: 75416 - DNA, 38 bp, Artificial Sequence
  primer
gtaaaacgacggccagtacttatcagtgcgtggtttgc

SEQ ID NO: 75417 - DNA, 21 bp, Artificial Sequence
  primer
atcagagcagacccacaggta

SEQ ID NO: 75418 - DNA, 38 bp, Artificial Sequence
  primer
gtaaaacgacggccagtggagaggacctggtctggaac

SEQ ID NO: 75419 - DNA, 21 bp, Artificial Sequence
  primer
cagcagctacaggaagcacag

SEQ ID NO: 75420 - DNA, 36 bp, Artificial Sequence
  primer
gtaaaacgacggccagtatcaaggcctttcccacag

SEQ ID NO: 75421 - DNA, 21 bp, Artificial Sequence
  primer
cagtgacaatgatcggagagg

SEQ ID NO: 75422 - DNA, 22 bp, Artificial Sequence
  primer
ctacttggtcaggagtgcattg

SEQ ID NO: 75423 - DNA, 21 bp, Artificial Sequence
  primer
tacgtcatcggttgctagtgc

SEQ ID NO: 75424 - DNA, 37 bp, Artificial Sequence
  primer
gtaaaacgacggccagtttcatcttggaccatctgcc

SEQ ID NO: 75425 - DNA, 21 bp, Artificial Sequence
  primer
gcacagggcaagtagataggg

SEQ ID NO: 75426 - DNA, 38 bp, Artificial Sequence
  primer
gtaaaacgacggccagtgaagaagaggagagggcagag

SEQ ID NO: 75427 - DNA, 37 bp, Artificial Sequence
  primer
gtaaaacgacggccagtcctgaacttctgggtcctgg

SEQ ID NO: 75428 - DNA, 20 bp, Artificial Sequence
  primer
ggagctcagtctgaacctgg

SEQ ID NO: 75429 - DNA, 21 bp, Artificial Sequence
  primer
gtgcttcatgtaaccctgcat

SEQ ID NO: 75430 - DNA, 38 bp, Artificial Sequence
  primer
gtaaaacgacggccagtacagagccacaggacacacag

SEQ ID NO: 75431 - DNA, 39 bp, Artificial Sequence
  primer
gtaaaacgacggccagttctgtgacctaggagttcctgc

SEQ ID NO: 75432 - DNA, 38 bp, Artificial Sequence
  primer
gtaaaacgacggccagtcaagagatctcgctgtgttgc

SEQ ID NO: 75433 - DNA, 38 bp, Artificial Sequence
  primer
gtaaaacgacggccagttgcagtggaaattaaagcagc

SEQ ID NO: 75434 - DNA, 21 bp, Artificial Sequence
  primer
acgctttcctctcaattcctg

SEQ ID NO: 75435 - DNA, 39 bp, Artificial Sequence
  primer
gtaaaacgacggccagttcaggtgtctcaggaattctcc

SEQ ID NO: 75436 - DNA, 21 bp, Artificial Sequence
  primer
ttcctttgtcgtggttgattg

SEQ ID NO: 75437 - DNA, 21 bp, Artificial Sequence
  primer
gtcaaatcgctgttcagagcc

SEQ ID NO: 75438 - DNA, 38 bp, Artificial Sequence
  primer
gtaaaacgacggccagtgcagaatgaaacctggacctg

SEQ ID NO: 75439 - DNA, 18 bp, Artificial Sequence
  primer
ctgcaggtcatcggcatc

SEQ ID NO: 75440 - DNA, 19 bp, Artificial Sequence
  primer
tcgaaccagctcttgaggc

SEQ ID NO: 75441 - DNA, 19 bp, Artificial Sequence
  primer
gctgcatgtcttccaccag

SEQ ID NO: 75442 - DNA, 38 bp, Artificial Sequence
  primer
gtaaaacgacggccagtatgcgtgaaacttggtgaatc

SEQ ID NO: 75443 - DNA, 21 bp, Artificial Sequence
  primer
cagttgctcccacttggtctc

SEQ ID NO: 75444 - DNA, 21 bp, Artificial Sequence
  primer
atcagcctgacaaccagcttc

SEQ ID NO: 75445 - DNA, 38 bp, Artificial Sequence
  primer
gtaaaacgacggccagtaaagctgtgcccaggttgtag

SEQ ID NO: 75446 - DNA, 37 bp, Artificial Sequence
  primer
gtaaaacgacggccagtggctgagagatgtttgcgtc

SEQ ID NO: 75447 - DNA, 21 bp, Artificial Sequence
  primer
gattcgaaaccaaaccctgtg

SEQ ID NO: 75448 - DNA, 18 bp, Artificial Sequence
  primer
acgcccggcctacttatc

SEQ ID NO: 75449 - DNA, 38 bp, Artificial Sequence
  primer
gtaaaacgacggccagtcctctgcactctgagcatgac

SEQ ID NO: 75450 - DNA, 38 bp, Artificial Sequence
  primer
gtaaaacgacggccagttttgcatttgaaagtccaacc

SEQ ID NO: 75451 - DNA, 21 bp, Artificial Sequence
  primer
ccacaagggtgaccattcatc

SEQ ID NO: 75452 - DNA, 41 bp, Artificial Sequence
  primer
gtaaaacgacggccagtttggaaacactccatgatagtcag

SEQ ID NO: 75453 - DNA, 21 bp, Artificial Sequence
  primer
gcaagtctgagcaacaagtgg

SEQ ID NO: 75454 - DNA, 43 bp, Artificial Sequence
  primer
gtaaaacgacggccagttttgacaatcattatagaacaaaggc

SEQ ID NO: 75455 - DNA, 21 bp, Artificial Sequence
  primer
aagctaacactgcaatgggtg

SEQ ID NO: 75456 - DNA, 21 bp, Artificial Sequence
  primer
ccagagtcacacagctcttgg

SEQ ID NO: 75457 - DNA, 38 bp, Artificial Sequence
  primer
gtaaaacgacggccagtcctagaagaagcccagatggc

SEQ ID NO: 75458 - DNA, 39 bp, Artificial Sequence
  primer
gtaaaacgacggccagtcaccaagaccaacctaaaccag

SEQ ID NO: 75459 - DNA, 38 bp, Artificial Sequence
  primer
gtaaaacgacggccagttagtccatccgggttcttctg

SEQ ID NO: 75460 - DNA, 38 bp, Artificial Sequence
  primer
gtaaaacgacggccagttccattgatgaagaaaggctg

SEQ ID NO: 75461 - DNA, 21 bp, Artificial Sequence
  primer
cctccttcaatttgtcaaggc

SEQ ID NO: 75462 - DNA, 21 bp, Artificial Sequence
  primer
tgctttgattcgtacacgagg

SEQ ID NO: 75463 - DNA, 38 bp, Artificial Sequence
  primer
gtaaaacgacggccagttgtggtcacagttcttggtcc

SEQ ID NO: 75464 - DNA, 21 bp, Artificial Sequence
  primer
tgtggtcacagttcttggtcc

SEQ ID NO: 75465 - DNA, 38 bp, Artificial Sequence; identical to SEQ ID NO: 75457
  primer

SEQ ID NO: 75466 - DNA, 21 bp, Artificial Sequence
  primer
agtccatctgggttcttctgg

SEQ ID NO: 75467 - DNA, 38 bp, Artificial Sequence
  primer
gtaaaacgacggccagtgagaaggtcatcctcaagccc

SEQ ID NO: 75468 - DNA, 21 bp, Artificial Sequence
  primer
aagaacattgggtgtgttccc

SEQ ID NO: 75469 - DNA, 38 bp, Artificial Sequence
  primer
gtaaaacgacggccagtctcatatgcaaggctgaccac

SEQ ID NO: 75470 - DNA, 21 bp, Artificial Sequence
  primer
agcatctcatggatcttggtg

SEQ ID NO: 75471 - DNA, 38 bp, Artificial Sequence
  primer
gtaaaacgacggccagtatggagaccatcgtggctaac

SEQ ID NO: 75472 - DNA, 38 bp, Artificial Sequence
  primer
gtaaaacgacggccagtccacttgagtcgtttgctagg

SEQ ID NO: 75473 - DNA, 21 bp, Artificial Sequence
  primer
ccgagatgtgacctcagtcag

SEQ ID NO: 75474 - DNA, 38 bp, Artificial Sequence
  primer
gtaaaacgacggccagtggactgctgagagggacattc

SEQ ID NO: 75475 - DNA, 38 bp, Artificial Sequence
  primer
gtaaaacgacggccagtactcgtccctgctgtaaatgg

SEQ ID NO: 75476 - DNA, 38 bp, Artificial Sequence
  primer
gtaaaacgacggccagttttcactcccaatggtttgtg

SEQ ID NO: 75477 - DNA, 38 bp, Artificial Sequence
  primer
gtaaaacgacggccagtgggtatggcatggattcagac

SEQ ID NO: 75478 - DNA, 38 bp, Artificial Sequence
  primer
gtaaaacgacggccagtacttgccatctgcattaaccc

SEQ ID NO: 75479 - DNA, 21 bp, Artificial Sequence
  primer
tttcactcccaatggtttgtg

SEQ ID NO: 75480 - DNA, 38 bp, Artificial Sequence; identical to SEQ ID NO: 75477
  primer

SEQ ID NO: 75481 - DNA, 38 bp, Artificial Sequence; identical to SEQ ID NO: 75478
  primer

SEQ ID NO: 75482 - DNA, 21 bp, Artificial Sequence
  primer
ttcttgctgtaagggacaggg

SEQ ID NO: 75483 - DNA, 21 bp, Artificial Sequence
  primer
ccctctaggcgagtctaccag

SEQ ID NO: 75484 - DNA, 21 bp, Artificial Sequence
  primer
ccaccctccattctagctgtg

SEQ ID NO: 75485 - DNA, 21 bp, Artificial Sequence
  primer
ctgagagggacatcctcaagc

SEQ ID NO: 75486 - DNA, 38 bp, Artificial Sequence
  primer
gtaaaacgacggccagttgtatgtgttctccacgatgc

SEQ ID NO: 75487 - DNA, 38 bp, Artificial Sequence
  primer
gtaaaacgacggccagtgcacaacaaggacacctgaag

SEQ ID NO: 75488 - DNA, 38 bp, Artificial Sequence
  primer
gtaaaacgacggccagtctctgatggatatgggtgagc

SEQ ID NO: 75489 - DNA, 38 bp, Artificial Sequence
  primer
gtaaaacgacggccagttctgctatatctccacccagc

SEQ ID NO: 75490 - DNA, 38 bp, Artificial Sequence
  primer
gtaaaacgacggccagtattgagtgctgggtctgtgac

SEQ ID NO: 75491 - DNA, 38 bp, Artificial Sequence
  primer
gtaaaacgacggccagtcgaaagcctcatgtgatgttg

SEQ ID NO: 75492 - DNA, 21 bp, Artificial Sequence
  primer
gtgctctcagttcctctgctg

SEQ ID NO: 75493 - DNA, 21 bp, Artificial Sequence
  primer
agggcgcctagttaatgtcag

SEQ ID NO: 75494 - DNA, 21 bp, Artificial Sequence
  primer
ggtagcaacaacctctgtccc

SEQ ID NO: 75495 - DNA, 38 bp, Artificial Sequence
  primer
gtaaaacgacggccagttatgcataatggagaccagcg

SEQ ID NO: 75496 - DNA, 21 bp, Artificial Sequence
  primer
aacgtaccactcacgatgctg

SEQ ID NO: 75497 - DNA, 38 bp, Artificial Sequence
  primer
gtaaaacgacggccagtggtcagaagacgcttggtagc

SEQ ID NO: 75498 - DNA, 38 bp, Artificial Sequence
  primer
gtaaaacgacggccagtcttccagtaagcctcggtttc

SEQ ID NO: 75499 - DNA, 38 bp, Artificial Sequence
  primer
gtaaaacgacggccagtacaaacaaacagggaagaccc

SEQ ID NO: 75500 - DNA, 38 bp, Artificial Sequence
  primer
gtaaaacgacggccagtctttcccaagatggtctccag

SEQ ID NO: 75501 - DNA, 37 bp, Artificial Sequence
  primer
gtaaaacgacggccagttaagaggccagctcttggtg

SEQ ID NO: 75502 - DNA, 38 bp, Artificial Sequence
  primer
gtaaaacgacggccagtggcaggtgggagaagtatgag

SEQ ID NO: 75503 - DNA, 21 bp, Artificial Sequence
  primer
cttcctgggagggtgtcatag

SEQ ID NO: 75504 - DNA, 38 bp, Artificial Sequence
  primer
gtaaaacgacggccagtttgagtagcccagaacccatc

SEQ ID NO: 75505 - DNA, 38 bp, Artificial Sequence
  primer
gtaaaacgacggccagtatgttgaaatgggaggagtgg

SEQ ID NO: 75506 - DNA, 21 bp, Artificial Sequence
  primer
gacttgggttaaggtcttggg

SEQ ID NO: 75507 - DNA, 27 bp, Artificial Sequence
  primer
ttaatggtatggtgaatcattaggaac

SEQ ID NO: 75508 - DNA, 21 bp, Artificial Sequence
  primer
attcattctgaggcagggaac

SEQ ID NO: 75509 - DNA, 22 bp, Artificial Sequence
  primer
ggttacggatagtagcactggg

SEQ ID NO: 75510 - DNA, 36 bp, Artificial Sequence
  primer
gtaaaacgacggccagtgatgggagtgggcagagac

SEQ ID NO: 75511 - DNA, 22 bp, Artificial Sequence
  primer
gggtggatatttccaactctgg

SEQ ID NO: 75512 - DNA, 21 bp, Artificial Sequence
  primer
gttagtggtagcaacaggccc

SEQ ID NO: 75513 - DNA, 38 bp, Artificial Sequence
  primer
gtaaaacgacggccagtcaacatctcaagctgtctggc

SEQ ID NO: 75514 - DNA, 21 bp, Artificial Sequence
  primer
tccttcctaggcagcatgttc

SEQ ID NO: 75515 - DNA, 37 bp, Artificial Sequence
  primer
gtaaaacgacggccagtgaggtgctggcagataaagg

SEQ ID NO: 75516 - DNA, 38 bp, Artificial Sequence
  primer
gtaaaacgacggccagttttgtatggcttccagttccc

SEQ ID NO: 75517 - DNA, 21 bp, Artificial Sequence
  primer
tcctgtcaccaacccaagaag

SEQ ID NO: 75518 - DNA, 37 bp, Artificial Sequence
  primer
gtaaaacgacggccagtccagcctgacagtttcatcg

SEQ ID NO: 75519 - DNA, 22 bp, Artificial Sequence
  primer
ctctctctcttgcacacacgtt

SEQ ID NO: 75520 - DNA, 21 bp, Artificial Sequence
  primer
tcatttcactcggaacttggg

SEQ ID NO: 75521 - DNA, 22 bp, Artificial Sequence
  primer
tctagcacaggatgaaccagag

SEQ ID NO: 75522 - DNA, 21 bp, Artificial Sequence
  primer
aagcatcatggaagcacactg

SEQ ID NO: 75523 - DNA, 37 bp, Artificial Sequence
  primer
gtaaaacgacggccagtacgggtttgtttcttcccac

SEQ ID NO: 75524 - DNA, 38 bp, Artificial Sequence
  primer
gtaaaacgacggccagtctggaagaaggcctgaggaag

SEQ ID NO: 75525 - DNA, 21 bp, Artificial Sequence
  primer
cttctccgctgacctgatttc

SEQ ID NO: 75526 - DNA, 21 bp, Artificial Sequence
  primer
gagtcaccctgactgaggagg

SEQ ID NO: 75527 - DNA, 44 bp, Artificial Sequence
  primer
gtaaaacgacggccagttcaagatttagctttaatacaggatgc

SEQ ID NO: 75528 - DNA, 39 bp, Artificial Sequence
  primer
gtaaaacgacggccagtgaggcaacaattccaattcaac

SEQ ID NO: 75529 - DNA, 38 bp, Artificial Sequence
  primer
gtaaaacgacggccagtgcccagccataaatctgaaac

SEQ ID NO: 75530 - DNA, 38 bp, Artificial Sequence
  primer
gtaaaacgacggccagttgattgccactttgaatctgc

SEQ ID NO: 75531 - DNA, 38 bp, Artificial Sequence
  primer
gtaaaacgacggccagtatcgggatgacaggaatatgg

SEQ ID NO: 75532 - DNA, 20 bp, Artificial Sequence
  primer
aagcatccatttgccctacc

SEQ ID NO: 75533 - DNA, 38 bp, Artificial Sequence
  primer
gtaaaacgacggccagtgcgtggcttcttaacttctcc

SEQ ID NO: 75534 - DNA, 37 bp, Artificial Sequence
  primer
gtaaaacgacggccagtcccggccctgtatttatttc

SEQ ID NO: 75535 - DNA, 21 bp, Artificial Sequence
  primer
atttccttgaccctctttggc

SEQ ID NO: 75536 - DNA, 38 bp, Artificial Sequence
  primer
gtaaaacgacggccagtggactcaagcaattctcccac

SEQ ID NO: 75537 - DNA, 38 bp, Artificial Sequence
  primer
gtaaaacgacggccagtcaagctatcccattaggcagg

SEQ ID NO: 75538 - DNA, 21 bp, Artificial Sequence
  primer
caattaactgaccgtcaagcc

SEQ ID NO: 75539 - DNA, 38 bp, Artificial Sequence
  primer
gtaaaacgacggccagtcacacaatggactcagtgacc

SEQ ID NO: 75540 - DNA, 37 bp, Artificial Sequence
  primer
gtaaaacgacggccagtaaaggtggttcttcactggg

SEQ ID NO: 75541 - DNA, 21 bp, Artificial Sequence
  primer
tcggcaactaaaggagaccac

SEQ ID NO: 75542 - DNA, 21 bp, Artificial Sequence
  primer
catcctgcttcactgacctcc

SEQ ID NO: 75543 - DNA, 23 bp, Artificial Sequence
  primer
tttacagactaaagcacaacccg

SEQ ID NO: 75544 - DNA, 38 bp, Artificial Sequence
  primer
gtaaaacgacggccagtccaaagcttaagagacagggc

SEQ ID NO: 75545 - DNA, 19 bp, Artificial Sequence
  primer
gtaagccacagcacccagc

SEQ ID NO: 75546 - DNA, 24 bp, Artificial Sequence
  primer
ttcttacgtagactttgggaaagc

SEQ ID NO: 75547 - DNA, 41 bp, Artificial Sequence
  primer
gtaaaacgacggccagtggatgccagactagtgaaactatg

SEQ ID NO: 75548 - DNA, 19 bp, Artificial Sequence
  primer
acagtgctcggcttgtctg

SEQ ID NO: 75549 - DNA, 39 bp, Artificial Sequence
  primer
gtaaaacgacggccagtcagacctatgcctacggagtgt

SEQ ID NO: 75550 - DNA, 39 bp, Artificial Sequence
  primer
gtaaaacgacggccagtcaggtcagcaagtcaatacagg

SEQ ID NO: 75551 - DNA, 20 bp, Artificial Sequence
  primer
caacctatattggtgggcgg

SEQ ID NO: 75552 - DNA, 39 bp, Artificial Sequence
  primer
gtaaaacgacggccagttccaggaagacaagttcaatcc

SEQ ID NO: 75553 - DNA, 21 bp, Artificial Sequence
  primer
gacaccgtcaaatcctgtgag

SEQ ID NO: 75554 - DNA, 21 bp, Artificial Sequence
  primer
aggaatgagccactgtgcttg

SEQ ID NO: 75555 - DNA, 21 bp, Artificial Sequence
  primer
caagtgatctgcctatctcgg

SEQ ID NO: 75556 - DNA, 38 bp, Artificial Sequence
  primer
gtaaaacgacggccagttgtttcaatgcaaattccagc

SEQ ID NO: 75557 - DNA, 18 bp, Artificial Sequence
  primer
cccagcctccacaactcc

SEQ ID NO: 75558 - DNA, 38 bp, Artificial Sequence
  primer
gtaaaacgacggccagtaacacagggctaaagcagtgg

SEQ ID NO: 75559 - DNA, 38 bp, Artificial Sequence
  primer
gtaaaacgacggccagttgttcagcaagtcacagcttc

SEQ ID NO: 75560 - DNA, 38 bp, Artificial Sequence
  primer
gtaaaacgacggccagtcaccaggatgtggaattaagg

SEQ ID NO: 75561 - DNA, 38 bp, Artificial Sequence
  primer
gtaaaacgacggccagttaggctgtcatccagaaatgg

SEQ ID NO: 75562 - DNA, 22 bp, Artificial Sequence
  primer
aagaatctggccacagatatgc

SEQ ID NO: 75563 - DNA, 39 bp, Artificial Sequence
  primer
gtaaaacgacggccagttgggcatcagttaaatttccag

SEQ ID NO: 75564 - DNA, 22 bp, Artificial Sequence
  primer
tttgaaatcttcatttgcaagg

SEQ ID NO: 75565 - DNA, 38 bp, Artificial Sequence
  primer
gtaaaacgacggccagtagaaactctcatggcagggaa

SEQ ID NO: 75566 - DNA, 19 bp, Artificial Sequence
  primer
ccagccctggtttcacttc

SEQ ID NO: 75567 - DNA, 22 bp, Artificial Sequence
  primer
caagaaaccatttaaccaagcc

SEQ ID NO: 75568 - DNA, 39 bp, Artificial Sequence
  primer
gtaaaacgacggccagtgatgatctctaaggtccctccc

SEQ ID NO: 75569 - DNA, 18 bp, Artificial Sequence
  primer
tggtgaggctgaagcagg

SEQ ID NO: 75570 - DNA, 37 bp, Artificial Sequence
  primer
gtaaaacgacggccagtgtggccgagattgtctaagc

SEQ ID NO: 75571 - DNA, 38 bp, Artificial Sequence
  primer
gtaaaacgacggccagtcctgcatggttcttccctaac

SEQ ID NO: 75572 - DNA, 41 bp, Artificial Sequence
  primer
gtaaaacgacggccagtgcttgaaaggtatcttaggcactg

SEQ ID NO: 75573 - DNA, 38 bp, Artificial Sequence
  primer
gtaaaacgacggccagtccgtgagccttgtaacttgtg

SEQ ID NO: 75574 - DNA, 21 bp, Artificial Sequence
  primer
gccaaagaccaatcatagctg

SEQ ID NO: 75575 - DNA, 42 bp, Artificial Sequence
  primer
gtaaaacgacggccagtccctgacttgcttactgtacattct

SEQ ID NO: 75576 - DNA, 18 bp, Artificial Sequence
  primer
aagtcatctgcccgcctc

SEQ ID NO: 75577 - DNA, 37 bp, Artificial Sequence
  primer
gtaaaacgacggccagtacaagcagaaacagcccttc

SEQ ID NO: 75578 - DNA, 21 bp, Artificial Sequence
  primer
gtctgcttcagggagatgagc

SEQ ID NO: 75579 - DNA, 38 bp, Artificial Sequence
  primer
gtaaaacgacggccagtaggaaatccacctcaaactgg

SEQ ID NO: 75580 - DNA, 38 bp, Artificial Sequence
  primer
gtaaaacgacggccagttttgtcattgttgctgtttgc

SEQ ID NO: 75581 - DNA, 21 bp, Artificial Sequence
  primer
tatttctggacctgctctggg

SEQ ID NO: 75582 - DNA, 21 bp, Artificial Sequence
  primer
aggaaatccacctcaaactgg

SEQ ID NO: 75583 - DNA, 21 bp, Artificial Sequence
  primer
tctatgccatttgctgctttg

SEQ ID NO: 75584 - DNA, 44 bp, Artificial Sequence
  primer
gtaaaacgacggccagtggaaatcatctaaataccttaactccc

SEQ ID NO: 75585 - DNA, 21 bp, Artificial Sequence
  primer
gacttgacccaagcaatgttc

SEQ ID NO: 75586 - DNA, 42 bp, Artificial Sequence
  primer
gtaaaacgacggccagtttgtaacagtttatgcagattcacc

SEQ ID NO: 75587 - DNA, 27 bp, Artificial Sequence
  primer
ggataaaccatatttagaacctaagca

SEQ ID NO: 75588 - DNA, 40 bp, Artificial Sequence
  primer
gtaaaacgacggccagtaacaaataggatgagagcaagcc

SEQ ID NO: 75589 - DNA, 38 bp, Artificial Sequence
  primer
gtaaaacgacggccagtacacggcacaaatacgtgaag

SEQ ID NO: 75590 - DNA, 25 bp, Artificial Sequence
  primer
tcagttggaattaatcactgcctta

SEQ ID NO: 75591 - DNA, 23 bp, Artificial Sequence
  primer
aaacaagacttcacctaccaccc

SEQ ID NO: 75592 - DNA, 26 bp, Artificial Sequence
  primer
ccattaagagctgtcttatcttcagg

SEQ ID NO: 75593 - DNA, 41 bp, Artificial Sequence
  primer
gtaaaacgacggccagtaactgaggaaggagtgtaaggtca

SEQ ID NO: 75594 - DNA, 42 bp, Artificial Sequence
  primer
gtaaaacgacggccagttggcttagtctcatgtttaaagtgg

SEQ ID NO: 75595 - DNA, 22 bp, Artificial Sequence
  primer
ccacactctctgtaatgttggg

SEQ ID NO: 75596 - DNA, 42 bp, Artificial Sequence
  primer
gtaaaacgacggccagtcttcagtcagtcacattagagcaag

SEQ ID NO: 75597 - DNA, 44 bp, Artificial Sequence
  primer
gtaaaacgacggccagtgaaggacatacaccacaatattaacaa

SEQ ID NO: 75598 - DNA, 22 bp, Artificial Sequence
  primer
gcactcaacaatgactgattcc

SEQ ID NO: 75599 - DNA, 39 bp, Artificial Sequence
  primer
gtaaaacgacggccagtttgctcactaatgacaccctga

SEQ ID NO: 75600 - DNA, 40 bp, Artificial Sequence
  primer
gtaaaacgacggccagttgaaagattcccaattattgcat

SEQ ID NO: 75601 - DNA, 42 bp, Artificial Sequence
  primer
gtaaaacgacggccagtaacaatgcttgatttctgaatctgt

SEQ ID NO: 75602 - DNA, 23 bp, Artificial Sequence
  primer
catttcacttctttccttgttgg

SEQ ID NO: 75603 - DNA, 41 bp, Artificial Sequence
  primer
gtaaaacgacggccagttcctcaaattagattatgtgcagc

SEQ ID NO: 75604 - DNA, 39 bp, Artificial Sequence
  primer
gtaaaacgacggccagtgcaccattgaacagttacacca

SEQ ID NO: 75605 - DNA, 43 bp, Artificial Sequence
  primer
gtaaaacgacggccagtaaacaaaccatacacattcaagattt

SEQ ID NO: 75606 - DNA, 21 bp, Artificial Sequence
  primer
tccttggccatttagtccttt

SEQ ID NO: 75607 - DNA, 45 bp, Artificial Sequence
  primer
gtaaaacgacggccagtaaagaaccttaaacacctaagaaatgaa

SEQ ID NO: 75608 - DNA, 40 bp, Artificial Sequence
  primer
gtaaaacgacggccagttgaaagcaacagtctgtgtaagc

SEQ ID NO: 75609 - DNA, 39 bp, Artificial Sequence
  primer
gtaaaacgacggccagttccatgatccttcctgatcttc

SEQ ID NO: 75610 - DNA, 27 bp, Artificial Sequence
  primer
caggtctcctaggactttattacaagc

SEQ ID NO: 75611 - DNA, 42 bp, Artificial Sequence
  primer
gtaaaacgacggccagtactttccatttactgacatgaaaca

SEQ ID NO: 75612 - DNA, 27 bp, Artificial Sequence
  primer
aggataattataaactcaggtttgtgg

SEQ ID NO: 75613 - DNA, 37 bp, Artificial Sequence
  primer
gtaaaacgacggccagtgtgctctccttgacactcgg

SEQ ID NO: 75614 - DNA, 39 bp, Artificial Sequence
  primer
gtaaaacgacggccagtgggaagacccaaatgtggatag

SEQ ID NO: 75615 - DNA, 21 bp, Artificial Sequence
  primer
ttatgaagatttgcctgcacc

SEQ ID NO: 75616 - DNA, 22 bp, Artificial Sequence
  primer
tgttctccattatccaacctgg

SEQ ID NO: 75617 - DNA, 22 bp, Artificial Sequence
  primer
ccaaagtaaggtccaactgtcc

SEQ ID NO: 75618 - DNA, 21 bp, Artificial Sequence
  primer
agcaaaggaatgtgttccctg

SEQ ID NO: 75619 - DNA, 35 bp, Artificial Sequence
  primer
gtaaaacgacggccagtctggacccaaggacaggc

SEQ ID NO: 75620 - DNA, 21 bp, Artificial Sequence
  primer
gctcaatctcacaacccttcc

SEQ ID NO: 75621 - DNA, 21 bp, Artificial Sequence
  primer
tctcaacctctctgagctccc

SEQ ID NO: 75622 - DNA, 39 bp, Artificial Sequence
  primer
gtaaaacgacggccagtccctctggacaacagtaagctg

SEQ ID NO: 75623 - DNA, 38 bp, Artificial Sequence
  primer
gtaaaacgacggccagtagcaaaggaatgtgttccctg

SEQ ID NO: 75624 - DNA, 20 bp, Artificial Sequence
  primer
gccttgagtgcagaggtgtc

SEQ ID NO: 75625 - DNA, 37 bp, Artificial Sequence
  primer
gtaaaacgacggccagtgttgaatgtccaccagctcc

SEQ ID NO: 75626 - DNA, 38 bp, Artificial Sequence
  primer
gtaaaacgacggccagtggtcctggcaccaaatacttc

SEQ ID NO: 75627 - DNA, 21 bp, Artificial Sequence
  primer
tactgtcctgccttaggctcc

SEQ ID NO: 75628 - DNA, 38 bp, Artificial Sequence
  primer
gtaaaacgacggccagtctgaatcgcattgaattgctc

SEQ ID NO: 75629 - DNA, 21 bp, Artificial Sequence
  primer
gaagtcatgccacacctgttc

SEQ ID NO: 75630 - DNA, 21 bp, Artificial Sequence
  primer
gactgcttgaaattgctgtgg

SEQ ID NO: 75631 - DNA, 21 bp, Artificial Sequence
  primer
ggagaaaggacgacaggagag

SEQ ID NO: 75632 - DNA, 38 bp, Artificial Sequence
  primer
gtaaaacgacggccagtttcaaggcacatcactcaagg

SEQ ID NO: 75633 - DNA, 21 bp, Artificial Sequence
  primer
ataaatagggccctggtgttg

SEQ ID NO: 75634 - DNA, 21 bp, Artificial Sequence
  primer
gcaccttgccttatgttcacc

SEQ ID NO: 75635 - DNA, 36 bp, Artificial Sequence
  primer
gtaaaacgacggccagtccctcacgcatttctgaac

SEQ ID NO: 75636 - DNA, 39 bp, Artificial Sequence
  primer
gtaaaacgacggccagttccaaacaatgacagctgctac

SEQ ID NO: 75637 - DNA, 38 bp, Artificial Sequence
  primer
gtaaaacgacggccagtataggtgccagcagtttgctc

SEQ ID NO: 75638 - DNA, 39 bp, Artificial Sequence; identical to SEQ ID NO: 75636
  primer

SEQ ID NO: 75639 - DNA, 21 bp, Artificial Sequence
  primer
agtgcaatatgtgccctcagc

SEQ ID NO: 75640 - DNA, 40 bp, Artificial Sequence
  primer
gtaaaacgacggccagtttattcagggaaacaaccaaatc

SEQ ID NO: 75641 - DNA, 38 bp, Artificial Sequence
  primer
gtaaaacgacggccagtagaagttcacaagcaacccag

SEQ ID NO: 75642 - DNA, 20 bp, Artificial Sequence
  primer
catttaaactctgcgaggcg

SEQ ID NO: 75643 - DNA, 21 bp, Artificial Sequence
  primer
taagtgcatgtcccaatcgag

SEQ ID NO: 75644 - DNA, 38 bp, Artificial Sequence
  primer
gtaaaacgacggccagtgctgaaacccaagtcctatgc

SEQ ID NO: 75645 - DNA, 21 bp, Artificial Sequence
  primer
aacaactgagcttctcctccg

SEQ ID NO: 75646 - DNA, 36 bp, Artificial Sequence
  primer
gtaaaacgacggccagtagctgtcactgcggagagg

SEQ ID NO: 75647 - DNA, 38 bp, Artificial Sequence
  primer
gtaaaacgacggccagtcatctgagctggacagagagg

SEQ ID NO: 75648 - DNA, 19 bp, Artificial Sequence
  primer
cccagcttctggtcacagc

SEQ ID NO: 75649 - DNA, 20 bp, Artificial Sequence
  primer
caggctgaggtaggtgatgg

SEQ ID NO: 75650 - DNA, 19 bp, Artificial Sequence
  primer
gtcagggagtgcaacaggg

SEQ ID NO: 75651 - DNA, 21 bp, Artificial Sequence
  primer
cagcttggctctatgcatctg

SEQ ID NO: 75652 - DNA, 18 bp, Artificial Sequence
  primer
gaaggacgtggccctcag

SEQ ID NO: 75653 - DNA, 39 bp, Artificial Sequence
  primer
gtaaaacgacggccagtaaacttccacctgtcagcaaac

SEQ ID NO: 75654 - DNA, 21 bp, Artificial Sequence
  primer
gcttgtagtggtctgtggacg

SEQ ID NO: 75655 - DNA, 38 bp, Artificial Sequence
  primer
gtaaaacgacggccagtaaaggtaaatgctcgcacagc

SEQ ID NO: 75656 - DNA, 21 bp, Artificial Sequence
  primer
cagacctccagtacgtcaggg

SEQ ID NO: 75657 - DNA, 37 bp, Artificial Sequence
  primer
gtaaaacgacggccagtctgtggccctgtatctcctg

SEQ ID NO: 75658 - DNA, 21 bp, Artificial Sequence
  primer
ggaggtttgtccgtcagtttc

SEQ ID NO: 75659 - DNA, 38 bp, Artificial Sequence
  primer
gtaaaacgacggccagtgccttgagctaaagcaaggtg

SEQ ID NO: 75660 - DNA, 38 bp, Artificial Sequence
  primer
gtaaaacgacggccagtctccgacttcaggtcttccac

SEQ ID NO: 75661 - DNA, 38 bp, Artificial Sequence
  primer
gtaaaacgacggccagtaagtgctaagcatcgaggagc

SEQ ID NO: 75662 - DNA, 21 bp, Artificial Sequence
  primer
tcacctcaaattccactgtcc

SEQ ID NO: 75663 - DNA, 21 bp, Artificial Sequence
  primer
caaggagctgactttcacgac

SEQ ID NO: 75664 - DNA, 38 bp, Artificial Sequence
  primer
gtaaaacgacggccagtacagcctctttgctatgggag

SEQ ID NO: 75665 - DNA, 20 bp, Artificial Sequence
  primer
aaaccacacgcacgtagtcc

SEQ ID NO: 75666 - DNA, 19 bp, Artificial Sequence
  primer
cctgcctgttcagtggtcc

SEQ ID NO: 75667 - DNA, 38 bp, Artificial Sequence
  primer
gtaaaacgacggccagtagctttcctggctctgagaag

SEQ ID NO: 75668 - DNA, 36 bp, Artificial Sequence
  primer
gtaaaacgacggccagtaggttcatggagccttggg

SEQ ID NO: 75669 - DNA, 38 bp, Artificial Sequence
  primer
gtaaaacgacggccagttcgactgaaatgtggctcaag

SEQ ID NO: 75670 - DNA, 21 bp, Artificial Sequence
  primer
tgaaaggaaggaagctcttgg

SEQ ID NO: 75671 - DNA, 21 bp, Artificial Sequence
  primer
cagctaggagagcattcccac

SEQ ID NO: 75672 - DNA, 38 bp, Artificial Sequence
  primer
gtaaaacgacggccagtagggacctggagtatcattgc

SEQ ID NO: 75673 - DNA, 21 bp, Artificial Sequence
  primer
gtacacctcactcaccctggc

SEQ ID NO: 75674 - DNA, 38 bp, Artificial Sequence
  primer
gtaaaacgacggccagtgctgaactgataggacctggg

SEQ ID NO: 75675 - DNA, 20 bp, Artificial Sequence
  primer
agctccacctacagggaagg

SEQ ID NO: 75676 - DNA, 18 bp, Artificial Sequence
  primer
cagcagggaggccttgag

SEQ ID NO: 75677 - DNA, 23 bp, Artificial Sequence
  primer
gcagagactaaatcagcatcacc

SEQ ID NO: 75678 - DNA, 38 bp, Artificial Sequence
  primer
gtaaaacgacggccagtacctcttgtcctctccgttcc

SEQ ID NO: 75679 - DNA, 36 bp, Artificial Sequence
  primer
gtaaaacgacggccagtaagagccctgtcgggagtc

SEQ ID NO: 75680 - DNA, 37 bp, Artificial Sequence
  primer
gtaaaacgacggccagtcctccagaacaggaagggac

SEQ ID NO: 75681 - DNA, 36 bp, Artificial Sequence
  primer
gtaaaacgacggccagtggaagtgactttggccagc

SEQ ID NO: 75682 - DNA, 22 bp, Artificial Sequence
  primer
tgatagggagttgagaggaagg

SEQ ID NO: 75683 - DNA, 38 bp, Artificial Sequence
  primer
gtaaaacgacggccagtggccaaaggcttatttcagtc

SEQ ID NO: 75684 - DNA, 39 bp, Artificial Sequence
  primer
gtaaaacgacggccagtggatttccctctttgctcattc

SEQ ID NO: 75685 - DNA, 21 bp, Artificial Sequence
  primer
gatagacccaacccacactcc

SEQ ID NO: 75686 - DNA, 38 bp, Artificial Sequence
  primer
gtaaaacgacggccagttaaaggcagagtgctgtggac

SEQ ID NO: 75687 - DNA, 38 bp, Artificial Sequence
  primer
gtaaaacgacggccagtcccaggttctggcacattaac

SEQ ID NO: 75688 - DNA, 37 bp, Artificial Sequence
  primer
gtaaaacgacggccagttcagacccaagctccacaag

SEQ ID NO: 75689 - DNA, 38 bp, Artificial Sequence
  primer
gtaaaacgacggccagtcgggatagacggtttcaaatg

SEQ ID NO: 75690 - DNA, 19 bp, Artificial Sequence
  primer
gctgtggctttggaaattg

SEQ ID NO: 75691 - DNA, 38 bp, Artificial Sequence
  primer
gtaaaacgacggccagtcactgatgaatccagtgcagc

SEQ ID NO: 75692 - DNA, 37 bp, Artificial Sequence
  primer
gtaaaacgacggccagtaagagcaggaagagcagggt

SEQ ID NO: 75693 - DNA, 18 bp, Artificial Sequence
  primer
cttcaacagcgtgccagg

SEQ ID NO: 75694 - DNA, 38 bp, Artificial Sequence
  primer
gtaaaacgacggccagtaggaccaagaatagctgcgac

SEQ ID NO: 75695 - DNA, 21 bp, Artificial Sequence
  primer
ggagatgaggagactcggacc

SEQ ID NO: 75696 - DNA, 21 bp, Artificial Sequence
  primer
ccctcccatctcatcctttac

SEQ ID NO: 75697 - DNA, 21 bp, Artificial Sequence
  primer
tgtgtatgtgtccctcttggg

SEQ ID NO: 75698 - DNA, 38 bp, Artificial Sequence
  primer
gtaaaacgacggccagtactgttcccaagaagccagtg

SEQ ID NO: 75699 - DNA, 20 bp, Artificial Sequence
  primer
caggaagcagctactctgcg

SEQ ID NO: 75700 - DNA, 22 bp, Artificial Sequence
  primer
gaggactttggaagtcagcttg

SEQ ID NO: 75701 - DNA, 21 bp, Artificial Sequence
  primer
ccttaggaatgccaggacacc

SEQ ID NO: 75702 - DNA, 38 bp, Artificial Sequence
  primer
gtaaaacgacggccagtaggtcctagccgtctgtcatc

SEQ ID NO: 75703 - DNA, 38 bp, Artificial Sequence
  primer
gtaaaacgacggccagtaaccctgctacagtcgaggag

SEQ ID NO: 75704 - DNA, 38 bp, Artificial Sequence
  primer
gtaaaacgacggccagtcagctggtacacgaagacacc

SEQ ID NO: 75705 - DNA, 37 bp, Artificial Sequence
  primer
gtaaaacgacggccagttgaaagggtggatcgtgaag

SEQ ID NO: 75706 - DNA, 22 bp, Artificial Sequence
  primer
tgaaacatatggaggatttggc

SEQ ID NO: 75707 - DNA, 38 bp, Artificial Sequence
  primer
gtaaaacgacggccagtgccaccaaggcattatttagc

SEQ ID NO: 75708 - DNA, 21 bp, Artificial Sequence
  primer
acacaacatcttcaggccagc

SEQ ID NO: 75709 - DNA, 21 bp, Artificial Sequence
  primer
aagtgagggtcaaggttggag

SEQ ID NO: 75710 - DNA, 39 bp, Artificial Sequence
  primer
gtaaaacgacggccagtctgtttccttaatgggtggaag

SEQ ID NO: 75711 - DNA, 36 bp, Artificial Sequence
  primer
gtaaaacgacggccagtttcctggtgaagggtgtgg

SEQ ID NO: 75712 - DNA, 21 bp, Artificial Sequence
  primer
actcatccatctgaagtgggc

SEQ ID NO: 75713 - DNA, 38 bp, Artificial Sequence
  primer
gtaaaacgacggccagtgtgtccctttctctgtcagcc

SEQ ID NO: 75714 - DNA, 37 bp, Artificial Sequence
  primer
gtaaaacgacggccagttcctcctcagccaagaggac

SEQ ID NO: 75715 - DNA, 21 bp, Artificial Sequence
  primer
acctaccacgttgatcccaag

SEQ ID NO: 75716 - DNA, 38 bp, Artificial Sequence
  primer
gtaaaacgacggccagtacttgtttcctcctttgctcc

SEQ ID NO: 75717 - DNA, 21 bp, Artificial Sequence
  primer
agaagtgagtggtgctcctcc

SEQ ID NO: 75718 - DNA, 38 bp, Artificial Sequence
  primer
gtaaaacgacggccagtgatgctcttcttctgggacct

SEQ ID NO: 75719 - DNA, 20 bp, Artificial Sequence
  primer
cagctcagaggcaaggaatg

SEQ ID NO: 75720 - DNA, 36 bp, Artificial Sequence
  primer
gtaaaacgacggccagtcaaagaagctggctgaggc

SEQ ID NO: 75721 - DNA, 21 bp, Artificial Sequence
  primer
gagacacagactgtcatgcga

SEQ ID NO: 75722 - DNA, 38 bp, Artificial Sequence
  primer
gtaaaacgacggccagtcacgtctcggtacagtctcca

SEQ ID NO: 75723 - DNA, 21 bp, Artificial Sequence
  primer
gggaaatgttgggactcactc

SEQ ID NO: 75724 - DNA, 21 bp, Artificial Sequence
  primer
ctgtaagaacccaggagggaa

SEQ ID NO: 75725 - DNA, 21 bp, Artificial Sequence
  primer
tcaggctcacacatggctatc

SEQ ID NO: 75726 - DNA, 38 bp, Artificial Sequence
  primer
gtaaaacgacggccagtcttgacaacgcctttgctttc

SEQ ID NO: 75727 - DNA, 20 bp, Artificial Sequence
  primer
cacacacccacatatgcacc

SEQ ID NO: 75728 - DNA, 38 bp, Artificial Sequence
  primer
gtaaaacgacggccagtctgaatctgtgaccctcaggc

SEQ ID NO: 75729 - DNA, 22 bp, Artificial Sequence
  primer
ttctcttccaaacccaagtgag

SEQ ID NO: 75730 - DNA, 22 bp, Artificial Sequence
  primer
tccaagaacctagagcctcctc

SEQ ID NO: 75731 - DNA, 22 bp, Artificial Sequence
  primer
cttctcttccattcccatcaac

SEQ ID NO: 75732 - DNA, 21 bp, Artificial Sequence
  primer
aaggtatgtgaagcagccagc

SEQ ID NO: 75733 - DNA, 38 bp, Artificial Sequence
  primer
gtaaaacgacggccagtcttgtagaatgcttcccgtcc

SEQ ID NO: 75734 - DNA, 21 bp, Artificial Sequence
  primer
caagaaagcttgggttatgcc

SEQ ID NO: 75735 - DNA, 21 bp, Artificial Sequence
  primer
ccctggatctccatgtcaaag

SEQ ID NO: 75736 - DNA, 21 bp, Artificial Sequence
  primer
tggattccacctcaggcttac

SEQ ID NO: 75737 - DNA, 21 bp, Artificial Sequence
  primer
cctcctccggactcctaaatc

SEQ ID NO: 75738 - DNA, 26 bp, Artificial Sequence
  primer
ccaaatttcctaacataaatcattgc

SEQ ID NO: 75739 - DNA, 35 bp, Artificial Sequence
  primer
gtaaaacgacggccagtgccctgacgaccagtttg

SEQ ID NO: 75740 - DNA, 21 bp, Artificial Sequence
  primer
cacaagctattctggcaatgg

SEQ ID NO: 75741 - DNA, 26 bp, Artificial Sequence
  primer
tgctttattactgggtaaagttctgc

SEQ ID NO: 75742 - DNA, 38 bp, Artificial Sequence
  primer
gtaaaacgacggccagttggatgaatggagttggctac

SEQ ID NO: 75743 - DNA, 44 bp, Artificial Sequence
  primer
gtaaaacgacggccagtctaccacttgtatatccagattaaggc

SEQ ID NO: 75744 - DNA, 38 bp, Artificial Sequence
  primer
gtaaaacgacggccagtagggaaacaacaaaccagtca

SEQ ID NO: 75745 - DNA, 22 bp, Artificial Sequence
  primer
aaggcagtcccaatactcacac

SEQ ID NO: 75746 - DNA, 19 bp, Artificial Sequence
  primer
ccatgggcacccaatatgt

SEQ ID NO: 75747 - DNA, 38 bp, Artificial Sequence
  primer
gtaaaacgacggccagtactcccagttgtgtggcaaag

SEQ ID NO: 75748 - DNA, 18 bp, Artificial Sequence
  primer
aatccaccaaactggccc

SEQ ID NO: 75749 - DNA, 24 bp, Artificial Sequence
  primer
gacgtcaacgaagagtgaaataac

SEQ ID NO: 75750 - DNA, 21 bp, Artificial Sequence
  primer
tatctgcctaatctttggccc

SEQ ID NO: 75751 - DNA, 22 bp, Artificial Sequence
  primer
cagtcttagggctttatggtcg

SEQ ID NO: 75752 - DNA, 35 bp, Artificial Sequence
  primer
gtaaaacgacggccagtcccactcccattcccaag

SEQ ID NO: 75753 - DNA, 41 bp, Artificial Sequence
  primer
gtaaaacgacggccagtaaatcaaatttcaaggataacgct

SEQ ID NO: 75754 - DNA, 25 bp, Artificial Sequence
  primer
gcacggtaggtaccctacacatatt

SEQ ID NO: 75755 - DNA, 28 bp, Artificial Sequence
  primer
aaatcttcctctaaccaaatatctctgt

SEQ ID NO: 75756 - DNA, 40 bp, Artificial Sequence
  primer
gtaaaacgacggccagtgctaacaatcctgatggcataac

SEQ ID NO: 75757 - DNA, 23 bp, Artificial Sequence
  primer
aagaaagagggttcagaaacagg

SEQ ID NO: 75758 - DNA, 37 bp, Artificial Sequence
  primer
gtaaaacgacggccagttggcgggtacctgtaatctc

SEQ ID NO: 75759 - DNA, 21 bp, Artificial Sequence
  primer
ctaacctgcatacccatgtgc

SEQ ID NO: 75760 - DNA, 21 bp, Artificial Sequence
  primer
acacaactggaactgagggac

SEQ ID NO: 75761 - DNA, 40 bp, Artificial Sequence
  primer
gtaaaacgacggccagttcacaagaactcattccagcttc

SEQ ID NO: 75762 - DNA, 18 bp, Artificial Sequence
  primer
caacagggcaagactccg

SEQ ID NO: 75763 - DNA, 26 bp, Artificial Sequence
  primer
gagttcactaatcatgtaaacaaggg

SEQ ID NO: 75764 - DNA, 39 bp, Artificial Sequence
  primer
gtaaaacgacggccagtcagcacacccaaactgtacaac

SEQ ID NO: 75765 - DNA, 24 bp, Artificial Sequence
  primer
gatttatggatagccaagttcctg

SEQ ID NO: 75766 - DNA, 22 bp, Artificial Sequence
  primer
aacggccaaatggttaagtatc

SEQ ID NO: 75767 - DNA, 23 bp, Artificial Sequence
  primer
ggcaaagcagaacaatataaacc

SEQ ID NO: 75768 - DNA, 25 bp, Artificial Sequence
  primer
cgctatctctgagggttactaaagg

SEQ ID NO: 75769 - DNA, 38 bp, Artificial Sequence
  primer
gtaaaacgacggccagtcagttcctcagtgcagcacac

SEQ ID NO: 75770 - DNA, 41 bp, Artificial Sequence
  primer
gtaaaacgacggccagtgcctgctttagtttagctgatttc

SEQ ID NO: 75771 - DNA, 38 bp, Artificial Sequence
  primer
gtaaaacgacggccagtttcaagacaccgaaatcagtt

SEQ ID NO: 75772 - DNA, 21 bp, Artificial Sequence
  primer
gaaggttgctgttcctcatcc

SEQ ID NO: 75773 - DNA, 20 bp, Artificial Sequence
  primer
gtccttggaggaagtgggag

SEQ ID NO: 75774 - DNA, 38 bp, Artificial Sequence
  primer
gtaaaacgacggccagtagcagagaacctttgcattcg

SEQ ID NO: 75775 - DNA, 20 bp, Artificial Sequence
  primer
ccagagccagtggaaagttg

SEQ ID NO: 75776 - DNA, 38 bp, Artificial Sequence
  primer
gtaaaacgacggccagtaccacacggtccatacaactg

SEQ ID NO: 75777 - DNA, 38 bp, Artificial Sequence
  primer
gtaaaacgacggccagtgaaaggcgacatttctggaag

SEQ ID NO: 75778 - DNA, 38 bp, Artificial Sequence
  primer
gtaaaacgacggccagtggtaggagccgctagataccc

SEQ ID NO: 75779 - DNA, 21 bp, Artificial Sequence
  primer
tgctgaaaccagggaactagc

SEQ ID NO: 75780 - DNA, 21 bp, Artificial Sequence
  primer
ctgtgtctagagcatggctgg

SEQ ID NO: 75781 - DNA, 36 bp, Artificial Sequence
  primer
gtaaaacgacggccagtatggtggctggtccatagg

SEQ ID NO: 75782 - DNA, 22 bp, Artificial Sequence
  primer
gagctaagcttcactgtcaccc

SEQ ID NO: 75783 - DNA, 21 bp, Artificial Sequence
  primer
tgaagaagggaaatgtccagg

SEQ ID NO: 75784 - DNA, 21 bp, Artificial Sequence
  primer
ggaccacactcaaagccagag

SEQ ID NO: 75785 - DNA, 38 bp, Artificial Sequence
  primer
gtaaaacgacggccagtcaaggcactgcagaggagtag

SEQ ID NO: 75786 - DNA, 38 bp, Artificial Sequence
  primer
gtaaaacgacggccagtcagctgatgttcccatccttc

SEQ ID NO: 75787 - DNA, 40 bp, Artificial Sequence
  primer
gtaaaacgacggccagtcagaaggaatcaaatgactgagg

SEQ ID NO: 75788 - DNA, 21 bp, Artificial Sequence
  primer
agcagggaagtttgagacctg

SEQ ID NO: 75789 - DNA, 21 bp, Artificial Sequence
  primer
cacgggtcagctgtctgtaag

SEQ ID NO: 75790 - DNA, 38 bp, Artificial Sequence
  primer
gtaaaacgacggccagtgagaaatgaggtgacttgccc

SEQ ID NO: 75791 - DNA, 38 bp, Artificial Sequence
  primer
gtaaaacgacggccagtcatcagtgctgaaactctggc

SEQ ID NO: 75792 - DNA, 20 bp, Artificial Sequence
  primer
ctggtgacttggaatgtggg

SEQ ID NO: 75793 - DNA, 37 bp, Artificial Sequence
  primer
gtaaaacgacggccagtccagatgggtggcatctaag

SEQ ID NO: 75794 - DNA, 21 bp, Artificial Sequence
  primer
atgtccaggaagcactccaag

SEQ ID NO: 75795 - DNA, 21 bp, Artificial Sequence
  primer
tctcggtggatgatgttcttg

SEQ ID NO: 75796 - DNA, 38 bp, Artificial Sequence
  primer
gtaaaacgacggccagtcccttgtaattcccagaaccc

SEQ ID NO: 75797 - DNA, 20 bp, Artificial Sequence
  primer
gtgggacatgaggagtccag

SEQ ID NO: 75798 - DNA, 38 bp, Artificial Sequence
  primer
gtaaaacgacggccagttggcatttatcagtgcaaagg

SEQ ID NO: 75799 - DNA, 21 bp, Artificial Sequence
  primer
tcacatctgcctccatctcag

SEQ ID NO: 75800 - DNA, 38 bp, Artificial Sequence
  primer
gtaaaacgacggccagtggcagagacgaacattgattg

SEQ ID NO: 75801 - DNA, 21 bp, Artificial Sequence
  primer
caggccttgatggacttcttc

SEQ ID NO: 75802 - DNA, 37 bp, Artificial Sequence
  primer
gtaaaacgacggccagtgtggcagtagctctcgggac

SEQ ID NO: 75803 - DNA, 38 bp, Artificial Sequence
  primer
gtaaaacgacggccagtaactccacccagttcttcacg

SEQ ID NO: 75804 - DNA, 38 bp, Artificial Sequence
  primer
gtaaaacgacggccagtctggatgatctcctcctcgtc

SEQ ID NO: 75805 - DNA, 38 bp, Artificial Sequence
  primer
gtaaaacgacggccagtaaagccacaggctggatgtag

SEQ ID NO: 75806 - DNA, 37 bp, Artificial Sequence
  primer
gtaaaacgacggccagtatgacacgagtgtgtgcgag

SEQ ID NO: 75807 - DNA, 21 bp, Artificial Sequence
  primer
tgggatcatgcctgaagtacc

SEQ ID NO: 75808 - DNA, 37 bp, Artificial Sequence
  primer
gtaaaacgacggccagtcactgagccactgaaccctg

SEQ ID NO: 75809 - DNA, 25 bp, Artificial Sequence
  primer
tgaacttataaagccattcatccaa

SEQ ID NO: 75810 - DNA, 23 bp, Artificial Sequence
  primer
gcccgtggtcattataatctctg

SEQ ID NO: 75811 - DNA, 38 bp, Artificial Sequence
  primer
gtaaaacgacggccagttgtttccatctgtttccttgc

SEQ ID NO: 75812 - DNA, 21 bp, Artificial Sequence
  primer
cttgaccctagaacccaatgc

SEQ ID NO: 75813 - DNA, 38 bp, Artificial Sequence
  primer
gtaaaacgacggccagtaggaccataactgtcccttgg

SEQ ID NO: 75814 - DNA, 38 bp, Artificial Sequence
  primer
gtaaaacgacggccagtcgacagatggactggagtcag

SEQ ID NO: 75815 - DNA, 21 bp, Artificial Sequence
  primer
ttagcatcagctgctttggag

SEQ ID NO: 75816 - DNA, 38 bp, Artificial Sequence
  primer
gtaaaacgacggccagtaagtgatactcccacttccgc

SEQ ID NO: 75817 - DNA, 41 bp, Artificial Sequence
  primer
gtaaaacgacggccagttgtggccaaatgtaacatcatatc

SEQ ID NO: 75818 - DNA, 27 bp, Artificial Sequence
  primer
gacagagaaagaatttatagcacactg

SEQ ID NO: 75819 - DNA, 26 bp, Artificial Sequence
  primer
ttctttcctaagcgtttagagtgatg

SEQ ID NO: 75820 - DNA, 38 bp, Artificial Sequence
  primer
gtaaaacgacggccagtgggcaacagaagaagaccttg

SEQ ID NO: 75821 - DNA, 21 bp, Artificial Sequence
  primer
tggacagtcaggtcaggtagg

SEQ ID NO: 75822 - DNA, 38 bp, Artificial Sequence
  primer
gtaaaacgacggccagtaaagccatgctacctgtctgg

SEQ ID NO: 75823 - DNA, 21 bp, Artificial Sequence
  primer
aaactcttcagccatcattgg

SEQ ID NO: 75824 - DNA, 21 bp, Artificial Sequence
  primer
gacttgtccactccctccaag

SEQ ID NO: 75825 - DNA, 21 bp, Artificial Sequence
  primer
ctaacagaggaagctggcagg

SEQ ID NO: 75826 - DNA, 22 bp, Artificial Sequence
  primer
ttctctatcatggctcgagagg

SEQ ID NO: 75827 - DNA, 21 bp, Artificial Sequence
  primer
tcccacttcctggatcttcac

SEQ ID NO: 75828 - DNA, 21 bp, Artificial Sequence
  primer
ctcctccatcacaacacatgg

SEQ ID NO: 75829 - DNA, 38 bp, Artificial Sequence
  primer
gtaaaacgacggccagtcagcctaggaaactgaggtcg

SEQ ID NO: 75830 - DNA, 21 bp, Artificial Sequence
  primer
aacacaccctctaaatgtgcg

SEQ ID NO: 75831 - DNA, 21 bp, Artificial Sequence
  primer
ctggacgtttgagacatctgc

SEQ ID NO: 75832 - DNA, 23 bp, Artificial Sequence
  primer
ctttacttctgaagcagctttgc

SEQ ID NO: 75833 - DNA, 38 bp, Artificial Sequence
  primer
gtaaaacgacggccagtaatggtttcctgcagttaggg

SEQ ID NO: 75834 - DNA, 25 bp, Artificial Sequence
  primer
cataaacattgaccactttctgtga

SEQ ID NO: 75835 - DNA, 25 bp, Artificial Sequence
  primer
caataacttctttgagaactggacc

SEQ ID NO: 75836 - DNA, 39 bp, Artificial Sequence
  primer
gtaaaacgacggccagttcttgtactccacggtttccac

SEQ ID NO: 75837 - DNA, 21 bp, Artificial Sequence
  primer
gtcaaatggtcatgggaacac

SEQ ID NO: 75838 - DNA, 38 bp, Artificial Sequence
  primer
gtaaaacgacggccagtgtccacaggacagagaaaggg

SEQ ID NO: 75839 - DNA, 21 bp, Artificial Sequence
  primer
gtctgccacatttacagcacg

SEQ ID NO: 75840 - DNA, 21 bp, Artificial Sequence
  primer
aattgtatggacttgcctggg

SEQ ID NO: 75841 - DNA, 38 bp, Artificial Sequence
  primer
gtaaaacgacggccagtatatttgctccctttcctccc

SEQ ID NO: 75842 - DNA, 38 bp, Artificial Sequence
  primer
gtaaaacgacggccagttcccacgcttctaacattgag

SEQ ID NO: 75843 - DNA, 38 bp, Artificial Sequence
  primer
gtaaaacgacggccagtcacacttgcatggagaggaag

SEQ ID NO: 75844 - DNA, 21 bp, Artificial Sequence
  primer
gtccagaaagaaatcttgccc

SEQ ID NO: 75845 - DNA, 20 bp, Artificial Sequence
  primer
actcctgggctcaagcaatc

SEQ ID NO: 75846 - DNA, 39 bp, Artificial Sequence
  primer
gtaaaacgacggccagtccactgaagaatgtggaagtgg

SEQ ID NO: 75847 - DNA, 21 bp, Artificial Sequence
  primer
ctctgccttcctcccaactta

SEQ ID NO: 75848 - DNA, 40 bp, Artificial Sequence
  primer
gtaaaacgacggccagttgtgctcattatttgtccaaagg

SEQ ID NO: 75849 - DNA, 38 bp, Artificial Sequence
  primer
gtaaaacgacggccagtatattctgcccaaaccagtcc

SEQ ID NO: 75850 - DNA, 21 bp, Artificial Sequence
  primer
tccaccacaaacactagaccg

SEQ ID NO: 75851 - DNA, 38 bp, Artificial Sequence
  primer
gtaaaacgacggccagtctgagaggtcacaggctggtc

SEQ ID NO: 75852 - DNA, 20 bp, Artificial Sequence
  primer
ttatgaggtgggtgactcgg

SEQ ID NO: 75853 - DNA, 21 bp, Artificial Sequence
  primer
atctggtgtcagggtcagctc

SEQ ID NO: 75854 - DNA, 38 bp, Artificial Sequence
  primer
gtaaaacgacggccagtggccaacaattctgttctccc

SEQ ID NO: 75855 - DNA, 21 bp, Artificial Sequence
  primer
attcctggtcttcaatgcctg

SEQ ID NO: 75856 - DNA, 38 bp, Artificial Sequence
  primer
gtaaaacgacggccagtagaaagaggtcagcaaccagg

SEQ ID NO: 75857 - DNA, 20 bp, Artificial Sequence
  primer
agtccgggagtctggtcatc

SEQ ID NO: 75858 - DNA, 21 bp, Artificial Sequence
  primer
aagatgaggattatggcgtcc

SEQ ID NO: 75859 - DNA, 38 bp, Artificial Sequence
  primer
gtaaaacgacggccagttggcaattgaaagaggtgatg

SEQ ID NO: 75860 - DNA, 21 bp, Artificial Sequence
  primer
gggtcccagaactacaggctc

SEQ ID NO: 75861 - DNA, 20 bp, Artificial Sequence
  primer
tcagcacctctggtgtcagg

SEQ ID NO: 75862 - DNA, 21 bp, Artificial Sequence
  primer
tccagaaccactaaaggccac

SEQ ID NO: 75863 - DNA, 38 bp, Artificial Sequence
  primer
gtaaaacgacggccagtggagaattctgtgggaaaccc

SEQ ID NO: 75864 - DNA, 20 bp, Artificial Sequence
  primer
actgcaatcagaccctgcac

SEQ ID NO: 75865 - DNA, 20 bp, Artificial Sequence
  primer
agcacatgttccaggactgc

SEQ ID NO: 75866 - DNA, 21 bp, Artificial Sequence
  primer
cagaaaccctctgtgtcccac

SEQ ID NO: 75867 - DNA, 37 bp, Artificial Sequence
  primer
gtaaaacgacggccagtcctgagaagagggaaccagg

SEQ ID NO: 75868 - DNA, 18 bp, Artificial Sequence
  primer
gacgcctgtgctggagag

SEQ ID NO: 75869 - DNA, 21 bp, Artificial Sequence
  primer
aatggaaggaggaggaacgac

SEQ ID NO: 75870 - DNA, 37 bp, Artificial Sequence
  primer
gtaaaacgacggccagtacacaagacagtggcagcac

SEQ ID NO: 75871 - DNA, 37 bp, Artificial Sequence
  primer
gtaaaacgacggccagtcctggagagcctgtaggagg

SEQ ID NO: 75872 - DNA, 18 bp, Artificial Sequence
  primer
gtgcgacgtgtcacaggc

SEQ ID NO: 75873 - DNA, 21 bp, Artificial Sequence
  primer
ttgagcccagtgagctatgat

SEQ ID NO: 75874 - DNA, 37 bp, Artificial Sequence
  primer
gtaaaacgacggccagtgcctgtaatttcagcctccc

SEQ ID NO: 75875 - DNA, 24 bp, Artificial Sequence
  primer
ggaacctaatcctgtatttctcct

SEQ ID NO: 75876 - DNA, 21 bp, Artificial Sequence
  primer
agatggaagccacatgttgag

SEQ ID NO: 75877 - DNA, 36 bp, Artificial Sequence
  primer
gtaaaacgacggccagtccacgctggtctctgactg

SEQ ID NO: 75878 - DNA, 22 bp, Artificial Sequence
  primer
gcatctttgttggaagcttgag

SEQ ID NO: 75879 - DNA, 21 bp, Artificial Sequence
  primer
acaagcaggagacaaattccc

SEQ ID NO: 75880 - DNA, 21 bp, Artificial Sequence
  primer
cagtcttgcccttacagcctc

SEQ ID NO: 75881 - DNA, 21 bp, Artificial Sequence
  primer
ggtgcttcatgtaaagagcca

SEQ ID NO: 75882 - DNA, 38 bp, Artificial Sequence
  primer
gtaaaacgacggccagtactccaaagaacagctctggc

SEQ ID NO: 75883 - DNA, 21 bp, Artificial Sequence
  primer
acactggcgtgatcatagctc

SEQ ID NO: 75884 - DNA, 38 bp, Artificial Sequence
  primer
gtaaaacgacggccagtagctcactcaggatctcctcc

SEQ ID NO: 75885 - DNA, 38 bp, Artificial Sequence
  primer
gtaaaacgacggccagttctccttacgtgtgaagcctg

SEQ ID NO: 75886 - DNA, 38 bp, Artificial Sequence
  primer
gtaaaacgacggccagtgcagttgaagattgaagcagg

SEQ ID NO: 75887 - DNA, 38 bp, Artificial Sequence
  primer
gtaaaacgacggccagtctatctggacttcactgccgc

SEQ ID NO: 75888 - DNA, 21 bp, Artificial Sequence
  primer
actccagacagggaacagagg

SEQ ID NO: 75889 - DNA, 38 bp, Artificial Sequence
  primer
gtaaaacgacggccagtctcacatgcagagaatttgcc

SEQ ID NO: 75890 - DNA, 23 bp, Artificial Sequence
  primer
aaagctttcatggaaatgtctga

SEQ ID NO: 75891 - DNA, 18 bp, Artificial Sequence
  primer
ccggcctcgaataacctg

SEQ ID NO: 75892 - DNA, 39 bp, Artificial Sequence
  primer
gtaaaacgacggccagttcccacaaatctccagtaagtg

SEQ ID NO: 75893 - DNA, 22 bp, Artificial Sequence
  primer
tgaggaaagtccacaattacca

SEQ ID NO: 75894 - DNA, 41 bp, Artificial Sequence
  primer
gtaaaacgacggccagtccagacattacaaagtctccacag

SEQ ID NO: 75895 - DNA, 38 bp, Artificial Sequence
  primer
gtaaaacgacggccagttcatgacaaggtggtggtagc

SEQ ID NO: 75896 - DNA, 25 bp, Artificial Sequence
  primer
gctgtcataccctttaggaaatagc

SEQ ID NO: 75897 - DNA, 39 bp, Artificial Sequence
  primer
gtaaaacgacggccagtcattctggagaactttgcagtg

SEQ ID NO: 75898 - DNA, 22 bp, Artificial Sequence
  primer
cataccaagttcttgactgccc

SEQ ID NO: 75899 - DNA, 21 bp, Artificial Sequence
  primer
gttgtctgggagttgggattc

SEQ ID NO: 75900 - DNA, 39 bp, Artificial Sequence
  primer
gtaaaacgacggccagtaacagcagctgcaactatcctc

SEQ ID NO: 75901 - DNA, 38 bp, Artificial Sequence
  primer
gtaaaacgacggccagtataaggtgataaacccacggc

SEQ ID NO: 75902 - DNA, 20 bp, Artificial Sequence
  primer
ctgggcaatatagcgagacc

SEQ ID NO: 75903 - DNA, 42 bp, Artificial Sequence
  primer
gtaaaacgacggccagtggtcctattatctgtaaatccctgg

SEQ ID NO: 75904 - DNA, 39 bp, Artificial Sequence
  primer
gtaaaacgacggccagtcaccatcccaaattaaataccc

SEQ ID NO: 75905 - DNA, 38 bp, Artificial Sequence
  primer
gtaaaacgacggccagtaccaccacacctgaccataag

SEQ ID NO: 75906 - DNA, 25 bp, Artificial Sequence
  primer
tgtgttatatcactgtatcgcttcc

SEQ ID NO: 75907 - DNA, 44 bp, Artificial Sequence
  primer
gtaaaacgacggccagtttcatttaaattccatcataaacttga

SEQ ID NO: 75908 - DNA, 39 bp, Artificial Sequence
  primer
gtaaaacgacggccagtcatttaggcatgtcaatgatgg

SEQ ID NO: 75909 - DNA, 39 bp, Artificial Sequence
  primer
gtaaaacgacggccagtgggtcatttaatgttgcaaacc

SEQ ID NO: 75910 - DNA, 38 bp, Artificial Sequence
  primer
gtaaaacgacggccagttccatcgaggttaccatttcc

SEQ ID NO: 75911 - DNA, 19 bp, Artificial Sequence
  primer
acacagcacagagccaacg

SEQ ID NO: 75912 - DNA, 39 bp, Artificial Sequence
  primer
gtaaaacgacggccagttcaaattcttaaagcccagagc

SEQ ID NO: 75913 - DNA, 38 bp, Artificial Sequence
  primer
gtaaaacgacggccagtgcttggatatgcaaaccgata

SEQ ID NO: 75914 - DNA, 30 bp, Artificial Sequence
  primer
gtaaacttaaaggccataatcttattgtta

SEQ ID NO: 75915 - DNA, 37 bp, Artificial Sequence
  primer
gtaaaacgacggccagtccctcaattcccaaacaaac

SEQ ID NO: 75916 - DNA, 43 bp, Artificial Sequence
  primer
gtaaaacgacggccagttggtctttaactgtgagattgtgttt

SEQ ID NO: 75917 - DNA, 35 bp, Artificial Sequence
  primer
gtaaaacgacggccagtctgagatgatccacccgc

SEQ ID NO: 75918 - DNA, 37 bp, Artificial Sequence
  primer
gtaaaacgacggccagtatcgcgctaactgctcattg

SEQ ID NO: 75919 - DNA, 40 bp, Artificial Sequence
  primer
gtaaaacgacggccagtgcagaatcacttcattatgtccc

SEQ ID NO: 75920 - DNA, 21 bp, Artificial Sequence
  primer
tcatacaattcccagccttcg

SEQ ID NO: 75921 - DNA, 20 bp, Artificial Sequence
  primer
gatggcgtgccactgtactc

SEQ ID NO: 75922 - DNA, 39 bp, Artificial Sequence
  primer
gtaaaacgacggccagtagcctaactctacagcccagac

SEQ ID NO: 75923 - DNA, 40 bp, Artificial Sequence
  primer
gtaaaacgacggccagttgacatgcacagacctatagcag

SEQ ID NO: 75924 - DNA, 21 bp, Artificial Sequence
  primer
ttggccacatgtcactaaagc

SEQ ID NO: 75925 - DNA, 21 bp, Artificial Sequence
  primer
aggaagatacagcaaggccac

SEQ ID NO: 75926 - DNA, 40 bp, Artificial Sequence
  primer
gtaaaacgacggccagtagacactgcaatccagagaaatc

SEQ ID NO: 75927 - DNA, 20 bp, Artificial Sequence
  primer
ccaaggccgagtaggatagg

SEQ ID NO: 75928 - DNA, 38 bp, Artificial Sequence
  primer
gtaaaacgacggccagtaaaccaagcagagaaagaggc

SEQ ID NO: 75929 - DNA, 21 bp, Artificial Sequence
  primer
aaactgctcctttctgcatcg

SEQ ID NO: 75930 - DNA, 36 bp, Artificial Sequence
  primer
gtaaaacgacggccagttgttccacctcagcaccac

SEQ ID NO: 75931 - DNA, 38 bp, Artificial Sequence
  primer
gtaaaacgacggccagttgattcttcacaggcaccaag

SEQ ID NO: 75932 - DNA, 38 bp, Artificial Sequence
  primer
gtaaaacgacggccagtggcccagaaagagataagctg

SEQ ID NO: 75933 - DNA, 38 bp, Artificial Sequence
  primer
gtaaaacgacggccagtttcagtttccatgagctccac

SEQ ID NO: 75934 - DNA, 37 bp, Artificial Sequence
  primer
gtaaaacgacggccagttcagcccaggactgtgtgac

SEQ ID NO: 75935 - DNA, 21 bp, Artificial Sequence
  primer
tcttggaacaagggaagtgtg

SEQ ID NO: 75936 - DNA, 21 bp, Artificial Sequence
  primer
ctgcccacttctgagttccag

SEQ ID NO: 75937 - DNA, 21 bp, Artificial Sequence
  primer
accaggaagtccttggcaaac

SEQ ID NO: 75938 - DNA, 21 bp, Artificial Sequence
  primer
aatgtcgtttcatgatggcag

SEQ ID NO: 75939 - DNA, 41 bp, Artificial Sequence
  primer
gtaaaacgacggccagtcagcataacttcacacaactccag

SEQ ID NO: 75940 - DNA, 21 bp, Artificial Sequence
  primer
gaatcagttccaggttcccag

SEQ ID NO: 75941 - DNA, 21 bp, Artificial Sequence
  primer
acttagggccagacaatctcg

SEQ ID NO: 75942 - DNA, 38 bp, Artificial Sequence
  primer
gtaaaacgacggccagtaaagcttcagttgcttggcac

SEQ ID NO: 75943 - DNA, 24 bp, Artificial Sequence
  primer
tgccttctatctcttcatagatgc

SEQ ID NO: 75944 - DNA, 42 bp, Artificial Sequence
  primer
gtaaaacgacggccagtcacatttcctattcagatatccagc

SEQ ID NO: 75945 - DNA, 21 bp, Artificial Sequence
  primer
cacaccagctatcatggaagg

SEQ ID NO: 75946 - DNA, 21 bp, Artificial Sequence
  primer
gctgtcatcacaaagctacgg

SEQ ID NO: 75947 - DNA, 37 bp, Artificial Sequence
  primer
gtaaaacgacggccagtccagagagggtgacttccag

SEQ ID NO: 75948 - DNA, 39 bp, Artificial Sequence
  primer
gtaaaacgacggccagtcatgaacactgtcagatggcac

SEQ ID NO: 75949 - DNA, 25 bp, Artificial Sequence
  primer
agaaattaggaatcattcatgtcca

SEQ ID NO: 75950 - DNA, 18 bp, Artificial Sequence
  primer
ctgcaagctgaacatgcg

SEQ ID NO: 75951 - DNA, 21 bp, Artificial Sequence
  primer
tcaagctgtccttgactgcac

SEQ ID NO: 75952 - DNA, 38 bp, Artificial Sequence
  primer
gtaaaacgacggccagttgtggttagtgttaggagggc

SEQ ID NO: 75953 - DNA, 39 bp, Artificial Sequence
  primer
gtaaaacgacggccagttcacagtagagccaaggtaggg

SEQ ID NO: 75954 - DNA, 40 bp, Artificial Sequence
  primer
gtaaaacgacggccagtgctggaaagctctttgttaggag

SEQ ID NO: 75955 - DNA, 21 bp, Artificial Sequence
  primer
cctggaggaaacaaagtcagg

SEQ ID NO: 75956 - DNA, 38 bp, Artificial Sequence
  primer
gtaaaacgacggccagttctgggtagacgatgatgcag

SEQ ID NO: 75957 - DNA, 21 bp, Artificial Sequence
  primer
atggcactacatccatgcttt

SEQ ID NO: 75958 - DNA, 21 bp, Artificial Sequence
  primer
tcaatgtgaaaggcaatcagg

SEQ ID NO: 75959 - DNA, 21 bp, Artificial Sequence
  primer
cctcatttcaaatatggctgg

SEQ ID NO: 75960 - DNA, 21 bp, Artificial Sequence
  primer
cagagaactggcagactgagg

SEQ ID NO: 75961 - DNA, 39 bp, Artificial Sequence
  primer
gtaaaacgacggccagtggaaagagatgagcatgacagg

SEQ ID NO: 75962 - DNA, 22 bp, Artificial Sequence
  primer
tgaaacctatccaacatttccc

SEQ ID NO: 75963 - DNA, 21 bp, Artificial Sequence
  primer
tgaaatgggagagtcaccaaa

SEQ ID NO: 75964 - DNA, 38 bp, Artificial Sequence
  primer
gtaaaacgacggccagtagtcacgtaaccatccttggg

SEQ ID NO: 75965 - DNA, 38 bp, Artificial Sequence
  primer
gtaaaacgacggccagtatccaagatgccaactccttg

SEQ ID NO: 75966 - DNA, 39 bp, Artificial Sequence
  primer
gtaaaacgacggccagtagattcctgactgaagccaatc

SEQ ID NO: 75967 - DNA, 38 bp, Artificial Sequence
  primer
gtaaaacgacggccagtatcacagaatgaaagggctcc

SEQ ID NO: 75968 - DNA, 24 bp, Artificial Sequence
  primer
ttccaaagcagtacatgtcttcaa

SEQ ID NO: 75969 - DNA, 44 bp, Artificial Sequence
  primer
gtaaaacgacggccagttcagaattccatcttcattaagagttc

SEQ ID NO: 75970 - DNA, 21 bp, Artificial Sequence
  primer
attggccagagttggtttctg

SEQ ID NO: 75971 - DNA, 20 bp, Artificial Sequence
  primer
gggacggtggcattgataac

SEQ ID NO: 75972 - DNA, 43 bp, Artificial Sequence
  primer
gtaaaacgacggccagtaagaatcactataatgcttgtcaccc

SEQ ID NO: 75973 - DNA, 21 bp, Artificial Sequence
  primer
gctactggaatggagggtgag

SEQ ID NO: 75974 - DNA, 21 bp, Artificial Sequence
  primer
gaggagagtccatgaggttcc

SEQ ID NO: 75975 - DNA, 38 bp, Artificial Sequence
  primer
gtaaaacgacggccagtcaggctcctactctcagccac

SEQ ID NO: 75976 - DNA, 39 bp, Artificial Sequence
  primer
gtaaaacgacggccagttctgtacaaacccttaggctgc

SEQ ID NO: 75977 - DNA, 21 bp, Artificial Sequence
  primer
gggtgataaaggctggtctcc

SEQ ID NO: 75978 - DNA, 21 bp, Artificial Sequence
  primer
gagggagggtgatctggaaag

SEQ ID NO: 75979 - DNA, 21 bp, Artificial Sequence
  primer
gtggccaggaagatagacagg

SEQ ID NO: 75980 - DNA, 21 bp, Artificial Sequence
  primer
ctcaggtgaaatttggcttcc

SEQ ID NO: 75981 - DNA, 37 bp, Artificial Sequence
  primer
gtaaaacgacggccagttcatgaccttggtcctcgac

SEQ ID NO: 75982 - DNA, 37 bp, Artificial Sequence
  primer
gtaaaacgacggccagtccaaagggcactctggaaag

SEQ ID NO: 75983 - DNA, 21 bp, Artificial Sequence
  primer
cttctgaccagacactgagcc

SEQ ID NO: 75984 - DNA, 36 bp, Artificial Sequence
  primer
gtaaaacgacggccagtaggaaccaggcttgggaag

SEQ ID NO: 75985 - DNA, 21 bp, Artificial Sequence
  primer
acacacttcaccatccactcg

SEQ ID NO: 75986 - DNA, 35 bp, Artificial Sequence
  primer
gtaaaacgacggccagtatgggagccaacaggagg

SEQ ID NO: 75987 - DNA, 38 bp, Artificial Sequence
  primer
gtaaaacgacggccagtttcctggccagattgtatcag

SEQ ID NO: 75988 - DNA, 21 bp, Artificial Sequence
  primer
catccagcaatgtttcctgag

SEQ ID NO: 75989 - DNA, 23 bp, Artificial Sequence
  primer
tcaaattgagcgaagtctgtttc

SEQ ID NO: 75990 - DNA, 38 bp, Artificial Sequence
  primer
gtaaaacgacggccagtttctcatttcccttccacctc

SEQ ID NO: 75991 - DNA, 23 bp, Artificial Sequence
  primer
tcaattgagatttaattgcctgg

SEQ ID NO: 75992 - DNA, 22 bp, Artificial Sequence
  primer
aaggttgatggcttcacatttc

SEQ ID NO: 75993 - DNA, 38 bp, Artificial Sequence
  primer
gtaaaacgacggccagtcttggtttcaggtcaaggagg

SEQ ID NO: 75994 - DNA, 25 bp, Artificial Sequence
  primer
caccaagagggaatttgtagagttt

SEQ ID NO: 75995 - DNA, 37 bp, Artificial Sequence
  primer
gtaaaacgacggccagtaggatatcccacatgctccc

SEQ ID NO: 75996 - DNA, 38 bp, Artificial Sequence
  primer
gtaaaacgacggccagtccttgatcttaagccgcagac

SEQ ID NO: 75997 - DNA, 22 bp, Artificial Sequence
  primer
acctctgaacttgctgtgtctg

SEQ ID NO: 75998 - DNA, 38 bp, Artificial Sequence
  primer
gtaaaacgacggccagttaatccacactcaacccaccc

SEQ ID NO: 75999 - DNA, 21 bp, Artificial Sequence
  primer
tgttcgttccatgaccttctg

SEQ ID NO: 76000 - DNA, 21 bp, Artificial Sequence
  primer
tgctgtcctcaagaaacaggc

SEQ ID NO: 76001 - DNA, 22 bp, Artificial Sequence
  primer
aacaaactctgcaatgatgtgg

SEQ ID NO: 76002 - DNA, 22 bp, Artificial Sequence
  primer
aggcagtattgacccagacaac

SEQ ID NO: 76003 - DNA, 21 bp, Artificial Sequence
  primer
taaatccaggaggtgcaagaa

SEQ ID NO: 76004 - DNA, 21 bp, Artificial Sequence
  primer
aggcacatgctcccagtctac

SEQ ID NO: 76005 - DNA, 25 bp, Artificial Sequence
  primer
aatgaaataagccttgttgattacg

SEQ ID NO: 76006 - DNA, 21 bp, Artificial Sequence
  primer
tgactcagtgcttcacttccc

SEQ ID NO: 76007 - DNA, 38 bp, Artificial Sequence
  primer
gtaaaacgacggccagtaatttacacccagaccatccg

SEQ ID NO: 76008 - DNA, 21 bp, Artificial Sequence
  primer
ctcatccaaccttctgtgtgg

SEQ ID NO: 76009 - DNA, 38 bp, Artificial Sequence
  primer
gtaaaacgacggccagtatactgccaggcccatgttac

SEQ ID NO: 76010 - DNA, 21 bp, Artificial Sequence
  primer
ctctccatatactgggagggc

SEQ ID NO: 76011 - DNA, 38 bp, Artificial Sequence
  primer
gtaaaacgacggccagtagctccagagagaggcaagtg

SEQ ID NO: 76012 - DNA, 22 bp, Artificial Sequence
  primer
ccaataacggaccatctttgtc

SEQ ID NO: 76013 - DNA, 38 bp, Artificial Sequence
  primer
gtaaaacgacggccagtcaatagtgtgagcttcctgcc

SEQ ID NO: 76014 - DNA, 21 bp, Artificial Sequence
  primer
ttgtggttgctttctttggag

SEQ ID NO: 76015 - DNA, 21 bp, Artificial Sequence
  primer
tttgaggcgtgaggactacag

SEQ ID NO: 76016 - DNA, 21 bp, Artificial Sequence
  primer
acacgcaaactggagaatcac

SEQ ID NO: 76017 - DNA, 19 bp, Artificial Sequence
  primer
agtcaagggccagatgctc

SEQ ID NO: 76018 - DNA, 22 bp, Artificial Sequence
  primer
ttacctgctgtgggatacttcc

SEQ ID NO: 76019 - DNA, 38 bp, Artificial Sequence
  primer
gtaaaacgacggccagtctgatgtgaaagcaaggcttc

SEQ ID NO: 76020 - DNA, 37 bp, Artificial Sequence
  primer
gtaaaacgacggccagtatttcctcccatgttgggtc

SEQ ID NO: 76021 - DNA, 21 bp, Artificial Sequence
  primer
gaccctaggaatgcacaaagc

SEQ ID NO: 76022 - DNA, 38 bp, Artificial Sequence
  primer
gtaaaacgacggccagtgtgtgtgaatcaaaccgatgc

SEQ ID NO: 76023 - DNA, 38 bp, Artificial Sequence
  primer
gtaaaacgacggccagtaaggtgaccgtgtcgttcttc

SEQ ID NO: 76024 - DNA, 37 bp, Artificial Sequence
  primer
gtaaaacgacggccagtgtggcaggtgcactgattct

SEQ ID NO: 76025 - DNA, 44 bp, Artificial Sequence
  primer
gtaaaacgacggccagtacatgtatctttcaattctgagatgag

SEQ ID NO: 76026 - DNA, 21 bp, Artificial Sequence
  primer
aaacaacttcatgaggcatgg

SEQ ID NO: 76027 - DNA, 21 bp, Artificial Sequence
  primer
actatcactgggccagctttc

SEQ ID NO: 76028 - DNA, 19 bp, Artificial Sequence
  primer
gtttcttccgtgctgctcc

SEQ ID NO: 76029 - DNA, 21 bp, Artificial Sequence
  primer
agaatcctggacttcacggag

SEQ ID NO: 76030 - DNA, 38 bp, Artificial Sequence
  primer
gtaaaacgacggccagtatcgctggtgacttcaatgtg

SEQ ID NO: 76031 - DNA, 39 bp, Artificial Sequence
  primer
gtaaaacgacggccagttcagtctgtttcttaggagccg

SEQ ID NO: 76032 - DNA, 21 bp, Artificial Sequence
  primer
acgtcttggaaagaggcactg

SEQ ID NO: 76033 - DNA, 38 bp, Artificial Sequence
  primer
gtaaaacgacggccagtctcgggagtgatgagatgttg

SEQ ID NO: 76034 - DNA, 21 bp, Artificial Sequence
  primer
tcctgtccgagttcgttactg

SEQ ID NO: 76035 - DNA, 38 bp, Artificial Sequence
  primer
gtaaaacgacggccagtttgctgcattgggaattagac

SEQ ID NO: 76036 - DNA, 20 bp, Artificial Sequence
  primer
gtcttgcaggctgtgctttc

SEQ ID NO: 76037 - DNA, 21 bp, Artificial Sequence
  primer
agagggagaagcctggtatcc

SEQ ID NO: 76038 - DNA, 22 bp, Artificial Sequence
  primer
tctttatgccagcacctatttg

SEQ ID NO: 76039 - DNA, 22 bp, Artificial Sequence
  primer
gaatcactgaagcattgggaag

SEQ ID NO: 76040 - DNA, 19 bp, Artificial Sequence
  primer
accacgggagtgagcaaac

SEQ ID NO: 76041 - DNA, 38 bp, Artificial Sequence
  primer
gtaaaacgacggccagtgctactctgctggtggtttgg

SEQ ID NO: 76042 - DNA, 20 bp, Artificial Sequence
  primer
aaatgcaattgtagggctgc

SEQ ID NO: 76043 - DNA, 40 bp, Artificial Sequence
  primer
gtaaaacgacggccagtcctcagagaggagatagaatgga

SEQ ID NO: 76044 - DNA, 38 bp, Artificial Sequence
  primer
gtaaaacgacggccagtagagtgaggccagtatttgcg

SEQ ID NO: 76045 - DNA, 21 bp, Artificial Sequence
  primer
aggcttggcttgtcatattgg

SEQ ID NO: 76046 - DNA, 38 bp, Artificial Sequence
  primer
gtaaaacgacggccagtcgtagtgcccagctctacttg

SEQ ID NO: 76047 - DNA, 36 bp, Artificial Sequence
  primer
gtaaaacgacggccagtaaacctgggactggtctgc

SEQ ID NO: 76048 - DNA, 37 bp, Artificial Sequence
  primer
gtaaaacgacggccagtagcggtcagactgcagagag

SEQ ID NO: 76049 - DNA, 21 bp, Artificial Sequence
  primer
aggcagggagggacagtaaag

SEQ ID NO: 76050 - DNA, 38 bp, Artificial Sequence
  primer
gtaaaacgacggccagtctgccttggaataagctcctg

SEQ ID NO: 76051 - DNA, 20 bp, Artificial Sequence
  primer
gctgttggtggaagaaaggg

SEQ ID NO: 76052 - DNA, 21 bp, Artificial Sequence
  primer
cagaaagcaaagacctgggag

SEQ ID NO: 76053 - DNA, 21 bp, Artificial Sequence
  primer
gagtacaatgggaatgggctc

SEQ ID NO: 76054 - DNA, 21 bp, Artificial Sequence
  primer
gaaacagtagggcctggtgag

SEQ ID NO: 76055 - DNA, 21 bp, Artificial Sequence
  primer
ctcatttacagggcagcagag

SEQ ID NO: 76056 - DNA, 38 bp, Artificial Sequence
  primer
gtaaaacgacggccagtgtctatgaggaaaggaggccc

SEQ ID NO: 76057 - DNA, 21 bp, Artificial Sequence
  primer
actcccagcaacaatgaccag

SEQ ID NO: 76058 - DNA, 38 bp, Artificial Sequence
  primer
gtaaaacgacggccagtctccaacatctctctccaggg

SEQ ID NO: 76059 - DNA, 37 bp, Artificial Sequence
  primer
gtaaaacgacggccagtacacaagaccctccgtctcc

SEQ ID NO: 76060 - DNA, 21 bp, Artificial Sequence
  primer
ccagaacaagcttccaaatcc

SEQ ID NO: 76061 - DNA, 21 bp, Artificial Sequence
  primer
ccagaacaagcttccaaatcc

SEQ ID NO: 76062 - DNA, 37 bp, Artificial Sequence
  primer
gtaaaacgacggccagtacaacagatggtttgctccg

SEQ ID NO: 76063 - DNA, 44 bp, Artificial Sequence
  primer
gtaaaacgacggccagtactaatgctggtttaaagttatgttcc

SEQ ID NO: 76064 - DNA, 38 bp, Artificial Sequence
  primer
gtaaaacgacggccagttcatggctatctgtgtctgcc

SEQ ID NO: 76065 - DNA, 38 bp, Artificial Sequence
  primer
gtaaaacgacggccagttcacaccaagagttgaccagc

SEQ ID NO: 76066 - DNA, 38 bp, Artificial Sequence
  primer
gtaaaacgacggccagtcagggctggaatgtgtttctc

SEQ ID NO: 76067 - DNA, 37 bp, Artificial Sequence
  primer
gtaaaacgacggccagtcttctggcccatttcactca

SEQ ID NO: 76068 - DNA, 19 bp, Artificial Sequence
  primer
acattctcccaggccacag

SEQ ID NO: 76069 - DNA, 38 bp, Artificial Sequence
  primer
gtaaaacgacggccagtgttgaatgcttccacgatgat

SEQ ID NO: 76070 - DNA, 39 bp, Artificial Sequence
  primer
gtaaaacgacggccagttccaagaaatgttgaggaggtc

SEQ ID NO: 76071 - DNA, 27 bp, Artificial Sequence
  primer
ggcagatctaacagactaagacaattc

SEQ ID NO: 76072 - DNA, 21 bp, Artificial Sequence
  primer
ctgtgggtcaattgtctctgc

SEQ ID NO: 76073 - DNA, 38 bp, Artificial Sequence
  primer
gtaaaacgacggccagttttctgggacactgagacacc

SEQ ID NO: 76074 - DNA, 39 bp, Artificial Sequence
  primer
gtaaaacgacggccagtggcaccaaacatcatttaaagc

SEQ ID NO: 76075 - DNA, 38 bp, Artificial Sequence
  primer
gtaaaacgacggccagtcaatgagtcaaacgttcagcc

SEQ ID NO: 76076 - DNA, 22 bp, Artificial Sequence
  primer
gggaaatctaagaggatcgttg

SEQ ID NO: 76077 - DNA, 38 bp, Artificial Sequence
  primer
gtaaaacgacggccagtgcttcaccctccctgtaaatc

SEQ ID NO: 76078 - DNA, 38 bp, Artificial Sequence
  primer
gtaaaacgacggccagtcaggtcactgctcatggaaac

SEQ ID NO: 76079 - DNA, 21 bp, Artificial Sequence
  primer
tttgccagcagagaacacaag

SEQ ID NO: 76080 - DNA, 38 bp, Artificial Sequence
  primer
gtaaaacgacggccagtatccagtccaaagcatcaagg

SEQ ID NO: 76081 - DNA, 21 bp, Artificial Sequence
  primer
aagtgtggaggtacctgtggg

SEQ ID NO: 76082 - DNA, 21 bp, Artificial Sequence
  primer
tcagcaatcgaccatctgaac

SEQ ID NO: 76083 - DNA, 38 bp, Artificial Sequence
  primer
gtaaaacgacggccagttcctggactcaagtgatttgc

SEQ ID NO: 76084 - DNA, 26 bp, Artificial Sequence
  primer
ttgatagaaataaggaccatgaattt

SEQ ID NO: 76085 - DNA, 25 bp, Artificial Sequence
  primer
gcctatgtaattagcaatgtcacaa

SEQ ID NO: 76086 - DNA, 21 bp, Artificial Sequence
  primer
ttaagcaagcaaagcggactc

SEQ ID NO: 76087 - DNA, 21 bp, Artificial Sequence
  primer
tggaaggaaggtagggctatg

SEQ ID NO: 76088 - DNA, 40 bp, Artificial Sequence
  primer
gtaaaacgacggccagtaagcatttcccaattgttgatag

SEQ ID NO: 76089 - DNA, 20 bp, Artificial Sequence
  primer
cccgctaagagggctacttg

SEQ ID NO: 76090 - DNA, 22 bp, Artificial Sequence
  primer
tctgattcatcaatgcgtgaag

SEQ ID NO: 76091 - DNA, 39 bp, Artificial Sequence
  primer
gtaaaacgacggccagttttcacctttaccagtgtggtg

SEQ ID NO: 76092 - DNA, 21 bp, Artificial Sequence
  primer
tagcctcgtccttgctatgtg

SEQ ID NO: 76093 - DNA, 23 bp, Artificial Sequence
  primer
gctgtgagaaagaggatctagcc

SEQ ID NO: 76094 - DNA, 38 bp, Artificial Sequence
  primer
gtaaaacgacggccagtacaagaggaaagagcaccgtc

SEQ ID NO: 76095 - DNA, 21 bp, Artificial Sequence
  primer
atttcgagggtaactccatgc

SEQ ID NO: 76096 - DNA, 21 bp, Artificial Sequence
  primer
tggagaacctttgtaccaggc

SEQ ID NO: 76097 - DNA, 21 bp, Artificial Sequence
  primer
tggacgacagagtcagaaagg

SEQ ID NO: 76098 - DNA, 39 bp, Artificial Sequence
  primer
gtaaaacgacggccagtttctggctggaaactttaggag

SEQ ID NO: 76099 - DNA, 39 bp, Artificial Sequence
  primer
gtaaaacgacggccagtacccttatctgttcagtggagc

SEQ ID NO: 76100 - DNA, 41 bp, Artificial Sequence
  primer
gtaaaacgacggccagttcaggatagaacccatgtactctg

SEQ ID NO: 76101 - DNA, 21 bp, Artificial Sequence
  primer
acaggttagcagctgtccatt

SEQ ID NO: 76102 - DNA, 24 bp, Artificial Sequence
  primer
aagtcttccatgagtacaagagca

SEQ ID NO: 76103 - DNA, 43 bp, Artificial Sequence
  primer
gtaaaacgacggccagttcagtatcacatagtgaagacacctg

SEQ ID NO: 76104 - DNA, 47 bp, Artificial Sequence
  primer
gtaaaacgacggccagtaataatgtagtaacatttcaacatacatgc

SEQ ID NO: 76105 - DNA, 43 bp, Artificial Sequence
  primer
gtaaaacgacggccagtaaaccaatgaaatttaatagaagctc

SEQ ID NO: 76106 - DNA, 38 bp, Artificial Sequence
  primer
gtaaaacgacggccagtattcatctggcacagacttgg

SEQ ID NO: 76107 - DNA, 22 bp, Artificial Sequence
  primer
tcagaaccctctgcctcattac

SEQ ID NO: 76108 - DNA, 43 bp, Artificial Sequence
  primer
gtaaaacgacggccagtctataaggactctggaaattacctcc

SEQ ID NO: 76109 - DNA, 41 bp, Artificial Sequence
  primer
gtaaaacgacggccagtcacaatgaaagactatttcccaaa

SEQ ID NO: 76110 - DNA, 21 bp, Artificial Sequence
  primer
gggctgctaaattgaccattg

SEQ ID NO: 76111 - DNA, 21 bp, Artificial Sequence
  primer
cacttggttaactgcacagcc

SEQ ID NO: 76112 - DNA, 23 bp, Artificial Sequence
  primer
ttcctctgaaacaggctttctaa

SEQ ID NO: 76113 - DNA, 20 bp, Artificial Sequence
  primer
aacattcagcagatgcctgg

SEQ ID NO: 76114 - DNA, 42 bp, Artificial Sequence
  primer
gtaaaacgacggccagtccagtaatgacatgaatatcttccc

SEQ ID NO: 76115 - DNA, 21 bp, Artificial Sequence
  primer
gcaatgtcacagtttggaagc

SEQ ID NO: 76116 - DNA, 38 bp, Artificial Sequence
  primer
gtaaaacgacggccagttctgagtctgagtgaccctgg

SEQ ID NO: 76117 - DNA, 38 bp, Artificial Sequence
  primer
gtaaaacgacggccagtcaaagagtcactgcttggtcc

SEQ ID NO: 76118 - DNA, 21 bp, Artificial Sequence
  primer
taagcccagctcttctcttgc

SEQ ID NO: 76119 - DNA, 38 bp, Artificial Sequence
  primer
gtaaaacgacggccagtactaagtggtgccctgattcc

SEQ ID NO: 76120 - DNA, 39 bp, Artificial Sequence
  primer
gtaaaacgacggccagtgcatcccaaacaataacagtgg

SEQ ID NO: 76121 - DNA, 40 bp, Artificial Sequence
  primer
gtaaaacgacggccagttgattattctccaaatgcaccac

SEQ ID NO: 76122 - DNA, 21 bp, Artificial Sequence
  primer
gagtcgcctttcatgaccttc

SEQ ID NO: 76123 - DNA, 40 bp, Artificial Sequence
  primer
gtaaaacgacggccagtgtgtgtgtgttatatgcctgagc

SEQ ID NO: 76124 - DNA, 38 bp, Artificial Sequence
  primer
gtaaaacgacggccagttggctacgaatcttccatgag

SEQ ID NO: 76125 - DNA, 40 bp, Artificial Sequence
  primer
gtaaaacgacggccagtttcctagtgcagaacacagatcc

SEQ ID NO: 76126 - DNA, 38 bp, Artificial Sequence
  primer
gtaaaacgacggccagtaggtggcactgctaacttgag

SEQ ID NO: 76127 - DNA, 40 bp, Artificial Sequence
  primer
gtaaaacgacggccagttcttccactttcacattctcctg

SEQ ID NO: 76128 - DNA, 21 bp, Artificial Sequence
  primer
cgtaagatatggagcatcggg

SEQ ID NO: 76129 - DNA, 39 bp, Artificial Sequence
  primer
gtaaaacgacggccagtcgagatgtacgcatttggaaac

SEQ ID NO: 76130 - DNA, 37 bp, Artificial Sequence
  primer
gtaaaacgacggccagtaatgaggcatctgtcgcttg

SEQ ID NO: 76131 - DNA, 22 bp, Artificial Sequence
  primer
caggcctcaattctcacatagg

SEQ ID NO: 76132 - DNA, 21 bp, Artificial Sequence
  primer
agtcaccaaaggctgatccac

SEQ ID NO: 76133 - DNA, 38 bp, Artificial Sequence
  primer
gtaaaacgacggccagtcatcaacgctcacagttcctc

SEQ ID NO: 76134 - DNA, 21 bp, Artificial Sequence
  primer
accaaatgggatgcacttcag

SEQ ID NO: 76135 - DNA, 38 bp, Artificial Sequence
  primer
gtaaaacgacggccagtggtgagcacttccattgtgtc

SEQ ID NO: 76136 - DNA, 21 bp, Artificial Sequence
  primer
gacacacacacaatggctgag

SEQ ID NO: 76137 - DNA, 39 bp, Artificial Sequence
  primer
gtaaaacgacggccagtggagtcagggtgaagaagaacc

SEQ ID NO: 76138 - DNA, 22 bp, Artificial Sequence
  primer
gtatcatagggaacagggttgc

SEQ ID NO: 76139 - DNA, 39 bp, Artificial Sequence
  primer
gtaaaacgacggccagtaattgtagcaagagccacttcg

SEQ ID NO: 76140 - DNA, 38 bp, Artificial Sequence
  primer
gtaaaacgacggccagttaaaccaatgcctacgtggtg

SEQ ID NO: 76141 - DNA, 40 bp, Artificial Sequence
  primer
gtaaaacgacggccagtgccaagtatgcctgaattaaatg

SEQ ID NO: 76142 - DNA, 21 bp, Artificial Sequence
  primer
catctttgtgtcaccaccagc

SEQ ID NO: 76143 - DNA, 21 bp, Artificial Sequence
  primer
aaatgcaatgaacaaaggctg

SEQ ID NO: 76144 - DNA, 21 bp, Artificial Sequence
  primer
tgagcgataccagataccacg

SEQ ID NO: 76145 - DNA, 36 bp, Artificial Sequence
  primer
gtaaaacgacggccagtagcagttctttgggcatgg

SEQ ID NO: 76146 - DNA, 21 bp, Artificial Sequence
  primer
tcaccatctgaatccttgcac

SEQ ID NO: 76147 - DNA, 38 bp, Artificial Sequence
  primer
gtaaaacgacggccagtgctttggtactggtctcggtc

SEQ ID NO: 76148 - DNA, 38 bp, Artificial Sequence
  primer
gtaaaacgacggccagttgctgacacctggcataaatc

SEQ ID NO: 76149 - DNA, 21 bp, Artificial Sequence
  primer
cctttgtcctccactgaaagc

SEQ ID NO: 76150 - DNA, 38 bp, Artificial Sequence
  primer
gtaaaacgacggccagtgccaacttccctgtcactttc

SEQ ID NO: 76151 - DNA, 21 bp, Artificial Sequence
  primer
ttgcatccataaatctgcctc

SEQ ID NO: 76152 - DNA, 21 bp, Artificial Sequence
  primer
ttggtgcctggcatagaatag

SEQ ID NO: 76153 - DNA, 22 bp, Artificial Sequence
  primer
gctcagcctcacataatgatcc

SEQ ID NO: 76154 - DNA, 23 bp, Artificial Sequence
  primer
gaggcctcatctttctctctgtc

SEQ ID NO: 76155 - DNA, 22 bp, Artificial Sequence
  primer
ccctgtctcccagaaatactgc

SEQ ID NO: 76156 - DNA, 38 bp, Artificial Sequence
  primer
gtaaaacgacggccagtttgaaaccaatttgcttcctg

SEQ ID NO: 76157 - DNA, 22 bp, Artificial Sequence
  primer
aaaccagaagggactgtagaaa

SEQ ID NO: 76158 - DNA, 38 bp, Artificial Sequence
  primer
gtaaaacgacggccagttacgtctggttgcgttctttg

SEQ ID NO: 76159 - DNA, 38 bp, Artificial Sequence
  primer
gtaaaacgacggccagtaaaggctttcaccctctgtcc

SEQ ID NO: 76160 - DNA, 35 bp, Artificial Sequence
  primer
gtaaaacgacggccagtattcacagggccctcctt

SEQ ID NO: 76161 - DNA, 38 bp, Artificial Sequence
  primer
gtaaaacgacggccagtgcaccacagcctaataagtgg

SEQ ID NO: 76162 - DNA, 20 bp, Artificial Sequence
  primer
aagaagaagcagcagcgaag

SEQ ID NO: 76163 - DNA, 24 bp, Artificial Sequence
  primer
ttcagcaacttatctaaagcatgg

SEQ ID NO: 76164 - DNA, 22 bp, Artificial Sequence
  primer
ggcagcagcacaaatctatgac

SEQ ID NO: 76165 - DNA, 21 bp, Artificial Sequence
  primer
tttctgtgggtcacaagcaac

SEQ ID NO: 76166 - DNA, 39 bp, Artificial Sequence
  primer
gtaaaacgacggccagtttggacccttgataatctcacc

SEQ ID NO: 76167 - DNA, 21 bp, Artificial Sequence
  primer
agaggacccagccctactcag

SEQ ID NO: 76168 - DNA, 21 bp, Artificial Sequence
  primer
ttgaattctcccatctcagcc

SEQ ID NO: 76169 - DNA, 41 bp, Artificial Sequence
  primer
gtaaaacgacggccagtttccatagacaagcctgatttctc

SEQ ID NO: 76170 - DNA, 21 bp, Artificial Sequence
  primer
tactcctcacgtcacagagcc

SEQ ID NO: 76171 - DNA, 19 bp, Artificial Sequence
  primer
ccatttgaatggcccaaag

SEQ ID NO: 76172 - DNA, 21 bp, Artificial Sequence
  primer
tcctgggaattcaaacaaatg

SEQ ID NO: 76173 - DNA, 37 bp, Artificial Sequence
  primer
gtaaaacgacggccagtaagcaagctgcaagtccaag

SEQ ID NO: 76174 - DNA, 20 bp, Artificial Sequence
  primer
gagcctcgagcgtcaaattc

SEQ ID NO: 76175 - DNA, 40 bp, Artificial Sequence
  primer
gtaaaacgacggccagttggtgctgataacaaacaacctc

SEQ ID NO: 76176 - DNA, 37 bp, Artificial Sequence
  primer
gtaaaacgacggccagttttgcaatgaagggcataaa

SEQ ID NO: 76177 - DNA, 39 bp, Artificial Sequence
  primer
gtaaaacgacggccagtggttgggtgtatgtgtcaacag

SEQ ID NO: 76178 - DNA, 24 bp, Artificial Sequence
  primer
gctagtgtacgatataaacggcag

SEQ ID NO: 76179 - DNA, 40 bp, Artificial Sequence
  primer
gtaaaacgacggccagtcctgctctctctcttcttatccg

SEQ ID NO: 76180 - DNA, 39 bp, Artificial Sequence
  primer
gtaaaacgacggccagttcagctgtcttatgatggaagg

SEQ ID NO: 76181 - DNA, 38 bp, Artificial Sequence
  primer
gtaaaacgacggccagtgaccatatgaccaattctcgg

SEQ ID NO: 76182 - DNA, 20 bp, Artificial Sequence
  primer
gggaggtttgagtctttgcc

SEQ ID NO: 76183 - DNA, 20 bp, Artificial Sequence
  primer
gggacagatttacctcgcag

SEQ ID NO: 76184 - DNA, 40 bp, Artificial Sequence
  primer
gtaaaacgacggccagtggagtggcagaagtaaagatgag

SEQ ID NO: 76185 - DNA, 42 bp, Artificial Sequence
  primer
gtaaaacgacggccagttccacatggatatgactttgatagc

SEQ ID NO: 76186 - DNA, 26 bp, Artificial Sequence
  primer
gagaagtaacccatctgctatcattt

SEQ ID NO: 76187 - DNA, 37 bp, Artificial Sequence
  primer
gtaaaacgacggccagtccctatcccagcacgtttac

SEQ ID NO: 76188 - DNA, 21 bp, Artificial Sequence
  primer
ccaagtcaaagtcgcttaggg

SEQ ID NO: 76189 - DNA, 39 bp, Artificial Sequence
  primer
gtaaaacgacggccagttttgaatccagatagtcgatgc

SEQ ID NO: 76190 - DNA, 38 bp, Artificial Sequence
  primer
gtaaaacgacggccagtatgtgtccttggacccttgag

SEQ ID NO: 76191 - DNA, 38 bp, Artificial Sequence
  primer
gtaaaacgacggccagttactcttgcccacctcaatcc

SEQ ID NO: 76192 - DNA, 21 bp, Artificial Sequence
  primer
caccatttctcaaccatgtgc

SEQ ID NO: 76193 - DNA, 21 bp, Artificial Sequence
  primer
gaccactgtaggccctgagtc

SEQ ID NO: 76194 - DNA, 42 bp, Artificial Sequence
  primer
gtaaaacgacggccagttctcccaggtatcttatacaaaggg

SEQ ID NO: 76195 - DNA, 38 bp, Artificial Sequence
  primer
gtaaaacgacggccagtctcgctactggttaagctggg

SEQ ID NO: 76196 - DNA, 21 bp, Artificial Sequence
  primer
gccatagggaagggtaagagg

SEQ ID NO: 76197 - DNA, 42 bp, Artificial Sequence
  primer
gtaaaacgacggccagttgttcaaattaagatgagacaatgg

SEQ ID NO: 76198 - DNA, 21 bp, Artificial Sequence
  primer
ttcatatgggcaccaagaaac

SEQ ID NO: 76199 - DNA, 38 bp, Artificial Sequence
  primer
gtaaaacgacggccagttccacatctccttgtcaccac

SEQ ID NO: 76200 - DNA, 43 bp, Artificial Sequence
  primer
gtaaaacgacggccagtgaatcaacataacatttccatgtcac

SEQ ID NO: 76201 - DNA, 22 bp, Artificial Sequence
  primer
ggcaaaccatctatcacaaacg

SEQ ID NO: 76202 - DNA, 38 bp, Artificial Sequence
  primer
gtaaaacgacggccagtgtctgctcactcacgccatac

SEQ ID NO: 76203 - DNA, 21 bp, Artificial Sequence
  primer
atacagagggagcctccacag

SEQ ID NO: 76204 - DNA, 21 bp, Artificial Sequence
  primer
cagatggagacgtcagtgctc

SEQ ID NO: 76205 - DNA, 21 bp, Artificial Sequence
  primer
ctcctctaccactcattcgcc

SEQ ID NO: 76206 - DNA, 38 bp, Artificial Sequence
  primer
gtaaaacgacggccagtgtagtgtctgacccggtctcc

SEQ ID NO: 76207 - DNA, 38 bp, Artificial Sequence
  primer
gtaaaacgacggccagttgtgaaagctctggttgaagc

SEQ ID NO: 76208 - DNA, 38 bp, Artificial Sequence
  primer
gtaaaacgacggccagttcacaagtggttcccagattc

SEQ ID NO: 76209 - DNA, 21 bp, Artificial Sequence
  primer
tgaatggctgcagtttctagg

SEQ ID NO: 76210 - DNA, 37 bp, Artificial Sequence
  primer
gtaaaacgacggccagtctgggcagttaggactgctg

SEQ ID NO: 76211 - DNA, 25 bp, Artificial Sequence
  primer
tctttaatctggatatcatgccatt

SEQ ID NO: 76212 - DNA, 24 bp, Artificial Sequence
  primer
tttctagttcagtgatggtgattt

SEQ ID NO: 76213 - DNA, 22 bp, Artificial Sequence
  primer
acactgtatacactacccgccc

SEQ ID NO: 76214 - DNA, 21 bp, Artificial Sequence
  primer
gcccagaccaagcctactatg

SEQ ID NO: 76215 - DNA, 40 bp, Artificial Sequence
  primer
gtaaaacgacggccagtacagtctctgttgtctgaaaggc

SEQ ID NO: 76216 - DNA, 22 bp, Artificial Sequence
  primer
caaatctcgccatttctaggtg

SEQ ID NO: 76217 - DNA, 38 bp, Artificial Sequence
  primer
gtaaaacgacggccagttaaagcctcctgcttcctttg

SEQ ID NO: 76218 - DNA, 21 bp, Artificial Sequence
  primer
tgttcaggcaaatcgtgaatc

SEQ ID NO: 76219 - DNA, 24 bp, Artificial Sequence
  primer
aaggacttacccagtttgatgttg

SEQ ID NO: 76220 - DNA, 37 bp, Artificial Sequence
  primer
gtaaaacgacggccagtgtctgaccaaatagcggctg

SEQ ID NO: 76221 - DNA, 21 bp, Artificial Sequence
  primer
gcaggaagttgacattgttgg

SEQ ID NO: 76222 - DNA, 23 bp, Artificial Sequence
  primer
tggcattagagtcactggaagat

SEQ ID NO: 76223 - DNA, 22 bp, Artificial Sequence
  primer
ggaatgcatttgtgtatcaacc

SEQ ID NO: 76224 - DNA, 38 bp, Artificial Sequence
  primer
gtaaaacgacggccagtcgacagctgagagttggtgac

SEQ ID NO: 76225 - DNA, 38 bp, Artificial Sequence
  primer
gtaaaacgacggccagtatgtagcagacgatgtggtgg

SEQ ID NO: 76226 - DNA, 21 bp, Artificial Sequence
  primer
gaagagctgtctccggctatc

SEQ ID NO: 76227 - DNA, 38 bp, Artificial Sequence
  primer
gtaaaacgacggccagttactccaaacatgtcatccgc

SEQ ID NO: 76228 - DNA, 21 bp, Artificial Sequence
  primer
atttctcgtgtgcttgggttc

SEQ ID NO: 76229 - DNA, 21 bp, Artificial Sequence
  primer
aactctgctttactgcctggg

SEQ ID NO: 76230 - DNA, 21 bp, Artificial Sequence
  primer
atgaaaccagcccaaatgaag

SEQ ID NO: 76231 - DNA, 20 bp, Artificial Sequence
  primer
ggatgctcactattcagcgg

SEQ ID NO: 76232 - DNA, 38 bp, Artificial Sequence
  primer
gtaaaacgacggccagtgatggagtcagtggctctgtg

SEQ ID NO: 76233 - DNA, 38 bp, Artificial Sequence
  primer
gtaaaacgacggccagtaggagtgtcacgaaggtctgc

SEQ ID NO: 76234 - DNA, 21 bp, Artificial Sequence
  primer
aagtcctcagtgagcagggtc

SEQ ID NO: 76235 - DNA, 38 bp, Artificial Sequence
  primer
gtaaaacgacggccagtccctacactctgcccactagg

SEQ ID NO: 76236 - DNA, 37 bp, Artificial Sequence
  primer
gtaaaacgacggccagtctccagacagcaggattccc

SEQ ID NO: 76237 - DNA, 21 bp, Artificial Sequence
  primer
ctgacaaggaagagttgcgtg

SEQ ID NO: 76238 - DNA, 37 bp, Artificial Sequence
  primer
gtaaaacgacggccagtgatggttccaaggacttgcc

SEQ ID NO: 76239 - DNA, 37 bp, Artificial Sequence
  primer
gtaaaacgacggccagtaggacagcccgttcataagc

SEQ ID NO: 76240 - DNA, 19 bp, Artificial Sequence
  primer
gggcacattgtcgtaggtg

SEQ ID NO: 76241 - DNA, 18 bp, Artificial Sequence
  primer
caggtccagggacttggg

SEQ ID NO: 76242 - DNA, 38 bp, Artificial Sequence
  primer
gtaaaacgacggccagttttcccagagctaggattccc

SEQ ID NO: 76243 - DNA, 38 bp, Artificial Sequence
  primer
gtaaaacgacggccagtgctgctccagagatacagacg

SEQ ID NO: 76244 - DNA, 38 bp, Artificial Sequence
  primer
gtaaaacgacggccagtgctcttggtttccaaactccc

SEQ ID NO: 76245 - DNA, 38 bp, Artificial Sequence
  primer
gtaaaacgacggccagttcaaggttatgcctcctcagc

SEQ ID NO: 76246 - DNA, 21 bp, Artificial Sequence
  primer
agagtaacaccgggatagggc

SEQ ID NO: 76247 - DNA, 21 bp, Artificial Sequence
  primer
gcctctgagatcaccttgtcc

SEQ ID NO: 76248 - DNA, 21 bp, Artificial Sequence
  primer
acggagttgccatgtattcac

SEQ ID NO: 76249 - DNA, 38 bp, Artificial Sequence
  primer
gtaaaacgacggccagtgctgaaggacccattggtaac

SEQ ID NO: 76250 - DNA, 38 bp, Artificial Sequence
  primer
gtaaaacgacggccagttcagggagggagatttcacag

SEQ ID NO: 76251 - DNA, 38 bp, Artificial Sequence
  primer
gtaaaacgacggccagtaccctcagtgtgatcctgtcc

SEQ ID NO: 76252 - DNA, 38 bp, Artificial Sequence
  primer
gtaaaacgacggccagtccagccacctggttctaagtc

SEQ ID NO: 76253 - DNA, 21 bp, Artificial Sequence
  primer
agactatgctccctgcagacc

SEQ ID NO: 76254 - DNA, 38 bp, Artificial Sequence
  primer
gtaaaacgacggccagtgtttaagtgaaatcccagcgg

SEQ ID NO: 76255 - DNA, 21 bp, Artificial Sequence
  primer
tttcatgggcattattcaagc

SEQ ID NO: 76256 - DNA, 21 bp, Artificial Sequence
  primer
acatttgacagagcacttggc

SEQ ID NO: 76257 - DNA, 38 bp, Artificial Sequence
  primer
gtaaaacgacggccagtagctcaactggaatggagagg

SEQ ID NO: 76258 - DNA, 38 bp, Artificial Sequence
  primer
gtaaaacgacggccagtttgacccactgttgcctactg

SEQ ID NO: 76259 - DNA, 20 bp, Artificial Sequence
  primer
gttcacagacgtggtccctc

SEQ ID NO: 76260 - DNA, 21 bp, Artificial Sequence
  primer
agcagtgcacaaatatcaggg

SEQ ID NO: 76261 - DNA, 20 bp, Artificial Sequence
  primer
gagagcaggccttacatggg

SEQ ID NO: 76262 - DNA, 21 bp, Artificial Sequence
  primer
tcctttcgtagctcttggacc

SEQ ID NO: 76263 - DNA, 42 bp, Artificial Sequence
  primer
gtaaaacgacggccagtgcctgctatagattactgtcttccc

SEQ ID NO: 76264 - DNA, 22 bp, Artificial Sequence
  primer
tcaaatgtcctttccctctcag

SEQ ID NO: 76265 - DNA, 38 bp, Artificial Sequence; identical to SEQ ID NO: 76254
  primer

SEQ ID NO: 76266 - DNA, 38 bp, Artificial Sequence
  primer
gtaaaacgacggccagtcagtgtaccgggagcagaaac

SEQ ID NO: 76267 - DNA, 20 bp, Artificial Sequence
  primer
gccctccacttccactaagg

SEQ ID NO: 76268 - DNA, 21 bp, Artificial Sequence
  primer
tctgatacccatcccttgctc

SEQ ID NO: 76269 - DNA, 21 bp, Artificial Sequence
  primer
taaagaaccgatgagttgggc

SEQ ID NO: 76270 - DNA, 38 bp, Artificial Sequence
  primer
gtaaaacgacggccagtcttcccaggtcccttctaacc

SEQ ID NO: 76271 - DNA, 21 bp, Artificial Sequence
  primer
acagaagggacagtgtcaggg

SEQ ID NO: 76272 - DNA, 21 bp, Artificial Sequence
  primer
caccctcctcacctacattcc

SEQ ID NO: 76273 - DNA, 21 bp, Artificial Sequence
  primer
ctgctgaatacatcctccacc

SEQ ID NO: 76274 - DNA, 21 bp, Artificial Sequence
  primer
gcgattcttcagcctcttagg

SEQ ID NO: 76275 - DNA, 38 bp, Artificial Sequence
  primer
gtaaaacgacggccagttgaatggatggagaaggaaag

SEQ ID NO: 76276 - DNA, 38 bp, Artificial Sequence
  primer
gtaaaacgacggccagtacagagaggccaaagctcaag

SEQ ID NO: 76277 - DNA, 20 bp, Artificial Sequence
  primer
gagtcactggcggaaagttg

SEQ ID NO: 76278 - DNA, 21 bp, Artificial Sequence
  primer
gacctcctgcttgagaccaac

SEQ ID NO: 76279 - DNA, 21 bp, Artificial Sequence
  primer
agaacctttcccagcagtgtc

SEQ ID NO: 76280 - DNA, 21 bp, Artificial Sequence
  primer
ccacacagaagctgtttccac

SEQ ID NO: 76281 - DNA, 38 bp, Artificial Sequence
  primer
gtaaaacgacggccagtttcaatgtggtagaaaggccc

SEQ ID NO: 76282 - DNA, 21 bp, Artificial Sequence
  primer
cctgatgcaatagtgggagag

SEQ ID NO: 76283 - DNA, 21 bp, Artificial Sequence
  primer
ttagcaatgcaaatctgagcc

SEQ ID NO: 76284 - DNA, 21 bp, Artificial Sequence
  primer
cttgggagggcacaatgatac

SEQ ID NO: 76285 - DNA, 38 bp, Artificial Sequence
  primer
gtaaaacgacggccagtagtcagatggagccagacagc

SEQ ID NO: 76286 - DNA, 38 bp, Artificial Sequence
  primer
gtaaaacgacggccagtcatgctgattcatgcaaatgg

SEQ ID NO: 76287 - DNA, 22 bp, Artificial Sequence
  primer
cagaaaccaacacacacagacg

SEQ ID NO: 76288 - DNA, 38 bp, Artificial Sequence
  primer
gtaaaacgacggccagtaaagagaaatggcctcgacac

SEQ ID NO: 76289 - DNA, 21 bp, Artificial Sequence
  primer
gtcaaaggcgctcagaggtag

SEQ ID NO: 76290 - DNA, 21 bp, Artificial Sequence
  primer
gtgtttggctggtttaggctc

SEQ ID NO: 76291 - DNA, 21 bp, Artificial Sequence
  primer
gatttatggatgcttcgaggg

SEQ ID NO: 76292 - DNA, 37 bp, Artificial Sequence
  primer
gtaaaacgacggccagtcctcccaggaactccagaag

SEQ ID NO: 76293 - DNA, 38 bp, Artificial Sequence
  primer
gtaaaacgacggccagtctcagctgccactctctatgg

SEQ ID NO: 76294 - DNA, 38 bp, Artificial Sequence
  primer
gtaaaacgacggccagtaagagcctggcatacaggaag

SEQ ID NO: 76295 - DNA, 20 bp, Artificial Sequence
  primer
actcaggagggagaggttgc

SEQ ID NO: 76296 - DNA, 38 bp, Artificial Sequence
  primer
gtaaaacgacggccagttggctcatagggaattaaggg

SEQ ID NO: 76297 - DNA, 38 bp, Artificial Sequence
  primer
gtaaaacgacggccagttaccttagagctccctgagcc

SEQ ID NO: 76298 - DNA, 38 bp, Artificial Sequence
  primer
gtaaaacgacggccagtaaggcaggactgagtcaggag

SEQ ID NO: 76299 - DNA, 20 bp, Artificial Sequence
  primer
agaggctcatcagctcctgc

SEQ ID NO: 76300 - DNA, 38 bp, Artificial Sequence
  primer
gtaaaacgacggccagttccctgctatgactcccactc

SEQ ID NO: 76301 - DNA, 21 bp, Artificial Sequence
  primer
aaagaagagcttcagggctcc

SEQ ID NO: 76302 - DNA, 21 bp, Artificial Sequence
  primer
aggtttagagggagggagtcg

SEQ ID NO: 76303 - DNA, 18 bp, Artificial Sequence
  primer
gctccgaactgcgaactg

SEQ ID NO: 76304 - DNA, 37 bp, Artificial Sequence
  primer
gtaaaacgacggccagtgggtcccagagagaagaagg

SEQ ID NO: 76305 - DNA, 21 bp, Artificial Sequence
  primer
ttagaatggaaccacccaagc

SEQ ID NO: 76306 - DNA, 39 bp, Artificial Sequence
  primer
gtaaaacgacggccagtgtgttgaaatctgtggttgtcc

SEQ ID NO: 76307 - DNA, 38 bp, Artificial Sequence
  primer
gtaaaacgacggccagtctttgatttctggctgcagtg

SEQ ID NO: 76308 - DNA, 21 bp, Artificial Sequence
  primer
gtgtttggagttgggtggaag

SEQ ID NO: 76309 - DNA, 21 bp, Artificial Sequence
  primer
agttggcaggtgcctgtagtc

SEQ ID NO: 76310 - DNA, 21 bp, Artificial Sequence
  primer
gtctttctttcggtcaccgtc

SEQ ID NO: 76311 - DNA, 38 bp, Artificial Sequence
  primer
gtaaaacgacggccagttatgcggtgcatggaataaag

SEQ ID NO: 76312 - DNA, 24 bp, Artificial Sequence
  primer
cttaatattccaccaagcactgtc

SEQ ID NO: 76313 - DNA, 20 bp, Artificial Sequence
  primer
acagaaaggccgtgtgtttg

SEQ ID NO: 76314 - DNA, 36 bp, Artificial Sequence
  primer
gtaaaacgacggccagtagttgcccaatcatggagg

SEQ ID NO: 76315 - DNA, 21 bp, Artificial Sequence
  primer
ctctcaacaagatgcaaaggc

SEQ ID NO: 76316 - DNA, 21 bp, Artificial Sequence
  primer
cataaatgtggtggatgtcgc

SEQ ID NO: 76317 - DNA, 43 bp, Artificial Sequence
  primer
gtaaaacgacggccagtggtcaaatttgtaaatgcctagaaag

SEQ ID NO: 76318 - DNA, 37 bp, Artificial Sequence
  primer
gtaaaacgacggccagtaaagctgtgcaactgttccc

SEQ ID NO: 76319 - DNA, 38 bp, Artificial Sequence
  primer
gtaaaacgacggccagtactgctgagggccagaaatac

SEQ ID NO: 76320 - DNA, 44 bp, Artificial Sequence
  primer
gtaaaacgacggccagttctttctacgaaaggtctacttgagag

SEQ ID NO: 76321 - DNA, 35 bp, Artificial Sequence
  primer
gtaaaacgacggccagtcgcttggagctccctcac

SEQ ID NO: 76322 - DNA, 35 bp, Artificial Sequence
  primer
gtaaaacgacggccagtagggacggctccttcctg

SEQ ID NO: 76323 - DNA, 20 bp, Artificial Sequence
  primer
gaagctctgcccagatcaag

SEQ ID NO: 76324 - DNA, 21 bp, Artificial Sequence
  primer
cctctggaacttggacctcag

SEQ ID NO: 76325 - DNA, 20 bp, Artificial Sequence
  primer
aacctgatggcactgtcctg

SEQ ID NO: 76326 - DNA, 38 bp, Artificial Sequence
  primer
gtaaaacgacggccagtacaaggagatgcttgggtagg

SEQ ID NO: 76327 - DNA, 20 bp, Artificial Sequence
  primer
tcctgagcaaagtgtgggtc

SEQ ID NO: 76328 - DNA, 21 bp, Artificial Sequence
  primer
acaccagggtggtaagaggtg

SEQ ID NO: 76329 - DNA, 38 bp, Artificial Sequence
  primer
gtaaaacgacggccagtaagtgttagccctggcttgag

SEQ ID NO: 76330 - DNA, 21 bp, Artificial Sequence
  primer
aggtgtggataagagccaagg

SEQ ID NO: 76331 - DNA, 37 bp, Artificial Sequence
  primer
gtaaaacgacggccagtcaagccggcctctaattctc

SEQ ID NO: 76332 - DNA, 38 bp, Artificial Sequence
  primer
gtaaaacgacggccagtctgattgagagtggaggaccc

SEQ ID NO: 76333 - DNA, 36 bp, Artificial Sequence
  primer
gtaaaacgacggccagtctgtgggaggacaaggagc

SEQ ID NO: 76334 - DNA, 21 bp, Artificial Sequence
  primer
cggaagtagagcttcagcacc

SEQ ID NO: 76335 - DNA, 20 bp, Artificial Sequence
  primer
tgaagaggtagcgcagaacc

SEQ ID NO: 76336 - DNA, 38 bp, Artificial Sequence
  primer
gtaaaacgacggccagtacgcacatcacaagcagagag

SEQ ID NO: 76337 - DNA, 19 bp, Artificial Sequence
  primer
cagagcgaggcagatgagg

SEQ ID NO: 76338 - DNA, 36 bp, Artificial Sequence
  primer
gtaaaacgacggccagttgtaggcaaagcaggccac

SEQ ID NO: 76339 - DNA, 39 bp, Artificial Sequence
  primer
gtaaaacgacggccagttggtcagagaggctctgttctc

SEQ ID NO: 76340 - DNA, 38 bp, Artificial Sequence
  primer
gtaaaacgacggccagtttctgtcacgtcctcatctgc

SEQ ID NO: 76341 - DNA, 20 bp, Artificial Sequence
  primer
gaggagtttggcttccaagg

SEQ ID NO: 76342 - DNA, 20 bp, Artificial Sequence
  primer
ctctgcacagggtgaagtgc

SEQ ID NO: 76343 - DNA, 27 bp, Artificial Sequence
  primer
ggttacctgatcagatggagttaatac

SEQ ID NO: 76344 - DNA, 21 bp, Artificial Sequence
  primer
ttgcaaattcgtactccgatg

SEQ ID NO: 76345 - DNA, 40 bp, Artificial Sequence
  primer
gtaaaacgacggccagttcaaacttcctattgcatccttg

SEQ ID NO: 76346 - DNA, 22 bp, Artificial Sequence
  primer
tccacgcattcatcacatttag

SEQ ID NO: 76347 - DNA, 21 bp, Artificial Sequence
  primer
gtcaaatggaatccgcctatc

SEQ ID NO: 76348 - DNA, 38 bp, Artificial Sequence
  primer
gtaaaacgacggccagtcaactatttctcgctgatgcc

SEQ ID NO: 76349 - DNA, 22 bp, Artificial Sequence
  primer
tcatcatcagtggattgtgtcc

SEQ ID NO: 76350 - DNA, 21 bp, Artificial Sequence
  primer
gtccttattggcaggaattgg

SEQ ID NO: 76351 - DNA, 38 bp, Artificial Sequence
  primer
gtaaaacgacggccagtttgtgatctgtattcgcctcc

SEQ ID NO: 76352 - DNA, 21 bp, Artificial Sequence
  primer
accagctgtacaggaatggtg

SEQ ID NO: 76353 - DNA, 38 bp, Artificial Sequence
  primer
gtaaaacgacggccagtggtggaggcactttatggttg

SEQ ID NO: 76354 - DNA, 38 bp, Artificial Sequence
  primer
gtaaaacgacggccagtaattgtatcaatgggttccgc

SEQ ID NO: 76355 - DNA, 27 bp, Artificial Sequence
  primer
ggttacctgatcagatggagttaatac

SEQ ID NO: 76356 - DNA, 40 bp, Artificial Sequence
  primer
gtaaaacgacggccagttcactttgaaaccctctctcctc

SEQ ID NO: 76357 - DNA, 36 bp, Artificial Sequence
  primer
gtaaaacgacggccagtaggccatctccagggattc

SEQ ID NO: 76358 - DNA, 27 bp, Artificial Sequence
  primer
ttcaactatatgtttagtctgagtccc

SEQ ID NO: 76359 - DNA, 43 bp, Artificial Sequence
  primer
gtaaaacgacggccagtgtatactactgaaccctgaaacatgc

SEQ ID NO: 76360 - DNA, 21 bp, Artificial Sequence
  primer
gaagagaaggtccgaagagcc

SEQ ID NO: 76361 - DNA, 37 bp, Artificial Sequence
  primer
gtaaaacgacggccagtgagacttggagtgtggcctg

SEQ ID NO: 76362 - DNA, 38 bp, Artificial Sequence
  primer
gtaaaacgacggccagtaaatggacactaatgccagcc

SEQ ID NO: 76363 - DNA, 20 bp, Artificial Sequence
  primer
caggccatgctcttcttgag

SEQ ID NO: 76364 - DNA, 38 bp, Artificial Sequence
  primer
gtaaaacgacggccagtgtccctacctcggatttccac

SEQ ID NO: 76365 - DNA, 38 bp, Artificial Sequence
  primer
gtaaaacgacggccagtatggaattaaaggcggtctcc

SEQ ID NO: 76366 - DNA, 38 bp, Artificial Sequence; identical to SEQ ID NO: 76362
  primer

SEQ ID NO: 76367 - DNA, 21 bp, Artificial Sequence
  primer
tacagggctgctcaaacacag

SEQ ID NO: 76368 - DNA, 40 bp, Artificial Sequence
  primer
gtaaaacgacggccagtcctgaacaccaactacatatcca

SEQ ID NO: 76369 - DNA, 38 bp, Artificial Sequence
  primer
gtaaaacgacggccagttcaagcagaattgacattggg

SEQ ID NO: 76370 - DNA, 21 bp, Artificial Sequence
  primer
acgtggcacagatacatccag

SEQ ID NO: 76371 - DNA, 23 bp, Artificial Sequence
  primer
aagcatctcaaattcttcttggc

SEQ ID NO: 76372 - DNA, 21 bp, Artificial Sequence
  primer
gacagctaggttggagaaggg

SEQ ID NO: 76373 - DNA, 21 bp, Artificial Sequence
  primer
agaatttcatcctgcctccag

SEQ ID NO: 76374 - DNA, 21 bp, Artificial Sequence
  primer
aaattccacttcaggtcaccc

SEQ ID NO: 76375 - DNA, 19 bp, Artificial Sequence
  primer
acaccatgccacatgcaac

SEQ ID NO: 76376 - DNA, 38 bp, Artificial Sequence
  primer
gtaaaacgacggccagtttggcatatttgggtggaaag

SEQ ID NO: 76377 - DNA, 20 bp, Artificial Sequence
  primer
gtctttggcactgaggtgtg

SEQ ID NO: 76378 - DNA, 18 bp, Artificial Sequence
  primer
ctggtccgtgggtgtctc

SEQ ID NO: 76379 - DNA, 21 bp, Artificial Sequence
  primer
ggcgtgagtgctctacctctg

SEQ ID NO: 76380 - DNA, 38 bp, Artificial Sequence
  primer
gtaaaacgacggccagtgggcaagttctttgcaaactg

SEQ ID NO: 76381 - DNA, 38 bp, Artificial Sequence; identical to SEQ ID NO: 76380
  primer

SEQ ID NO: 76382 - DNA, 38 bp, Artificial Sequence
  primer
gtaaaacgacggccagtgcctgaagtggtttatggagg

SEQ ID NO: 76383 - DNA, 21 bp, Artificial Sequence
  primer
tggctagataaggaacgaggc

SEQ ID NO: 76384 - DNA, 21 bp, Artificial Sequence
  primer
gctgccctaaggctatacgtg

SEQ ID NO: 76385 - DNA, 21 bp, Artificial Sequence
  primer
agcagagcaggtgtgtgtgtc

SEQ ID NO: 76386 - DNA, 22 bp, Artificial Sequence
  primer
aaatcctcatctcatgctctgc

SEQ ID NO: 76387 - DNA, 20 bp, Artificial Sequence
  primer
agatcctggttctgtcgtgg

SEQ ID NO: 76388 - DNA, 37 bp, Artificial Sequence
  primer
gtaaaacgacggccagtcttcagaatccgagtccacg

SEQ ID NO: 76389 - DNA, 38 bp, Artificial Sequence
  primer
gtaaaacgacggccagtacaaagtgaccaaggccagtg

SEQ ID NO: 76390 - DNA, 21 bp, Artificial Sequence
  primer
gagggacagcaggtacaggag

SEQ ID NO: 76391 - DNA, 39 bp, Artificial Sequence
  primer
gtaaaacgacggccagttctgaattcatctaatggctgg

SEQ ID NO: 76392 - DNA, 19 bp, Artificial Sequence
  primer
aaattcccagaagccaggg

SEQ ID NO: 76393 - DNA, 21 bp, Artificial Sequence
  primer
tctccaccacattaacttgcc

SEQ ID NO: 76394 - DNA, 21 bp, Artificial Sequence
  primer
atgccacctctacccactctc

SEQ ID NO: 76395 - DNA, 36 bp, Artificial Sequence
  primer
gtaaaacgacggccagtgtgggatacgggtgagagg

SEQ ID NO: 76396 - DNA, 21 bp, Artificial Sequence
  primer
gatctgtaagtcaccctcgcc

SEQ ID NO: 76397 - DNA, 21 bp, Artificial Sequence
  primer
gtggtagcgaacaggtcattc

SEQ ID NO: 76398 - DNA, 38 bp, Artificial Sequence
  primer
gtaaaacgacggccagtctttactttcctctgcaccgc

SEQ ID NO: 76399 - DNA, 21 bp, Artificial Sequence
  primer
ataagcagggagacctagcgg

SEQ ID NO: 76400 - DNA, 38 bp, Artificial Sequence
  primer
gtaaaacgacggccagtcctagctggactctgacccac

SEQ ID NO: 76401 - DNA, 37 bp, Artificial Sequence
  primer
gtaaaacgacggccagtcgatgagccgctttagtttg

SEQ ID NO: 76402 - DNA, 21 bp, Artificial Sequence
  primer
ggtagtgggaaagcagcagtc

SEQ ID NO: 76403 - DNA, 21 bp, Artificial Sequence
  primer
tggtgagggatataagggtgg

SEQ ID NO: 76404 - DNA, 38 bp, Artificial Sequence
  primer
gtaaaacgacggccagtcctgacggcctctctattctg

SEQ ID NO: 76405 - DNA, 38 bp, Artificial Sequence
  primer
gtaaaacgacggccagtggacaaccctcccaggaatag

SEQ ID NO: 76406 - DNA, 38 bp, Artificial Sequence
  primer
gtaaaacgacggccagtagcaactggagtaggcacctg

SEQ ID NO: 76407 - DNA, 38 bp, Artificial Sequence
  primer
gtaaaacgacggccagtgtgcttccctaccttcactcc

SEQ ID NO: 76408 - DNA, 38 bp, Artificial Sequence
  primer
gtaaaacgacggccagttcccaacacctcaagtcacac

SEQ ID NO: 76409 - DNA, 18 bp, Artificial Sequence
  primer
ggtcaggccagtcaccac

SEQ ID NO: 76410 - DNA, 38 bp, Artificial Sequence
  primer
gtaaaacgacggccagtgcttcttgaagctctccaggt

SEQ ID NO: 76411 - DNA, 38 bp, Artificial Sequence
  primer
gtaaaacgacggccagtactcactcttgacgcctttcc

SEQ ID NO: 76412 - DNA, 38 bp, Artificial Sequence
  primer
gtaaaacgacggccagtggtcttgtcgtcgtctgtgaa

SEQ ID NO: 76413 - DNA, 21 bp, Artificial Sequence
  primer
tggaagcagttggtcctcttc

SEQ ID NO: 76414 - DNA, 39 bp, Artificial Sequence
  primer
gtaaaacgacggccagtgttggaacaggagacagagacc

SEQ ID NO: 76415 - DNA, 38 bp, Artificial Sequence
  primer
gtaaaacgacggccagtacgtgggtctcaacaggtagc

SEQ ID NO: 76416 - DNA, 36 bp, Artificial Sequence
  primer
gtaaaacgacggccagtcctgagcattggccttgtc

SEQ ID NO: 76417 - DNA, 20 bp, Artificial Sequence
  primer
tggcagtgttgaagagggac

SEQ ID NO: 76418 - DNA, 18 bp, Artificial Sequence
  primer
cccacccaagacagaggg

SEQ ID NO: 76419 - DNA, 22 bp, Artificial Sequence
  primer
gaaactggaagtctgcaggatg

SEQ ID NO: 76420 - DNA, 38 bp, Artificial Sequence
  primer
gtaaaacgacggccagtctacaggctgagacctgctcc

SEQ ID NO: 76421 - DNA, 21 bp, Artificial Sequence
  primer
gtgtggtgcagacacttgagg

SEQ ID NO: 76422 - DNA, 21 bp, Artificial Sequence
  primer
cccaccatgtagacggtcttg

SEQ ID NO: 76423 - DNA, 37 bp, Artificial Sequence
  primer
gtaaaacgacggccagtagggccatgtttaatgggac

SEQ ID NO: 76424 - DNA, 21 bp, Artificial Sequence
  primer
tccaccctatctcccactcac

SEQ ID NO: 76425 - DNA, 21 bp, Artificial Sequence
  primer
caaatcttacatggacgtggc

SEQ ID NO: 76426 - DNA, 21 bp, Artificial Sequence
  primer
tccaccctatctcccactcac

SEQ ID NO: 76427 - DNA, 21 bp, Artificial Sequence
  primer
aaaggccaagaagacagcatc

SEQ ID NO: 76428 - DNA, 21 bp, Artificial Sequence
  primer
tagctcgctggtttaattcgc

SEQ ID NO: 76429 - DNA, 38 bp, Artificial Sequence
  primer
gtaaaacgacggccagtacttggtgtgctgagatgcag

SEQ ID NO: 76430 - DNA, 38 bp, Artificial Sequence
  primer
gtaaaacgacggccagtatgaatgaatctcggctgtcc

SEQ ID NO: 76431 - DNA, 38 bp, Artificial Sequence
  primer
gtaaaacgacggccagtatggaacatgccagaggtagc

SEQ ID NO: 76432 - DNA, 35 bp, Artificial Sequence
  primer
gtaaaacgacggccagtaggagtccaggccctcag

SEQ ID NO: 76433 - DNA, 39 bp, Artificial Sequence
  primer
gtaaaacgacggccagtcaaagcagaatttgacgctagg

SEQ ID NO: 76434 - DNA, 21 bp, Artificial Sequence
  primer
gtcctagcctctcccacacag

SEQ ID NO: 76435 - DNA, 35 bp, Artificial Sequence
  primer
gtaaaacgacggccagtccaggcgtccaggtccta

SEQ ID NO: 76436 - DNA, 20 bp, Artificial Sequence
  primer
gggaatggcttctatctggg

SEQ ID NO: 76437 - DNA, 38 bp, Artificial Sequence
  primer
gtaaaacgacggccagtcagacccagagagcagcagag

SEQ ID NO: 76438 - DNA, 20 bp, Artificial Sequence
  primer
aacatctctctgcgcctgtc

SEQ ID NO: 76439 - DNA, 21 bp, Artificial Sequence
  primer
aggttgaacccagggctagag

SEQ ID NO: 76440 - DNA, 21 bp, Artificial Sequence
  primer
aaagtacgacaggctggaagc

SEQ ID NO: 76441 - DNA, 19 bp, Artificial Sequence
  primer
gaaacatgctggtgttgcg

SEQ ID NO: 76442 - DNA, 20 bp, Artificial Sequence
  primer
ggatggtagatcctgggagg

SEQ ID NO: 76443 - DNA, 38 bp, Artificial Sequence
  primer
gtaaaacgacggccagtgtgacccttgagggagacaag

SEQ ID NO: 76444 - DNA, 21 bp, Artificial Sequence
  primer
ctgggtgtattatgggatggg

SEQ ID NO: 76445 - DNA, 21 bp, Artificial Sequence
  primer
cagcagcacatgcacctctac

SEQ ID NO: 76446 - DNA, 38 bp, Artificial Sequence
  primer
gtaaaacgacggccagttctctagagggttctgctccc

SEQ ID NO: 76447 - DNA, 20 bp, Artificial Sequence
  primer
aaatccctgggcagtcagag

SEQ ID NO: 76448 - DNA, 21 bp, Artificial Sequence
  primer
gagacggttctggagttgtgg

SEQ ID NO: 76449 - DNA, 21 bp, Artificial Sequence
  primer
cactgaggattctctcggtcc

SEQ ID NO: 76450 - DNA, 38 bp, Artificial Sequence
  primer
gtaaaacgacggccagtagaatcaagcaagggatggtg

SEQ ID NO: 76451 - DNA, 19 bp, Artificial Sequence
  primer
ctcctccaactcctggtgg

SEQ ID NO: 76452 - DNA, 39 bp, Artificial Sequence
  primer
gtaaaacgacggccagtcaaagagggagatggacagaag

SEQ ID NO: 76453 - DNA, 38 bp, Artificial Sequence
  primer
gtaaaacgacggccagtaatacagcagcacctgtgagg

SEQ ID NO: 76454 - DNA, 20 bp, Artificial Sequence
  primer
gtgatctgcggactcacctg

SEQ ID NO: 76455 - DNA, 21 bp, Artificial Sequence
  primer
tcctgaccctacatttccagg

SEQ ID NO: 76456 - DNA, 21 bp, Artificial Sequence
  primer
aagtgacagcttcagggaacc

SEQ ID NO: 76457 - DNA, 23 bp, Artificial Sequence
  primer
caccacacatcaataagccattc

SEQ ID NO: 76458 - DNA, 23 bp, Artificial Sequence
  primer
gatcacaatcatattcacagccc

SEQ ID NO: 76459 - DNA, 21 bp, Artificial Sequence
  primer
tttgagaaccgctgttgagac

SEQ ID NO: 76460 - DNA, 21 bp, Artificial Sequence
  primer
ctgattcagacccaagcactg

SEQ ID NO: 76461 - DNA, 38 bp, Artificial Sequence
  primer
gtaaaacgacggccagtcgagtggatgcagagtttgag

SEQ ID NO: 76462 - DNA, 35 bp, Artificial Sequence
  primer
gtaaaacgacggccagtgagcctggcccagacatt

SEQ ID NO: 76463 - DNA, 21 bp, Artificial Sequence
  primer
tgtcagcttgcaggagatcag

SEQ ID NO: 76464 - DNA, 24 bp, Artificial Sequence
  primer
gcattaatccaatatctagggcac

SEQ ID NO: 76465 - DNA, 20 bp, Artificial Sequence
  primer
ccaaagtggaggaacagacg

SEQ ID NO: 76466 - DNA, 21 bp, Artificial Sequence
  primer
gtattgctggacaacgacagc

SEQ ID NO: 76467 - DNA, 22 bp, Artificial Sequence
  primer
ttaacaaagtcatgcatgtgcc

SEQ ID NO: 76468 - DNA, 21 bp, Artificial Sequence
  primer
tgggacaagtcagtgatgagc

SEQ ID NO: 76469 - DNA, 43 bp, Artificial Sequence
  primer
gtaaaacgacggccagtattctcacttctggtagaacttggag

SEQ ID NO: 76470 - DNA, 20 bp, Artificial Sequence
  primer
aacgtgctccatcctgtgag

SEQ ID NO: 76471 - DNA, 38 bp, Artificial Sequence
  primer
gtaaaacgacggccagtgctgagtttccttctcaaccc

SEQ ID NO: 76472 - DNA, 38 bp, Artificial Sequence
  primer
gtaaaacgacggccagtaagaatcatctcccaagtggc

SEQ ID NO: 76473 - DNA, 21 bp, Artificial Sequence
  primer
cagtctctcatcacaccgacc

SEQ ID NO: 76474 - DNA, 21 bp, Artificial Sequence
  primer
actctttccaggacaggctcc

SEQ ID NO: 76475 - DNA, 38 bp, Artificial Sequence
  primer
gtaaaacgacggccagtagacgggcagactgacttctg

SEQ ID NO: 76476 - DNA, 21 bp, Artificial Sequence
  primer
atttagccacaggcaagaagc

SEQ ID NO: 76477 - DNA, 21 bp, Artificial Sequence
  primer
acagtgtcctgcactgggaag

SEQ ID NO: 76478 - DNA, 24 bp, Artificial Sequence
  primer
ggaatgatggaaactaattctggc

SEQ ID NO: 76479 - DNA, 21 bp, Artificial Sequence
  primer
aaattctgacagcagaaggcg

SEQ ID NO: 76480 - DNA, 39 bp, Artificial Sequence
  primer
gtaaaacgacggccagtgcttaaccactcaggctgtagg

SEQ ID NO: 76481 - DNA, 21 bp, Artificial Sequence
  primer
ctagcccaccaattcccatag

SEQ ID NO: 76482 - DNA, 38 bp, Artificial Sequence
  primer
gtaaaacgacggccagtgacacctgactggcatagcac

SEQ ID NO: 76483 - DNA, 38 bp, Artificial Sequence
  primer
gtaaaacgacggccagtttagcattgaagaggcttccc

SEQ ID NO: 76484 - DNA, 21 bp, Artificial Sequence
  primer
agatgaaagtgtgcaggatgg

SEQ ID NO: 76485 - DNA, 36 bp, Artificial Sequence
  primer
gtaaaacgacggccagtcaggcctgacctttcctcc

SEQ ID NO: 76486 - DNA, 39 bp, Artificial Sequence
  primer
gtaaaacgacggccagtggatttaacttgctttcctccc

SEQ ID NO: 76487 - DNA, 22 bp, Artificial Sequence
  primer
caattctttagtggtccggaag

SEQ ID NO: 76488 - DNA, 21 bp, Artificial Sequence
  primer
tttcatttctcagagggcagg

SEQ ID NO: 76489 - DNA, 38 bp, Artificial Sequence
  primer
gtaaaacgacggccagtgtaggcagcagaacttgggtc

SEQ ID NO: 76490 - DNA, 21 bp, Artificial Sequence
  primer
tcaaagtttgggttgctgaag

SEQ ID NO: 76491 - DNA, 22 bp, Artificial Sequence
  primer
cccttcacagctgatgctagtc

SEQ ID NO: 76492 - DNA, 21 bp, Artificial Sequence
  primer
tccttgaaatgcctgactgtg

SEQ ID NO: 76493 - DNA, 37 bp, Artificial Sequence
  primer
gtaaaacgacggccagtgtctctgtttggcctggatg

SEQ ID NO: 76494 - DNA, 38 bp, Artificial Sequence
  primer
gtaaaacgacggccagttctattacaggacggttgccc

SEQ ID NO: 76495 - DNA, 20 bp, Artificial Sequence
  primer
atatgtgcacgtcccagagg

SEQ ID NO: 76496 - DNA, 20 bp, Artificial Sequence
  primer
aggcaagaagtggaagaggg

SEQ ID NO: 76497 - DNA, 38 bp, Artificial Sequence
  primer
gtaaaacgacggccagtagactttcaggaaccacggtc

SEQ ID NO: 76498 - DNA, 37 bp, Artificial Sequence
  primer
gtaaaacgacggccagtgggttataggcatgcaccac

SEQ ID NO: 76499 - DNA, 21 bp, Artificial Sequence
  primer
tgaacctcagagatcctgcac

SEQ ID NO: 76500 - DNA, 38 bp, Artificial Sequence
  primer
gtaaaacgacggccagtggaacaggatgggagatgatg

SEQ ID NO: 76501 - DNA, 22 bp, Artificial Sequence
  primer
aattaaaccctagcatcagccc

SEQ ID NO: 76502 - DNA, 38 bp, Artificial Sequence
  primer
gtaaaacgacggccagttgtcaactctcagcaaccctc

SEQ ID NO: 76503 - DNA, 21 bp, Artificial Sequence
  primer
ggcagctcagcttcatttagg

SEQ ID NO: 76504 - DNA, 38 bp, Artificial Sequence
  primer
gtaaaacgacggccagttacctctttcccacccttgtg

SEQ ID NO: 76505 - DNA, 22 bp, Artificial Sequence
  primer
ggtgggaggttacctactcagg

SEQ ID NO: 76506 - DNA, 38 bp, Artificial Sequence
  primer
gtaaaacgacggccagttctggccttgggtaatgagac

SEQ ID NO: 76507 - DNA, 21 bp, Artificial Sequence
  primer
atgtggccagaaggagagaag

SEQ ID NO: 76508 - DNA, 21 bp, Artificial Sequence
  primer
aggacgaagacaccaaagacc

SEQ ID NO: 76509 - DNA, 21 bp, Artificial Sequence
  primer
attgtgccaccctatctggtc

SEQ ID NO: 76510 - DNA, 21 bp, Artificial Sequence
  primer
taggaagtcctgggagtctgg

SEQ ID NO: 76511 - DNA, 21 bp, Artificial Sequence
  primer
aaaggaacacaggtggacagg

SEQ ID NO: 76512 - DNA, 38 bp, Artificial Sequence
  primer
gtaaaacgacggccagttcctacctcccacttccttcc

SEQ ID NO: 76513 - DNA, 21 bp, Artificial Sequence
  primer
ttccctgttgtggctgtctac

SEQ ID NO: 76514 - DNA, 22 bp, Artificial Sequence
  primer
tcctcttccagactcttcctcc

SEQ ID NO: 76515 - DNA, 38 bp, Artificial Sequence
  primer
gtaaaacgacggccagtatctgtctccgcatccatctc

SEQ ID NO: 76516 - DNA, 21 bp, Artificial Sequence
  primer
ctagcaagggtgcttgtctcc

SEQ ID NO: 76517 - DNA, 38 bp, Artificial Sequence
  primer
gtaaaacgacggccagtagcgtaggtctctgctcacac

SEQ ID NO: 76518 - DNA, 38 bp, Artificial Sequence
  primer
gtaaaacgacggccagtacaggtggcttcttaaggctg

SEQ ID NO: 76519 - DNA, 21 bp, Artificial Sequence
  primer
ccaggacaggatctagggctc

SEQ ID NO: 76520 - DNA, 39 bp, Artificial Sequence
  primer
gtaaaacgacggccagttcagaaccaccatctctcactg

SEQ ID NO: 76521 - DNA, 20 bp, Artificial Sequence
  primer
ctccacagggaggagtgttg

SEQ ID NO: 76522 - DNA, 37 bp, Artificial Sequence
  primer
gtaaaacgacggccagtttggtgctgaccttggtttc

SEQ ID NO: 76523 - DNA, 38 bp, Artificial Sequence
  primer
gtaaaacgacggccagtactggataactcggcagcaac

SEQ ID NO: 76524 - DNA, 39 bp, Artificial Sequence
  primer
gtaaaacgacggccagtcaccataatttcaaagggatgc

SEQ ID NO: 76525 - DNA, 38 bp, Artificial Sequence
  primer
gtaaaacgacggccagtttcctgagtgtttcgggtagc

SEQ ID NO: 76526 - DNA, 37 bp, Artificial Sequence
  primer
gtaaaacgacggccagttccctgcagtagatcatgcc

SEQ ID NO: 76527 - DNA, 40 bp, Artificial Sequence
  primer
gtaaaacgacggccagtaatagtccacatgacctgcaatc

SEQ ID NO: 76528 - DNA, 23 bp, Artificial Sequence
  primer
tttccaaccctgaattactctcc

SEQ ID NO: 76529 - DNA, 21 bp, Artificial Sequence
  primer
cagccacacccattcatttac

SEQ ID NO: 76530 - DNA, 25 bp, Artificial Sequence
  primer
aattagttcatcagccgaatacttg

SEQ ID NO: 76531 - DNA, 21 bp, Artificial Sequence
  primer
ggcaggtgttcggttgtaatc

SEQ ID NO: 76532 - DNA, 38 bp, Artificial Sequence
  primer
gtaaaacgacggccagtaggcaactgcaacattctctg

SEQ ID NO: 76533 - DNA, 26 bp, Artificial Sequence
  primer
tgctaagacacctctaattcacatca

SEQ ID NO: 76534 - DNA, 38 bp, Artificial Sequence
  primer
gtaaaacgacggccagtggtcgcacaacaatgtgaata

SEQ ID NO: 76535 - DNA, 23 bp, Artificial Sequence
  primer
cccaaggagctattggttctaag

SEQ ID NO: 76536 - DNA, 38 bp, Artificial Sequence
  primer
gtaaaacgacggccagttctgcccactcgttgtatagc

SEQ ID NO: 76537 - DNA, 38 bp, Artificial Sequence
  primer
gtaaaacgacggccagtggagggaagataggaagcagg

SEQ ID NO: 76538 - DNA, 20 bp, Artificial Sequence
  primer
aggtaatccacccaccttgg

SEQ ID NO: 76539 - DNA, 21 bp, Artificial Sequence
  primer
accctttggctccagatgttc

SEQ ID NO: 76540 - DNA, 21 bp, Artificial Sequence
  primer
tacccatttaccaccacccag

SEQ ID NO: 76541 - DNA, 39 bp, Artificial Sequence
  primer
gtaaaacgacggccagtccaccagagagagaccacaaac

SEQ ID NO: 76542 - DNA, 21 bp, Artificial Sequence
  primer
atgatggaagacactgcaacc

SEQ ID NO: 76543 - DNA, 38 bp, Artificial Sequence
  primer
gtaaaacgacggccagtatggaaacaaggcatattggg

SEQ ID NO: 76544 - DNA, 26 bp, Artificial Sequence
  primer
ggatttagtcttgattaacttgccac

SEQ ID NO: 76545 - DNA, 38 bp, Artificial Sequence
  primer
gtaaaacgacggccagtggtacataccaccatgccagg

SEQ ID NO: 76546 - DNA, 22 bp, Artificial Sequence
  primer
catcctctcctacaaatggctg

SEQ ID NO: 76547 - DNA, 38 bp, Artificial Sequence
  primer
gtaaaacgacggccagtcaaactccaaggctgagagac

SEQ ID NO: 76548 - DNA, 21 bp, Artificial Sequence
  primer
ctggaagccctatgttgacac

SEQ ID NO: 76549 - DNA, 37 bp, Artificial Sequence
  primer
gtaaaacgacggccagttgcaacatggatgagtttgc

SEQ ID NO: 76550 - DNA, 20 bp, Artificial Sequence
  primer
gagctgagattgtgccattg

SEQ ID NO: 76551 - DNA, 21 bp, Artificial Sequence
  primer
cagcctgcaagactgagtgag

SEQ ID NO: 76552 - DNA, 39 bp, Artificial Sequence
  primer
gtaaaacgacggccagttcacagattgatcttgacctgc

SEQ ID NO: 76553 - DNA, 23 bp, Artificial Sequence
  primer
aggtgacgtatattcccactgag

SEQ ID NO: 76554 - DNA, 38 bp, Artificial Sequence
  primer
gtaaaacgacggccagtgaatggttctctcctcttccc

SEQ ID NO: 76555 - DNA, 39 bp, Artificial Sequence
  primer
gtaaaacgacggccagtttgtgttattgagacagcaccg

SEQ ID NO: 76556 - DNA, 24 bp, Artificial Sequence
  primer
aacacactattaaggcgagagtcc

SEQ ID NO: 76557 - DNA, 21 bp, Artificial Sequence
  primer
agtgactgaaatgccatgctg

SEQ ID NO: 76558 - DNA, 38 bp, Artificial Sequence
  primer
gtaaaacgacggccagttatctcgacctcccaaagcac

SEQ ID NO: 76559 - DNA, 44 bp, Artificial Sequence
  primer
gtaaaacgacggccagtagtttgataaatccacatactttaggg

SEQ ID NO: 76560 - DNA, 21 bp, Artificial Sequence
  primer
catcactatgtgcttcacggg

SEQ ID NO: 76561 - DNA, 22 bp, Artificial Sequence
  primer
cacacacacacacctggatacc

SEQ ID NO: 76562 - DNA, 25 bp, Artificial Sequence
  primer
cctgaacaagtttattgacatcagc

SEQ ID NO: 76563 - DNA, 42 bp, Artificial Sequence
  primer
gtaaaacgacggccagttctgatgtttagaaacaggcagttc

SEQ ID NO: 76564 - DNA, 21 bp, Artificial Sequence
  primer
ctctctctgcatccacactgg

SEQ ID NO: 76565 - DNA, 21 bp, Artificial Sequence
  primer
ggacactggactaggtgtggg

SEQ ID NO: 76566 - DNA, 21 bp, Artificial Sequence
  primer
ggagaagatgggtggattgag

SEQ ID NO: 76567 - DNA, 21 bp, Artificial Sequence
  primer
gtttgctgggctttagttccc

SEQ ID NO: 76568 - DNA, 38 bp, Artificial Sequence
  primer
gtaaaacgacggccagtgagctgaaggttagtctgccc

SEQ ID NO: 76569 - DNA, 21 bp, Artificial Sequence
  primer
agaaggactcccatcctcacc

SEQ ID NO: 76570 - DNA, 21 bp, Artificial Sequence
  primer
agttcaccgtgggaagctagg

SEQ ID NO: 76571 - DNA, 21 bp, Artificial Sequence
  primer
gtccgtagaaggaaggacctg

SEQ ID NO: 76572 - DNA, 38 bp, Artificial Sequence
  primer
gtaaaacgacggccagttcacacttagggaggctctgc

SEQ ID NO: 76573 - DNA, 21 bp, Artificial Sequence
  primer
aaggtggagtagtgcatggtg

SEQ ID NO: 76574 - DNA, 21 bp, Artificial Sequence
  primer
taccttgactttgtggaagcg

SEQ ID NO: 76575 - DNA, 38 bp, Artificial Sequence
  primer
gtaaaacgacggccagtggaggcagaggaggttctagc

SEQ ID NO: 76576 - DNA, 37 bp, Artificial Sequence
  primer
gtaaaacgacggccagttccagaacctgtaaccgctg

SEQ ID NO: 76577 - DNA, 21 bp, Artificial Sequence
  primer
ccacagaagagagagactggg

SEQ ID NO: 76578 - DNA, 37 bp, Artificial Sequence
  primer
gtaaaacgacggccagttcctgggaacagtctggttg

SEQ ID NO: 76579 - DNA, 21 bp, Artificial Sequence
  primer
tagcctggctgacagaatgag

SEQ ID NO: 76580 - DNA, 21 bp, Artificial Sequence
  primer
atggatgaatgggctttgttc

SEQ ID NO: 76581 - DNA, 22 bp, Artificial Sequence
  primer
gctgctctaaaccatccacatc

SEQ ID NO: 76582 - DNA, 21 bp, Artificial Sequence
  primer
caggaatgtgctttgggagac

SEQ ID NO: 76583 - DNA, 38 bp, Artificial Sequence
  primer
gtaaaacgacggccagtgtcacaagcacgtaatgctcc

SEQ ID NO: 76584 - DNA, 21 bp, Artificial Sequence
  primer
aatctgagaacactcgctgcc

SEQ ID NO: 76585 - DNA, 21 bp, Artificial Sequence
  primer
gagactgaggcctggagagac

SEQ ID NO: 76586 - DNA, 37 bp, Artificial Sequence
  primer
gtaaaacgacggccagtaactccctgtaccctcctgc

SEQ ID NO: 76587 - DNA, 21 bp, Artificial Sequence
  primer
ggccatttctgttgtttctgg

SEQ ID NO: 76588 - DNA, 36 bp, Artificial Sequence
  primer
gtaaaacgacggccagtcctccagcagacacatccc

SEQ ID NO: 76589 - DNA, 20 bp, Artificial Sequence
  primer
gagagagggtgagcacatgg

SEQ ID NO: 76590 - DNA, 21 bp, Artificial Sequence
  primer
cttccttccgtgaagtgtctg

SEQ ID NO: 76591 - DNA, 18 bp, Artificial Sequence
  primer
gagagctggcgaaccgac

SEQ ID NO: 76592 - DNA, 18 bp, Artificial Sequence
  primer
cttgcgcatctcggtgac

SEQ ID NO: 76593 - DNA, 18 bp, Artificial Sequence
  primer
cagcctcccttcggtctc

SEQ ID NO: 76594 - DNA, 37 bp, Artificial Sequence
  primer
gtaaaacgacggccagtgactgcggctgacaggatag

SEQ ID NO: 76595 - DNA, 38 bp, Artificial Sequence
  primer
gtaaaacgacggccagtcaggtacgagggaaagctcac

SEQ ID NO: 76596 - DNA, 21 bp, Artificial Sequence
  primer
actgagaagcgtcagggtctc

SEQ ID NO: 76597 - DNA, 21 bp, Artificial Sequence
  primer
tgtcaagtccttgagtgtggg

SEQ ID NO: 76598 - DNA, 21 bp, Artificial Sequence
  primer
tctgtcagactggactcaggg

SEQ ID NO: 76599 - DNA, 21 bp, Artificial Sequence
  primer
gtcactcagggacctgtaggc

SEQ ID NO: 76600 - DNA, 38 bp, Artificial Sequence
  primer
gtaaaacgacggccagtatcccttgctctcttcactgc

SEQ ID NO: 76601 - DNA, 38 bp, Artificial Sequence
  primer
gtaaaacgacggccagtgtagggccctttcagactgtg

SEQ ID NO: 76602 - DNA, 21 bp, Artificial Sequence
  primer
aagctcctggtgactactccg

SEQ ID NO: 76603 - DNA, 38 bp, Artificial Sequence
  primer
gtaaaacgacggccagttagggaagcctatgggttctg

SEQ ID NO: 76604 - DNA, 21 bp, Artificial Sequence
  primer
ccctacaaaggactcaccacc

SEQ ID NO: 76605 - DNA, 38 bp, Artificial Sequence
  primer
gtaaaacgacggccagtgggcacctgaccagtgaatac

SEQ ID NO: 76606 - DNA, 37 bp, Artificial Sequence
  primer
gtaaaacgacggccagtggtttgctcacacccatctg

SEQ ID NO: 76607 - DNA, 38 bp, Artificial Sequence
  primer
gtaaaacgacggccagtgtcagtatccaggtgggatgg

SEQ ID NO: 76608 - DNA, 21 bp, Artificial Sequence
  primer
ccaggaagactatgtccaggg

SEQ ID NO: 76609 - DNA, 22 bp, Artificial Sequence
  primer
gcaggagggactatgggtagac

SEQ ID NO: 76610 - DNA, 21 bp, Artificial Sequence
  primer
cagacatggatgcaaacacac

SEQ ID NO: 76611 - DNA, 21 bp, Artificial Sequence
  primer
cctgcaggtagagggtgtgag

SEQ ID NO: 76612 - DNA, 38 bp, Artificial Sequence
  primer
gtaaaacgacggccagtgcatcttgtacttgctggctg

SEQ ID NO: 76613 - DNA, 37 bp, Artificial Sequence
  primer
gtaaaacgacggccagtcactggatgagagagcgagg

SEQ ID NO: 76614 - DNA, 39 bp, Artificial Sequence
  primer
gtaaaacgacggccagtgcaaatgtcagggctgtctatc

SEQ ID NO: 76615 - DNA, 21 bp, Artificial Sequence
  primer
ggttctggctcctgaagtcac

SEQ ID NO: 76616 - DNA, 21 bp, Artificial Sequence
  primer
gagcaatagcaatgttcacgg

SEQ ID NO: 76617 - DNA, 19 bp, Artificial Sequence
  primer
agagtgtgctgggacaggg

SEQ ID NO: 76618 - DNA, 21 bp, Artificial Sequence
  primer
tacactggtccctcctctccc

SEQ ID NO: 76619 - DNA, 21 bp, Artificial Sequence
  primer
gggaccacatgatttccagag

SEQ ID NO: 76620 - DNA, 21 bp, Artificial Sequence
  primer
accagatgaacagaaggaggc

SEQ ID NO: 76621 - DNA, 21 bp, Artificial Sequence
  primer
taaatttgagcctcggtctcc

SEQ ID NO: 76622 - DNA, 21 bp, Artificial Sequence
  primer
actctgtggtcagaggaaggc

SEQ ID NO: 76623 - DNA, 36 bp, Artificial Sequence
  primer
gtaaaacgacggccagtgtgattcgcagacaggcag

SEQ ID NO: 76624 - DNA, 38 bp, Artificial Sequence
  primer
gtaaaacgacggccagtcctcttgaaagctcttctggc

SEQ ID NO: 76625 - DNA, 21 bp, Artificial Sequence
  primer
tactcctggtcaaagtctgcg

SEQ ID NO: 76626 - DNA, 20 bp, Artificial Sequence
  primer
ctggaagcaagcgttaatgg

SEQ ID NO: 76627 - DNA, 21 bp, Artificial Sequence
  primer
caggactcagcttcaaactcg

SEQ ID NO: 76628 - DNA, 21 bp, Artificial Sequence
  primer
tgcagtgagctctgattgtcc

SEQ ID NO: 76629 - DNA, 21 bp, Artificial Sequence
  primer
cacggcaagaccctatctcag

SEQ ID NO: 76630 - DNA, 37 bp, Artificial Sequence
  primer
gtaaaacgacggccagtcactgcaacctttgcttcct

SEQ ID NO: 76631 - DNA, 37 bp, Artificial Sequence
  primer
gtaaaacgacggccagtcccaccactccaagacagtg

SEQ ID NO: 76632 - DNA, 21 bp, Artificial Sequence
  primer
agctgggactacagacatggg

SEQ ID NO: 76633 - DNA, 21 bp, Artificial Sequence
  primer
gggatgagggagttcaaggtc

SEQ ID NO: 76634 - DNA, 21 bp, Artificial Sequence
  primer
cacagcccgttctaatgcttc

SEQ ID NO: 76635 - DNA, 21 bp, Artificial Sequence
  primer
cccacatagaagcctgtcctg

SEQ ID NO: 76636 - DNA, 21 bp, Artificial Sequence
  primer
tggtggcgtgtgcttatagtc

SEQ ID NO: 76637 - DNA, 38 bp, Artificial Sequence
  primer
gtaaaacgacggccagtcagcagaagctgctcacacac

SEQ ID NO: 76638 - DNA, 38 bp, Artificial Sequence
  primer
gtaaaacgacggccagttctccacatagctgtcctggt

SEQ ID NO: 76639 - DNA, 37 bp, Artificial Sequence
  primer
gtaaaacgacggccagtgcgtctccacatagctgtcc

SEQ ID NO: 76640 - DNA, 36 bp, Artificial Sequence
  primer
gtaaaacgacggccagttccaggtcgtgctggtagg

SEQ ID NO: 76641 - DNA, 37 bp, Artificial Sequence
  primer
gtaaaacgacggccagtcctgtcacctgcatgcactc

SEQ ID NO: 76642 - DNA, 19 bp, Artificial Sequence
  primer
gaatttcctggctcccagc

SEQ ID NO: 76643 - DNA, 38 bp, Artificial Sequence
  primer
gtaaaacgacggccagttggaacagagagagggttcag

SEQ ID NO: 76644 - DNA, 38 bp, Artificial Sequence
  primer
gtaaaacgacggccagttggtttgctagggaagaggag

SEQ ID NO: 76645 - DNA, 21 bp, Artificial Sequence
  primer
cccgctggtgatctctgtatc

SEQ ID NO: 76646 - DNA, 38 bp, Artificial Sequence
  primer
gtaaaacgacggccagtgggaaccttgggacataaagg

SEQ ID NO: 76647 - DNA, 18 bp, Artificial Sequence
  primer
ggtccagagagtgggcct

SEQ ID NO: 76648 - DNA, 36 bp, Artificial Sequence
  primer
gtaaaacgacggccagtaaagagagagcgtcacggc

SEQ ID NO: 76649 - DNA, 40 bp, Artificial Sequence
  primer
gtaaaacgacggccagttcgatccctacctctcaactctc

SEQ ID NO: 76650 - DNA, 21 bp, Artificial Sequence
  primer
aggtcctagagccaaccttcc

SEQ ID NO: 76651 - DNA, 38 bp, Artificial Sequence
  primer
gtaaaacgacggccagtagtcagagccaggatggagac

SEQ ID NO: 76652 - DNA, 21 bp, Artificial Sequence
  primer
agtcaccttacgtcacccagc

SEQ ID NO: 76653 - DNA, 38 bp, Artificial Sequence
  primer
gtaaaacgacggccagttgaggcagtcctcatactccc

SEQ ID NO: 76654 - DNA, 21 bp, Artificial Sequence
  primer
ggtggatgagttcctctgtcc

SEQ ID NO: 76655 - DNA, 21 bp, Artificial Sequence
  primer
agtggtgccagctctaccaac

SEQ ID NO: 76656 - DNA, 21 bp, Artificial Sequence
  primer
agggatggactggtcataagc

SEQ ID NO: 76657 - DNA, 20 bp, Artificial Sequence
  primer
ctgtgtcctgcccaagtcag

SEQ ID NO: 76658 - DNA, 21 bp, Artificial Sequence
  primer
ccagaagttggtctctctccc

SEQ ID NO: 76659 - DNA, 38 bp, Artificial Sequence
  primer
gtaaaacgacggccagtgtggcagatcaacacttgcag

SEQ ID NO: 76660 - DNA, 20 bp, Artificial Sequence
  primer
attcctgtgtccagcctgtg

SEQ ID NO: 76661 - DNA, 21 bp, Artificial Sequence
  primer
gagcaagggatcaagcaactg

SEQ ID NO: 76662 - DNA, 38 bp, Artificial Sequence
  primer
gtaaaacgacggccagtggtgagaaacacagggtaggg

SEQ ID NO: 76663 - DNA, 38 bp, Artificial Sequence
  primer
gtaaaacgacggccagtagagtccgaaccctcccttag

SEQ ID NO: 76664 - DNA, 20 bp, Artificial Sequence
  primer
ggaaagggacctctcagcac

SEQ ID NO: 76665 - DNA, 21 bp, Artificial Sequence
  primer
gcccttctctagatcccttcc

SEQ ID NO: 76666 - DNA, 21 bp, Artificial Sequence
  primer
gcctgtaatgagaatcgcttg

SEQ ID NO: 76667 - DNA, 21 bp, Artificial Sequence
  primer
ctgtttctccagctctccctg

SEQ ID NO: 76668 - DNA, 39 bp, Artificial Sequence
  primer
gtaaaacgacggccagttctgtgtatggatggtctgcac

SEQ ID NO: 76669 - DNA, 21 bp, Artificial Sequence
  primer
ccttcctgtggtcataccgag

SEQ ID NO: 76670 - DNA, 21 bp, Artificial Sequence
  primer
ctaagacctgcaggcatctcc

SEQ ID NO: 76671 - DNA, 22 bp, Artificial Sequence
  primer
ttagaaatgtgtgcaacccttg

SEQ ID NO: 76672 - DNA, 21 bp, Artificial Sequence
  primer
tcccagggagttctatggttg

SEQ ID NO: 76673 - DNA, 21 bp, Artificial Sequence
  primer
tacaccagccctcatagagcc

SEQ ID NO: 76674 - DNA, 38 bp, Artificial Sequence
  primer
gtaaaacgacggccagtcccacttgtctgtgtttgtcc

SEQ ID NO: 76675 - DNA, 21 bp, Artificial Sequence
  primer
gcctcaccatctgttgagaag

SEQ ID NO: 76676 - DNA, 21 bp, Artificial Sequence
  primer
gtgttgaggatccagaggctg

SEQ ID NO: 76677 - DNA, 38 bp, Artificial Sequence
  primer
gtaaaacgacggccagtaaagttgaacaagggtgggtg

SEQ ID NO: 76678 - DNA, 21 bp, Artificial Sequence
  primer
gcaggcagaagggtttatcag

SEQ ID NO: 76679 - DNA, 37 bp, Artificial Sequence
  primer
gtaaaacgacggccagtccaatggcccaatttctttc

SEQ ID NO: 76680 - DNA, 38 bp, Artificial Sequence
  primer
gtaaaacgacggccagtgacttccaccacccattcatc

SEQ ID NO: 76681 - DNA, 21 bp, Artificial Sequence
  primer
ggcaaggacaatttgcagttc

SEQ ID NO: 76682 - DNA, 37 bp, Artificial Sequence
  primer
gtaaaacgacggccagtagaatgggagatggaggcag

SEQ ID NO: 76683 - DNA, 38 bp, Artificial Sequence
  primer
gtaaaacgacggccagtcaggtcactttgaaaccaggg

SEQ ID NO: 76684 - DNA, 20 bp, Artificial Sequence
  primer
caaattccagcatggctgac

SEQ ID NO: 76685 - DNA, 21 bp, Artificial Sequence
  primer
gtctggagagctattctgccc

SEQ ID NO: 76686 - DNA, 38 bp, Artificial Sequence
  primer
gtaaaacgacggccagtatgaacagggctggaagtagg

SEQ ID NO: 76687 - DNA, 42 bp, Artificial Sequence
  primer
gtaaaacgacggccagtttctgatgtgaaaccaacatttgta

SEQ ID NO: 76688 - DNA, 21 bp, Artificial Sequence
  primer
tcttccattcacccactgacc

SEQ ID NO: 76689 - DNA, 18 bp, Artificial Sequence
  primer
cttgaaccgggaaggcag

SEQ ID NO: 76690 - DNA, 38 bp, Artificial Sequence
  primer
gtaaaacgacggccagtgtttgacttcaagaccgtggc

SEQ ID NO: 76691 - DNA, 21 bp, Artificial Sequence
  primer
aagtgcttctccaaaccgttc

SEQ ID NO: 76692 - DNA, 19 bp, Artificial Sequence
  primer
agctcaggaagcaacaggc

SEQ ID NO: 76693 - DNA, 21 bp, Artificial Sequence
  primer
taccaggcaagtggatacagc

SEQ ID NO: 76694 - DNA, 38 bp, Artificial Sequence
  primer
gtaaaacgacggccagtctgaaactgcgctgtgtatgg

SEQ ID NO: 76695 - DNA, 37 bp, Artificial Sequence
  primer
gtaaaacgacggccagtctgcacctaggatgccagag

SEQ ID NO: 76696 - DNA, 21 bp, Artificial Sequence
  primer
gatgttcccgaagatggtacg

SEQ ID NO: 76697 - DNA, 20 bp, Artificial Sequence
  primer
gccacacagaagcagagacc

SEQ ID NO: 76698 - DNA, 38 bp, Artificial Sequence
  primer
gtaaaacgacggccagttgctaatgctcaaactggctg

SEQ ID NO: 76699 - DNA, 35 bp, Artificial Sequence
  primer
gtaaaacgacggccagtctccctgcttcagctccc

SEQ ID NO: 76700 - DNA, 19 bp, Artificial Sequence
  primer
ctggcacctgtcttctggg

SEQ ID NO: 76701 - DNA, 18 bp, Artificial Sequence
  primer
tgcaacctgagagggctg

SEQ ID NO: 76702 - DNA, 22 bp, Artificial Sequence
  primer
tggttcagagaagggaatgatg

SEQ ID NO: 76703 - DNA, 37 bp, Artificial Sequence
  primer
gtaaaacgacggccagttcacttgcaggcagaggaag

SEQ ID NO: 76704 - DNA, 21 bp, Artificial Sequence
  primer
ggcaactttgtatgacttggc

SEQ ID NO: 76705 - DNA, 38 bp, Artificial Sequence
  primer
gtaaaacgacggccagtgggataatgtgagcaaggtgg

SEQ ID NO: 76706 - DNA, 21 bp, Artificial Sequence
  primer
ctaggctatgacctgggctct

SEQ ID NO: 76707 - DNA, 38 bp, Artificial Sequence
  primer
gtaaaacgacggccagtcacagaccttgtccctcttga

SEQ ID NO: 76708 - DNA, 21 bp, Artificial Sequence
  primer
tctagaggccaatcttccacc

SEQ ID NO: 76709 - DNA, 36 bp, Artificial Sequence
  primer
gtaaaacgacggccagtgttgccataagccacccag

SEQ ID NO: 76710 - DNA, 21 bp, Artificial Sequence
  primer
ggcctagttctccatccacag

SEQ ID NO: 76711 - DNA, 20 bp, Artificial Sequence
  primer
tgttgccagtggtgtcacag

SEQ ID NO: 76712 - DNA, 21 bp, Artificial Sequence
  primer
tttgcttggaactggtttctg

SEQ ID NO: 76713 - DNA, 38 bp, Artificial Sequence
  primer
gtaaaacgacggccagttttgcatcacgagaacaatcc

SEQ ID NO: 76714 - DNA, 20 bp, Artificial Sequence
  primer
accacatgcctttgatttgc

SEQ ID NO: 76715 - DNA, 22 bp, Artificial Sequence
  primer
tctgagctttgaattcctttgc

SEQ ID NO: 76716 - DNA, 38 bp, Artificial Sequence
  primer
gtaaaacgacggccagtaaagagctccactgtaatgcg

SEQ ID NO: 76717 - DNA, 37 bp, Artificial Sequence
  primer
gtaaaacgacggccagtaccatgttcttggcaacctg

SEQ ID NO: 76718 - DNA, 39 bp, Artificial Sequence
  primer
gtaaaacgacggccagttgtccttatcaaaggcaacagg

SEQ ID NO: 76719 - DNA, 21 bp, Artificial Sequence
  primer
tcaattcctggcatcatgaac

SEQ ID NO: 76720 - DNA, 38 bp, Artificial Sequence
  primer
gtaaaacgacggccagtccaagaccttgattcctctgc

SEQ ID NO: 76721 - DNA, 21 bp, Artificial Sequence
  primer
agcctggcaacctttctttag

SEQ ID NO: 76722 - DNA, 23 bp, Artificial Sequence
  primer
ttgactttgatggaagaacaagg

SEQ ID NO: 76723 - DNA, 40 bp, Artificial Sequence
  primer
gtaaaacgacggccagttgccatagtggagatattgcatc

SEQ ID NO: 76724 - DNA, 21 bp, Artificial Sequence
  primer
ggaatatactttgccatgccc

SEQ ID NO: 76725 - DNA, 37 bp, Artificial Sequence
  primer
gtaaaacgacggccagtgactaagggtgtgctcgctg

SEQ ID NO: 76726 - DNA, 38 bp, Artificial Sequence
  primer
gtaaaacgacggccagttatttgcagatggacaatggg

SEQ ID NO: 76727 - DNA, 22 bp, Artificial Sequence
  primer
ggaaagcttcattcatcaaagg

SEQ ID NO: 76728 - DNA, 38 bp, Artificial Sequence
  primer
gtaaaacgacggccagtttgctccaatcatctgctttc

SEQ ID NO: 76729 - DNA, 38 bp, Artificial Sequence
  primer
gtaaaacgacggccagtcaagtcacctgctttccacac

SEQ ID NO: 76730 - DNA, 21 bp, Artificial Sequence
  primer
ttcccaggtaaggaggagttg

SEQ ID NO: 76731 - DNA, 21 bp, Artificial Sequence
  primer
cttccctgaaagcatgagcag

SEQ ID NO: 76732 - DNA, 38 bp, Artificial Sequence
  primer
gtaaaacgacggccagtctgagtcaaatcattcagcgg

SEQ ID NO: 76733 - DNA, 21 bp, Artificial Sequence
  primer
aagaccaggtcatttgcacag

SEQ ID NO: 76734 - DNA, 22 bp, Artificial Sequence
  primer
ggtggttacatttgtgtggcag

SEQ ID NO: 76735 - DNA, 22 bp, Artificial Sequence
  primer
gctgatgtctaaggcaaactgg

SEQ ID NO: 76736 - DNA, 21 bp, Artificial Sequence
  primer
actcttcctccatggaacacc

SEQ ID NO: 76737 - DNA, 38 bp, Artificial Sequence
  primer
gtaaaacgacggccagttattagccaaagggcttcagg

SEQ ID NO: 76738 - DNA, 39 bp, Artificial Sequence
  primer
gtaaaacgacggccagtaaactctgttggttctggcttc

SEQ ID NO: 76739 - DNA, 19 bp, Artificial Sequence
  primer
agccacagaatgccgactc

SEQ ID NO: 76740 - DNA, 21 bp, Artificial Sequence
  primer
atgccataagcctctctcctg

SEQ ID NO: 76741 - DNA, 38 bp, Artificial Sequence
  primer
gtaaaacgacggccagtacgaaacacaaacaggagctg

SEQ ID NO: 76742 - DNA, 38 bp, Artificial Sequence
  primer
gtaaaacgacggccagtataggccgagtggaaacacag

SEQ ID NO: 76743 - DNA, 37 bp, Artificial Sequence
  primer
gtaaaacgacggccagtgaagagggccaaagatctgc

SEQ ID NO: 76744 - DNA, 21 bp, Artificial Sequence
  primer
tcagcagcagagcagataacc

SEQ ID NO: 76745 - DNA, 21 bp, Artificial Sequence
  primer
ttcctatcactgcctcaaggg

SEQ ID NO: 76746 - DNA, 21 bp, Artificial Sequence
  primer
catcactcactgggaggtcag

SEQ ID NO: 76747 - DNA, 36 bp, Artificial Sequence
  primer
gtaaaacgacggccagtgccctcagggagttgtctg

SEQ ID NO: 76748 - DNA, 35 bp, Artificial Sequence
  primer
gtaaaacgacggccagttgatctgtccacctcggc

SEQ ID NO: 76749 - DNA, 38 bp, Artificial Sequence
  primer
gtaaaacgacggccagttatacagagagcaaggtggcg

SEQ ID NO: 76750 - DNA, 37 bp, Artificial Sequence
  primer
gtaaaacgacggccagtgctccatgaacgccacatag

SEQ ID NO: 76751 - DNA, 38 bp, Artificial Sequence
  primer
gtaaaacgacggccagtaaacaggagaacagaggctgg

SEQ ID NO: 76752 - DNA, 21 bp, Artificial Sequence
  primer
cagaatctgggaggctatgtg

SEQ ID NO: 76753 - DNA, 19 bp, Artificial Sequence
  primer
cagctcaaacgctccttcc

SEQ ID NO: 76754 - DNA, 39 bp, Artificial Sequence
  primer
gtaaaacgacggccagtttaacagaagctcagaaagggc

SEQ ID NO: 76755 - DNA, 22 bp, Artificial Sequence
  primer
tgttccttggcaatacctgaag

SEQ ID NO: 76756 - DNA, 21 bp, Artificial Sequence
  primer
gggatgatgaagaggagggtc

SEQ ID NO: 76757 - DNA, 23 bp, Artificial Sequence
  primer
gaaatcttccctctgactccaag

SEQ ID NO: 76758 - DNA, 38 bp, Artificial Sequence
  primer
gtaaaacgacggccagtaaacctcagcacagaaatggg

SEQ ID NO: 76759 - DNA, 21 bp, Artificial Sequence
  primer
aatttcaacagtgcttctccg

SEQ ID NO: 76760 - DNA, 37 bp, Artificial Sequence
  primer
gtaaaacgacggccagtgaggttattgttcagggcgg

SEQ ID NO: 76761 - DNA, 35 bp, Artificial Sequence
  primer
gtaaaacgacggccagtgtagggttgcccgaagcc

SEQ ID NO: 76762 - DNA, 21 bp, Artificial Sequence
  primer
gccatgttgttggtggaagac

SEQ ID NO: 76763 - DNA, 20 bp, Artificial Sequence
  primer
acgtgagcagttggttgagg

SEQ ID NO: 76764 - DNA, 38 bp, Artificial Sequence
  primer
gtaaaacgacggccagtactcagctgtgtacctgaggg

SEQ ID NO: 76765 - DNA, 37 bp, Artificial Sequence
  primer
gtaaaacgacggccagtgagaagagccagacaatggc

SEQ ID NO: 76766 - DNA, 38 bp, Artificial Sequence
  primer
gtaaaacgacggccagtttggaagccaaggatacattc

SEQ ID NO: 76767 - DNA, 38 bp, Artificial Sequence
  primer
gtaaaacgacggccagtgaataggcagtttgctgggac

SEQ ID NO: 76768 - DNA, 39 bp, Artificial Sequence
  primer
gtaaaacgacggccagttgcacgttagagaaccactctg

SEQ ID NO: 76769 - DNA, 19 bp, Artificial Sequence
  primer
ctgggcagggagacagaac

SEQ ID NO: 76770 - DNA, 38 bp, Artificial Sequence
  primer
gtaaaacgacggccagtgaaactatgcaggcatgagcc

SEQ ID NO: 76771 - DNA, 21 bp, Artificial Sequence
  primer
ttcatggtcaaacagctctcc

SEQ ID NO: 76772 - DNA, 21 bp, Artificial Sequence
  primer
ggacagcccttctctcacaag

SEQ ID NO: 76773 - DNA, 23 bp, Artificial Sequence
  primer
ggtccagaagcatctcaataatc

SEQ ID NO: 76774 - DNA, 36 bp, Artificial Sequence
  primer
gtaaaacgacggccagtatcatctctgggctggctg

SEQ ID NO: 76775 - DNA, 38 bp, Artificial Sequence
  primer
gtaaaacgacggccagtggctgggatcttgtcactctc

SEQ ID NO: 76776 - DNA, 21 bp, Artificial Sequence
  primer
catggtaccacatgaagccag

SEQ ID NO: 76777 - DNA, 38 bp, Artificial Sequence
  primer
gtaaaacgacggccagtatccttggcatatcctgttgg

SEQ ID NO: 76778 - DNA, 38 bp, Artificial Sequence
  primer
gtaaaacgacggccagtaacaaaggacacgcaggagtc

SEQ ID NO: 76779 - DNA, 21 bp, Artificial Sequence
  primer
caagaaccctgagccattctc

SEQ ID NO: 76780 - DNA, 21 bp, Artificial Sequence
  primer
aattggagaggcagattgagc

SEQ ID NO: 76781 - DNA, 21 bp, Artificial Sequence
  primer
ccttgggtggagaactgattg

SEQ ID NO: 76782 - DNA, 21 bp, Artificial Sequence
  primer
attgaggacgtggctcttcag

SEQ ID NO: 76783 - DNA, 21 bp, Artificial Sequence
  primer
ccaaactggaatggaaattgg

SEQ ID NO: 76784 - DNA, 37 bp, Artificial Sequence
  primer
gtaaaacgacggccagtgtgattctgcatgcttggtg

SEQ ID NO: 76785 - DNA, 36 bp, Artificial Sequence
  primer
gtaaaacgacggccagtaacagagccaggtgggaag

SEQ ID NO: 76786 - DNA, 37 bp, Artificial Sequence
  primer
gtaaaacgacggccagtattgcatggcaatgaaggag

SEQ ID NO: 76787 - DNA, 39 bp, Artificial Sequence
  primer
gtaaaacgacggccagttggctaaagatgagacattccc

SEQ ID NO: 76788 - DNA, 38 bp, Artificial Sequence
  primer
gtaaaacgacggccagtgtcttgctctcgaagtgggtc

SEQ ID NO: 76789 - DNA, 21 bp, Artificial Sequence
  primer
acaggcttcgaatggtattgg

SEQ ID NO: 76790 - DNA, 21 bp, Artificial Sequence
  primer
atggagataggtccaactgcc

SEQ ID NO: 76791 - DNA, 38 bp, Artificial Sequence
  primer
gtaaaacgacggccagtcagcagtaccacagccatctc

SEQ ID NO: 76792 - DNA, 38 bp, Artificial Sequence
  primer
gtaaaacgacggccagtttcatcaacggtgataccgag

SEQ ID NO: 76793 - DNA, 40 bp, Artificial Sequence
  primer
gtaaaacgacggccagttgcataaataaagggcaacagtc

SEQ ID NO: 76794 - DNA, 22 bp, Artificial Sequence
  primer
aagatcccaaaccctctcaatc

SEQ ID NO: 76795 - DNA, 19 bp, Artificial Sequence
  primer
gcccaagctgttgttgttg

SEQ ID NO: 76796 - DNA, 21 bp, Artificial Sequence
  primer
gtacccttcgtgggagttctg

SEQ ID NO: 76797 - DNA, 38 bp, Artificial Sequence
  primer
gtaaaacgacggccagtctgtagcccggataatggttg

SEQ ID NO: 76798 - DNA, 35 bp, Artificial Sequence
  primer
gtaaaacgacggccagtagaaactcaggctcgcgg

SEQ ID NO: 76799 - DNA, 22 bp, Artificial Sequence
  primer
catcaatcttaggtggacagca

SEQ ID NO: 76800 - DNA, 38 bp, Artificial Sequence
  primer
gtaaaacgacggccagtcaggaagatgattcagagccg

SEQ ID NO: 76801 - DNA, 44 bp, Artificial Sequence
  primer
gtaaaacgacggccagtaacctgaagtctagaaacttctcaatc

SEQ ID NO: 76802 - DNA, 21 bp, Artificial Sequence
  primer
tgccttggtgagaattcagtt

SEQ ID NO: 76803 - DNA, 21 bp, Artificial Sequence
  primer
ctccatatttgttggaagggc

SEQ ID NO: 76804 - DNA, 38 bp, Artificial Sequence
  primer
gtaaaacgacggccagtctgtgggcttgtatgaacctc

SEQ ID NO: 76805 - DNA, 21 bp, Artificial Sequence
  primer
agcagccattgcctctttact

SEQ ID NO: 76806 - DNA, 22 bp, Artificial Sequence
  primer
ggtgtagagaccgtgaagatcc

SEQ ID NO: 76807 - DNA, 21 bp, Artificial Sequence
  primer
ctgtttggtgtgcaaggtttg

SEQ ID NO: 76808 - DNA, 38 bp, Artificial Sequence
  primer
gtaaaacgacggccagttgtgcaaaggaagggactaac

SEQ ID NO: 76809 - DNA, 21 bp, Artificial Sequence
  primer
agcaatcgtctcaactcagga

SEQ ID NO: 76810 - DNA, 45 bp, Artificial Sequence
  primer
gtaaaacgacggccagttgtgtatggcatatgtattaggtaaaga

SEQ ID NO: 76811 - DNA, 21 bp, Artificial Sequence
  primer
cactgcaatctgaagtacccg

SEQ ID NO: 76812 - DNA, 23 bp, Artificial Sequence
  primer
gccatttctgaatttaaagcatc

SEQ ID NO: 76813 - DNA, 22 bp, Artificial Sequence
  primer
gcagcacatcaggtaaagtgag

SEQ ID NO: 76814 - DNA, 21 bp, Artificial Sequence
  primer
ggaaacaagtatgcctgagga

SEQ ID NO: 76815 - DNA, 38 bp, Artificial Sequence
  primer
gtaaaacgacggccagtccaaattccactttggcctac

SEQ ID NO: 76816 - DNA, 44 bp, Artificial Sequence
  primer
gtaaaacgacggccagtttctggatgtctgtagaatacatttcc

SEQ ID NO: 76817 - DNA, 24 bp, Artificial Sequence
  primer
cctccaccacactataacctatcc

SEQ ID NO: 76818 - DNA, 22 bp, Artificial Sequence
  primer
ctatggtttgtgatccatgagg

SEQ ID NO: 76819 - DNA, 38 bp, Artificial Sequence
  primer
gtaaaacgacggccagtgagtgcctgaagggatctgtc

SEQ ID NO: 76820 - DNA, 39 bp, Artificial Sequence
  primer
gtaaaacgacggccagttgccaaacatatgactctgtgg

SEQ ID NO: 76821 - DNA, 38 bp, Artificial Sequence
  primer
gtaaaacgacggccagtcaatcactacgctttgttggg

SEQ ID NO: 76822 - DNA, 38 bp, Artificial Sequence
  primer
gtaaaacgacggccagtctgacagtaggaggtggtccc

SEQ ID NO: 76823 - DNA, 38 bp, Artificial Sequence
  primer
gtaaaacgacggccagtatgggcacagtttgtactccc

SEQ ID NO: 76824 - DNA, 21 bp, Artificial Sequence
  primer
ggaagtccaactcctgtctgc

SEQ ID NO: 76825 - DNA, 21 bp, Artificial Sequence
  primer
gttctgtttcccagatgctcc

SEQ ID NO: 76826 - DNA, 21 bp, Artificial Sequence
  primer
cactaaattgctgtgttgccg

SEQ ID NO: 76827 - DNA, 38 bp, Artificial Sequence
  primer
gtaaaacgacggccagttcctgcgactgtttccctatc

SEQ ID NO: 76828 - DNA, 21 bp, Artificial Sequence
  primer
ataacttacctgcgggaccac

SEQ ID NO: 76829 - DNA, 40 bp, Artificial Sequence
  primer
gtaaaacgacggccagtaggacaggttggatacaagtgag

SEQ ID NO: 76830 - DNA, 26 bp, Artificial Sequence
  primer
ttcgctaaagttagtggttctaaagg

SEQ ID NO: 76831 - DNA, 37 bp, Artificial Sequence
  primer
gtaaaacgacggccagtaagcaagagaatggcacgtc

SEQ ID NO: 76832 - DNA, 20 bp, Artificial Sequence
  primer
attgctggttcatggcagag

SEQ ID NO: 76833 - DNA, 36 bp, Artificial Sequence
  primer
gtaaaacgacggccagtctcacctgcgaccacattc

SEQ ID NO: 76834 - DNA, 38 bp, Artificial Sequence
  primer
gtaaaacgacggccagttggcctgacctaggcataaac

SEQ ID NO: 76835 - DNA, 38 bp, Artificial Sequence
  primer
gtaaaacgacggccagtacgaagcttcctctcagcatc

SEQ ID NO: 76836 - DNA, 21 bp, Artificial Sequence
  primer
actctcgggctctctgtcctc

SEQ ID NO: 76837 - DNA, 38 bp, Artificial Sequence
  primer
gtaaaacgacggccagttgacccttactcccattctgc

SEQ ID NO: 76838 - DNA, 19 bp, Artificial Sequence
  primer
cccagctctcaactcgacg

SEQ ID NO: 76839 - DNA, 21 bp, Artificial Sequence
  primer
ctccatggcaggatgtgtttc

SEQ ID NO: 76840 - DNA, 21 bp, Artificial Sequence
  primer
cccagagactgtgtggtcctc

SEQ ID NO: 76841 - DNA, 21 bp, Artificial Sequence
  primer
ggcagaggactggtagattgg

SEQ ID NO: 76842 - DNA, 21 bp, Artificial Sequence
  primer
tatgtaggctccaaggccctc

SEQ ID NO: 76843 - DNA, 38 bp, Artificial Sequence
  primer
gtaaaacgacggccagtctaggttcaagcaggtgggac

SEQ ID NO: 76844 - DNA, 21 bp, Artificial Sequence
  primer
gtcagctgtggctcctttctg

SEQ ID NO: 76845 - DNA, 38 bp, Artificial Sequence
  primer
gtaaaacgacggccagtgagacagaaggtgaggccttg

SEQ ID NO: 76846 - DNA, 35 bp, Artificial Sequence
  primer
gtaaaacgacggccagtgttggtcaccgaagtggg

SEQ ID NO: 76847 - DNA, 21 bp, Artificial Sequence
  primer
tgcaactcactggctaccttg

SEQ ID NO: 76848 - DNA, 38 bp, Artificial Sequence
  primer
gtaaaacgacggccagtgggccaggatgtctaacagtg

SEQ ID NO: 76849 - DNA, 38 bp, Artificial Sequence
  primer
gtaaaacgacggccagtcactgtttcgggaatccactc

SEQ ID NO: 76850 - DNA, 21 bp, Artificial Sequence
  primer
accaatccacaattgaccctc

SEQ ID NO: 76851 - DNA, 21 bp, Artificial Sequence
  primer
aggagtatgtgcctcaccacc

SEQ ID NO: 76852 - DNA, 21 bp, Artificial Sequence
  primer
agaggaccacttgacctttgc

SEQ ID NO: 76853 - DNA, 20 bp, Artificial Sequence
  primer
gtgggctctgtgagatgagg

SEQ ID NO: 76854 - DNA, 20 bp, Artificial Sequence
  primer
tgctaatcacctggctgtgc

SEQ ID NO: 76855 - DNA, 21 bp, Artificial Sequence
  primer
tggccactaattaatcctggg

SEQ ID NO: 76856 - DNA, 20 bp, Artificial Sequence
  primer
cagctggtcaagtcccacag

SEQ ID NO: 76857 - DNA, 20 bp, Artificial Sequence
  primer
tcccatacctcaatgcctcc

SEQ ID NO: 76858 - DNA, 21 bp, Artificial Sequence
  primer
tacagaggaatctgtctgccc

SEQ ID NO: 76859 - DNA, 40 bp, Artificial Sequence
  primer
gtaaaacgacggccagtcctgaactccatgttactcatgc

SEQ ID NO: 76860 - DNA, 21 bp, Artificial Sequence
  primer
ccagaaagaatcaaagcaggg

SEQ ID NO: 76861 - DNA, 21 bp, Artificial Sequence
  primer
tggacaacaattgaaaggctg

SEQ ID NO: 76862 - DNA, 25 bp, Artificial Sequence
  primer
atgctaccacaaatagttaagagcc

SEQ ID NO: 76863 - DNA, 41 bp, Artificial Sequence
  primer
gtaaaacgacggccagtagaatacagccattgcaatatcac

SEQ ID NO: 76864 - DNA, 39 bp, Artificial Sequence
  primer
gtaaaacgacggccagtttctccaccaacacaatgattc

SEQ ID NO: 76865 - DNA, 23 bp, Artificial Sequence
  primer
gctctggatttgttaatggaagc

SEQ ID NO: 76866 - DNA, 21 bp, Artificial Sequence
  primer
aagaacaaggtccactcaggg

SEQ ID NO: 76867 - DNA, 27 bp, Artificial Sequence
  primer
cagtgaagtattatggacctgactatg

SEQ ID NO: 76868 - DNA, 27 bp, Artificial Sequence
  primer
cctattaggtaacaacttctcagttca

SEQ ID NO: 76869 - DNA, 25 bp, Artificial Sequence
  primer
tggtaccagagagtatcagtcttgc

SEQ ID NO: 76870 - DNA, 21 bp, Artificial Sequence
  primer
aagcaatgctagaaacggaca

SEQ ID NO: 76871 - DNA, 38 bp, Artificial Sequence
  primer
gtaaaacgacggccagtatcaaagcaagaacctgcctc

SEQ ID NO: 76872 - DNA, 18 bp, Artificial Sequence
  primer
aatccacccgcctcaatc

SEQ ID NO: 76873 - DNA, 38 bp, Artificial Sequence
  primer
gtaaaacgacggccagtgcagacactacctgcatcctg

SEQ ID NO: 76874 - DNA, 38 bp, Artificial Sequence
  primer
gtaaaacgacggccagttctctaagcaggaacaaagcg

SEQ ID NO: 76875 - DNA, 21 bp, Artificial Sequence
  primer
tcagaaccaaggtgtgctttg

SEQ ID NO: 76876 - DNA, 38 bp, Artificial Sequence
  primer
gtaaaacgacggccagtgacaatctgggaaggctatgc

SEQ ID NO: 76877 - DNA, 25 bp, Artificial Sequence
  primer
caagggatactcaacctgtactgtg

SEQ ID NO: 76878 - DNA, 21 bp, Artificial Sequence
  primer
tttgtcttgcttcgtcttccc

SEQ ID NO: 76879 - DNA, 38 bp, Artificial Sequence
  primer
gtaaaacgacggccagtttggatgcattggtttgactc

SEQ ID NO: 76880 - DNA, 38 bp, Artificial Sequence
  primer
gtaaaacgacggccagtctgctacatcctcaatgctgg

SEQ ID NO: 76881 - DNA, 21 bp, Artificial Sequence
  primer
ttcaaatccatttgccgattc

SEQ ID NO: 76882 - DNA, 38 bp, Artificial Sequence
  primer
gtaaaacgacggccagtatcacttggcctcttctgacc

SEQ ID NO: 76883 - DNA, 46 bp, Artificial Sequence
  primer
gtaaaacgacggccagtaaagaatgagctagagttcctaagaataa

SEQ ID NO: 76884 - DNA, 38 bp, Artificial Sequence
  primer
gtaaaacgacggccagttgtggtgattcttgctaaggc

SEQ ID NO: 76885 - DNA, 41 bp, Artificial Sequence
  primer
gtaaaacgacggccagtttctgattaactcagttgctgacc

SEQ ID NO: 76886 - DNA, 22 bp, Artificial Sequence
  primer
caaatatggcaggctgcttaac

SEQ ID NO: 76887 - DNA, 22 bp, Artificial Sequence
  primer
aaatcaagtgtgtagacctcgg

SEQ ID NO: 76888 - DNA, 21 bp, Artificial Sequence
  primer
tgccgttattcctctcattcc

SEQ ID NO: 76889 - DNA, 46 bp, Artificial Sequence
  primer
gtaaaacgacggccagtttacaaccttcactcctagaaacttattt

SEQ ID NO: 76890 - DNA, 20 bp, Artificial Sequence
  primer
ctggcctcaagctatcctcc

SEQ ID NO: 76891 - DNA, 27 bp, Artificial Sequence
  primer
tctagggtattaagaagtgaatccagg

SEQ ID NO: 76892 - DNA, 21 bp, Artificial Sequence
  primer
gccttaaacaggcttcacaga

SEQ ID NO: 76893 - DNA, 44 bp, Artificial Sequence
  primer
gtaaaacgacggccagtccgaaattactattagatctggttagc

SEQ ID NO: 76894 - DNA, 38 bp, Artificial Sequence
  primer
gtaaaacgacggccagtttgcctttcctgaatgacatc

SEQ ID NO: 76895 - DNA, 24 bp, Artificial Sequence
  primer
aaccagctattatgtggacaagtg

SEQ ID NO: 76896 - DNA, 44 bp, Artificial Sequence
  primer
gtaaaacgacggccagtgaaacttataacacagaagacacatgg

SEQ ID NO: 76897 - DNA, 20 bp, Artificial Sequence
  primer
gccaaatcctaacccacaag

SEQ ID NO: 76898 - DNA, 20 bp, Artificial Sequence
  primer
gtgacaggcgctatgctagg

SEQ ID NO: 76899 - DNA, 38 bp, Artificial Sequence
  primer
gtaaaacgacggccagttttgtctgaggaggctagctg

SEQ ID NO: 76900 - DNA, 44 bp, Artificial Sequence
  primer
gtaaaacgacggccagtaaactttcttcacagaatttctcatag

SEQ ID NO: 76901 - DNA, 26 bp, Artificial Sequence
  primer
cctgctactttaaagctctagacaaa

SEQ ID NO: 76902 - DNA, 38 bp, Artificial Sequence
  primer
gtaaaacgacggccagtagcaagaagggtggatcaaag

SEQ ID NO: 76903 - DNA, 19 bp, Artificial Sequence
  primer
gccttatggctcctggttg

SEQ ID NO: 76904 - DNA, 43 bp, Artificial Sequence
  primer
gtaaaacgacggccagtaaacagtagttggtaatgtcactgaa

SEQ ID NO: 76905 - DNA, 23 bp, Artificial Sequence
  primer
tgaactgttctgttcctcctttg

SEQ ID NO: 76906 - DNA, 40 bp, Artificial Sequence
  primer
gtaaaacgacggccagtccatgcaaagtgattctttgttc

SEQ ID NO: 76907 - DNA, 23 bp, Artificial Sequence
  primer
tttcctccaaaccattgtatttc

SEQ ID NO: 76908 - DNA, 38 bp, Artificial Sequence
  primer
gtaaaacgacggccagttgactgatgaaggcgattcag

SEQ ID NO: 76909 - DNA, 38 bp, Artificial Sequence
  primer
gtaaaacgacggccagtttcaggatgttctggttctgg

SEQ ID NO: 76910 - DNA, 22 bp, Artificial Sequence
  primer
gcacattaaagccttctcaagc

SEQ ID NO: 76911 - DNA, 26 bp, Artificial Sequence
  primer
gtgtactatcccataccctgaatacc

SEQ ID NO: 76912 - DNA, 18 bp, Artificial Sequence
  primer
agccaagatcgcaccacc

SEQ ID NO: 76913 - DNA, 20 bp, Artificial Sequence
  primer
ctgattgacatggcgaaacc

SEQ ID NO: 76914 - DNA, 22 bp, Artificial Sequence
  primer
ccaagtcagcttgtcaagaaac

SEQ ID NO: 76915 - DNA, 18 bp, Artificial Sequence
  primer
tctgaggacggcgcatac

SEQ ID NO: 76916 - DNA, 35 bp, Artificial Sequence
  primer
gtaaaacgacggccagtgagataaacgcccgggaa

SEQ ID NO: 76917 - DNA, 38 bp, Artificial Sequence
  primer
gtaaaacgacggccagtatctccctcctgagagcttgg

SEQ ID NO: 76918 - DNA, 21 bp, Artificial Sequence
  primer
gcctcctttctatctgcaacc

SEQ ID NO: 76919 - DNA, 37 bp, Artificial Sequence
  primer
gtaaaacgacggccagtctctgtccagaggcaaggac

SEQ ID NO: 76920 - DNA, 35 bp, Artificial Sequence
  primer
gtaaaacgacggccagttctgaggacggcgcatac

SEQ ID NO: 76921 - DNA, 21 bp, Artificial Sequence
  primer
aaccatctgtggagaacctgg

SEQ ID NO: 76922 - DNA, 20 bp, Artificial Sequence
  primer
ctgacaggcttcagcacctc

SEQ ID NO: 76923 - DNA, 38 bp, Artificial Sequence
  primer
gtaaaacgacggccagttagaggatgccctttctggag

SEQ ID NO: 76924 - DNA, 38 bp, Artificial Sequence
  primer
gtaaaacgacggccagtcttaagaaagggagacacggc

SEQ ID NO: 76925 - DNA, 21 bp, Artificial Sequence
  primer
tacagcttggtgttgaggtgg

SEQ ID NO: 76926 - DNA, 38 bp, Artificial Sequence
  primer
gtaaaacgacggccagttttcccactgccttcttcttc

SEQ ID NO: 76927 - DNA, 19 bp, Artificial Sequence
  primer
cgccacttctacccacctc

SEQ ID NO: 76928 - DNA, 39 bp, Artificial Sequence
  primer
gtaaaacgacggccagttcaagcttgccctgtaataagc

SEQ ID NO: 76929 - DNA, 21 bp, Artificial Sequence
  primer
tcccttacccatccagtcatc

SEQ ID NO: 76930 - DNA, 19 bp, Artificial Sequence
  primer
gggcttgtgaaagtgagcc

SEQ ID NO: 76931 - DNA, 21 bp, Artificial Sequence
  primer
cataacaggccaaactgggag

SEQ ID NO: 76932 - DNA, 21 bp, Artificial Sequence
  primer
cttggcctggaacatttatgg

SEQ ID NO: 76933 - DNA, 38 bp, Artificial Sequence
  primer
gtaaaacgacggccagtaattgggactgtttccaaagc

SEQ ID NO: 76934 - DNA, 21 bp, Artificial Sequence
  primer
atcacaaggcggtatgcaaag

SEQ ID NO: 76935 - DNA, 21 bp, Artificial Sequence
  primer
gattcagggctccagaaggac

SEQ ID NO: 76936 - DNA, 19 bp, Artificial Sequence
  primer
cttgggagtggaggtgtgg

SEQ ID NO: 76937 - DNA, 23 bp, Artificial Sequence
  primer
aaacagcacagtttggattcttg

SEQ ID NO: 76938 - DNA, 21 bp, Artificial Sequence
  primer
taagggtagctgctggagagg

SEQ ID NO: 76939 - DNA, 38 bp, Artificial Sequence
  primer
gtaaaacgacggccagtcttgccctcctgaatttcttg

SEQ ID NO: 76940 - DNA, 21 bp, Artificial Sequence
  primer
ccctgtacatgtccctggaag

SEQ ID NO: 76941 - DNA, 21 bp, Artificial Sequence
  primer
gatcttgaaagcgattcaggg

SEQ ID NO: 76942 - DNA, 21 bp, Artificial Sequence
  primer
gagttgaggcccgagttacac

SEQ ID NO: 76943 - DNA, 38 bp, Artificial Sequence
  primer
gtaaaacgacggccagtaaggagtgaagctctgttggc

SEQ ID NO: 76944 - DNA, 38 bp, Artificial Sequence
  primer
gtaaaacgacggccagtacctcgtagcggtaatcctcc

SEQ ID NO: 76945 - DNA, 36 bp, Artificial Sequence
  primer
gtaaaacgacggccagtgagaagacaaggccgggag

SEQ ID NO: 76946 - DNA, 39 bp, Artificial Sequence
  primer
gtaaaacgacggccagttcactagttgcacactgggttg

SEQ ID NO: 76947 - DNA, 24 bp, Artificial Sequence
  primer
ttagaggttactactcccagaccc

SEQ ID NO: 76948 - DNA, 23 bp, Artificial Sequence
  primer
ctggaatgccacattactttagg

SEQ ID NO: 76949 - DNA, 24 bp, Artificial Sequence
  primer
catttaaccaagttacaaatgggc

SEQ ID NO: 76950 - DNA, 21 bp, Artificial Sequence
  primer
cacacctggcctgtcatactc

SEQ ID NO: 76951 - DNA, 22 bp, Artificial Sequence
  primer
atcaaacatctccctgcctaag

SEQ ID NO: 76952 - DNA, 22 bp, Artificial Sequence
  primer
tcaggagctgacttggcttatc

SEQ ID NO: 76953 - DNA, 21 bp, Artificial Sequence
  primer
aaggcagagaactgtggatgc

SEQ ID NO: 76954 - DNA, 28 bp, Artificial Sequence
  primer
gatggtgatatctatgaggtagaaatgt

SEQ ID NO: 76955 - DNA, 28 bp, Artificial Sequence
  primer
ggagttcgagactagactgactactaaa

SEQ ID NO: 76956 - DNA, 22 bp, Artificial Sequence
  primer
tctgaacaaacaagaaccctga

SEQ ID NO: 76957 - DNA, 21 bp, Artificial Sequence
  primer
aatttagtgcccaacggacag

SEQ ID NO: 76958 - DNA, 38 bp, Artificial Sequence
  primer
gtaaaacgacggccagtggcttagtgcctccttgtttg

SEQ ID NO: 76959 - DNA, 22 bp, Artificial Sequence
  primer
aggccattcaattagtctggag

SEQ ID NO: 76960 - DNA, 40 bp, Artificial Sequence
  primer
gtaaaacgacggccagtaattcactgtccaacaacagagg

SEQ ID NO: 76961 - DNA, 38 bp, Artificial Sequence
  primer
gtaaaacgacggccagttaaggacactgcaagccaaag

SEQ ID NO: 76962 - DNA, 38 bp, Artificial Sequence
  primer
gtaaaacgacggccagttgcactcacgccaacatttac

SEQ ID NO: 76963 - DNA, 26 bp, Artificial Sequence
  primer
ttgaacactatcacttaatgtcagcc

SEQ ID NO: 76964 - DNA, 38 bp, Artificial Sequence
  primer
gtaaaacgacggccagtgttctgttggctcagagaccc

SEQ ID NO: 76965 - DNA, 21 bp, Artificial Sequence
  primer
ggctctgggtattctgctctc

SEQ ID NO: 76966 - DNA, 21 bp, Artificial Sequence
  primer
taacggagacccaaccacaag

SEQ ID NO: 76967 - DNA, 23 bp, Artificial Sequence
  primer
tgtgttagcaagatagcagtggg

SEQ ID NO: 76968 - DNA, 21 bp, Artificial Sequence
  primer
tagaggcagcaccagggatac

SEQ ID NO: 76969 - DNA, 21 bp, Artificial Sequence
  primer
cctctttcaacagagcttccc

SEQ ID NO: 76970 - DNA, 38 bp, Artificial Sequence
  primer
gtaaaacgacggccagttcctgcaaagtgctggtagag

SEQ ID NO: 76971 - DNA, 21 bp, Artificial Sequence
  primer
cactgcccttcccattcttag

SEQ ID NO: 76972 - DNA, 38 bp, Artificial Sequence
  primer
gtaaaacgacggccagtggtgttgccagtgtctctcag

SEQ ID NO: 76973 - DNA, 21 bp, Artificial Sequence
  primer
aaagtgagtcaagtcctccgc

SEQ ID NO: 76974 - DNA, 38 bp, Artificial Sequence
  primer
gtaaaacgacggccagtggccaagagtctaagaccagc

SEQ ID NO: 76975 - DNA, 43 bp, Artificial Sequence
  primer
gtaaaacgacggccagtaaactaggtggctccatttaaattac

SEQ ID NO: 76976 - DNA, 20 bp, Artificial Sequence
  primer
aaaggatggagggaacaacc

SEQ ID NO: 76977 - DNA, 38 bp, Artificial Sequence
  primer
gtaaaacgacggccagtaagtttcatcctcaacacggg

SEQ ID NO: 76978 - DNA, 22 bp, Artificial Sequence
  primer
tcgatcaaattatccctccaac

SEQ ID NO: 76979 - DNA, 18 bp, Artificial Sequence
  primer
aagcacacccacccgttc

SEQ ID NO: 76980 - DNA, 21 bp, Artificial Sequence
  primer
gtgggaaggattcgtagaggg

SEQ ID NO: 76981 - DNA, 19 bp, Artificial Sequence
  primer
catctcagccaccctctcc

SEQ ID NO: 76982 - DNA, 20 bp, Artificial Sequence
  primer
ctgctcttgaaaggcaaagg

SEQ ID NO: 76983 - DNA, 21 bp, Artificial Sequence
  primer
cccgctctccgtctaccttag

SEQ ID NO: 76984 - DNA, 20 bp, Artificial Sequence
  primer
aggtcctcgaaggtagcagg

SEQ ID NO: 76985 - DNA, 21 bp, Artificial Sequence
  primer
aagacctacggagaagggagg

SEQ ID NO: 76986 - DNA, 38 bp, Artificial Sequence
  primer
gtaaaacgacggccagtctgccaccgtgtggctaatac

SEQ ID NO: 76987 - DNA, 38 bp, Artificial Sequence
  primer
gtaaaacgacggccagtgttgtggagcgagaacctgag

SEQ ID NO: 76988 - DNA, 38 bp, Artificial Sequence
  primer
gtaaaacgacggccagtctcagcagaacaggactctgg

SEQ ID NO: 76989 - DNA, 20 bp, Artificial Sequence
  primer
aactcaggccttggagaagc

SEQ ID NO: 76990 - DNA, 20 bp, Artificial Sequence
  primer
tcacttgaaccgggaggtag

SEQ ID NO: 76991 - DNA, 22 bp, Artificial Sequence
  primer
aatcccatgttgggaattacac

SEQ ID NO: 76992 - DNA, 39 bp, Artificial Sequence
  primer
gtaaaacgacggccagttggcagatacatggtaagcaag

SEQ ID NO: 76993 - DNA, 26 bp, Artificial Sequence
  primer
atactgaagaaatcatcgtagcaatc

SEQ ID NO: 76994 - DNA, 21 bp, Artificial Sequence
  primer
cattgcaatttcaaagaagcc

SEQ ID NO: 76995 - DNA, 38 bp, Artificial Sequence
  primer
gtaaaacgacggccagttaggaaggaccgtattctggg

SEQ ID NO: 76996 - DNA, 21 bp, Artificial Sequence
  primer
cttaagcagcggaagtgcatc

SEQ ID NO: 76997 - DNA, 38 bp, Artificial Sequence
  primer
gtaaaacgacggccagtatgttgctctccaactcctgg

SEQ ID NO: 76998 - DNA, 21 bp, Artificial Sequence
  primer
accttgtacaattggccatcc

SEQ ID NO: 76999 - DNA, 40 bp, Artificial Sequence
  primer
gtaaaacgacggccagtggaaggaaggattatttcactgg

SEQ ID NO: 77000 - DNA, 21 bp, Artificial Sequence
  primer
ctagctgggtgtgacaaaggg

SEQ ID NO: 77001 - DNA, 38 bp, Artificial Sequence
  primer
gtaaaacgacggccagtgactatagaatgggccaaggg

SEQ ID NO: 77002 - DNA, 21 bp, Artificial Sequence
  primer
tcaagagacttgctcaatgcc

SEQ ID NO: 77003 - DNA, 22 bp, Artificial Sequence
  primer
tgtacagcaagaagatgatggg

SEQ ID NO: 77004 - DNA, 21 bp, Artificial Sequence
  primer
caattgttctgggcttcacag

SEQ ID NO: 77005 - DNA, 38 bp, Artificial Sequence
  primer
gtaaaacgacggccagtgtccagggaaaggcttaccag

SEQ ID NO: 77006 - DNA, 41 bp, Artificial Sequence
  primer
gtaaaacgacggccagtggataaattgcacaggaaactagg

SEQ ID NO: 77007 - DNA, 28 bp, Artificial Sequence
  primer
tgccaataatagtgtaattctttgattc

SEQ ID NO: 77008 - DNA, 40 bp, Artificial Sequence
  primer
gtaaaacgacggccagtccagcacattcctaattacatgc

SEQ ID NO: 77009 - DNA, 40 bp, Artificial Sequence
  primer
gtaaaacgacggccagttgagagtctgaaatgaccagagg

SEQ ID NO: 77010 - DNA, 20 bp, Artificial Sequence
  primer
gcctgggtgacagagtcaaa

SEQ ID NO: 77011 - DNA, 39 bp, Artificial Sequence
  primer
gtaaaacgacggccagtaaggtatcacttcaagcatccg

SEQ ID NO: 77012 - DNA, 38 bp, Artificial Sequence
  primer
gtaaaacgacggccagttaggatgtttcaacagagggc

SEQ ID NO: 77013 - DNA, 20 bp, Artificial Sequence
  primer
gagttatctccgggacccac

SEQ ID NO: 77014 - DNA, 22 bp, Artificial Sequence
  primer
agatgttcagcttgaatctggg

SEQ ID NO: 77015 - DNA, 22 bp, Artificial Sequence
  primer
ccacagggacgttaactcaatc

SEQ ID NO: 77016 - DNA, 18 bp, Artificial Sequence
  primer
ggtgatccactcgccttg

SEQ ID NO: 77017 - DNA, 19 bp, Artificial Sequence
  primer
gttagtttggccggctgac

SEQ ID NO: 77018 - DNA, 36 bp, Artificial Sequence
  primer
gtaaaacgacggccagtaaaggaaggcctggagctg

SEQ ID NO: 77019 - DNA, 38 bp, Artificial Sequence
  primer
gtaaaacgacggccagttcaggagtactgggctgtttg

SEQ ID NO: 77020 - DNA, 21 bp, Artificial Sequence
  primer
ttcctggaagtgtactggtgg

SEQ ID NO: 77021 - DNA, 21 bp, Artificial Sequence
  primer
gtttgagggcttcctccatag

SEQ ID NO: 77022 - DNA, 38 bp, Artificial Sequence
  primer
gtaaaacgacggccagtgtttgaagggagaatgatggg

SEQ ID NO: 77023 - DNA, 21 bp, Artificial Sequence
  primer
tctgtcatcatgagctgagcc

SEQ ID NO: 77024 - DNA, 21 bp, Artificial Sequence
  primer
aagcattgtcaatcgcaacag

SEQ ID NO: 77025 - DNA, 41 bp, Artificial Sequence
  primer
gtaaaacgacggccagttgggaatgtgatttcataggttac

SEQ ID NO: 77026 - DNA, 41 bp, Artificial Sequence
  primer
gtaaaacgacggccagtccttcacacagaaagaagaaactg

SEQ ID NO: 77027 - DNA, 21 bp, Artificial Sequence
  primer
ctcctttcccaactttccacc

SEQ ID NO: 77028 - DNA, 41 bp, Artificial Sequence
  primer
gtaaaacgacggccagtaaatcatggtaaatatggcatttg

SEQ ID NO: 77029 - DNA, 23 bp, Artificial Sequence
  primer
aagcaatggacatttgtgttagc

SEQ ID NO: 77030 - DNA, 40 bp, Artificial Sequence
  primer
gtaaaacgacggccagtaaaggatagctgtggatttgaca

SEQ ID NO: 77031 - DNA, 40 bp, Artificial Sequence
  primer
gtaaaacgacggccagttcatgtactggtcattgtgcttc

SEQ ID NO: 77032 - DNA, 21 bp, Artificial Sequence
  primer
agagcctattcgccacaagag

SEQ ID NO: 77033 - DNA, 39 bp, Artificial Sequence
  primer
gtaaaacgacggccagtcagcactataacaaggcctcag

SEQ ID NO: 77034 - DNA, 19 bp, Artificial Sequence
  primer
gctttaagcgcagtgctcc

SEQ ID NO: 77035 - DNA, 42 bp, Artificial Sequence
  primer
gtaaaacgacggccagtcctcatgagaatggaatctcttaca

SEQ ID NO: 77036 - DNA, 39 bp, Artificial Sequence
  primer
gtaaaacgacggccagttggtggtggaattactgacaag

SEQ ID NO: 77037 - DNA, 22 bp, Artificial Sequence
  primer
ggtgcatgctaattccagctac

SEQ ID NO: 77038 - DNA, 38 bp, Artificial Sequence
  primer
gtaaaacgacggccagtcccttcatatcttggaatggc

SEQ ID NO: 77039 - DNA, 38 bp, Artificial Sequence
  primer
gtaaaacgacggccagtaccgtgttgttccctctcttc

SEQ ID NO: 77040 - DNA, 38 bp, Artificial Sequence
  primer
gtaaaacgacggccagttttggcttcttccatcctttc

SEQ ID NO: 77041 - DNA, 38 bp, Artificial Sequence
  primer
gtaaaacgacggccagttctcctaagacaaagggctgc

SEQ ID NO: 77042 - DNA, 38 bp, Artificial Sequence
  primer
gtaaaacgacggccagtccaacctgctttcttacaggg

SEQ ID NO: 77043 - DNA, 41 bp, Artificial Sequence
  primer
gtaaaacgacggccagtcaccaattctccctatagaggttc

SEQ ID NO: 77044 - DNA, 37 bp, Artificial Sequence
  primer
gtaaaacgacggccagtgtgtggcccgcaaataacta

SEQ ID NO: 77045 - DNA, 39 bp, Artificial Sequence
  primer
gtaaaacgacggccagtcagcttacgtctgtcccttacg

SEQ ID NO: 77046 - DNA, 22 bp, Artificial Sequence
  primer
gcaaactggaaggtgagacttc

SEQ ID NO: 77047 - DNA, 39 bp, Artificial Sequence
  primer
gtaaaacgacggccagttgcaaattatggctgaggatac

SEQ ID NO: 77048 - DNA, 39 bp, Artificial Sequence
  primer
gtaaaacgacggccagtaagggtaggaagaatgaccagg

SEQ ID NO: 77049 - DNA, 22 bp, Artificial Sequence
  primer
catgaaggacctgaaacatttg

SEQ ID NO: 77050 - DNA, 26 bp, Artificial Sequence
  primer
tttgaggaaataaatgttagacaccc

SEQ ID NO: 77051 - DNA, 21 bp, Artificial Sequence
  primer
ccatgtgcagaaggaaatcag

SEQ ID NO: 77052 - DNA, 28 bp, Artificial Sequence
  primer
gcaatatgtgatagaagtaaatggaaca

SEQ ID NO: 77053 - DNA, 40 bp, Artificial Sequence
  primer
gtaaaacgacggccagtccaaattagcatacctgaagtcc

SEQ ID NO: 77054 - DNA, 20 bp, Artificial Sequence
  primer
gttcgacacccaggagtcac

SEQ ID NO: 77055 - DNA, 21 bp, Artificial Sequence
  primer
taaggcactcccacaaacaga

SEQ ID NO: 77056 - DNA, 44 bp, Artificial Sequence
  primer
gtaaaacgacggccagttctaatgcttaggtgtctgatggttag

SEQ ID NO: 77057 - DNA, 18 bp, Artificial Sequence
  primer
actgtgcccggcctaaac

SEQ ID NO: 77058 - DNA, 39 bp, Artificial Sequence
  primer
gtaaaacgacggccagtctttccatattcccacagttcc

SEQ ID NO: 77059 - DNA, 38 bp, Artificial Sequence
  primer
gtaaaacgacggccagtaagggcagagtgagggagaac

SEQ ID NO: 77060 - DNA, 19 bp, Artificial Sequence
  primer
gaggagacctgaaccagcc

SEQ ID NO: 77061 - DNA, 21 bp, Artificial Sequence
  primer
tccatcctgggtaacagagtg

SEQ ID NO: 77062 - DNA, 21 bp, Artificial Sequence
  primer
gcacagcaacctaggaatttg

SEQ ID NO: 77063 - DNA, 21 bp, Artificial Sequence
  primer
taggagaatgaacccaggagg

SEQ ID NO: 77064 - DNA, 38 bp, Artificial Sequence
  primer
gtaaaacgacggccagtcaagattgtgccaccgtactc

SEQ ID NO: 77065 - DNA, 25 bp, Artificial Sequence
  primer
ttctatttatcctgttcgcctactg

SEQ ID NO: 77066 - DNA, 39 bp, Artificial Sequence
  primer
gtaaaacgacggccagttccaacgacacgtaaatactgg

SEQ ID NO: 77067 - DNA, 38 bp, Artificial Sequence
  primer
gtaaaacgacggccagtcaatgcatccaaacattctcc

SEQ ID NO: 77068 - DNA, 42 bp, Artificial Sequence
  primer
gtaaaacgacggccagtaaggcagaaagataaatcacaaatc

SEQ ID NO: 77069 - DNA, 21 bp, Artificial Sequence
  primer
gacacatacggccttaagcaa

SEQ ID NO: 77070 - DNA, 21 bp, Artificial Sequence
  primer
ataagctgcacaaattcgctc

SEQ ID NO: 77071 - DNA, 38 bp, Artificial Sequence
  primer
gtaaaacgacggccagttcctcacatgaaggcaaagtc

SEQ ID NO: 77072 - DNA, 19 bp, Artificial Sequence
  primer
agcatttatgcagaccggc

SEQ ID NO: 77073 - DNA, 18 bp, Artificial Sequence
  primer
ctccgttcccacctcgac

SEQ ID NO: 77074 - DNA, 35 bp, Artificial Sequence
  primer
gtaaaacgacggccagtgcagcggtgcctgttaag

SEQ ID NO: 77075 - DNA, 21 bp, Artificial Sequence
  primer
tagtaactgcgcctcctctcc

SEQ ID NO: 77076 - DNA, 38 bp, Artificial Sequence
  primer
gtaaaacgacggccagtgtcaggactggaagggaagac

SEQ ID NO: 77077 - DNA, 19 bp, Artificial Sequence
  primer
actcctcccgagagcacac

SEQ ID NO: 77078 - DNA, 19 bp, Artificial Sequence
  primer
actggcaccctgaaacctg

SEQ ID NO: 77079 - DNA, 19 bp, Artificial Sequence
  primer
actggcaccctgaaacctg

SEQ ID NO: 77080 - DNA, 38 bp, Artificial Sequence
  primer
gtaaaacgacggccagtaagtgctgctctttcagatgg

SEQ ID NO: 77081 - DNA, 20 bp, Artificial Sequence
  primer
gcacagaggcatgactgagc

SEQ ID NO: 77082 - DNA, 38 bp, Artificial Sequence; identical to SEQ ID NO: 77076
  primer

SEQ ID NO: 77083 - DNA, 21 bp, Artificial Sequence
  primer
agagagcgtctctacatcccg

SEQ ID NO: 77084 - DNA, 21 bp, Artificial Sequence
  primer
gttatggaattcccgttggat

SEQ ID NO: 77085 - DNA, 39 bp, Artificial Sequence
  primer
gtaaaacgacggccagtaaacgcaagcagaacataggtc

SEQ ID NO: 77086 - DNA, 21 bp, Artificial Sequence
  primer
agataccattgcgcttatcgg

SEQ ID NO: 77087 - DNA, 38 bp, Artificial Sequence
  primer
gtaaaacgacggccagtgaaagggagatgggtggagac

SEQ ID NO: 77088 - DNA, 19 bp, Artificial Sequence
  primer
atgtgagccactgcacctg

SEQ ID NO: 77089 - DNA, 21 bp, Artificial Sequence
  primer
caacatacctcacgatcagcc

SEQ ID NO: 77090 - DNA, 39 bp, Artificial Sequence
  primer
gtaaaacgacggccagtcagcaggtttctcagtcttctg

SEQ ID NO: 77091 - DNA, 38 bp, Artificial Sequence
  primer
gtaaaacgacggccagtgcttcttcttctgcttgaggg

SEQ ID NO: 77092 - DNA, 21 bp, Artificial Sequence
  primer
gttctcgctcatccatccatc

SEQ ID NO: 77093 - DNA, 21 bp, Artificial Sequence
  primer
ggcctaagtcccttcctcctc

SEQ ID NO: 77094 - DNA, 26 bp, Artificial Sequence
  primer
gggtttagcaaatgtttatttcactc

SEQ ID NO: 77095 - DNA, 20 bp, Artificial Sequence
  primer
actgtcaatacgcccaggtg

SEQ ID NO: 77096 - DNA, 29 bp, Artificial Sequence
  primer
tttacctcaagactttcatcagtttagta

SEQ ID NO: 77097 - DNA, 21 bp, Artificial Sequence
  primer
aaaggaacaggacccatgaag

SEQ ID NO: 77098 - DNA, 23 bp, Artificial Sequence
  primer
ccttagcagccaaaggtactagg

SEQ ID NO: 77099 - DNA, 21 bp, Artificial Sequence
  primer
gctcatttgcagtagtgtggg

SEQ ID NO: 77100 - DNA, 40 bp, Artificial Sequence
  primer
gtaaaacgacggccagtcaacagtctctaccctcaaggtg

SEQ ID NO: 77101 - DNA, 21 bp, Artificial Sequence
  primer
atttgaggtggaaacctttgg

SEQ ID NO: 77102 - DNA, 24 bp, Artificial Sequence
  primer
aaacaactaattgctctctttccg

SEQ ID NO: 77103 - DNA, 20 bp, Artificial Sequence
  primer
ggcaacatagtgaggccctg

SEQ ID NO: 77104 - DNA, 39 bp, Artificial Sequence
  primer
gtaaaacgacggccagttcaaagactgttagcaagtggc

SEQ ID NO: 77105 - DNA, 37 bp, Artificial Sequence
  primer
gtaaaacgacggccagttgctgatgccaaagcctaag

SEQ ID NO: 77106 - DNA, 23 bp, Artificial Sequence
  primer
cagcacatccttacatacttggc

SEQ ID NO: 77107 - DNA, 21 bp, Artificial Sequence
  primer
ttgcacttgacagttcaccac

SEQ ID NO: 77108 - DNA, 20 bp, Artificial Sequence
  primer
atgctgcagatgtgttgtgg

SEQ ID NO: 77109 - DNA, 46 bp, Artificial Sequence
  primer
gtaaaacgacggccagttttcattagatattacccattacatttga

SEQ ID NO: 77110 - DNA, 39 bp, Artificial Sequence
  primer
gtaaaacgacggccagttgaacaatgtttcttagccagc

SEQ ID NO: 77111 - DNA, 29 bp, Artificial Sequence
  primer
gaagtagtctctcctattcatgtaccctt

SEQ ID NO: 77112 - DNA, 38 bp, Artificial Sequence
  primer
gtaaaacgacggccagtggcatcagagttgggtagtgg

SEQ ID NO: 77113 - DNA, 21 bp, Artificial Sequence
  primer
agaaattggctctcttggtgc

SEQ ID NO: 77114 - DNA, 30 bp, Artificial Sequence
  primer
gataatatttcctagtcaaattctgagatg

SEQ ID NO: 77115 - DNA, 23 bp, Artificial Sequence
  primer
tgagcatcacataacttctgcat

SEQ ID NO: 77116 - DNA, 37 bp, Artificial Sequence
  primer
gtaaaacgacggccagtcctcttgcatgccattcttt

SEQ ID NO: 77117 - DNA, 38 bp, Artificial Sequence
  primer
gtaaaacgacggccagtaggattccttgccagtcacac

SEQ ID NO: 77118 - DNA, 21 bp, Artificial Sequence
  primer
tcccaggacagcccattatac

SEQ ID NO: 77119 - DNA, 39 bp, Artificial Sequence
  primer
gtaaaacgacggccagtcagacacagaactgtctttggg

SEQ ID NO: 77120 - DNA, 26 bp, Artificial Sequence
  primer
agtaatgtctcctgctctgtgtttag

SEQ ID NO: 77121 - DNA, 21 bp, Artificial Sequence
  primer
ccaggagccttaaacacgaag

SEQ ID NO: 77122 - DNA, 20 bp, Artificial Sequence
  primer
aatgatgaaagggccaaagc

SEQ ID NO: 77123 - DNA, 43 bp, Artificial Sequence
  primer
gtaaaacgacggccagttgcatactaatatttatccgaacagg

SEQ ID NO: 77124 - DNA, 26 bp, Artificial Sequence
  primer
ttcatcttacatttctctcaacagga

SEQ ID NO: 77125 - DNA, 18 bp, Artificial Sequence
  primer
ttctgccaccgcgtattc

SEQ ID NO: 77126 - DNA, 23 bp, Artificial Sequence
  primer
tctgaaataattcatccgacagc

SEQ ID NO: 77127 - DNA, 38 bp, Artificial Sequence
  primer
gtaaaacgacggccagtgtgaaatcacacatttgctgc

SEQ ID NO: 77128 - DNA, 25 bp, Artificial Sequence
  primer
ttgtatcttgcttaaagctcacctc

SEQ ID NO: 77129 - DNA, 24 bp, Artificial Sequence
  primer
aacaagaagatctgatgatgcaaa

SEQ ID NO: 77130 - DNA, 40 bp, Artificial Sequence
  primer
gtaaaacgacggccagttgatttaagcaggccaataaact

SEQ ID NO: 77131 - DNA, 20 bp, Artificial Sequence
  primer
actaggaaggctgaggtggg

SEQ ID NO: 77132 - DNA, 40 bp, Artificial Sequence
  primer
gtaaaacgacggccagtctgtggaatccctacagaaagag

SEQ ID NO: 77133 - DNA, 40 bp, Artificial Sequence
  primer
gtaaaacgacggccagtgacccatctgatgattctgtttc

SEQ ID NO: 77134 - DNA, 22 bp, Artificial Sequence
  primer
aaatgtttccaatgaatccacc

SEQ ID NO: 77135 - DNA, 38 bp, Artificial Sequence
  primer
gtaaaacgacggccagtacttggcttgaaattccttgg

SEQ ID NO: 77136 - DNA, 25 bp, Artificial Sequence
  primer
tctgaaacttaagactgcctctagc

SEQ ID NO: 77137 - DNA, 38 bp, Artificial Sequence
  primer
gtaaaacgacggccagtttcacacgttggtggagaaac

SEQ ID NO: 77138 - DNA, 38 bp, Artificial Sequence
  primer
gtaaaacgacggccagtttcctggctcctattccagag

SEQ ID NO: 77139 - DNA, 38 bp, Artificial Sequence
  primer
gtaaaacgacggccagtgcttcctactgaagagccacc

SEQ ID NO: 77140 - DNA, 26 bp, Artificial Sequence
  primer
tgtcagagtcagagtgctgtaaactt

SEQ ID NO: 77141 - DNA, 21 bp, Artificial Sequence
  primer
tgttagcaactggcctactcc

SEQ ID NO: 77142 - DNA, 22 bp, Artificial Sequence
  primer
tcagaagcacagcaaagttcac

SEQ ID NO: 77143 - DNA, 23 bp, Artificial Sequence
  primer
ggtttagagggcttctgaggttc

SEQ ID NO: 77144 - DNA, 38 bp, Artificial Sequence
  primer
gtaaaacgacggccagttaacaaatgatcctcccaccc

SEQ ID NO: 77145 - DNA, 36 bp, Artificial Sequence
  primer
gtaaaacgacggccagtacccaggctggagttcagt

SEQ ID NO: 77146 - DNA, 23 bp, Artificial Sequence
  primer
ccaatcatcaagcaattaacagg

SEQ ID NO: 77147 - DNA, 21 bp, Artificial Sequence
  primer
attgggacacacccttgagac

SEQ ID NO: 77148 - DNA, 21 bp, Artificial Sequence
  primer
taatgccattgaaccctgaac

SEQ ID NO: 77149 - DNA, 37 bp, Artificial Sequence
  primer
gtaaaacgacggccagtactcaggaggcagaagttgc

SEQ ID NO: 77150 - DNA, 41 bp, Artificial Sequence
  primer
gtaaaacgacggccagtaataggaaggatgccattaatttg

SEQ ID NO: 77151 - DNA, 38 bp, Artificial Sequence
  primer
gtaaaacgacggccagtggtaataagaccttgccctgc

SEQ ID NO: 77152 - DNA, 20 bp, Artificial Sequence
  primer
ggcatggcagaaacctagag

SEQ ID NO: 77153 - DNA, 37 bp, Artificial Sequence
  primer
gtaaaacgacggccagtcagaaaggacagcaaggagc

SEQ ID NO: 77154 - DNA, 23 bp, Artificial Sequence
  primer
cgtcctatcagttggatcttctc

SEQ ID NO: 77155 - DNA, 22 bp, Artificial Sequence
  primer
tcccattctcacagaaggaaac

SEQ ID NO: 77156 - DNA, 39 bp, Artificial Sequence
  primer
gtaaaacgacggccagttcattgggctaacttcatccag

SEQ ID NO: 77157 - DNA, 22 bp, Artificial Sequence
  primer
catcattcgtgcacatcaattc

SEQ ID NO: 77158 - DNA, 39 bp, Artificial Sequence
  primer
gtaaaacgacggccagtgcaattagtaacctgtggtggc

SEQ ID NO: 77159 - DNA, 37 bp, Artificial Sequence
  primer
gtaaaacgacggccagtaatccaggtttctggactgc

SEQ ID NO: 77160 - DNA, 26 bp, Artificial Sequence
  primer
tttgtgtctctgaatacctcctttag

SEQ ID NO: 77161 - DNA, 38 bp, Artificial Sequence
  primer
gtaaaacgacggccagtttcccaatttaggctttctgg

SEQ ID NO: 77162 - DNA, 21 bp, Artificial Sequence
  primer
ggagcacttacccaaagggag

SEQ ID NO: 77163 - DNA, 38 bp, Artificial Sequence
  primer
gtaaaacgacggccagtcgttattccgggataggacac

SEQ ID NO: 77164 - DNA, 37 bp, Artificial Sequence
  primer
gtaaaacgacggccagtgtcaggctctccacaagcag

SEQ ID NO: 77165 - DNA, 38 bp, Artificial Sequence
  primer
gtaaaacgacggccagtaggttgggctagctccattag

SEQ ID NO: 77166 - DNA, 20 bp, Artificial Sequence
  primer
aggaaagtcccaggaagcag

SEQ ID NO: 77167 - DNA, 38 bp, Artificial Sequence
  primer
gtaaaacgacggccagtaataggaactggcaggtggtc

SEQ ID NO: 77168 - DNA, 20 bp, Artificial Sequence
  primer
ggtcacataggtcagcaggc

SEQ ID NO: 77169 - DNA, 38 bp, Artificial Sequence
  primer
gtaaaacgacggccagtgagtgggaaggtgaggttctg

SEQ ID NO: 77170 - DNA, 20 bp, Artificial Sequence
  primer
atgaagcagcctgtggtcag

SEQ ID NO: 77171 - DNA, 21 bp, Artificial Sequence
  primer
actcatgagaaggatccagcc

SEQ ID NO: 77172 - DNA, 21 bp, Artificial Sequence
  primer
attctgccatccaggaaacag

SEQ ID NO: 77173 - DNA, 37 bp, Artificial Sequence
  primer
gtaaaacgacggccagtcaggtcaggtcagcctcatc

SEQ ID NO: 77174 - DNA, 38 bp, Artificial Sequence
  primer
gtaaaacgacggccagtcctgaccctcactctggtcac

SEQ ID NO: 77175 - DNA, 21 bp, Artificial Sequence
  primer
aaactgcactttggttccgac

SEQ ID NO: 77176 - DNA, 21 bp, Artificial Sequence
  primer
atacgcaggtcagcatttgag

SEQ ID NO: 77177 - DNA, 38 bp, Artificial Sequence
  primer
gtaaaacgacggccagtgatagggactgagcctttgcc

SEQ ID NO: 77178 - DNA, 38 bp, Artificial Sequence
  primer
gtaaaacgacggccagtgtggaggacatggatctaccc

SEQ ID NO: 77179 - DNA, 21 bp, Artificial Sequence
  primer
agctgccgcagatactcgtag

SEQ ID NO: 77180 - DNA, 19 bp, Artificial Sequence
  primer
ccgccttagcttcccaaac

SEQ ID NO: 77181 - DNA, 21 bp, Artificial Sequence
  primer
aggaagatctgtgccaggttc

SEQ ID NO: 77182 - DNA, 38 bp, Artificial Sequence
  primer
gtaaaacgacggccagtgtgtaaatgcctgtcctgctg

SEQ ID NO: 77183 - DNA, 21 bp, Artificial Sequence
  primer
gtctgccacactgctctaacc

SEQ ID NO: 77184 - DNA, 40 bp, Artificial Sequence
  primer
gtaaaacgacggccagttcatgaatgtcaagcagtctttc

SEQ ID NO: 77185 - DNA, 22 bp, Artificial Sequence
  primer
catcaggtcaaaggtcttcctg

SEQ ID NO: 77186 - DNA, 38 bp, Artificial Sequence
  primer
gtaaaacgacggccagtcggaggcaagcttcaataaac

SEQ ID NO: 77187 - DNA, 20 bp, Artificial Sequence
  primer
agccaccatgaccaactgag

SEQ ID NO: 77188 - DNA, 20 bp, Artificial Sequence
  primer
ccctgggagggtacacaaag

SEQ ID NO: 77189 - DNA, 19 bp, Artificial Sequence
  primer
aaagagatgcaagggcagc

SEQ ID NO: 77190 - DNA, 40 bp, Artificial Sequence
  primer
gtaaaacgacggccagttggtaacaattctccatcaacca

SEQ ID NO: 77191 - DNA, 21 bp, Artificial Sequence
  primer
tgggatggactcctgactttc

SEQ ID NO: 77192 - DNA, 24 bp, Artificial Sequence
  primer
tcaatattattctacgccatgcac

SEQ ID NO: 77193 - DNA, 45 bp, Artificial Sequence
  primer
gtaaaacgacggccagtgctttaagctgtagttatcaattggttc

SEQ ID NO: 77194 - DNA, 37 bp, Artificial Sequence
  primer
gtaaaacgacggccagtggccatgccactctatgttc

SEQ ID NO: 77195 - DNA, 21 bp, Artificial Sequence
  primer
gagatggtacccaccctagcc

SEQ ID NO: 77196 - DNA, 21 bp, Artificial Sequence
  primer
ttgcaataattgggacaccac

SEQ ID NO: 77197 - DNA, 38 bp, Artificial Sequence
  primer
gtaaaacgacggccagtaacagtcttagcccagccatc

SEQ ID NO: 77198 - DNA, 38 bp, Artificial Sequence
  primer
gtaaaacgacggccagtaattctttcctggatgatgcg

SEQ ID NO: 77199 - DNA, 43 bp, Artificial Sequence
  primer
gtaaaacgacggccagtcacaaactccagactctttgaataag

SEQ ID NO: 77200 - DNA, 22 bp, Artificial Sequence
  primer
caaatcacatcgtaccaactgc

SEQ ID NO: 77201 - DNA, 21 bp, Artificial Sequence
  primer
ctattgcagaagccattgcag

SEQ ID NO: 77202 - DNA, 20 bp, Artificial Sequence
  primer
gggagcttcagctaccttgg

SEQ ID NO: 77203 - DNA, 37 bp, Artificial Sequence
  primer
gtaaaacgacggccagtattccgggacctggttacac

SEQ ID NO: 77204 - DNA, 36 bp, Artificial Sequence
  primer
gtaaaacgacggccagtctctgtgtcagtccacccg

SEQ ID NO: 77205 - DNA, 38 bp, Artificial Sequence
  primer
gtaaaacgacggccagttgtttgcaataattgggaggc

SEQ ID NO: 77206 - DNA, 21 bp, Artificial Sequence
  primer
attcatgtacacctgaagccg

SEQ ID NO: 77207 - DNA, 21 bp, Artificial Sequence
  primer
ctaaatgatgctggcacttgg

SEQ ID NO: 77208 - DNA, 23 bp, Artificial Sequence
  primer
actaagaggtcatggtgatttgc

SEQ ID NO: 77209 - DNA, 38 bp, Artificial Sequence
  primer
gtaaaacgacggccagtccaagcagcacgattaaagtc

SEQ ID NO: 77210 - DNA, 21 bp, Artificial Sequence
  primer
acccagagcaattaaagctgc

SEQ ID NO: 77211 - DNA, 21 bp, Artificial Sequence
  primer
gtttggtttcttcatttcccg

SEQ ID NO: 77212 - DNA, 21 bp, Artificial Sequence
  primer
tgagcagttccctagtcatgg

SEQ ID NO: 77213 - DNA, 21 bp, Artificial Sequence
  primer
tgttattcctggctctttggg

SEQ ID NO: 77214 - DNA, 21 bp, Artificial Sequence
  primer
gtaaatgacagggatggtggg

SEQ ID NO: 77215 - DNA, 38 bp, Artificial Sequence
  primer
gtaaaacgacggccagtaatgggagcaaccaagaagtc

SEQ ID NO: 77216 - DNA, 21 bp, Artificial Sequence
  primer
atggctatagcagtggccttg

SEQ ID NO: 77217 - DNA, 21 bp, Artificial Sequence
  primer
ctgccaaggtctcactctgtg

SEQ ID NO: 77218 - DNA, 38 bp, Artificial Sequence
  primer
gtaaaacgacggccagtatcaccctggatcttggtcac

SEQ ID NO: 77219 - DNA, 21 bp, Artificial Sequence
  primer
tcattgacagctgggtagcag

SEQ ID NO: 77220 - DNA, 38 bp, Artificial Sequence
  primer
gtaaaacgacggccagtcttcccttctgtcaggtctgg

SEQ ID NO: 77221 - DNA, 21 bp, Artificial Sequence
  primer
tctcaaccagggtccagtttc

SEQ ID NO: 77222 - DNA, 22 bp, Artificial Sequence
  primer
aaactaaagccacgtgatttgc

SEQ ID NO: 77223 - DNA, 39 bp, Artificial Sequence
  primer
gtaaaacgacggccagtcaccatacttaaagctccaggg

SEQ ID NO: 77224 - DNA, 40 bp, Artificial Sequence
  primer
gtaaaacgacggccagttttaacaaggtgaggaaatctgg

SEQ ID NO: 77225 - DNA, 21 bp, Artificial Sequence
  primer
aagggtgcaaccaatgatgac

SEQ ID NO: 77226 - DNA, 24 bp, Artificial Sequence
  primer
tgctctgctaagtcttggagtttc

SEQ ID NO: 77227 - DNA, 38 bp, Artificial Sequence
  primer
gtaaaacgacggccagtaaattgcctccctcaatcaac

SEQ ID NO: 77228 - DNA, 38 bp, Artificial Sequence
  primer
gtaaaacgacggccagtggctcgtgtttctagccattg

SEQ ID NO: 77229 - DNA, 37 bp, Artificial Sequence
  primer
gtaaaacgacggccagtacaaatttaatccggcctgc

SEQ ID NO: 77230 - DNA, 21 bp, Artificial Sequence
  primer
tttgacatctgcaaaccaagc

SEQ ID NO: 77231 - DNA, 38 bp, Artificial Sequence
  primer
gtaaaacgacggccagtgaaagatttactagggcgggc

SEQ ID NO: 77232 - DNA, 38 bp, Artificial Sequence
  primer
gtaaaacgacggccagttttatcaaacggctggtgaag

SEQ ID NO: 77233 - DNA, 21 bp, Artificial Sequence
  primer
attctgacctccacccacttc

SEQ ID NO: 77234 - DNA, 38 bp, Artificial Sequence
  primer
gtaaaacgacggccagtgaaagctccaggcttcacatc

SEQ ID NO: 77235 - DNA, 21 bp, Artificial Sequence
  primer
atttatagccagggccaggag

SEQ ID NO: 77236 - DNA, 21 bp, Artificial Sequence
  primer
ggaagatggatttctgcttgc

SEQ ID NO: 77237 - DNA, 21 bp, Artificial Sequence
  primer
accattcatcagccaagcaac

SEQ ID NO: 77238 - DNA, 38 bp, Artificial Sequence
  primer
gtaaaacgacggccagtccaaatatgatgcattcccag

SEQ ID NO: 77239 - DNA, 38 bp, Artificial Sequence
  primer
gtaaaacgacggccagtagccctgggtctccttagttg

SEQ ID NO: 77240 - DNA, 22 bp, Artificial Sequence
  primer
gatggtcaggaatagcgaagtg

SEQ ID NO: 77241 - DNA, 21 bp, Artificial Sequence
  primer
taaatgccgtcctctcctcac

SEQ ID NO: 77242 - DNA, 23 bp, Artificial Sequence
  primer
aacagagaaattccgtctcatcc

SEQ ID NO: 77243 - DNA, 38 bp, Artificial Sequence
  primer
gtaaaacgacggccagtgcaaagttccctcaactcacc

SEQ ID NO: 77244 - DNA, 22 bp, Artificial Sequence
  primer
ttcccattgtctgacttcttcc

SEQ ID NO: 77245 - DNA, 20 bp, Artificial Sequence
  primer
gaagccttgccagagtcaac

SEQ ID NO: 77246 - DNA, 39 bp, Artificial Sequence
  primer
gtaaaacgacggccagtcaatccatctgggtatggagag

SEQ ID NO: 77247 - DNA, 22 bp, Artificial Sequence
  primer
gctgctgaaggaacgactacag

SEQ ID NO: 77248 - DNA, 40 bp, Artificial Sequence
  primer
gtaaaacgacggccagttcaataatggaagggaaggattg

SEQ ID NO: 77249 - DNA, 26 bp, Artificial Sequence
  primer
aatggtcactataaatgccatattcc

SEQ ID NO: 77250 - DNA, 20 bp, Artificial Sequence
  primer
ctcccacctggtttgacaag

SEQ ID NO: 77251 - DNA, 41 bp, Artificial Sequence
  primer
gtaaaacgacggccagttgggcattatccataatttcaaag

SEQ ID NO: 77252 - DNA, 20 bp, Artificial Sequence
  primer
cccacatagggcatcagaag

SEQ ID NO: 77253 - DNA, 21 bp, Artificial Sequence
  primer
atccagcctgagcaatgagag

SEQ ID NO: 77254 - DNA, 39 bp, Artificial Sequence
  primer
gtaaaacgacggccagtggctgaaccacctgtggaatac

SEQ ID NO: 77255 - DNA, 21 bp, Artificial Sequence
  primer
gattactgactgggcagtggc

SEQ ID NO: 77256 - DNA, 21 bp, Artificial Sequence
  primer
gctaggccctacaagcttcac

SEQ ID NO: 77257 - DNA, 20 bp, Artificial Sequence
  primer
attggaaaccggagaacagg

SEQ ID NO: 77258 - DNA, 38 bp, Artificial Sequence
  primer
gtaaaacgacggccagtgattgtcaccttgcatttccc

SEQ ID NO: 77259 - DNA, 21 bp, Artificial Sequence
  primer
caaccaaacacctcaatccag

SEQ ID NO: 77260 - DNA, 37 bp, Artificial Sequence
  primer
gtaaaacgacggccagtgaacagccagaagggaaagg

SEQ ID NO: 77261 - DNA, 18 bp, Artificial Sequence
  primer
ctgccgcgtagtgacagc

SEQ ID NO: 77262 - DNA, 38 bp, Artificial Sequence
  primer
gtaaaacgacggccagtaacaggatgcaaactgctgag

SEQ ID NO: 77263 - DNA, 21 bp, Artificial Sequence
  primer
gccaaatactgccacagagtg

SEQ ID NO: 77264 - DNA, 38 bp, Artificial Sequence
  primer
gtaaaacgacggccagttggcttcattccttcctcaac

SEQ ID NO: 77265 - DNA, 18 bp, Artificial Sequence
  primer
tgacctcgtgatccaccc

SEQ ID NO: 77266 - DNA, 38 bp, Artificial Sequence
  primer
gtaaaacgacggccagtgacgaagtccctggagtgaac

SEQ ID NO: 77267 - DNA, 38 bp, Artificial Sequence
  primer
gtaaaacgacggccagtttggtcctcaccacactaagc

SEQ ID NO: 77268 - DNA, 38 bp, Artificial Sequence
  primer
gtaaaacgacggccagtgcgtctggttgcacaattagc

SEQ ID NO: 77269 - DNA, 21 bp, Artificial Sequence
  primer
agccaaaccgacagtcttctg

SEQ ID NO: 77270 - DNA, 22 bp, Artificial Sequence
  primer
catggccattgtgttgtatctc

SEQ ID NO: 77271 - DNA, 21 bp, Artificial Sequence
  primer
cataggtaggaccttgcagcc

SEQ ID NO: 77272 - DNA, 37 bp, Artificial Sequence
  primer
gtaaaacgacggccagtatttccagctgcagggagag

SEQ ID NO: 77273 - DNA, 21 bp, Artificial Sequence
  primer
cccttaggttgactatggccc

SEQ ID NO: 77274 - DNA, 21 bp, Artificial Sequence
  primer
cagaatccattccaactcgtg

SEQ ID NO: 77275 - DNA, 21 bp, Artificial Sequence
  primer
actcatgcttacagcccacag

SEQ ID NO: 77276 - DNA, 38 bp, Artificial Sequence
  primer
gtaaaacgacggccagtagtagccagctgctgttaggg

SEQ ID NO: 77277 - DNA, 21 bp, Artificial Sequence
  primer
agagagagaggaggtgcttgg

SEQ ID NO: 77278 - DNA, 21 bp, Artificial Sequence
  primer
ccagaactcacgacggctatc

SEQ ID NO: 77279 - DNA, 20 bp, Artificial Sequence
  primer
ggagagtggagcaatgatgc

SEQ ID NO: 77280 - DNA, 21 bp, Artificial Sequence
  primer
tagaacacatcagtggctccc

SEQ ID NO: 77281 - DNA, 38 bp, Artificial Sequence
  primer
gtaaaacgacggccagtatctccagttgaggacatggg

SEQ ID NO: 77282 - DNA, 21 bp, Artificial Sequence
  primer
caaagagtaaaggccagccag

SEQ ID NO: 77283 - DNA, 23 bp, Artificial Sequence
  primer
gataggaacattctaggcaaggg

SEQ ID NO: 77284 - DNA, 21 bp, Artificial Sequence
  primer
ttgtggaagaaatgtgaagcc

SEQ ID NO: 77285 - DNA, 23 bp, Artificial Sequence
  primer
tcagagtcagatctttcaatggg

SEQ ID NO: 77286 - DNA, 19 bp, Artificial Sequence
  primer
gaaaggctgagcccatcac

SEQ ID NO: 77287 - DNA, 20 bp, Artificial Sequence
  primer
cagaaaccatggaaccaacg

SEQ ID NO: 77288 - DNA, 21 bp, Artificial Sequence
  primer
ctgatggcccagtcttctctg

SEQ ID NO: 77289 - DNA, 21 bp, Artificial Sequence
  primer
aggctggctgactctacatcc

SEQ ID NO: 77290 - DNA, 38 bp, Artificial Sequence
  primer
gtaaaacgacggccagtgtgatactggatgttgcctgc

SEQ ID NO: 77291 - DNA, 21 bp, Artificial Sequence
  primer
cagtgtcctctgcattcatgg

SEQ ID NO: 77292 - DNA, 20 bp, Artificial Sequence
  primer
agtagcaacctcccacccag

SEQ ID NO: 77293 - DNA, 38 bp, Artificial Sequence
  primer
gtaaaacgacggccagttccaaattgtttcagcaatcg

SEQ ID NO: 77294 - DNA, 21 bp, Artificial Sequence
  primer
gttccaggcacaaacttggac

SEQ ID NO: 77295 - DNA, 20 bp, Artificial Sequence
  primer
atcaatggctctgagatggc

SEQ ID NO: 77296 - DNA, 37 bp, Artificial Sequence
  primer
gtaaaacgacggccagtggctgctagatgttccatgc

SEQ ID NO: 77297 - DNA, 18 bp, Artificial Sequence
  primer
gaccaagacaccgcgtcc

SEQ ID NO: 77298 - DNA, 39 bp, Artificial Sequence
  primer
gtaaaacgacggccagttctcccatctccaaatgttacc

SEQ ID NO: 77299 - DNA, 22 bp, Artificial Sequence
  primer
ggaaggagaagctctgggatag

SEQ ID NO: 77300 - DNA, 38 bp, Artificial Sequence
  primer
gtaaaacgacggccagtttggtgtcacctttgccttag

SEQ ID NO: 77301 - DNA, 37 bp, Artificial Sequence
  primer
gtaaaacgacggccagtgacagcaaagcgaaccaatc

SEQ ID NO: 77302 - DNA, 21 bp, Artificial Sequence
  primer
gctccatagtgtggaaagtgc

SEQ ID NO: 77303 - DNA, 39 bp, Artificial Sequence
  primer
gtaaaacgacggccagtgggaacgcaatcagtcataaag

SEQ ID NO: 77304 - DNA, 25 bp, Artificial Sequence
  primer
gcatcttcatatcaatgaatttgtg

SEQ ID NO: 77305 - DNA, 30 bp, Artificial Sequence
  primer
aatatgtaattacctgataaattcgaaaga

SEQ ID NO: 77306 - DNA, 21 bp, Artificial Sequence
  primer
agcagtgctactaagacacgc

SEQ ID NO: 77307 - DNA, 21 bp, Artificial Sequence
  primer
ttcaaatttcacaggaatggg

SEQ ID NO: 77308 - DNA, 23 bp, Artificial Sequence
  primer
tggtttagcaagatgagaggaga

SEQ ID NO: 77309 - DNA, 22 bp, Artificial Sequence
  primer
ttgggattcctataacccaacc

SEQ ID NO: 77310 - DNA, 21 bp, Artificial Sequence
  primer
caattctgccttcctgttgaa

SEQ ID NO: 77311 - DNA, 21 bp, Artificial Sequence
  primer
acgcttccagcaacttcattc

SEQ ID NO: 77312 - DNA, 20 bp, Artificial Sequence
  primer
acaggtgtgagccaatgtgc

SEQ ID NO: 77313 - DNA, 41 bp, Artificial Sequence
  primer
gtaaaacgacggccagtgccatttcactgaataaaggagtc

SEQ ID NO: 77314 - DNA, 21 bp, Artificial Sequence
  primer
agtgtcctagggaaactgggc

SEQ ID NO: 77315 - DNA, 35 bp, Artificial Sequence
  primer
gtaaaacgacggccagtgccaacctcctccaaccc

SEQ ID NO: 77316 - DNA, 38 bp, Artificial Sequence
  primer
gtaaaacgacggccagtagaggtgtgactgggtatggg

SEQ ID NO: 77317 - DNA, 38 bp, Artificial Sequence
  primer
gtaaaacgacggccagtttacaggaccagcaggctatg

SEQ ID NO: 77318 - DNA, 37 bp, Artificial Sequence
  primer
gtaaaacgacggccagttttacgacgtcaaggcaagg

SEQ ID NO: 77319 - DNA, 37 bp, Artificial Sequence
  primer
gtaaaacgacggccagtattccatcgctgagctgcta

SEQ ID NO: 77320 - DNA, 21 bp, Artificial Sequence
  primer
gggacacgttccctatagtcc

SEQ ID NO: 77321 - DNA, 21 bp, Artificial Sequence
  primer
cagctgaaacctcaaagcatc

SEQ ID NO: 77322 - DNA, 21 bp, Artificial Sequence
  primer
tgtcaagcagacaaactgcac

SEQ ID NO: 77323 - DNA, 38 bp, Artificial Sequence
  primer
gtaaaacgacggccagtgtgacagagcaagagtccgtc

SEQ ID NO: 77324 - DNA, 21 bp, Artificial Sequence
  primer
tcatgtcacaatgcagctcag

SEQ ID NO: 77325 - DNA, 21 bp, Artificial Sequence
  primer
tggtctgtttagagccacacg

SEQ ID NO: 77326 - DNA, 21 bp, Artificial Sequence
  primer
caccgacgtcgctatttacag

SEQ ID NO: 77327 - DNA, 21 bp, Artificial Sequence
  primer
caaagcccttccttcactctg

SEQ ID NO: 77328 - DNA, 21 bp, Artificial Sequence
  primer
ccacctgggtttattaggctc

SEQ ID NO: 77329 - DNA, 20 bp, Artificial Sequence
  primer
accacacaactccggatgag

SEQ ID NO: 77330 - DNA, 38 bp, Artificial Sequence
  primer
gtaaaacgacggccagtcagcctgggtgagagtgagac

SEQ ID NO: 77331 - DNA, 37 bp, Artificial Sequence
  primer
gtaaaacgacggccagtcagtcctggttcagctggtg

SEQ ID NO: 77332 - DNA, 21 bp, Artificial Sequence
  primer
agggtgacagagcacacattg

SEQ ID NO: 77333 - DNA, 21 bp, Artificial Sequence
  primer
gaacccagtaaggaaacagcg

SEQ ID NO: 77334 - DNA, 21 bp, Artificial Sequence
  primer
tgtgccacttactccaacctg

SEQ ID NO: 77335 - DNA, 21 bp, Artificial Sequence
  primer
tcaagaatggaatgaaatcgc

SEQ ID NO: 77336 - DNA, 36 bp, Artificial Sequence
  primer
gtaaaacgacggccagtccctggtcagctggaagac

SEQ ID NO: 77337 - DNA, 21 bp, Artificial Sequence
  primer
attgaagccagtttgaatccg

SEQ ID NO: 77338 - DNA, 38 bp, Artificial Sequence
  primer
gtaaaacgacggccagtgtcctgacatcccatttggtg

SEQ ID NO: 77339 - DNA, 38 bp, Artificial Sequence
  primer
gtaaaacgacggccagtgggtgtagagctttcaggtgc

SEQ ID NO: 77340 - DNA, 21 bp, Artificial Sequence
  primer
tggtagtgtttcagaggccag

SEQ ID NO: 77341 - DNA, 21 bp, Artificial Sequence
  primer
aacctgttctgcccaattctg

SEQ ID NO: 77342 - DNA, 20 bp, Artificial Sequence
  primer
agtcctcaaggtcccagcac

SEQ ID NO: 77343 - DNA, 19 bp, Artificial Sequence
  primer
gtcatctccagggagtggg

SEQ ID NO: 77344 - DNA, 21 bp, Artificial Sequence
  primer
cccagaaacattcagcaaagc

SEQ ID NO: 77345 - DNA, 20 bp, Artificial Sequence
  primer
caatcgcctcccacgtctac

SEQ ID NO: 77346 - DNA, 37 bp, Artificial Sequence
  primer
gtaaaacgacggccagtcactgcacccagcctatttc

SEQ ID NO: 77347 - DNA, 38 bp, Artificial Sequence
  primer
gtaaaacgacggccagttcttccatgaatggcaaactg

SEQ ID NO: 77348 - DNA, 22 bp, Artificial Sequence
  primer
ggagttgaaattaggaatgggc

SEQ ID NO: 77349 - DNA, 38 bp, Artificial Sequence
  primer
gtaaaacgacggccagtagctgaaagtttgaccaagcc

SEQ ID NO: 77350 - DNA, 21 bp, Artificial Sequence
  primer
tacgctcatggtatgtttggg

SEQ ID NO: 77351 - DNA, 20 bp, Artificial Sequence
  primer
agttggtatgcctgcgtttg

SEQ ID NO: 77352 - DNA, 21 bp, Artificial Sequence
  primer
ctctgctatagggagggatgg

SEQ ID NO: 77353 - DNA, 38 bp, Artificial Sequence
  primer
gtaaaacgacggccagttcatatgtagccagtgcccag

SEQ ID NO: 77354 - DNA, 39 bp, Artificial Sequence
  primer
gtaaaacgacggccagttcccttaagaacctgaagaggc

SEQ ID NO: 77355 - DNA, 20 bp, Artificial Sequence
  primer
gcttctctcggcacacacac

SEQ ID NO: 77356 - DNA, 40 bp, Artificial Sequence
  primer
gtaaaacgacggccagtgggcaatttgagagagaagactg

SEQ ID NO: 77357 - DNA, 21 bp, Artificial Sequence
  primer
aaatgtggccctcaggttaga

SEQ ID NO: 77358 - DNA, 40 bp, Artificial Sequence
  primer
gtaaaacgacggccagtaagtccatgctgtaagtcagagg

SEQ ID NO: 77359 - DNA, 38 bp, Artificial Sequence
  primer
gtaaaacgacggccagtttgccaagaatcgtttgtgag

SEQ ID NO: 77360 - DNA, 39 bp, Artificial Sequence
  primer
gtaaaacgacggccagtccttagtgtgttcaatggtggc

SEQ ID NO: 77361 - DNA, 38 bp, Artificial Sequence
  primer
gtaaaacgacggccagttttctcccacccaaattcttg

SEQ ID NO: 77362 - DNA, 38 bp, Artificial Sequence
  primer
gtaaaacgacggccagtactctcaattcaggcagtggg

SEQ ID NO: 77363 - DNA, 21 bp, Artificial Sequence
  primer
acaaggcccacttcataccag

SEQ ID NO: 77364 - DNA, 21 bp, Artificial Sequence
  primer
atgtcaactgcagctttcctg

SEQ ID NO: 77365 - DNA, 21 bp, Artificial Sequence
  primer
ggctaggtttcctgcactctg

SEQ ID NO: 77366 - DNA, 38 bp, Artificial Sequence; identical to SEQ ID NO: 77362
  primer

SEQ ID NO: 77367 - DNA, 38 bp, Artificial Sequence
  primer
gtaaaacgacggccagtcctttcccaccagatgctaag

SEQ ID NO: 77368 - DNA, 21 bp, Artificial Sequence
  primer
actgaacatcagaagccagcc

SEQ ID NO: 77369 - DNA, 19 bp, Artificial Sequence
  primer
caggttgagagggcagctc

SEQ ID NO: 77370 - DNA, 24 bp, Artificial Sequence
  primer
cacacacaaatgatttcactatcg

SEQ ID NO: 77371 - DNA, 23 bp, Artificial Sequence
  primer
aggtgagagaggttgtcattgtc

SEQ ID NO: 77372 - DNA, 21 bp, Artificial Sequence
  primer
aaacagatgctacccacaggg

SEQ ID NO: 77373 - DNA, 18 bp, Artificial Sequence
  primer
cgagaaggtgggaaggtg

SEQ ID NO: 77374 - DNA, 21 bp, Artificial Sequence
  primer
cagcgttgatgtcagagaagc

SEQ ID NO: 77375 - DNA, 21 bp, Artificial Sequence
  primer
accgtcctacgtttgttctgg

SEQ ID NO: 77376 - DNA, 21 bp, Artificial Sequence
  primer
agatggtccattgtcaatccc

SEQ ID NO: 77377 - DNA, 18 bp, Artificial Sequence
  primer
cattgcgcacctcctttg

SEQ ID NO: 77378 - DNA, 39 bp, Artificial Sequence
  primer
gtaaaacgacggccagtcctcttcgtagttcattgccac

SEQ ID NO: 77379 - DNA, 21 bp, Artificial Sequence
  primer
agcagtgatccacatgtcctg

SEQ ID NO: 77380 - DNA, 42 bp, Artificial Sequence
  primer
gtaaaacgacggccagtaaatacaacagaaatattggcatcc

SEQ ID NO: 77381 - DNA, 21 bp, Artificial Sequence
  primer
cctggtccgacaggtagaaag

SEQ ID NO: 77382 - DNA, 21 bp, Artificial Sequence
  primer
tactccctcaggacctcctcc

SEQ ID NO: 77383 - DNA, 18 bp, Artificial Sequence
  primer
ccgacagcacaatctccc

SEQ ID NO: 77384 - DNA, 37 bp, Artificial Sequence
  primer
gtaaaacgacggccagtaagaaggaactgagccgagg

SEQ ID NO: 77385 - DNA, 20 bp, Artificial Sequence
  primer
cacgttggaactcccaattc

SEQ ID NO: 77386 - DNA, 21 bp, Artificial Sequence
  primer
tccgtttcacaatctgtcagc

SEQ ID NO: 77387 - DNA, 38 bp, Artificial Sequence
  primer
gtaaaacgacggccagtacctgcaaagctgtcagtctc

SEQ ID NO: 77388 - DNA, 21 bp, Artificial Sequence
  primer
ttagagcacggttgggttagg

SEQ ID NO: 77389 - DNA, 39 bp, Artificial Sequence
  primer
gtaaaacgacggccagttggacacaatcatctgaaatgc

SEQ ID NO: 77390 - DNA, 26 bp, Artificial Sequence
  primer
gtttaacaccaaattaagagtcatgc

SEQ ID NO: 77391 - DNA, 38 bp, Artificial Sequence
  primer
gtaaaacgacggccagtatcatatgcagggtttggtgg

SEQ ID NO: 77392 - DNA, 21 bp, Artificial Sequence
  primer
ctgcatttcacaatggctttc

SEQ ID NO: 77393 - DNA, 21 bp, Artificial Sequence
  primer
acacatggtccaagcaacaat

SEQ ID NO: 77394 - DNA, 42 bp, Artificial Sequence
  primer
gtaaaacgacggccagtagcaagagataaataacactgcaca

SEQ ID NO: 77395 - DNA, 37 bp, Artificial Sequence
  primer
gtaaaacgacggccagtagggacaacagagggacgac

SEQ ID NO: 77396 - DNA, 38 bp, Artificial Sequence
  primer
gtaaaacgacggccagttcacttccctgaaccagatcc

SEQ ID NO: 77397 - DNA, 21 bp, Artificial Sequence
  primer
acctttgcaaggaccagaaat

SEQ ID NO: 77398 - DNA, 21 bp, Artificial Sequence
  primer
tacccaatatgacttccacgc

SEQ ID NO: 77399 - DNA, 22 bp, Artificial Sequence
  primer
gaaagtcagagggaatggtgac

SEQ ID NO: 77400 - DNA, 38 bp, Artificial Sequence
  primer
gtaaaacgacggccagttgcaactagctttcctgttca

SEQ ID NO: 77401 - DNA, 38 bp, Artificial Sequence
  primer
gtaaaacgacggccagttgattctctgctgctctgagg

SEQ ID NO: 77402 - DNA, 39 bp, Artificial Sequence
  primer
gtaaaacgacggccagtaagggaagagggagtgaatctg

SEQ ID NO: 77403 - DNA, 22 bp, Artificial Sequence
  primer
gcttggacactcatccaaagag

SEQ ID NO: 77404 - DNA, 20 bp, Artificial Sequence
  primer
gacagacccacagcttccac

SEQ ID NO: 77405 - DNA, 23 bp, Artificial Sequence
  primer
aataccagcagcaatcatttgag

SEQ ID NO: 77406 - DNA, 38 bp, Artificial Sequence
  primer
gtaaaacgacggccagtgcaaaggtagggataattggg

SEQ ID NO: 77407 - DNA, 21 bp, Artificial Sequence
  primer
actcactgaccaatgggttcc

SEQ ID NO: 77408 - DNA, 21 bp, Artificial Sequence
  primer
acagacagcactttggtcagg

SEQ ID NO: 77409 - DNA, 38 bp, Artificial Sequence
  primer
gtaaaacgacggccagtgaattcccagttgtcagcctc

SEQ ID NO: 77410 - DNA, 38 bp, Artificial Sequence
  primer
gtaaaacgacggccagtcccttgttgtccttcttgagc

SEQ ID NO: 77411 - DNA, 20 bp, Artificial Sequence
  primer
tcaaagtcaatcccacaggg

SEQ ID NO: 77412 - DNA, 38 bp, Artificial Sequence
  primer
gtaaaacgacggccagtgctgtggaggttagaagtggg

SEQ ID NO: 77413 - DNA, 21 bp, Artificial Sequence
  primer
cctgcccaagtaggaaatcag

SEQ ID NO: 77414 - DNA, 21 bp, Artificial Sequence
  primer
agcccatgttagagggaaagc

SEQ ID NO: 77415 - DNA, 22 bp, Artificial Sequence
  primer
aatcttccaccactcttctccc

SEQ ID NO: 77416 - DNA, 20 bp, Artificial Sequence
  primer
ggagtctctgaacactgccc

SEQ ID NO: 77417 - DNA, 21 bp, Artificial Sequence
  primer
tcactgagctcacaggtttgg

SEQ ID NO: 77418 - DNA, 21 bp, Artificial Sequence
  primer
tctctacaagcccaatccctg

SEQ ID NO: 77419 - DNA, 21 bp, Artificial Sequence
  primer
aacttcccaatcctttgctcc

SEQ ID NO: 77420 - DNA, 38 bp, Artificial Sequence
  primer
gtaaaacgacggccagtagccatatgtttccactgcac

SEQ ID NO: 77421 - DNA, 21 bp, Artificial Sequence
  primer
agtagttccgtgaccctccag

SEQ ID NO: 77422 - DNA, 38 bp, Artificial Sequence
  primer
gtaaaacgacggccagtggaagagcaaggtgaggtttg

SEQ ID NO: 77423 - DNA, 36 bp, Artificial Sequence
  primer
gtaaaacgacggccagtgcagaaccaggacgcaatc

SEQ ID NO: 77424 - DNA, 38 bp, Artificial Sequence
  primer
gtaaaacgacggccagtccacagaggtgtgcatttcag

SEQ ID NO: 77425 - DNA, 21 bp, Artificial Sequence
  primer
tgagagctatttctgggaggc

SEQ ID NO: 77426 - DNA, 21 bp, Artificial Sequence
  primer
ttgatgtgaaagtgctcaggg

SEQ ID NO: 77427 - DNA, 38 bp, Artificial Sequence
  primer
gtaaaacgacggccagtatacactgggaaactgggtgg

SEQ ID NO: 77428 - DNA, 21 bp, Artificial Sequence
  primer
ccatcactgaatgggagagtg

SEQ ID NO: 77429 - DNA, 21 bp, Artificial Sequence
  primer
atctcctcttggactttgccc

SEQ ID NO: 77430 - DNA, 21 bp, Artificial Sequence
  primer
aggtctcagattccctgaccc

SEQ ID NO: 77431 - DNA, 37 bp, Artificial Sequence
  primer
gtaaaacgacggccagtgggagatacttcagccaccc

SEQ ID NO: 77432 - DNA, 21 bp, Artificial Sequence
  primer
agagccacctggacctgtaac

SEQ ID NO: 77433 - DNA, 38 bp, Artificial Sequence
  primer
gtaaaacgacggccagtgagccttgtctttgaactggg

SEQ ID NO: 77434 - DNA, 37 bp, Artificial Sequence
  primer
gtaaaacgacggccagtgaggttcctcctccaaggtg

SEQ ID NO: 77435 - DNA, 20 bp, Artificial Sequence
  primer
gccaatgagttcccttctcc

SEQ ID NO: 77436 - DNA, 21 bp, Artificial Sequence
  primer
agggtccttcaagtcacatgc

SEQ ID NO: 77437 - DNA, 37 bp, Artificial Sequence
  primer
gtaaaacgacggccagttgaggccagaggttcatcac

SEQ ID NO: 77438 - DNA, 36 bp, Artificial Sequence
  primer
gtaaaacgacggccagtcccaccctcattatcctcg

SEQ ID NO: 77439 - DNA, 39 bp, Artificial Sequence
  primer
gtaaaacgacggccagtggatcatctttgggtaggttgg

SEQ ID NO: 77440 - DNA, 21 bp, Artificial Sequence
  primer
gacacaccagctcacttcctg

SEQ ID NO: 77441 - DNA, 21 bp, Artificial Sequence
  primer
gcataagacttgcctgaaccc

SEQ ID NO: 77442 - DNA, 21 bp, Artificial Sequence
  primer
ctgtttcttccagatctgccc

SEQ ID NO: 77443 - DNA, 21 bp, Artificial Sequence
  primer
tgcacaatgaccaccacatac

SEQ ID NO: 77444 - DNA, 21 bp, Artificial Sequence
  primer
gaactgcacctttcggatcac

SEQ ID NO: 77445 - DNA, 38 bp, Artificial Sequence
  primer
gtaaaacgacggccagtaatgtcctcttgatgtgtggc

SEQ ID NO: 77446 - DNA, 38 bp, Artificial Sequence
  primer
gtaaaacgacggccagtcctaaattctttgagccctgg

SEQ ID NO: 77447 - DNA, 38 bp, Artificial Sequence
  primer
gtaaaacgacggccagtttcctccacctcacattctcc

SEQ ID NO: 77448 - DNA, 21 bp, Artificial Sequence
  primer
tcactgatacatccctggcac

SEQ ID NO: 77449 - DNA, 20 bp, Artificial Sequence
  primer
atcgtgaagaggacgacgac

SEQ ID NO: 77450 - DNA, 38 bp, Artificial Sequence
  primer
gtaaaacgacggccagtattcaatgaggttggtgtcca

SEQ ID NO: 77451 - DNA, 39 bp, Artificial Sequence
  primer
gtaaaacgacggccagtaagcaaggaagaggtatgaggg

SEQ ID NO: 77452 - DNA, 21 bp, Artificial Sequence
  primer
gggtccagtgtgtatcttggg

SEQ ID NO: 77453 - DNA, 35 bp, Artificial Sequence
  primer
gtaaaacgacggccagtggcgaagacagcgactcc

SEQ ID NO: 77454 - DNA, 20 bp, Artificial Sequence
  primer
cacaaccctgggacaagatg

SEQ ID NO: 77455 - DNA, 38 bp, Artificial Sequence
  primer
gtaaaacgacggccagttagaacacgaggctgcacttg

SEQ ID NO: 77456 - DNA, 36 bp, Artificial Sequence
  primer
gtaaaacgacggccagtacaggacgctgggatgaag

SEQ ID NO: 77457 - DNA, 36 bp, Artificial Sequence
  primer
gtaaaacgacggccagtgaaggaccagcctgtgagc

SEQ ID NO: 77458 - DNA, 22 bp, Artificial Sequence
  primer
gagagacctggacaggattgag

SEQ ID NO: 77459 - DNA, 36 bp, Artificial Sequence
  primer
gtaaaacgacggccagtgaagaaagcagggtctgcg

SEQ ID NO: 77460 - DNA, 38 bp, Artificial Sequence
  primer
gtaaaacgacggccagtctctgctcataagacggtggg

SEQ ID NO: 77461 - DNA, 38 bp, Artificial Sequence
  primer
gtaaaacgacggccagtaggctaggccaagagagaagg

SEQ ID NO: 77462 - DNA, 21 bp, Artificial Sequence
  primer
cggtatctgcaggtaggagaa

SEQ ID NO: 77463 - DNA, 38 bp, Artificial Sequence
  primer
gtaaaacgacggccagtgaaggagacacagacactccg

SEQ ID NO: 77464 - DNA, 21 bp, Artificial Sequence
  primer
atcttattggttggtgtcgcc

SEQ ID NO: 77465 - DNA, 20 bp, Artificial Sequence
  primer
gtcgatctcggcaaagacag

SEQ ID NO: 77466 - DNA, 19 bp, Artificial Sequence
  primer
cacctccctcctatgcctg

SEQ ID NO: 77467 - DNA, 38 bp, Artificial Sequence
  primer
gtaaaacgacggccagtggactcgtggtgagagagttg

SEQ ID NO: 77468 - DNA, 39 bp, Artificial Sequence
  primer
gtaaaacgacggccagtcccatctactatgtctgccacc

SEQ ID NO: 77469 - DNA, 21 bp, Artificial Sequence
  primer
ctctgtcccatgtgatatccg

SEQ ID NO: 77470 - DNA, 44 bp, Artificial Sequence
  primer
gtaaaacgacggccagtgctaggagtagaatcacgttaattcag

SEQ ID NO: 77471 - DNA, 24 bp, Artificial Sequence
  primer
tcatgttaaaggaaaccctattcc

SEQ ID NO: 77472 - DNA, 43 bp, Artificial Sequence
  primer
gtaaaacgacggccagttgacaactgcatagtttaggtgattg

SEQ ID NO: 77473 - DNA, 38 bp, Artificial Sequence
  primer
gtaaaacgacggccagttgtcccaggaactgcaaataa

SEQ ID NO: 77474 - DNA, 38 bp, Artificial Sequence
  primer
gtaaaacgacggccagttgagactgtgccactgcattc

SEQ ID NO: 77475 - DNA, 40 bp, Artificial Sequence
  primer
gtaaaacgacggccagtgggcacatctactttctttagga

SEQ ID NO: 77476 - DNA, 22 bp, Artificial Sequence
  primer
tgaacagtcctacctctgcatc

SEQ ID NO: 77477 - DNA, 38 bp, Artificial Sequence
  primer
gtaaaacgacggccagtttccacttcctctgaaacgtg

SEQ ID NO: 77478 - DNA, 18 bp, Artificial Sequence
  primer
ccctgatctcacctgcca

SEQ ID NO: 77479 - DNA, 43 bp, Artificial Sequence
  primer
gtaaaacgacggccagttcagaagagacctagcagtgataaac

SEQ ID NO: 77480 - DNA, 38 bp, Artificial Sequence
  primer
gtaaaacgacggccagtcccactgttgaaaggaaggag

SEQ ID NO: 77481 - DNA, 22 bp, Artificial Sequence
  primer
tttgactggaaacaattcctcc

SEQ ID NO: 77482 - DNA, 21 bp, Artificial Sequence
  primer
ggccaatcttcatacagtccc

SEQ ID NO: 77483 - DNA, 38 bp, Artificial Sequence
  primer
gtaaaacgacggccagtcctcccaggactaatgctttc

SEQ ID NO: 77484 - DNA, 41 bp, Artificial Sequence
  primer
gtaaaacgacggccagtcagacactctaatgaacggatgac

SEQ ID NO: 77485 - DNA, 38 bp, Artificial Sequence
  primer
gtaaaacgacggccagttataaacttgtgcggcaatcc

SEQ ID NO: 77486 - DNA, 21 bp, Artificial Sequence
  primer
catttcataggattcgccctc

SEQ ID NO: 77487 - DNA, 38 bp, Artificial Sequence
  primer
gtaaaacgacggccagtgtaacgatgggtgatgggaag

SEQ ID NO: 77488 - DNA, 36 bp, Artificial Sequence
  primer
gtaaaacgacggccagtacatgcctctgtgtgcctg

SEQ ID NO: 77489 - DNA, 21 bp, Artificial Sequence
  primer
atgctgtcatacttcccgacc

SEQ ID NO: 77490 - DNA, 38 bp, Artificial Sequence
  primer
gtaaaacgacggccagtctcctgtcaaccggcttctac

SEQ ID NO: 77491 - DNA, 21 bp, Artificial Sequence
  primer
tggtaagagacaaccactggg

SEQ ID NO: 77492 - DNA, 38 bp, Artificial Sequence
  primer
gtaaaacgacggccagttccgcttcttgctactctgtg

SEQ ID NO: 77493 - DNA, 37 bp, Artificial Sequence
  primer
gtaaaacgacggccagtcaatgtcgccaacctctcac

SEQ ID NO: 77494 - DNA, 37 bp, Artificial Sequence
  primer
gtaaaacgacggccagtgcctccctagcaggtgaaac

SEQ ID NO: 77495 - DNA, 21 bp, Artificial Sequence
  primer
atagtcaagcgagggagttgg

SEQ ID NO: 77496 - DNA, 21 bp, Artificial Sequence
  primer
taggttccgtccatgctaacg

SEQ ID NO: 77497 - DNA, 21 bp, Artificial Sequence
  primer
taggtaaggtcagaggtgccc

SEQ ID NO: 77498 - DNA, 21 bp, Artificial Sequence
  primer
cctaagggaagtgaatgcgag

SEQ ID NO: 77499 - DNA, 20 bp, Artificial Sequence
  primer
gaggaaggaaggttggcaag

SEQ ID NO: 77500 - DNA, 21 bp, Artificial Sequence
  primer
tgccagtgcagtaagcagttc

SEQ ID NO: 77501 - DNA, 38 bp, Artificial Sequence
  primer
gtaaaacgacggccagtgacttctagggctatggcctg

SEQ ID NO: 77502 - DNA, 21 bp, Artificial Sequence
  primer
ggacagcaccagctatgacag

SEQ ID NO: 77503 - DNA, 21 bp, Artificial Sequence
  primer
aggtcccgatattccacaatg

SEQ ID NO: 77504 - DNA, 21 bp, Artificial Sequence
  primer
acgcacctatgtacctcccac

SEQ ID NO: 77505 - DNA, 38 bp, Artificial Sequence; identical to SEQ ID NO: 77487
  primer

SEQ ID NO: 77506 - DNA, 37 bp, Artificial Sequence; identical to SEQ ID NO: 77494
  primer

SEQ ID NO: 77507 - DNA, 21 bp, Artificial Sequence
  primer
cagacagaaatgtggccttcc

SEQ ID NO: 77508 - DNA, 36 bp, Artificial Sequence
  primer
gtaaaacgacggccagtaagcaggtcaggttctggc

SEQ ID NO: 77509 - DNA, 21 bp, Artificial Sequence
  primer
cactgaactgagggtagtggg

SEQ ID NO: 77510 - DNA, 38 bp, Artificial Sequence
  primer
gtaaaacgacggccagtgttcttggcaagcagctgaac

SEQ ID NO: 77511 - DNA, 38 bp, Artificial Sequence
  primer
gtaaaacgacggccagtctggtcagtcactcagttcgc

SEQ ID NO: 77512 - DNA, 20 bp, Artificial Sequence
  primer
aggcacagactctcaggcac

SEQ ID NO: 77513 - DNA, 20 bp, Artificial Sequence
  primer
ggtatcactgtgggcagagc

SEQ ID NO: 77514 - DNA, 36 bp, Artificial Sequence
  primer
gtaaaacgacggccagtcctccagacacctgagcct

SEQ ID NO: 77515 - DNA, 35 bp, Artificial Sequence
  primer
gtaaaacgacggccagtataactgggtcggcggtc

SEQ ID NO: 77516 - DNA, 21 bp, Artificial Sequence
  primer
tttcatttgattgcacttggg

SEQ ID NO: 77517 - DNA, 21 bp, Artificial Sequence
  primer
caggctgattctgggatactg

SEQ ID NO: 77518 - DNA, 21 bp, Artificial Sequence
  primer
ataaggcaatgctaaccgctc

SEQ ID NO: 77519 - DNA, 41 bp, Artificial Sequence
  primer
gtaaaacgacggccagtaaagctatcattcttgctcaatgg

SEQ ID NO: 77520 - DNA, 38 bp, Artificial Sequence
  primer
gtaaaacgacggccagttgtcccgaagaactgtttacc

SEQ ID NO: 77521 - DNA, 20 bp, Artificial Sequence
  primer
tcccaggagggcagatagac

SEQ ID NO: 77522 - DNA, 21 bp, Artificial Sequence
  primer
cccaggttgggataacaaatg

SEQ ID NO: 77523 - DNA, 37 bp, Artificial Sequence
  primer
gtaaaacgacggccagtgacacaaccacgccctttac

SEQ ID NO: 77524 - DNA, 21 bp, Artificial Sequence
  primer
gacctgggagaacaaatttcc

SEQ ID NO: 77525 - DNA, 21 bp, Artificial Sequence
  primer
gaagacgatgaattgcaggtg

SEQ ID NO: 77526 - DNA, 19 bp, Artificial Sequence
  primer
tggaccaggcaccaacttc

SEQ ID NO: 77527 - DNA, 21 bp, Artificial Sequence
  primer
gctagtctaaagcacctgggc

SEQ ID NO: 77528 - DNA, 21 bp, Artificial Sequence
  primer
accgcccttattctttattgc

SEQ ID NO: 77529 - DNA, 23 bp, Artificial Sequence
  primer
ttcagttcaacttgttctgggac

SEQ ID NO: 77530 - DNA, 20 bp, Artificial Sequence
  primer
cctgggcaagagtgtgagac

SEQ ID NO: 77531 - DNA, 22 bp, Artificial Sequence
  primer
ccatccatccacatatccacac

SEQ ID NO: 77532 - DNA, 40 bp, Artificial Sequence
  primer
gtaaaacgacggccagtggaagctgaagatagaaccaagc

SEQ ID NO: 77533 - DNA, 20 bp, Artificial Sequence
  primer
taaaggcatgagccaccttg

SEQ ID NO: 77534 - DNA, 18 bp, Artificial Sequence
  primer
atggtgtgaacccgggag

SEQ ID NO: 77535 - DNA, 21 bp, Artificial Sequence
  primer
gtgaactgccaagatcaaggg

SEQ ID NO: 77536 - DNA, 21 bp, Artificial Sequence
  primer
accagcatgggcaagatagag

SEQ ID NO: 77537 - DNA, 37 bp, Artificial Sequence
  primer
gtaaaacgacggccagtgaaatcccacagcacctcac

SEQ ID NO: 77538 - DNA, 21 bp, Artificial Sequence
  primer
caccatgcctgactgaagaag

SEQ ID NO: 77539 - DNA, 40 bp, Artificial Sequence
  primer
gtaaaacgacggccagttgctaatgcagtgaagatctgtg

SEQ ID NO: 77540 - DNA, 21 bp, Artificial Sequence
  primer
ctcctggaatagattgccctg

SEQ ID NO: 77541 - DNA, 21 bp, Artificial Sequence
  primer
ccttactgcaaagccaaagtg

SEQ ID NO: 77542 - DNA, 21 bp, Artificial Sequence
  primer
gacatggagatggactctgga

SEQ ID NO: 77543 - DNA, 20 bp, Artificial Sequence
  primer
agtgctgggatgacaaccac

SEQ ID NO: 77544 - DNA, 40 bp, Artificial Sequence
  primer
gtaaaacgacggccagtaatgcctctacctataaggctgg

SEQ ID NO: 77545 - DNA, 35 bp, Artificial Sequence
  primer
gtaaaacgacggccagtatgcagccgtacagccag

SEQ ID NO: 77546 - DNA, 36 bp, Artificial Sequence
  primer
gtaaaacgacggccagtctgggctcaagcaatcctc

SEQ ID NO: 77547 - DNA, 38 bp, Artificial Sequence
  primer
gtaaaacgacggccagtgccactgcgcctttacataag

SEQ ID NO: 77548 - DNA, 21 bp, Artificial Sequence
  primer
taatggatccagctcgttcag

SEQ ID NO: 77549 - DNA, 21 bp, Artificial Sequence
  primer
agcatgcaaagaaaggagagg

SEQ ID NO: 77550 - DNA, 21 bp, Artificial Sequence
  primer
cctcattcctttgtgtcatgg

SEQ ID NO: 77551 - DNA, 38 bp, Artificial Sequence
  primer
gtaaaacgacggccagtagtgggtctgccaggatagag

SEQ ID NO: 77552 - DNA, 20 bp, Artificial Sequence
  primer
gagccctggaatgaaaggac

SEQ ID NO: 77553 - DNA, 38 bp, Artificial Sequence
  primer
gtaaaacgacggccagtagtgcttcctttggtagcctg

SEQ ID NO: 77554 - DNA, 21 bp, Artificial Sequence
  primer
cctgccgataacatcagacaa

SEQ ID NO: 77555 - DNA, 20 bp, Artificial Sequence
  primer
agctgcccagggataacaac

SEQ ID NO: 77556 - DNA, 21 bp, Artificial Sequence
  primer
agagaagtcggtcaaactggc

SEQ ID NO: 77557 - DNA, 38 bp, Artificial Sequence
  primer
gtaaaacgacggccagtgaaagcaagtgcctccttcag

SEQ ID NO: 77558 - DNA, 37 bp, Artificial Sequence
  primer
gtaaaacgacggccagtcaaatgccgcacattctctc

SEQ ID NO: 77559 - DNA, 40 bp, Artificial Sequence
  primer
gtaaaacgacggccagtgggctggacataatttgagacag

SEQ ID NO: 77560 - DNA, 22 bp, Artificial Sequence
  primer
gaattcaagcaaacacaaagcc

SEQ ID NO: 77561 - DNA, 21 bp, Artificial Sequence
  primer
gccctatgggcagaatattga

SEQ ID NO: 77562 - DNA, 35 bp, Artificial Sequence
  primer
gtaaaacgacggccagtgcacatggtgcagcttcc

SEQ ID NO: 77563 - DNA, 39 bp, Artificial Sequence
  primer
gtaaaacgacggccagttggaatgaatcagtcaggtgag

SEQ ID NO: 77564 - DNA, 39 bp, Artificial Sequence
  primer
gtaaaacgacggccagtggtggtactggcaggagaaatc

SEQ ID NO: 77565 - DNA, 38 bp, Artificial Sequence
  primer
gtaaaacgacggccagtatagtggagtactggccgctg

SEQ ID NO: 77566 - DNA, 21 bp, Artificial Sequence
  primer
ccaccattgtcactggagaag

SEQ ID NO: 77567 - DNA, 38 bp, Artificial Sequence
  primer
gtaaaacgacggccagtctgtcagcagcttccactcac

SEQ ID NO: 77568 - DNA, 21 bp, Artificial Sequence
  primer
agcctggtgttgagtttacgg

SEQ ID NO: 77569 - DNA, 38 bp, Artificial Sequence
  primer
gtaaaacgacggccagtttctccctgagaaacagcagg

SEQ ID NO: 77570 - DNA, 38 bp, Artificial Sequence
  primer
gtaaaacgacggccagtctcccttaaatttggagctgg

SEQ ID NO: 77571 - DNA, 38 bp, Artificial Sequence
  primer
gtaaaacgacggccagtgttcgaaatacctgccaggag

SEQ ID NO: 77572 - DNA, 38 bp, Artificial Sequence
  primer
gtaaaacgacggccagtcaatctgtccttcagccagtg

SEQ ID NO: 77573 - DNA, 38 bp, Artificial Sequence
  primer
gtaaaacgacggccagtcaaggtgatccgttcattgtg

SEQ ID NO: 77574 - DNA, 21 bp, Artificial Sequence
  primer
tgttgaactgtgagagcctcc

SEQ ID NO: 77575 - DNA, 38 bp, Artificial Sequence
  primer
gtaaaacgacggccagtgcaagttgaacctgagactgc

SEQ ID NO: 77576 - DNA, 21 bp, Artificial Sequence
  primer
ctctttctccctccagggttc

SEQ ID NO: 77577 - DNA, 38 bp, Artificial Sequence
  primer
gtaaaacgacggccagtcagtcagcaggaaatggagtg

SEQ ID NO: 77578 - DNA, 38 bp, Artificial Sequence
  primer
gtaaaacgacggccagtcttgccctcctacctttgatg

SEQ ID NO: 77579 - DNA, 38 bp, Artificial Sequence
  primer
gtaaaacgacggccagttccctgggacacaggagatag

SEQ ID NO: 77580 - DNA, 21 bp, Artificial Sequence
  primer
tcccagctgtaatcaagaggc

SEQ ID NO: 77581 - DNA, 39 bp, Artificial Sequence
  primer
gtaaaacgacggccagtttacactgaaagcacacatggc

SEQ ID NO: 77582 - DNA, 19 bp, Artificial Sequence
  primer
aaatggcatgaacctggga

SEQ ID NO: 77583 - DNA, 38 bp, Artificial Sequence
  primer
gtaaaacgacggccagtgccatcttcacagcttcactg

SEQ ID NO: 77584 - DNA, 38 bp, Artificial Sequence
  primer
gtaaaacgacggccagtatgtcaactccaaggcatgtg

SEQ ID NO: 77585 - DNA, 38 bp, Artificial Sequence
  primer
gtaaaacgacggccagttcactgacctttccctaagcc

SEQ ID NO: 77586 - DNA, 21 bp, Artificial Sequence
  primer
aaaggctcctaggctctccac

SEQ ID NO: 77587 - DNA, 21 bp, Artificial Sequence
  primer
cccagactcaagtgatcctcc

SEQ ID NO: 77588 - DNA, 21 bp, Artificial Sequence
  primer
tctcctgacctcatgatcctc

SEQ ID NO: 77589 - DNA, 21 bp, Artificial Sequence
  primer
cctgttcccacatgtaaaggg

SEQ ID NO: 77590 - DNA, 37 bp, Artificial Sequence
  primer
gtaaaacgacggccagtaggtgagctctgccttcctc

SEQ ID NO: 77591 - DNA, 38 bp, Artificial Sequence
  primer
gtaaaacgacggccagttgaatgcacaggaggaaagag

SEQ ID NO: 77592 - DNA, 24 bp, Artificial Sequence
  primer
ttcagactggtaagaaccactgtt

SEQ ID NO: 77593 - DNA, 39 bp, Artificial Sequence
  primer
gtaaaacgacggccagttggaccaactttctgaatttgc

SEQ ID NO: 77594 - DNA, 21 bp, Artificial Sequence
  primer
gcagagatggaggttcctgag

SEQ ID NO: 77595 - DNA, 20 bp, Artificial Sequence
  primer
agagtctcccagcctcttgg

SEQ ID NO: 77596 - DNA, 38 bp, Artificial Sequence
  primer
gtaaaacgacggccagttggcttatttcacccacactg

SEQ ID NO: 77597 - DNA, 38 bp, Artificial Sequence
  primer
gtaaaacgacggccagtcctttaaccaagtgggtctcc

SEQ ID NO: 77598 - DNA, 21 bp, Artificial Sequence
  primer
ccctcagattgtgaccctagc

SEQ ID NO: 77599 - DNA, 38 bp, Artificial Sequence
  primer
gtaaaacgacggccagtgtggctgcctcagtactttcc

SEQ ID NO: 77600 - DNA, 19 bp, Artificial Sequence
  primer
ggctcttccactgcaccag

SEQ ID NO: 77601 - DNA, 20 bp, Artificial Sequence
  primer
tttccctcccacacctaacc

SEQ ID NO: 77602 - DNA, 19 bp, Artificial Sequence
  primer
ggctcttccactgcaccag

SEQ ID NO: 77603 - DNA, 21 bp, Artificial Sequence
  primer
taagggtccagtctgcaaagc

SEQ ID NO: 77604 - DNA, 37 bp, Artificial Sequence
  primer
gtaaaacgacggccagtctagtgggactctgcgggag

SEQ ID NO: 77605 - DNA, 37 bp, Artificial Sequence
  primer
gtaaaacgacggccagtaaatccgtggaaagtctccg

SEQ ID NO: 77606 - DNA, 21 bp, Artificial Sequence
  primer
taatgaatttagcgtgggcag

SEQ ID NO: 77607 - DNA, 38 bp, Artificial Sequence
  primer
gtaaaacgacggccagtcaggtgacccaatgttgactg

SEQ ID NO: 77608 - DNA, 21 bp, Artificial Sequence
  primer
tatgttgggtttacacgcacg

SEQ ID NO: 77609 - DNA, 37 bp, Artificial Sequence
  primer
gtaaaacgacggccagtatcaaccgcaggtttgtcac

SEQ ID NO: 77610 - DNA, 27 bp, Artificial Sequence
  primer
atttacaggaccaatatttaatcaagg

SEQ ID NO: 77611 - DNA, 42 bp, Artificial Sequence
  primer
gtaaaacgacggccagttgcaacacgattcatatctaaactg

SEQ ID NO: 77612 - DNA, 40 bp, Artificial Sequence
  primer
gtaaaacgacggccagtcccacaaccttgcctataacttc

SEQ ID NO: 77613 - DNA, 23 bp, Artificial Sequence
  primer
ttacaccatctgtagggcaaatc

SEQ ID NO: 77614 - DNA, 20 bp, Artificial Sequence
  primer
aggaaagctctgcaaccctc

SEQ ID NO: 77615 - DNA, 39 bp, Artificial Sequence
  primer
gtaaaacgacggccagtaagcctccttaatcctactggg

SEQ ID NO: 77616 - DNA, 23 bp, Artificial Sequence
  primer
gaatgttcactggtaatccctcc

SEQ ID NO: 77617 - DNA, 24 bp, Artificial Sequence
  primer
gccttagtagtcacagacaggagg

SEQ ID NO: 77618 - DNA, 22 bp, Artificial Sequence
  primer
acacacacacacacacacacac

SEQ ID NO: 77619 - DNA, 26 bp, Artificial Sequence
  primer
ccctaatgtttagtaccaatgatgga

SEQ ID NO: 77620 - DNA, 37 bp, Artificial Sequence
  primer
gtaaaacgacggccagtcccagcaggataggcaattc

SEQ ID NO: 77621 - DNA, 37 bp, Artificial Sequence
  primer
gtaaaacgacggccagtggttatgccagatggaatgg

SEQ ID NO: 77622 - DNA, 22 bp, Artificial Sequence
  primer
ccatttctaactcaccacaccc

SEQ ID NO: 77623 - DNA, 21 bp, Artificial Sequence
  primer
aacacatggtagcgatagccc

SEQ ID NO: 77624 - DNA, 38 bp, Artificial Sequence
  primer
gtaaaacgacggccagttgagaacagtgcctcatttgc

SEQ ID NO: 77625 - DNA, 21 bp, Artificial Sequence
  primer
cgggaatgtcaactaccgaac

SEQ ID NO: 77626 - DNA, 21 bp, Artificial Sequence
  primer
taagcattgtgcacctttcaa

SEQ ID NO: 77627 - DNA, 22 bp, Artificial Sequence
  primer
tgattcaaacacactcacctcg

SEQ ID NO: 77628 - DNA, 38 bp, Artificial Sequence
  primer
gtaaaacgacggccagtatgcgatgaagaattccagtg

SEQ ID NO: 77629 - DNA, 21 bp, Artificial Sequence
  primer
aatgggttatgtaagggcacc

SEQ ID NO: 77630 - DNA, 21 bp, Artificial Sequence
  primer
cagcaaatcttgcaataagcg

SEQ ID NO: 77631 - DNA, 21 bp, Artificial Sequence
  primer
ggcctagaaactgctttgctg

SEQ ID NO: 77632 - DNA, 21 bp, Artificial Sequence
  primer
tgcagctcacctggtatgaag

SEQ ID NO: 77633 - DNA, 38 bp, Artificial Sequence
  primer
gtaaaacgacggccagtagagccaaggccaattcaaac

SEQ ID NO: 77634 - DNA, 21 bp, Artificial Sequence
  primer
ttgacaccctcgttctcaaag

SEQ ID NO: 77635 - DNA, 21 bp, Artificial Sequence
  primer
gggttgagcctcacactcttc

SEQ ID NO: 77636 - DNA, 21 bp, Artificial Sequence
  primer
cgccatcttccacactatctg

SEQ ID NO: 77637 - DNA, 20 bp, Artificial Sequence
  primer
ctgtgctgctcccacagttc

SEQ ID NO: 77638 - DNA, 21 bp, Artificial Sequence
  primer
tgggtgtacagagagccttcc

SEQ ID NO: 77639 - DNA, 38 bp, Artificial Sequence
  primer
gtaaaacgacggccagtccacctgccactgtcataaag

SEQ ID NO: 77640 - DNA, 38 bp, Artificial Sequence
  primer
gtaaaacgacggccagtcttgatggctcaaagcttcac

SEQ ID NO: 77641 - DNA, 19 bp, Artificial Sequence
  primer
gagctgcaccagtgaggtg

SEQ ID NO: 77642 - DNA, 21 bp, Artificial Sequence
  primer
agctacctccagttgggacag

SEQ ID NO: 77643 - DNA, 21 bp, Artificial Sequence
  primer
cagctccttgtagctccacac

SEQ ID NO: 77644 - DNA, 38 bp, Artificial Sequence
  primer
gtaaaacgacggccagtcactcaccaaggctcttgtcc

SEQ ID NO: 77645 - DNA, 38 bp, Artificial Sequence
  primer
gtaaaacgacggccagtagggaaagtggcctatggaag

SEQ ID NO: 77646 - DNA, 38 bp, Artificial Sequence
  primer
gtaaaacgacggccagtctagctgccctgtacctcacc

SEQ ID NO: 77647 - DNA, 19 bp, Artificial Sequence
  primer
catggcctaggctgctctc

SEQ ID NO: 77648 - DNA, 37 bp, Artificial Sequence
  primer
gtaaaacgacggccagtgacctctgcctggtctttcc

SEQ ID NO: 77649 - DNA, 38 bp, Artificial Sequence
  primer
gtaaaacgacggccagtgatatgtcatcagcctctggc

SEQ ID NO: 77650 - DNA, 38 bp, Artificial Sequence
  primer
gtaaaacgacggccagtccctggctagatgtttaacgc

SEQ ID NO: 77651 - DNA, 20 bp, Artificial Sequence
  primer
tgatcttgagcgtgtcccag

SEQ ID NO: 77652 - DNA, 21 bp, Artificial Sequence
  primer
cagcagttcctcttcctcgtc

SEQ ID NO: 77653 - DNA, 19 bp, Artificial Sequence
  primer
cagagaggcacacgctgtc

SEQ ID NO: 77654 - DNA, 36 bp, Artificial Sequence
  primer
gtaaaacgacggccagtcagagtccaggagccaagc

SEQ ID NO: 77655 - DNA, 21 bp, Artificial Sequence
  primer
tgtgtgtgagagagtgcttgg

SEQ ID NO: 77656 - DNA, 38 bp, Artificial Sequence
  primer
gtaaaacgacggccagtctgtttgactcctgcctcctc

SEQ ID NO: 77657 - DNA, 21 bp, Artificial Sequence
  primer
tccatttggtcttgagtggtg

SEQ ID NO: 77658 - DNA, 38 bp, Artificial Sequence
  primer
gtaaaacgacggccagtttgaaaggagagggtgctgag

SEQ ID NO: 77659 - DNA, 22 bp, Artificial Sequence
  primer
agagggagaagagctgtgactg

SEQ ID NO: 77660 - DNA, 38 bp, Artificial Sequence
  primer
gtaaaacgacggccagtttggtggctacgggttaattc

SEQ ID NO: 77661 - DNA, 39 bp, Artificial Sequence
  primer
gtaaaacgacggccagtcagtttccaagacaggaagcac

SEQ ID NO: 77662 - DNA, 38 bp, Artificial Sequence
  primer
gtaaaacgacggccagtttatcgtgagctgacattggg

SEQ ID NO: 77663 - DNA, 21 bp, Artificial Sequence
  primer
ggaaagtaatccatatccggg

SEQ ID NO: 77664 - DNA, 21 bp, Artificial Sequence
  primer
atggcagaggaagaatggaac

SEQ ID NO: 77665 - DNA, 39 bp, Artificial Sequence
  primer
gtaaaacgacggccagtgggttaccattgtacaggaggc

SEQ ID NO: 77666 - DNA, 19 bp, Artificial Sequence
  primer
aatgggaggcaatgcaaag

SEQ ID NO: 77667 - DNA, 22 bp, Artificial Sequence
  primer
tggtgggtgcctgtaatcttag

SEQ ID NO: 77668 - DNA, 21 bp, Artificial Sequence
  primer
gtcagggacaaggagcagttg

SEQ ID NO: 77669 - DNA, 21 bp, Artificial Sequence
  primer
ctctgtctcggaatgggaaac

SEQ ID NO: 77670 - DNA, 20 bp, Artificial Sequence
  primer
aagctgaggcagggaaattg

SEQ ID NO: 77671 - DNA, 37 bp, Artificial Sequence
  primer
gtaaaacgacggccagtaagtccctgcgaagaggttg

SEQ ID NO: 77672 - DNA, 35 bp, Artificial Sequence
  primer
gtaaaacgacggccagtacctgtgcacctgtgctg

SEQ ID NO: 77673 - DNA, 38 bp, Artificial Sequence
  primer
gtaaaacgacggccagttagccctgcaacatttcttcc

SEQ ID NO: 77674 - DNA, 18 bp, Artificial Sequence
  primer
tgacctcgtgatccaccc

SEQ ID NO: 77675 - DNA, 21 bp, Artificial Sequence
  primer
cagaaacctccgtttcctttc

SEQ ID NO: 77676 - DNA, 21 bp, Artificial Sequence
  primer
tgaacacaatgtcaggaaccg

SEQ ID NO: 77677 - DNA, 22 bp, Artificial Sequence
  primer
tccacatgagtgtcagaggttc

SEQ ID NO: 77678 - DNA, 38 bp, Artificial Sequence
  primer
gtaaaacgacggccagtgaagaagggatgtttccaacg

SEQ ID NO: 77679 - DNA, 44 bp, Artificial Sequence
  primer
gtaaaacgacggccagtcgtttataaattacttgaaggccaaag

SEQ ID NO: 77680 - DNA, 24 bp, Artificial Sequence
  primer
cctcagtgatcaatttctttcttg

SEQ ID NO: 77681 - DNA, 39 bp, Artificial Sequence
  primer
gtaaaacgacggccagtcgcgagtcttagtctttggaag

SEQ ID NO: 77682 - DNA, 21 bp, Artificial Sequence
  primer
gtagcaccgaatctaccgagg

SEQ ID NO: 77683 - DNA, 21 bp, Artificial Sequence
  primer
tccaggctgcttaagtacacg

SEQ ID NO: 77684 - DNA, 41 bp, Artificial Sequence
  primer
gtaaaacgacggccagttcagaaatgaatgcaggttgtaaa

SEQ ID NO: 77685 - DNA, 24 bp, Artificial Sequence
  primer
aattatttcctgtcacattcaccc

SEQ ID NO: 77686 - DNA, 40 bp, Artificial Sequence
  primer
gtaaaacgacggccagtttcctaatgaaccaagtcaatgg

SEQ ID NO: 77687 - DNA, 38 bp, Artificial Sequence
  primer
gtaaaacgacggccagtatcaatagtgccagctgcaaa

SEQ ID NO: 77688 - DNA, 21 bp, Artificial Sequence
  primer
tctttcacttccctctgcatt

SEQ ID NO: 77689 - DNA, 21 bp, Artificial Sequence
  primer
tgctggagcaagatatatggg

SEQ ID NO: 77690 - DNA, 20 bp, Artificial Sequence
  primer
accactccagcaagattccc

SEQ ID NO: 77691 - DNA, 39 bp, Artificial Sequence
  primer
gtaaaacgacggccagttggaaatacatggagaacaggc

SEQ ID NO: 77692 - DNA, 37 bp, Artificial Sequence
  primer
gtaaaacgacggccagtcaagtgagtcaggcagggtc

SEQ ID NO: 77693 - DNA, 21 bp, Artificial Sequence
  primer
ggccctgctacttgttagtgg

SEQ ID NO: 77694 - DNA, 21 bp, Artificial Sequence
  primer
cctctctctgcttctccaacc

SEQ ID NO: 77695 - DNA, 21 bp, Artificial Sequence
  primer
gaaacagaggaaggaaccacg

SEQ ID NO: 77696 - DNA, 20 bp, Artificial Sequence
  primer
agagacccacgtccagcttc

SEQ ID NO: 77697 - DNA, 21 bp, Artificial Sequence
  primer
tgccaactttgttatcaagcc

SEQ ID NO: 77698 - DNA, 38 bp, Artificial Sequence
  primer
gtaaaacgacggccagtaggctgagttcaatcatgtgc

SEQ ID NO: 77699 - DNA, 21 bp, Artificial Sequence
  primer
tacaggacagcaaagaagccc

SEQ ID NO: 77700 - DNA, 37 bp, Artificial Sequence
  primer
gtaaaacgacggccagtaccacttgcagggtgaacag

SEQ ID NO: 77701 - DNA, 21 bp, Artificial Sequence
  primer
tggctgtcttcctagcaaagg

SEQ ID NO: 77702 - DNA, 21 bp, Artificial Sequence
  primer
cccgtttaaagcactctgagc

SEQ ID NO: 77703 - DNA, 21 bp, Artificial Sequence
  primer
gtctcctcccgctagtctgtg

SEQ ID NO: 77704 - DNA, 38 bp, Artificial Sequence
  primer
gtaaaacgacggccagtgccatccaaatgactgctaac

SEQ ID NO: 77705 - DNA, 39 bp, Artificial Sequence
  primer
gtaaaacgacggccagttctgttgggtgagtgaaggaag

SEQ ID NO: 77706 - DNA, 21 bp, Artificial Sequence
  primer
ccatctctgttcctcgtgatg

SEQ ID NO: 77707 - DNA, 36 bp, Artificial Sequence
  primer
gtaaaacgacggccagtgtcagaaccggcgtctttc

SEQ ID NO: 77708 - DNA, 39 bp, Artificial Sequence
  primer
gtaaaacgacggccagtcagagccagaaagaaagactgg

SEQ ID NO: 77709 - DNA, 19 bp, Artificial Sequence
  primer
ttccagggaactggacgag

SEQ ID NO: 77710 - DNA, 21 bp, Artificial Sequence
  primer
ggttcagcagggtatttcagg

SEQ ID NO: 77711 - DNA, 22 bp, Artificial Sequence
  primer
ggtgatagccatatccttctgg

SEQ ID NO: 77712 - DNA, 38 bp, Artificial Sequence
  primer
gtaaaacgacggccagttgggaacatttatgttggctg

SEQ ID NO: 77713 - DNA, 37 bp, Artificial Sequence
  primer
gtaaaacgacggccagttgtgtggctggtgacttgag

SEQ ID NO: 77714 - DNA, 38 bp, Artificial Sequence
  primer
gtaaaacgacggccagtagttacgagcaagttccaccg

SEQ ID NO: 77715 - DNA, 21 bp, Artificial Sequence
  primer
acattcctcccaacatcaagg

SEQ ID NO: 77716 - DNA, 42 bp, Artificial Sequence
  primer
gtaaaacgacggccagttcatctaaagagccgaattctaaag

SEQ ID NO: 77717 - DNA, 21 bp, Artificial Sequence
  primer
attcattcaatcaacccagcc

SEQ ID NO: 77718 - DNA, 37 bp, Artificial Sequence
  primer
gtaaaacgacggccagtagcaacagccatcaggagac

SEQ ID NO: 77719 - DNA, 36 bp, Artificial Sequence
  primer
gtaaaacgacggccagtaggaagagggagcccagag

SEQ ID NO: 77720 - DNA, 20 bp, Artificial Sequence
  primer
ctctgtcccaggtccctgac

SEQ ID NO: 77721 - DNA, 20 bp, Artificial Sequence
  primer
catagtccatggtgttggcg

SEQ ID NO: 77722 - DNA, 21 bp, Artificial Sequence
  primer
ctatgtgcacaggccacattc

SEQ ID NO: 77723 - DNA, 21 bp, Artificial Sequence
  primer
aacccttctcttgccttccac

SEQ ID NO: 77724 - DNA, 37 bp, Artificial Sequence
  primer
gtaaaacgacggccagtaaattgatgcagccaacagc

SEQ ID NO: 77725 - DNA, 21 bp, Artificial Sequence
  primer
ggtgagccacacctctgctac

SEQ ID NO: 77726 - DNA, 38 bp, Artificial Sequence
  primer
gtaaaacgacggccagtacatggatagaaccagcccag

SEQ ID NO: 77727 - DNA, 38 bp, Artificial Sequence
  primer
gtaaaacgacggccagtatggtgaggaagatcagggtc

SEQ ID NO: 77728 - DNA, 39 bp, Artificial Sequence
  primer
gtaaaacgacggccagtcatcaaaggaagcaggactgag

SEQ ID NO: 77729 - DNA, 19 bp, Artificial Sequence
  primer
ctcccacaatgccaccttc

SEQ ID NO: 77730 - DNA, 39 bp, Artificial Sequence
  primer
gtaaaacgacggccagtccaggagtttccactcctcaag

SEQ ID NO: 77731 - DNA, 38 bp, Artificial Sequence
  primer
gtaaaacgacggccagtagatgctaccaccaggagagg

SEQ ID NO: 77732 - DNA, 21 bp, Artificial Sequence
  primer
caggtcaagggagagagatgg

SEQ ID NO: 77733 - DNA, 21 bp, Artificial Sequence
  primer
cagaaattgggctaatgctcc

SEQ ID NO: 77734 - DNA, 21 bp, Artificial Sequence
  primer
gctccaggtaagtggatgagg

SEQ ID NO: 77735 - DNA, 35 bp, Artificial Sequence
  primer
gtaaaacgacggccagtgagagcccgtctgggatg

SEQ ID NO: 77736 - DNA, 21 bp, Artificial Sequence
  primer
tcctggtacctgtgtgcagtg

SEQ ID NO: 77737 - DNA, 21 bp, Artificial Sequence
  primer
ctgcttccttccctaagtccc

SEQ ID NO: 77738 - DNA, 20 bp, Artificial Sequence
  primer
aggagccaggactaacagcc

SEQ ID NO: 77739 - DNA, 21 bp, Artificial Sequence
  primer
ctacagcaatcacgctgcttc

SEQ ID NO: 77740 - DNA, 38 bp, Artificial Sequence
  primer
gtaaaacgacggccagtttaaccgggtcttgattaggc

SEQ ID NO: 77741 - DNA, 38 bp, Artificial Sequence
  primer
gtaaaacgacggccagtgttccagggccacaaataatg

SEQ ID NO: 77742 - DNA, 21 bp, Artificial Sequence
  primer
ccatggtgttgtttccatgat

SEQ ID NO: 77743 - DNA, 38 bp, Artificial Sequence
  primer
gtaaaacgacggccagtcaaggtgaagcaatcctcctg

SEQ ID NO: 77744 - DNA, 20 bp, Artificial Sequence
  primer
ggcccttggaaagctgttag

SEQ ID NO: 77745 - DNA, 21 bp, Artificial Sequence
  primer
cctggagctcaggaatgtgac

SEQ ID NO: 77746 - DNA, 21 bp, Artificial Sequence
  primer
ccaccaacctgtgtctcattc

SEQ ID NO: 77747 - DNA, 21 bp, Artificial Sequence
  primer
ctcagggaatggaaggaactg

SEQ ID NO: 77748 - DNA, 38 bp, Artificial Sequence
  primer
gtaaaacgacggccagtcacagtgaccatactcggcag

SEQ ID NO: 77749 - DNA, 38 bp, Artificial Sequence
  primer
gtaaaacgacggccagtacctgatgccaagttccattc

SEQ ID NO: 77750 - DNA, 38 bp, Artificial Sequence
  primer
gtaaaacgacggccagtagtctgtggtctgcagggaag

SEQ ID NO: 77751 - DNA, 21 bp, Artificial Sequence
  primer
atgtggttgtcaggttccctc

SEQ ID NO: 77752 - DNA, 19 bp, Artificial Sequence
  primer
catcagctccagcctccag

SEQ ID NO: 77753 - DNA, 21 bp, Artificial Sequence
  primer
tctcccagaatcctctctccc

SEQ ID NO: 77754 - DNA, 38 bp, Artificial Sequence
  primer
gtaaaacgacggccagttacccatcctctctacccagg

SEQ ID NO: 77755 - DNA, 19 bp, Artificial Sequence
  primer
aactggtcctccgcagttg

SEQ ID NO: 77756 - DNA, 38 bp, Artificial Sequence
  primer
gtaaaacgacggccagttacctccatatcagtgccagg

SEQ ID NO: 77757 - DNA, 38 bp, Artificial Sequence
  primer
gtaaaacgacggccagtacacgtggtcaagcaattagg

SEQ ID NO: 77758 - DNA, 26 bp, Artificial Sequence
  primer
gcatatactcaatgatctgtcactgg

SEQ ID NO: 77759 - DNA, 22 bp, Artificial Sequence
  primer
aatgggcagagtcatgtattga

SEQ ID NO: 77760 - DNA, 21 bp, Artificial Sequence
  primer
acacacgggagccttacactc

SEQ ID NO: 77761 - DNA, 19 bp, Artificial Sequence
  primer
aggtccttacccgagcgag

SEQ ID NO: 77762 - DNA, 38 bp, Artificial Sequence
  primer
gtaaaacgacggccagtcaccctcatttcccattcttc

SEQ ID NO: 77763 - DNA, 36 bp, Artificial Sequence
  primer
gtaaaacgacggccagtctagaaggagcgtgcctgg

SEQ ID NO: 77764 - DNA, 38 bp, Artificial Sequence
  primer
gtaaaacgacggccagtaatgaaagtgacagccttgcc

SEQ ID NO: 77765 - DNA, 21 bp, Artificial Sequence
  primer
ggttatgcacttaacgggagc

SEQ ID NO: 77766 - DNA, 21 bp, Artificial Sequence
  primer
ccctaactcgccttcccttag

SEQ ID NO: 77767 - DNA, 20 bp, Artificial Sequence
  primer
atcctgtgggtgggacattc

SEQ ID NO: 77768 - DNA, 21 bp, Artificial Sequence
  primer
gcgtacacgttgttgttgacc

SEQ ID NO: 77769 - DNA, 37 bp, Artificial Sequence
  primer
gtaaaacgacggccagttgccgtagaggcatgagaag

SEQ ID NO: 77770 - DNA, 38 bp, Artificial Sequence
  primer
gtaaaacgacggccagtatcactagtccacgctgctcc

SEQ ID NO: 77771 - DNA, 21 bp, Artificial Sequence
  primer
ggtgctcacagggttaggaac

SEQ ID NO: 77772 - DNA, 21 bp, Artificial Sequence
  primer
ctggtagctgtccaggctgag

SEQ ID NO: 77773 - DNA, 21 bp, Artificial Sequence
  primer
ctaattgaatccaaggcaggc

SEQ ID NO: 77774 - DNA, 20 bp, Artificial Sequence
  primer
agtcccagaagctaccaccc

SEQ ID NO: 77775 - DNA, 21 bp, Artificial Sequence
  primer
aaatcacaggcaagcagaaag

SEQ ID NO: 77776 - DNA, 44 bp, Artificial Sequence
  primer
gtaaaacgacggccagtcacaacctgatttatatttgagacaag

SEQ ID NO: 77777 - DNA, 38 bp, Artificial Sequence
  primer
gtaaaacgacggccagttttgcctagaggtgaagggtc

SEQ ID NO: 77778 - DNA, 22 bp, Artificial Sequence
  primer
gcttcagcttgactgaaacatc

SEQ ID NO: 77779 - DNA, 38 bp, Artificial Sequence
  primer
gtaaaacgacggccagttccaaacactgggatctcaac

SEQ ID NO: 77780 - DNA, 22 bp, Artificial Sequence
  primer
tttgtgttcaccgatgaatctt

SEQ ID NO: 77781 - DNA, 46 bp, Artificial Sequence
  primer
gtaaaacgacggccagtaaacctaacctatctcacaatcaataatc

SEQ ID NO: 77782 - DNA, 20 bp, Artificial Sequence
  primer
agtcccagaagctaccaccc

SEQ ID NO: 77783 - DNA, 19 bp, Artificial Sequence
  primer
agtcctaggcccaagggtg

SEQ ID NO: 77784 - DNA, 43 bp, Artificial Sequence
  primer
gtaaaacgacggccagttctttatgcttactacatcatctggg

SEQ ID NO: 77785 - DNA, 21 bp, Artificial Sequence
  primer
tttaaagtcgtcatctcgggc

SEQ ID NO: 77786 - DNA, 21 bp, Artificial Sequence
  primer
aggactcaagcctcaagcaag

SEQ ID NO: 77787 - DNA, 21 bp, Artificial Sequence
  primer
ccctttgtctcattgcatttg

SEQ ID NO: 77788 - DNA, 41 bp, Artificial Sequence
  primer
gtaaaacgacggccagtttctaggattaatggcagtgtttg

SEQ ID NO: 77789 - DNA, 21 bp, Artificial Sequence
  primer
tttaaagtcgtcatctcgggc

SEQ ID NO: 77790 - DNA, 38 bp, Artificial Sequence
  primer
gtaaaacgacggccagtaggactcaagcctcaagcaag

SEQ ID NO: 77791 - DNA, 38 bp, Artificial Sequence
  primer
gtaaaacgacggccagtctctcacacccaatttcaagc

SEQ ID NO: 77792 - DNA, 24 bp, Artificial Sequence
  primer
aaagccacgaagtgagttacaagt

SEQ ID NO: 77793 - DNA, 41 bp, Artificial Sequence
  primer
gtaaaacgacggccagtcgatgaacaaatatgctgtctgag

SEQ ID NO: 77794 - DNA, 41 bp, Artificial Sequence
  primer
gtaaaacgacggccagtgctatttacagtcatgaaagcagg

SEQ ID NO: 77795 - DNA, 21 bp, Artificial Sequence
  primer
cccttgtggtgtcattcattg

SEQ ID NO: 77796 - DNA, 21 bp, Artificial Sequence
  primer
tctgtgagctaggaagccgac

SEQ ID NO: 77797 - DNA, 21 bp, Artificial Sequence
  primer
tgccattgttactttccatgc

SEQ ID NO: 77798 - DNA, 43 bp, Artificial Sequence
  primer
gtaaaacgacggccagttcctgaataaacaggagggtatattg

SEQ ID NO: 77799 - DNA, 21 bp, Artificial Sequence
  primer
ggcttgtggtgataaagtggg

SEQ ID NO: 77800 - DNA, 21 bp, Artificial Sequence
  primer
gtttccttagttgcagccacc

SEQ ID NO: 77801 - DNA, 21 bp, Artificial Sequence
  primer
gctactctcgtggatctgagc

SEQ ID NO: 77802 - DNA, 21 bp, Artificial Sequence
  primer
acaatgactgcactgcctctc

SEQ ID NO: 77803 - DNA, 22 bp, Artificial Sequence
  primer
ccatagaacaagagatgctggg

SEQ ID NO: 77804 - DNA, 21 bp, Artificial Sequence
  primer
aagctcttcaggcagatgtgg

SEQ ID NO: 77805 - DNA, 21 bp, Artificial Sequence
  primer
tttgaccttcacatccacagg

SEQ ID NO: 77806 - DNA, 21 bp, Artificial Sequence
  primer
tgaaggatcccgtctcatctc

SEQ ID NO: 77807 - DNA, 38 bp, Artificial Sequence
  primer
gtaaaacgacggccagtaagctcttcaggcagatgtgg

SEQ ID NO: 77808 - DNA, 22 bp, Artificial Sequence
  primer
ttcatagttccgtgtgttcgtg

SEQ ID NO: 77809 - DNA, 37 bp, Artificial Sequence
  primer
gtaaaacgacggccagtcatcgcttaccaagcagtgg

SEQ ID NO: 77810 - DNA, 40 bp, Artificial Sequence
  primer
gtaaaacgacggccagtgcaaatcttcacaaaggagagag

SEQ ID NO: 77811 - DNA, 22 bp, Artificial Sequence
  primer
ttcatagttccgtgtgttcgtg

SEQ ID NO: 77812 - DNA, 37 bp, Artificial Sequence; identical to SEQ ID NO: 77809
  primer

SEQ ID NO: 77813 - DNA, 21 bp, Artificial Sequence
  primer
gaccttcaagcatgtggtgtg

SEQ ID NO: 77814 - DNA, 38 bp, Artificial Sequence
  primer
gtaaaacgacggccagttcttgggttgagtcaaagctg

SEQ ID NO: 77815 - DNA, 38 bp, Artificial Sequence
  primer
gtaaaacgacggccagttcagactggaggagggaagag

SEQ ID NO: 77816 - DNA, 37 bp, Artificial Sequence
  primer
gtaaaacgacggccagtttcacatagctgcgggtctc

SEQ ID NO: 77817 - DNA, 38 bp, Artificial Sequence
  primer
gtaaaacgacggccagtttgttgtgacatgttgcttcg

SEQ ID NO: 77818 - DNA, 37 bp, Artificial Sequence
  primer
gtaaaacgacggccagtactgaaactgcccaaccctc

SEQ ID NO: 77819 - DNA, 26 bp, Artificial Sequence
  primer
catttccttcagttcagaatgtagac

SEQ ID NO: 77820 - DNA, 22 bp, Artificial Sequence
  primer
ccatcactaaagcaaacaagcc

SEQ ID NO: 77821 - DNA, 18 bp, Artificial Sequence
  primer
gcatttgcaggccaggtc

SEQ ID NO: 77822 - DNA, 21 bp, Artificial Sequence
  primer
tccattgcccacactaatttc

SEQ ID NO: 77823 - DNA, 21 bp, Artificial Sequence
  primer
tcccagatttggtgatgtcag

SEQ ID NO: 77824 - DNA, 23 bp, Artificial Sequence
  primer
ctcaaatttcagtgctgacacag

SEQ ID NO: 77825 - DNA, 38 bp, Artificial Sequence
  primer
gtaaaacgacggccagtaagaccaaagggtccacttcc

SEQ ID NO: 77826 - DNA, 41 bp, Artificial Sequence
  primer
gtaaaacgacggccagtcactgcagttggttacattattcc

SEQ ID NO: 77827 - DNA, 26 bp, Artificial Sequence
  primer
gggaagaagtttataactccctactg

SEQ ID NO: 77828 - DNA, 39 bp, Artificial Sequence
  primer
gtaaaacgacggccagttcccatgttatacaccctctgg

SEQ ID NO: 77829 - DNA, 25 bp, Artificial Sequence
  primer
tttcctacaacaaattcctctttca

SEQ ID NO: 77830 - DNA, 21 bp, Artificial Sequence
  primer
agatctggaagccacagttcc

SEQ ID NO: 77831 - DNA, 21 bp, Artificial Sequence
  primer
aagtgccaaagccttaagagg

SEQ ID NO: 77832 - DNA, 20 bp, Artificial Sequence
  primer
aatgtccacatccctgcttg

SEQ ID NO: 77833 - DNA, 38 bp, Artificial Sequence
  primer
gtaaaacgacggccagtccctcgtgtcattcttggaac

SEQ ID NO: 77834 - DNA, 21 bp, Artificial Sequence
  primer
gagccaagggctaaacacaag

SEQ ID NO: 77835 - DNA, 21 bp, Artificial Sequence
  primer
aaactcaatgcttccagagcc

SEQ ID NO: 77836 - DNA, 37 bp, Artificial Sequence
  primer
gtaaaacgacggccagtctggcctttgcaacctttag

SEQ ID NO: 77837 - DNA, 21 bp, Artificial Sequence
  primer
gaaagtcaggcaacaccattg

SEQ ID NO: 77838 - DNA, 37 bp, Artificial Sequence
  primer
gtaaaacgacggccagtctcactgtgctggaggaagg

SEQ ID NO: 77839 - DNA, 38 bp, Artificial Sequence
  primer
gtaaaacgacggccagtaagcaggaggcttatctgtcg

SEQ ID NO: 77840 - DNA, 38 bp, Artificial Sequence
  primer
gtaaaacgacggccagtggtcccacccacttgtcttag

SEQ ID NO: 77841 - DNA, 39 bp, Artificial Sequence
  primer
gtaaaacgacggccagtcagctagaacaagacaccaggg

SEQ ID NO: 77842 - DNA, 38 bp, Artificial Sequence
  primer
gtaaaacgacggccagtatgagagcagatgggatggac

SEQ ID NO: 77843 - DNA, 21 bp, Artificial Sequence
  primer
acctctttccactcctctggg

SEQ ID NO: 77844 - DNA, 21 bp, Artificial Sequence
  primer
aagaagggaggtttcctgctg

SEQ ID NO: 77845 - DNA, 21 bp, Artificial Sequence
  primer
gagaacaagctgagtcctggg

SEQ ID NO: 77846 - DNA, 21 bp, Artificial Sequence
  primer
ggatccctgtgctgatactcc

SEQ ID NO: 77847 - DNA, 21 bp, Artificial Sequence
  primer
ctggttgccatcgtatgtgtc

SEQ ID NO: 77848 - DNA, 38 bp, Artificial Sequence
  primer
gtaaaacgacggccagtgagtcaggaggactgggtttg

SEQ ID NO: 77849 - DNA, 37 bp, Artificial Sequence
  primer
gtaaaacgacggccagtcaaagggactcctcctgtcc

SEQ ID NO: 77850 - DNA, 20 bp, Artificial Sequence
  primer
caaagctgaggctgttgagg

SEQ ID NO: 77851 - DNA, 20 bp, Artificial Sequence
  primer
ctccatctttgcctcacacc

SEQ ID NO: 77852 - DNA, 18 bp, Artificial Sequence
  primer
ggactcaagcgatctgcc

SEQ ID NO: 77853 - DNA, 38 bp, Artificial Sequence
  primer
gtaaaacgacggccagttttccacaggcttgagttctg

SEQ ID NO: 77854 - DNA, 21 bp, Artificial Sequence
  primer
tgctatgtgaaaccatttggc

SEQ ID NO: 77855 - DNA, 21 bp, Artificial Sequence
  primer
aactgccatacccaaacactg

SEQ ID NO: 77856 - DNA, 39 bp, Artificial Sequence
  primer
gtaaaacgacggccagttcttatctacctggatgcgacc

SEQ ID NO: 77857 - DNA, 22 bp, Artificial Sequence
  primer
ttagactcacgaaggaacaggg

SEQ ID NO: 77858 - DNA, 47 bp, Artificial Sequence
  primer
gtaaaacgacggccagtctctcctactgtaattctctagtaaccaac

SEQ ID NO: 77859 - DNA, 42 bp, Artificial Sequence
  primer
gtaaaacgacggccagttttcataacacaaataagaactgcc

SEQ ID NO: 77860 - DNA, 25 bp, Artificial Sequence
  primer
ttacaggagttagaagggataccag

SEQ ID NO: 77861 - DNA, 21 bp, Artificial Sequence
  primer
agggacaacaggtacattccc

SEQ ID NO: 77862 - DNA, 42 bp, Artificial Sequence
  primer
gtaaaacgacggccagttctgtaatgtgattcaatgttctgc

SEQ ID NO: 77863 - DNA, 38 bp, Artificial Sequence
  primer
gtaaaacgacggccagttacccattgggctaaagcagt

SEQ ID NO: 77864 - DNA, 38 bp, Artificial Sequence
  primer
gtaaaacgacggccagtttcttggaaattgagaccgtg

SEQ ID NO: 77865 - DNA, 40 bp, Artificial Sequence
  primer
gtaaaacgacggccagttctatgtaagtcaacccagagcc

SEQ ID NO: 77866 - DNA, 40 bp, Artificial Sequence
  primer
gtaaaacgacggccagtcagcaaccaactcaatcttcatc

SEQ ID NO: 77867 - DNA, 19 bp, Artificial Sequence
  primer
tgaggcaagagcagcaaac

SEQ ID NO: 77868 - DNA, 40 bp, Artificial Sequence
  primer
gtaaaacgacggccagttgaataggatgacaagaggttcc

SEQ ID NO: 77869 - DNA, 22 bp, Artificial Sequence
  primer
caaatgtgatgtgccatacagc

SEQ ID NO: 77870 - DNA, 39 bp, Artificial Sequence
  primer
gtaaaacgacggccagtacagcatgaattaacaccttgg

SEQ ID NO: 77871 - DNA, 25 bp, Artificial Sequence
  primer
tgtggaaattcacaataccttcttt

SEQ ID NO: 77872 - DNA, 42 bp, Artificial Sequence
  primer
gtaaaacgacggccagttgccttaggaacagatgtagttgag

SEQ ID NO: 77873 - DNA, 23 bp, Artificial Sequence
  primer
tcactgaaatgtcactatgtggg

SEQ ID NO: 77874 - DNA, 21 bp, Artificial Sequence
  primer
aaactggaataaacgcaaggg

SEQ ID NO: 77875 - DNA, 42 bp, Artificial Sequence
  primer
gtaaaacgacggccagtgaccctgccaatatatttagaactg

SEQ ID NO: 77876 - DNA, 22 bp, Artificial Sequence
  primer
aaatcacattgtgccctagaaa

SEQ ID NO: 77877 - DNA, 38 bp, Artificial Sequence
  primer
gtaaaacgacggccagtcggaagttaaacaagcccatc

SEQ ID NO: 77878 - DNA, 39 bp, Artificial Sequence
  primer
gtaaaacgacggccagtgctggaccagtatcatcctttc

SEQ ID NO: 77879 - DNA, 21 bp, Artificial Sequence
  primer
aatagtgtggtaaggtggcgg

SEQ ID NO: 77880 - DNA, 41 bp, Artificial Sequence
  primer
gtaaaacgacggccagttgcttgtagcaataagaacctaaa

SEQ ID NO: 77881 - DNA, 42 bp, Artificial Sequence
  primer
gtaaaacgacggccagtccaattctcagaagtttaattggtg

SEQ ID NO: 77882 - DNA, 38 bp, Artificial Sequence
  primer
gtaaaacgacggccagtagtcaatgcgtctgaacactg

SEQ ID NO: 77883 - DNA, 40 bp, Artificial Sequence
  primer
gtaaaacgacggccagtcctagaatctccaaagttctgcc

SEQ ID NO: 77884 - DNA, 41 bp, Artificial Sequence
  primer
gtaaaacgacggccagttcaatgctgcgattatcctatttc

SEQ ID NO: 77885 - DNA, 40 bp, Artificial Sequence
  primer
gtaaaacgacggccagtaagggctttacaaatggtttctg

SEQ ID NO: 77886 - DNA, 39 bp, Artificial Sequence
  primer
gtaaaacgacggccagtccagttgtttctcaacaatgct

SEQ ID NO: 77887 - DNA, 21 bp, Artificial Sequence
  primer
tctcactctgggaaacaggag

SEQ ID NO: 77888 - DNA, 38 bp, Artificial Sequence
  primer
gtaaaacgacggccagttttaactcaaggtgagcctgg

SEQ ID NO: 77889 - DNA, 21 bp, Artificial Sequence
  primer
aatgacacgggcacattagtc

SEQ ID NO: 77890 - DNA, 21 bp, Artificial Sequence
  primer
agatggagaccacggtgaaac

SEQ ID NO: 77891 - DNA, 21 bp, Artificial Sequence
  primer
caatttcctggatggttgagg

SEQ ID NO: 77892 - DNA, 22 bp, Artificial Sequence
  primer
gggcttagcgttgaaggtactc

SEQ ID NO: 77893 - DNA, 38 bp, Artificial Sequence
  primer
gtaaaacgacggccagttcttacaccaagcattccagc

SEQ ID NO: 77894 - DNA, 23 bp, Artificial Sequence
  primer
gattaaatgaccagcctccattc

SEQ ID NO: 77895 - DNA, 21 bp, Artificial Sequence
  primer
aacagctgctggaatctaggg

SEQ ID NO: 77896 - DNA, 21 bp, Artificial Sequence
  primer
taatgcccaagtctgaaaccc

SEQ ID NO: 77897 - DNA, 21 bp, Artificial Sequence
  primer
atagcccaccttcttgtgagg

SEQ ID NO: 77898 - DNA, 21 bp, Artificial Sequence
  primer
acaccaccattaaggccaaag

SEQ ID NO: 77899 - DNA, 21 bp, Artificial Sequence
  primer
ggaacaaaggaagtgaggagg

SEQ ID NO: 77900 - DNA, 38 bp, Artificial Sequence
  primer
gtaaaacgacggccagtcaaaccaatgtggatgtgttg

SEQ ID NO: 77901 - DNA, 38 bp, Artificial Sequence
  primer
gtaaaacgacggccagtacaaaggaagtaagcaagccg

SEQ ID NO: 77902 - DNA, 22 bp, Artificial Sequence
  primer
aaattctgttgcagctttcagc

SEQ ID NO: 77903 - DNA, 21 bp, Artificial Sequence
  primer
gcttgtcctgggcactttatc

SEQ ID NO: 77904 - DNA, 38 bp, Artificial Sequence
  primer
gtaaaacgacggccagtgccctaatacaagaagcggtg

SEQ ID NO: 77905 - DNA, 20 bp, Artificial Sequence
  primer
gcagcaaagaaacatttcgc

SEQ ID NO: 77906 - DNA, 23 bp, Artificial Sequence
  primer
tcctcctttatgattcacaccac

SEQ ID NO: 77907 - DNA, 22 bp, Artificial Sequence
  primer
tccttccagtggctataggttc

SEQ ID NO: 77908 - DNA, 21 bp, Artificial Sequence
  primer
cccatgggaaacaacaatacc

SEQ ID NO: 77909 - DNA, 21 bp, Artificial Sequence
  primer
atggcacaaacttgacattgc

SEQ ID NO: 77910 - DNA, 22 bp, Artificial Sequence
  primer
tctgatctgctagctttccagc

SEQ ID NO: 77911 - DNA, 21 bp, Artificial Sequence
  primer
acaatagggaccgacccactc

SEQ ID NO: 77912 - DNA, 20 bp, Artificial Sequence
  primer
tgtctgcacggacaagacag

SEQ ID NO: 77913 - DNA, 38 bp, Artificial Sequence
  primer
gtaaaacgacggccagtcttctgcagctccagcttctc

SEQ ID NO: 77914 - DNA, 22 bp, Artificial Sequence
  primer
aaccacacatgaacccaaattc

SEQ ID NO: 77915 - DNA, 21 bp, Artificial Sequence
  primer
cacatgcaccaaccaactacc

SEQ ID NO: 77916 - DNA, 21 bp, Artificial Sequence
  primer
tacttccgatgtcaggtctgg

SEQ ID NO: 77917 - DNA, 21 bp, Artificial Sequence
  primer
aatgcacaggcctaggaacag

SEQ ID NO: 77918 - DNA, 21 bp, Artificial Sequence
  primer
actgagtgcctccaatccatc

SEQ ID NO: 77919 - DNA, 21 bp, Artificial Sequence
  primer
aacactggaaacctaggcagc

SEQ ID NO: 77920 - DNA, 38 bp, Artificial Sequence
  primer
gtaaaacgacggccagtaagcaaccaaaggcttctgac

SEQ ID NO: 77921 - DNA, 21 bp, Artificial Sequence
  primer
aaactgaggaaatgaccctgc

SEQ ID NO: 77922 - DNA, 21 bp, Artificial Sequence
  primer
ccaaacattaggtccaatgcc

SEQ ID NO: 77923 - DNA, 21 bp, Artificial Sequence
  primer
tgtatggctgatgttgaagcc

SEQ ID NO: 77924 - DNA, 21 bp, Artificial Sequence
  primer
caattcctggcagacactttg

SEQ ID NO: 77925 - DNA, 21 bp, Artificial Sequence
  primer
tgtttgtctcacctgcctcac

SEQ ID NO: 77926 - DNA, 21 bp, Artificial Sequence
  primer
ctcaaacacttggctctggtg

SEQ ID NO: 77927 - DNA, 21 bp, Artificial Sequence
  primer
gagggtgaagacctcaacacg

SEQ ID NO: 77928 - DNA, 21 bp, Artificial Sequence
  primer
gacaagtgacgatgggagatg

SEQ ID NO: 77929 - DNA, 21 bp, Artificial Sequence
  primer
agtgtcatcccgctgacaaac

SEQ ID NO: 77930 - DNA, 21 bp, Artificial Sequence
  primer
gatgggtttgagggaggtatg

SEQ ID NO: 77931 - DNA, 37 bp, Artificial Sequence
  primer
gtaaaacgacggccagtccattgctggaaaggacatc

SEQ ID NO: 77932 - DNA, 21 bp, Artificial Sequence
  primer
ttactgagactcacctcccgc

SEQ ID NO: 77933 - DNA, 37 bp, Artificial Sequence
  primer
gtaaaacgacggccagtacttcctcctctcgctccag

SEQ ID NO: 77934 - DNA, 20 bp, Artificial Sequence
  primer
ggacagtgtgcccttgtacc

SEQ ID NO: 77935 - DNA, 38 bp, Artificial Sequence
  primer
gtaaaacgacggccagtgagtgtagttgtgggcaccag

SEQ ID NO: 77936 - DNA, 21 bp, Artificial Sequence
  primer
ggaaaggaagtggaggtaggc

SEQ ID NO: 77937 - DNA, 21 bp, Artificial Sequence
  primer
ccctcacaagcagctgtctac

SEQ ID NO: 77938 - DNA, 19 bp, Artificial Sequence
  primer
acaccactggctctccagg

SEQ ID NO: 77939 - DNA, 21 bp, Artificial Sequence
  primer
cgaggatcagggttcctactg

SEQ ID NO: 77940 - DNA, 21 bp, Artificial Sequence
  primer
acacagaggaatcagcagtgg

SEQ ID NO: 77941 - DNA, 38 bp, Artificial Sequence
  primer
gtaaaacgacggccagtatggtcatccgttggactttc

SEQ ID NO: 77942 - DNA, 42 bp, Artificial Sequence
  primer
gtaaaacgacggccagttctgtgcactgaaatttataattgg

SEQ ID NO: 77943 - DNA, 38 bp, Artificial Sequence
  primer
gtaaaacgacggccagttgcgagtaagaagtccgtttg

SEQ ID NO: 77944 - DNA, 38 bp, Artificial Sequence
  primer
gtaaaacgacggccagttgagactccatcgtgttccag

SEQ ID NO: 77945 - DNA, 21 bp, Artificial Sequence
  primer
aaaggcaaatgtaggcaacac

SEQ ID NO: 77946 - DNA, 38 bp, Artificial Sequence
  primer
gtaaaacgacggccagtagcgcagtgtctccaccttac

SEQ ID NO: 77947 - DNA, 37 bp, Artificial Sequence
  primer
gtaaaacgacggccagtggacgaaggcaagaataccc

SEQ ID NO: 77948 - DNA, 20 bp, Artificial Sequence
  primer
ggatgtactccacggctgag

SEQ ID NO: 77949 - DNA, 40 bp, Artificial Sequence
  primer
gtaaaacgacggccagtggaaatgaagagtgagcgaaatc

SEQ ID NO: 77950 - DNA, 38 bp, Artificial Sequence
  primer
gtaaaacgacggccagtctgaacatagggtcagcatgg

SEQ ID NO: 77951 - DNA, 21 bp, Artificial Sequence
  primer
catttgagctatttcctgccc

SEQ ID NO: 77952 - DNA, 21 bp, Artificial Sequence
  primer
tcctgcaggtgcttgatgtag

SEQ ID NO: 77953 - DNA, 38 bp, Artificial Sequence
  primer
gtaaaacgacggccagttgcaggcacgtaaccaataag

SEQ ID NO: 77954 - DNA, 22 bp, Artificial Sequence
  primer
aagataaccctctctccgttcg

SEQ ID NO: 77955 - DNA, 39 bp, Artificial Sequence
  primer
gtaaaacgacggccagtcctgtgacaaattcaagaaccc

SEQ ID NO: 77956 - DNA, 21 bp, Artificial Sequence
  primer
cttcttccgcacatccatttc

SEQ ID NO: 77957 - DNA, 38 bp, Artificial Sequence
  primer
gtaaaacgacggccagttcgaaggtttctttccctttg

SEQ ID NO: 77958 - DNA, 21 bp, Artificial Sequence
  primer
gctgagactcaactgtcaccc

SEQ ID NO: 77959 - DNA, 21 bp, Artificial Sequence
  primer
ctagtggctgaattggctcag

SEQ ID NO: 77960 - DNA, 38 bp, Artificial Sequence
  primer
gtaaaacgacggccagttgcttcttcctcttcttggtg

SEQ ID NO: 77961 - DNA, 36 bp, Artificial Sequence
  primer
gtaaaacgacggccagtgggtgtcaccttctggtgg

SEQ ID NO: 77962 - DNA, 40 bp, Artificial Sequence
  primer
gtaaaacgacggccagttgcagcagaagcagttctttaac

SEQ ID NO: 77963 - DNA, 38 bp, Artificial Sequence
  primer
gtaaaacgacggccagtcccagttggcataaggacctc

SEQ ID NO: 77964 - DNA, 44 bp, Artificial Sequence
  primer
gtaaaacgacggccagtttgactatgtacttacggaatttcagg

SEQ ID NO: 77965 - DNA, 18 bp, Artificial Sequence
  primer
gggagcggttctctgagg

SEQ ID NO: 77966 - DNA, 21 bp, Artificial Sequence
  primer
agtccctggagtagctgggtc

SEQ ID NO: 77967 - DNA, 21 bp, Artificial Sequence
  primer
aatttgaatggctgaactccc

SEQ ID NO: 77968 - DNA, 21 bp, Artificial Sequence
  primer
aagtcctctagatgggccctg

SEQ ID NO: 77969 - DNA, 21 bp, Artificial Sequence
  primer
ccaataaagggactccaaccc

SEQ ID NO: 77970 - DNA, 21 bp, Artificial Sequence
  primer
aggacagcgtgcagagagaag

SEQ ID NO: 77971 - DNA, 38 bp, Artificial Sequence
  primer
gtaaaacgacggccagtcatctttcttcccacattgcc

SEQ ID NO: 77972 - DNA, 21 bp, Artificial Sequence
  primer
tctcacacacatccacacaca

SEQ ID NO: 77973 - DNA, 20 bp, Artificial Sequence
  primer
gcagtagttgtcggcgtcag

SEQ ID NO: 77974 - DNA, 38 bp, Artificial Sequence
  primer
gtaaaacgacggccagttttctgaggagagagaaggcg

SEQ ID NO: 77975 - DNA, 37 bp, Artificial Sequence
  primer
gtaaaacgacggccagtctccagactcctcagcccag

SEQ ID NO: 77976 - DNA, 38 bp, Artificial Sequence
  primer
gtaaaacgacggccagtcggaacatcaccctatccttc

SEQ ID NO: 77977 - DNA, 21 bp, Artificial Sequence
  primer
cctcaaagggacagagcaatc

SEQ ID NO: 77978 - DNA, 21 bp, Artificial Sequence
  primer
accttgtcaggtggtagtggg

SEQ ID NO: 77979 - DNA, 21 bp, Artificial Sequence
  primer
acctctccacctggcactaac

SEQ ID NO: 77980 - DNA, 21 bp, Artificial Sequence
  primer
caccgcacacgtacacactac

SEQ ID NO: 77981 - DNA, 20 bp, Artificial Sequence
  primer
cttcccggagtgagagaacc

SEQ ID NO: 77982 - DNA, 38 bp, Artificial Sequence
  primer
gtaaaacgacggccagtaataagcctgatccagcctcc

SEQ ID NO: 77983 - DNA, 38 bp, Artificial Sequence
  primer
gtaaaacgacggccagtacgagtcagggtagcttggag

SEQ ID NO: 77984 - DNA, 22 bp, Artificial Sequence
  primer
ccagggtcagggactcttaaac

SEQ ID NO: 77985 - DNA, 38 bp, Artificial Sequence
  primer
gtaaaacgacggccagttttcatccgtcatctttccac

SEQ ID NO: 77986 - DNA, 21 bp, Artificial Sequence
  primer
acatctttgacaagccttggg

SEQ ID NO: 77987 - DNA, 37 bp, Artificial Sequence
  primer
gtaaaacgacggccagtgctgtagtgccagttcccag

SEQ ID NO: 77988 - DNA, 38 bp, Artificial Sequence
  primer
gtaaaacgacggccagtttcggctttaaggtttatggc

SEQ ID NO: 77989 - DNA, 38 bp, Artificial Sequence
  primer
gtaaaacgacggccagttctcctactgcactgaatggg

SEQ ID NO: 77990 - DNA, 38 bp, Artificial Sequence
  primer
gtaaaacgacggccagtccaactgacctatgaccaacg

SEQ ID NO: 77991 - DNA, 38 bp, Artificial Sequence
  primer
gtaaaacgacggccagtcaatcggcgtttaaggaagtc

SEQ ID NO: 77992 - DNA, 21 bp, Artificial Sequence
  primer
tggagccactgacagtacagg

SEQ ID NO: 77993 - DNA, 39 bp, Artificial Sequence
  primer
gtaaaacgacggccagttggttccatctcaaggtcactc

SEQ ID NO: 77994 - DNA, 38 bp, Artificial Sequence
  primer
gtaaaacgacggccagttctgtcctaatgctgacccag

SEQ ID NO: 77995 - DNA, 38 bp, Artificial Sequence
  primer
gtaaaacgacggccagtcaaatatggcactgaactggg

SEQ ID NO: 77996 - DNA, 38 bp, Artificial Sequence
  primer
gtaaaacgacggccagttgattcctgcgcttacatttg

SEQ ID NO: 77997 - DNA, 38 bp, Artificial Sequence
  primer
gtaaaacgacggccagtgatccgaatttcacttaggcg

SEQ ID NO: 77998 - DNA, 21 bp, Artificial Sequence
  primer
ctatgggagcagctgtaaggg

SEQ ID NO: 77999 - DNA, 38 bp, Artificial Sequence
  primer
gtaaaacgacggccagtctggttgtaagaaaggcctcc

SEQ ID NO: 78000 - DNA, 21 bp, Artificial Sequence
  primer
aaaggtgtctgcaatcccaag

SEQ ID NO: 78001 - DNA, 22 bp, Artificial Sequence
  primer
aaccctcttacctgccaaagtc

SEQ ID NO: 78002 - DNA, 27 bp, Artificial Sequence
  primer
tttactttaattcagctttgtaaaggg

SEQ ID NO: 78003 - DNA, 21 bp, Artificial Sequence
  primer
actgtgtcaggactgaggtgc

SEQ ID NO: 78004 - DNA, 39 bp, Artificial Sequence
  primer
gtaaaacgacggccagttctgttcttccaatagccaacc

SEQ ID NO: 78005 - DNA, 38 bp, Artificial Sequence
  primer
gtaaaacgacggccagtccactgcacctagcctctctg

SEQ ID NO: 78006 - DNA, 38 bp, Artificial Sequence
  primer
gtaaaacgacggccagtgacacaaagtttgagggaggc

SEQ ID NO: 78007 - DNA, 38 bp, Artificial Sequence
  primer
gtaaaacgacggccagtaagagcttgatcccactggag

SEQ ID NO: 78008 - DNA, 37 bp, Artificial Sequence
  primer
gtaaaacgacggccagtaaacacttgcatttccaccc

SEQ ID NO: 78009 - DNA, 21 bp, Artificial Sequence
  primer
cttcctggtgtcatcatctgg

SEQ ID NO: 78010 - DNA, 41 bp, Artificial Sequence
  primer
gtaaaacgacggccagttttaactgtaccctccaaaggaag

SEQ ID NO: 78011 - DNA, 45 bp, Artificial Sequence
  primer
gtaaaacgacggccagtgattgaaagacaattaaagagtagctga

SEQ ID NO: 78012 - DNA, 21 bp, Artificial Sequence
  primer
ggaaagatcaatcccttgctg

SEQ ID NO: 78013 - DNA, 38 bp, Artificial Sequence
  primer
gtaaaacgacggccagtgtccagcctcccacatacttc

SEQ ID NO: 78014 - DNA, 38 bp, Artificial Sequence
  primer
gtaaaacgacggccagtgatgccaccctctggtaattc

SEQ ID NO: 78015 - DNA, 38 bp, Artificial Sequence
  primer
gtaaaacgacggccagtccatccaggttcatagatccc

SEQ ID NO: 78016 - DNA, 19 bp, Artificial Sequence
  primer
caaggcaggaggtcaggag

SEQ ID NO: 78017 - DNA, 21 bp, Artificial Sequence
  primer
ctgggcaatatagcaagaccc

SEQ ID NO: 78018 - DNA, 38 bp, Artificial Sequence
  primer
gtaaaacgacggccagtcagcattcctggaacacaaag

SEQ ID NO: 78019 - DNA, 41 bp, Artificial Sequence
  primer
gtaaaacgacggccagtcaaccagaaatatggctgatagag

SEQ ID NO: 78020 - DNA, 36 bp, Artificial Sequence
  primer
gtaaaacgacggccagtggcatgggcttcttctttg

SEQ ID NO: 78021 - DNA, 38 bp, Artificial Sequence
  primer
gtaaaacgacggccagtggaaattctgcaaagcaggag

SEQ ID NO: 78022 - DNA, 38 bp, Artificial Sequence
  primer
gtaaaacgacggccagttattcgaggccgtatggagac

SEQ ID NO: 78023 - DNA, 39 bp, Artificial Sequence
  primer
gtaaaacgacggccagttgagaagggagaggtttagctg

SEQ ID NO: 78024 - DNA, 21 bp, Artificial Sequence
  primer
cttaagcaatctgcctgcctc

SEQ ID NO: 78025 - DNA, 21 bp, Artificial Sequence
  primer
gtttgggatggaatttggatg

SEQ ID NO: 78026 - DNA, 22 bp, Artificial Sequence
  primer
tcctagaagtggagctgagtgg

SEQ ID NO: 78027 - DNA, 23 bp, Artificial Sequence
  primer
gaatactttggatgctgaaccag

SEQ ID NO: 78028 - DNA, 21 bp, Artificial Sequence
  primer
tccctctccactagctccaag

SEQ ID NO: 78029 - DNA, 38 bp, Artificial Sequence
  primer
gtaaaacgacggccagttccgagatatgcttgagaggg

SEQ ID NO: 78030 - DNA, 21 bp, Artificial Sequence
  primer
tgttggcagatgcctgtaatc

SEQ ID NO: 78031 - DNA, 37 bp, Artificial Sequence
  primer
gtaaaacgacggccagtgctgtgccctcagtaagcag

SEQ ID NO: 78032 - DNA, 38 bp, Artificial Sequence
  primer
gtaaaacgacggccagtggcaaaggtctcctgattctg

SEQ ID NO: 78033 - DNA, 21 bp, Artificial Sequence
  primer
gcatcactgcattccatcttg

SEQ ID NO: 78034 - DNA, 25 bp, Artificial Sequence
  primer
gacaatatgcatctcactgattctg

SEQ ID NO: 78035 - DNA, 24 bp, Artificial Sequence
  primer
tgcatataatggcagtgtgttatg

SEQ ID NO: 78036 - DNA, 38 bp, Artificial Sequence
  primer
gtaaaacgacggccagtaggttaagggtcaacccaaag

SEQ ID NO: 78037 - DNA, 21 bp, Artificial Sequence
  primer
tccgacccttgaactctcttc

SEQ ID NO: 78038 - DNA, 38 bp, Artificial Sequence
  primer
gtaaaacgacggccagtcagtggcaacagactgagatg

SEQ ID NO: 78039 - DNA, 21 bp, Artificial Sequence
  primer
caacagccttgaagccttagc

SEQ ID NO: 78040 - DNA, 22 bp, Artificial Sequence
  primer
gctgtggctcagttcctaagag

SEQ ID NO: 78041 - DNA, 38 bp, Artificial Sequence
  primer
gtaaaacgacggccagtataagcagagggtgagcttgc

SEQ ID NO: 78042 - DNA, 38 bp, Artificial Sequence
  primer
gtaaaacgacggccagtatgcccaaactgtttctggac

SEQ ID NO: 78043 - DNA, 38 bp, Artificial Sequence
  primer
gtaaaacgacggccagttgcaggaggaatgagaaacag

SEQ ID NO: 78044 - DNA, 21 bp, Artificial Sequence
  primer
gcagtacagcaccgatttcac

SEQ ID NO: 78045 - DNA, 21 bp, Artificial Sequence
  primer
ccaggattatttcctggaacg

SEQ ID NO: 78046 - DNA, 38 bp, Artificial Sequence
  primer
gtaaaacgacggccagtcagagctcaagccaggaagtc

SEQ ID NO: 78047 - DNA, 38 bp, Artificial Sequence
  primer
gtaaaacgacggccagttgaagtcccatctcctggaac

SEQ ID NO: 78048 - DNA, 36 bp, Artificial Sequence
  primer
gtaaaacgacggccagtgggctccttccttcagacc

SEQ ID NO: 78049 - DNA, 39 bp, Artificial Sequence
  primer
gtaaaacgacggccagtaagcttggtgctaatagaagcg

SEQ ID NO: 78050 - DNA, 23 bp, Artificial Sequence
  primer
tgaggactagagagccacacatc

SEQ ID NO: 78051 - DNA, 22 bp, Artificial Sequence
  primer
tcaatcccactttatacccaca

SEQ ID NO: 78052 - DNA, 39 bp, Artificial Sequence
  primer
gtaaaacgacggccagtcctttgacccaggacttcttag

SEQ ID NO: 78053 - DNA, 21 bp, Artificial Sequence
  primer
acaggcacatcatacacaggc

SEQ ID NO: 78054 - DNA, 38 bp, Artificial Sequence
  primer
gtaaaacgacggccagtcacaggcttcaccaaacttca

SEQ ID NO: 78055 - DNA, 38 bp, Artificial Sequence
  primer
gtaaaacgacggccagtactttcgttaacttgtgccgc

SEQ ID NO: 78056 - DNA, 42 bp, Artificial Sequence
  primer
gtaaaacgacggccagtcacctccatctaaacagattcagac

SEQ ID NO: 78057 - DNA, 24 bp, Artificial Sequence
  primer
tcaatactcatttcctcccttgag

SEQ ID NO: 78058 - DNA, 35 bp, Artificial Sequence
  primer
gtaaaacgacggccagtgatccaactgcctcagcc

SEQ ID NO: 78059 - DNA, 21 bp, Artificial Sequence
  primer
tcaattcatttgaagggtggg

SEQ ID NO: 78060 - DNA, 21 bp, Artificial Sequence
  primer
ggaggagtatggaatggagcc

SEQ ID NO: 78061 - DNA, 42 bp, Artificial Sequence
  primer
gtaaaacgacggccagtgactgtaccggtgaactacaaattc

SEQ ID NO: 78062 - DNA, 26 bp, Artificial Sequence
  primer
aagccagtaaatgtagaagttgaagg

SEQ ID NO: 78063 - DNA, 39 bp, Artificial Sequence
  primer
gtaaaacgacggccagttttgggtctgtaaacaaagctg

SEQ ID NO: 78064 - DNA, 21 bp, Artificial Sequence
  primer
caggcatcactgtgaggtgag

SEQ ID NO: 78065 - DNA, 38 bp, Artificial Sequence
  primer
gtaaaacgacggccagtcactgtttgctcagggatttg

SEQ ID NO: 78066 - DNA, 38 bp, Artificial Sequence
  primer
gtaaaacgacggccagtctaatgctcaaagtggccctg

SEQ ID NO: 78067 - DNA, 21 bp, Artificial Sequence
  primer
atggtcctaatgagctcccag

SEQ ID NO: 78068 - DNA, 21 bp, Artificial Sequence
  primer
agactggcatgggagtattgg

SEQ ID NO: 78069 - DNA, 21 bp, Artificial Sequence
  primer
caatccctaaggctatgcagc

SEQ ID NO: 78070 - DNA, 21 bp, Artificial Sequence
  primer
acttcccagctctgtcaatcc

SEQ ID NO: 78071 - DNA, 38 bp, Artificial Sequence
  primer
gtaaaacgacggccagttttcaggtgtgtctgcaggtc

SEQ ID NO: 78072 - DNA, 37 bp, Artificial Sequence
  primer
gtaaaacgacggccagtaaactggagagaagctgggc

SEQ ID NO: 78073 - DNA, 37 bp, Artificial Sequence
  primer
gtaaaacgacggccagtgatcagctccaaactgtcgg

SEQ ID NO: 78074 - DNA, 21 bp, Artificial Sequence
  primer
aagtcccttgagggtcatcag

SEQ ID NO: 78075 - DNA, 38 bp, Artificial Sequence
  primer
gtaaaacgacggccagtacaggatgggaggatgtatgg

SEQ ID NO: 78076 - DNA, 38 bp, Artificial Sequence
  primer
gtaaaacgacggccagtgcagtttctgtcctttccctg

SEQ ID NO: 78077 - DNA, 19 bp, Artificial Sequence
  primer
cttgcacccattcctgagc

SEQ ID NO: 78078 - DNA, 37 bp, Artificial Sequence
  primer
gtaaaacgacggccagtggagagaggaagaggtgggc

SEQ ID NO: 78079 - DNA, 21 bp, Artificial Sequence
  primer
ctctccagtccctgactgtcc

SEQ ID NO: 78080 - DNA, 21 bp, Artificial Sequence
  primer
actcctgacctcaggtgatcc

SEQ ID NO: 78081 - DNA, 22 bp, Artificial Sequence
  primer
tcatttgctccaggtaacttcc

SEQ ID NO: 78082 - DNA, 21 bp, Artificial Sequence
  primer
ctgctctgcaattcctcattg

SEQ ID NO: 78083 - DNA, 21 bp, Artificial Sequence
  primer
gtgtcaaataccaccaccgag

SEQ ID NO: 78084 - DNA, 21 bp, Artificial Sequence
  primer
ggaaagggaattgttagtgcg

SEQ ID NO: 78085 - DNA, 38 bp, Artificial Sequence
  primer
gtaaaacgacggccagtctcctacagggcacgagagag

SEQ ID NO: 78086 - DNA, 37 bp, Artificial Sequence
  primer
gtaaaacgacggccagtcaaagggcaggaggctagag

SEQ ID NO: 78087 - DNA, 21 bp, Artificial Sequence
  primer
ttaccctcacctcccaatgtc

SEQ ID NO: 78088 - DNA, 38 bp, Artificial Sequence
  primer
gtaaaacgacggccagtaacgaacatagagtgctttgc

SEQ ID NO: 78089 - DNA, 22 bp, Artificial Sequence
  primer
cgactgcactaaagaatcatcc

SEQ ID NO: 78090 - DNA, 42 bp, Artificial Sequence
  primer
gtaaaacgacggccagtcattcaaatgatgggagaatacaac

SEQ ID NO: 78091 - DNA, 21 bp, Artificial Sequence
  primer
ccaaagggatggctacaaatc

SEQ ID NO: 78092 - DNA, 22 bp, Artificial Sequence
  primer
tacagcagcagtagaatcaccc

SEQ ID NO: 78093 - DNA, 27 bp, Artificial Sequence
  primer
ctacgtatttactattcccttcactcc

SEQ ID NO: 78094 - DNA, 38 bp, Artificial Sequence
  primer
gtaaaacgacggccagtagccctcatacccagctgtaa

SEQ ID NO: 78095 - DNA, 21 bp, Artificial Sequence
  primer
tccacctcaaacaacctatgg

SEQ ID NO: 78096 - DNA, 22 bp, Artificial Sequence
  primer
ttggaatcctcaaacgtctctc

SEQ ID NO: 78097 - DNA, 27 bp, Artificial Sequence
  primer
aatccttcatgctacttaattcttacg

SEQ ID NO: 78098 - DNA, 23 bp, Artificial Sequence
  primer
gcctgagttgactctcattgttc

SEQ ID NO: 78099 - DNA, 25 bp, Artificial Sequence
  primer
atgtacggacatgaattatcatctg

SEQ ID NO: 78100 - DNA, 38 bp, Artificial Sequence
  primer
gtaaaacgacggccagtgcctggctatggaataaaccc

SEQ ID NO: 78101 - DNA, 36 bp, Artificial Sequence
  primer
gtaaaacgacggccagttcacaccatcggactccag

SEQ ID NO: 78102 - DNA, 37 bp, Artificial Sequence
  primer
gtaaaacgacggccagttagcatggcaaatctgaccc

SEQ ID NO: 78103 - DNA, 21 bp, Artificial Sequence
  primer
tacgcgaagtgctgtatgagc

SEQ ID NO: 78104 - DNA, 38 bp, Artificial Sequence
  primer
gtaaaacgacggccagtgcagttgaataaggcacaacc

SEQ ID NO: 78105 - DNA, 19 bp, Artificial Sequence
  primer
cgcctaaaggaggagcgtc

SEQ ID NO: 78106 - DNA, 23 bp, Artificial Sequence
  primer
tccctgtgtgacagacatacaat

SEQ ID NO: 78107 - DNA, 30 bp, Artificial Sequence
  primer
acagtaatgaaatatatgatttaagggaga

SEQ ID NO: 78108 - DNA, 38 bp, Artificial Sequence
  primer
gtaaaacgacggccagtaacgtgattctgtaaatgcgg

SEQ ID NO: 78109 - DNA, 24 bp, Artificial Sequence
  primer
cctccacggtgaagtagaataaag

SEQ ID NO: 78110 - DNA, 28 bp, Artificial Sequence
  primer
aaatagcaccctaagcagaagaatatag

SEQ ID NO: 78111 - DNA, 42 bp, Artificial Sequence
  primer
gtaaaacgacggccagtaatttatcctcaggaactaggcatc

SEQ ID NO: 78112 - DNA, 41 bp, Artificial Sequence
  primer
gtaaaacgacggccagtgttgaatcacaattgttaaccctg

SEQ ID NO: 78113 - DNA, 38 bp, Artificial Sequence
  primer
gtaaaacgacggccagttttctcaaattggcacagagg

SEQ ID NO: 78114 - DNA, 21 bp, Artificial Sequence
  primer
ttgtagtgggccaagattgtg

SEQ ID NO: 78115 - DNA, 38 bp, Artificial Sequence
  primer
gtaaaacgacggccagtcattcactcgccttcattcag

SEQ ID NO: 78116 - DNA, 21 bp, Artificial Sequence
  primer
acaccctcatcaattgtttgc

SEQ ID NO: 78117 - DNA, 24 bp, Artificial Sequence
  primer
gctcagcagatatgtactgcactg

SEQ ID NO: 78118 - DNA, 38 bp, Artificial Sequence
  primer
gtaaaacgacggccagtaacaaacccaggagcaaattc

SEQ ID NO: 78119 - DNA, 21 bp, Artificial Sequence
  primer
tcatgtggaatgttcatgtgc

SEQ ID NO: 78120 - DNA, 27 bp, Artificial Sequence
  primer
agcatgcaatagtgataattgtatttc

SEQ ID NO: 78121 - DNA, 21 bp, Artificial Sequence
  primer
ggtgagcctaggacagacaca

SEQ ID NO: 78122 - DNA, 46 bp, Artificial Sequence
  primer
gtaaaacgacggccagtaagttgaaggctttaatgtactaagtgtt

SEQ ID NO: 78123 - DNA, 22 bp, Artificial Sequence
  primer
tgcatgcaatcaatctacaagg

SEQ ID NO: 78124 - DNA, 21 bp, Artificial Sequence
  primer
ctggagttgttgggttgttcc

SEQ ID NO: 78125 - DNA, 42 bp, Artificial Sequence
  primer
gtaaaacgacggccagtaaatctatctcttccctgacattcc

SEQ ID NO: 78126 - DNA, 38 bp, Artificial Sequence
  primer
gtaaaacgacggccagtcctcgtttaagcctgggaatc

SEQ ID NO: 78127 - DNA, 20 bp, Artificial Sequence
  primer
ttccaccctcaattctgacg

SEQ ID NO: 78128 - DNA, 38 bp, Artificial Sequence
  primer
gtaaaacgacggccagttgccgagaaataatggaggag

SEQ ID NO: 78129 - DNA, 21 bp, Artificial Sequence
  primer
gaattactcgggctgcaagtc

SEQ ID NO: 78130 - DNA, 41 bp, Artificial Sequence
  primer
gtaaaacgacggccagtcttgatctgctcagtaattgcttc

SEQ ID NO: 78131 - DNA, 44 bp, Artificial Sequence
  primer
gtaaaacgacggccagtgtagacagtacagtcaaagcacttagc

SEQ ID NO: 78132 - DNA, 38 bp, Artificial Sequence
  primer
gtaaaacgacggccagttaagttgcacccaagcaagac

SEQ ID NO: 78133 - DNA, 39 bp, Artificial Sequence
  primer
gtaaaacgacggccagttggctaatttacacaccctcac

SEQ ID NO: 78134 - DNA, 22 bp, Artificial Sequence
  primer
aatgggaaattggtcctatcac

SEQ ID NO: 78135 - DNA, 21 bp, Artificial Sequence
  primer
ttctccaatcgtcaaccttcc

SEQ ID NO: 78136 - DNA, 38 bp, Artificial Sequence
  primer
gtaaaacgacggccagtgtatcccaaagactcctctgc

SEQ ID NO: 78137 - DNA, 20 bp, Artificial Sequence
  primer
cgccttcattcatagccaag

SEQ ID NO: 78138 - DNA, 39 bp, Artificial Sequence
  primer
gtaaaacgacggccagtttcatgtgcaattgttgattcc

SEQ ID NO: 78139 - DNA, 21 bp, Artificial Sequence
  primer
tgacattcaggaatacgtggc

SEQ ID NO: 78140 - DNA, 38 bp, Artificial Sequence
  primer
gtaaaacgacggccagtcacccactgcactgttgagac

SEQ ID NO: 78141 - DNA, 20 bp, Artificial Sequence
  primer
cacatttgcatcttccatgc

SEQ ID NO: 78142 - DNA, 24 bp, Artificial Sequence
  primer
aacaattcttccaggctgttattc

SEQ ID NO: 78143 - DNA, 39 bp, Artificial Sequence
  primer
gtaaaacgacggccagtgcatttaggctaatgaacaggg

SEQ ID NO: 78144 - DNA, 23 bp, Artificial Sequence
  primer
aattatatgtcaataaagccggg

SEQ ID NO: 78145 - DNA, 27 bp, Artificial Sequence
  primer
tttacctaataagcatttattaacggg

SEQ ID NO: 78146 - DNA, 21 bp, Artificial Sequence
  primer
agtgatggaggaattaacggg

SEQ ID NO: 78147 - DNA, 21 bp, Artificial Sequence
  primer
ggactcaccagacaggcattc

SEQ ID NO: 78148 - DNA, 23 bp, Artificial Sequence
  primer
aacattgatgtaccacttccctg

SEQ ID NO: 78149 - DNA, 40 bp, Artificial Sequence
  primer
gtaaaacgacggccagtctctgtgcctatccacaatatcc

SEQ ID NO: 78150 - DNA, 26 bp, Artificial Sequence
  primer
accttattaaatgatggttgttgttg

SEQ ID NO: 78151 - DNA, 44 bp, Artificial Sequence
  primer
gtaaaacgacggccagtttcaggcattaagtttaagtgactttc

SEQ ID NO: 78152 - DNA, 21 bp, Artificial Sequence
  primer
gaggaaaggagaaattagccg

SEQ ID NO: 78153 - DNA, 22 bp, Artificial Sequence
  primer
aagccttgcacaaagaaatgac

SEQ ID NO: 78154 - DNA, 44 bp, Artificial Sequence
  primer
gtaaaacgacggccagtgcaattagggagaaatactcatacctc

SEQ ID NO: 78155 - DNA, 39 bp, Artificial Sequence
  primer
gtaaaacgacggccagtgctgaacaccataacgagcttt

SEQ ID NO: 78156 - DNA, 21 bp, Artificial Sequence
  primer
ttcccgcatctgcatatactc

SEQ ID NO: 78157 - DNA, 21 bp, Artificial Sequence
  primer
tgtaacctcatctgctttcgg

SEQ ID NO: 78158 - DNA, 23 bp, Artificial Sequence
  primer
gctggcgtactttataacctctg

SEQ ID NO: 78159 - DNA, 21 bp, Artificial Sequence
  primer
agattgaagcaccagtaccgc

SEQ ID NO: 78160 - DNA, 41 bp, Artificial Sequence
  primer
gtaaaacgacggccagtgttctcttccaatactgtaagccc

SEQ ID NO: 78161 - DNA, 19 bp, Artificial Sequence
  primer
tgctgctttgttgcaatcc

SEQ ID NO: 78162 - DNA, 38 bp, Artificial Sequence
  primer
gtaaaacgacggccagtctgagataatgctgcctctgc

SEQ ID NO: 78163 - DNA, 21 bp, Artificial Sequence
  primer
tatgtttggcacaaatggtgg

SEQ ID NO: 78164 - DNA, 21 bp, Artificial Sequence
  primer
atgcagcctgaataaccacag

SEQ ID NO: 78165 - DNA, 21 bp, Artificial Sequence
  primer
taactgcttgggtacgcactg

SEQ ID NO: 78166 - DNA, 21 bp, Artificial Sequence
  primer
ctgctgaacaaatcttctccg

SEQ ID NO: 78167 - DNA, 43 bp, Artificial Sequence
  primer
gtaaaacgacggccagttgaaacttccgtttctgtataaatcc

SEQ ID NO: 78168 - DNA, 39 bp, Artificial Sequence
  primer
gtaaaacgacggccagttgtgctgtcttggctgacttac

SEQ ID NO: 78169 - DNA, 44 bp, Artificial Sequence
  primer
gtaaaacgacggccagtccaaccatataaattaagcataacaaa

SEQ ID NO: 78170 - DNA, 27 bp, Artificial Sequence
  primer
tgtgtgaaataaatgcatacttaggtc

SEQ ID NO: 78171 - DNA, 30 bp, Artificial Sequence
  primer
aattcaagttaatggtcatattagttctga

SEQ ID NO: 78172 - DNA, 40 bp, Artificial Sequence
  primer
gtaaaacgacggccagtgaccttagcataaagcatttgga

SEQ ID NO: 78173 - DNA, 40 bp, Artificial Sequence
  primer
gtaaaacgacggccagttgagttattctaccggctaatgc

SEQ ID NO: 78174 - DNA, 22 bp, Artificial Sequence
  primer
tctcacaacaaagtggagacaa

SEQ ID NO: 78175 - DNA, 43 bp, Artificial Sequence
  primer
gtaaaacgacggccagtttcatcctaagactcttgcacataaa

SEQ ID NO: 78176 - DNA, 41 bp, Artificial Sequence
  primer
gtaaaacgacggccagtaaagcaggtttgaacacacataaa

SEQ ID NO: 78177 - DNA, 44 bp, Artificial Sequence
  primer
gtaaaacgacggccagtttctttatttaccaagactgcttcttt

SEQ ID NO: 78178 - DNA, 47 bp, Artificial Sequence
  primer
gtaaaacgacggccagtaatgaagaatgtaatgaacagtttatgttt

SEQ ID NO: 78179 - DNA, 21 bp, Artificial Sequence
  primer
gggtttgctgtactttccacc

SEQ ID NO: 78180 - DNA, 38 bp, Artificial Sequence
  primer
gtaaaacgacggccagttagaacgctgttgaatgcagg

SEQ ID NO: 78181 - DNA, 21 bp, Artificial Sequence
  primer
caaaggaggttcttcagggag

SEQ ID NO: 78182 - DNA, 39 bp, Artificial Sequence
  primer
gtaaaacgacggccagttggtgcaaagatttctagttgc

SEQ ID NO: 78183 - DNA, 38 bp, Artificial Sequence
  primer
gtaaaacgacggccagttccaacagcaactggctaaac

SEQ ID NO: 78184 - DNA, 38 bp, Artificial Sequence
  primer
gtaaaacgacggccagtttggtctttgcttgaggtgtg

SEQ ID NO: 78185 - DNA, 26 bp, Artificial Sequence
  primer
accacttgagaatagatatttgcttg

SEQ ID NO: 78186 - DNA, 21 bp, Artificial Sequence
  primer
tgagagccagtatgttcaggg

SEQ ID NO: 78187 - DNA, 21 bp, Artificial Sequence
  primer
agactcatgtccctccttccc

SEQ ID NO: 78188 - DNA, 38 bp, Artificial Sequence
  primer
gtaaaacgacggccagtaccagacccagtaaccacagc

SEQ ID NO: 78189 - DNA, 21 bp, Artificial Sequence
  primer
ctcttgggctttgagagaagc

SEQ ID NO: 78190 - DNA, 21 bp, Artificial Sequence
  primer
ccacgtgtcctttctcctttc

SEQ ID NO: 78191 - DNA, 21 bp, Artificial Sequence
  primer
gctgaagatgatgtcagaggc

SEQ ID NO: 78192 - DNA, 37 bp, Artificial Sequence
  primer
gtaaaacgacggccagtctaaagccacgcagggctac

SEQ ID NO: 78193 - DNA, 21 bp, Artificial Sequence
  primer
ctgaggtcctgttaagggcag

SEQ ID NO: 78194 - DNA, 19 bp, Artificial Sequence
  primer
cagagctgtgcctcagtcg

SEQ ID NO: 78195 - DNA, 36 bp, Artificial Sequence
  primer
gtaaaacgacggccagtcagtcctgtggcctggaag

SEQ ID NO: 78196 - DNA, 19 bp, Artificial Sequence
  primer
ctcctgtggagaagctgcc

SEQ ID NO: 78197 - DNA, 39 bp, Artificial Sequence
  primer
gtaaaacgacggccagtcaaaggctttattatcctgccc

SEQ ID NO: 78198 - DNA, 37 bp, Artificial Sequence
  primer
gtaaaacgacggccagtcctctcagacccaaaggagg

SEQ ID NO: 78199 - DNA, 38 bp, Artificial Sequence
  primer
gtaaaacgacggccagtagctggctcagacttaggtgc

SEQ ID NO: 78200 - DNA, 21 bp, Artificial Sequence
  primer
cacctcttgctggctgtagtg

SEQ ID NO: 78201 - DNA, 37 bp, Artificial Sequence
  primer
gtaaaacgacggccagtcgttgagggatgcacaagtc

SEQ ID NO: 78202 - DNA, 39 bp, Artificial Sequence
  primer
gtaaaacgacggccagtttcccaagagctgtatcagagg

SEQ ID NO: 78203 - DNA, 38 bp, Artificial Sequence
  primer
gtaaaacgacggccagtcagttggagcccttatcactg

SEQ ID NO: 78204 - DNA, 43 bp, Artificial Sequence
  primer
gtaaaacgacggccagtgaactgtagataaccaggtatttgcc

SEQ ID NO: 78205 - DNA, 38 bp, Artificial Sequence
  primer
gtaaaacgacggccagtgggcagggaatagagagtgag

SEQ ID NO: 78206 - DNA, 21 bp, Artificial Sequence
  primer
tctgtagccaacaggaaaggg

SEQ ID NO: 78207 - DNA, 39 bp, Artificial Sequence
  primer
gtaaaacgacggccagtccacaaccaaacattcagatgc

SEQ ID NO: 78208 - DNA, 38 bp, Artificial Sequence
  primer
gtaaaacgacggccagtgcttgaatgagtgacggtgag

SEQ ID NO: 78209 - DNA, 38 bp, Artificial Sequence
  primer
gtaaaacgacggccagtaagacacactggaagggatgg

SEQ ID NO: 78210 - DNA, 21 bp, Artificial Sequence
  primer
aaacaaagccatgtagctgcc

SEQ ID NO: 78211 - DNA, 21 bp, Artificial Sequence
  primer
gaggagattctgtgcctgtcc

SEQ ID NO: 78212 - DNA, 20 bp, Artificial Sequence
  primer
acagaggccacgtgtgtagg

SEQ ID NO: 78213 - DNA, 38 bp, Artificial Sequence
  primer
gtaaaacgacggccagtctcagcagaactgcaatgagg

SEQ ID NO: 78214 - DNA, 38 bp, Artificial Sequence
  primer
gtaaaacgacggccagtgaggtcttcaaatgcagcgag

SEQ ID NO: 78215 - DNA, 38 bp, Artificial Sequence
  primer
gtaaaacgacggccagtcctgcctgaactctagcttcc

SEQ ID NO: 78216 - DNA, 37 bp, Artificial Sequence
  primer
gtaaaacgacggccagtcgggaaactctgtggctatg

SEQ ID NO: 78217 - DNA, 20 bp, Artificial Sequence
  primer
acttggcaggagggaaactg

SEQ ID NO: 78218 - DNA, 38 bp, Artificial Sequence
  primer
gtaaaacgacggccagtgaggaaggtgctgatacggag

SEQ ID NO: 78219 - DNA, 21 bp, Artificial Sequence
  primer
atgtgctcaggcacagatgtc

SEQ ID NO: 78220 - DNA, 38 bp, Artificial Sequence
  primer
gtaaaacgacggccagtagcctaccctttacacctggg

SEQ ID NO: 78221 - DNA, 39 bp, Artificial Sequence
  primer
gtaaaacgacggccagtttatcacaacaattagcgcctg

SEQ ID NO: 78222 - DNA, 21 bp, Artificial Sequence
  primer
gagctcagctacaatccctgc

SEQ ID NO: 78223 - DNA, 21 bp, Artificial Sequence
  primer
caggctctgcatttctgagtg

SEQ ID NO: 78224 - DNA, 21 bp, Artificial Sequence
  primer
tatgtccctcacacatcaggc

SEQ ID NO: 78225 - DNA, 38 bp, Artificial Sequence
  primer
gtaaaacgacggccagtagggaagagaggaacacctgc

SEQ ID NO: 78226 - DNA, 20 bp, Artificial Sequence
  primer
gaggtccagctcacacttgg

SEQ ID NO: 78227 - DNA, 37 bp, Artificial Sequence
  primer
gtaaaacgacggccagtgaggatggatagcctcaccc

SEQ ID NO: 78228 - DNA, 38 bp, Artificial Sequence
  primer
gtaaaacgacggccagtcagccgtagagtttgaggacc

SEQ ID NO: 78229 - DNA, 38 bp, Artificial Sequence
  primer
gtaaaacgacggccagtcaccctccctgacaccattag

SEQ ID NO: 78230 - DNA, 21 bp, Artificial Sequence
  primer
aaaggagccaagaggtagacg

SEQ ID NO: 78231 - DNA, 21 bp, Artificial Sequence
  primer
tgtgtagagcgagctggagtg

SEQ ID NO: 78232 - DNA, 37 bp, Artificial Sequence
  primer
gtaaaacgacggccagtgatgcatttcccacaaatgg

SEQ ID NO: 78233 - DNA, 21 bp, Artificial Sequence
  primer
acagctgttcctacccactcc

SEQ ID NO: 78234 - DNA, 21 bp, Artificial Sequence
  primer
gaagatattaatggccctgcc

SEQ ID NO: 78235 - DNA, 20 bp, Artificial Sequence
  primer
acccaacccaacacctcttc

SEQ ID NO: 78236 - DNA, 21 bp, Artificial Sequence
  primer
cttctctagcctttgcccaac

SEQ ID NO: 78237 - DNA, 21 bp, Artificial Sequence
  primer
gcatggtctgaatttcaaggg

SEQ ID NO: 78238 - DNA, 21 bp, Artificial Sequence
  primer
gccaccctttagctctattcc

SEQ ID NO: 78239 - DNA, 21 bp, Artificial Sequence
  primer
ccaagtcctccatattgtccc

SEQ ID NO: 78240 - DNA, 21 bp, Artificial Sequence
  primer
tagcttgttgggactccttcc

SEQ ID NO: 78241 - DNA, 41 bp, Artificial Sequence
  primer
gtaaaacgacggccagtcactaaatggtgtttacaactggg

SEQ ID NO: 78242 - DNA, 21 bp, Artificial Sequence
  primer
actaagggatggcctagggtg

SEQ ID NO: 78243 - DNA, 21 bp, Artificial Sequence
  primer
agacttggagaagaccaaggg

SEQ ID NO: 78244 - DNA, 40 bp, Artificial Sequence
  primer
gtaaaacgacggccagttgtgtatgaaggaaatcactggc

SEQ ID NO: 78245 - DNA, 22 bp, Artificial Sequence
  primer
ttctagccatctgctcttctgg

SEQ ID NO: 78246 - DNA, 21 bp, Artificial Sequence
  primer
cagatgggcacagagcattag

SEQ ID NO: 78247 - DNA, 38 bp, Artificial Sequence
  primer
gtaaaacgacggccagtttcctcacaccatttggaaag

SEQ ID NO: 78248 - DNA, 21 bp, Artificial Sequence
  primer
ctttgtttcccagtacccagc

SEQ ID NO: 78249 - DNA, 38 bp, Artificial Sequence
  primer
gtaaaacgacggccagtacagcttcttcttctccctgc

SEQ ID NO: 78250 - DNA, 21 bp, Artificial Sequence
  primer
tgccacctgggataagacttc

SEQ ID NO: 78251 - DNA, 21 bp, Artificial Sequence
  primer
ttctccttccctgctgaactc

SEQ ID NO: 78252 - DNA, 38 bp, Artificial Sequence
  primer
gtaaaacgacggccagtgcctaagctcatccaggaaat

SEQ ID NO: 78253 - DNA, 38 bp, Artificial Sequence
  primer
gtaaaacgacggccagtatccacagaccaacccagatg

SEQ ID NO: 78254 - DNA, 20 bp, Artificial Sequence
  primer
ttacccagggtgaagaaggg

SEQ ID NO: 78255 - DNA, 38 bp, Artificial Sequence
  primer
gtaaaacgacggccagtcctcctctaccctctgccaac

SEQ ID NO: 78256 - DNA, 20 bp, Artificial Sequence
  primer
ttccatctgtggacaatccc

SEQ ID NO: 78257 - DNA, 38 bp, Artificial Sequence
  primer
gtaaaacgacggccagtatccaaagtggcttatcccag

SEQ ID NO: 78258 - DNA, 20 bp, Artificial Sequence
  primer
acccatatagccagggcaac

SEQ ID NO: 78259 - DNA, 21 bp, Artificial Sequence
  primer
ggccatacacagaaacctttg

SEQ ID NO: 78260 - DNA, 39 bp, Artificial Sequence
  primer
gtaaaacgacggccagtcacttgtcaatggctcagaatc

SEQ ID NO: 78261 - DNA, 38 bp, Artificial Sequence
  primer
gtaaaacgacggccagttcctctttgtggagatgcttg

SEQ ID NO: 78262 - DNA, 38 bp, Artificial Sequence
  primer
gtaaaacgacggccagttggtacattagtgccagggag

SEQ ID NO: 78263 - DNA, 38 bp, Artificial Sequence
  primer
gtaaaacgacggccagtgggttcctgtggttctccaac

SEQ ID NO: 78264 - DNA, 37 bp, Artificial Sequence
  primer
gtaaaacgacggccagtctccttaccagcgttccctc

SEQ ID NO: 78265 - DNA, 38 bp, Artificial Sequence
  primer
gtaaaacgacggccagtttcagccttgctgagctgtag

SEQ ID NO: 78266 - DNA, 21 bp, Artificial Sequence
  primer
tgagcttaaagtgatgctggc

SEQ ID NO: 78267 - DNA, 21 bp, Artificial Sequence
  primer
aggagcccaagaaagggtaag

SEQ ID NO: 78268 - DNA, 38 bp, Artificial Sequence
  primer
gtaaaacgacggccagtatgcatcctcatttcctcagc

SEQ ID NO: 78269 - DNA, 38 bp, Artificial Sequence
  primer
gtaaaacgacggccagtcaaggcagctcagttgtctcc

SEQ ID NO: 78270 - DNA, 21 bp, Artificial Sequence
  primer
acaaagggtccacaagggtag

SEQ ID NO: 78271 - DNA, 19 bp, Artificial Sequence
  primer
ctgctaggcccatcctcag

SEQ ID NO: 78272 - DNA, 21 bp, Artificial Sequence
  primer
gggaagaatgcacagatctcc

SEQ ID NO: 78273 - DNA, 21 bp, Artificial Sequence
  primer
acaaagggtccacaagggtag

SEQ ID NO: 78274 - DNA, 38 bp, Artificial Sequence
  primer
gtaaaacgacggccagtggatcttgttaggcaccttgg

SEQ ID NO: 78275 - DNA, 20 bp, Artificial Sequence
  primer
gccttcccaagacagatgag

SEQ ID NO: 78276 - DNA, 21 bp, Artificial Sequence
  primer
ctcatgccattcctcttaggc

SEQ ID NO: 78277 - DNA, 21 bp, Artificial Sequence
  primer
agctccatgttcctcctgttc

SEQ ID NO: 78278 - DNA, 38 bp, Artificial Sequence
  primer
gtaaaacgacggccagttttagccttgacacgaccaag

SEQ ID NO: 78279 - DNA, 19 bp, Artificial Sequence
  primer
ctgctaggcccatcctcag

SEQ ID NO: 78280 - DNA, 38 bp, Artificial Sequence
  primer
gtaaaacgacggccagtagtgtggcaggaagaaggaag

SEQ ID NO: 78281 - DNA, 18 bp, Artificial Sequence
  primer
tccgccggaatttagctg

SEQ ID NO: 78282 - DNA, 21 bp, Artificial Sequence
  primer
ctgagacgacacacaatttgg

SEQ ID NO: 78283 - DNA, 21 bp, Artificial Sequence
  primer
gtgggtgtgctagcatctctg

SEQ ID NO: 78284 - DNA, 20 bp, Artificial Sequence
  primer
cacttgaacatgggaggcag

SEQ ID NO: 78285 - DNA, 20 bp, Artificial Sequence
  primer
acaggatgcgttcgaagatg

SEQ ID NO: 78286 - DNA, 39 bp, Artificial Sequence
  primer
gtaaaacgacggccagtgctcactacaggagaaggaggg

SEQ ID NO: 78287 - DNA, 38 bp, Artificial Sequence
  primer
gtaaaacgacggccagtgaaactgctgacagagggagg

SEQ ID NO: 78288 - DNA, 22 bp, Artificial Sequence
  primer
catcatctctgcctgaaaggag

SEQ ID NO: 78289 - DNA, 21 bp, Artificial Sequence
  primer
cccacctagaaggatcaaggg

SEQ ID NO: 78290 - DNA, 38 bp, Artificial Sequence
  primer
gtaaaacgacggccagtctttgagaagagcgagcttgg

SEQ ID NO: 78291 - DNA, 21 bp, Artificial Sequence
  primer
gacccaagtgtcactgcaatc

SEQ ID NO: 78292 - DNA, 38 bp, Artificial Sequence
  primer
gtaaaacgacggccagtgatccgagaagccacagactc

SEQ ID NO: 78293 - DNA, 21 bp, Artificial Sequence
  primer
aggctgtctcaagcaaacctc

SEQ ID NO: 78294 - DNA, 38 bp, Artificial Sequence
  primer
gtaaaacgacggccagtaggataaggcggcagtagttg

SEQ ID NO: 78295 - DNA, 38 bp, Artificial Sequence
  primer
gtaaaacgacggccagtgctcctcatcatcactttccc

SEQ ID NO: 78296 - DNA, 21 bp, Artificial Sequence
  primer
gattctggtttgggctgtttc

SEQ ID NO: 78297 - DNA, 21 bp, Artificial Sequence
  primer
caccattcaccttggacagtg

SEQ ID NO: 78298 - DNA, 38 bp, Artificial Sequence
  primer
gtaaaacgacggccagtgcatcacaagtgggttagtgg

SEQ ID NO: 78299 - DNA, 38 bp, Artificial Sequence
  primer
gtaaaacgacggccagtggatttgtcactggatggagg

SEQ ID NO: 78300 - DNA, 21 bp, Artificial Sequence
  primer
ttggcctgtaacattgctctg

SEQ ID NO: 78301 - DNA, 38 bp, Artificial Sequence
  primer
gtaaaacgacggccagtaagtccatgacaaagggcatc

SEQ ID NO: 78302 - DNA, 38 bp, Artificial Sequence
  primer
gtaaaacgacggccagtacactggagcgagatgctttc

SEQ ID NO: 78303 - DNA, 41 bp, Artificial Sequence
  primer
gtaaaacgacggccagtttatctcaccacaaggcacaatac

SEQ ID NO: 78304 - DNA, 39 bp, Artificial Sequence
  primer
gtaaaacgacggccagtaagagtgctcctgcctaaagag

SEQ ID NO: 78305 - DNA, 37 bp, Artificial Sequence
  primer
gtaaaacgacggccagtcagtgacctccctttccctg

SEQ ID NO: 78306 - DNA, 44 bp, Artificial Sequence
  primer
gtaaaacgacggccagtagatagctaccctctaagaattggttt

SEQ ID NO: 78307 - DNA, 23 bp, Artificial Sequence
  primer
gaattctgtccctacgagtcaaa

SEQ ID NO: 78308 - DNA, 22 bp, Artificial Sequence
  primer
ggaaagtgactgactgacctgg

SEQ ID NO: 78309 - DNA, 38 bp, Artificial Sequence
  primer
gtaaaacgacggccagtatgaaagttccactggcaagg

SEQ ID NO: 78310 - DNA, 44 bp, Artificial Sequence
  primer
gtaaaacgacggccagtcccatttatcctggatttatattgatg

SEQ ID NO: 78311 - DNA, 41 bp, Artificial Sequence
  primer
gtaaaacgacggccagtccaggtagctgatgaatttcaaac

SEQ ID NO: 78312 - DNA, 47 bp, Artificial Sequence
  primer
gtaaaacgacggccagtcttctcacttagtaccattaataccacttt

SEQ ID NO: 78313 - DNA, 24 bp, Artificial Sequence
  primer
tgttccacacatgatggttaattc

SEQ ID NO: 78314 - DNA, 22 bp, Artificial Sequence
  primer
gccatttcacctacaatgacag

SEQ ID NO: 78315 - DNA, 38 bp, Artificial Sequence
  primer
gtaaaacgacggccagtcaggactcttgggtttgcttg

SEQ ID NO: 78316 - DNA, 37 bp, Artificial Sequence
  primer
gtaaaacgacggccagttttcgcacctggattctgtc

SEQ ID NO: 78317 - DNA, 38 bp, Artificial Sequence
  primer
gtaaaacgacggccagttgcccaggtaccttccttatg

SEQ ID NO: 78318 - DNA, 38 bp, Artificial Sequence
  primer
gtaaaacgacggccagtgccctttccagtttcactgac

SEQ ID NO: 78319 - DNA, 21 bp, Artificial Sequence
  primer
atcagctgcacaatgaacagg

SEQ ID NO: 78320 - DNA, 38 bp, Artificial Sequence
  primer
gtaaaacgacggccagtctagaagctgctggcaaagtg

SEQ ID NO: 78321 - DNA, 38 bp, Artificial Sequence
  primer
gtaaaacgacggccagtggtttaggcagaatttgctcc

SEQ ID NO: 78322 - DNA, 38 bp, Artificial Sequence
  primer
gtaaaacgacggccagtaaggatctgatcttgggttgc

SEQ ID NO: 78323 - DNA, 38 bp, Artificial Sequence
  primer
gtaaaacgacggccagtcagggtttacagaatgggtcc

SEQ ID NO: 78324 - DNA, 38 bp, Artificial Sequence
  primer
gtaaaacgacggccagttctcagccttcacattcttgc

SEQ ID NO: 78325 - DNA, 21 bp, Artificial Sequence
  primer
tgctacggattgccttacctc

SEQ ID NO: 78326 - DNA, 38 bp, Artificial Sequence
  primer
gtaaaacgacggccagtcagtaacatttcgaaggcgtg

SEQ ID NO: 78327 - DNA, 21 bp, Artificial Sequence
  primer
aactggtcaacccttcccttc

SEQ ID NO: 78328 - DNA, 38 bp, Artificial Sequence
  primer
gtaaaacgacggccagtgtaggaggtttcacgaggctg

SEQ ID NO: 78329 - DNA, 39 bp, Artificial Sequence
  primer
gtaaaacgacggccagttcaacgaagattatgcaggatg

SEQ ID NO: 78330 - DNA, 43 bp, Artificial Sequence
  primer
gtaaaacgacggccagttgaatagaaaggttacttcaaatggc

SEQ ID NO: 78331 - DNA, 26 bp, Artificial Sequence
  primer
gaattggaacaatgaccttatgaact

SEQ ID NO: 78332 - DNA, 24 bp, Artificial Sequence
  primer
cagatagcaattatattccagccc

SEQ ID NO: 78333 - DNA, 38 bp, Artificial Sequence
  primer
gtaaaacgacggccagtcattacctggctggaggaaag

SEQ ID NO: 78334 - DNA, 24 bp, Artificial Sequence
  primer
tgtatatgaaggttaggcagtggg

SEQ ID NO: 78335 - DNA, 25 bp, Artificial Sequence
  primer
ttgaaactgaaggatcagttctagc

SEQ ID NO: 78336 - DNA, 42 bp, Artificial Sequence
  primer
gtaaaacgacggccagtttgtttgcttcttggtaaatgactt

SEQ ID NO: 78337 - DNA, 24 bp, Artificial Sequence
  primer
caaacgatgtaatttcagcaaatc

SEQ ID NO: 78338 - DNA, 24 bp, Artificial Sequence
  primer
tcttaccagaactgcttcattgtc

SEQ ID NO: 78339 - DNA, 27 bp, Artificial Sequence
  primer
tgtaaagttatattgtgctgcaaacag

SEQ ID NO: 78340 - DNA, 44 bp, Artificial Sequence
  primer
gtaaaacgacggccagttttctcattaatttgtgaactctacca

SEQ ID NO: 78341 - DNA, 21 bp, Artificial Sequence
  primer
tagagaatcaaagaacccggc

SEQ ID NO: 78342 - DNA, 23 bp, Artificial Sequence
  primer
tgttcacatagatctcagcatcc

SEQ ID NO: 78343 - DNA, 26 bp, Artificial Sequence
  primer
tctatggttcattctacaacacagaa

SEQ ID NO: 78344 - DNA, 22 bp, Artificial Sequence
  primer
tgtttcaggcatttaggcaatc

SEQ ID NO: 78345 - DNA, 21 bp, Artificial Sequence
  primer
ctactgtcagggtttctgccc

SEQ ID NO: 78346 - DNA, 35 bp, Artificial Sequence
  primer
gtaaaacgacggccagtgggctggagatccttggg

SEQ ID NO: 78347 - DNA, 37 bp, Artificial Sequence
  primer
gtaaaacgacggccagtcttcccacaattctgccctc

SEQ ID NO: 78348 - DNA, 39 bp, Artificial Sequence
  primer
gtaaaacgacggccagtgctccctcattgtttaaagagc

SEQ ID NO: 78349 - DNA, 37 bp, Artificial Sequence
  primer
gtaaaacgacggccagtcgacaactgtcaccctgacc

SEQ ID NO: 78350 - DNA, 21 bp, Artificial Sequence
  primer
agccctagaaccttgatgacc

SEQ ID NO: 78351 - DNA, 40 bp, Artificial Sequence
  primer
gtaaaacgacggccagttggcttcatggcatatacttacg

SEQ ID NO: 78352 - DNA, 21 bp, Artificial Sequence
  primer
ttgaaatccatgattcctccc

SEQ ID NO: 78353 - DNA, 43 bp, Artificial Sequence
  primer
gtaaaacgacggccagtccagcagtaactaatgactgatcaaa

SEQ ID NO: 78354 - DNA, 41 bp, Artificial Sequence
  primer
gtaaaacgacggccagtttggctttagattgttgatttcag

SEQ ID NO: 78355 - DNA, 23 bp, Artificial Sequence
  primer
tttggtcaaggcaaacatttaac

SEQ ID NO: 78356 - DNA, 39 bp, Artificial Sequence
  primer
gtaaaacgacggccagtctgaaagtctagagtccagccc

SEQ ID NO: 78357 - DNA, 18 bp, Artificial Sequence
  primer
cctgggcaacagaaccag

SEQ ID NO: 78358 - DNA, 38 bp, Artificial Sequence
  primer
gtaaaacgacggccagttcgtacctggtaatggaagcg

SEQ ID NO: 78359 - DNA, 18 bp, Artificial Sequence
  primer
aggcatgagccactgtgc

SEQ ID NO: 78360 - DNA, 23 bp, Artificial Sequence
  primer
cactgtaggtcagtgtcatctcg

SEQ ID NO: 78361 - DNA, 38 bp, Artificial Sequence
  primer
gtaaaacgacggccagtgtatgagccactgcaaccatc

SEQ ID NO: 78362 - DNA, 41 bp, Artificial Sequence
  primer
gtaaaacgacggccagtccaaaggctacactcaaattgaaa

SEQ ID NO: 78363 - DNA, 35 bp, Artificial Sequence
  primer
gtaaaacgacggccagtccctgatggccaatttgt

SEQ ID NO: 78364 - DNA, 21 bp, Artificial Sequence
  primer
agggcaatccatggagtaaat

SEQ ID NO: 78365 - DNA, 23 bp, Artificial Sequence
  primer
caaccaatcataacatggttcac

SEQ ID NO: 78366 - DNA, 24 bp, Artificial Sequence
  primer
tgaatgtgggatttaaagtcattc

SEQ ID NO: 78367 - DNA, 40 bp, Artificial Sequence
  primer
gtaaaacgacggccagtcatataccatcttgcccaatgag

SEQ ID NO: 78368 - DNA, 42 bp, Artificial Sequence
  primer
gtaaaacgacggccagtgtgttatcagatacatgtcaatgcc

SEQ ID NO: 78369 - DNA, 22 bp, Artificial Sequence
  primer
cccggtacatgtttccaaatag

SEQ ID NO: 78370 - DNA, 21 bp, Artificial Sequence
  primer
ttgggaatgaaagaaacctgc

SEQ ID NO: 78371 - DNA, 23 bp, Artificial Sequence
  primer
gcatatttggaggagctacaacc

SEQ ID NO: 78372 - DNA, 42 bp, Artificial Sequence
  primer
gtaaaacgacggccagtttcactgcattaacacaaataaagg

SEQ ID NO: 78373 - DNA, 23 bp, Artificial Sequence
  primer
tctcaattccagtttgctttcag

SEQ ID NO: 78374 - DNA, 40 bp, Artificial Sequence
  primer
gtaaaacgacggccagtgatgccacagcttgtaactatcc

SEQ ID NO: 78375 - DNA, 40 bp, Artificial Sequence
  primer
gtaaaacgacggccagttcatgtaaatcccatgtagccag

SEQ ID NO: 78376 - DNA, 40 bp, Artificial Sequence
  primer
gtaaaacgacggccagttctttatggaatgggacatcaac

SEQ ID NO: 78377 - DNA, 37 bp, Artificial Sequence
  primer
gtaaaacgacggccagtcaattaggcggacatgacaa

SEQ ID NO: 78378 - DNA, 37 bp, Artificial Sequence
  primer
gtaaaacgacggccagtacggaaagagtccgatcctc

SEQ ID NO: 78379 - DNA, 21 bp, Artificial Sequence
  primer
aaatgagaagatccaggccat

SEQ ID NO: 78380 - DNA, 35 bp, Artificial Sequence
  primer
gtaaaacgacggccagtacacccagctcccagtcc

SEQ ID NO: 78381 - DNA, 39 bp, Artificial Sequence
  primer
gtaaaacgacggccagtcgtgtctgtccgagtagtttcc

SEQ ID NO: 78382 - DNA, 37 bp, Artificial Sequence
  primer
gtaaaacgacggccagtgcagacagaggtgtcttccg

SEQ ID NO: 78383 - DNA, 36 bp, Artificial Sequence
  primer
gtaaaacgacggccagtgcctggaagagctggagag

SEQ ID NO: 78384 - DNA, 21 bp, Artificial Sequence
  primer
agcttgagaagggaggagaag

SEQ ID NO: 78385 - DNA, 38 bp, Artificial Sequence
  primer
gtaaaacgacggccagtctaaggtacagcgccagacag

SEQ ID NO: 78386 - DNA, 36 bp, Artificial Sequence
  primer
gtaaaacgacggccagtaatgcctgggtgcagactc

SEQ ID NO: 78387 - DNA, 19 bp, Artificial Sequence
  primer
agcaccctgagcctacacg

SEQ ID NO: 78388 - DNA, 21 bp, Artificial Sequence
  primer
agctgtgaagactcctctccc

SEQ ID NO: 78389 - DNA, 18 bp, Artificial Sequence
  primer
gaacctgggaggtggagc

SEQ ID NO: 78390 - DNA, 35 bp, Artificial Sequence
  primer
gtaaaacgacggccagtgaggtgggcatgttgagg

SEQ ID NO: 78391 - DNA, 21 bp, Artificial Sequence
  primer
taagtgatggtggactgtggg

SEQ ID NO: 78392 - DNA, 19 bp, Artificial Sequence
  primer
ccctgtgtcacctctgtgc

SEQ ID NO: 78393 - DNA, 39 bp, Artificial Sequence
  primer
gtaaaacgacggccagtacccaggagcatatcctaaatg

SEQ ID NO: 78394 - DNA, 38 bp, Artificial Sequence
  primer
gtaaaacgacggccagtacaggtcttaggcgtttgtgc

SEQ ID NO: 78395 - DNA, 39 bp, Artificial Sequence; identical to SEQ ID NO: 78381
  primer

SEQ ID NO: 78396 - DNA, 37 bp, Artificial Sequence
  primer
gtaaaacgacggccagtccaccaaggagtcagcctat

SEQ ID NO: 78397 - DNA, 38 bp, Artificial Sequence; identical to SEQ ID NO: 78385
  primer

SEQ ID NO: 78398 - DNA, 38 bp, Artificial Sequence
  primer
gtaaaacgacggccagttgtaatcccagctactcaggg

SEQ ID NO: 78399 - DNA, 36 bp, Artificial Sequence
  primer
gtaaaacgacggccagtatctgaggtgggcacactg

SEQ ID NO: 78400 - DNA, 37 bp, Artificial Sequence
  primer
gtaaaacgacggccagtaaggagttcccaagtgaggc

SEQ ID NO: 78401 - DNA, 21 bp, Artificial Sequence
  primer
gtggtgctccatgtaggtctg

SEQ ID NO: 78402 - DNA, 38 bp, Artificial Sequence
  primer
gtaaaacgacggccagtggaaagtgttgatgatctgcg

SEQ ID NO: 78403 - DNA, 21 bp, Artificial Sequence
  primer
aaagccatcgaatttggacag

SEQ ID NO: 78404 - DNA, 38 bp, Artificial Sequence
  primer
gtaaaacgacggccagtgggcctatgaggttagctgtg

SEQ ID NO: 78405 - DNA, 38 bp, Artificial Sequence
  primer
gtaaaacgacggccagtttcctgcttctctccttctgc

SEQ ID NO: 78406 - DNA, 38 bp, Artificial Sequence
  primer
gtaaaacgacggccagtgagcacgttaggcattaaggg

SEQ ID NO: 78407 - DNA, 21 bp, Artificial Sequence
  primer
tgctttcatttggttctggtg

SEQ ID NO: 78408 - DNA, 21 bp, Artificial Sequence
  primer
ggaaaggcttgtaaccacacg

SEQ ID NO: 78409 - DNA, 38 bp, Artificial Sequence
  primer
gtaaaacgacggccagtagctactgatattggctgccg

SEQ ID NO: 78410 - DNA, 21 bp, Artificial Sequence
  primer
gcactgtccatcttcaggttg

SEQ ID NO: 78411 - DNA, 21 bp, Artificial Sequence
  primer
cctattcaccattctccctgg

SEQ ID NO: 78412 - DNA, 37 bp, Artificial Sequence
  primer
gtaaaacgacggccagtacttgagcctccactcgttg

SEQ ID NO: 78413 - DNA, 38 bp, Artificial Sequence
  primer
gtaaaacgacggccagtagagactgtccgactcctccc

SEQ ID NO: 78414 - DNA, 21 bp, Artificial Sequence
  primer
gctggatcagtaacgtctccc

SEQ ID NO: 78415 - DNA, 21 bp, Artificial Sequence
  primer
ttccagggaaggaaagatgag

SEQ ID NO: 78416 - DNA, 21 bp, Artificial Sequence
  primer
gaacacacccactgctttgag

SEQ ID NO: 78417 - DNA, 39 bp, Artificial Sequence
  primer
gtaaaacgacggccagtgccaagtctaaggcagggatag

SEQ ID NO: 78418 - DNA, 22 bp, Artificial Sequence
  primer
acaaatacatgccaagaagcag

SEQ ID NO: 78419 - DNA, 38 bp, Artificial Sequence
  primer
gtaaaacgacggccagtgtcttgaaggccaggctacac

SEQ ID NO: 78420 - DNA, 38 bp, Artificial Sequence
  primer
gtaaaacgacggccagttccttgcagacggtacacttg

SEQ ID NO: 78421 - DNA, 38 bp, Artificial Sequence
  primer
gtaaaacgacggccagtaaaggtttgttgtctgggctg

SEQ ID NO: 78422 - DNA, 38 bp, Artificial Sequence
  primer
gtaaaacgacggccagtatccctacactctcagtgggc

SEQ ID NO: 78423 - DNA, 38 bp, Artificial Sequence
  primer
gtaaaacgacggccagtctgcaggtgagcttgaacttg

SEQ ID NO: 78424 - DNA, 38 bp, Artificial Sequence
  primer
gtaaaacgacggccagtcaagatctgctgatggctctg

SEQ ID NO: 78425 - DNA, 38 bp, Artificial Sequence
  primer
gtaaaacgacggccagtcctggtgccaactctttcttc

SEQ ID NO: 78426 - DNA, 21 bp, Artificial Sequence
  primer
tctctccctggtcagtcttcc

SEQ ID NO: 78427 - DNA, 38 bp, Artificial Sequence
  primer
gtaaaacgacggccagtggtgcaattgtaggtgaggtg

SEQ ID NO: 78428 - DNA, 21 bp, Artificial Sequence
  primer
ggattgagctgatgctggtag

SEQ ID NO: 78429 - DNA, 38 bp, Artificial Sequence
  primer
gtaaaacgacggccagtgtgttcctgaaccagtgcttg

SEQ ID NO: 78430 - DNA, 38 bp, Artificial Sequence
  primer
gtaaaacgacggccagtattggcatcgaagaagtcctg

SEQ ID NO: 78431 - DNA, 38 bp, Artificial Sequence
  primer
gtaaaacgacggccagtgatgagatcaaagatgcgctg

SEQ ID NO: 78432 - DNA, 21 bp, Artificial Sequence
  primer
gtaagctgcaagaaagcggag

SEQ ID NO: 78433 - DNA, 21 bp, Artificial Sequence
  primer
cggaaatgccaacttacactg

SEQ ID NO: 78434 - DNA, 38 bp, Artificial Sequence
  primer
gtaaaacgacggccagttggaggttggagttgaaggag

SEQ ID NO: 78435 - DNA, 38 bp, Artificial Sequence
  primer
gtaaaacgacggccagttgtgcaatgtgatccaacatc

SEQ ID NO: 78436 - DNA, 21 bp, Artificial Sequence
  primer
tgaccatcactactgcttggg

SEQ ID NO: 78437 - DNA, 21 bp, Artificial Sequence
  primer
tgaccagaccagatgacaacc

SEQ ID NO: 78438 - DNA, 21 bp, Artificial Sequence
  primer
ggtccctcataactcgtttgg

SEQ ID NO: 78439 - DNA, 20 bp, Artificial Sequence
  primer
cggtccaactcttgttgagc

SEQ ID NO: 78440 - DNA, 38 bp, Artificial Sequence
  primer
gtaaaacgacggccagttcagagggtttgggtggtatc

SEQ ID NO: 78441 - DNA, 21 bp, Artificial Sequence
  primer
aggaaggaactggcttgtgag

SEQ ID NO: 78442 - DNA, 21 bp, Artificial Sequence
  primer
tgctggtattgctggtactgc

SEQ ID NO: 78443 - DNA, 38 bp, Artificial Sequence
  primer
gtaaaacgacggccagttgcacctttggaacaatgaag

SEQ ID NO: 78444 - DNA, 38 bp, Artificial Sequence
  primer
gtaaaacgacggccagtgacgtgaagcaccatctcttg

SEQ ID NO: 78445 - DNA, 21 bp, Artificial Sequence
  primer
gaggtgctgcatgaacttgag

SEQ ID NO: 78446 - DNA, 38 bp, Artificial Sequence
  primer
gtaaaacgacggccagtaggtgtccgttcctacactgg

SEQ ID NO: 78447 - DNA, 39 bp, Artificial Sequence
  primer
gtaaaacgacggccagtccggcatagataggtatatggg

SEQ ID NO: 78448 - DNA, 21 bp, Artificial Sequence
  primer
ccacagagaagactcgcacac

SEQ ID NO: 78449 - DNA, 21 bp, Artificial Sequence
  primer
tccattgtgtctctcacccac

SEQ ID NO: 78450 - DNA, 20 bp, Artificial Sequence
  primer
gggaatccagagacggaaag

SEQ ID NO: 78451 - DNA, 21 bp, Artificial Sequence
  primer
gaagcgagttgacggcttaac

SEQ ID NO: 78452 - DNA, 21 bp, Artificial Sequence
  primer
cagcagggactcagatcaagg

SEQ ID NO: 78453 - DNA, 20 bp, Artificial Sequence
  primer
caggtgtgagccaccatgtc

SEQ ID NO: 78454 - DNA, 21 bp, Artificial Sequence
  primer
gcacatcaaacacacacatgg

SEQ ID NO: 78455 - DNA, 37 bp, Artificial Sequence
  primer
gtaaaacgacggccagttgccctgtctcaggtgtgtc

SEQ ID NO: 78456 - DNA, 36 bp, Artificial Sequence
  primer
gtaaaacgacggccagtaggacaatggtccctgctg

SEQ ID NO: 78457 - DNA, 38 bp, Artificial Sequence
  primer
gtaaaacgacggccagtgaacaaggacccatcttcctc

SEQ ID NO: 78458 - DNA, 38 bp, Artificial Sequence
  primer
gtaaaacgacggccagtaagggaaccactacctccctg

SEQ ID NO: 78459 - DNA, 21 bp, Artificial Sequence
  primer
gtttcagagatgaacggaggg

SEQ ID NO: 78460 - DNA, 40 bp, Artificial Sequence
  primer
gtaaaacgacggccagtcagatatgctgcaaattgaacac

SEQ ID NO: 78461 - DNA, 38 bp, Artificial Sequence
  primer
gtaaaacgacggccagtcaccacgatttcgagagtacg

SEQ ID NO: 78462 - DNA, 38 bp, Artificial Sequence
  primer
gtaaaacgacggccagttcaaacatgattggcagaacg

SEQ ID NO: 78463 - DNA, 22 bp, Artificial Sequence
  primer
ttcccaatatttcatggcattc

SEQ ID NO: 78464 - DNA, 21 bp, Artificial Sequence
  primer
tcccaagatgactgaaagtgg

SEQ ID NO: 78465 - DNA, 19 bp, Artificial Sequence
  primer
ttggctgatggaaagaccc

SEQ ID NO: 78466 - DNA, 27 bp, Artificial Sequence
  primer
aaatgttacttcttcccagttctcttt

SEQ ID NO: 78467 - DNA, 21 bp, Artificial Sequence
  primer
cacactgaaagggtcatcagc

SEQ ID NO: 78468 - DNA, 41 bp, Artificial Sequence
  primer
gtaaaacgacggccagtgcctgcagtaactcactccattac

SEQ ID NO: 78469 - DNA, 47 bp, Artificial Sequence
  primer
gtaaaacgacggccagtaatacactgtcaattaggacttctactgtt

SEQ ID NO: 78470 - DNA, 21 bp, Artificial Sequence
  primer
ttcaaagcttcaaacccagtg

SEQ ID NO: 78471 - DNA, 21 bp, Artificial Sequence
  primer
tgcatgtgcaaagtcttcctc

SEQ ID NO: 78472 - DNA, 38 bp, Artificial Sequence
  primer
gtaaaacgacggccagtgggtggtgacagttatttccc

SEQ ID NO: 78473 - DNA, 19 bp, Artificial Sequence
  primer
gcctgggcaactagagcaa

SEQ ID NO: 78474 - DNA, 38 bp, Artificial Sequence
  primer
gtaaaacgacggccagtacactgacgcgtgctaacttc

SEQ ID NO: 78475 - DNA, 38 bp, Artificial Sequence
  primer
gtaaaacgacggccagtacttcgcattattcctggctg

SEQ ID NO: 78476 - DNA, 39 bp, Artificial Sequence
  primer
gtaaaacgacggccagttctcctgatgcagctagatggt

SEQ ID NO: 78477 - DNA, 21 bp, Artificial Sequence
  primer
ttaaacattgtcatgcagccc

SEQ ID NO: 78478 - DNA, 37 bp, Artificial Sequence
  primer
gtaaaacgacggccagtcccgtagcttccttgaggtc

SEQ ID NO: 78479 - DNA, 22 bp, Artificial Sequence
  primer
cccatgggactgatagaactca

SEQ ID NO: 78480 - DNA, 27 bp, Artificial Sequence
  primer
ggattatactttctaaagctcagttgc

SEQ ID NO: 78481 - DNA, 24 bp, Artificial Sequence
  primer
gatggtatgaatgttcccagagtt

SEQ ID NO: 78482 - DNA, 25 bp, Artificial Sequence
  primer
ttcttatgataggtgttgcaagagg

SEQ ID NO: 78483 - DNA, 41 bp, Artificial Sequence
  primer
gtaaaacgacggccagtaaactattgcaagctgacactgaa

SEQ ID NO: 78484 - DNA, 38 bp, Artificial Sequence
  primer
gtaaaacgacggccagtaaattcgaagcatgcacacac

SEQ ID NO: 78485 - DNA, 23 bp, Artificial Sequence
  primer
tccagtcaaattgatatgggttg

SEQ ID NO: 78486 - DNA, 38 bp, Artificial Sequence
  primer
gtaaaacgacggccagtaaattgtgcatttgaagcagg

SEQ ID NO: 78487 - DNA, 23 bp, Artificial Sequence
  primer
cacagaaatatttgcaggtgtcc

SEQ ID NO: 78488 - DNA, 21 bp, Artificial Sequence
  primer
atgtttggaggcccaactagg

SEQ ID NO: 78489 - DNA, 42 bp, Artificial Sequence
  primer
gtaaaacgacggccagtttgaatattagaagcacagtctcca

SEQ ID NO: 78490 - DNA, 38 bp, Artificial Sequence
  primer
gtaaaacgacggccagttcgcataaatggaaactggtc

SEQ ID NO: 78491 - DNA, 20 bp, Artificial Sequence
  primer
agaacatgcccaacacacag

SEQ ID NO: 78492 - DNA, 22 bp, Artificial Sequence
  primer
tttctgctaccagctacaaggc

SEQ ID NO: 78493 - DNA, 38 bp, Artificial Sequence
  primer
gtaaaacgacggccagtctgctgctgggattctagagg

SEQ ID NO: 78494 - DNA, 21 bp, Artificial Sequence
  primer
ctccaacatccaatctgtccc

SEQ ID NO: 78495 - DNA, 21 bp, Artificial Sequence
  primer
atctggagtggaggacaggac

SEQ ID NO: 78496 - DNA, 21 bp, Artificial Sequence
  primer
tcttctggcggtacctagtgg

SEQ ID NO: 78497 - DNA, 38 bp, Artificial Sequence
  primer
gtaaaacgacggccagtaggaaaggaattcaaacgcac

SEQ ID NO: 78498 - DNA, 21 bp, Artificial Sequence
  primer
catgttcttcttgttcccagc

SEQ ID NO: 78499 - DNA, 21 bp, Artificial Sequence
  primer
gccagcaagtccagagtatcc

SEQ ID NO: 78500 - DNA, 38 bp, Artificial Sequence
  primer
gtaaaacgacggccagttaaacctcgatgagcaggtcc

SEQ ID NO: 78501 - DNA, 38 bp, Artificial Sequence
  primer
gtaaaacgacggccagttggaatgaaggtagaggcagg

SEQ ID NO: 78502 - DNA, 21 bp, Artificial Sequence
  primer
ccgaacgatactcccagactc

SEQ ID NO: 78503 - DNA, 37 bp, Artificial Sequence
  primer
gtaaaacgacggccagtaaaggtgggcctagaattgc

SEQ ID NO: 78504 - DNA, 25 bp, Artificial Sequence
  primer
ccagaagtagaatgcataacaccag

SEQ ID NO: 78505 - DNA, 21 bp, Artificial Sequence
  primer
tagctcccacaaggctctttc

SEQ ID NO: 78506 - DNA, 25 bp, Artificial Sequence
  primer
gagacaaccaaagattatttctccc

SEQ ID NO: 78507 - DNA, 38 bp, Artificial Sequence
  primer
gtaaaacgacggccagtacattcctgacaaacagcacg

SEQ ID NO: 78508 - DNA, 23 bp, Artificial Sequence
  primer
tcctccaaagactagatgtgcaa

SEQ ID NO: 78509 - DNA, 42 bp, Artificial Sequence
  primer
gtaaaacgacggccagtaaatgctttatccttactgcaaatg

SEQ ID NO: 78510 - DNA, 38 bp, Artificial Sequence
  primer
gtaaaacgacggccagtgcatggctcctgtctcattac

SEQ ID NO: 78511 - DNA, 40 bp, Artificial Sequence
  primer
gtaaaacgacggccagtacacgaacaatttagatgcaatg

SEQ ID NO: 78512 - DNA, 25 bp, Artificial Sequence
  primer
ttgaccaattacttgtctaggttcc

SEQ ID NO: 78513 - DNA, 20 bp, Artificial Sequence
  primer
gaagcagcaggagacagtgg

SEQ ID NO: 78514 - DNA, 41 bp, Artificial Sequence
  primer
gtaaaacgacggccagtcaaatttaaggtgaaagggaagtg

SEQ ID NO: 78515 - DNA, 38 bp, Artificial Sequence
  primer
gtaaaacgacggccagttccacaatattcagcccaatg

SEQ ID NO: 78516 - DNA, 21 bp, Artificial Sequence
  primer
tgactagaagggtcgcagatg

SEQ ID NO: 78517 - DNA, 21 bp, Artificial Sequence
  primer
agacagttctctgcctgccac

SEQ ID NO: 78518 - DNA, 38 bp, Artificial Sequence
  primer
gtaaaacgacggccagtgcaaggcagatttcattacgg

SEQ ID NO: 78519 - DNA, 38 bp, Artificial Sequence
  primer
gtaaaacgacggccagtgaaagggagtacagctcccag

SEQ ID NO: 78520 - DNA, 38 bp, Artificial Sequence
  primer
gtaaaacgacggccagttggctgactgggattagtgac

SEQ ID NO: 78521 - DNA, 21 bp, Artificial Sequence
  primer
ggctcaagtgattctcccatc

SEQ ID NO: 78522 - DNA, 27 bp, Artificial Sequence
  primer
aaaggtaaagaagattctgtttatggg

SEQ ID NO: 78523 - DNA, 21 bp, Artificial Sequence
  primer
catagtgctggattggcagag

SEQ ID NO: 78524 - DNA, 37 bp, Artificial Sequence
  primer
gtaaaacgacggccagtagaaggttcctttgcttggc

SEQ ID NO: 78525 - DNA, 38 bp, Artificial Sequence
  primer
gtaaaacgacggccagtaaacccagaaagctgaagtcc

SEQ ID NO: 78526 - DNA, 40 bp, Artificial Sequence
  primer
gtaaaacgacggccagttggtgagtgtcttcaccaatacc

SEQ ID NO: 78527 - DNA, 20 bp, Artificial Sequence
  primer
acaagggccactcactcatc

SEQ ID NO: 78528 - DNA, 20 bp, Artificial Sequence
  primer
atgtccaaggcagatgggag

SEQ ID NO: 78529 - DNA, 21 bp, Artificial Sequence
  primer
atcaccagaggccagtactcc

SEQ ID NO: 78530 - DNA, 21 bp, Artificial Sequence
  primer
ctcatcagaggccagttcacc

SEQ ID NO: 78531 - DNA, 39 bp, Artificial Sequence
  primer
gtaaaacgacggccagtccttggtcaatttccatactgc

SEQ ID NO: 78532 - DNA, 21 bp, Artificial Sequence
  primer
ttcatcctcagaaggtgcaag

SEQ ID NO: 78533 - DNA, 21 bp, Artificial Sequence
  primer
tatgctaacctggagagcacg

SEQ ID NO: 78534 - DNA, 24 bp, Artificial Sequence
  primer
tcagaaatccttcagttagccatc

SEQ ID NO: 78535 - DNA, 23 bp, Artificial Sequence
  primer
gctcaaccactttcttcaagttc

SEQ ID NO: 78536 - DNA, 21 bp, Artificial Sequence
  primer
gccctggcaaactaaacaaac

SEQ ID NO: 78537 - DNA, 40 bp, Artificial Sequence
  primer
gtaaaacgacggccagttttcctcctaattcagcatttcc

SEQ ID NO: 78538 - DNA, 42 bp, Artificial Sequence
  primer
gtaaaacgacggccagttgattacactgcaagattctttgac

SEQ ID NO: 78539 - DNA, 22 bp, Artificial Sequence
  primer
ttagaccaatgtgcccaatttc

SEQ ID NO: 78540 - DNA, 38 bp, Artificial Sequence
  primer
gtaaaacgacggccagtgggtaaagaagtccttgtggc

SEQ ID NO: 78541 - DNA, 21 bp, Artificial Sequence
  primer
cataatgcttgccacaaagcc

SEQ ID NO: 78542 - DNA, 22 bp, Artificial Sequence
  primer
gaagctgtgagacaatgtttgg

SEQ ID NO: 78543 - DNA, 23 bp, Artificial Sequence
  primer
ccaagcataatgccataaacatc

SEQ ID NO: 78544 - DNA, 44 bp, Artificial Sequence
  primer
gtaaaacgacggccagtttctgtcttatctttccacttaactcc

SEQ ID NO: 78545 - DNA, 27 bp, Artificial Sequence
  primer
tttaacattattatatgccattccaac

SEQ ID NO: 78546 - DNA, 39 bp, Artificial Sequence
  primer
gtaaaacgacggccagtggaagacctaacacttcccttg

SEQ ID NO: 78547 - DNA, 39 bp, Artificial Sequence
  primer
gtaaaacgacggccagtaaactgggtgagagtacatgcc

SEQ ID NO: 78548 - DNA, 38 bp, Artificial Sequence
  primer
gtaaaacgacggccagtaagaaatcttgcacaaggtgg

SEQ ID NO: 78549 - DNA, 21 bp, Artificial Sequence
  primer
cacccacggtactggttactg

SEQ ID NO: 78550 - DNA, 39 bp, Artificial Sequence
  primer
gtaaaacgacggccagtcccacctcactaagaatggttc

SEQ ID NO: 78551 - DNA, 38 bp, Artificial Sequence
  primer
gtaaaacgacggccagtgcagcaagtgaaagtcgtctg

SEQ ID NO: 78552 - DNA, 21 bp, Artificial Sequence
  primer
ggattgcttgagctcagaagg

SEQ ID NO: 78553 - DNA, 38 bp, Artificial Sequence
  primer
gtaaaacgacggccagtagacagatgcatgggaacact

SEQ ID NO: 78554 - DNA, 21 bp, Artificial Sequence
  primer
agcctggacaacaaagtgaga

SEQ ID NO: 78555 - DNA, 19 bp, Artificial Sequence
  primer
gccagggcaaaccattaaa

SEQ ID NO: 78556 - DNA, 41 bp, Artificial Sequence
  primer
gtaaaacgacggccagtaaatcatccaacatgtagcaaaca

SEQ ID NO: 78557 - DNA, 38 bp, Artificial Sequence
  primer
gtaaaacgacggccagtagcatgaaggagctttgtcac

SEQ ID NO: 78558 - DNA, 38 bp, Artificial Sequence
  primer
gtaaaacgacggccagtagctgaaatgtgacccaaatg

SEQ ID NO: 78559 - DNA, 22 bp, Artificial Sequence
  primer
tgacacaggaagaggtggtagc

SEQ ID NO: 78560 - DNA, 38 bp, Artificial Sequence
  primer
gtaaaacgacggccagtctgtcccaatagaaagggctc

SEQ ID NO: 78561 - DNA, 36 bp, Artificial Sequence
  primer
gtaaaacgacggccagtcataaggcacagcgcactc

SEQ ID NO: 78562 - DNA, 21 bp, Artificial Sequence
  primer
aaacagctgtcctgtgggaag

SEQ ID NO: 78563 - DNA, 21 bp, Artificial Sequence
  primer
acacaggagtacccgtcactg

SEQ ID NO: 78564 - DNA, 21 bp, Artificial Sequence
  primer
ggacgtagggaaagatctcgg

SEQ ID NO: 78565 - DNA, 18 bp, Artificial Sequence
  primer
ccctcccttccagacacc

SEQ ID NO: 78566 - DNA, 38 bp, Artificial Sequence
  primer
gtaaaacgacggccagtgtgcacaagtacagtcggcag

SEQ ID NO: 78567 - DNA, 38 bp, Artificial Sequence
  primer
gtaaaacgacggccagttgggagatctgagctttctgg

SEQ ID NO: 78568 - DNA, 21 bp, Artificial Sequence
  primer
aacctggaagacagctgaacc

SEQ ID NO: 78569 - DNA, 21 bp, Artificial Sequence
  primer
agcctccgtgctatgctactc

SEQ ID NO: 78570 - DNA, 20 bp, Artificial Sequence
  primer
ccaccaaggagtgagctgag

SEQ ID NO: 78571 - DNA, 38 bp, Artificial Sequence
  primer
gtaaaacgacggccagtggatctgtgtaagagcccagg

SEQ ID NO: 78572 - DNA, 21 bp, Artificial Sequence
  primer
ggtacggatcaagagtttggc

SEQ ID NO: 78573 - DNA, 21 bp, Artificial Sequence
  primer
atctcagagccactcccagag

SEQ ID NO: 78574 - DNA, 38 bp, Artificial Sequence
  primer
gtaaaacgacggccagtatggccagagaaaggaacaag

SEQ ID NO: 78575 - DNA, 21 bp, Artificial Sequence
  primer
gcttccagagcttcctctttg

SEQ ID NO: 78576 - DNA, 21 bp, Artificial Sequence
  primer
ccacatcccagatgtaaaggg

SEQ ID NO: 78577 - DNA, 38 bp, Artificial Sequence
  primer
gtaaaacgacggccagtgcgtgtggaaagtaccttgtg

SEQ ID NO: 78578 - DNA, 38 bp, Artificial Sequence
  primer
gtaaaacgacggccagtttaaacaaacaggccaggtcc

SEQ ID NO: 78579 - DNA, 21 bp, Artificial Sequence
  primer
ggaacagagatgtcagagccc

SEQ ID NO: 78580 - DNA, 21 bp, Artificial Sequence
  primer
acaaagtggacacaggcacac

SEQ ID NO: 78581 - DNA, 38 bp, Artificial Sequence
  primer
gtaaaacgacggccagtaagtgtgagtgcaaggagagg

SEQ ID NO: 78582 - DNA, 38 bp, Artificial Sequence
  primer
gtaaaacgacggccagttggagtatgagttgctgcctc

SEQ ID NO: 78583 - DNA, 20 bp, Artificial Sequence
  primer
atgcccaggaatacacccac

SEQ ID NO: 78584 - DNA, 21 bp, Artificial Sequence
  primer
aagttagcgatgccaatccac

SEQ ID NO: 78585 - DNA, 21 bp, Artificial Sequence
  primer
ttccacagccaacacatcttc

SEQ ID NO: 78586 - DNA, 38 bp, Artificial Sequence
  primer
gtaaaacgacggccagttccgggataaaggacctagtg

SEQ ID NO: 78587 - DNA, 19 bp, Artificial Sequence
  primer
caaggtcacaagcgagcag

SEQ ID NO: 78588 - DNA, 21 bp, Artificial Sequence
  primer
tgcctttcttaagggagcttg

SEQ ID NO: 78589 - DNA, 23 bp, Artificial Sequence
  primer
gcacatactgaagagacagcagg

SEQ ID NO: 78590 - DNA, 21 bp, Artificial Sequence
  primer
ccaacagagacagacagcagc

SEQ ID NO: 78591 - DNA, 20 bp, Artificial Sequence
  primer
ggcagagaagggtttggaac

SEQ ID NO: 78592 - DNA, 38 bp, Artificial Sequence
  primer
gtaaaacgacggccagttgagtctttgggcctgttctc

SEQ ID NO: 78593 - DNA, 38 bp, Artificial Sequence
  primer
gtaaaacgacggccagtacaggaaaggttgattcctgg

SEQ ID NO: 78594 - DNA, 37 bp, Artificial Sequence
  primer
gtaaaacgacggccagtaacactcagaggagccgtcc

SEQ ID NO: 78595 - DNA, 20 bp, Artificial Sequence
  primer
cttcagggacatgaagcagg

SEQ ID NO: 78596 - DNA, 38 bp, Artificial Sequence
  primer
gtaaaacgacggccagtaattctccacgttctcaaccc

SEQ ID NO: 78597 - DNA, 21 bp, Artificial Sequence
  primer
gtagctgtagatgtggctgcg

SEQ ID NO: 78598 - DNA, 38 bp, Artificial Sequence
  primer
gtaaaacgacggccagtaagcagctggcacaattaagg

SEQ ID NO: 78599 - DNA, 38 bp, Artificial Sequence
  primer
gtaaaacgacggccagttagatgacgggacaaagtggg

SEQ ID NO: 78600 - DNA, 20 bp, Artificial Sequence
  primer
ctctttccagttggcccttc

SEQ ID NO: 78601 - DNA, 36 bp, Artificial Sequence
  primer
gtaaaacgacggccagtaagacgtgcagaacctgcc

SEQ ID NO: 78602 - DNA, 38 bp, Artificial Sequence
  primer
gtaaaacgacggccagtgtcgtagacggtgagcacaag

SEQ ID NO: 78603 - DNA, 38 bp, Artificial Sequence
  primer
gtaaaacgacggccagttggtgggagaggtaaggattc

SEQ ID NO: 78604 - DNA, 38 bp, Artificial Sequence
  primer
gtaaaacgacggccagtccacccagtcactccctagac

SEQ ID NO: 78605 - DNA, 21 bp, Artificial Sequence
  primer
cacaggtagcaagcaatggag

SEQ ID NO: 78606 - DNA, 21 bp, Artificial Sequence
  primer
gaggcctaaagaaggcaggag

SEQ ID NO: 78607 - DNA, 21 bp, Artificial Sequence
  primer
agaagcaagttctgggagctg

SEQ ID NO: 78608 - DNA, 38 bp, Artificial Sequence
  primer
gtaaaacgacggccagtcctcctgccactctgctagac

SEQ ID NO: 78609 - DNA, 21 bp, Artificial Sequence
  primer
tgtctgtggtcacctgaaacc

SEQ ID NO: 78610 - DNA, 21 bp, Artificial Sequence
  primer
tcggactccaaaccaactacc

SEQ ID NO: 78611 - DNA, 21 bp, Artificial Sequence
  primer
accaaactcctgcacaccttc

SEQ ID NO: 78612 - DNA, 21 bp, Artificial Sequence
  primer
taggatgtcccagctttgtcc

SEQ ID NO: 78613 - DNA, 37 bp, Artificial Sequence
  primer
gtaaaacgacggccagtaaacaggaagccacgaggag

SEQ ID NO: 78614 - DNA, 21 bp, Artificial Sequence
  primer
cagagtctcagaggccttccc

SEQ ID NO: 78615 - DNA, 37 bp, Artificial Sequence
  primer
gtaaaacgacggccagtctacacttccagctgctgcc

SEQ ID NO: 78616 - DNA, 21 bp, Artificial Sequence
  primer
ttcaccacctctcctacaggg

SEQ ID NO: 78617 - DNA, 23 bp, Artificial Sequence
  primer
gggtcagaggtaagaggacacac

SEQ ID NO: 78618 - DNA, 36 bp, Artificial Sequence
  primer
gtaaaacgacggccagtaggtcaccgtcctctctgg

SEQ ID NO: 78619 - DNA, 21 bp, Artificial Sequence
  primer
ctggtagaagatgccggagac

SEQ ID NO: 78620 - DNA, 37 bp, Artificial Sequence
  primer
gtaaaacgacggccagttgtgtcctgcagggagagag

SEQ ID NO: 78621 - DNA, 37 bp, Artificial Sequence
  primer
gtaaaacgacggccagtcttgaactcaggccaagcag

SEQ ID NO: 78622 - DNA, 18 bp, Artificial Sequence
  primer
acgctggctttcaatccc

SEQ ID NO: 78623 - DNA, 38 bp, Artificial Sequence
  primer
gtaaaacgacggccagtacaccaacctcacagcgctac

SEQ ID NO: 78624 - DNA, 21 bp, Artificial Sequence
  primer
atgaaatctggcagcaacttc

SEQ ID NO: 78625 - DNA, 40 bp, Artificial Sequence
  primer
gtaaaacgacggccagtacacagaaggtacgcagtaaagg

SEQ ID NO: 78626 - DNA, 22 bp, Artificial Sequence
  primer
ggtgacacagcaagacttcatc

SEQ ID NO: 78627 - DNA, 38 bp, Artificial Sequence
  primer
gtaaaacgacggccagtctgaatactgcttggtctggc

SEQ ID NO: 78628 - DNA, 21 bp, Artificial Sequence
  primer
atggctacaggaggcattacg

SEQ ID NO: 78629 - DNA, 27 bp, Artificial Sequence
  primer
tgacaatattacacaattctgtgtgtg

SEQ ID NO: 78630 - DNA, 25 bp, Artificial Sequence
  primer
tgaggtactcacagaatcaatctca

SEQ ID NO: 78631 - DNA, 39 bp, Artificial Sequence
  primer
gtaaaacgacggccagtgccaaatatccatctgaaacaa

SEQ ID NO: 78632 - DNA, 20 bp, Artificial Sequence
  primer
tcccacatcagcctctcaag

SEQ ID NO: 78633 - DNA, 40 bp, Artificial Sequence
  primer
gtaaaacgacggccagttccaaagcttatgtgacaactca

SEQ ID NO: 78634 - DNA, 38 bp, Artificial Sequence
  primer
gtaaaacgacggccagttccaatatctaaggcagacgg

SEQ ID NO: 78635 - DNA, 23 bp, Artificial Sequence
  primer
tttctctgtgtggtgatgaagtt

SEQ ID NO: 78636 - DNA, 37 bp, Artificial Sequence
  primer
gtaaaacgacggccagtatttgggttctccatccacc

SEQ ID NO: 78637 - DNA, 21 bp, Artificial Sequence
  primer
tcagttcaaagagcctgcatc

SEQ ID NO: 78638 - DNA, 39 bp, Artificial Sequence
  primer
gtaaaacgacggccagtgaatcaggcgcttaaatttctc

SEQ ID NO: 78639 - DNA, 22 bp, Artificial Sequence
  primer
aatgccaaattcatatgcaagg

SEQ ID NO: 78640 - DNA, 26 bp, Artificial Sequence
  primer
aacaaacttatgcaacagttaagtcc

SEQ ID NO: 78641 - DNA, 23 bp, Artificial Sequence
  primer
cagacagagtgctttctttggtg

SEQ ID NO: 78642 - DNA, 40 bp, Artificial Sequence
  primer
gtaaaacgacggccagttggacttggttgtctctttagga

SEQ ID NO: 78643 - DNA, 39 bp, Artificial Sequence
  primer
gtaaaacgacggccagtcagaatctgctaccactgcttc

SEQ ID NO: 78644 - DNA, 26 bp, Artificial Sequence
  primer
aaaggaatagttgcatgtacagagtc

SEQ ID NO: 78645 - DNA, 39 bp, Artificial Sequence
  primer
gtaaaacgacggccagtggttgagatgaaaggattccac

SEQ ID NO: 78646 - DNA, 39 bp, Artificial Sequence
  primer
gtaaaacgacggccagtgcaggctgacccagtaaataac

SEQ ID NO: 78647 - DNA, 41 bp, Artificial Sequence
  primer
gtaaaacgacggccagttttattaagtcttctcggccaaac

SEQ ID NO: 78648 - DNA, 23 bp, Artificial Sequence
  primer
tggcatcaaataagtggagagag

SEQ ID NO: 78649 - DNA, 23 bp, Artificial Sequence
  primer
ttaagatgcagctactacccagc

SEQ ID NO: 78650 - DNA, 19 bp, Artificial Sequence
  primer
cccaccatccttgctgttt

SEQ ID NO: 78651 - DNA, 40 bp, Artificial Sequence
  primer
gtaaaacgacggccagtaaagagaaagggttaacctgcat

SEQ ID NO: 78652 - DNA, 38 bp, Artificial Sequence
  primer
gtaaaacgacggccagtgagttgtgacaatcccactgc

SEQ ID NO: 78653 - DNA, 19 bp, Artificial Sequence
  primer
cgcacctggccttaatttc

SEQ ID NO: 78654 - DNA, 18 bp, Artificial Sequence
  primer
acaagcgtgagccaccat

SEQ ID NO: 78655 - DNA, 41 bp, Artificial Sequence
  primer
gtaaaacgacggccagtttcttcaaagacaccatgtgattc

SEQ ID NO: 78656 - DNA, 23 bp, Artificial Sequence
  primer
aaacatcttggtcacgacgatac

SEQ ID NO: 78657 - DNA, 38 bp, Artificial Sequence
  primer
gtaaaacgacggccagtagttcttcaagcgactgaggg

SEQ ID NO: 78658 - DNA, 21 bp, Artificial Sequence
  primer
gaataaggatcagcctacggg

SEQ ID NO: 78659 - DNA, 41 bp, Artificial Sequence
  primer
gtaaaacgacggccagtttgcaactgtgagctgttactatg

SEQ ID NO: 78660 - DNA, 22 bp, Artificial Sequence
  primer
gacccagaaagaatgcagtttc

SEQ ID NO: 78661 - DNA, 40 bp, Artificial Sequence
  primer
gtaaaacgacggccagtaactgctttccaatattcccaac

SEQ ID NO: 78662 - DNA, 38 bp, Artificial Sequence
  primer
gtaaaacgacggccagtatggtatgtgtgttgctggtg

SEQ ID NO: 78663 - DNA, 41 bp, Artificial Sequence
  primer
gtaaaacgacggccagtcgaataaatcgaataaatagcctt

SEQ ID NO: 78664 - DNA, 41 bp, Artificial Sequence
  primer
gtaaaacgacggccagtcattgaaggtgtcaaccaataaac

SEQ ID NO: 78665 - DNA, 41 bp, Artificial Sequence; identical to SEQ ID NO: 78664
  primer

SEQ ID NO: 78666 - DNA, 27 bp, Artificial Sequence
  primer
tcactaaagtgtcacaagattctgttc

SEQ ID NO: 78667 - DNA, 21 bp, Artificial Sequence
  primer
gcggacagagtgagtctttgt

SEQ ID NO: 78668 - DNA, 21 bp, Artificial Sequence
  primer
taacgttgcgaactgctatcc

SEQ ID NO: 78669 - DNA, 18 bp, Artificial Sequence
  primer
caatgtgcctggcctacg

SEQ ID NO: 78670 - DNA, 39 bp, Artificial Sequence
  primer
gtaaaacgacggccagttgacaatgaaaccaagagcaag

SEQ ID NO: 78671 - DNA, 38 bp, Artificial Sequence
  primer
gtaaaacgacggccagtcattgggcaattctgtcattg

SEQ ID NO: 78672 - DNA, 24 bp, Artificial Sequence
  primer
caccattatatcaagtgtctggca

SEQ ID NO: 78673 - DNA, 40 bp, Artificial Sequence
  primer
gtaaaacgacggccagttccctggatttatgaaatatggc

SEQ ID NO: 78674 - DNA, 21 bp, Artificial Sequence
  primer
ttgctatcccgaagctgaaac

SEQ ID NO: 78675 - DNA, 22 bp, Artificial Sequence
  primer
tgggattccatcttaaatccat

SEQ ID NO: 78676 - DNA, 38 bp, Artificial Sequence
  primer
gtaaaacgacggccagtacactttgcaacaccttcacc

SEQ ID NO: 78677 - DNA, 25 bp, Artificial Sequence
  primer
aagcattcctattatttcagaacag

SEQ ID NO: 78678 - DNA, 22 bp, Artificial Sequence
  primer
tgcatggcataaactctgagac

SEQ ID NO: 78679 - DNA, 24 bp, Artificial Sequence
  primer
ttcgaggtcatatgttactagggc

SEQ ID NO: 78680 - DNA, 38 bp, Artificial Sequence
  primer
gtaaaacgacggccagtcctctgcttcaggagtatccc

SEQ ID NO: 78681 - DNA, 22 bp, Artificial Sequence
  primer
agtgtgtgtgtgtgtgtgtgtg

SEQ ID NO: 78682 - DNA, 38 bp, Artificial Sequence
  primer
gtaaaacgacggccagtggagggcagagaattacaagg

SEQ ID NO: 78683 - DNA, 21 bp, Artificial Sequence
  primer
caagtgatccacccacttcag

SEQ ID NO: 78684 - DNA, 38 bp, Artificial Sequence
  primer
gtaaaacgacggccagttttccctcaggctttctgttt

SEQ ID NO: 78685 - DNA, 22 bp, Artificial Sequence
  primer
cgaccacatgatggactgatag

SEQ ID NO: 78686 - DNA, 22 bp, Artificial Sequence
  primer
aaagggtagctggtagtggagg

SEQ ID NO: 78687 - DNA, 42 bp, Artificial Sequence
  primer
gtaaaacgacggccagtaaagaccaagtcactctttctatgc

SEQ ID NO: 78688 - DNA, 42 bp, Artificial Sequence
  primer
gtaaaacgacggccagtcaaagaggtatacacgattcctgac

SEQ ID NO: 78689 - DNA, 21 bp, Artificial Sequence
  primer
tgtatgcctgcatgtgtgaga

SEQ ID NO: 78690 - DNA, 36 bp, Artificial Sequence
  primer
gtaaaacgacggccagtggtcagccaggatggtctc

SEQ ID NO: 78691 - DNA, 18 bp, Artificial Sequence
  primer
ccagggaatgctgaagcc

SEQ ID NO: 78692 - DNA, 22 bp, Artificial Sequence
  primer
ggtgtagaacagaaggcaatgg

SEQ ID NO: 78693 - DNA, 39 bp, Artificial Sequence
  primer
gtaaaacgacggccagttcccaaataaagcagaaagaaa

SEQ ID NO: 78694 - DNA, 21 bp, Artificial Sequence
  primer
aatatgggcatgagccacttc

SEQ ID NO: 78695 - DNA, 24 bp, Artificial Sequence
  primer
tttcactcacacactttcattctg

SEQ ID NO: 78696 - DNA, 42 bp, Artificial Sequence
  primer
gtaaaacgacggccagttgatttaataatgaagatgggttgg

SEQ ID NO: 78697 - DNA, 38 bp, Artificial Sequence
  primer
gtaaaacgacggccagtttggtaggcaaacaacattcc

SEQ ID NO: 78698 - DNA, 21 bp, Artificial Sequence
  primer
gctgggattacaggtgcaaag

SEQ ID NO: 78699 - DNA, 21 bp, Artificial Sequence
  primer
tgaagcagtgctcttcacatc

SEQ ID NO: 78700 - DNA, 38 bp, Artificial Sequence
  primer
gtaaaacgacggccagtgaacagtttaaaggccttggg

SEQ ID NO: 78701 - DNA, 21 bp, Artificial Sequence
  primer
cagcccgaatgaccattattt

SEQ ID NO: 78702 - DNA, 20 bp, Artificial Sequence
  primer
cttccgtccactcctcattg

SEQ ID NO: 78703 - DNA, 21 bp, Artificial Sequence
  primer
taccctctgccaaacaggaag

SEQ ID NO: 78704 - DNA, 38 bp, Artificial Sequence
  primer
gtaaaacgacggccagtggcctttctcttatgtcccag

SEQ ID NO: 78705 - DNA, 21 bp, Artificial Sequence
  primer
gagcatgatatccagtgggtg

SEQ ID NO: 78706 - DNA, 38 bp, Artificial Sequence
  primer
gtaaaacgacggccagtagaggctgatgcattgttgag

SEQ ID NO: 78707 - DNA, 20 bp, Artificial Sequence
  primer
aggaagcaggaggcagagag

SEQ ID NO: 78708 - DNA, 38 bp, Artificial Sequence
  primer
gtaaaacgacggccagtatgtgttgagactggtgggtg

SEQ ID NO: 78709 - DNA, 21 bp, Artificial Sequence
  primer
gggtgtgaacatgggtaggac

SEQ ID NO: 78710 - DNA, 35 bp, Artificial Sequence
  primer
gtaaaacgacggccagtgggtttgtatccgggtgg

SEQ ID NO: 78711 - DNA, 39 bp, Artificial Sequence
  primer
gtaaaacgacggccagtgctgggtacatctaccaccttg

SEQ ID NO: 78712 - DNA, 21 bp, Artificial Sequence
  primer
cctgctactccctctctcgtc

SEQ ID NO: 78713 - DNA, 19 bp, Artificial Sequence
  primer
acaggtggcgacgtgactc

SEQ ID NO: 78714 - DNA, 21 bp, Artificial Sequence
  primer
ggttccagctcactaggcttc

SEQ ID NO: 78715 - DNA, 21 bp, Artificial Sequence
  primer
gatagcatcttgctggtgcag

SEQ ID NO: 78716 - DNA, 38 bp, Artificial Sequence
  primer
gtaaaacgacggccagtggccataggaatgaaagagcc

SEQ ID NO: 78717 - DNA, 21 bp, Artificial Sequence
  primer
agctccagctctcctattccc

SEQ ID NO: 78718 - DNA, 21 bp, Artificial Sequence
  primer
gagaccaactctgaccttgcc

SEQ ID NO: 78719 - DNA, 20 bp, Artificial Sequence
  primer
ttctgtctgtccctccctcc

SEQ ID NO: 78720 - DNA, 21 bp, Artificial Sequence
  primer
aatgtagcaaatactgggcgg

SEQ ID NO: 78721 - DNA, 21 bp, Artificial Sequence
  primer
aggcgttgatgtagatttggg

SEQ ID NO: 78722 - DNA, 21 bp, Artificial Sequence
  primer
tcctcgaaagtcgagaagtgc

SEQ ID NO: 78723 - DNA, 21 bp, Artificial Sequence
  primer
taaacaacgaccatcgcagag

SEQ ID NO: 78724 - DNA, 19 bp, Artificial Sequence
  primer
gaacgggaggtagtggtcg

SEQ ID NO: 78725 - DNA, 37 bp, Artificial Sequence
  primer
gtaaaacgacggccagtgaggcttctgggctacttgg

SEQ ID NO: 78726 - DNA, 20 bp, Artificial Sequence
  primer
ttccaagtccagtcggaaag

SEQ ID NO: 78727 - DNA, 39 bp, Artificial Sequence
  primer
gtaaaacgacggccagtggaggaatcctggtggttattg

SEQ ID NO: 78728 - DNA, 38 bp, Artificial Sequence
  primer
gtaaaacgacggccagttaaacacacctctatcccgcc

SEQ ID NO: 78729 - DNA, 20 bp, Artificial Sequence
  primer
agagctgatctctctggccc

SEQ ID NO: 78730 - DNA, 21 bp, Artificial Sequence
  primer
catcttggagaagaccacgag

SEQ ID NO: 78731 - DNA, 38 bp, Artificial Sequence
  primer
gtaaaacgacggccagtcttcaagatcagcatccggtc

SEQ ID NO: 78732 - DNA, 21 bp, Artificial Sequence
  primer
aactatctgaaatggccgtgg

SEQ ID NO: 78733 - DNA, 21 bp, Artificial Sequence
  primer
ctcaagctctcaaaggccaag

SEQ ID NO: 78734 - DNA, 20 bp, Artificial Sequence
  primer
gggtcctctcagaccctcag

SEQ ID NO: 78735 - DNA, 21 bp, Artificial Sequence
  primer
gctacaccatgtggcaaagag

SEQ ID NO: 78736 - DNA, 19 bp, Artificial Sequence
  primer
gaggctgaggcaggagaat

SEQ ID NO: 78737 - DNA, 21 bp, Artificial Sequence
  primer
agctgggactacaggcacatt

SEQ ID NO: 78738 - DNA, 21 bp, Artificial Sequence
  primer
gatcccattggtgatttaggc

SEQ ID NO: 78739 - DNA, 21 bp, Artificial Sequence
  primer
cagtaatccctgaagcgtgtg

SEQ ID NO: 78740 - DNA, 37 bp, Artificial Sequence
  primer
gtaaaacgacggccagtgcccagcgacagtgtatttg

SEQ ID NO: 78741 - DNA, 36 bp, Artificial Sequence
  primer
gtaaaacgacggccagttgccctcaggaggactgac

SEQ ID NO: 78742 - DNA, 38 bp, Artificial Sequence
  primer
gtaaaacgacggccagttcaccactgacatcctcttgc

SEQ ID NO: 78743 - DNA, 38 bp, Artificial Sequence
  primer
gtaaaacgacggccagttcaagagaaggaattgggtgg

SEQ ID NO: 78744 - DNA, 38 bp, Artificial Sequence
  primer
gtaaaacgacggccagtcaaccagcaggcatactcttc

SEQ ID NO: 78745 - DNA, 21 bp, Artificial Sequence
  primer
ggagaagattcaggcaagcac

SEQ ID NO: 78746 - DNA, 38 bp, Artificial Sequence
  primer
gtaaaacgacggccagtggaatgtgagtgtctgccaag

SEQ ID NO: 78747 - DNA, 38 bp, Artificial Sequence
  primer
gtaaaacgacggccagttctcgtggtgtagcatggaag

SEQ ID NO: 78748 - DNA, 21 bp, Artificial Sequence
  primer
aaaccctttagcctcgttcag

SEQ ID NO: 78749 - DNA, 21 bp, Artificial Sequence
  primer
ggacaattacacaggcgaagg

SEQ ID NO: 78750 - DNA, 20 bp, Artificial Sequence
  primer
ggactggcactttggaagag

SEQ ID NO: 78751 - DNA, 21 bp, Artificial Sequence
  primer
gtaggcctgaaagacagtggg

SEQ ID NO: 78752 - DNA, 21 bp, Artificial Sequence
  primer
acactgaggtcagctttgcag

SEQ ID NO: 78753 - DNA, 21 bp, Artificial Sequence
  primer
tctttgagcttccagagaccc

SEQ ID NO: 78754 - DNA, 37 bp, Artificial Sequence
  primer
gtaaaacgacggccagtgactcctcaggacaccctcc

SEQ ID NO: 78755 - DNA, 37 bp, Artificial Sequence
  primer
gtaaaacgacggccagtgtctggcccttgaagtcctg

SEQ ID NO: 78756 - DNA, 41 bp, Artificial Sequence
  primer
gtaaaacgacggccagtcatctccctagaactcttctgtgc

SEQ ID NO: 78757 - DNA, 25 bp, Artificial Sequence
  primer
ggatgatgtcacatgtcttaggttt

SEQ ID NO: 78758 - DNA, 38 bp, Artificial Sequence
  primer
gtaaaacgacggccagtagggtcctggtcacacctaag

SEQ ID NO: 78759 - DNA, 40 bp, Artificial Sequence
  primer
gtaaaacgacggccagttctgggattctatttcatcctgg

SEQ ID NO: 78760 - DNA, 21 bp, Artificial Sequence
  primer
gatgccacaagatacctccag

SEQ ID NO: 78761 - DNA, 22 bp, Artificial Sequence
  primer
ttaaagccaagaagcgaatacc

SEQ ID NO: 78762 - DNA, 41 bp, Artificial Sequence
  primer
gtaaaacgacggccagtaaatccaccttaccaaagtcaaat

SEQ ID NO: 78763 - DNA, 21 bp, Artificial Sequence
  primer
tgtccaagcttcacaatttcg

SEQ ID NO: 78764 - DNA, 41 bp, Artificial Sequence
  primer
gtaaaacgacggccagttcagaattgtcagacatccaacac

SEQ ID NO: 78765 - DNA, 21 bp, Artificial Sequence
  primer
tgctgagctgcaatcatgtag

SEQ ID NO: 78766 - DNA, 44 bp, Artificial Sequence
  primer
gtaaaacgacggccagtaatgctgaatcagtgttatacagctac

SEQ ID NO: 78767 - DNA, 21 bp, Artificial Sequence
  primer
aaagtccaccatgacctgctc

SEQ ID NO: 78768 - DNA, 21 bp, Artificial Sequence
  primer
ttcccatcaaatcctaggcag

SEQ ID NO: 78769 - DNA, 38 bp, Artificial Sequence
  primer
gtaaaacgacggccagtggattagggtttgctacacgc

SEQ ID NO: 78770 - DNA, 38 bp, Artificial Sequence
  primer
gtaaaacgacggccagtactggacagggtaggcagaac

SEQ ID NO: 78771 - DNA, 21 bp, Artificial Sequence
  primer
tgagccaagatattgcaccac

SEQ ID NO: 78772 - DNA, 39 bp, Artificial Sequence
  primer
gtaaaacgacggccagtgaaagagacagaaggatcggtg

SEQ ID NO: 78773 - DNA, 37 bp, Artificial Sequence
  primer
gtaaaacgacggccagtagctagccacacacagcctc

SEQ ID NO: 78774 - DNA, 38 bp, Artificial Sequence
  primer
gtaaaacgacggccagtaggacacttcgtcttcatccc

SEQ ID NO: 78775 - DNA, 28 bp, Artificial Sequence
  primer
aaagttaagtaagtgaatatctgccaca

SEQ ID NO: 78776 - DNA, 38 bp, Artificial Sequence
  primer
gtaaaacgacggccagtatgctgaaattggtggcaaag

SEQ ID NO: 78777 - DNA, 39 bp, Artificial Sequence
  primer
gtaaaacgacggccagttgtgatcacccttctcccatag

SEQ ID NO: 78778 - DNA, 21 bp, Artificial Sequence
  primer
gctgccaaccattcgtagtag

SEQ ID NO: 78779 - DNA, 39 bp, Artificial Sequence
  primer
gtaaaacgacggccagtcaagtcattcttgcttggagag

SEQ ID NO: 78780 - DNA, 38 bp, Artificial Sequence
  primer
gtaaaacgacggccagtgtgactgatggaaagcacagc

SEQ ID NO: 78781 - DNA, 36 bp, Artificial Sequence
  primer
gtaaaacgacggccagtggtccgagtcccagacatc

SEQ ID NO: 78782 - DNA, 21 bp, Artificial Sequence
  primer
aaccgagaagcactaacaccc

SEQ ID NO: 78783 - DNA, 21 bp, Artificial Sequence
  primer
ggctgtcaccaacttaaaccc

SEQ ID NO: 78784 - DNA, 38 bp, Artificial Sequence
  primer
gtaaaacgacggccagtatctctgggtgatttgggatg

SEQ ID NO: 78785 - DNA, 36 bp, Artificial Sequence
  primer
gtaaaacgacggccagtctgagtggcctccgacttc

SEQ ID NO: 78786 - DNA, 21 bp, Artificial Sequence
  primer
ggatgttagtttctgtggccg

SEQ ID NO: 78787 - DNA, 21 bp, Artificial Sequence
  primer
aatatggttccacgaagccac

SEQ ID NO: 78788 - DNA, 38 bp, Artificial Sequence
  primer
gtaaaacgacggccagttgtgtgcctgagacaaaccag

SEQ ID NO: 78789 - DNA, 21 bp, Artificial Sequence
  primer
ccgtattctctgatgctgctg

SEQ ID NO: 78790 - DNA, 38 bp, Artificial Sequence
  primer
gtaaaacgacggccagtgcaaaggaactgccaataagg

SEQ ID NO: 78791 - DNA, 21 bp, Artificial Sequence
  primer
cctttccagatccaaagatgg

SEQ ID NO: 78792 - DNA, 20 bp, Artificial Sequence
  primer
aggcacaggacctgaggaac

SEQ ID NO: 78793 - DNA, 21 bp, Artificial Sequence
  primer
acacacatcgcaccttctgac

SEQ ID NO: 78794 - DNA, 21 bp, Artificial Sequence
  primer
ctaggtgcaaatccctgactg

SEQ ID NO: 78795 - DNA, 36 bp, Artificial Sequence
  primer
gtaaaacgacggccagtttccctcaaacgcagaacc

SEQ ID NO: 78796 - DNA, 21 bp, Artificial Sequence
  primer
agcattccagaaatgttgcac

SEQ ID NO: 78797 - DNA, 38 bp, Artificial Sequence
  primer
gtaaaacgacggccagtatacaatacgccattcccagc

SEQ ID NO: 78798 - DNA, 38 bp, Artificial Sequence
  primer
gtaaaacgacggccagtgacacctagcctctccctgag

SEQ ID NO: 78799 - DNA, 19 bp, Artificial Sequence
  primer
acttgcaggtgaaggccac

SEQ ID NO: 78800 - DNA, 20 bp, Artificial Sequence
  primer
gcggtgagacctaacggaag

SEQ ID NO: 78801 - DNA, 36 bp, Artificial Sequence
  primer
gtaaaacgacggccagtccatgggcctttgtctagc

SEQ ID NO: 78802 - DNA, 38 bp, Artificial Sequence
  primer
gtaaaacgacggccagtgcatcaagtggctcagacaag

SEQ ID NO: 78803 - DNA, 21 bp, Artificial Sequence
  primer
agtgctgctcattcccaagtc

SEQ ID NO: 78804 - DNA, 21 bp, Artificial Sequence
  primer
gtggctattggaaggaactgc

SEQ ID NO: 78805 - DNA, 38 bp, Artificial Sequence
  primer
gtaaaacgacggccagtctgcactgaattctgctttgg

SEQ ID NO: 78806 - DNA, 36 bp, Artificial Sequence
  primer
gtaaaacgacggccagtgtggagagtggcttccagc

SEQ ID NO: 78807 - DNA, 38 bp, Artificial Sequence
  primer
gtaaaacgacggccagttcctggtctgttcctccgtat

SEQ ID NO: 78808 - DNA, 23 bp, Artificial Sequence
  primer
tgaaatccaaacctttcacactg

SEQ ID NO: 78809 - DNA, 36 bp, Artificial Sequence
  primer
gtaaaacgacggccagtcaaccacagtgctgggtcc

SEQ ID NO: 78810 - DNA, 18 bp, Artificial Sequence
  primer
agaagcgccggctagaag

SEQ ID NO: 78811 - DNA, 21 bp, Artificial Sequence
  primer
attatgttgcccacactggtc

SEQ ID NO: 78812 - DNA, 41 bp, Artificial Sequence
  primer
gtaaaacgacggccagtcactgaatacaatgcagaagcact

SEQ ID NO: 78813 - DNA, 22 bp, Artificial Sequence
  primer
aatcattccatgagtcaccagg

SEQ ID NO: 78814 - DNA, 38 bp, Artificial Sequence
  primer
gtaaaacgacggccagttctgaggacagaagcaccaag

SEQ ID NO: 78815 - DNA, 19 bp, Artificial Sequence
  primer
ccatgtgaggctacccttg

SEQ ID NO: 78816 - DNA, 38 bp, Artificial Sequence
  primer
gtaaaacgacggccagtccattaattgcatctcccacc

SEQ ID NO: 78817 - DNA, 40 bp, Artificial Sequence
  primer
gtaaaacgacggccagtccctttggaacttctagtccctc

SEQ ID NO: 78818 - DNA, 39 bp, Artificial Sequence
  primer
gtaaaacgacggccagtttggttctcacccaccattact

SEQ ID NO: 78819 - DNA, 27 bp, Artificial Sequence
  primer
gcatttactacatgtccaatactgtgc

SEQ ID NO: 78820 - DNA, 22 bp, Artificial Sequence
  primer
tggtctctccaatcagaagtca

SEQ ID NO: 78821 - DNA, 38 bp, Artificial Sequence
  primer
gtaaaacgacggccagtattgggaacagctaggagtgg

SEQ ID NO: 78822 - DNA, 24 bp, Artificial Sequence
  primer
gggctgtaacaacaaattcttagg

SEQ ID NO: 78823 - DNA, 26 bp, Artificial Sequence
  primer
aaagactcaatgcaagcttgataata

SEQ ID NO: 78824 - DNA, 25 bp, Artificial Sequence
  primer
cctgtgagctacagtttactgatcc

SEQ ID NO: 78825 - DNA, 39 bp, Artificial Sequence
  primer
gtaaaacgacggccagtggagaattgatgactcagctcc

SEQ ID NO: 78826 - DNA, 38 bp, Artificial Sequence
  primer
gtaaaacgacggccagtaaaggaatgtggagccaacac

SEQ ID NO: 78827 - DNA, 28 bp, Artificial Sequence
  primer
tgggatgttagtaaagagaatttatgtc

SEQ ID NO: 78828 - DNA, 21 bp, Artificial Sequence
  primer
acagtgggctatatcatcggg

SEQ ID NO: 78829 - DNA, 23 bp, Artificial Sequence
  primer
caacatgagatgtgactgactcc

SEQ ID NO: 78830 - DNA, 37 bp, Artificial Sequence
  primer
gtaaaacgacggccagtcgcccggcctaattatagta

SEQ ID NO: 78831 - DNA, 22 bp, Artificial Sequence
  primer
cttattgctggttcaggacaaa

SEQ ID NO: 78832 - DNA, 37 bp, Artificial Sequence
  primer
gtaaaacgacggccagttggttccctgcaggactaag

SEQ ID NO: 78833 - DNA, 27 bp, Artificial Sequence
  primer
taatcaccaagacataaataaatctgc

SEQ ID NO: 78834 - DNA, 23 bp, Artificial Sequence
  primer
tcgagattacactgtattgcctg

SEQ ID NO: 78835 - DNA, 21 bp, Artificial Sequence
  primer
aaatatcagctgaggcttccc

SEQ ID NO: 78836 - DNA, 42 bp, Artificial Sequence
  primer
gtaaaacgacggccagtcaggagtctgaaatctgttatgagc

SEQ ID NO: 78837 - DNA, 23 bp, Artificial Sequence
  primer
tgaaacaggaatggctaatttcc

SEQ ID NO: 78838 - DNA, 21 bp, Artificial Sequence
  primer
atctagagcggcaggttcatc

SEQ ID NO: 78839 - DNA, 38 bp, Artificial Sequence
  primer
gtaaaacgacggccagtaaattaagggtgttgggaggg

SEQ ID NO: 78840 - DNA, 39 bp, Artificial Sequence
  primer
gtaaaacgacggccagtcacagcctttcattccaaacac

SEQ ID NO: 78841 - DNA, 22 bp, Artificial Sequence
  primer
caagcactgtgaatcataacgg

SEQ ID NO: 78842 - DNA, 21 bp, Artificial Sequence
  primer
cacaatacacgtcatcctggg

SEQ ID NO: 78843 - DNA, 26 bp, Artificial Sequence
  primer
aaatccataaaggatactacccactg

SEQ ID NO: 78844 - DNA, 22 bp, Artificial Sequence
  primer
agagttaacggttgcacaacat

SEQ ID NO: 78845 - DNA, 21 bp, Artificial Sequence
  primer
gattagagggtgatgggaggc

SEQ ID NO: 78846 - DNA, 38 bp, Artificial Sequence
  primer
gtaaaacgacggccagtagtaggctggtaagtggtggg

SEQ ID NO: 78847 - DNA, 21 bp, Artificial Sequence
  primer
cacccggcctatattcctttc

SEQ ID NO: 78848 - DNA, 21 bp, Artificial Sequence
  primer
ccctcttccactcaccagttg

SEQ ID NO: 78849 - DNA, 23 bp, Artificial Sequence
  primer
aaatcattgagcacagtttctgg

SEQ ID NO: 78850 - DNA, 21 bp, Artificial Sequence
  primer
gagccaccatgtaatcgagag

SEQ ID NO: 78851 - DNA, 26 bp, Artificial Sequence
  primer
tggtcacatatattggtaatccagac

SEQ ID NO: 78852 - DNA, 18 bp, Artificial Sequence
  primer
gctgagatcatgccaccg

SEQ ID NO: 78853 - DNA, 27 bp, Artificial Sequence
  primer
aataggagatgtatgtgctaaggtcac

SEQ ID NO: 78854 - DNA, 38 bp, Artificial Sequence
  primer
gtaaaacgacggccagttagtggcatcatttcctttgc

SEQ ID NO: 78855 - DNA, 21 bp, Artificial Sequence
  primer
caaggcagagggatatggttc

SEQ ID NO: 78856 - DNA, 21 bp, Artificial Sequence
  primer
ttctgacctgaaacttgctcc

SEQ ID NO: 78857 - DNA, 22 bp, Artificial Sequence
  primer
cagagcgagactctgtctcaaa

SEQ ID NO: 78858 - DNA, 21 bp, Artificial Sequence
  primer
attcaagtcctcagggacgat

SEQ ID NO: 78859 - DNA, 39 bp, Artificial Sequence
  primer
gtaaaacgacggccagtggacaacaaggtgcagcataag

SEQ ID NO: 78860 - DNA, 37 bp, Artificial Sequence
  primer
gtaaaacgacggccagtaccttgggatggacatgttg

SEQ ID NO: 78861 - DNA, 22 bp, Artificial Sequence
  primer
ccaatagaccacctctgctttg

SEQ ID NO: 78862 - DNA, 40 bp, Artificial Sequence
  primer
gtaaaacgacggccagttcacaactccaacaggatgtacc

SEQ ID NO: 78863 - DNA, 21 bp, Artificial Sequence
  primer
ttctgtgttcttcccatctgc

SEQ ID NO: 78864 - DNA, 38 bp, Artificial Sequence
  primer
gtaaaacgacggccagttgacaaatccagcacctatgg

SEQ ID NO: 78865 - DNA, 44 bp, Artificial Sequence
  primer
gtaaaacgacggccagtaatacccaaatccctagtatcatacac

SEQ ID NO: 78866 - DNA, 23 bp, Artificial Sequence
  primer
cagctaacaaataaccttcaggc

SEQ ID NO: 78867 - DNA, 38 bp, Artificial Sequence
  primer
gtaaaacgacggccagtgtgatgaacctgtaaggaggg

SEQ ID NO: 78868 - DNA, 37 bp, Artificial Sequence
  primer
gtaaaacgacggccagttcaccacaccaacagcagag

SEQ ID NO: 78869 - DNA, 21 bp, Artificial Sequence
  primer
ctctggactggcttctttccc

SEQ ID NO: 78870 - DNA, 22 bp, Artificial Sequence
  primer
tggtaagaggtgggttctaggg

SEQ ID NO: 78871 - DNA, 20 bp, Artificial Sequence
  primer
gccgctactcttccacacag

SEQ ID NO: 78872 - DNA, 37 bp, Artificial Sequence
  primer
gtaaaacgacggccagtatgcctgactttcccacacc

SEQ ID NO: 78873 - DNA, 38 bp, Artificial Sequence
  primer
gtaaaacgacggccagtacagggaaggaagtggaaacc

SEQ ID NO: 78874 - DNA, 38 bp, Artificial Sequence
  primer
gtaaaacgacggccagttactgatgctgggaaagaccc

SEQ ID NO: 78875 - DNA, 38 bp, Artificial Sequence
  primer
gtaaaacgacggccagtccttcagttccatgcttcctc

SEQ ID NO: 78876 - DNA, 37 bp, Artificial Sequence
  primer
gtaaaacgacggccagtagattgcagtttgtgtgggc

SEQ ID NO: 78877 - DNA, 38 bp, Artificial Sequence
  primer
gtaaaacgacggccagtgtccatgagtcactgtccagc

SEQ ID NO: 78878 - DNA, 21 bp, Artificial Sequence
  primer
gacttgctcttgcaagcactg

SEQ ID NO: 78879 - DNA, 38 bp, Artificial Sequence
  primer
gtaaaacgacggccagtgcaaaggatgcatgcaagtag

SEQ ID NO: 78880 - DNA, 21 bp, Artificial Sequence
  primer
gctgtcacacagcatcctctc

SEQ ID NO: 78881 - DNA, 42 bp, Artificial Sequence
  primer
gtaaaacgacggccagtagacacctaaatactgaccatctgc

SEQ ID NO: 78882 - DNA, 21 bp, Artificial Sequence
  primer
tgcagctctttagagccagtg

SEQ ID NO: 78883 - DNA, 38 bp, Artificial Sequence
  primer
gtaaaacgacggccagtaagtttcaaaggcaccacagc

SEQ ID NO: 78884 - DNA, 21 bp, Artificial Sequence
  primer
cgacctaggcagagaggtttc

SEQ ID NO: 78885 - DNA, 39 bp, Artificial Sequence
  primer
gtaaaacgacggccagtaagccttgagttagtccatccc

SEQ ID NO: 78886 - DNA, 38 bp, Artificial Sequence
  primer
gtaaaacgacggccagtaaaccacactttctggctgtg

SEQ ID NO: 78887 - DNA, 38 bp, Artificial Sequence
  primer
gtaaaacgacggccagtttaattgaagctttcccaggc

SEQ ID NO: 78888 - DNA, 21 bp, Artificial Sequence
  primer
tgtggccagaactctgtcttg

SEQ ID NO: 78889 - DNA, 39 bp, Artificial Sequence
  primer
gtaaaacgacggccagttcaggtttatttaggctgcgac

SEQ ID NO: 78890 - DNA, 21 bp, Artificial Sequence
  primer
gagacataggaagggaggtgg

SEQ ID NO: 78891 - DNA, 21 bp, Artificial Sequence
  primer
aaacatcagtgagcatcctgc

SEQ ID NO: 78892 - DNA, 20 bp, Artificial Sequence
  primer
cttctcaagatggcacccag

SEQ ID NO: 78893 - DNA, 38 bp, Artificial Sequence
  primer
gtaaaacgacggccagtctgcggtagaaggtgtgtttg

SEQ ID NO: 78894 - DNA, 35 bp, Artificial Sequence
  primer
gtaaaacgacggccagtatgcctctgtcccgcttc

SEQ ID NO: 78895 - DNA, 21 bp, Artificial Sequence
  primer
cggatctgatatgtgagggtg

SEQ ID NO: 78896 - DNA, 37 bp, Artificial Sequence
  primer
gtaaaacgacggccagtatctcatcactggcaatggg

SEQ ID NO: 78897 - DNA, 38 bp, Artificial Sequence
  primer
gtaaaacgacggccagtgtcacatggcaccaggttctc

SEQ ID NO: 78898 - DNA, 20 bp, Artificial Sequence
  primer
cccagtccacagagctcatc

SEQ ID NO: 78899 - DNA, 20 bp, Artificial Sequence
  primer
aagcagagtcaccgtcatgc

SEQ ID NO: 78900 - DNA, 38 bp, Artificial Sequence
  primer
gtaaaacgacggccagtaatggaggaacagcctttctg

SEQ ID NO: 78901 - DNA, 21 bp, Artificial Sequence
  primer
ctccagaaacagcttgtagcg

SEQ ID NO: 78902 - DNA, 20 bp, Artificial Sequence
  primer
catctgggtgacctttgctg

SEQ ID NO: 78903 - DNA, 21 bp, Artificial Sequence
  primer
ctgacacccaggactttgtgg

SEQ ID NO: 78904 - DNA, 38 bp, Artificial Sequence
  primer
gtaaaacgacggccagtggtctaaagtgagcctctggc

SEQ ID NO: 78905 - DNA, 21 bp, Artificial Sequence
  primer
gtgtggatgtggtggtagtcg

SEQ ID NO: 78906 - DNA, 20 bp, Artificial Sequence
  primer
aaccattcaacctggcactg

SEQ ID NO: 78907 - DNA, 21 bp, Artificial Sequence
  primer
acatgcagcctgtgagacttg

SEQ ID NO: 78908 - DNA, 21 bp, Artificial Sequence
  primer
aggcatttgaagacactgtgc

SEQ ID NO: 78909 - DNA, 21 bp, Artificial Sequence
  primer
gctggtgatgacaaactcctg

SEQ ID NO: 78910 - DNA, 21 bp, Artificial Sequence
  primer
tcctcacaggaattagtgccc

SEQ ID NO: 78911 - DNA, 38 bp, Artificial Sequence
  primer
gtaaaacgacggccagtactcactgcactggatggatg

SEQ ID NO: 78912 - DNA, 21 bp, Artificial Sequence
  primer
ctccaggtagaggacgctctg

SEQ ID NO: 78913 - DNA, 39 bp, Artificial Sequence
  primer
gtaaaacgacggccagttgacaattcccgtgcctatatc

SEQ ID NO: 78914 - DNA, 38 bp, Artificial Sequence
  primer
gtaaaacgacggccagtcctgctgaagtctgtggagtc

SEQ ID NO: 78915 - DNA, 38 bp, Artificial Sequence
  primer
gtaaaacgacggccagttgaaactgccagactccacac

SEQ ID NO: 78916 - DNA, 20 bp, Artificial Sequence
  primer
gatggtgagctggagacctg

SEQ ID NO: 78917 - DNA, 21 bp, Artificial Sequence
  primer
gactgtacagccttgctgtgg

SEQ ID NO: 78918 - DNA, 19 bp, Artificial Sequence
  primer
cgtctctgggaagaaaccg

SEQ ID NO: 78919 - DNA, 20 bp, Artificial Sequence
  primer
catggactgccacagtagcc

SEQ ID NO: 78920 - DNA, 38 bp, Artificial Sequence
  primer
gtaaaacgacggccagttgcctaatgtcccatggaaag

SEQ ID NO: 78921 - DNA, 21 bp, Artificial Sequence
  primer
tgtgctcacagagccatcttc

SEQ ID NO: 78922 - DNA, 21 bp, Artificial Sequence
  primer
atcctggatgtttgggacaac

SEQ ID NO: 78923 - DNA, 38 bp, Artificial Sequence
  primer
gtaaaacgacggccagtaaagcatcagagctgagaggg

SEQ ID NO: 78924 - DNA, 20 bp, Artificial Sequence
  primer
actggaaggcaaccacattg

SEQ ID NO: 78925 - DNA, 21 bp, Artificial Sequence
  primer
acgatccactatggagaaggg

SEQ ID NO: 78926 - DNA, 21 bp, Artificial Sequence
  primer
tagagtctggctttgctgtgg

SEQ ID NO: 78927 - DNA, 21 bp, Artificial Sequence
  primer
caggagaggagctcagctagg

SEQ ID NO: 78928 - DNA, 20 bp, Artificial Sequence
  primer
atggtatgcacctgtggtcc

SEQ ID NO: 78929 - DNA, 20 bp, Artificial Sequence
  primer
ctgcctcactccacctctcc

SEQ ID NO: 78930 - DNA, 21 bp, Artificial Sequence
  primer
gaaggactgagtgggatttgg

SEQ ID NO: 78931 - DNA, 38 bp, Artificial Sequence
  primer
gtaaaacgacggccagtcaccatgaatgtgagcacctg

SEQ ID NO: 78932 - DNA, 20 bp, Artificial Sequence
  primer
gagagaataacgcgggtgtg

SEQ ID NO: 78933 - DNA, 20 bp, Artificial Sequence
  primer
gatggagagggaagacaggg

SEQ ID NO: 78934 - DNA, 19 bp, Artificial Sequence
  primer
ctcctgcagggttggagag

SEQ ID NO: 78935 - DNA, 37 bp, Artificial Sequence
  primer
gtaaaacgacggccagtgagaggcaggtgtcacaagg

SEQ ID NO: 78936 - DNA, 21 bp, Artificial Sequence
  primer
gacctggatcagaggtcatgc

SEQ ID NO: 78937 - DNA, 21 bp, Artificial Sequence
  primer
gtgacaattaccacttgcggg

SEQ ID NO: 78938 - DNA, 20 bp, Artificial Sequence
  primer
gtgtagcttgcagcctggtc

SEQ ID NO: 78939 - DNA, 21 bp, Artificial Sequence
  primer
gcacaccagctctgtcttctg

SEQ ID NO: 78940 - DNA, 20 bp, Artificial Sequence
  primer
gaaagacctgggagagcctg

SEQ ID NO: 78941 - DNA, 37 bp, Artificial Sequence
  primer
gtaaaacgacggccagtgaagtgtcaagggaacagcg

SEQ ID NO: 78942 - DNA, 20 bp, Artificial Sequence
  primer
gcccacgtcatctattctgg

SEQ ID NO: 78943 - DNA, 20 bp, Artificial Sequence
  primer
ggccactgtcctgttcagag

SEQ ID NO: 78944 - DNA, 20 bp, Artificial Sequence
  primer
acctctctcccatctgcctc

SEQ ID NO: 78945 - DNA, 35 bp, Artificial Sequence
  primer
gtaaaacgacggccagtaagggcagggagggtgtc

SEQ ID NO: 78946 - DNA, 38 bp, Artificial Sequence
  primer
gtaaaacgacggccagtgtagacagtcgccaacctcag

SEQ ID NO: 78947 - DNA, 21 bp, Artificial Sequence
  primer
gcaaatttctgctgtcagagg

SEQ ID NO: 78948 - DNA, 21 bp, Artificial Sequence
  primer
aaggaaccaaagactggagcc

SEQ ID NO: 78949 - DNA, 21 bp, Artificial Sequence
  primer
atcaaatgaggattggcacag

SEQ ID NO: 78950 - DNA, 22 bp, Artificial Sequence
  primer
tcttgtcaagcctgatccaaat

SEQ ID NO: 78951 - DNA, 25 bp, Artificial Sequence
  primer
tggtgataatgtctgttctacctgc

SEQ ID NO: 78952 - DNA, 24 bp, Artificial Sequence
  primer
tgagtttcacaccctatattgcat

SEQ ID NO: 78953 - DNA, 36 bp, Artificial Sequence
  primer
gtaaaacgacggccagtgggaggaaagggaaaggac

SEQ ID NO: 78954 - DNA, 21 bp, Artificial Sequence
  primer
gggaataacagcagcaatcag

SEQ ID NO: 78955 - DNA, 38 bp, Artificial Sequence
  primer
gtaaaacgacggccagttcaggtagaggaggaggcgta

SEQ ID NO: 78956 - DNA, 21 bp, Artificial Sequence
  primer
gtgcttatttcacatggcagg

SEQ ID NO: 78957 - DNA, 21 bp, Artificial Sequence
  primer
cctaggttaaggccaacatgc

SEQ ID NO: 78958 - DNA, 38 bp, Artificial Sequence
  primer
gtaaaacgacggccagtgaagacaggcacccacattct

SEQ ID NO: 78959 - DNA, 38 bp, Artificial Sequence
  primer
gtaaaacgacggccagtggcaatcattgtccaccaaag

SEQ ID NO: 78960 - DNA, 37 bp, Artificial Sequence
  primer
gtaaaacgacggccagttccacattggaaacctcacc

SEQ ID NO: 78961 - DNA, 21 bp, Artificial Sequence
  primer
tgggaattaaccactccttcc

SEQ ID NO: 78962 - DNA, 21 bp, Artificial Sequence
  primer
aattggtgatgacccataggc

SEQ ID NO: 78963 - DNA, 38 bp, Artificial Sequence
  primer
gtaaaacgacggccagtaatgcacttgacattccaacc

SEQ ID NO: 78964 - DNA, 39 bp, Artificial Sequence
  primer
gtaaaacgacggccagttggcccagagtaggtagtcaac

SEQ ID NO: 78965 - DNA, 21 bp, Artificial Sequence
  primer
aggtcaaagctgctcagtcac

SEQ ID NO: 78966 - DNA, 44 bp, Artificial Sequence
  primer
gtaaaacgacggccagttctcaagatttgaaataatttaggacc

SEQ ID NO: 78967 - DNA, 37 bp, Artificial Sequence
  primer
gtaaaacgacggccagtgaccactgcccttgtcaaac

SEQ ID NO: 78968 - DNA, 21 bp, Artificial Sequence
  primer
ctttgcagcccttaaggaacc

SEQ ID NO: 78969 - DNA, 21 bp, Artificial Sequence
  primer
agccacagagttatgccacag

SEQ ID NO: 78970 - DNA, 39 bp, Artificial Sequence
  primer
gtaaaacgacggccagtacatagctgtcattcccattcc

SEQ ID NO: 78971 - DNA, 21 bp, Artificial Sequence
  primer
cagacccaatccaaatgtctg

SEQ ID NO: 78972 - DNA, 21 bp, Artificial Sequence
  primer
agcattatgccaacaatgcac

SEQ ID NO: 78973 - DNA, 22 bp, Artificial Sequence
  primer
gcaggaatctgtctcacactgg

SEQ ID NO: 78974 - DNA, 37 bp, Artificial Sequence
  primer
gtaaaacgacggccagttcagtggaaataccatgggc

SEQ ID NO: 78975 - DNA, 21 bp, Artificial Sequence
  primer
gtcccagttctgggttcaatc

SEQ ID NO: 78976 - DNA, 21 bp, Artificial Sequence
  primer
tataaatgcaaaggctggctg

SEQ ID NO: 78977 - DNA, 21 bp, Artificial Sequence
  primer
taccagaatgtggcagactcc

SEQ ID NO: 78978 - DNA, 22 bp, Artificial Sequence
  primer
ttcacagaatgatgggatcaag

SEQ ID NO: 78979 - DNA, 21 bp, Artificial Sequence
  primer
tctggcctcaacgttcctatc

SEQ ID NO: 78980 - DNA, 39 bp, Artificial Sequence
  primer
gtaaaacgacggccagttgacattcatcccttaacaccc

SEQ ID NO: 78981 - DNA, 37 bp, Artificial Sequence
  primer
gtaaaacgacggccagtgcacaggttgggaagttctg

SEQ ID NO: 78982 - DNA, 21 bp, Artificial Sequence
  primer
aaagaaacagcaaaccaaccg

SEQ ID NO: 78983 - DNA, 21 bp, Artificial Sequence
  primer
aacttgggaggtggaggctac

SEQ ID NO: 78984 - DNA, 21 bp, Artificial Sequence
  primer
tctctgagagccttccaggtg

SEQ ID NO: 78985 - DNA, 23 bp, Artificial Sequence
  primer
cagggtaacaaattcgacaacag

SEQ ID NO: 78986 - DNA, 21 bp, Artificial Sequence
  primer
cctggagttgagagaaggctg

SEQ ID NO: 78987 - DNA, 22 bp, Artificial Sequence
  primer
cagaactcaaactctgaacggg

SEQ ID NO: 78988 - DNA, 37 bp, Artificial Sequence
  primer
gtaaaacgacggccagtgccattctgactcacacctg

SEQ ID NO: 78989 - DNA, 38 bp, Artificial Sequence
  primer
gtaaaacgacggccagttaatcaaatggttgctggtgg

SEQ ID NO: 78990 - DNA, 20 bp, Artificial Sequence
  primer
ttcacccattcctctgttgc

SEQ ID NO: 78991 - DNA, 21 bp, Artificial Sequence
  primer
tgcacagttacaccaggttcc

SEQ ID NO: 78992 - DNA, 38 bp, Artificial Sequence
  primer
gtaaaacgacggccagttggaaataagggtgcctcttt

SEQ ID NO: 78993 - DNA, 39 bp, Artificial Sequence
  primer
gtaaaacgacggccagttcaagccaagttatgcaatgtc

SEQ ID NO: 78994 - DNA, 37 bp, Artificial Sequence
  primer
gtaaaacgacggccagttcctcagcccatcatttcac

SEQ ID NO: 78995 - DNA, 41 bp, Artificial Sequence
  primer
gtaaaacgacggccagtaaatagcctcacagtatttggtgg

SEQ ID NO: 78996 - DNA, 38 bp, Artificial Sequence
  primer
gtaaaacgacggccagttgcaatacagtgcattcatgg

SEQ ID NO: 78997 - DNA, 22 bp, Artificial Sequence
  primer
tgcttgaatggagagaggaaag

SEQ ID NO: 78998 - DNA, 20 bp, Artificial Sequence
  primer
ctccatttccaaactgcgtc

SEQ ID NO: 78999 - DNA, 38 bp, Artificial Sequence
  primer
gtaaaacgacggccagtaagaatacagtgaggcctggg

SEQ ID NO: 79000 - DNA, 39 bp, Artificial Sequence
  primer
gtaaaacgacggccagtcatggtagatacgcagatggtg

SEQ ID NO: 79001 - DNA, 21 bp, Artificial Sequence
  primer
agaagtgggagacaaagacgg

SEQ ID NO: 79002 - DNA, 21 bp, Artificial Sequence
  primer
attgctgttacatggtgtgcc

SEQ ID NO: 79003 - DNA, 38 bp, Artificial Sequence
  primer
gtaaaacgacggccagttacaccagccttatcatgggc

SEQ ID NO: 79004 - DNA, 21 bp, Artificial Sequence
  primer
cctctgctctgtgcttgacac

SEQ ID NO: 79005 - DNA, 42 bp, Artificial Sequence
  primer
gtaaaacgacggccagtgcaataccttagaataggatagcgg

SEQ ID NO: 79006 - DNA, 24 bp, Artificial Sequence
  primer
aaatcaatatcccatacccttgac

SEQ ID NO: 79007 - DNA, 21 bp, Artificial Sequence
  primer
tactgcacagaccactccagg

SEQ ID NO: 79008 - DNA, 39 bp, Artificial Sequence
  primer
gtaaaacgacggccagtgcattctatggtaatcaagggc

SEQ ID NO: 79009 - DNA, 25 bp, Artificial Sequence
  primer
aaagatgtagaggaaggtcaacaag

SEQ ID NO: 79010 - DNA, 19 bp, Artificial Sequence
  primer
agctggccatctggacctc

SEQ ID NO: 79011 - DNA, 21 bp, Artificial Sequence
  primer
ctggcagtgcaggtacatttc

SEQ ID NO: 79012 - DNA, 37 bp, Artificial Sequence
  primer
gtaaaacgacggccagtcaccgttgctctgtttccac

SEQ ID NO: 79013 - DNA, 22 bp, Artificial Sequence
  primer
gagacaagcacactggaaactg

SEQ ID NO: 79014 - DNA, 38 bp, Artificial Sequence
  primer
gtaaaacgacggccagtggagcatagtgccagtgaatg

SEQ ID NO: 79015 - DNA, 21 bp, Artificial Sequence
  primer
ctagacctgaaagtcgcctgg

SEQ ID NO: 79016 - DNA, 38 bp, Artificial Sequence
  primer
gtaaaacgacggccagtgatgagctctggctcttcacc

SEQ ID NO: 79017 - DNA, 39 bp, Artificial Sequence
  primer
gtaaaacgacggccagtctagagattccagaaacctggc

SEQ ID NO: 79018 - DNA, 22 bp, Artificial Sequence
  primer
tggaagcctcaggatttgttag

SEQ ID NO: 79019 - DNA, 21 bp, Artificial Sequence
  primer
ctatggtcagtttgctggtcc

SEQ ID NO: 79020 - DNA, 21 bp, Artificial Sequence
  primer
tacatgcttcattccaggacg

SEQ ID NO: 79021 - DNA, 21 bp, Artificial Sequence
  primer
acatcccattcccacttcatc

SEQ ID NO: 79022 - DNA, 38 bp, Artificial Sequence
  primer
gtaaaacgacggccagtgtttctctgagtgcaatgggc

SEQ ID NO: 79023 - DNA, 20 bp, Artificial Sequence
  primer
agtccttgtttctgggcctc

SEQ ID NO: 79024 - DNA, 21 bp, Artificial Sequence
  primer
gttatgtgagggccttgttcc

SEQ ID NO: 79025 - DNA, 38 bp, Artificial Sequence
  primer
gtaaaacgacggccagttcttagagcctgggagctgac

SEQ ID NO: 79026 - DNA, 21 bp, Artificial Sequence
  primer
cacctttaaacctcactgggc

SEQ ID NO: 79027 - DNA, 38 bp, Artificial Sequence
  primer
gtaaaacgacggccagtccctcagtcaataccctgctc

SEQ ID NO: 79028 - DNA, 22 bp, Artificial Sequence
  primer
aagctacaagcaactgtgcctc

SEQ ID NO: 79029 - DNA, 39 bp, Artificial Sequence
  primer
gtaaaacgacggccagtcctttatctcaaccactcaccc

SEQ ID NO: 79030 - DNA, 21 bp, Artificial Sequence
  primer
tcatgtgagaaggaaagctgg

SEQ ID NO: 79031 - DNA, 21 bp, Artificial Sequence
  primer
gagggaacatgaccctcagac

SEQ ID NO: 79032 - DNA, 38 bp, Artificial Sequence
  primer
gtaaaacgacggccagtagaagggatcagtgagatccg

SEQ ID NO: 79033 - DNA, 38 bp, Artificial Sequence
  primer
gtaaaacgacggccagtgcagatggacagcttcttctc

SEQ ID NO: 79034 - DNA, 22 bp, Artificial Sequence
  primer
aaaggtcccagaaatgctatcc

SEQ ID NO: 79035 - DNA, 38 bp, Artificial Sequence
  primer
gtaaaacgacggccagtctcactccatgcttgtcttgg

SEQ ID NO: 79036 - DNA, 21 bp, Artificial Sequence
  primer
tggaatgattcttcaactggg

SEQ ID NO: 79037 - DNA, 38 bp, Artificial Sequence
  primer
gtaaaacgacggccagtcctgtgcctgtctcctgtaac

SEQ ID NO: 79038 - DNA, 38 bp, Artificial Sequence
  primer
gtaaaacgacggccagtgatcatccctgtgggtagagg

SEQ ID NO: 79039 - DNA, 21 bp, Artificial Sequence
  primer
gcatggtttctcctgatccac

SEQ ID NO: 79040 - DNA, 21 bp, Artificial Sequence
  primer
ccctccttacagctctggtcc

SEQ ID NO: 79041 - DNA, 38 bp, Artificial Sequence
  primer
gtaaaacgacggccagtttcaaagcgatcagaacttgg

SEQ ID NO: 79042 - DNA, 21 bp, Artificial Sequence
  primer
agcaggaaccagtagtgggag

SEQ ID NO: 79043 - DNA, 21 bp, Artificial Sequence
  primer
caacatagtggagtgggatgg

SEQ ID NO: 79044 - DNA, 19 bp, Artificial Sequence
  primer
ggatctccgcacacaaagc

SEQ ID NO: 79045 - DNA, 38 bp, Artificial Sequence
  primer
gtaaaacgacggccagttgtgttgtatttccggcagac

SEQ ID NO: 79046 - DNA, 21 bp, Artificial Sequence
  primer
gtcaaaccctgagggacagag

SEQ ID NO: 79047 - DNA, 38 bp, Artificial Sequence
  primer
gtaaaacgacggccagtctcttgctgggtgattgtgag

SEQ ID NO: 79048 - DNA, 21 bp, Artificial Sequence
  primer
tggagtaatgtcacctcccag

SEQ ID NO: 79049 - DNA, 20 bp, Artificial Sequence
  primer
ctgactgttgggtgaggagg

SEQ ID NO: 79050 - DNA, 38 bp, Artificial Sequence
  primer
gtaaaacgacggccagtgatgagctggatgaagtgctc

SEQ ID NO: 79051 - DNA, 19 bp, Artificial Sequence
  primer
ccctcctccctcagactca

SEQ ID NO: 79052 - DNA, 21 bp, Artificial Sequence
  primer
cttgtcaaatgaggtccctgg

SEQ ID NO: 79053 - DNA, 38 bp, Artificial Sequence
  primer
gtaaaacgacggccagtcatccctctgcaaggagaaag

SEQ ID NO: 79054 - DNA, 21 bp, Artificial Sequence
  primer
ctcagcgtctcactccaacag

SEQ ID NO: 79055 - DNA, 21 bp, Artificial Sequence
  primer
gtatattctgggaggccctgg

SEQ ID NO: 79056 - DNA, 19 bp, Artificial Sequence
  primer
agagatgatgcccacaccc

SEQ ID NO: 79057 - DNA, 20 bp, Artificial Sequence
  primer
ccagaaagaatgggacaggc

SEQ ID NO: 79058 - DNA, 35 bp, Artificial Sequence
  primer
gtaaaacgacggccagtgacccaagggtccaggtc

SEQ ID NO: 79059 - DNA, 38 bp, Artificial Sequence
  primer
gtaaaacgacggccagtctgtggtctctgccacacatc

SEQ ID NO: 79060 - DNA, 20 bp, Artificial Sequence
  primer
ctcgtacgccagtgagatgg

SEQ ID NO: 79061 - DNA, 22 bp, Artificial Sequence
  primer
gatagctcactggttggtcctg

SEQ ID NO: 79062 - DNA, 36 bp, Artificial Sequence
  primer
gtaaaacgacggccagtagcaaaggccttgatgctg

SEQ ID NO: 79063 - DNA, 21 bp, Artificial Sequence
  primer
agagtgagaccctgcctcaac

SEQ ID NO: 79064 - DNA, 38 bp, Artificial Sequence
  primer
gtaaaacgacggccagtcaggctgagtctaagggaagg

SEQ ID NO: 79065 - DNA, 21 bp, Artificial Sequence
  primer
gagagaagagtgggaaccagg

SEQ ID NO: 79066 - DNA, 36 bp, Artificial Sequence
  primer
gtaaaacgacggccagtgcggcaggagatagtggag

SEQ ID NO: 79067 - DNA, 38 bp, Artificial Sequence
  primer
gtaaaacgacggccagttggcctgtgtgtttcattctc

SEQ ID NO: 79068 - DNA, 20 bp, Artificial Sequence
  primer
tagtgtccatggaacgtggc

SEQ ID NO: 79069 - DNA, 38 bp, Artificial Sequence
  primer
gtaaaacgacggccagtacttcaggagtgctaggctgc

SEQ ID NO: 79070 - DNA, 21 bp, Artificial Sequence
  primer
caccaacctcactcagctcac

SEQ ID NO: 79071 - DNA, 38 bp, Artificial Sequence
  primer
gtaaaacgacggccagttactttctctaacggcccagg

SEQ ID NO: 79072 - DNA, 38 bp, Artificial Sequence
  primer
gtaaaacgacggccagttacagctcgtgatggagaagc

SEQ ID NO: 79073 - DNA, 21 bp, Artificial Sequence
  primer
tgcacttgaaaggttcaacaa

SEQ ID NO: 79074 - DNA, 22 bp, Artificial Sequence
  primer
tgtctgtctggactcaccattc

SEQ ID NO: 79075 - DNA, 21 bp, Artificial Sequence
  primer
ctacctgggcatgaggcatac

SEQ ID NO: 79076 - DNA, 21 bp, Artificial Sequence
  primer
aagttgaaggcagaggcaaag

SEQ ID NO: 79077 - DNA, 39 bp, Artificial Sequence
  primer
gtaaaacgacggccagtagacagagggagggaccagtag

SEQ ID NO: 79078 - DNA, 38 bp, Artificial Sequence
  primer
gtaaaacgacggccagtcaaggaaacagaaatccgctc

SEQ ID NO: 79079 - DNA, 38 bp, Artificial Sequence
  primer
gtaaaacgacggccagtagtaaagtggcatctgggtgg

SEQ ID NO: 79080 - DNA, 20 bp, Artificial Sequence
  primer
gttcctctgcttggtttggg

SEQ ID NO: 79081 - DNA, 36 bp, Artificial Sequence
  primer
gtaaaacgacggccagtatggaggttggatgatggg

SEQ ID NO: 79082 - DNA, 22 bp, Artificial Sequence
  primer
gagctggatcataagtgggttg

SEQ ID NO: 79083 - DNA, 22 bp, Artificial Sequence
  primer
cctgacttccaaactgagatgg

SEQ ID NO: 79084 - DNA, 21 bp, Artificial Sequence
  primer
tggtgcttcccttcttctctc

SEQ ID NO: 79085 - DNA, 38 bp, Artificial Sequence
  primer
gtaaaacgacggccagtctgggaagaaacattcatggg

SEQ ID NO: 79086 - DNA, 38 bp, Artificial Sequence
  primer
gtaaaacgacggccagtagctcctggctcatgacaatc

SEQ ID NO: 79087 - DNA, 38 bp, Artificial Sequence
  primer
gtaaaacgacggccagtgtagagaggtctcggctccag

SEQ ID NO: 79088 - DNA, 38 bp, Artificial Sequence
  primer
gtaaaacgacggccagtggattgcccatctttctcatc

SEQ ID NO: 79089 - DNA, 38 bp, Artificial Sequence
  primer
gtaaaacgacggccagtatatgcataaccttccgcctg

SEQ ID NO: 79090 - DNA, 21 bp, Artificial Sequence
  primer
ataagatgtctgcaacccgtg

SEQ ID NO: 79091 - DNA, 25 bp, Artificial Sequence
  primer
aaatatggccagagttcaatctttc

SEQ ID NO: 79092 - DNA, 21 bp, Artificial Sequence
  primer
caagaattgcagggtggatac

SEQ ID NO: 79093 - DNA, 21 bp, Artificial Sequence
  primer
gccagtggagaaactgacatc

SEQ ID NO: 79094 - DNA, 29 bp, Artificial Sequence
  primer
cgtatgacagtttgttcaagactagtagg

SEQ ID NO: 79095 - DNA, 38 bp, Artificial Sequence
  primer
gtaaaacgacggccagtgagattagactggcgattcgg

SEQ ID NO: 79096 - DNA, 38 bp, Artificial Sequence
  primer
gtaaaacgacggccagttttcaagaacttccaagcacg

SEQ ID NO: 79097 - DNA, 38 bp, Artificial Sequence
  primer
gtaaaacgacggccagtagctaaagaggtgggagggag

SEQ ID NO: 79098 - DNA, 38 bp, Artificial Sequence
  primer
gtaaaacgacggccagttctttctcatgcccattagcc

SEQ ID NO: 79099 - DNA, 21 bp, Artificial Sequence
  primer
gttcaagctacagtggagccc

SEQ ID NO: 79100 - DNA, 38 bp, Artificial Sequence
  primer
gtaaaacgacggccagtgctgtgtgtagttcacctggg

SEQ ID NO: 79101 - DNA, 21 bp, Artificial Sequence
  primer
acttcaggctgggttgagaag

SEQ ID NO: 79102 - DNA, 35 bp, Artificial Sequence
  primer
gtaaaacgacggccagttttccgttcccaccagac

SEQ ID NO: 79103 - DNA, 38 bp, Artificial Sequence
  primer
gtaaaacgacggccagtctgggcaacaagagtgaaact

SEQ ID NO: 79104 - DNA, 38 bp, Artificial Sequence
  primer
gtaaaacgacggccagtcaagacctggctcctaacctc

SEQ ID NO: 79105 - DNA, 37 bp, Artificial Sequence
  primer
gtaaaacgacggccagtaggaaggcattaacccaacc

SEQ ID NO: 79106 - DNA, 23 bp, Artificial Sequence
  primer
tcccaatttcagtgttactgagc

SEQ ID NO: 79107 - DNA, 21 bp, Artificial Sequence
  primer
ttaaacagggctggcgtctac

SEQ ID NO: 79108 - DNA, 41 bp, Artificial Sequence
  primer
gtaaaacgacggccagttgatgtaacccaatgtcatgtacc

SEQ ID NO: 79109 - DNA, 21 bp, Artificial Sequence
  primer
aaaccaaggtctacacagccc

SEQ ID NO: 79110 - DNA, 38 bp, Artificial Sequence
  primer
gtaaaacgacggccagttaaaggagccctgaacaccac

SEQ ID NO: 79111 - DNA, 20 bp, Artificial Sequence
  primer
ttgaggctgaacatgctgtg

SEQ ID NO: 79112 - DNA, 38 bp, Artificial Sequence
  primer
gtaaaacgacggccagtgacagaccatgatgagttggg

SEQ ID NO: 79113 - DNA, 39 bp, Artificial Sequence
  primer
gtaaaacgacggccagtgagaccaagacaaatggagtgg

SEQ ID NO: 79114 - DNA, 38 bp, Artificial Sequence
  primer
gtaaaacgacggccagtccttagcctaccatccatgtg

SEQ ID NO: 79115 - DNA, 38 bp, Artificial Sequence
  primer
gtaaaacgacggccagtctcatagatcccagccagctc

SEQ ID NO: 79116 - DNA, 21 bp, Artificial Sequence
  primer
agatgtccatctggctgtgtc

SEQ ID NO: 79117 - DNA, 38 bp, Artificial Sequence
  primer
gtaaaacgacggccagtgaaaccctgaagggagaaacg

SEQ ID NO: 79118 - DNA, 21 bp, Artificial Sequence
  primer
cctttagggagggagatttgc

SEQ ID NO: 79119 - DNA, 21 bp, Artificial Sequence
  primer
cgtctgtacaatgggatgctc

SEQ ID NO: 79120 - DNA, 21 bp, Artificial Sequence
  primer
acactccatcccattccagac

SEQ ID NO: 79121 - DNA, 38 bp, Artificial Sequence
  primer
gtaaaacgacggccagtactggctgttcctgctgagac

SEQ ID NO: 79122 - DNA, 38 bp, Artificial Sequence
  primer
gtaaaacgacggccagtttgctcagacagtgagggttc

SEQ ID NO: 79123 - DNA, 38 bp, Artificial Sequence
  primer
gtaaaacgacggccagtctcacacgccatgtttctctc

SEQ ID NO: 79124 - DNA, 21 bp, Artificial Sequence
  primer
gagaagccagcagtgatgaag

SEQ ID NO: 79125 - DNA, 38 bp, Artificial Sequence
  primer
gtaaaacgacggccagtcaggagagagaacaaggtcgg

SEQ ID NO: 79126 - DNA, 38 bp, Artificial Sequence
  primer
gtaaaacgacggccagtctgtcataccctccttccacc

SEQ ID NO: 79127 - DNA, 21 bp, Artificial Sequence
  primer
agcgggcagaagtgatcatag

SEQ ID NO: 79128 - DNA, 21 bp, Artificial Sequence
  primer
catccaggaccatttcctctc

SEQ ID NO: 79129 - DNA, 21 bp, Artificial Sequence
  primer
gacgaggtaggaaatgatccg

SEQ ID NO: 79130 - DNA, 38 bp, Artificial Sequence
  primer
gtaaaacgacggccagtccttcttgcatcttaccaggg

SEQ ID NO: 79131 - DNA, 38 bp, Artificial Sequence
  primer
gtaaaacgacggccagttactgtgggaaggaggtggtc

SEQ ID NO: 79132 - DNA, 21 bp, Artificial Sequence
  primer
acatagcctgtggtggagaga

SEQ ID NO: 79133 - DNA, 38 bp, Artificial Sequence
  primer
gtaaaacgacggccagtgtacgggagactgaggtccag

SEQ ID NO: 79134 - DNA, 20 bp, Artificial Sequence
  primer
aggcacagtgaggaggaagg

SEQ ID NO: 79135 - DNA, 21 bp, Artificial Sequence
  primer
ggcagtgagatcttgaggacc

SEQ ID NO: 79136 - DNA, 20 bp, Artificial Sequence
  primer
taccacctgcaaagtacggg

SEQ ID NO: 79137 - DNA, 21 bp, Artificial Sequence
  primer
ttacaaggttgagagggaggc

SEQ ID NO: 79138 - DNA, 35 bp, Artificial Sequence
  primer
gtaaaacgacggccagtgaagcccacgaggtggag

SEQ ID NO: 79139 - DNA, 38 bp, Artificial Sequence
  primer
gtaaaacgacggccagtcaatcacaagttccagcaagg

SEQ ID NO: 79140 - DNA, 20 bp, Artificial Sequence
  primer
atgccacactctgggacaac

SEQ ID NO: 79141 - DNA, 37 bp, Artificial Sequence
  primer
gtaaaacgacggccagtgagccgagacaacaccattg

SEQ ID NO: 79142 - DNA, 20 bp, Artificial Sequence
  primer
caatgacaggaagggaggtg

SEQ ID NO: 79143 - DNA, 39 bp, Artificial Sequence
  primer
gtaaaacgacggccagtgaggcaagagccaactctattg

SEQ ID NO: 79144 - DNA, 39 bp, Artificial Sequence
  primer
gtaaaacgacggccagtaatgatagccagtgatggttgg

SEQ ID NO: 79145 - DNA, 21 bp, Artificial Sequence
  primer
accttcaggaatggctgctac

SEQ ID NO: 79146 - DNA, 38 bp, Artificial Sequence
  primer
gtaaaacgacggccagttgatggcatgaaggcatattg

SEQ ID NO: 79147 - DNA, 38 bp, Artificial Sequence
  primer
gtaaaacgacggccagttccctcttgaaagtttggagc

SEQ ID NO: 79148 - DNA, 38 bp, Artificial Sequence
  primer
gtaaaacgacggccagtggcaggctagactttcattcc

SEQ ID NO: 79149 - DNA, 40 bp, Artificial Sequence
  primer
gtaaaacgacggccagtcctggtcaaatacacaggaagag

SEQ ID NO: 79150 - DNA, 38 bp, Artificial Sequence
  primer
gtaaaacgacggccagtggagcaccctggaaatgttac

SEQ ID NO: 79151 - DNA, 20 bp, Artificial Sequence
  primer
ttaagggtgacacagctggc

SEQ ID NO: 79152 - DNA, 22 bp, Artificial Sequence
  primer
gacaaattccaaattagggagc

SEQ ID NO: 79153 - DNA, 21 bp, Artificial Sequence
  primer
atctggagagcaaactgcgag

SEQ ID NO: 79154 - DNA, 23 bp, Artificial Sequence
  primer
agttcatcgaactgtaagagggc

SEQ ID NO: 79155 - DNA, 21 bp, Artificial Sequence
  primer
ccctggtccttcagaatcatc

SEQ ID NO: 79156 - DNA, 21 bp, Artificial Sequence
  primer
tgatcctcaatcaaccgtgac

SEQ ID NO: 79157 - DNA, 21 bp, Artificial Sequence
  primer
agcggtgtgatctggaagatg

SEQ ID NO: 79158 - DNA, 21 bp, Artificial Sequence
  primer
attatgagcagcacaaacggc

SEQ ID NO: 79159 - DNA, 38 bp, Artificial Sequence
  primer
gtaaaacgacggccagtcatgcacagggttggtagatg

SEQ ID NO: 79160 - DNA, 21 bp, Artificial Sequence
  primer
ccatcaccagccagtatgttc

SEQ ID NO: 79161 - DNA, 37 bp, Artificial Sequence
  primer
gtaaaacgacggccagtacttctctccagcccgacac

SEQ ID NO: 79162 - DNA, 37 bp, Artificial Sequence
  primer
gtaaaacgacggccagtatagtccctccacccactcc

SEQ ID NO: 79163 - DNA, 21 bp, Artificial Sequence
  primer
ggaattacagacctcccaggc

SEQ ID NO: 79164 - DNA, 21 bp, Artificial Sequence
  primer
aggagcatccgaagaggtttc

SEQ ID NO: 79165 - DNA, 38 bp, Artificial Sequence
  primer
gtaaaacgacggccagtagaagagggagaacccaggtc

SEQ ID NO: 79166 - DNA, 38 bp, Artificial Sequence
  primer
gtaaaacgacggccagtaagggaagctgaagtctgagc

SEQ ID NO: 79167 - DNA, 20 bp, Artificial Sequence
  primer
ggctcatactccttcagggc

SEQ ID NO: 79168 - DNA, 21 bp, Artificial Sequence
  primer
ctcccaggcccacataataaa

SEQ ID NO: 79169 - DNA, 21 bp, Artificial Sequence
  primer
cttggtcacggacacagattc

SEQ ID NO: 79170 - DNA, 35 bp, Artificial Sequence
  primer
gtaaaacgacggccagttgatccacccacctcagc

SEQ ID NO: 79171 - DNA, 38 bp, Artificial Sequence
  primer
gtaaaacgacggccagtgacatctgattggtggtgagc

SEQ ID NO: 79172 - DNA, 21 bp, Artificial Sequence
  primer
gacagcccacagattctctcc

SEQ ID NO: 79173 - DNA, 18 bp, Artificial Sequence
  primer
tcaccaggaggacctcgg

SEQ ID NO: 79174 - DNA, 19 bp, Artificial Sequence
  primer
gttctgaagcctgtctgcg

SEQ ID NO: 79175 - DNA, 39 bp, Artificial Sequence
  primer
gtaaaacgacggccagtaaacttcagtgtcctgtctgcc

SEQ ID NO: 79176 - DNA, 21 bp, Artificial Sequence
  primer
gaacttgtaacccaaccctgc

SEQ ID NO: 79177 - DNA, 20 bp, Artificial Sequence
  primer
atccctgacctaccacctgc

SEQ ID NO: 79178 - DNA, 19 bp, Artificial Sequence
  primer
agagttgcacggcttgctc

SEQ ID NO: 79179 - DNA, 21 bp, Artificial Sequence
  primer
aatgacaagaggtgctctccc

SEQ ID NO: 79180 - DNA, 21 bp, Artificial Sequence
  primer
aggctgagtcacactgtctgc

SEQ ID NO: 79181 - DNA, 38 bp, Artificial Sequence
  primer
gtaaaacgacggccagtgtgctggtgtctctgggtttc

SEQ ID NO: 79182 - DNA, 21 bp, Artificial Sequence
  primer
cctccaggtagtttccattgc

SEQ ID NO: 79183 - DNA, 21 bp, Artificial Sequence
  primer
tccacttggtgatccgagaac

SEQ ID NO: 79184 - DNA, 37 bp, Artificial Sequence; identical to SEQ ID NO: 79161
  primer

SEQ ID NO: 79185 - DNA, 21 bp, Artificial Sequence
  primer
ggaattacagacctcccaggc

SEQ ID NO: 79186 - DNA, 24 bp, Artificial Sequence
  primer
tgtcataatcatacaatcgccaag

SEQ ID NO: 79187 - DNA, 22 bp, Artificial Sequence
  primer
tggccagctattattattgtgc

SEQ ID NO: 79188 - DNA, 38 bp, Artificial Sequence
  primer
gtaaaacgacggccagtcgtcagctggaagaagatcac

SEQ ID NO: 79189 - DNA, 21 bp, Artificial Sequence
  primer
aatggtgtttgctgacaatgg

SEQ ID NO: 79190 - DNA, 39 bp, Artificial Sequence
  primer
gtaaaacgacggccagttgtattctctaaaggcccatgc

SEQ ID NO: 79191 - DNA, 39 bp, Artificial Sequence
  primer
gtaaaacgacggccagtaggaagaaaggttaacccaagc

SEQ ID NO: 79192 - DNA, 38 bp, Artificial Sequence
  primer
gtaaaacgacggccagtcacaaagcaacaatttccagc

SEQ ID NO: 79193 - DNA, 21 bp, Artificial Sequence
  primer
gggcatcaatgacaacatttc

SEQ ID NO: 79194 - DNA, 44 bp, Artificial Sequence
  primer
gtaaaacgacggccagtcagtttacatacagtaatggtggtctg

SEQ ID NO: 79195 - DNA, 22 bp, Artificial Sequence
  primer
ggtcctatcaaatgcctgatgt

SEQ ID NO: 79196 - DNA, 27 bp, Artificial Sequence
  primer
aaagctagcatatgcactgtaggtact

SEQ ID NO: 79197 - DNA, 38 bp, Artificial Sequence
  primer
gtaaaacgacggccagtatttatttcatgcatggtgcc

SEQ ID NO: 79198 - DNA, 39 bp, Artificial Sequence
  primer
gtaaaacgacggccagtgcttagatgttgggtgagaacc

SEQ ID NO: 79199 - DNA, 22 bp, Artificial Sequence
  primer
cctcgaactaatcttgagggac

SEQ ID NO: 79200 - DNA, 38 bp, Artificial Sequence
  primer
gtaaaacgacggccagttcagcaattctcaggaaacct

SEQ ID NO: 79201 - DNA, 24 bp, Artificial Sequence
  primer
tgtcctcccaaatttactaagcac

SEQ ID NO: 79202 - DNA, 38 bp, Artificial Sequence
  primer
gtaaaacgacggccagttccacacatgttccacacaag

SEQ ID NO: 79203 - DNA, 27 bp, Artificial Sequence
  primer
caagtgacatactggaactaatacgac

SEQ ID NO: 79204 - DNA, 22 bp, Artificial Sequence
  primer
ttaaggagcacactcgaacctc

SEQ ID NO: 79205 - DNA, 25 bp, Artificial Sequence
  primer
caagaatactagcttgtccatcaca

SEQ ID NO: 79206 - DNA, 22 bp, Artificial Sequence
  primer
ttatgaatatggtccctgtggc

SEQ ID NO: 79207 - DNA, 38 bp, Artificial Sequence
  primer
gtaaaacgacggccagtggattatttgtgtgagccgtg

SEQ ID NO: 79208 - DNA, 38 bp, Artificial Sequence
  primer
gtaaaacgacggccagtagccaatctctttgcatcagc

SEQ ID NO: 79209 - DNA, 21 bp, Artificial Sequence
  primer
tctctgagtcccttcagcctc

SEQ ID NO: 79210 - DNA, 21 bp, Artificial Sequence
  primer
aacagacagagcctacctggc

SEQ ID NO: 79211 - DNA, 38 bp, Artificial Sequence
  primer
gtaaaacgacggccagttagagaaaggtgggcttcagg

SEQ ID NO: 79212 - DNA, 37 bp, Artificial Sequence
  primer
gtaaaacgacggccagtggcttcttcgttcatctccc

SEQ ID NO: 79213 - DNA, 20 bp, Artificial Sequence
  primer
caacctgcccagtacctctg

SEQ ID NO: 79214 - DNA, 39 bp, Artificial Sequence
  primer
gtaaaacgacggccagttgctatatgaccctgacatccc

SEQ ID NO: 79215 - DNA, 21 bp, Artificial Sequence
  primer
ccatgggcattatgtggaaac

SEQ ID NO: 79216 - DNA, 21 bp, Artificial Sequence
  primer
aatcatgcagcaccctacctc

SEQ ID NO: 79217 - DNA, 20 bp, Artificial Sequence
  primer
ctgggaagaagctgcaagtg

SEQ ID NO: 79218 - DNA, 38 bp, Artificial Sequence
  primer
gtaaaacgacggccagtgagcaagaagcatcctatgcc

SEQ ID NO: 79219 - DNA, 21 bp, Artificial Sequence
  primer
acctggagtaccctaaggccc

SEQ ID NO: 79220 - DNA, 20 bp, Artificial Sequence
  primer
tgtgactcgagaatgctggg

SEQ ID NO: 79221 - DNA, 21 bp, Artificial Sequence
  primer
tgcacgatcactatctggagg

SEQ ID NO: 79222 - DNA, 38 bp, Artificial Sequence
  primer
gtaaaacgacggccagtccagagatagggaggagcttg

SEQ ID NO: 79223 - DNA, 38 bp, Artificial Sequence
  primer
gtaaaacgacggccagtacaagcacactcacctccatc

SEQ ID NO: 79224 - DNA, 37 bp, Artificial Sequence
  primer
gtaaaacgacggccagtgttgctgcttgggtgagttg

SEQ ID NO: 79225 - DNA, 21 bp, Artificial Sequence
  primer
ggctaaggatgccttcaggtc

SEQ ID NO: 79226 - DNA, 21 bp, Artificial Sequence
  primer
ggaagcagtggaggagacatc

SEQ ID NO: 79227 - DNA, 36 bp, Artificial Sequence
  primer
gtaaaacgacggccagtggtctcctctggctcaccc

SEQ ID NO: 79228 - DNA, 21 bp, Artificial Sequence
  primer
cctgaaggttatgctggaagg

SEQ ID NO: 79229 - DNA, 21 bp, Artificial Sequence
  primer
tcagaagaggagtctccacgg

SEQ ID NO: 79230 - DNA, 21 bp, Artificial Sequence
  primer
tcacctggtctccaagtgttg

SEQ ID NO: 79231 - DNA, 37 bp, Artificial Sequence
  primer
gtaaaacgacggccagtctacacagcctgggctcatc

SEQ ID NO: 79232 - DNA, 21 bp, Artificial Sequence
  primer
ccttgagctatcccaaacgtc

SEQ ID NO: 79233 - DNA, 37 bp, Artificial Sequence
  primer
gtaaaacgacggccagtagcaccttgcaacagctcac

SEQ ID NO: 79234 - DNA, 21 bp, Artificial Sequence
  primer
ggtgacggttgcatgatattg

SEQ ID NO: 79235 - DNA, 38 bp, Artificial Sequence
  primer
gtaaaacgacggccagtagcagctgtgtgtgaaggaag

SEQ ID NO: 79236 - DNA, 21 bp, Artificial Sequence
  primer
caaggacgctgcagagctaag

SEQ ID NO: 79237 - DNA, 37 bp, Artificial Sequence
  primer
gtaaaacgacggccagtggacaaatggacccagcttc

SEQ ID NO: 79238 - DNA, 21 bp, Artificial Sequence
  primer
tcccacttcctggtacaaagc

SEQ ID NO: 79239 - DNA, 38 bp, Artificial Sequence
  primer
gtaaaacgacggccagtcactctcacaatctggccctc

SEQ ID NO: 79240 - DNA, 38 bp, Artificial Sequence
  primer
gtaaaacgacggccagtcaccagacagaatctgagccc

SEQ ID NO: 79241 - DNA, 19 bp, Artificial Sequence
  primer
ccttctgggagtggaggtg

SEQ ID NO: 79242 - DNA, 38 bp, Artificial Sequence
  primer
gtaaaacgacggccagtaaggctctgaagcagggttag

SEQ ID NO: 79243 - DNA, 20 bp, Artificial Sequence
  primer
atctcagtgccacagccatc

SEQ ID NO: 79244 - DNA, 21 bp, Artificial Sequence
  primer
agggcggtaaagaaagaacag

SEQ ID NO: 79245 - DNA, 21 bp, Artificial Sequence
  primer
ggtagatgccgctgtctatgg

SEQ ID NO: 79246 - DNA, 21 bp, Artificial Sequence
  primer
cagtgcttcagatgccatacc

SEQ ID NO: 79247 - DNA, 39 bp, Artificial Sequence
  primer
gtaaaacgacggccagtaagctataacctgtcagccacc

SEQ ID NO: 79248 - DNA, 38 bp, Artificial Sequence
  primer
gtaaaacgacggccagtcctcatgccaaaggacctatc

SEQ ID NO: 79249 - DNA, 21 bp, Artificial Sequence
  primer
agggaaggagatgggacagag

SEQ ID NO: 79250 - DNA, 38 bp, Artificial Sequence
  primer
gtaaaacgacggccagtagcagattcttccaaccatgc

SEQ ID NO: 79251 - DNA, 38 bp, Artificial Sequence
  primer
gtaaaacgacggccagtgatcaggaccttgagaccacc

SEQ ID NO: 79252 - DNA, 38 bp, Artificial Sequence
  primer
gtaaaacgacggccagtagcttctttctgccagtctcg

SEQ ID NO: 79253 - DNA, 21 bp, Artificial Sequence
  primer
gggacttctgctcttgtgagg

SEQ ID NO: 79254 - DNA, 38 bp, Artificial Sequence
  primer
gtaaaacgacggccagtgatgtgggatggcaatttagg

SEQ ID NO: 79255 - DNA, 21 bp, Artificial Sequence
  primer
attcacatgggttcagtgtgg

SEQ ID NO: 79256 - DNA, 21 bp, Artificial Sequence
  primer
gtcctgtgaagcaggaagcac

SEQ ID NO: 79257 - DNA, 21 bp, Artificial Sequence
  primer
tttagaaaccacccaccttcc

SEQ ID NO: 79258 - DNA, 21 bp, Artificial Sequence
  primer
ttggctggtggttcttatctg

SEQ ID NO: 79259 - DNA, 21 bp, Artificial Sequence
  primer
tatgcaggtgtagcaagcagc

SEQ ID NO: 79260 - DNA, 22 bp, Artificial Sequence
  primer
agagctaactcctgtcccaatg

SEQ ID NO: 79261 - DNA, 21 bp, Artificial Sequence
  primer
gacctgtgcacttgctctcac

SEQ ID NO: 79262 - DNA, 21 bp, Artificial Sequence
  primer
aggtatgtagggaaccctggc

SEQ ID NO: 79263 - DNA, 20 bp, Artificial Sequence
  primer
gatgaagatgaggagctggg

SEQ ID NO: 79264 - DNA, 20 bp, Artificial Sequence
  primer
gctaccctcccaacaccttc

SEQ ID NO: 79265 - DNA, 40 bp, Artificial Sequence
  primer
gtaaaacgacggccagtaaagtcccatcatcacctcatag

SEQ ID NO: 79266 - DNA, 38 bp, Artificial Sequence
  primer
gtaaaacgacggccagtgagttccaaagagtgaaggcg

SEQ ID NO: 79267 - DNA, 38 bp, Artificial Sequence
  primer
gtaaaacgacggccagtatcctcttgaacttgcccttc

SEQ ID NO: 79268 - DNA, 38 bp, Artificial Sequence
  primer
gtaaaacgacggccagtctgcaggaagatggtgctaag

SEQ ID NO: 79269 - DNA, 41 bp, Artificial Sequence
  primer
gtaaaacgacggccagtccttctaaatgatcctcagactgc

SEQ ID NO: 79270 - DNA, 21 bp, Artificial Sequence
  primer
atcaagctcagtcacccacag

SEQ ID NO: 79271 - DNA, 39 bp, Artificial Sequence
  primer
gtaaaacgacggccagtgctactatgctgaatggcacag

SEQ ID NO: 79272 - DNA, 28 bp, Artificial Sequence
  primer
aaatacaggaattccaacctaacagtaa

SEQ ID NO: 79273 - DNA, 39 bp, Artificial Sequence
  primer
gtaaaacgacggccagtaaagcagaatttggacactgaa

SEQ ID NO: 79274 - DNA, 20 bp, Artificial Sequence
  primer
tctgatgggcattacaaccc

SEQ ID NO: 79275 - DNA, 40 bp, Artificial Sequence
  primer
gtaaaacgacggccagttccttatgttcagacaaagtggg

SEQ ID NO: 79276 - DNA, 39 bp, Artificial Sequence
  primer
gtaaaacgacggccagtccacagtccctaatatgcaggt

SEQ ID NO: 79277 - DNA, 21 bp, Artificial Sequence
  primer
tgggaaatagcagaactacgg

SEQ ID NO: 79278 - DNA, 24 bp, Artificial Sequence
  primer
tttcaattacaggctttccaatta

SEQ ID NO: 79279 - DNA, 22 bp, Artificial Sequence
  primer
ctttgttgaaatgaacaatggc

SEQ ID NO: 79280 - DNA, 41 bp, Artificial Sequence
  primer
gtaaaacgacggccagttgggctccatgtaatactgatctc

SEQ ID NO: 79281 - DNA, 41 bp, Artificial Sequence
  primer
gtaaaacgacggccagtcataagccaaacatcattatgcaa

SEQ ID NO: 79282 - DNA, 41 bp, Artificial Sequence
  primer
gtaaaacgacggccagttttgaaggtaagacactggaactg

SEQ ID NO: 79283 - DNA, 40 bp, Artificial Sequence
  primer
gtaaaacgacggccagtctgaaattgatgacactgcattc

SEQ ID NO: 79284 - DNA, 20 bp, Artificial Sequence
  primer
ctgtttgctcacacagcagc

SEQ ID NO: 79285 - DNA, 21 bp, Artificial Sequence
  primer
tcctggaagtgagttggacag

SEQ ID NO: 79286 - DNA, 42 bp, Artificial Sequence
  primer
gtaaaacgacggccagttgccaactttatatagaccatgagc

SEQ ID NO: 79287 - DNA, 39 bp, Artificial Sequence
  primer
gtaaaacgacggccagtggatttgaaccaacaaatctgg

SEQ ID NO: 79288 - DNA, 21 bp, Artificial Sequence
  primer
tgctatttacgctgggatgac

SEQ ID NO: 79289 - DNA, 21 bp, Artificial Sequence
  primer
ccagccacacaaatcatcttc

SEQ ID NO: 79290 - DNA, 42 bp, Artificial Sequence
  primer
gtaaaacgacggccagtaacaatgctcacaaatataaggcag

SEQ ID NO: 79291 - DNA, 23 bp, Artificial Sequence
  primer
tcagatctacactgcatgcacac

SEQ ID NO: 79292 - DNA, 21 bp, Artificial Sequence
  primer
gagctcccttaacttcccagc

SEQ ID NO: 79293 - DNA, 38 bp, Artificial Sequence
  primer
gtaaaacgacggccagtatcctcattgtgaccaatggc

SEQ ID NO: 79294 - DNA, 24 bp, Artificial Sequence
  primer
cctggagttaggagagtaattccc

SEQ ID NO: 79295 - DNA, 38 bp, Artificial Sequence; identical to SEQ ID NO: 79267
  primer

SEQ ID NO: 79296 - DNA, 21 bp, Artificial Sequence
  primer
tgttctccagcttctccttcc

SEQ ID NO: 79297 - DNA, 20 bp, Artificial Sequence
  primer
ggtggtcgttctgtgtggtg

SEQ ID NO: 79298 - DNA, 21 bp, Artificial Sequence
  primer
ctctctccatctccctccttc

SEQ ID NO: 79299 - DNA, 38 bp, Artificial Sequence
  primer
gtaaaacgacggccagtgcctttcgtgttcgtctatcc

SEQ ID NO: 79300 - DNA, 21 bp, Artificial Sequence
  primer
ctgatggaaggaggctacagg

SEQ ID NO: 79301 - DNA, 39 bp, Artificial Sequence
  primer
gtaaaacgacggccagtccctgtcctagaagatagcagg

SEQ ID NO: 79302 - DNA, 38 bp, Artificial Sequence
  primer
gtaaaacgacggccagtgggaaatgtggaggaaagaac

SEQ ID NO: 79303 - DNA, 21 bp, Artificial Sequence
  primer
acctccctatccctcttcagg

SEQ ID NO: 79304 - DNA, 21 bp, Artificial Sequence
  primer
tggaacttgttggtggagttg

SEQ ID NO: 79305 - DNA, 19 bp, Artificial Sequence
  primer
gtttggctgcggagagaag

SEQ ID NO: 79306 - DNA, 38 bp, Artificial Sequence
  primer
gtaaaacgacggccagtctgtggactgcgacaaatcag

SEQ ID NO: 79307 - DNA, 21 bp, Artificial Sequence
  primer
ccagtttcaggtgggtttgtc

SEQ ID NO: 79308 - DNA, 20 bp, Artificial Sequence
  primer
catgccattgatcacacagg

SEQ ID NO: 79309 - DNA, 38 bp, Artificial Sequence
  primer
gtaaaacgacggccagtgctactccgatgtctgccttc

SEQ ID NO: 79310 - DNA, 21 bp, Artificial Sequence
  primer
tcgaagatcagtcgacctgtg

SEQ ID NO: 79311 - DNA, 21 bp, Artificial Sequence
  primer
gtggtctctgtccctcctgtc

SEQ ID NO: 79312 - DNA, 21 bp, Artificial Sequence
  primer
caaatgcagacactgaggtcc

SEQ ID NO: 79313 - DNA, 21 bp, Artificial Sequence
  primer
ctcagtcacacgtggaggaac

SEQ ID NO: 79314 - DNA, 20 bp, Artificial Sequence
  primer
catgtcaccatctggcactg

SEQ ID NO: 79315 - DNA, 22 bp, Artificial Sequence
  primer
ccggatctcatcatagacgaag

SEQ ID NO: 79316 - DNA, 38 bp, Artificial Sequence
  primer
gtaaaacgacggccagtctcagaggtcagtgctggttg

SEQ ID NO: 79317 - DNA, 38 bp, Artificial Sequence
  primer
gtaaaacgacggccagtttgctcagatatcttggtggc

SEQ ID NO: 79318 - DNA, 21 bp, Artificial Sequence
  primer
ctccaggtcaactcagccttc

SEQ ID NO: 79319 - DNA, 20 bp, Artificial Sequence
  primer
ctcttaaagccggttcaggg

SEQ ID NO: 79320 - DNA, 20 bp, Artificial Sequence
  primer
ctgcttcacacctcacccac

SEQ ID NO: 79321 - DNA, 38 bp, Artificial Sequence
  primer
gtaaaacgacggccagtaaaccaaggtacagggtggtg

SEQ ID NO: 79322 - DNA, 21 bp, Artificial Sequence
  primer
tgatggttcggtgtttacgtc

SEQ ID NO: 79323 - DNA, 38 bp, Artificial Sequence
  primer
gtaaaacgacggccagtagtcaggaccggctaagtcac

SEQ ID NO: 79324 - DNA, 38 bp, Artificial Sequence
  primer
gtaaaacgacggccagtatgatttggcagggaactgac

SEQ ID NO: 79325 - DNA, 21 bp, Artificial Sequence
  primer
tgtctgccctgtaccattctg

SEQ ID NO: 79326 - DNA, 22 bp, Artificial Sequence
  primer
gccattaccagaacaaagaagc

SEQ ID NO: 79327 - DNA, 43 bp, Artificial Sequence
  primer
gtaaaacgacggccagttgatacaatctttgaatcgctaaatg

SEQ ID NO: 79328 - DNA, 37 bp, Artificial Sequence
  primer
gtaaaacgacggccagtattcgaggaatgataccggg

SEQ ID NO: 79329 - DNA, 37 bp, Artificial Sequence
  primer
gtaaaacgacggccagtctagctcgtcccacctgatg

SEQ ID NO: 79330 - DNA, 41 bp, Artificial Sequence
  primer
gtaaaacgacggccagtaaagttcagcccattaggaagtaa

SEQ ID NO: 79331 - DNA, 38 bp, Artificial Sequence
  primer
gtaaaacgacggccagtcatctgacggtaagcaacagc

SEQ ID NO: 79332 - DNA, 22 bp, Artificial Sequence
  primer
ccattagtctcaaccaatgcct

SEQ ID NO: 79333 - DNA, 21 bp, Artificial Sequence
  primer
tcacgatactgagccaattcc

SEQ ID NO: 79334 - DNA, 38 bp, Artificial Sequence
  primer
gtaaaacgacggccagtatgtgatgcagctctgtaggc

SEQ ID NO: 79335 - DNA, 21 bp, Artificial Sequence
  primer
ctgagatctttccatcagccc

SEQ ID NO: 79336 - DNA, 39 bp, Artificial Sequence
  primer
gtaaaacgacggccagttcagccttgaattatctagccc

SEQ ID NO: 79337 - DNA, 21 bp, Artificial Sequence
  primer
agccattagagagcaagacgc

SEQ ID NO: 79338 - DNA, 21 bp, Artificial Sequence
  primer
catagaaggcagacagcttgg

SEQ ID NO: 79339 - DNA, 22 bp, Artificial Sequence
  primer
tgcatcctaatttcttcaggtg

SEQ ID NO: 79340 - DNA, 38 bp, Artificial Sequence
  primer
gtaaaacgacggccagttcagaaattgcatctggcttc

SEQ ID NO: 79341 - DNA, 38 bp, Artificial Sequence
  primer
gtaaaacgacggccagttagaacatggcttcagttggc

SEQ ID NO: 79342 - DNA, 19 bp, Artificial Sequence
  primer
attcggcccaataatgcag

SEQ ID NO: 79343 - DNA, 38 bp, Artificial Sequence
  primer
gtaaaacgacggccagttcttgggctcaagcaatcttc

SEQ ID NO: 79344 - DNA, 38 bp, Artificial Sequence
  primer
gtaaaacgacggccagtagcctcaactttccttgctcc

SEQ ID NO: 79345 - DNA, 40 bp, Artificial Sequence
  primer
gtaaaacgacggccagtcatatattgcttgacggttgttg

SEQ ID NO: 79346 - DNA, 38 bp, Artificial Sequence
  primer
gtaaaacgacggccagttcaatcaaggctcttgtgcag

SEQ ID NO: 79347 - DNA, 35 bp, Artificial Sequence
  primer
gtaaaacgacggccagtgacctcagagccgcttcc

SEQ ID NO: 79348 - DNA, 38 bp, Artificial Sequence
  primer
gtaaaacgacggccagttcagaacaagtccaatgtccc

SEQ ID NO: 79349 - DNA, 21 bp, Artificial Sequence
  primer
atggcaagtgctcagataggc

SEQ ID NO: 79350 - DNA, 24 bp, Artificial Sequence
  primer
aaggccctgaagaatataccttgt

SEQ ID NO: 79351 - DNA, 21 bp, Artificial Sequence
  primer
cacttgcaacggtattaaggg

SEQ ID NO: 79352 - DNA, 20 bp, Artificial Sequence
  primer
ggaggcagcaagattccatc

SEQ ID NO: 79353 - DNA, 18 bp, Artificial Sequence
  primer
ccacggactcctctcagc

SEQ ID NO: 79354 - DNA, 21 bp, Artificial Sequence
  primer
aggatgcaagtttcagcaatg

SEQ ID NO: 79355 - DNA, 38 bp, Artificial Sequence
  primer
gtaaaacgacggccagtatggaggaacagtttcttcgg

SEQ ID NO: 79356 - DNA, 21 bp, Artificial Sequence
  primer
cacccaggagacgcttatctc

SEQ ID NO: 79357 - DNA, 21 bp, Artificial Sequence
  primer
agcctcaactgagacggagac

SEQ ID NO: 79358 - DNA, 37 bp, Artificial Sequence
  primer
gtaaaacgacggccagtccttctccaagtttgccttg

SEQ ID NO: 79359 - DNA, 21 bp, Artificial Sequence
  primer
cagagctttcaacacaggcag

SEQ ID NO: 79360 - DNA, 20 bp, Artificial Sequence
  primer
acctgccattcacaaaggtg

SEQ ID NO: 79361 - DNA, 44 bp, Artificial Sequence
  primer
gtaaaacgacggccagttgctttaaattataccatcccaataac

SEQ ID NO: 79362 - DNA, 21 bp, Artificial Sequence
  primer
ccgccaggctctatcactaag

SEQ ID NO: 79363 - DNA, 38 bp, Artificial Sequence
  primer
gtaaaacgacggccagtagggcgggtatagaagacagc

SEQ ID NO: 79364 - DNA, 22 bp, Artificial Sequence
  primer
tgatctatcactccatcctggg

SEQ ID NO: 79365 - DNA, 28 bp, Artificial Sequence
  primer
acacttatttgaagcattagattcattt

SEQ ID NO: 79366 - DNA, 21 bp, Artificial Sequence
  primer
cgtgaatgccaactcctacac

SEQ ID NO: 79367 - DNA, 21 bp, Artificial Sequence
  primer
tccttgccagctattcctacc

SEQ ID NO: 79368 - DNA, 21 bp, Artificial Sequence
  primer
gactggccgatagagatttcg

SEQ ID NO: 79369 - DNA, 38 bp, Artificial Sequence
  primer
gtaaaacgacggccagtttcacaggcccagataaacag

SEQ ID NO: 79370 - DNA, 38 bp, Artificial Sequence
  primer
gtaaaacgacggccagttggtcttgaacaactgggctc

SEQ ID NO: 79371 - DNA, 38 bp, Artificial Sequence
  primer
gtaaaacgacggccagtaaatcaacctgaaggctcctg

SEQ ID NO: 79372 - DNA, 21 bp, Artificial Sequence
  primer
aaggtcaaaggacagaggcac

SEQ ID NO: 79373 - DNA, 22 bp, Artificial Sequence
  primer
ccttgctgtgaagaacaaggtc

SEQ ID NO: 79374 - DNA, 21 bp, Artificial Sequence
  primer
tcctccatctccacctaaagc

SEQ ID NO: 79375 - DNA, 37 bp, Artificial Sequence
  primer
gtaaaacgacggccagtcctgggaaacagagcgttac

SEQ ID NO: 79376 - DNA, 21 bp, Artificial Sequence
  primer
ttctctgtcaaaccctgagcc

SEQ ID NO: 79377 - DNA, 20 bp, Artificial Sequence
  primer
attcaacaacgtggacgctc

SEQ ID NO: 79378 - DNA, 39 bp, Artificial Sequence
  primer
gtaaaacgacggccagtggaaagacttgccctcaaactc

SEQ ID NO: 79379 - DNA, 44 bp, Artificial Sequence
  primer
gtaaaacgacggccagtcaaagccctttaaatataatgcaagac

SEQ ID NO: 79380 - DNA, 21 bp, Artificial Sequence
  primer
aacgtacattcccatgacacc

SEQ ID NO: 79381 - DNA, 38 bp, Artificial Sequence
  primer
gtaaaacgacggccagtggtcaccacactttcctctcc

SEQ ID NO: 79382 - DNA, 21 bp, Artificial Sequence
  primer
aagcttccttagggatctggc

SEQ ID NO: 79383 - DNA, 23 bp, Artificial Sequence
  primer
ggcagccactgtagacaaactac

SEQ ID NO: 79384 - DNA, 21 bp, Artificial Sequence
  primer
caccaggtgaaagatgtgtgg

SEQ ID NO: 79385 - DNA, 21 bp, Artificial Sequence
  primer
ctacacagcccgtcagacaac

SEQ ID NO: 79386 - DNA, 20 bp, Artificial Sequence
  primer
ctgcgaaagaggttggtcag

SEQ ID NO: 79387 - DNA, 38 bp, Artificial Sequence
  primer
gtaaaacgacggccagtctttgggtgagctgattccac

SEQ ID NO: 79388 - DNA, 22 bp, Artificial Sequence
  primer
ctctgcttaaatgtcctcctcc

SEQ ID NO: 79389 - DNA, 21 bp, Artificial Sequence
  primer
acatgatgcattctgggtctg

SEQ ID NO: 79390 - DNA, 21 bp, Artificial Sequence
  primer
gagggcacctaatgaacctct

SEQ ID NO: 79391 - DNA, 37 bp, Artificial Sequence
  primer
gtaaaacgacggccagtcagcttctcaggcacacgtc

SEQ ID NO: 79392 - DNA, 21 bp, Artificial Sequence
  primer
ttgtgtccagttcatccaagg

SEQ ID NO: 79393 - DNA, 38 bp, Artificial Sequence
  primer
gtaaaacgacggccagtgcttccttctctcccagtgtg

SEQ ID NO: 79394 - DNA, 21 bp, Artificial Sequence
  primer
ctagcatccctccctgtcatc

SEQ ID NO: 79395 - DNA, 38 bp, Artificial Sequence
  primer
gtaaaacgacggccagtaagaaggtgggctgctgtatc

SEQ ID NO: 79396 - DNA, 21 bp, Artificial Sequence
  primer
aacatgggataatggctacgg

SEQ ID NO: 79397 - DNA, 21 bp, Artificial Sequence
  primer
aatctgcaggtcagacgagtg

SEQ ID NO: 79398 - DNA, 21 bp, Artificial Sequence
  primer
ggattcagcctcattggaaac

SEQ ID NO: 79399 - DNA, 39 bp, Artificial Sequence
  primer
gtaaaacgacggccagtgcagtctgatcacacatggtcc

SEQ ID NO: 79400 - DNA, 36 bp, Artificial Sequence
  primer
gtaaaacgacggccagtgaagacgccaaggttacgg

SEQ ID NO: 79401 - DNA, 37 bp, Artificial Sequence
  primer
gtaaaacgacggccagtacgccctgactgtactgctg

SEQ ID NO: 79402 - DNA, 38 bp, Artificial Sequence
  primer
gtaaaacgacggccagtgaatgcacaaacaaccaaagg

SEQ ID NO: 79403 - DNA, 38 bp, Artificial Sequence
  primer
gtaaaacgacggccagtaggcctgagattcttcactgc

SEQ ID NO: 79404 - DNA, 39 bp, Artificial Sequence
  primer
gtaaaacgacggccagtaatgaaacaaacatcccaggtg

SEQ ID NO: 79405 - DNA, 39 bp, Artificial Sequence
  primer
gtaaaacgacggccagttgaaaggctaaatgtgttgcac

SEQ ID NO: 79406 - DNA, 39 bp, Artificial Sequence
  primer
gtaaaacgacggccagtagtgaccatgtgttaggtgctg

SEQ ID NO: 79407 - DNA, 19 bp, Artificial Sequence
  primer
gagggcttactgtggcagg

SEQ ID NO: 79408 - DNA, 25 bp, Artificial Sequence
  primer
tttctacatatgatgcactctccac

SEQ ID NO: 79409 - DNA, 22 bp, Artificial Sequence
  primer
ttcttagaggcacacgaagtcc

SEQ ID NO: 79410 - DNA, 38 bp, Artificial Sequence
  primer
gtaaaacgacggccagtgccaaacaagctattgggaac

SEQ ID NO: 79411 - DNA, 44 bp, Artificial Sequence
  primer
gtaaaacgacggccagtctatgactataatcgtgagtcaactgc

SEQ ID NO: 79412 - DNA, 41 bp, Artificial Sequence
  primer
gtaaaacgacggccagtggaatcaacagtttcaaatgatcc

SEQ ID NO: 79413 - DNA, 38 bp, Artificial Sequence
  primer
gtaaaacgacggccagtggaggaaggagaggaaggtgt

SEQ ID NO: 79414 - DNA, 21 bp, Artificial Sequence
  primer
gagcaaggaacagtccacctc

SEQ ID NO: 79415 - DNA, 21 bp, Artificial Sequence
  primer
ccctacagttgggacaaggtc

SEQ ID NO: 79416 - DNA, 39 bp, Artificial Sequence
  primer
gtaaaacgacggccagttgacccagaagagactcagacc

SEQ ID NO: 79417 - DNA, 38 bp, Artificial Sequence
  primer
gtaaaacgacggccagtagtgctaggcaccaactcctg

SEQ ID NO: 79418 - DNA, 21 bp, Artificial Sequence
  primer
acagggtcttctgtcaggtgg

SEQ ID NO: 79419 - DNA, 38 bp, Artificial Sequence
  primer
gtaaaacgacggccagtcagcctacctgtggcatacac

SEQ ID NO: 79420 - DNA, 21 bp, Artificial Sequence
  primer
tgccatgacacctcctacatc

SEQ ID NO: 79421 - DNA, 19 bp, Artificial Sequence
  primer
acctgcctcgcagctactc

SEQ ID NO: 79422 - DNA, 19 bp, Artificial Sequence
  primer
gtgcctggtccagatgagc

SEQ ID NO: 79423 - DNA, 20 bp, Artificial Sequence
  primer
agagaacagccaagcctcag

SEQ ID NO: 79424 - DNA, 24 bp, Artificial Sequence
  primer
tccaatacccagaggtatgacaac

SEQ ID NO: 79425 - DNA, 20 bp, Artificial Sequence
  primer
gtataaggaatgggaggccg

SEQ ID NO: 79426 - DNA, 36 bp, Artificial Sequence
  primer
gtaaaacgacggccagtgcccaggcttgtgttcttg

SEQ ID NO: 79427 - DNA, 38 bp, Artificial Sequence
  primer
gtaaaacgacggccagtttgaccctactccatccttgg

SEQ ID NO: 79428 - DNA, 25 bp, Artificial Sequence
  primer
tcacccttaggtgatataggacttg

SEQ ID NO: 79429 - DNA, 21 bp, Artificial Sequence
  primer
taccacagtgggattcacgtc

SEQ ID NO: 79430 - DNA, 22 bp, Artificial Sequence
  primer
tgcattctgccaataggaagtc

SEQ ID NO: 79431 - DNA, 21 bp, Artificial Sequence
  primer
cgagaaatacaccttggcatc

SEQ ID NO: 79432 - DNA, 46 bp, Artificial Sequence
  primer
gtaaaacgacggccagtgaaacttacaatcagtagataatgctgac

SEQ ID NO: 79433 - DNA, 20 bp, Artificial Sequence
  primer
aaatggcattgcttccaaac

SEQ ID NO: 79434 - DNA, 21 bp, Artificial Sequence
  primer
tcaggcatgaatccagagttg

SEQ ID NO: 79435 - DNA, 39 bp, Artificial Sequence
  primer
gtaaaacgacggccagtaaagataatggctcctctgtgg

SEQ ID NO: 79436 - DNA, 19 bp, Artificial Sequence
  primer
ctgagcccaggcagtcaag

SEQ ID NO: 79437 - DNA, 23 bp, Artificial Sequence
  primer
tttggtatcctggtttgctacag

SEQ ID NO: 79438 - DNA, 18 bp, Artificial Sequence
  primer
ccgtgttagccaggatgg

SEQ ID NO: 79439 - DNA, 21 bp, Artificial Sequence
  primer
tgaactacagtcgtgctgctg

SEQ ID NO: 79440 - DNA, 38 bp, Artificial Sequence
  primer
gtaaaacgacggccagtagcttgcacatgtcgtctttg

SEQ ID NO: 79441 - DNA, 38 bp, Artificial Sequence
  primer
gtaaaacgacggccagtgtgtggagcatgaatgaggag

SEQ ID NO: 79442 - DNA, 18 bp, Artificial Sequence
  primer
ggtgatcccacctcctcg

SEQ ID NO: 79443 - DNA, 35 bp, Artificial Sequence
  primer
gtaaaacgacggccagtaggtgatccaccggcctt

SEQ ID NO: 79444 - DNA, 38 bp, Artificial Sequence
  primer
gtaaaacgacggccagtagggtcagagaaacatctggc

SEQ ID NO: 79445 - DNA, 42 bp, Artificial Sequence
  primer
gtaaaacgacggccagttgcacaattaattatatccactggg

SEQ ID NO: 79446 - DNA, 21 bp, Artificial Sequence
  primer
ctaagaggtccagaaggcagg

SEQ ID NO: 79447 - DNA, 21 bp, Artificial Sequence
  primer
acaagtgctgagcctcctgtc

SEQ ID NO: 79448 - DNA, 21 bp, Artificial Sequence
  primer
gctcatctttcctgcacagag

SEQ ID NO: 79449 - DNA, 21 bp, Artificial Sequence
  primer
ccacagatcacaaccaacagg

SEQ ID NO: 79450 - DNA, 18 bp, Artificial Sequence
  primer
gaagctttggccgctgag

SEQ ID NO: 79451 - DNA, 27 bp, Artificial Sequence
  primer
atgcctacataactgtgattacttctg

SEQ ID NO: 79452 - DNA, 20 bp, Artificial Sequence
  primer
gttcaccaccacctggaaag

SEQ ID NO: 79453 - DNA, 41 bp, Artificial Sequence
  primer
gtaaaacgacggccagtaaatacacagcctatgggaatgag

SEQ ID NO: 79454 - DNA, 38 bp, Artificial Sequence
  primer
gtaaaacgacggccagtatggtctccattcatcccttc

SEQ ID NO: 79455 - DNA, 39 bp, Artificial Sequence
  primer
gtaaaacgacggccagtcacgtggttgaagagataaggc

SEQ ID NO: 79456 - DNA, 21 bp, Artificial Sequence
  primer
ttaagaacttggcagtgcagc

SEQ ID NO: 79457 - DNA, 21 bp, Artificial Sequence
  primer
gagggaagcaacattccaatc

SEQ ID NO: 79458 - DNA, 23 bp, Artificial Sequence
  primer
agagtcaacacactgcattctca

SEQ ID NO: 79459 - DNA, 39 bp, Artificial Sequence
  primer
gtaaaacgacggccagtgtaatggtcagcctctctttcc

SEQ ID NO: 79460 - DNA, 37 bp, Artificial Sequence
  primer
gtaaaacgacggccagtcgcagcctacagcaaacatc

SEQ ID NO: 79461 - DNA, 37 bp, Artificial Sequence
  primer
gtaaaacgacggccagtaaagcagagtgaggaggctg

SEQ ID NO: 79462 - DNA, 21 bp, Artificial Sequence
  primer
tctgacctcaccttcccaaac

SEQ ID NO: 79463 - DNA, 21 bp, Artificial Sequence
  primer
acaacatcatattggctgccc

SEQ ID NO: 79464 - DNA, 38 bp, Artificial Sequence
  primer
gtaaaacgacggccagtcagagacagaagcagccttcc

SEQ ID NO: 79465 - DNA, 37 bp, Artificial Sequence
  primer
gtaaaacgacggccagtaagagacagggaccctccag

SEQ ID NO: 79466 - DNA, 20 bp, Artificial Sequence
  primer
caaacagcatttggaaagcg

SEQ ID NO: 79467 - DNA, 38 bp, Artificial Sequence
  primer
gtaaaacgacggccagtagtgtaagttcacgtggcagc

SEQ ID NO: 79468 - DNA, 21 bp, Artificial Sequence
  primer
ctgtgtatatttggttgggcg

SEQ ID NO: 79469 - DNA, 44 bp, Artificial Sequence
  primer
gtaaaacgacggccagtaactttaacataacgtttggcattaac

SEQ ID NO: 79470 - DNA, 37 bp, Artificial Sequence
  primer
gtaaaacgacggccagtctcacggctcctctccctac

SEQ ID NO: 79471 - DNA, 43 bp, Artificial Sequence
  primer
gtaaaacgacggccagtcattaagtcctgcaaactattaaccc

SEQ ID NO: 79472 - DNA, 21 bp, Artificial Sequence
  primer
ccttcaagcaaacaggtacgg

SEQ ID NO: 79473 - DNA, 39 bp, Artificial Sequence
  primer
gtaaaacgacggccagtccttcaatccaaccagcactac

SEQ ID NO: 79474 - DNA, 21 bp, Artificial Sequence
  primer
tgttcacccgttcattcactc

SEQ ID NO: 79475 - DNA, 23 bp, Artificial Sequence
  primer
gaggtgttgacaagaatcagtcc

SEQ ID NO: 79476 - DNA, 38 bp, Artificial Sequence
  primer
gtaaaacgacggccagtcatttggcattgcacatctct

SEQ ID NO: 79477 - DNA, 21 bp, Artificial Sequence
  primer
cacagcttcgttccctctagc

SEQ ID NO: 79478 - DNA, 36 bp, Artificial Sequence
  primer
gtaaaacgacggccagtatgaggccaacaccctctg

SEQ ID NO: 79479 - DNA, 39 bp, Artificial Sequence
  primer
gtaaaacgacggccagttttaacaagttcaccacctcgg

SEQ ID NO: 79480 - DNA, 36 bp, Artificial Sequence
  primer
gtaaaacgacggccagtggcaccaaaccatccaaag

SEQ ID NO: 79481 - DNA, 37 bp, Artificial Sequence
  primer
gtaaaacgacggccagtcactgagcctggcctatttg

SEQ ID NO: 79482 - DNA, 21 bp, Artificial Sequence
  primer
tgatttgacaggctttgttgg

SEQ ID NO: 79483 - DNA, 38 bp, Artificial Sequence
  primer
gtaaaacgacggccagttgcacagagagatgcagttcc

SEQ ID NO: 79484 - DNA, 21 bp, Artificial Sequence
  primer
ctgggtgacagagcaagactc

SEQ ID NO: 79485 - DNA, 21 bp, Artificial Sequence
  primer
tcctcaacaccattcttctgg

SEQ ID NO: 79486 - DNA, 38 bp, Artificial Sequence
  primer
gtaaaacgacggccagtcagacccacccagctctactg

SEQ ID NO: 79487 - DNA, 21 bp, Artificial Sequence
  primer
tccacaaatagctcggagaag

SEQ ID NO: 79488 - DNA, 38 bp, Artificial Sequence
  primer
gtaaaacgacggccagttacagctcacgatctgaaccc

SEQ ID NO: 79489 - DNA, 21 bp, Artificial Sequence
  primer
tatcaaatccacaggctgacg

SEQ ID NO: 79490 - DNA, 21 bp, Artificial Sequence
  primer
ggtctcctttgtcggagtcag

SEQ ID NO: 79491 - DNA, 38 bp, Artificial Sequence
  primer
gtaaaacgacggccagtagcagttcagctctagcaggg

SEQ ID NO: 79492 - DNA, 21 bp, Artificial Sequence
  primer
ggttcttggtcttgatcctgg

SEQ ID NO: 79493 - DNA, 21 bp, Artificial Sequence
  primer
ataacatcccatcccacaagg

SEQ ID NO: 79494 - DNA, 21 bp, Artificial Sequence
  primer
agtggaagcaggcatgaagtc

SEQ ID NO: 79495 - DNA, 20 bp, Artificial Sequence
  primer
gtgcagtgaggctaagccag

SEQ ID NO: 79496 - DNA, 37 bp, Artificial Sequence
  primer
gtaaaacgacggccagtcagcttctccagaaggaggg

SEQ ID NO: 79497 - DNA, 38 bp, Artificial Sequence
  primer
gtaaaacgacggccagtgcctctgaaaggctaagggac

SEQ ID NO: 79498 - DNA, 18 bp, Artificial Sequence
  primer
gacgtcacacaccggacc

SEQ ID NO: 79499 - DNA, 19 bp, Artificial Sequence
  primer
agacaagggtccgggtcac

SEQ ID NO: 79500 - DNA, 38 bp, Artificial Sequence
  primer
gtaaaacgacggccagttgcgtatgtgtcaggctgttc

SEQ ID NO: 79501 - DNA, 21 bp, Artificial Sequence
  primer
tagaggtagatcccgctcctg

SEQ ID NO: 79502 - DNA, 21 bp, Artificial Sequence
  primer
cctaagccacactgaacccag

SEQ ID NO: 79503 - DNA, 21 bp, Artificial Sequence
  primer
gcaggtctcactttctggctc

SEQ ID NO: 79504 - DNA, 21 bp, Artificial Sequence
  primer
aatcaccaccctaccacttcc

SEQ ID NO: 79505 - DNA, 38 bp, Artificial Sequence
  primer
gtaaaacgacggccagtaaggaggcagtagccagtcag

SEQ ID NO: 79506 - DNA, 21 bp, Artificial Sequence
  primer
tcgaagagcagcttgtactcc

SEQ ID NO: 79507 - DNA, 38 bp, Artificial Sequence
  primer
gtaaaacgacggccagtttcaggaaggccaacttgttc

SEQ ID NO: 79508 - DNA, 21 bp, Artificial Sequence
  primer
cacaggcttgtcacagaccac

SEQ ID NO: 79509 - DNA, 22 bp, Artificial Sequence
  primer
ggactgcaggaataaggatctg

SEQ ID NO: 79510 - DNA, 41 bp, Artificial Sequence
  primer
gtaaaacgacggccagtgatacccaccctgtaattgttagg

SEQ ID NO: 79511 - DNA, 21 bp, Artificial Sequence
  primer
tgtgatctgagcaggttgctt

SEQ ID NO: 79512 - DNA, 39 bp, Artificial Sequence
  primer
gtaaaacgacggccagttcaaatatcttgctggctaggg

SEQ ID NO: 79513 - DNA, 28 bp, Artificial Sequence
  primer
aaatgaatcataaccaaatctgtgtaaa

SEQ ID NO: 79514 - DNA, 39 bp, Artificial Sequence
  primer
gtaaaacgacggccagtataagcggaaatttgatgtgtg

SEQ ID NO: 79515 - DNA, 38 bp, Artificial Sequence
  primer
gtaaaacgacggccagtagcagcactgctagcacaaag

SEQ ID NO: 79516 - DNA, 38 bp, Artificial Sequence
  primer
gtaaaacgacggccagttgtttcagggctggtttactg

SEQ ID NO: 79517 - DNA, 20 bp, Artificial Sequence
  primer
gtccaccaaaggtcaccctc

SEQ ID NO: 79518 - DNA, 42 bp, Artificial Sequence
  primer
gtaaaacgacggccagtaaacagaagttgtattcccagaagg

SEQ ID NO: 79519 - DNA, 38 bp, Artificial Sequence
  primer
gtaaaacgacggccagtgtcaaggcaaactctgactgc

SEQ ID NO: 79520 - DNA, 18 bp, Artificial Sequence
  primer
tcgctgcagagcaggaag

SEQ ID NO: 79521 - DNA, 21 bp, Artificial Sequence
  primer
ctctctttcccattccacacc

SEQ ID NO: 79522 - DNA, 21 bp, Artificial Sequence
  primer
acccagaagtgccataccaac

SEQ ID NO: 79523 - DNA, 41 bp, Artificial Sequence
  primer
gtaaaacgacggccagtaaggacaaacagaatttatgcagg

SEQ ID NO: 79524 - DNA, 21 bp, Artificial Sequence
  primer
tgggattactttgtgtgaggc

SEQ ID NO: 79525 - DNA, 46 bp, Artificial Sequence
  primer
gtaaaacgacggccagtgctgctataatttaaatcaattacctgac

SEQ ID NO: 79526 - DNA, 30 bp, Artificial Sequence
  primer
aaatatcaattctttaattacttagggcac

SEQ ID NO: 79527 - DNA, 26 bp, Artificial Sequence
  primer
tgttaaacacataagccctttatcta

SEQ ID NO: 79528 - DNA, 37 bp, Artificial Sequence
  primer
gtaaaacgacggccagtgctccagacccaacacaaag

SEQ ID NO: 79529 - DNA, 37 bp, Artificial Sequence
  primer
gtaaaacgacggccagtacaggcgtgagtcaccattc

SEQ ID NO: 79530 - DNA, 38 bp, Artificial Sequence
  primer
gtaaaacgacggccagtcaatgctgacactcccttctc

SEQ ID NO: 79531 - DNA, 21 bp, Artificial Sequence
  primer
aaccctccttaagaaccgctg

SEQ ID NO: 79532 - DNA, 40 bp, Artificial Sequence
  primer
gtaaaacgacggccagtccagactttaccattgcctatcc

SEQ ID NO: 79533 - DNA, 41 bp, Artificial Sequence
  primer
gtaaaacgacggccagtgcaagaatctgtaatatccaaggc

SEQ ID NO: 79534 - DNA, 27 bp, Artificial Sequence
  primer
tctactaagtcagagtgtatgagcctg

SEQ ID NO: 79535 - DNA, 18 bp, Artificial Sequence
  primer
actccagcctcgcaacag

SEQ ID NO: 79536 - DNA, 39 bp, Artificial Sequence
  primer
gtaaaacgacggccagtgaagcaaagggtttgagatgag

SEQ ID NO: 79537 - DNA, 36 bp, Artificial Sequence
  primer
gtaaaacgacggccagttttctgaggcaagaagcgg

SEQ ID NO: 79538 - DNA, 38 bp, Artificial Sequence
  primer
gtaaaacgacggccagtgcctggatggagagaacagag

SEQ ID NO: 79539 - DNA, 38 bp, Artificial Sequence
  primer
gtaaaacgacggccagtgaccatttcctgccttcagag

SEQ ID NO: 79540 - DNA, 21 bp, Artificial Sequence
  primer
accagagagacaggcaggaag

SEQ ID NO: 79541 - DNA, 21 bp, Artificial Sequence
  primer
gaacactgcccaatgatgatg

SEQ ID NO: 79542 - DNA, 21 bp, Artificial Sequence
  primer
ggaggaaatcttgtgcagtcc

SEQ ID NO: 79543 - DNA, 21 bp, Artificial Sequence
  primer
taccactgtgattgcctttgg

SEQ ID NO: 79544 - DNA, 21 bp, Artificial Sequence
  primer
atggctgtagttctgggatgc

SEQ ID NO: 79545 - DNA, 21 bp, Artificial Sequence
  primer
accctgtgagaaatggagtgg

SEQ ID NO: 79546 - DNA, 38 bp, Artificial Sequence
  primer
gtaaaacgacggccagtcgtgggccctttaagtatctg

SEQ ID NO: 79547 - DNA, 21 bp, Artificial Sequence
  primer
ctgtgaaccatgcagtcttcc

SEQ ID NO: 79548 - DNA, 37 bp, Artificial Sequence
  primer
gtaaaacgacggccagtatggcatagcaggcgtactg

SEQ ID NO: 79549 - DNA, 20 bp, Artificial Sequence
  primer
agagcgggagggagtgttag

SEQ ID NO: 79550 - DNA, 38 bp, Artificial Sequence
  primer
gtaaaacgacggccagtgagtaaggcatcgcaaccttc

SEQ ID NO: 79551 - DNA, 38 bp, Artificial Sequence
  primer
gtaaaacgacggccagtagagacaagtgggtcagggtc

SEQ ID NO: 79552 - DNA, 38 bp, Artificial Sequence
  primer
gtaaaacgacggccagtagggtatcatggtatctgggc

SEQ ID NO: 79553 - DNA, 36 bp, Artificial Sequence
  primer
gtaaaacgacggccagtgcagccggtaaccaatctc

SEQ ID NO: 79554 - DNA, 21 bp, Artificial Sequence
  primer
tttcccgatccattgaatacc

SEQ ID NO: 79555 - DNA, 21 bp, Artificial Sequence
  primer
ctatggagcgtgttgcctatc

SEQ ID NO: 79556 - DNA, 23 bp, Artificial Sequence
  primer
tgtgcagaaataaagatgtgagg

SEQ ID NO: 79557 - DNA, 22 bp, Artificial Sequence
  primer
gccagattgcaaattctttacc

SEQ ID NO: 79558 - DNA, 21 bp, Artificial Sequence
  primer
gcccagtgccagataactacc

SEQ ID NO: 79559 - DNA, 30 bp, Artificial Sequence
  primer
ttaaatcttaacctctaatcacttctacca

SEQ ID NO: 79560 - DNA, 20 bp, Artificial Sequence
  primer
cagtgtcctgcaaacagcag

SEQ ID NO: 79561 - DNA, 21 bp, Artificial Sequence
  primer
ttcttaattctggcgctctgc

SEQ ID NO: 79562 - DNA, 40 bp, Artificial Sequence
  primer
gtaaaacgacggccagttggtaagggtgaaagacaagagg

SEQ ID NO: 79563 - DNA, 38 bp, Artificial Sequence
  primer
gtaaaacgacggccagtggagaagccagagggttaagg

SEQ ID NO: 79564 - DNA, 38 bp, Artificial Sequence
  primer
gtaaaacgacggccagtaaactccaacacaaaggtggg

SEQ ID NO: 79565 - DNA, 38 bp, Artificial Sequence
  primer
gtaaaacgacggccagttggaaggaacctgggtatctc

SEQ ID NO: 79566 - DNA, 42 bp, Artificial Sequence
  primer
gtaaaacgacggccagtgataataaacccagtgtccatgaag

SEQ ID NO: 79567 - DNA, 25 bp, Artificial Sequence
  primer
aacaggatgtacctggaagtatcac

SEQ ID NO: 79568 - DNA, 47 bp, Artificial Sequence
  primer
gtaaaacgacggccagtttctgtgaaatataattaagttgccttatc

SEQ ID NO: 79569 - DNA, 38 bp, Artificial Sequence
  primer
gtaaaacgacggccagtccaacaatatctccttcggtg

SEQ ID NO: 79570 - DNA, 37 bp, Artificial Sequence
  primer
gtaaaacgacggccagttgacagaatgaatggcaagg

SEQ ID NO: 79571 - DNA, 38 bp, Artificial Sequence
  primer
gtaaaacgacggccagtctgtgccaagtcccttctagg

SEQ ID NO: 79572 - DNA, 42 bp, Artificial Sequence
  primer
gtaaaacgacggccagtcctcttcattatactggaagtcacg

SEQ ID NO: 79573 - DNA, 27 bp, Artificial Sequence
  primer
cagttaagctttagaggaaattcattc

SEQ ID NO: 79574 - DNA, 39 bp, Artificial Sequence
  primer
gtaaaacgacggccagttcaatttcctattgctggactg

SEQ ID NO: 79575 - DNA, 39 bp, Artificial Sequence
  primer
gtaaaacgacggccagttgtagaaatgccaagaagcaaa

SEQ ID NO: 79576 - DNA, 21 bp, Artificial Sequence
  primer
ggaaagggcgtaagaagcaag

SEQ ID NO: 79577 - DNA, 38 bp, Artificial Sequence
  primer
gtaaaacgacggccagttgaggtagcaacctgtctccc

SEQ ID NO: 79578 - DNA, 37 bp, Artificial Sequence
  primer
gtaaaacgacggccagtaaacaccaggagggatcagg

SEQ ID NO: 79579 - DNA, 38 bp, Artificial Sequence
  primer
gtaaaacgacggccagtcagagcatccactgagacctg

SEQ ID NO: 79580 - DNA, 21 bp, Artificial Sequence
  primer
ccacacctcagaaacccagag

SEQ ID NO: 79581 - DNA, 21 bp, Artificial Sequence
  primer
gagagtgcctccacctgtctg

SEQ ID NO: 79582 - DNA, 38 bp, Artificial Sequence
  primer
gtaaaacgacggccagtatgaaggaatgactgcttccc

SEQ ID NO: 79583 - DNA, 38 bp, Artificial Sequence
  primer
gtaaaacgacggccagtctgacagaattccaggccaag

SEQ ID NO: 79584 - DNA, 21 bp, Artificial Sequence
  primer
catctcctccctttccctttc

SEQ ID NO: 79585 - DNA, 37 bp, Artificial Sequence
  primer
gtaaaacgacggccagtgagggagagctggagacctg

SEQ ID NO: 79586 - DNA, 20 bp, Artificial Sequence
  primer
ggaggatggagagaaggcag

SEQ ID NO: 79587 - DNA, 22 bp, Artificial Sequence
  primer
tgggattacaggcagataccag

SEQ ID NO: 79588 - DNA, 22 bp, Artificial Sequence
  primer
gacatttgaaccattctctggc

SEQ ID NO: 79589 - DNA, 19 bp, Artificial Sequence
  primer
aggaagcctcgccctagac

SEQ ID NO: 79590 - DNA, 21 bp, Artificial Sequence
  primer
tcagatcaagtggagctttgc

SEQ ID NO: 79591 - DNA, 21 bp, Artificial Sequence
  primer
ctgcgcctgcaactatgtaag

SEQ ID NO: 79592 - DNA, 21 bp, Artificial Sequence
  primer
cggaacctgccttcttaagtg

SEQ ID NO: 79593 - DNA, 37 bp, Artificial Sequence
  primer
gtaaaacgacggccagttacaggcatgagccattgtg

SEQ ID NO: 79594 - DNA, 22 bp, Artificial Sequence
  primer
tcaagacctgactctcctccac

SEQ ID NO: 79595 - DNA, 38 bp, Artificial Sequence
  primer
gtaaaacgacggccagtggcaagggaagcatcttattc

SEQ ID NO: 79596 - DNA, 42 bp, Artificial Sequence
  primer
gtaaaacgacggccagtaaccaacaagtcattcagcaaatac

SEQ ID NO: 79597 - DNA, 41 bp, Artificial Sequence
  primer
gtaaaacgacggccagtcacacaaatcaaacctacacactg

SEQ ID NO: 79598 - DNA, 38 bp, Artificial Sequence
  primer
gtaaaacgacggccagtatctggtgacttggagcaagg

SEQ ID NO: 79599 - DNA, 38 bp, Artificial Sequence
  primer
gtaaaacgacggccagttcagtccgatgcaatctgttg

SEQ ID NO: 79600 - DNA, 21 bp, Artificial Sequence
  primer
aaagcaccaggattacaagcg

SEQ ID NO: 79601 - DNA, 21 bp, Artificial Sequence
  primer
caggccttggctcttattcac

SEQ ID NO: 79602 - DNA, 21 bp, Artificial Sequence
  primer
ggcctggaagtcttatccaag

SEQ ID NO: 79603 - DNA, 37 bp, Artificial Sequence
  primer
gtaaaacgacggccagtgcaggcagaggttacaggtg

SEQ ID NO: 79604 - DNA, 21 bp, Artificial Sequence
  primer
ccacagctctagccttgtgtc

SEQ ID NO: 79605 - DNA, 38 bp, Artificial Sequence
  primer
gtaaaacgacggccagtggaaagacagcaacaaatccc

SEQ ID NO: 79606 - DNA, 37 bp, Artificial Sequence
  primer
gtaaaacgacggccagtaggcaaggcatgagtgacag

SEQ ID NO: 79607 - DNA, 21 bp, Artificial Sequence
  primer
ctgcattcacagccaggtatg

SEQ ID NO: 79608 - DNA, 21 bp, Artificial Sequence
  primer
tggcatgtatggatgaattgg

SEQ ID NO: 79609 - DNA, 20 bp, Artificial Sequence
  primer
cggaaggactttcaggatcg

SEQ ID NO: 79610 - DNA, 38 bp, Artificial Sequence
  primer
gtaaaacgacggccagtgcagggaattggaaatcagag

SEQ ID NO: 79611 - DNA, 21 bp, Artificial Sequence
  primer
gcctaatctacccaccacctg

SEQ ID NO: 79612 - DNA, 39 bp, Artificial Sequence
  primer
gtaaaacgacggccagtctggatattctgaaagccttgg

SEQ ID NO: 79613 - DNA, 24 bp, Artificial Sequence
  primer
aactagagctgtgctaagcttcat

SEQ ID NO: 79614 - DNA, 21 bp, Artificial Sequence
  primer
tagcaggagtcagtcccttcc

SEQ ID NO: 79615 - DNA, 38 bp, Artificial Sequence
  primer
gtaaaacgacggccagtgtttcaccaatgttgtggtcc

SEQ ID NO: 79616 - DNA, 38 bp, Artificial Sequence
  primer
gtaaaacgacggccagtaattattggatcctgcctccc

SEQ ID NO: 79617 - DNA, 38 bp, Artificial Sequence; identical to SEQ ID NO: 79615
  primer

SEQ ID NO: 79618 - DNA, 21 bp, Artificial Sequence
  primer
aatgggtgaaggtctcacagg

SEQ ID NO: 79619 - DNA, 39 bp, Artificial Sequence
  primer
gtaaaacgacggccagtgcttgatgttcagcttgattga

SEQ ID NO: 79620 - DNA, 24 bp, Artificial Sequence
  primer
cagtgccgatgtatgagttatgtc

SEQ ID NO: 79621 - DNA, 37 bp, Artificial Sequence
  primer
gtaaaacgacggccagttcttggaccaacacacccac

SEQ ID NO: 79622 - DNA, 40 bp, Artificial Sequence
  primer
gtaaaacgacggccagtttctgcataagaaacagtgctga

SEQ ID NO: 79623 - DNA, 35 bp, Artificial Sequence
  primer
gtaaaacgacggccagtgccaagctgtttccaccc

SEQ ID NO: 79624 - DNA, 22 bp, Artificial Sequence
  primer
ccagaaatttgtcttccaggtg

SEQ ID NO: 79625 - DNA, 38 bp, Artificial Sequence
  primer
gtaaaacgacggccagtaacagcctgtgtgtgggtatc

SEQ ID NO: 79626 - DNA, 21 bp, Artificial Sequence
  primer
gccctaaagttcaagaccagc

SEQ ID NO: 79627 - DNA, 40 bp, Artificial Sequence
  primer
gtaaaacgacggccagtgcaaagcacactaccatatctga

SEQ ID NO: 79628 - DNA, 40 bp, Artificial Sequence
  primer
gtaaaacgacggccagttggaggtgaccatggatttatag

SEQ ID NO: 79629 - DNA, 21 bp, Artificial Sequence
  primer
acagatcaagcaaggaaaggg

SEQ ID NO: 79630 - DNA, 39 bp, Artificial Sequence
  primer
gtaaaacgacggccagtccactgcccacaccataaatac

SEQ ID NO: 79631 - DNA, 21 bp, Artificial Sequence
  primer
ttgccatgtcagaatgatgtc

SEQ ID NO: 79632 - DNA, 22 bp, Artificial Sequence
  primer
gcattcaaccacattagtcagc

SEQ ID NO: 79633 - DNA, 41 bp, Artificial Sequence
  primer
gtaaaacgacggccagtcatttgctttgttagttcctttgc

SEQ ID NO: 79634 - DNA, 22 bp, Artificial Sequence
  primer
gagacctttagtgcagtccgtc

SEQ ID NO: 79635 - DNA, 39 bp, Artificial Sequence
  primer
gtaaaacgacggccagtttgtttggaaattagcattggg

SEQ ID NO: 79636 - DNA, 21 bp, Artificial Sequence
  primer
ttaattagctgggtgtggtgg

SEQ ID NO: 79637 - DNA, 22 bp, Artificial Sequence
  primer
ggcatagggtattgacttgagg

SEQ ID NO: 79638 - DNA, 22 bp, Artificial Sequence
  primer
aagtaacaaaggcaggcaaatg

SEQ ID NO: 79639 - DNA, 38 bp, Artificial Sequence
  primer
gtaaaacgacggccagttgctcccaaacatcagttgac

SEQ ID NO: 79640 - DNA, 38 bp, Artificial Sequence
  primer
gtaaaacgacggccagtaggctgataagtgatgacggc

SEQ ID NO: 79641 - DNA, 21 bp, Artificial Sequence
  primer
gggttagtgctttgtaaccgc

SEQ ID NO: 79642 - DNA, 21 bp, Artificial Sequence
  primer
tggcaatcagagtggtactgc

SEQ ID NO: 79643 - DNA, 38 bp, Artificial Sequence
  primer
gtaaaacgacggccagtgggctcacctataccaccatc

SEQ ID NO: 79644 - DNA, 21 bp, Artificial Sequence
  primer
gttgctgggtattctgaaggg

SEQ ID NO: 79645 - DNA, 38 bp, Artificial Sequence
  primer
gtaaaacgacggccagtaaaccagacacgtccaagatg

SEQ ID NO: 79646 - DNA, 21 bp, Artificial Sequence
  primer
cccattcactgatatcctccc

SEQ ID NO: 79647 - DNA, 38 bp, Artificial Sequence
  primer
gtaaaacgacggccagtgggtaaaggcagctaatccag

SEQ ID NO: 79648 - DNA, 20 bp, Artificial Sequence
  primer
cgcttagcgggcagaatatc

SEQ ID NO: 79649 - DNA, 25 bp, Artificial Sequence
  primer
gcaccttaattatatggaggtttcc

SEQ ID NO: 79650 - DNA, 21 bp, Artificial Sequence
  primer
tgctttcgtagctggattgag

SEQ ID NO: 79651 - DNA, 21 bp, Artificial Sequence
  primer
gtgcttccgggtttcttagtg

SEQ ID NO: 79652 - DNA, 22 bp, Artificial Sequence
  primer
acaagcatggataaagattggg

SEQ ID NO: 79653 - DNA, 25 bp, Artificial Sequence
  primer
tgcagaaggagagtgactgtttatc

SEQ ID NO: 79654 - DNA, 24 bp, Artificial Sequence
  primer
tgttgctactgttgttattcccag

SEQ ID NO: 79655 - DNA, 21 bp, Artificial Sequence
  primer
ctgtgagccctatatctccgc

SEQ ID NO: 79656 - DNA, 20 bp, Artificial Sequence
  primer
cttagccatgaaccgtctgc

SEQ ID NO: 79657 - DNA, 23 bp, Artificial Sequence
  primer
ggcctgaaattaagagaggaagg

SEQ ID NO: 79658 - DNA, 21 bp, Artificial Sequence
  primer
agcaggagtacagctcagtgc

SEQ ID NO: 79659 - DNA, 21 bp, Artificial Sequence
  primer
ctgatggagaggagcacacag

SEQ ID NO: 79660 - DNA, 21 bp, Artificial Sequence
  primer
tgaaggtttcaggtcctctcc

SEQ ID NO: 79661 - DNA, 21 bp, Artificial Sequence
  primer
ggcaagttccactgtgctaag

SEQ ID NO: 79662 - DNA, 35 bp, Artificial Sequence
  primer
gtaaaacgacggccagtctgctggctgtcctgctc

SEQ ID NO: 79663 - DNA, 21 bp, Artificial Sequence
  primer
gtaggatgcggtctcttccag

SEQ ID NO: 79664 - DNA, 38 bp, Artificial Sequence
  primer
gtaaaacgacggccagtcactgaaagctctttgcaagc

SEQ ID NO: 79665 - DNA, 20 bp, Artificial Sequence
  primer
caggagccagaaatgtccac

SEQ ID NO: 79666 - DNA, 35 bp, Artificial Sequence
  primer
gtaaaacgacggccagttaaacagcccacgccaag

SEQ ID NO: 79667 - DNA, 26 bp, Artificial Sequence
  primer
tttgagagactattgctatgaagcac

SEQ ID NO: 79668 - DNA, 21 bp, Artificial Sequence
  primer
atgtgactgaagatgccatgc

SEQ ID NO: 79669 - DNA, 38 bp, Artificial Sequence
  primer
gtaaaacgacggccagtaaccatatttgggtgcaactg

SEQ ID NO: 79670 - DNA, 23 bp, Artificial Sequence
  primer
tgggaacatatttgcaataggac

SEQ ID NO: 79671 - DNA, 21 bp, Artificial Sequence
  primer
cttcacagaaggactcagggc

SEQ ID NO: 79672 - DNA, 38 bp, Artificial Sequence
  primer
gtaaaacgacggccagttcctatgtttgggaccactgc

SEQ ID NO: 79673 - DNA, 21 bp, Artificial Sequence
  primer
ccagctatcttggcaacaagg

SEQ ID NO: 79674 - DNA, 22 bp, Artificial Sequence
  primer
tgatactgtggtcaagaaacgg

SEQ ID NO: 79675 - DNA, 26 bp, Artificial Sequence
  primer
tgcagttatcatatatggcagatacc

SEQ ID NO: 79676 - DNA, 20 bp, Artificial Sequence
  primer
agcacccacctcatgtcatc

SEQ ID NO: 79677 - DNA, 23 bp, Artificial Sequence
  primer
cagcattgttaccctaactgctc

SEQ ID NO: 79678 - DNA, 20 bp, Artificial Sequence
  primer
aatggcttgattctgggagg

SEQ ID NO: 79679 - DNA, 25 bp, Artificial Sequence
  primer
tgtacatatttaaccttgaaagcca

SEQ ID NO: 79680 - DNA, 39 bp, Artificial Sequence
  primer
gtaaaacgacggccagtcccagtagttgcttctggagtg

SEQ ID NO: 79681 - DNA, 39 bp, Artificial Sequence
  primer
gtaaaacgacggccagtcacgcattgcaatactctgaag

SEQ ID NO: 79682 - DNA, 21 bp, Artificial Sequence
  primer
gcaccaaatttacccagaagg

SEQ ID NO: 79683 - DNA, 22 bp, Artificial Sequence
  primer
ggatcctgcaaggtatcagaag

SEQ ID NO: 79684 - DNA, 43 bp, Artificial Sequence
  primer
gtaaaacgacggccagtaatgcttagatgatgagagggtattc

SEQ ID NO: 79685 - DNA, 38 bp, Artificial Sequence
  primer
gtaaaacgacggccagtacatgtgccacttatggatgg

SEQ ID NO: 79686 - DNA, 22 bp, Artificial Sequence
  primer
tgagcaagttgcagtcactcag

SEQ ID NO: 79687 - DNA, 22 bp, Artificial Sequence
  primer
cccagtttgtgaacctcaagtc

SEQ ID NO: 79688 - DNA, 21 bp, Artificial Sequence
  primer
tagttccaggcaccatgaatc

SEQ ID NO: 79689 - DNA, 37 bp, Artificial Sequence
  primer
gtaaaacgacggccagtcaagtgatccgcctatctcg

SEQ ID NO: 79690 - DNA, 38 bp, Artificial Sequence
  primer
gtaaaacgacggccagtttatgtcaagcagccaaatgc

SEQ ID NO: 79691 - DNA, 38 bp, Artificial Sequence
  primer
gtaaaacgacggccagttcggtaccctggagttgtctc

SEQ ID NO: 79692 - DNA, 22 bp, Artificial Sequence
  primer
tcactttgctcccaaaggaata

SEQ ID NO: 79693 - DNA, 20 bp, Artificial Sequence
  primer
cccattataagccctgggtc

SEQ ID NO: 79694 - DNA, 39 bp, Artificial Sequence
  primer
gtaaaacgacggccagtgagtgaagaccaccaccaagac

SEQ ID NO: 79695 - DNA, 42 bp, Artificial Sequence
  primer
gtaaaacgacggccagttcaagattaatcactcgaaactgtg

SEQ ID NO: 79696 - DNA, 38 bp, Artificial Sequence
  primer
gtaaaacgacggccagtaatgacactgccagcttgatg

SEQ ID NO: 79697 - DNA, 41 bp, Artificial Sequence
  primer
gtaaaacgacggccagttctgttgaaagtgaaatggttctg

SEQ ID NO: 79698 - DNA, 21 bp, Artificial Sequence
  primer
cctttcctcttcatggaccag

SEQ ID NO: 79699 - DNA, 20 bp, Artificial Sequence
  primer
cattcgcatgaccctactgg

SEQ ID NO: 79700 - DNA, 42 bp, Artificial Sequence
  primer
gtaaaacgacggccagtggagggaaacaaactatattccaag

SEQ ID NO: 79701 - DNA, 21 bp, Artificial Sequence
  primer
gctatagcccaatttcctgcc

SEQ ID NO: 79702 - DNA, 42 bp, Artificial Sequence
  primer
gtaaaacgacggccagtcccaatttatctcaataccattcac

SEQ ID NO: 79703 - DNA, 21 bp, Artificial Sequence
  primer
gcaagggaaggagtaaacacg

SEQ ID NO: 79704 - DNA, 36 bp, Artificial Sequence
  primer
gtaaaacgacggccagtagggaacaggctgctcaag

SEQ ID NO: 79705 - DNA, 38 bp, Artificial Sequence
  primer
gtaaaacgacggccagttaaggcataaccctttgtggc

SEQ ID NO: 79706 - DNA, 21 bp, Artificial Sequence
  primer
acatgctttgagcctcatctg

SEQ ID NO: 79707 - DNA, 22 bp, Artificial Sequence
  primer
catttgtagttcaggcatacgg

SEQ ID NO: 79708 - DNA, 37 bp, Artificial Sequence
  primer
gtaaaacgacggccagtcagaaggacagcagggacac

SEQ ID NO: 79709 - DNA, 21 bp, Artificial Sequence
  primer
ttgtatggccagtttaagccc

SEQ ID NO: 79710 - DNA, 40 bp, Artificial Sequence
  primer
gtaaaacgacggccagtaaatctttccatggttcttctgc

SEQ ID NO: 79711 - DNA, 39 bp, Artificial Sequence
  primer
gtaaaacgacggccagttgcacccagtcagaaataaacc

SEQ ID NO: 79712 - DNA, 39 bp, Artificial Sequence
  primer
gtaaaacgacggccagttgtgcaatagagtgaggctgtc

SEQ ID NO: 79713 - DNA, 21 bp, Artificial Sequence
  primer
ctcgtcttgatcttggtgtgc

SEQ ID NO: 79714 - DNA, 37 bp, Artificial Sequence
  primer
gtaaaacgacggccagtacggactacatggcaacacc

SEQ ID NO: 79715 - DNA, 27 bp, Artificial Sequence
  primer
tttgctacaaataatttcacatcagtg

SEQ ID NO: 79716 - DNA, 37 bp, Artificial Sequence
  primer
gtaaaacgacggccagtaattcccatgcatccctttc

SEQ ID NO: 79717 - DNA, 21 bp, Artificial Sequence
  primer
ctgaaggttaaacgccaggtc

SEQ ID NO: 79718 - DNA, 21 bp, Artificial Sequence
  primer
tgtgacccaggctgtagaaag

SEQ ID NO: 79719 - DNA, 20 bp, Artificial Sequence
  primer
gtttcacagcaacaaagggc

SEQ ID NO: 79720 - DNA, 21 bp, Artificial Sequence
  primer
aaggcgtcttgaattcactgg

SEQ ID NO: 79721 - DNA, 21 bp, Artificial Sequence
  primer
aaggccagaactgatgaaacc

SEQ ID NO: 79722 - DNA, 21 bp, Artificial Sequence
  primer
ttggcataaccttcagaaacg

SEQ ID NO: 79723 - DNA, 21 bp, Artificial Sequence
  primer
caccaagagactttggattgc

SEQ ID NO: 79724 - DNA, 21 bp, Artificial Sequence
  primer
gaagctcatcgtggctgtaag

SEQ ID NO: 79725 - DNA, 21 bp, Artificial Sequence
  primer
agactagagctatgcgctgcc

SEQ ID NO: 79726 - DNA, 20 bp, Artificial Sequence
  primer
agcatactgtgctcccatcg

SEQ ID NO: 79727 - DNA, 21 bp, Artificial Sequence
  primer
tacactcaagctgcacgttcc

SEQ ID NO: 79728 - DNA, 37 bp, Artificial Sequence
  primer
gtaaaacgacggccagtctgctgacgccagtcttctc

SEQ ID NO: 79729 - DNA, 21 bp, Artificial Sequence
  primer
tagaccgatcatctttggcac

SEQ ID NO: 79730 - DNA, 38 bp, Artificial Sequence
  primer
gtaaaacgacggccagtaaggcaggtgtagcatgaagg

SEQ ID NO: 79731 - DNA, 39 bp, Artificial Sequence
  primer
gtaaaacgacggccagttggttctgtgtatgaggcactg

SEQ ID NO: 79732 - DNA, 38 bp, Artificial Sequence
  primer
gtaaaacgacggccagtcgagccttgagaaggaagatg

SEQ ID NO: 79733 - DNA, 19 bp, Artificial Sequence
  primer
tagctgagcatggtggtgc

SEQ ID NO: 79734 - DNA, 39 bp, Artificial Sequence
  primer
gtaaaacgacggccagtcaaataacaccgagaccctgag

SEQ ID NO: 79735 - DNA, 38 bp, Artificial Sequence
  primer
gtaaaacgacggccagtatatcaagccgtctggtccac

SEQ ID NO: 79736 - DNA, 39 bp, Artificial Sequence
  primer
gtaaaacgacggccagttgttcctaattacacagccacg

SEQ ID NO: 79737 - DNA, 20 bp, Artificial Sequence
  primer
tcacttgaacccaggagaca

SEQ ID NO: 79738 - DNA, 21 bp, Artificial Sequence
  primer
ccttcttcctgcatttgaagc

SEQ ID NO: 79739 - DNA, 22 bp, Artificial Sequence
  primer
gaaatgaaggcactatgttggg

SEQ ID NO: 79740 - DNA, 36 bp, Artificial Sequence
  primer
gtaaaacgacggccagtaccagcaatgccaggagac

SEQ ID NO: 79741 - DNA, 21 bp, Artificial Sequence
  primer
cgtgacaacaaaggcagagac

SEQ ID NO: 79742 - DNA, 22 bp, Artificial Sequence
  primer
tgagccataagcaggagttacc

SEQ ID NO: 79743 - DNA, 38 bp, Artificial Sequence
  primer
gtaaaacgacggccagtttcactggctgctttatcctg

SEQ ID NO: 79744 - DNA, 38 bp, Artificial Sequence
  primer
gtaaaacgacggccagtctattgcaaagcaaagggagg

SEQ ID NO: 79745 - DNA, 38 bp, Artificial Sequence
  primer
gtaaaacgacggccagttgccagtgtcaaatgctgaag

SEQ ID NO: 79746 - DNA, 38 bp, Artificial Sequence
  primer
gtaaaacgacggccagtgcatcttccgtccaaagaaac

SEQ ID NO: 79747 - DNA, 38 bp, Artificial Sequence
  primer
gtaaaacgacggccagtttggaactgcctgttgttgtc

SEQ ID NO: 79748 - DNA, 45 bp, Artificial Sequence
  primer
gtaaaacgacggccagtttacctctttggtatacatcctttcata

SEQ ID NO: 79749 - DNA, 21 bp, Artificial Sequence
  primer
aggcgttgtcatggttaagtg

SEQ ID NO: 79750 - DNA, 39 bp, Artificial Sequence
  primer
gtaaaacgacggccagtccaactgtaaggagacacagcc

SEQ ID NO: 79751 - DNA, 21 bp, Artificial Sequence
  primer
attgaaacgtttgcttgggac

SEQ ID NO: 79752 - DNA, 20 bp, Artificial Sequence
  primer
cagtgggagtcaggtggatg

SEQ ID NO: 79753 - DNA, 18 bp, Artificial Sequence
  primer
cactgtgcccagccattc

SEQ ID NO: 79754 - DNA, 39 bp, Artificial Sequence
  primer
gtaaaacgacggccagtaccaaacttcccatgagcttag

SEQ ID NO: 79755 - DNA, 24 bp, Artificial Sequence
  primer
cacacacacaaagtcctgagagtc

SEQ ID NO: 79756 - DNA, 21 bp, Artificial Sequence
  primer
ttgaagaccctcttctccagc

SEQ ID NO: 79757 - DNA, 21 bp, Artificial Sequence
  primer
cagacccataccagttgtccc

SEQ ID NO: 79758 - DNA, 37 bp, Artificial Sequence
  primer
gtaaaacgacggccagtaacggtaggttgtccttgcc

SEQ ID NO: 79759 - DNA, 21 bp, Artificial Sequence
  primer
ctgatgccttcattccctttc

SEQ ID NO: 79760 - DNA, 38 bp, Artificial Sequence
  primer
gtaaaacgacggccagtggtcaccaagaaattgtgctg

SEQ ID NO: 79761 - DNA, 38 bp, Artificial Sequence
  primer
gtaaaacgacggccagtcagacattcatccactgctcc

SEQ ID NO: 79762 - DNA, 21 bp, Artificial Sequence
  primer
ggtgtgagaaagattcctgcc

SEQ ID NO: 79763 - DNA, 38 bp, Artificial Sequence
  primer
gtaaaacgacggccagtcatccaaagcctttcttaccc

SEQ ID NO: 79764 - DNA, 38 bp, Artificial Sequence
  primer
gtaaaacgacggccagtgagggagccacatgacattac

SEQ ID NO: 79765 - DNA, 20 bp, Artificial Sequence
  primer
cccacctcatcccatactcc

SEQ ID NO: 79766 - DNA, 21 bp, Artificial Sequence
  primer
tgcctttgtgtagctgacctg

SEQ ID NO: 79767 - DNA, 25 bp, Artificial Sequence
  primer
gaggacttctcgttacttctcaagg

SEQ ID NO: 79768 - DNA, 39 bp, Artificial Sequence
  primer
gtaaaacgacggccagtccaatgttaaggaaactgtggg

SEQ ID NO: 79769 - DNA, 38 bp, Artificial Sequence
  primer
gtaaaacgacggccagtatttccacttccgtcatcacc

SEQ ID NO: 79770 - DNA, 21 bp, Artificial Sequence
  primer
tataagtggcttccctcagcc

SEQ ID NO: 79771 - DNA, 21 bp, Artificial Sequence
  primer
aattcagacaggcaaagaccc

SEQ ID NO: 79772 - DNA, 21 bp, Artificial Sequence
  primer
ggagctggctgatgtgttaag

SEQ ID NO: 79773 - DNA, 21 bp, Artificial Sequence
  primer
taccacaaggattcctggcac

SEQ ID NO: 79774 - DNA, 21 bp, Artificial Sequence
  primer
caacaaggtcagcacacttgc

SEQ ID NO: 79775 - DNA, 38 bp, Artificial Sequence
  primer
gtaaaacgacggccagttgtcgaggtggaaatgatacg

SEQ ID NO: 79776 - DNA, 21 bp, Artificial Sequence
  primer
gagtctcagctcctcccagtc

SEQ ID NO: 79777 - DNA, 38 bp, Artificial Sequence
  primer
gtaaaacgacggccagtcagtccagagacctcagtggg

SEQ ID NO: 79778 - DNA, 38 bp, Artificial Sequence
  primer
gtaaaacgacggccagttctgaggctccttctctcctc

SEQ ID NO: 79779 - DNA, 21 bp, Artificial Sequence
  primer
aaccaacctcaagccagctac

SEQ ID NO: 79780 - DNA, 38 bp, Artificial Sequence
  primer
gtaaaacgacggccagtccagaaacagaactgtggtgc

SEQ ID NO: 79781 - DNA, 21 bp, Artificial Sequence
  primer
gcagattagctgatggtcctg

SEQ ID NO: 79782 - DNA, 20 bp, Artificial Sequence
  primer
agctgcacagggtgtctgtc

SEQ ID NO: 79783 - DNA, 37 bp, Artificial Sequence
  primer
gtaaaacgacggccagtgagacgctgttccctcagtg

SEQ ID NO: 79784 - DNA, 20 bp, Artificial Sequence
  primer
ccacctgccagctctctagc

SEQ ID NO: 79785 - DNA, 37 bp, Artificial Sequence
  primer
gtaaaacgacggccagtgggtctcctgggttcaagtg

SEQ ID NO: 79786 - DNA, 38 bp, Artificial Sequence
  primer
gtaaaacgacggccagttcgagcaaatacaagcagagg

SEQ ID NO: 79787 - DNA, 20 bp, Artificial Sequence
  primer
aacccacccatcacacagac

SEQ ID NO: 79788 - DNA, 22 bp, Artificial Sequence
  primer
gcagataaggacaatgtagccc

SEQ ID NO: 79789 - DNA, 38 bp, Artificial Sequence
  primer
gtaaaacgacggccagtgttcctgtcggactcaaccag

SEQ ID NO: 79790 - DNA, 37 bp, Artificial Sequence
  primer
gtaaaacgacggccagtgggatgcaagacaaattggg

SEQ ID NO: 79791 - DNA, 38 bp, Artificial Sequence
  primer
gtaaaacgacggccagtagtgaccaaagtctctgagcg

SEQ ID NO: 79792 - DNA, 21 bp, Artificial Sequence
  primer
attcctgggctgaagtgattc

SEQ ID NO: 79793 - DNA, 21 bp, Artificial Sequence
  primer
acccatctgcccatctatttg

SEQ ID NO: 79794 - DNA, 20 bp, Artificial Sequence
  primer
cctggaagatgacatccctg

SEQ ID NO: 79795 - DNA, 38 bp, Artificial Sequence
  primer
gtaaaacgacggccagtggtagatgaactcggacctgc

SEQ ID NO: 79796 - DNA, 38 bp, Artificial Sequence
  primer
gtaaaacgacggccagtagacgtggctctggttctcag

SEQ ID NO: 79797 - DNA, 36 bp, Artificial Sequence
  primer
gtaaaacgacggccagtggcgaacttgttccagagg

SEQ ID NO: 79798 - DNA, 20 bp, Artificial Sequence
  primer
ctgaaagccctggaagatgg

SEQ ID NO: 79799 - DNA, 20 bp, Artificial Sequence
  primer
ctctggctttcgaactgtgg

SEQ ID NO: 79800 - DNA, 21 bp, Artificial Sequence
  primer
ttctccgtacagtctcctccc

SEQ ID NO: 79801 - DNA, 21 bp, Artificial Sequence
  primer
agtctgtcctcgatggctgtg

SEQ ID NO: 79802 - DNA, 22 bp, Artificial Sequence
  primer
caggtgtgagccttcaaacttc

SEQ ID NO: 79803 - DNA, 19 bp, Artificial Sequence
  primer
cagtgagacacgcacctgg

SEQ ID NO: 79804 - DNA, 20 bp, Artificial Sequence
  primer
acaccagcagtttgtcctgg

SEQ ID NO: 79805 - DNA, 21 bp, Artificial Sequence
  primer
tgatcatgttgatgtcgttgg

SEQ ID NO: 79806 - DNA, 36 bp, Artificial Sequence
  primer
gtaaaacgacggccagtgttctcagtgcgtccaggg

SEQ ID NO: 79807 - DNA, 21 bp, Artificial Sequence
  primer
gagaggtactggactgcaccc

SEQ ID NO: 79808 - DNA, 35 bp, Artificial Sequence
  primer
gtaaaacgacggccagtgtccaggaagggcacctg

SEQ ID NO: 79809 - DNA, 21 bp, Artificial Sequence
  primer
caacctgcaacctcttccatc

SEQ ID NO: 79810 - DNA, 38 bp, Artificial Sequence
  primer
gtaaaacgacggccagtcaagcctagtgtcttggaggg

SEQ ID NO: 79811 - DNA, 21 bp, Artificial Sequence
  primer
ctggatgaagagcggattgtc

SEQ ID NO: 79812 - DNA, 23 bp, Artificial Sequence
  primer
gaacacctagacctgtgtgcttt

SEQ ID NO: 79813 - DNA, 39 bp, Artificial Sequence
  primer
gtaaaacgacggccagtctagaagacatgcatcccactg

SEQ ID NO: 79814 - DNA, 38 bp, Artificial Sequence
  primer
gtaaaacgacggccagtttcctacctctcccacgtttg

SEQ ID NO: 79815 - DNA, 39 bp, Artificial Sequence
  primer
gtaaaacgacggccagttcactagctctttctgggcttt

SEQ ID NO: 79816 - DNA, 20 bp, Artificial Sequence
  primer
agtagcacaagcatttgcgg

SEQ ID NO: 79817 - DNA, 24 bp, Artificial Sequence
  primer
ggacaaggtgatactcattcaacc

SEQ ID NO: 79818 - DNA, 21 bp, Artificial Sequence
  primer
ttcgctcactgtttctgcaag

SEQ ID NO: 79819 - DNA, 21 bp, Artificial Sequence
  primer
agcgtgcgaagaaattacagg

SEQ ID NO: 79820 - DNA, 38 bp, Artificial Sequence
  primer
gtaaaacgacggccagtctttgcatggaatgaaagcac

SEQ ID NO: 79821 - DNA, 39 bp, Artificial Sequence
  primer
gtaaaacgacggccagtccacaaggagaatgtaggcttc

SEQ ID NO: 79822 - DNA, 25 bp, Artificial Sequence
  primer
aagacatctattgcactgctgaaac

SEQ ID NO: 79823 - DNA, 21 bp, Artificial Sequence
  primer
tatggtagatgctgacggtgc

SEQ ID NO: 79824 - DNA, 21 bp, Artificial Sequence
  primer
tctggtcttggtggaaatcag

SEQ ID NO: 79825 - DNA, 26 bp, Artificial Sequence
  primer
tcaaatgcttaatttgtaaatccttc

SEQ ID NO: 79826 - DNA, 20 bp, Artificial Sequence
  primer
acaaccctcagcacatagcc

SEQ ID NO: 79827 - DNA, 21 bp, Artificial Sequence
  primer
cttcctgtggaaccattctcc

SEQ ID NO: 79828 - DNA, 20 bp, Artificial Sequence
  primer
ccaatggcttattcctgtgc

SEQ ID NO: 79829 - DNA, 38 bp, Artificial Sequence
  primer
gtaaaacgacggccagttcctatgtggaagattgggtg

SEQ ID NO: 79830 - DNA, 40 bp, Artificial Sequence
  primer
gtaaaacgacggccagtcagcttcatctcagtttgtcacc

SEQ ID NO: 79831 - DNA, 21 bp, Artificial Sequence
  primer
tcatcgcatatgccctgtatc

SEQ ID NO: 79832 - DNA, 21 bp, Artificial Sequence
  primer
taatggtggtagcattggacc

SEQ ID NO: 79833 - DNA, 22 bp, Artificial Sequence
  primer
ttgggtacaaagctcaagtcaa

SEQ ID NO: 79834 - DNA, 20 bp, Artificial Sequence
  primer
agtggacctggaagcatgtg

SEQ ID NO: 79835 - DNA, 43 bp, Artificial Sequence
  primer
gtaaaacgacggccagtccagtattcctttaggattatttccc

SEQ ID NO: 79836 - DNA, 21 bp, Artificial Sequence
  primer
atgcctggctcaaacaatttc

SEQ ID NO: 79837 - DNA, 38 bp, Artificial Sequence
  primer
gtaaaacgacggccagtttagcccatctctgagcttcc

SEQ ID NO: 79838 - DNA, 25 bp, Artificial Sequence
  primer
tgacatgacataacatctgtaccaa

SEQ ID NO: 79839 - DNA, 21 bp, Artificial Sequence
  primer
atgtattggcctaagggcatc

SEQ ID NO: 79840 - DNA, 21 bp, Artificial Sequence
  primer
gctggagtaaccaagcgactg

SEQ ID NO: 79841 - DNA, 21 bp, Artificial Sequence
  primer
aggatttctggctaaccaacg

SEQ ID NO: 79842 - DNA, 21 bp, Artificial Sequence
  primer
tttaccagctgtgagtcagcc

SEQ ID NO: 79843 - DNA, 20 bp, Artificial Sequence
  primer
tttggtcacgtcaggaaagc

SEQ ID NO: 79844 - DNA, 21 bp, Artificial Sequence
  primer
tttaagctgttccaaggccag

SEQ ID NO: 79845 - DNA, 38 bp, Artificial Sequence
  primer
gtaaaacgacggccagttttaattccctggaggtgtcg

SEQ ID NO: 79846 - DNA, 39 bp, Artificial Sequence
  primer
gtaaaacgacggccagtaatatctcgtcactcacccacc

SEQ ID NO: 79847 - DNA, 21 bp, Artificial Sequence
  primer
gccacagaaccatcatctttg

SEQ ID NO: 79848 - DNA, 21 bp, Artificial Sequence
  primer
agaatttcagccaaagccctc

SEQ ID NO: 79849 - DNA, 21 bp, Artificial Sequence
  primer
atcgattgcagtgacagttgc

SEQ ID NO: 79850 - DNA, 22 bp, Artificial Sequence
  primer
ccctgacacattgcttccttag

SEQ ID NO: 79851 - DNA, 21 bp, Artificial Sequence
  primer
aaagaatgtcaacccacaggg

SEQ ID NO: 79852 - DNA, 39 bp, Artificial Sequence
  primer
gtaaaacgacggccagtgcatttcagggtggtttgttac

SEQ ID NO: 79853 - DNA, 38 bp, Artificial Sequence
  primer
gtaaaacgacggccagtacaacagtgaacccagtgtgc

SEQ ID NO: 79854 - DNA, 38 bp, Artificial Sequence
  primer
gtaaaacgacggccagtcccattgcagataaggcactc

SEQ ID NO: 79855 - DNA, 21 bp, Artificial Sequence
  primer
aatcatcccatccaaagcaac

SEQ ID NO: 79856 - DNA, 22 bp, Artificial Sequence
  primer
ccagctccatgaactcgtactc

SEQ ID NO: 79857 - DNA, 21 bp, Artificial Sequence
  primer
gccaaagtctgagaggtggag

SEQ ID NO: 79858 - DNA, 39 bp, Artificial Sequence
  primer
gtaaaacgacggccagtttccagaaggcttaaagctgtg

SEQ ID NO: 79859 - DNA, 21 bp, Artificial Sequence
  primer
atgtacatgtgcagagggagc

SEQ ID NO: 79860 - DNA, 21 bp, Artificial Sequence
  primer
gttctaaaccatggtgctggg

SEQ ID NO: 79861 - DNA, 22 bp, Artificial Sequence
  primer
caaatcagaattggagggtctg

SEQ ID NO: 79862 - DNA, 38 bp, Artificial Sequence
  primer
gtaaaacgacggccagtccttatacagggtgagcaggg

SEQ ID NO: 79863 - DNA, 21 bp, Artificial Sequence
  primer
atacggcagtgagacctctgg

SEQ ID NO: 79864 - DNA, 21 bp, Artificial Sequence
  primer
gttgatgcagcgttaggactc

SEQ ID NO: 79865 - DNA, 18 bp, Artificial Sequence
  primer
ctcccagcgaacagatgg

SEQ ID NO: 79866 - DNA, 24 bp, Artificial Sequence
  primer
cctttcatattagcattgtttggc

SEQ ID NO: 79867 - DNA, 38 bp, Artificial Sequence
  primer
gtaaaacgacggccagtgagtctcaacaggctccatcc

SEQ ID NO: 79868 - DNA, 39 bp, Artificial Sequence
  primer
gtaaaacgacggccagtagagggactgaaatcactcagc

SEQ ID NO: 79869 - DNA, 38 bp, Artificial Sequence
  primer
gtaaaacgacggccagtatgcttgtgtggttgtgtgtg

SEQ ID NO: 79870 - DNA, 38 bp, Artificial Sequence
  primer
gtaaaacgacggccagttatgactttgcctgcacacac

SEQ ID NO: 79871 - DNA, 25 bp, Artificial Sequence
  primer
tcagaggtttcatgtgtttacattc

SEQ ID NO: 79872 - DNA, 21 bp, Artificial Sequence
  primer
caggaaggtgagcagaaggag

SEQ ID NO: 79873 - DNA, 43 bp, Artificial Sequence
  primer
gtaaaacgacggccagttcttgattgaattactgtctcaaagg

SEQ ID NO: 79874 - DNA, 38 bp, Artificial Sequence
  primer
gtaaaacgacggccagtagtctgcgtttagcaaggtcc

SEQ ID NO: 79875 - DNA, 21 bp, Artificial Sequence
  primer
ttggaaattcgccagtatgag

SEQ ID NO: 79876 - DNA, 24 bp, Artificial Sequence
  primer
cacagaagaattcctcaagattcc

SEQ ID NO: 79877 - DNA, 42 bp, Artificial Sequence
  primer
gtaaaacgacggccagttggattcaatgatctgttccaatac

SEQ ID NO: 79878 - DNA, 22 bp, Artificial Sequence
  primer
gcaggatgttaagaccaccaag

SEQ ID NO: 79879 - DNA, 40 bp, Artificial Sequence
  primer
gtaaaacgacggccagtcatcccagaaagaatgaatcctc

SEQ ID NO: 79880 - DNA, 21 bp, Artificial Sequence
  primer
tcccacattattgattctggc

SEQ ID NO: 79881 - DNA, 38 bp, Artificial Sequence
  primer
gtaaaacgacggccagtaacactgtgaaccaggctgag

SEQ ID NO: 79882 - DNA, 38 bp, Artificial Sequence
  primer
gtaaaacgacggccagtgaaatgcagacaggatcaccc

SEQ ID NO: 79883 - DNA, 38 bp, Artificial Sequence
  primer
gtaaaacgacggccagtgctctctcacatccatgaccc

SEQ ID NO: 79884 - DNA, 19 bp, Artificial Sequence
  primer
ccatgctggtgtgctgtta

SEQ ID NO: 79885 - DNA, 21 bp, Artificial Sequence
  primer
gtactcactcagggtccagcc

SEQ ID NO: 79886 - DNA, 21 bp, Artificial Sequence
  primer
caaactttgcccatcaatgtc

SEQ ID NO: 79887 - DNA, 21 bp, Artificial Sequence
  primer
gacgtgcactgaccaagtagg

SEQ ID NO: 79888 - DNA, 37 bp, Artificial Sequence
  primer
gtaaaacgacggccagtgtacttccggcagcactcag

SEQ ID NO: 79889 - DNA, 21 bp, Artificial Sequence
  primer
gtgctgtcttgaagttcaccc

SEQ ID NO: 79890 - DNA, 38 bp, Artificial Sequence
  primer
gtaaaacgacggccagtctcctgactggcctgtttctc

SEQ ID NO: 79891 - DNA, 23 bp, Artificial Sequence
  primer
gggagtatttaactgctgatggc

SEQ ID NO: 79892 - DNA, 21 bp, Artificial Sequence
  primer
gcaggcactttctgatatggg

SEQ ID NO: 79893 - DNA, 21 bp, Artificial Sequence
  primer
gccaccagtttacgtgacatc

SEQ ID NO: 79894 - DNA, 21 bp, Artificial Sequence
  primer
ctttcttgtggtgcttgcttg

SEQ ID NO: 79895 - DNA, 36 bp, Artificial Sequence
  primer
gtaaaacgacggccagtctgtcctaaggcccagcag

SEQ ID NO: 79896 - DNA, 21 bp, Artificial Sequence
  primer
tgttcagttcacccagctgac

SEQ ID NO: 79897 - DNA, 39 bp, Artificial Sequence
  primer
gtaaaacgacggccagttgcagctggtaagaggagaaag

SEQ ID NO: 79898 - DNA, 39 bp, Artificial Sequence
  primer
gtaaaacgacggccagtaagggaaacctatttggaaagg

SEQ ID NO: 79899 - DNA, 38 bp, Artificial Sequence
  primer
gtaaaacgacggccagttataccacgctcccttgtcag

SEQ ID NO: 79900 - DNA, 21 bp, Artificial Sequence
  primer
atggaatatgacgtgatgggc

SEQ ID NO: 79901 - DNA, 38 bp, Artificial Sequence
  primer
gtaaaacgacggccagtgtatgacaattcatctgcgcc

SEQ ID NO: 79902 - DNA, 23 bp, Artificial Sequence
  primer
ttgagcaagacaacttcactgtc

SEQ ID NO: 79903 - DNA, 38 bp, Artificial Sequence
  primer
gtaaaacgacggccagtgggcaactcattaccaactgc

SEQ ID NO: 79904 - DNA, 21 bp, Artificial Sequence
  primer
gcctcagttacttcgctttgc

SEQ ID NO: 79905 - DNA, 21 bp, Artificial Sequence
  primer
gtgcagacaaagccaactctg

SEQ ID NO: 79906 - DNA, 21 bp, Artificial Sequence
  primer
ttgtcggaatttggtaaaggg

SEQ ID NO: 79907 - DNA, 21 bp, Artificial Sequence
  primer
ccttgcaataaatggagaggg

SEQ ID NO: 79908 - DNA, 37 bp, Artificial Sequence
  primer
gtaaaacgacggccagtcccacgagtgctctgaaatc

SEQ ID NO: 79909 - DNA, 38 bp, Artificial Sequence
  primer
gtaaaacgacggccagtgggcaagtacaggcttcagac

SEQ ID NO: 79910 - DNA, 21 bp, Artificial Sequence
  primer
ttcagatgggttagctgctcc

SEQ ID NO: 79911 - DNA, 21 bp, Artificial Sequence
  primer
tactagcgcactgtgtctcgg

SEQ ID NO: 79912 - DNA, 38 bp, Artificial Sequence
  primer
gtaaaacgacggccagtggactgcagagagacagggac

SEQ ID NO: 79913 - DNA, 36 bp, Artificial Sequence
  primer
gtaaaacgacggccagtggcgattggcagtttaagg

SEQ ID NO: 79914 - DNA, 21 bp, Artificial Sequence
  primer
gcagtccattggtgtctgtct

SEQ ID NO: 79915 - DNA, 38 bp, Artificial Sequence
  primer
gtaaaacgacggccagttttcaaagctgccagttgttc

SEQ ID NO: 79916 - DNA, 19 bp, Artificial Sequence
  primer
aaatcagccacggagcatc

SEQ ID NO: 79917 - DNA, 38 bp, Artificial Sequence
  primer
gtaaaacgacggccagtggtccacatgattggtactgg

SEQ ID NO: 79918 - DNA, 24 bp, Artificial Sequence
  primer
tgctccttcaatttatagcaaagc

SEQ ID NO: 79919 - DNA, 21 bp, Artificial Sequence
  primer
cagcatgacccatcacatttc

SEQ ID NO: 79920 - DNA, 38 bp, Artificial Sequence
  primer
gtaaaacgacggccagtaagtgctagctggttgtgctg

SEQ ID NO: 79921 - DNA, 21 bp, Artificial Sequence
  primer
acctcaattccaagcacatcc

SEQ ID NO: 79922 - DNA, 42 bp, Artificial Sequence
  primer
gtaaaacgacggccagtccaacttaatgaacaaatccttctg

SEQ ID NO: 79923 - DNA, 41 bp, Artificial Sequence
  primer
gtaaaacgacggccagtcccttggctacatttagaaagatg

SEQ ID NO: 79924 - DNA, 38 bp, Artificial Sequence
  primer
gtaaaacgacggccagtagcaccgtacctagcatttga

SEQ ID NO: 79925 - DNA, 21 bp, Artificial Sequence
  primer
attccaaacacgcacttaggc

SEQ ID NO: 79926 - DNA, 21 bp, Artificial Sequence
  primer
attgcttgaacctgaagacgg

SEQ ID NO: 79927 - DNA, 38 bp, Artificial Sequence
  primer
gtaaaacgacggccagtaaccctgcatacatagccaga

SEQ ID NO: 79928 - DNA, 25 bp, Artificial Sequence
  primer
tgagcactgaatctataaagcatgt

SEQ ID NO: 79929 - DNA, 21 bp, Artificial Sequence
  primer
gaagaacacaaatgctgccaa

SEQ ID NO: 79930 - DNA, 21 bp, Artificial Sequence
  primer
tcccagaaacaaacggaaatc

SEQ ID NO: 79931 - DNA, 35 bp, Artificial Sequence
  primer
gtaaaacgacggccagtgcaaaccaccacgacacg

SEQ ID NO: 79932 - DNA, 43 bp, Artificial Sequence
  primer
gtaaaacgacggccagtgaacaatgactcaaatccacttaaac

SEQ ID NO: 79933 - DNA, 26 bp, Artificial Sequence
  primer
ggctataatttactcaccctctttcc

SEQ ID NO: 79934 - DNA, 37 bp, Artificial Sequence
  primer
gtaaaacgacggccagtaaatggctagcagccagaaa

SEQ ID NO: 79935 - DNA, 42 bp, Artificial Sequence
  primer
gtaaaacgacggccagtcagcaatagagaatgtcatatttgg

SEQ ID NO: 79936 - DNA, 21 bp, Artificial Sequence
  primer
tgaacccaatttccctcaaag

SEQ ID NO: 79937 - DNA, 41 bp, Artificial Sequence
  primer
gtaaaacgacggccagttgacagtttccacattaccatcag

SEQ ID NO: 79938 - DNA, 41 bp, Artificial Sequence
  primer
gtaaaacgacggccagttggtagcattatctactcaccagg

SEQ ID NO: 79939 - DNA, 38 bp, Artificial Sequence
  primer
gtaaaacgacggccagtgattcaagctcaaagggcatc

SEQ ID NO: 79940 - DNA, 23 bp, Artificial Sequence
  primer
gattgtctggttctaggtgaagc

SEQ ID NO: 79941 - DNA, 38 bp, Artificial Sequence
  primer
gtaaaacgacggccagtaagtcacaaagctgaggcagt

SEQ ID NO: 79942 - DNA, 20 bp, Artificial Sequence
  primer
tacagatgtgcaccaccacg

SEQ ID NO: 79943 - DNA, 21 bp, Artificial Sequence
  primer
ttgtgtgtgctaggcattcag

SEQ ID NO: 79944 - DNA, 38 bp, Artificial Sequence
  primer
gtaaaacgacggccagttacacacaccaaacaggcaaa

SEQ ID NO: 79945 - DNA, 20 bp, Artificial Sequence
  primer
gggcaacaagagggaaactc

SEQ ID NO: 79946 - DNA, 22 bp, Artificial Sequence
  primer
aagtgtccttcctcagggtaca

SEQ ID NO: 79947 - DNA, 35 bp, Artificial Sequence
  primer
gtaaaacgacggccagtcttgagcccgggagacag

SEQ ID NO: 79948 - DNA, 40 bp, Artificial Sequence
  primer
gtaaaacgacggccagttgttggtgcttatctccaatacc

SEQ ID NO: 79949 - DNA, 35 bp, Artificial Sequence; identical to SEQ ID NO: 45446
  primer

SEQ ID NO: 79950 - DNA, 26 bp, Artificial Sequence
  primer
tgtctagtgtagctatgcatgaaacc

SEQ ID NO: 79951 - DNA, 39 bp, Artificial Sequence
  primer
gtaaaacgacggccagtcaaccagatagtgtagccctga

SEQ ID NO: 79952 - DNA, 23 bp, Artificial Sequence
  primer
gaacaattacttccaggctatgg

SEQ ID NO: 79953 - DNA, 41 bp, Artificial Sequence
  primer
gtaaaacgacggccagtacatgtgctttgccatatagactt

SEQ ID NO: 79954 - DNA, 20 bp, Artificial Sequence
  primer
tgctgtgttggtgtgagagc

SEQ ID NO: 79955 - DNA, 41 bp, Artificial Sequence
  primer
gtaaaacgacggccagttcaaattcattccaagcttctagg

SEQ ID NO: 79956 - DNA, 38 bp, Artificial Sequence
  primer
gtaaaacgacggccagtagacgccctggaacttgtatc

SEQ ID NO: 79957 - DNA, 46 bp, Artificial Sequence
  primer
gtaaaacgacggccagtgagggtatttggaagtaagatgtattaga

SEQ ID NO: 79958 - DNA, 41 bp, Artificial Sequence
  primer
gtaaaacgacggccagttttgccatcagtacaaatgagttt

SEQ ID NO: 79959 - DNA, 44 bp, Artificial Sequence
  primer
gtaaaacgacggccagtaaagactttatatttcattcctgcttt

SEQ ID NO: 79960 - DNA, 21 bp, Artificial Sequence
  primer
ggaaggaagggatggaaacac

SEQ ID NO: 79961 - DNA, 42 bp, Artificial Sequence
  primer
gtaaaacgacggccagtgaaacacaatgcctatgaaatatcc

SEQ ID NO: 79962 - DNA, 25 bp, Artificial Sequence
  primer
tgtcaaggaagatacagttgttgag

SEQ ID NO: 79963 - DNA, 28 bp, Artificial Sequence
  primer
ctatttcagtcagtacaaagtggtttct

SEQ ID NO: 79964 - DNA, 20 bp, Artificial Sequence
  primer
tttccaagcagttctcatgc

SEQ ID NO: 79965 - DNA, 24 bp, Artificial Sequence
  primer
gagaaataacagttgctgagaacg

SEQ ID NO: 79966 - DNA, 36 bp, Artificial Sequence
  primer
gtaaaacgacggccagtggtcacattccttggcctc

SEQ ID NO: 79967 - DNA, 37 bp, Artificial Sequence
  primer
gtaaaacgacggccagtcagcatctccctctgacctg

SEQ ID NO: 79968 - DNA, 38 bp, Artificial Sequence
  primer
gtaaaacgacggccagttgtgtacaattcatttgcagc

SEQ ID NO: 79969 - DNA, 38 bp, Artificial Sequence
  primer
gtaaaacgacggccagtcccagtaagaatgcaatccag

SEQ ID NO: 79970 - DNA, 38 bp, Artificial Sequence
  primer
gtaaaacgacggccagtatgcctggctctcaatctatg

SEQ ID NO: 79971 - DNA, 23 bp, Artificial Sequence
  primer
tttcaagcttaaatgctacctcg

SEQ ID NO: 79972 - DNA, 28 bp, Artificial Sequence
  primer
tttctttaggtagtagaatgactggtga

SEQ ID NO: 79973 - DNA, 27 bp, Artificial Sequence
  primer
aatctacatctttaaccatttagtgcc

SEQ ID NO: 79974 - DNA, 21 bp, Artificial Sequence
  primer
tgggcccagtgtttactatgt

SEQ ID NO: 79975 - DNA, 38 bp, Artificial Sequence
  primer
gtaaaacgacggccagtcgaacagaattatctgccagg

SEQ ID NO: 79976 - DNA, 37 bp, Artificial Sequence
  primer
gtaaaacgacggccagtttggacctctttcaaatggc

SEQ ID NO: 79977 - DNA, 38 bp, Artificial Sequence
  primer
gtaaaacgacggccagtctcctgacctcgtattccacc

SEQ ID NO: 79978 - DNA, 43 bp, Artificial Sequence
  primer
gtaaaacgacggccagtatatgctaagttccttcacaattcag

SEQ ID NO: 79979 - DNA, 44 bp, Artificial Sequence
  primer
gtaaaacgacggccagtaagtaactctgggccattatttatacc

SEQ ID NO: 79980 - DNA, 21 bp, Artificial Sequence
  primer
cagaaccaagctgtcactcaa

SEQ ID NO: 79981 - DNA, 21 bp, Artificial Sequence
  primer
acgtcacacatatccacagcc

SEQ ID NO: 79982 - DNA, 38 bp, Artificial Sequence
  primer
gtaaaacgacggccagttcagcaatgaactatgcctcc

SEQ ID NO: 79983 - DNA, 37 bp, Artificial Sequence
  primer
gtaaaacgacggccagtacagcctcatggctgagttg

SEQ ID NO: 79984 - DNA, 38 bp, Artificial Sequence
  primer
gtaaaacgacggccagtccattaggaggaaggaaaggg

SEQ ID NO: 79985 - DNA, 21 bp, Artificial Sequence
  primer
accttggttctttcttccagc

SEQ ID NO: 79986 - DNA, 37 bp, Artificial Sequence
  primer
gtaaaacgacggccagtagcccacagcaacaagacac

SEQ ID NO: 79987 - DNA, 38 bp, Artificial Sequence
  primer
gtaaaacgacggccagttctgggaacacttcattggtg

SEQ ID NO: 79988 - DNA, 38 bp, Artificial Sequence
  primer
gtaaaacgacggccagtcgtccatccgtaatgaccaag

SEQ ID NO: 79989 - DNA, 38 bp, Artificial Sequence
  primer
gtaaaacgacggccagtgtctcctgagctcgctttctc

SEQ ID NO: 79990 - DNA, 38 bp, Artificial Sequence
  primer
gtaaaacgacggccagtcaaagccacattgcacatctc

SEQ ID NO: 79991 - DNA, 20 bp, Artificial Sequence
  primer
cgctggaagccagaacatac

SEQ ID NO: 79992 - DNA, 21 bp, Artificial Sequence
  primer
cgtggagatgtctgtctgtcc

SEQ ID NO: 79993 - DNA, 21 bp, Artificial Sequence
  primer
gactgctcagcgacatgaaac

SEQ ID NO: 79994 - DNA, 37 bp, Artificial Sequence
  primer
gtaaaacgacggccagtggcaggcactgttggttatc

SEQ ID NO: 79995 - DNA, 38 bp, Artificial Sequence
  primer
gtaaaacgacggccagtgcaggtgagtcagatgctttg

SEQ ID NO: 79996 - DNA, 24 bp, Artificial Sequence
  primer
ggactttcgagacaaaggaataac

SEQ ID NO: 79997 - DNA, 18 bp, Artificial Sequence
  primer
gggatcagaggcagcgac

SEQ ID NO: 79998 - DNA, 43 bp, Artificial Sequence
  primer
gtaaaacgacggccagtaatgctctgacattaatatgatcacc

SEQ ID NO: 79999 - DNA, 23 bp, Artificial Sequence
  primer
cctaaattgacagttacagcaca

SEQ ID NO: 80000 - DNA, 22 bp, Artificial Sequence
  primer
gaaatttaacacggtagcctgc

SEQ ID NO: 80001 - DNA, 38 bp, Artificial Sequence
  primer
gtaaaacgacggccagtaacgaaacaaacgtgtggaat

SEQ ID NO: 80002 - DNA, 42 bp, Artificial Sequence
  primer
gtaaaacgacggccagtttcacaaatcagtctcactagcaaa

SEQ ID NO: 80003 - DNA, 44 bp, Artificial Sequence
  primer
gtaaaacgacggccagttggtatctcaagttatcatgatccata

SEQ ID NO: 80004 - DNA, 47 bp, Artificial Sequence
  primer
gtaaaacgacggccagtttataatttcaatctcaaataactcaccat

SEQ ID NO: 80005 - DNA, 44 bp, Artificial Sequence
  primer
gtaaaacgacggccagttgaaattaagacgatatcagcatttac

SEQ ID NO: 80006 - DNA, 43 bp, Artificial Sequence
  primer
gtaaaacgacggccagtttccctgtatctaccactacttctgc

SEQ ID NO: 80007 - DNA, 22 bp, Artificial Sequence
  primer
cctttacctactcccatgtccc

SEQ ID NO: 80008 - DNA, 22 bp, Artificial Sequence
  primer
caatttgccaagaagtgaatga

SEQ ID NO: 80009 - DNA, 28 bp, Artificial Sequence
  primer
tcaacagtatcataaacatatgaacacc

SEQ ID NO: 80010 - DNA, 22 bp, Artificial Sequence
  primer
tcttctgccaattcacttgaga

SEQ ID NO: 80011 - DNA, 38 bp, Artificial Sequence
  primer
gtaaaacgacggccagtcaccctagaaggaaggaatga

SEQ ID NO: 80012 - DNA, 25 bp, Artificial Sequence
  primer
gaggttaacagtaccagttggtttc

SEQ ID NO: 80013 - DNA, 40 bp, Artificial Sequence
  primer
gtaaaacgacggccagttgaataccacctgcataaactga

SEQ ID NO: 80014 - DNA, 35 bp, Artificial Sequence
  primer
gtaaaacgacggccagtacaacaggcgctgctttc

SEQ ID NO: 80015 - DNA, 38 bp, Artificial Sequence
  primer
gtaaaacgacggccagttcagcatcatgcaatacaccc

SEQ ID NO: 80016 - DNA, 44 bp, Artificial Sequence
  primer
gtaaaacgacggccagtaagaaatagaaattgcaagatattcat

SEQ ID NO: 80017 - DNA, 24 bp, Artificial Sequence
  primer
caatgtgataattctgagaagagg

SEQ ID NO: 80018 - DNA, 44 bp, Artificial Sequence
  primer
gtaaaacgacggccagtaattgaataaaggagaaagttaacaaa

SEQ ID NO: 80019 - DNA, 21 bp, Artificial Sequence
  primer
atcatcacagacattcgcaga

SEQ ID NO: 80020 - DNA, 43 bp, Artificial Sequence
  primer
gtaaaacgacggccagttggtcgattatctaacagattgacag

SEQ ID NO: 80021 - DNA, 40 bp, Artificial Sequence
  primer
gtaaaacgacggccagttgaaattctgcattccaagagag

SEQ ID NO: 80022 - DNA, 21 bp, Artificial Sequence
  primer
cagtggctttggttacagctc

SEQ ID NO: 80023 - DNA, 21 bp, Artificial Sequence
  primer
ccttgcaaaggtccttactgc

SEQ ID NO: 80024 - DNA, 22 bp, Artificial Sequence
  primer
ggaaactgtactcaggctctgg

SEQ ID NO: 80025 - DNA, 38 bp, Artificial Sequence
  primer
gtaaaacgacggccagtctcaagtgatccacctgcttt

SEQ ID NO: 80026 - DNA, 38 bp, Artificial Sequence
  primer
gtaaaacgacggccagtacgcctgtaatcccagaagtt

SEQ ID NO: 80027 - DNA, 21 bp, Artificial Sequence
  primer
gatgaagctggcataggttcc

SEQ ID NO: 80028 - DNA, 38 bp, Artificial Sequence
  primer
gtaaaacgacggccagtggagaactggaaatgtggacg

SEQ ID NO: 80029 - DNA, 38 bp, Artificial Sequence
  primer
gtaaaacgacggccagtcatctcaccgttcaggacctc

SEQ ID NO: 80030 - DNA, 38 bp, Artificial Sequence
  primer
gtaaaacgacggccagtttgtcgttgagggtagaaggg

SEQ ID NO: 80031 - DNA, 21 bp, Artificial Sequence
  primer
ggttgagtccctgcgtagaag

SEQ ID NO: 80032 - DNA, 21 bp, Artificial Sequence
  primer
gttgaagttctcgctcttggg

SEQ ID NO: 80033 - DNA, 38 bp, Artificial Sequence
  primer
gtaaaacgacggccagtgggctatggctgtcttcaatc

SEQ ID NO: 80034 - DNA, 38 bp, Artificial Sequence
  primer
gtaaaacgacggccagtaattcgtcttgccaggagatg

SEQ ID NO: 80035 - DNA, 21 bp, Artificial Sequence
  primer
ggaaacttcagttcgccattc

SEQ ID NO: 80036 - DNA, 21 bp, Artificial Sequence
  primer
gcgacacacctgctgtaactc

SEQ ID NO: 80037 - DNA, 20 bp, Artificial Sequence
  primer
tgtgttgggtcaacatcacc

SEQ ID NO: 80038 - DNA, 38 bp, Artificial Sequence
  primer
gtaaaacgacggccagtactcctggactcaagcaatcc

SEQ ID NO: 80039 - DNA, 40 bp, Artificial Sequence
  primer
gtaaaacgacggccagtagcaactggaacagacagacttc

SEQ ID NO: 80040 - DNA, 38 bp, Artificial Sequence
  primer
gtaaaacgacggccagtccacccaccaagaacaactac

SEQ ID NO: 80041 - DNA, 40 bp, Artificial Sequence
  primer
gtaaaacgacggccagttcaagcctcactttattcacctc

SEQ ID NO: 80042 - DNA, 21 bp, Artificial Sequence
  primer
ctgcctactgtggctaagctg

SEQ ID NO: 80043 - DNA, 40 bp, Artificial Sequence
  primer
gtaaaacgacggccagtaattctcatacaggacttggctg

SEQ ID NO: 80044 - DNA, 21 bp, Artificial Sequence
  primer
ctggcctgcctgaactgttac

SEQ ID NO: 80045 - DNA, 21 bp, Artificial Sequence
  primer
agcacctcaagctttcactcc

SEQ ID NO: 80046 - DNA, 38 bp, Artificial Sequence
  primer
gtaaaacgacggccagtctgaatgaacatgaggcaagg

SEQ ID NO: 80047 - DNA, 38 bp, Artificial Sequence
  primer
gtaaaacgacggccagtttacaaagagcctcgtgcttg

SEQ ID NO: 80048 - DNA, 38 bp, Artificial Sequence
  primer
gtaaaacgacggccagtggacaaaggcaaaccacacag

SEQ ID NO: 80049 - DNA, 19 bp, Artificial Sequence
  primer
gcttcagcgacatggtgag

SEQ ID NO: 80050 - DNA, 18 bp, Artificial Sequence
  primer
gacgctagaaggccgctg

SEQ ID NO: 80051 - DNA, 37 bp, Artificial Sequence
  primer
gtaaaacgacggccagtctgacaatcccagaggaccc

SEQ ID NO: 80052 - DNA, 19 bp, Artificial Sequence
  primer
tttgccttggcatttggtc

SEQ ID NO: 80053 - DNA, 37 bp, Artificial Sequence
  primer
gtaaaacgacggccagtacccacagatgcagaggacc

SEQ ID NO: 80054 - DNA, 24 bp, Artificial Sequence
  primer
cctctctgattacacaaaccagtc

SEQ ID NO: 80055 - DNA, 18 bp, Artificial Sequence
  primer
ttacaggaatgagccgcc

SEQ ID NO: 80056 - DNA, 41 bp, Artificial Sequence
  primer
gtaaaacgacggccagtcaacaaacctgctgctctaaatac

SEQ ID NO: 80057 - DNA, 24 bp, Artificial Sequence
  primer
aggcaaactacatttattcccttt

SEQ ID NO: 80058 - DNA, 41 bp, Artificial Sequence
  primer
gtaaaacgacggccagtccaattctacttgcattctctacc

SEQ ID NO: 80059 - DNA, 42 bp, Artificial Sequence
  primer
gtaaaacgacggccagttgaagtgaaagctactcaccaaatc

SEQ ID NO: 80060 - DNA, 43 bp, Artificial Sequence
  primer
gtaaaacgacggccagtgcttcacacatttatcaaatttctct

SEQ ID NO: 80061 - DNA, 21 bp, Artificial Sequence
  primer
gtttcccaattcctggtgatt

SEQ ID NO: 80062 - DNA, 24 bp, Artificial Sequence
  primer
cccaggaatgttaacctttgtaac

SEQ ID NO: 80063 - DNA, 41 bp, Artificial Sequence
  primer
gtaaaacgacggccagtttctgtatgggcatgaaattagac

SEQ ID NO: 80064 - DNA, 27 bp, Artificial Sequence
  primer
tgatgtttctgactgtatacataacgc

SEQ ID NO: 80065 - DNA, 21 bp, Artificial Sequence
  primer
agttggaaggacctaaatgcc

SEQ ID NO: 80066 - DNA, 38 bp, Artificial Sequence
  primer
gtaaaacgacggccagtgatggcaggtatggaagaagg

SEQ ID NO: 80067 - DNA, 22 bp, Artificial Sequence
  primer
aaacctaaagagtgcttggtgt

SEQ ID NO: 80068 - DNA, 38 bp, Artificial Sequence
  primer
gtaaaacgacggccagtaagccaatgcatagcctcatc

SEQ ID NO: 80069 - DNA, 24 bp, Artificial Sequence
  primer
aaactctcaaatctttcttggctg

SEQ ID NO: 80070 - DNA, 23 bp, Artificial Sequence
  primer
tcagattcttgaccctcaatgtc

SEQ ID NO: 80071 - DNA, 22 bp, Artificial Sequence
  primer
caataatttgactggcacaagg

SEQ ID NO: 80072 - DNA, 21 bp, Artificial Sequence
  primer
gttctgacgatgcgatacctg

SEQ ID NO: 80073 - DNA, 21 bp, Artificial Sequence
  primer
tgacacacagggtttcctagc

SEQ ID NO: 80074 - DNA, 21 bp, Artificial Sequence
  primer
ctggacgggtcttgctagttc

SEQ ID NO: 80075 - DNA, 21 bp, Artificial Sequence
  primer
gtacctgcgggactctgaaac

SEQ ID NO: 80076 - DNA, 34 bp, Artificial Sequence
  primer
gtaaaacgacggccagtaaccgagccacagcctc

SEQ ID NO: 80077 - DNA, 38 bp, Artificial Sequence
  primer
gtaaaacgacggccagttgcccaccctacatacttcac

SEQ ID NO: 80078 - DNA, 37 bp, Artificial Sequence
  primer
gtaaaacgacggccagtttcacagacaggtgcaggtc

SEQ ID NO: 80079 - DNA, 21 bp, Artificial Sequence
  primer
aatcgctgtttcccagtaagc

SEQ ID NO: 80080 - DNA, 38 bp, Artificial Sequence
  primer
gtaaaacgacggccagtagacgccttcaaacacctgtc

SEQ ID NO: 80081 - DNA, 38 bp, Artificial Sequence
  primer
gtaaaacgacggccagtcactgacctttgagcttagcg

SEQ ID NO: 80082 - DNA, 21 bp, Artificial Sequence
  primer
tcagcacaggcctacagaaac

SEQ ID NO: 80083 - DNA, 21 bp, Artificial Sequence
  primer
tccacctgcacacaaactacc

SEQ ID NO: 80084 - DNA, 23 bp, Artificial Sequence
  primer
ggcaacagtaaatatttccctcc

SEQ ID NO: 80085 - DNA, 21 bp, Artificial Sequence
  primer
agagtaggagtagggatggcg

SEQ ID NO: 80086 - DNA, 39 bp, Artificial Sequence
  primer
gtaaaacgacggccagtggcttaaaccacagcactcatc

SEQ ID NO: 80087 - DNA, 37 bp, Artificial Sequence
  primer
gtaaaacgacggccagtcattccaacacacccaaacc

SEQ ID NO: 80088 - DNA, 38 bp, Artificial Sequence
  primer
gtaaaacgacggccagtatgactaaatcccaaatgccc

SEQ ID NO: 80089 - DNA, 40 bp, Artificial Sequence
  primer
gtaaaacgacggccagtccaggttccttggtagagagttc

SEQ ID NO: 80090 - DNA, 22 bp, Artificial Sequence
  primer
ttgtttgcctctgaattccaac

SEQ ID NO: 80091 - DNA, 21 bp, Artificial Sequence
  primer
ctgacccagaccctagtcctg

SEQ ID NO: 80092 - DNA, 42 bp, Artificial Sequence
  primer
gtaaaacgacggccagtgaaagtacagtaaatcttcacggct

SEQ ID NO: 80093 - DNA, 38 bp, Artificial Sequence
  primer
gtaaaacgacggccagtgacatctcctcacactgcctg

SEQ ID NO: 80094 - DNA, 21 bp, Artificial Sequence
  primer
ggacacagatgaggctgaatg

SEQ ID NO: 80095 - DNA, 20 bp, Artificial Sequence
  primer
taggaagaatagggcgtggc

SEQ ID NO: 80096 - DNA, 21 bp, Artificial Sequence
  primer
cctagccagctcccaagtctc

SEQ ID NO: 80097 - DNA, 38 bp, Artificial Sequence
  primer
gtaaaacgacggccagtaggaaagagggagaaccagtg

SEQ ID NO: 80098 - DNA, 21 bp, Artificial Sequence
  primer
agtcctcgccactcagaaatg

SEQ ID NO: 80099 - DNA, 38 bp, Artificial Sequence
  primer
gtaaaacgacggccagtttagggagcactatggcaagg

SEQ ID NO: 80100 - DNA, 38 bp, Artificial Sequence
  primer
gtaaaacgacggccagtcagctcttccatgccaaattc

SEQ ID NO: 80101 - DNA, 20 bp, Artificial Sequence
  primer
aagatcttccgtctccagcg

SEQ ID NO: 80102 - DNA, 20 bp, Artificial Sequence
  primer
agaaaggcagaagcaaaccc

SEQ ID NO: 80103 - DNA, 21 bp, Artificial Sequence
  primer
tttgagaccaacctgaccaac

SEQ ID NO: 80104 - DNA, 20 bp, Artificial Sequence
  primer
cgaaggtcgccttgttacag

SEQ ID NO: 80105 - DNA, 39 bp, Artificial Sequence
  primer
gtaaaacgacggccagttgagtgaatgaaacagggaaca

SEQ ID NO: 80106 - DNA, 21 bp, Artificial Sequence
  primer
agacaggacctccctttgttg

SEQ ID NO: 80107 - DNA, 38 bp, Artificial Sequence
  primer
gtaaaacgacggccagtccaaatcacagcctatcacca

SEQ ID NO: 80108 - DNA, 37 bp, Artificial Sequence
  primer
gtaaaacgacggccagtgccaacaacacaaggaccac

SEQ ID NO: 80109 - DNA, 25 bp, Artificial Sequence
  primer
cccactatatagctattgcttctgc

SEQ ID NO: 80110 - DNA, 22 bp, Artificial Sequence
  primer
tcacaggattcaggcagtaacc

SEQ ID NO: 80111 - DNA, 39 bp, Artificial Sequence
  primer
gtaaaacgacggccagtgtaactgctccttaatccaggg

SEQ ID NO: 80112 - DNA, 38 bp, Artificial Sequence
  primer
gtaaaacgacggccagtaccaaagtggaccctatgctg

SEQ ID NO: 80113 - DNA, 38 bp, Artificial Sequence
  primer
gtaaaacgacggccagtggacgctctcattacaggagg

SEQ ID NO: 80114 - DNA, 20 bp, Artificial Sequence
  primer
catgcatgccatcactgttc

SEQ ID NO: 80115 - DNA, 44 bp, Artificial Sequence
  primer
gtaaaacgacggccagtaatacaacatacatttgaattcttccc

SEQ ID NO: 80116 - DNA, 21 bp, Artificial Sequence
  primer
agattgcagttgatttgctcc

SEQ ID NO: 80117 - DNA, 40 bp, Artificial Sequence
  primer
gtaaaacgacggccagttgtgggagtagtgtggtacatcc

SEQ ID NO: 80118 - DNA, 39 bp, Artificial Sequence
  primer
gtaaaacgacggccagttccacagtgagcctgagatatg

SEQ ID NO: 80119 - DNA, 22 bp, Artificial Sequence
  primer
aacttctctcacaccttgaccg

SEQ ID NO: 80120 - DNA, 21 bp, Artificial Sequence
  primer
accttcttctcagggccaaag

SEQ ID NO: 80121 - DNA, 21 bp, Artificial Sequence
  primer
ttaccagaagactccttgggc

SEQ ID NO: 80122 - DNA, 21 bp, Artificial Sequence
  primer
agttgacaggcagttcattgg

SEQ ID NO: 80123 - DNA, 38 bp, Artificial Sequence
  primer
gtaaaacgacggccagtacctgatgaaggagggaactg

SEQ ID NO: 80124 - DNA, 37 bp, Artificial Sequence
  primer
gtaaaacgacggccagtcaaccaacccaaccaaacac

SEQ ID NO: 80125 - DNA, 38 bp, Artificial Sequence
  primer
gtaaaacgacggccagtatagcttcagggaaatcctcg

SEQ ID NO: 80126 - DNA, 36 bp, Artificial Sequence
  primer
gtaaaacgacggccagtctggcagaggcagaggttg

SEQ ID NO: 80127 - DNA, 21 bp, Artificial Sequence
  primer
tgatctccaacgacaggtcac

SEQ ID NO: 80128 - DNA, 21 bp, Artificial Sequence
  primer
caccctccattaccctacgag

SEQ ID NO: 80129 - DNA, 38 bp, Artificial Sequence
  primer
gtaaaacgacggccagtccagggctgtctgtattgatg

SEQ ID NO: 80130 - DNA, 38 bp, Artificial Sequence
  primer
gtaaaacgacggccagtgcccataaacctgacctcctc

SEQ ID NO: 80131 - DNA, 21 bp, Artificial Sequence
  primer
gacattcctctctttgcccag

SEQ ID NO: 80132 - DNA, 37 bp, Artificial Sequence
  primer
gtaaaacgacggccagtcactccctgagcctgtttcc

SEQ ID NO: 80133 - DNA, 20 bp, Artificial Sequence
  primer
atctgcacacaggatctggc

SEQ ID NO: 80134 - DNA, 21 bp, Artificial Sequence
  primer
caggaaagatcagggcttctg

SEQ ID NO: 80135 - DNA, 20 bp, Artificial Sequence
  primer
ccctacagccagagggtttc

SEQ ID NO: 80136 - DNA, 19 bp, Artificial Sequence
  primer
agaagcatggaggacaccg

SEQ ID NO: 80137 - DNA, 21 bp, Artificial Sequence
  primer
tctgccttcaacagtctcacc

SEQ ID NO: 80138 - DNA, 38 bp, Artificial Sequence
  primer
gtaaaacgacggccagttcaggctgagacaagacatgg

SEQ ID NO: 80139 - DNA, 21 bp, Artificial Sequence
  primer
tctgctggagtctcctcttcc

SEQ ID NO: 80140 - DNA, 35 bp, Artificial Sequence
  primer
gtaaaacgacggccagtcaccttatgcccgtcctg

SEQ ID NO: 80141 - DNA, 22 bp, Artificial Sequence
  primer
cagatttcaaagcatccacagc

SEQ ID NO: 80142 - DNA, 40 bp, Artificial Sequence
  primer
gtaaaacgacggccagtcacagacaaagaggagttgttgg

SEQ ID NO: 80143 - DNA, 23 bp, Artificial Sequence
  primer
tgtaagtcaaaggcttatggcaa

SEQ ID NO: 80144 - DNA, 40 bp, Artificial Sequence
  primer
gtaaaacgacggccagtcaccattaggaccaacaagtgac

SEQ ID NO: 80145 - DNA, 40 bp, Artificial Sequence
  primer
gtaaaacgacggccagtaatatgccattgtctctttacgc

SEQ ID NO: 80146 - DNA, 38 bp, Artificial Sequence
  primer
gtaaaacgacggccagtccataggcaagatgactgctg

SEQ ID NO: 80147 - DNA, 24 bp, Artificial Sequence
  primer
gcaaggaacttcagtagctttcag

SEQ ID NO: 80148 - DNA, 21 bp, Artificial Sequence
  primer
cgcaagggtaatcttgctcag

SEQ ID NO: 80149 - DNA, 23 bp, Artificial Sequence
  primer
ggcatatagtggatccgaaagac

SEQ ID NO: 80150 - DNA, 38 bp, Artificial Sequence
  primer
gtaaaacgacggccagtagcagtaggaagcagtcaccc

SEQ ID NO: 80151 - DNA, 21 bp, Artificial Sequence
  primer
acacaggaggtggtgactgtg

SEQ ID NO: 80152 - DNA, 38 bp, Artificial Sequence
  primer
gtaaaacgacggccagtgggtaaggctcagtatcctcc

SEQ ID NO: 80153 - DNA, 38 bp, Artificial Sequence
  primer
gtaaaacgacggccagttctaagggccgaagaaagttg

SEQ ID NO: 80154 - DNA, 20 bp, Artificial Sequence
  primer
gagatgaggcctaagccagg

SEQ ID NO: 80155 - DNA, 21 bp, Artificial Sequence
  primer
ttggtacctctttgcatggtg

SEQ ID NO: 80156 - DNA, 21 bp, Artificial Sequence
  primer
tgctttgtcagctggagtgag

SEQ ID NO: 80157 - DNA, 21 bp, Artificial Sequence
  primer
gagggagggaaagaagactgg

SEQ ID NO: 80158 - DNA, 40 bp, Artificial Sequence
  primer
gtaaaacgacggccagtcaagtctacacagccagtcttgg

SEQ ID NO: 80159 - DNA, 22 bp, Artificial Sequence
  primer
catcatcattaaacacgcatcg

SEQ ID NO: 80160 - DNA, 38 bp, Artificial Sequence
  primer
gtaaaacgacggccagtacttggcaaatgttagggctg

SEQ ID NO: 80161 - DNA, 38 bp, Artificial Sequence
  primer
gtaaaacgacggccagtgcaggatctcaagtttcccag

SEQ ID NO: 80162 - DNA, 21 bp, Artificial Sequence
  primer
gggtgtcccactgctattctc

SEQ ID NO: 80163 - DNA, 37 bp, Artificial Sequence
  primer
gtaaaacgacggccagtcctcatcccatcctgtcctc

SEQ ID NO: 80164 - DNA, 38 bp, Artificial Sequence
  primer
gtaaaacgacggccagtggcagatttctggattcaagg

SEQ ID NO: 80165 - DNA, 21 bp, Artificial Sequence
  primer
caaggatggacctccagctac

SEQ ID NO: 80166 - DNA, 18 bp, Artificial Sequence
  primer
ctgggattactggcgtcc

SEQ ID NO: 80167 - DNA, 21 bp, Artificial Sequence
  primer
tggagttacttagggccatgc

SEQ ID NO: 80168 - DNA, 21 bp, Artificial Sequence
  primer
gcaaagcctccacctagaaac

SEQ ID NO: 80169 - DNA, 38 bp, Artificial Sequence
  primer
gtaaaacgacggccagtagaaagaattggagggaaggg

SEQ ID NO: 80170 - DNA, 20 bp, Artificial Sequence
  primer
cgttcacagggtcctgaaag

SEQ ID NO: 80171 - DNA, 21 bp, Artificial Sequence
  primer
attgtatccttcctctgccgc

SEQ ID NO: 80172 - DNA, 21 bp, Artificial Sequence
  primer
attgtatccttcctctgccgc

SEQ ID NO: 80173 - DNA, 38 bp, Artificial Sequence
  primer
gtaaaacgacggccagtcaagtgcagggtttacttggg

SEQ ID NO: 80174 - DNA, 36 bp, Artificial Sequence
  primer
gtaaaacgacggccagtcctcctgacagccacaaac

SEQ ID NO: 80175 - DNA, 18 bp, Artificial Sequence
  primer
ctttaacctgggaggccg

SEQ ID NO: 80176 - DNA, 21 bp, Artificial Sequence
  primer
accacagaagacaaccctgtg

SEQ ID NO: 80177 - DNA, 22 bp, Artificial Sequence
  primer
cagctctcatgggaaagagttc

SEQ ID NO: 80178 - DNA, 18 bp, Artificial Sequence
  primer
acagacagacagcccgga

SEQ ID NO: 80179 - DNA, 21 bp, Artificial Sequence
  primer
aaaccacagtggaggaagcac

SEQ ID NO: 80180 - DNA, 22 bp, Artificial Sequence
  primer
tcagacttgaaccaatggtgtg

SEQ ID NO: 80181 - DNA, 20 bp, Artificial Sequence
  primer
atgtcctgggcgttaggaac

SEQ ID NO: 80182 - DNA, 21 bp, Artificial Sequence
  primer
gtcctgtcaacatgaagctgg

SEQ ID NO: 80183 - DNA, 38 bp, Artificial Sequence
  primer
gtaaaacgacggccagtatgcagacttccatctcaagc

SEQ ID NO: 80184 - DNA, 38 bp, Artificial Sequence
  primer
gtaaaacgacggccagtaaagaagagcaggccactcac

SEQ ID NO: 80185 - DNA, 38 bp, Artificial Sequence
  primer
gtaaaacgacggccagttttccaacaaggaaacctcag

SEQ ID NO: 80186 - DNA, 38 bp, Artificial Sequence
  primer
gtaaaacgacggccagtcttgcaatcgggacaacatag

SEQ ID NO: 80187 - DNA, 38 bp, Artificial Sequence
  primer
gtaaaacgacggccagtacacattcccttctctccagc

SEQ ID NO: 80188 - DNA, 21 bp, Artificial Sequence
  primer
gatgcctgactgccactaaag

SEQ ID NO: 80189 - DNA, 23 bp, Artificial Sequence
  primer
gattaatgagtcactgcacaggc

SEQ ID NO: 80190 - DNA, 21 bp, Artificial Sequence
  primer
agctaaggaagatgcgagcac

SEQ ID NO: 80191 - DNA, 20 bp, Artificial Sequence
  primer
aacccaatcaccgtcattcc

SEQ ID NO: 80192 - DNA, 21 bp, Artificial Sequence
  primer
aatgcctccttcatcaggttc

SEQ ID NO: 80193 - DNA, 21 bp, Artificial Sequence
  primer
tttgtaggtggtgactgagcg

SEQ ID NO: 80194 - DNA, 21 bp, Artificial Sequence
  primer
ctgcctaaatggtaagcaggg

SEQ ID NO: 80195 - DNA, 20 bp, Artificial Sequence
  primer
ctgcacacttccacctcacc

SEQ ID NO: 80196 - DNA, 36 bp, Artificial Sequence
  primer
gtaaaacgacggccagttaaagcacgaggctgggac

SEQ ID NO: 80197 - DNA, 20 bp, Artificial Sequence
  primer
aggtcatggtcttccttccg

SEQ ID NO: 80198 - DNA, 38 bp, Artificial Sequence
  primer
gtaaaacgacggccagttccggtgaatgtcaagttctc

SEQ ID NO: 80199 - DNA, 18 bp, Artificial Sequence
  primer
gtccacagacagcgggtg

SEQ ID NO: 80200 - DNA, 38 bp, Artificial Sequence
  primer
gtaaaacgacggccagtcttcttcctcgttcttgctcc

SEQ ID NO: 80201 - DNA, 38 bp, Artificial Sequence
  primer
gtaaaacgacggccagtgagccatgcaggagttctgtc

SEQ ID NO: 80202 - DNA, 36 bp, Artificial Sequence
  primer
gtaaaacgacggccagtctcttgcggctcttgactg

SEQ ID NO: 80203 - DNA, 24 bp, Artificial Sequence
  primer
tcccttacaagccattagaaacac

SEQ ID NO: 80204 - DNA, 38 bp, Artificial Sequence
  primer
gtaaaacgacggccagtttcacacagatggccaggtag

SEQ ID NO: 80205 - DNA, 38 bp, Artificial Sequence
  primer
gtaaaacgacggccagtcactgagacatcctgctgagg

SEQ ID NO: 80206 - DNA, 38 bp, Artificial Sequence
  primer
gtaaaacgacggccagttcaatgtcagacacccagagg

SEQ ID NO: 80207 - DNA, 37 bp, Artificial Sequence
  primer
gtaaaacgacggccagtaaggacagccttatgcccac

SEQ ID NO: 80208 - DNA, 22 bp, Artificial Sequence
  primer
tcattctcctcaaaccataggc

SEQ ID NO: 80209 - DNA, 38 bp, Artificial Sequence
  primer
gtaaaacgacggccagtagcacatctcccagtacagcc

SEQ ID NO: 80210 - DNA, 37 bp, Artificial Sequence
  primer
gtaaaacgacggccagtgggtggaagtgacagctttg

SEQ ID NO: 80211 - DNA, 21 bp, Artificial Sequence
  primer
tcatttccacctgtcgatgag

SEQ ID NO: 80212 - DNA, 21 bp, Artificial Sequence
  primer
ttctactcaaaggcagggctc

SEQ ID NO: 80213 - DNA, 21 bp, Artificial Sequence
  primer
agaggtggctggtgttctagg

SEQ ID NO: 80214 - DNA, 21 bp, Artificial Sequence
  primer
gcagtcctaaagcagccagag

SEQ ID NO: 80215 - DNA, 22 bp, Artificial Sequence
  primer
atgctcaaatacctagcatggc

SEQ ID NO: 80216 - DNA, 21 bp, Artificial Sequence
  primer
tagctgtggagaaagggttgg

SEQ ID NO: 80217 - DNA, 38 bp, Artificial Sequence
  primer
gtaaaacgacggccagtagacacagaatcacctgcacc

SEQ ID NO: 80218 - DNA, 37 bp, Artificial Sequence
  primer
gtaaaacgacggccagtcacctccactgcctggtatg

SEQ ID NO: 80219 - DNA, 21 bp, Artificial Sequence
  primer
tctaatccaagcctgactccc

SEQ ID NO: 80220 - DNA, 38 bp, Artificial Sequence
  primer
gtaaaacgacggccagtaaagcaagcactccagcctac

SEQ ID NO: 80221 - DNA, 22 bp, Artificial Sequence
  primer
ggcatcaagctgcttagaaatg

SEQ ID NO: 80222 - DNA, 21 bp, Artificial Sequence
  primer
cctgggtttattctagggtgg

SEQ ID NO: 80223 - DNA, 21 bp, Artificial Sequence
  primer
gccgtgaatcagtactccacc

SEQ ID NO: 80224 - DNA, 38 bp, Artificial Sequence
  primer
gtaaaacgacggccagtgaacttggctctgagacctgc

SEQ ID NO: 80225 - DNA, 20 bp, Artificial Sequence
  primer
ctaggccatttgctgagctg

SEQ ID NO: 80226 - DNA, 38 bp, Artificial Sequence
  primer
gtaaaacgacggccagtatgtcaggcagaaattggtgg

SEQ ID NO: 80227 - DNA, 38 bp, Artificial Sequence
  primer
gtaaaacgacggccagtctaccaccacccatgacttcc

SEQ ID NO: 80228 - DNA, 35 bp, Artificial Sequence
  primer
gtaaaacgacggccagtgtcacgcagctctctgcc

SEQ ID NO: 80229 - DNA, 21 bp, Artificial Sequence
  primer
agagactgagacagacgcgag

SEQ ID NO: 80230 - DNA, 21 bp, Artificial Sequence
  primer
ggccaagtaactagctccagg

SEQ ID NO: 80231 - DNA, 21 bp, Artificial Sequence
  primer
gggctgcttgcctaaagtctc

SEQ ID NO: 80232 - DNA, 19 bp, Artificial Sequence
  primer
agcagtacgctgctgttgc

SEQ ID NO: 80233 - DNA, 38 bp, Artificial Sequence
  primer
gtaaaacgacggccagtacctcgatcatggagaagacg

SEQ ID NO: 80234 - DNA, 21 bp, Artificial Sequence
  primer
ggatcccagacagaccacatc

SEQ ID NO: 80235 - DNA, 21 bp, Artificial Sequence
  primer
ctccaaggtgcgactcttatg

SEQ ID NO: 80236 - DNA, 44 bp, Artificial Sequence
  primer
gtaaaacgacggccagttgtatttgttcttgtgatttctagctc

SEQ ID NO: 80237 - DNA, 38 bp, Artificial Sequence
  primer
gtaaaacgacggccagtatgaagacttgagggaggctg

SEQ ID NO: 80238 - DNA, 38 bp, Artificial Sequence
  primer
gtaaaacgacggccagtgcagctaaggtggaaggtgag

SEQ ID NO: 80239 - DNA, 21 bp, Artificial Sequence
  primer
tcttcactgttcggatcttgg

SEQ ID NO: 80240 - DNA, 38 bp, Artificial Sequence
  primer
gtaaaacgacggccagtcccactagtttgtcacctgcc

SEQ ID NO: 80241 - DNA, 21 bp, Artificial Sequence
  primer
ttaccctcccagctctcattt

SEQ ID NO: 80242 - DNA, 38 bp, Artificial Sequence
  primer
gtaaaacgacggccagtgaggtgagggtgaaggaggtc

SEQ ID NO: 80243 - DNA, 21 bp, Artificial Sequence
  primer
gtcatggccaggatcatgtag

SEQ ID NO: 80244 - DNA, 21 bp, Artificial Sequence
  primer
caccagactggcatgaatctc

SEQ ID NO: 80245 - DNA, 38 bp, Artificial Sequence
  primer
gtaaaacgacggccagtccacaatcactagcgtcatcc

SEQ ID NO: 80246 - DNA, 38 bp, Artificial Sequence
  primer
gtaaaacgacggccagttggaggatctaggttgggttc

SEQ ID NO: 80247 - DNA, 20 bp, Artificial Sequence
  primer
acaggctctggccaattctc

SEQ ID NO: 80248 - DNA, 21 bp, Artificial Sequence
  primer
aaccagaagtccagcaagtcg

SEQ ID NO: 80249 - DNA, 38 bp, Artificial Sequence
  primer
gtaaaacgacggccagtctccatagtggcctggatttc

SEQ ID NO: 80250 - DNA, 37 bp, Artificial Sequence
  primer
gtaaaacgacggccagtcctttccctggcttgttctc

SEQ ID NO: 80251 - DNA, 37 bp, Artificial Sequence
  primer
gtaaaacgacggccagtctcatcagcacctttccctg

SEQ ID NO: 80252 - DNA, 21 bp, Artificial Sequence
  primer
ctcaagggacaaggtgtctgg

SEQ ID NO: 80253 - DNA, 38 bp, Artificial Sequence
  primer
gtaaaacgacggccagttacgcctagaggtaagcctgg

SEQ ID NO: 80254 - DNA, 20 bp, Artificial Sequence
  primer
ctgggacatcccatcttgag

SEQ ID NO: 80255 - DNA, 20 bp, Artificial Sequence
  primer
tgacttgggtacgtgcttcc

SEQ ID NO: 80256 - DNA, 37 bp, Artificial Sequence
  primer
gtaaaacgacggccagtgaggaggttctggccttctg

SEQ ID NO: 80257 - DNA, 21 bp, Artificial Sequence
  primer
acacactgagactgtgcggag

SEQ ID NO: 80258 - DNA, 20 bp, Artificial Sequence
  primer
ccctcagtggttctcagtgg

SEQ ID NO: 80259 - DNA, 20 bp, Artificial Sequence
  primer
agacaggagaaggctctcgg

SEQ ID NO: 80260 - DNA, 21 bp, Artificial Sequence
  primer
gtgccaggattaggacgtgag

SEQ ID NO: 80261 - DNA, 21 bp, Artificial Sequence
  primer
ggtacacccaacactgttccc

SEQ ID NO: 80262 - DNA, 21 bp, Artificial Sequence
  primer
ttcatctgcctgaatccattg

SEQ ID NO: 80263 - DNA, 38 bp, Artificial Sequence
  primer
gtaaaacgacggccagtacttgaagtcggcacaagtcc

SEQ ID NO: 80264 - DNA, 37 bp, Artificial Sequence
  primer
gtaaaacgacggccagttcatggccagcagtcctaac

SEQ ID NO: 80265 - DNA, 21 bp, Artificial Sequence
  primer
aaagccagctgaggatgacag

SEQ ID NO: 80266 - DNA, 19 bp, Artificial Sequence
  primer
ccattccaccacccatttc

SEQ ID NO: 80267 - DNA, 20 bp, Artificial Sequence
  primer
acgcatatgcacacccacac

SEQ ID NO: 80268 - DNA, 21 bp, Artificial Sequence
  primer
tagtggtggtggacatgcttc

SEQ ID NO: 80269 - DNA, 21 bp, Artificial Sequence
  primer
actaaatgcctgtaatgcggc

SEQ ID NO: 80270 - DNA, 21 bp, Artificial Sequence
  primer
aacagccattcccacaatacc

SEQ ID NO: 80271 - DNA, 21 bp, Artificial Sequence
  primer
aagcagcagcttactcatcca

SEQ ID NO: 80272 - DNA, 21 bp, Artificial Sequence
  primer
ctatgatgcatttgtcggcag

SEQ ID NO: 80273 - DNA, 37 bp, Artificial Sequence
  primer
gtaaaacgacggccagtctaggtctgctcagccaggg

SEQ ID NO: 80274 - DNA, 38 bp, Artificial Sequence
  primer
gtaaaacgacggccagtcactggccgattcttccttag

SEQ ID NO: 80275 - DNA, 21 bp, Artificial Sequence
  primer
ctgagtctgtgtctccctccc

SEQ ID NO: 80276 - DNA, 21 bp, Artificial Sequence
  primer
gctgacaagtggtcaaactgg

SEQ ID NO: 80277 - DNA, 38 bp, Artificial Sequence
  primer
gtaaaacgacggccagtgttcatcctgaatcctccagc

SEQ ID NO: 80278 - DNA, 21 bp, Artificial Sequence
  primer
cacgcagaggtagcaatgttc

SEQ ID NO: 80279 - DNA, 38 bp, Artificial Sequence
  primer
gtaaaacgacggccagtctttgctcaaagctccctacc

SEQ ID NO: 80280 - DNA, 37 bp, Artificial Sequence
  primer
gtaaaacgacggccagttctcaacagtggccgagaag

SEQ ID NO: 80281 - DNA, 38 bp, Artificial Sequence
  primer
gtaaaacgacggccagtgtcagagattggatgggaagg

SEQ ID NO: 80282 - DNA, 38 bp, Artificial Sequence
  primer
gtaaaacgacggccagtcaaccatctatgtctgccctg

SEQ ID NO: 80283 - DNA, 38 bp, Artificial Sequence
  primer
gtaaaacgacggccagtagggtaggaacagggcctaag

SEQ ID NO: 80284 - DNA, 38 bp, Artificial Sequence
  primer
gtaaaacgacggccagtccttgccctcattctgattct

SEQ ID NO: 80285 - DNA, 38 bp, Artificial Sequence
  primer
gtaaaacgacggccagtgggtctgtggttctgacattc

SEQ ID NO: 80286 - DNA, 21 bp, Artificial Sequence
  primer
tcacagctccaaactctcctg

SEQ ID NO: 80287 - DNA, 38 bp, Artificial Sequence
  primer
gtaaaacgacggccagtgttgttccttcaacccgtctc

SEQ ID NO: 80288 - DNA, 38 bp, Artificial Sequence
  primer
gtaaaacgacggccagttccaagctgagggagactagg

SEQ ID NO: 80289 - DNA, 38 bp, Artificial Sequence
  primer
gtaaaacgacggccagttagcttgtttatcatccgccc

SEQ ID NO: 80290 - DNA, 21 bp, Artificial Sequence
  primer
ttcaggactcacctcctccag

SEQ ID NO: 80291 - DNA, 37 bp, Artificial Sequence
  primer
gtaaaacgacggccagtacatgtccctgtgacccttg

SEQ ID NO: 80292 - DNA, 21 bp, Artificial Sequence
  primer
caagtgggtcactcagcattc

SEQ ID NO: 80293 - DNA, 38 bp, Artificial Sequence
  primer
gtaaaacgacggccagttaggtaggaagacagggctgc

SEQ ID NO: 80294 - DNA, 38 bp, Artificial Sequence
  primer
gtaaaacgacggccagttccatcaaggaccacacaaac

SEQ ID NO: 80295 - DNA, 20 bp, Artificial Sequence
  primer
taaccaccagaggccaaagg

SEQ ID NO: 80296 - DNA, 20 bp, Artificial Sequence
  primer
atgagcaagtcagcacccac

SEQ ID NO: 80297 - DNA, 24 bp, Artificial Sequence
  primer
agaggtacaagtgagggttctgtg

SEQ ID NO: 80298 - DNA, 21 bp, Artificial Sequence
  primer
aagaatcagtcatgtcgctgc

SEQ ID NO: 80299 - DNA, 38 bp, Artificial Sequence
  primer
gtaaaacgacggccagttcaaggccaccatttaggaag

SEQ ID NO: 80300 - DNA, 21 bp, Artificial Sequence
  primer
acagtgtcctcaaactggctg

SEQ ID NO: 80301 - DNA, 38 bp, Artificial Sequence
  primer
gtaaaacgacggccagtcagtgggagactgttacgcag

SEQ ID NO: 80302 - DNA, 21 bp, Artificial Sequence
  primer
aaacgacacttcgagtcctgg

SEQ ID NO: 80303 - DNA, 19 bp, Artificial Sequence
  primer
ctccaatgaagcggtcctg

SEQ ID NO: 80304 - DNA, 21 bp, Artificial Sequence
  primer
aagagtggtcagggagctacg

SEQ ID NO: 80305 - DNA, 21 bp, Artificial Sequence
  primer
atatgccagagccatgcaaag

SEQ ID NO: 80306 - DNA, 21 bp, Artificial Sequence
  primer
tcctgaaggtcttatttcggg

SEQ ID NO: 80307 - DNA, 21 bp, Artificial Sequence
  primer
tatttccatcctgctgatccc

SEQ ID NO: 80308 - DNA, 37 bp, Artificial Sequence
  primer
gtaaaacgacggccagtatgttgcctgagctcctagc

SEQ ID NO: 80309 - DNA, 21 bp, Artificial Sequence
  primer
tgatttctgtggttcagctcc

SEQ ID NO: 80310 - DNA, 21 bp, Artificial Sequence
  primer
acttgttcacctgtggagctg

SEQ ID NO: 80311 - DNA, 19 bp, Artificial Sequence
  primer
ctcactagccagcaagggc

SEQ ID NO: 80312 - DNA, 38 bp, Artificial Sequence
  primer
gtaaaacgacggccagtctaagcttgacaccctccctg

SEQ ID NO: 80313 - DNA, 21 bp, Artificial Sequence
  primer
ctatgcccttgggaatgaaag

SEQ ID NO: 80314 - DNA, 37 bp, Artificial Sequence
  primer
gtaaaacgacggccagtaaccctgtgtgaactgaccg

SEQ ID NO: 80315 - DNA, 21 bp, Artificial Sequence
  primer
tctatcctcggaggtgtgagc

SEQ ID NO: 80316 - DNA, 38 bp, Artificial Sequence
  primer
gtaaaacgacggccagtcctgtcccagaaactcaaacc

SEQ ID NO: 80317 - DNA, 19 bp, Artificial Sequence
  primer
agcatcgctgagcactgtc

SEQ ID NO: 80318 - DNA, 20 bp, Artificial Sequence
  primer
ttgattgtcaaggtctcggc

SEQ ID NO: 80319 - DNA, 21 bp, Artificial Sequence
  primer
ctctctgagcttaagtggccc

SEQ ID NO: 80320 - DNA, 21 bp, Artificial Sequence
  primer
actaaagccaggaggagcctg

SEQ ID NO: 80321 - DNA, 21 bp, Artificial Sequence
  primer
taggtgggtacatggtgaggg

SEQ ID NO: 80322 - DNA, 38 bp, Artificial Sequence
  primer
gtaaaacgacggccagtcttctctgtctccttgacccg

SEQ ID NO: 80323 - DNA, 21 bp, Artificial Sequence
  primer
tgtgacacccaacagaggaag

SEQ ID NO: 80324 - DNA, 21 bp, Artificial Sequence
  primer
actccaagtccggtcctgttc

SEQ ID NO: 80325 - DNA, 21 bp, Artificial Sequence
  primer
cccaggaaggtctcggactac

SEQ ID NO: 80326 - DNA, 20 bp, Artificial Sequence
  primer
actccagccttcgaggattc

SEQ ID NO: 80327 - DNA, 21 bp, Artificial Sequence
  primer
agctgctgcttcagggtattc

SEQ ID NO: 80328 - DNA, 38 bp, Artificial Sequence
  primer
gtaaaacgacggccagtcagatgtgactcccagaaacg

SEQ ID NO: 80329 - DNA, 37 bp, Artificial Sequence
  primer
gtaaaacgacggccagtactccagcccagtcacacac

SEQ ID NO: 80330 - DNA, 38 bp, Artificial Sequence
  primer
gtaaaacgacggccagtagaaagctgctcgttcacctg

SEQ ID NO: 80331 - DNA, 20 bp, Artificial Sequence
  primer
cctgtctctgcatctcctgg

SEQ ID NO: 80332 - DNA, 21 bp, Artificial Sequence
  primer
ccctggtcacttggtacttgg

SEQ ID NO: 80333 - DNA, 21 bp, Artificial Sequence
  primer
aaacaacggcctcctttactg

SEQ ID NO: 80334 - DNA, 21 bp, Artificial Sequence
  primer
cgagtaaggagtcagggatgg

SEQ ID NO: 80335 - DNA, 43 bp, Artificial Sequence
  primer
gtaaaacgacggccagttttagtacaatcatggaagacaggac

SEQ ID NO: 80336 - DNA, 24 bp, Artificial Sequence
  primer
tttaggacatcattattcactggc

SEQ ID NO: 80337 - DNA, 39 bp, Artificial Sequence
  primer
gtaaaacgacggccagtgcttcatcacaacctagacctg

SEQ ID NO: 80338 - DNA, 24 bp, Artificial Sequence
  primer
tttagcagaaatgcttaaagaggt

SEQ ID NO: 80339 - DNA, 41 bp, Artificial Sequence
  primer
gtaaaacgacggccagttcagaaagtttaaggcatcctgtt

SEQ ID NO: 80340 - DNA, 19 bp, Artificial Sequence
  primer
aatgggtaggctgcgaatg

SEQ ID NO: 80341 - DNA, 39 bp, Artificial Sequence
  primer
gtaaaacgacggccagtcctcatggtgaaatcgtgaatc

SEQ ID NO: 80342 - DNA, 21 bp, Artificial Sequence
  primer
ggagctagagggtgctctttc

SEQ ID NO: 80343 - DNA, 22 bp, Artificial Sequence
  primer
ttaagtctgagttctgccctgg

SEQ ID NO: 80344 - DNA, 21 bp, Artificial Sequence
  primer
gagcctcttcctttctctggg

SEQ ID NO: 80345 - DNA, 36 bp, Artificial Sequence
  primer
gtaaaacgacggccagtttggacttgtttccctggc

SEQ ID NO: 80346 - DNA, 20 bp, Artificial Sequence
  primer
cacttgctttctcctgccac

SEQ ID NO: 80347 - DNA, 22 bp, Artificial Sequence
  primer
ggcttctttattacagccaggg

SEQ ID NO: 80348 - DNA, 22 bp, Artificial Sequence
  primer
aactgagattacagcagtcggc

SEQ ID NO: 80349 - DNA, 38 bp, Artificial Sequence
  primer
gtaaaacgacggccagtgcattccatacgtgagaaacc

SEQ ID NO: 80350 - DNA, 22 bp, Artificial Sequence
  primer
ggagaggcaggtgattaagagg

SEQ ID NO: 80351 - DNA, 37 bp, Artificial Sequence
  primer
gtaaaacgacggccagtttgcttgggcatttggatac

SEQ ID NO: 80352 - DNA, 26 bp, Artificial Sequence
  primer
ttcatttgtgatattgaagctctttg

SEQ ID NO: 80353 - DNA, 20 bp, Artificial Sequence
  primer
atgaccaggcatgtgtttcc

SEQ ID NO: 80354 - DNA, 26 bp, Artificial Sequence
  primer
tgtgctttatatcaaacttccattca

SEQ ID NO: 80355 - DNA, 24 bp, Artificial Sequence
  primer
gcactaattatccttcctttccaa

SEQ ID NO: 80356 - DNA, 22 bp, Artificial Sequence
  primer
gaccttgtgtgctaaagagcaa

SEQ ID NO: 80357 - DNA, 39 bp, Artificial Sequence
  primer
gtaaaacgacggccagtggaccaaactttaaaccaatgc

SEQ ID NO: 80358 - DNA, 41 bp, Artificial Sequence
  primer
gtaaaacgacggccagtttctattcactactcaaggctggg

SEQ ID NO: 80359 - DNA, 21 bp, Artificial Sequence
  primer
tcccaatctcaccattcagac

SEQ ID NO: 80360 - DNA, 38 bp, Artificial Sequence
  primer
gtaaaacgacggccagtatctgctgatgaaggattcca

SEQ ID NO: 80361 - DNA, 38 bp, Artificial Sequence
  primer
gtaaaacgacggccagtaatgaacatcaccctttgcag

SEQ ID NO: 80362 - DNA, 38 bp, Artificial Sequence
  primer
gtaaaacgacggccagtggcatgcatacagaatccttc

SEQ ID NO: 80363 - DNA, 39 bp, Artificial Sequence
  primer
gtaaaacgacggccagtttgtgcactgttcactgttcct

SEQ ID NO: 80364 - DNA, 24 bp, Artificial Sequence
  primer
cctgatagccatgtgatatcttcc

SEQ ID NO: 80365 - DNA, 22 bp, Artificial Sequence
  primer
aatacaaccacaggcacattcc

SEQ ID NO: 80366 - DNA, 36 bp, Artificial Sequence
  primer
gtaaaacgacggccagtagctttgcggaatgctctc

SEQ ID NO: 80367 - DNA, 38 bp, Artificial Sequence
  primer
gtaaaacgacggccagtagccctatatctgtgcttggc

SEQ ID NO: 80368 - DNA, 21 bp, Artificial Sequence
  primer
acttggagaagggaagtcacg

SEQ ID NO: 80369 - DNA, 21 bp, Artificial Sequence
  primer
gatgggatgggactcattcag

SEQ ID NO: 80370 - DNA, 38 bp, Artificial Sequence
  primer
gtaaaacgacggccagtcactccacaggagaagggaac

SEQ ID NO: 80371 - DNA, 19 bp, Artificial Sequence
  primer
agccgtttgtttcgtctgg

SEQ ID NO: 80372 - DNA, 21 bp, Artificial Sequence
  primer
ctcaagcaatccttccacctc

SEQ ID NO: 80373 - DNA, 38 bp, Artificial Sequence
  primer
gtaaaacgacggccagttgagccatgactatgccactg

SEQ ID NO: 80374 - DNA, 24 bp, Artificial Sequence
  primer
gaaaggtgaaagtctctcaaccag

SEQ ID NO: 80375 - DNA, 35 bp, Artificial Sequence
  primer
gtaaaacgacggccagtctctggagtgctgccctg

SEQ ID NO: 80376 - DNA, 19 bp, Artificial Sequence
  primer
atgctgcctgggctctaag

SEQ ID NO: 80377 - DNA, 23 bp, Artificial Sequence
  primer
ggagccggttgtagaactctaag

SEQ ID NO: 80378 - DNA, 20 bp, Artificial Sequence
  primer
aagaccagcctaggaaaccc

SEQ ID NO: 80379 - DNA, 21 bp, Artificial Sequence
  primer
ctcaaaggatcctcccacctc

SEQ ID NO: 80380 - DNA, 35 bp, Artificial Sequence
  primer
gtaaaacgacggccagttacccgccttagcctccc

SEQ ID NO: 80381 - DNA, 19 bp, Artificial Sequence
  primer
catgtgccactatgcccag

SEQ ID NO: 80382 - DNA, 38 bp, Artificial Sequence
  primer
gtaaaacgacggccagtattggttctgggtgaaagtgc

SEQ ID NO: 80383 - DNA, 38 bp, Artificial Sequence
  primer
gtaaaacgacggccagtcaaattccttgtgagtggtgc

SEQ ID NO: 80384 - DNA, 21 bp, Artificial Sequence
  primer
tggaagatttggctctcttgc

SEQ ID NO: 80385 - DNA, 21 bp, Artificial Sequence
  primer
aataccttcttcgtggcttgg

SEQ ID NO: 80386 - DNA, 38 bp, Artificial Sequence
  primer
gtaaaacgacggccagtcggcgatacctacacaaactg

SEQ ID NO: 80387 - DNA, 38 bp, Artificial Sequence
  primer
gtaaaacgacggccagtactgagaatgaaatctggccc

SEQ ID NO: 80388 - DNA, 20 bp, Artificial Sequence
  primer
tttgttgaccgaaatcctcg

SEQ ID NO: 80389 - DNA, 38 bp, Artificial Sequence
  primer
gtaaaacgacggccagttattgcacgttgaaggtagcc

SEQ ID NO: 80390 - DNA, 38 bp, Artificial Sequence
  primer
gtaaaacgacggccagtatctttgtttcgattgggtgc

SEQ ID NO: 80391 - DNA, 21 bp, Artificial Sequence
  primer
agtttacggtggcgatacctg

SEQ ID NO: 80392 - DNA, 21 bp, Artificial Sequence
  primer
cattacgtacttggcattggg

SEQ ID NO: 80393 - DNA, 21 bp, Artificial Sequence
  primer
atccttggcaccaaatctctg

SEQ ID NO: 80394 - DNA, 21 bp, Artificial Sequence
  primer
atggcatgtggtgttccttag

SEQ ID NO: 80395 - DNA, 38 bp, Artificial Sequence
  primer
gtaaaacgacggccagtgtaagccagcacactgacctc

SEQ ID NO: 80396 - DNA, 21 bp, Artificial Sequence
  primer
gcccaagtacagaagaggcac

SEQ ID NO: 80397 - DNA, 38 bp, Artificial Sequence
  primer
gtaaaacgacggccagttcagcaggaatttcccatagc

SEQ ID NO: 80398 - DNA, 38 bp, Artificial Sequence
  primer
gtaaaacgacggccagtgagagaaggtcctgttcctgc

SEQ ID NO: 80399 - DNA, 38 bp, Artificial Sequence
  primer
gtaaaacgacggccagtggtgtctcccatatcgctgtc

SEQ ID NO: 80400 - DNA, 21 bp, Artificial Sequence
  primer
aatgtcttcagctgctttccc

SEQ ID NO: 80401 - DNA, 20 bp, Artificial Sequence
  primer
ggacccattctatgcccatc

SEQ ID NO: 80402 - DNA, 21 bp, Artificial Sequence
  primer
aggcatacggagaagcgtaag

SEQ ID NO: 80403 - DNA, 38 bp, Artificial Sequence
  primer
gtaaaacgacggccagttctgaaacttgtccggatgtg

SEQ ID NO: 80404 - DNA, 38 bp, Artificial Sequence
  primer
gtaaaacgacggccagtaagaacagcatcctctgtccc

SEQ ID NO: 80405 - DNA, 38 bp, Artificial Sequence
  primer
gtaaaacgacggccagtgcgtagggcaggtagtagtcg

SEQ ID NO: 80406 - DNA, 37 bp, Artificial Sequence
  primer
gtaaaacgacggccagtttctccagcatgtcctccag

SEQ ID NO: 80407 - DNA, 36 bp, Artificial Sequence
  primer
gtaaaacgacggccagtgggtctcccaaacgcagac

SEQ ID NO: 80408 - DNA, 39 bp, Artificial Sequence
  primer
gtaaaacgacggccagtgggacatcagtatctgagcagc

SEQ ID NO: 80409 - DNA, 38 bp, Artificial Sequence
  primer
gtaaaacgacggccagtgtgtacaaaggcatcgtcctg

SEQ ID NO: 80410 - DNA, 38 bp, Artificial Sequence
  primer
gtaaaacgacggccagtagagtcagcactggagccttg

SEQ ID NO: 80411 - DNA, 38 bp, Artificial Sequence
  primer
gtaaaacgacggccagtgccaaggagtggcttaagttg

SEQ ID NO: 80412 - DNA, 21 bp, Artificial Sequence
  primer
gcttccattagcttcccattc

SEQ ID NO: 80413 - DNA, 36 bp, Artificial Sequence
  primer
gtaaaacgacggccagtgtagttgaggccggtgtcg

SEQ ID NO: 80414 - DNA, 21 bp, Artificial Sequence
  primer
gctgtaggtgttgtcgtcgtc

SEQ ID NO: 80415 - DNA, 36 bp, Artificial Sequence
  primer
gtaaaacgacggccagtatccctttccctggctctc

SEQ ID NO: 80416 - DNA, 37 bp, Artificial Sequence
  primer
gtaaaacgacggccagtccttctcccgatctgtaggg

SEQ ID NO: 80417 - DNA, 38 bp, Artificial Sequence
  primer
gtaaaacgacggccagtatactttcaggtggcccagtg

SEQ ID NO: 80418 - DNA, 20 bp, Artificial Sequence
  primer
gtgatggcatagatggtggg

SEQ ID NO: 80419 - DNA, 36 bp, Artificial Sequence
  primer
gtaaaacgacggccagtggctggcctttacctcctg

SEQ ID NO: 80420 - DNA, 36 bp, Artificial Sequence
  primer
gtaaaacgacggccagtcgcacggagaactgagaac

SEQ ID NO: 80421 - DNA, 22 bp, Artificial Sequence
  primer
gcttccttcatctagtgcatcg

SEQ ID NO: 80422 - DNA, 37 bp, Artificial Sequence
  primer
gtaaaacgacggccagtcttctctgtccgagtgtgcc

SEQ ID NO: 80423 - DNA, 21 bp, Artificial Sequence
  primer
ggtatcttgcagtatcggcac

SEQ ID NO: 80424 - DNA, 20 bp, Artificial Sequence
  primer
gagcggatgaatggtgtttg

SEQ ID NO: 80425 - DNA, 21 bp, Artificial Sequence
  primer
ggaacaactcctagcccagtg

SEQ ID NO: 80426 - DNA, 22 bp, Artificial Sequence
  primer
aagtagacgactccttgggtcc

SEQ ID NO: 80427 - DNA, 37 bp, Artificial Sequence
  primer
gtaaaacgacggccagtggcaacactgctaaccaagg

SEQ ID NO: 80428 - DNA, 38 bp, Artificial Sequence
  primer
gtaaaacgacggccagtcagggtctcactgtacctccc

SEQ ID NO: 80429 - DNA, 21 bp, Artificial Sequence
  primer
gccaacctgactcaacacaag

SEQ ID NO: 80430 - DNA, 38 bp, Artificial Sequence
  primer
gtaaaacgacggccagttaagcagtgaataattgcggc

SEQ ID NO: 80431 - DNA, 38 bp, Artificial Sequence
  primer
gtaaaacgacggccagtttcaggatgtgatgggtgttc

SEQ ID NO: 80432 - DNA, 38 bp, Artificial Sequence
  primer
gtaaaacgacggccagttggacctggtcagtgatatgg

SEQ ID NO: 80433 - DNA, 21 bp, Artificial Sequence
  primer
aattgaagggtttagaggccc

SEQ ID NO: 80434 - DNA, 21 bp, Artificial Sequence
  primer
ggaggacttgatcaccagcag

SEQ ID NO: 80435 - DNA, 38 bp, Artificial Sequence
  primer
gtaaaacgacggccagtatggactgacgaggacttctg

SEQ ID NO: 80436 - DNA, 21 bp, Artificial Sequence
  primer
agcaggtctcggtagaagcag

SEQ ID NO: 80437 - DNA, 38 bp, Artificial Sequence
  primer
gtaaaacgacggccagtacaaaggtctcagcttcctgg

SEQ ID NO: 80438 - DNA, 21 bp, Artificial Sequence
  primer
ttatagctcactgcagcctgg

SEQ ID NO: 80439 - DNA, 38 bp, Artificial Sequence
  primer
gtaaaacgacggccagtggagcaagaaggtatccttgg

SEQ ID NO: 80440 - DNA, 38 bp, Artificial Sequence
  primer
gtaaaacgacggccagtagcgtcaggttgaagaagtcc

SEQ ID NO: 80441 - DNA, 38 bp, Artificial Sequence
  primer
gtaaaacgacggccagttcagcatcttccatgatagcc

SEQ ID NO: 80442 - DNA, 37 bp, Artificial Sequence
  primer
gtaaaacgacggccagtaggcatcaatttcgcatcac

SEQ ID NO: 80443 - DNA, 22 bp, Artificial Sequence
  primer
tgtacctttgatcttcccaagc

SEQ ID NO: 80444 - DNA, 37 bp, Artificial Sequence
  primer
gtaaaacgacggccagtctttggcagctacatcaccg

SEQ ID NO: 80445 - DNA, 38 bp, Artificial Sequence
  primer
gtaaaacgacggccagtattcttccaaaggtcctggag

SEQ ID NO: 80446 - DNA, 22 bp, Artificial Sequence
  primer
tccaggtttgactcagtgacag

SEQ ID NO: 80447 - DNA, 42 bp, Artificial Sequence
  primer
gtaaaacgacggccagttttgaaatgaacttaggcaatgaag

SEQ ID NO: 80448 - DNA, 36 bp, Artificial Sequence
  primer
gtaaaacgacggccagtacaggtgcagcaggttgtc

SEQ ID NO: 80449 - DNA, 35 bp, Artificial Sequence
  primer
gtaaaacgacggccagtaacaccgacacggacagc

SEQ ID NO: 80450 - DNA, 18 bp, Artificial Sequence
  primer
gcacggctgcctcgtaac

SEQ ID NO: 80451 - DNA, 38 bp, Artificial Sequence
  primer
gtaaaacgacggccagtcaccatgtccacatcgatcac

SEQ ID NO: 80452 - DNA, 37 bp, Artificial Sequence
  primer
gtaaaacgacggccagtcataatagaagggccgcacc

SEQ ID NO: 80453 - DNA, 38 bp, Artificial Sequence
  primer
gtaaaacgacggccagtgccactcctcataactccctg

SEQ ID NO: 80454 - DNA, 21 bp, Artificial Sequence
  primer
ccagtgtttcaacaccacagc

SEQ ID NO: 80455 - DNA, 36 bp, Artificial Sequence
  primer
gtaaaacgacggccagtcgtcgctcgtagtgctcag

SEQ ID NO: 80456 - DNA, 20 bp, Artificial Sequence
  primer
tgagcgtgaggttgaggaag

SEQ ID NO: 80457 - DNA, 18 bp, Artificial Sequence
  primer
gagccctccatgagctgg

SEQ ID NO: 80458 - DNA, 20 bp, Artificial Sequence
  primer
atgagcagcatctcgtaggg

SEQ ID NO: 80459 - DNA, 38 bp, Artificial Sequence
  primer
gtaaaacgacggccagtgagatggagccaggatgtagg

SEQ ID NO: 80460 - DNA, 18 bp, Artificial Sequence
  primer
gcgtaccgcgaacatctc

SEQ ID NO: 80461 - DNA, 21 bp, Artificial Sequence
  primer
tggcggtagaagagaaactgc

SEQ ID NO: 80462 - DNA, 21 bp, Artificial Sequence
  primer
gtgatgaccgacttgacaacc

SEQ ID NO: 80463 - DNA, 38 bp, Artificial Sequence
  primer
gtaaaacgacggccagtttgttgtctttcctgcgaatg

SEQ ID NO: 80464 - DNA, 20 bp, Artificial Sequence
  primer
cctggcctgtcctagtagcc

SEQ ID NO: 80465 - DNA, 38 bp, Artificial Sequence
  primer
gtaaaacgacggccagtaggtccctttctggctacctg

SEQ ID NO: 80466 - DNA, 19 bp, Artificial Sequence
  primer
aggaaggtcggtgaggagg

SEQ ID NO: 80467 - DNA, 21 bp, Artificial Sequence
  primer
aggaaacttccctccgaacag

SEQ ID NO: 80468 - DNA, 21 bp, Artificial Sequence
  primer
ccacacctggcctctactagg

SEQ ID NO: 80469 - DNA, 36 bp, Artificial Sequence
  primer
gtaaaacgacggccagtagacatgcgcgactgtgag

SEQ ID NO: 80470 - DNA, 21 bp, Artificial Sequence
  primer
gatccctctccgtgacttgac

SEQ ID NO: 80471 - DNA, 38 bp, Artificial Sequence
  primer
gtaaaacgacggccagtttgatggcatgtgagtgaagg

SEQ ID NO: 80472 - DNA, 21 bp, Artificial Sequence
  primer
tttcctaaatctgcagagccc

SEQ ID NO: 80473 - DNA, 18 bp, Artificial Sequence
  primer
cagagcctgaccacagcc

SEQ ID NO: 80474 - DNA, 21 bp, Artificial Sequence
  primer
agtcctcgtggcaatagaagc

SEQ ID NO: 80475 - DNA, 20 bp, Artificial Sequence
  primer
gactgcagaactgaccaggg

SEQ ID NO: 80476 - DNA, 38 bp, Artificial Sequence
  primer
gtaaaacgacggccagtcacacagtcattgcacagcag

SEQ ID NO: 80477 - DNA, 23 bp, Artificial Sequence
  primer
aaaggctggaaattaatgagctg

SEQ ID NO: 80478 - DNA, 18 bp, Artificial Sequence
  primer
gacccaagaccgaaaggg

SEQ ID NO: 80479 - DNA, 44 bp, Artificial Sequence
  primer
gtaaaacgacggccagtctatcttataggttgcattagggattc

SEQ ID NO: 80480 - DNA, 20 bp, Artificial Sequence
  primer
catctgagaggtgtttgccc

SEQ ID NO: 80481 - DNA, 35 bp, Artificial Sequence
  primer
gtaaaacgacggccagtgctggtctccaatgcctg

SEQ ID NO: 80482 - DNA, 42 bp, Artificial Sequence
  primer
gtaaaacgacggccagttcatgattaagaaccaatcatcaag

SEQ ID NO: 80483 - DNA, 25 bp, Artificial Sequence
  primer
tttccaactctctgaaattgctaac

SEQ ID NO: 80484 - DNA, 22 bp, Artificial Sequence
  primer
tccagatcttaccacacactgc

SEQ ID NO: 80485 - DNA, 39 bp, Artificial Sequence
  primer
gtaaaacgacggccagtcctaattcgctggagtgctatg

SEQ ID NO: 80486 - DNA, 21 bp, Artificial Sequence
  primer
cagcagaagcccaaaccttag

SEQ ID NO: 80487 - DNA, 38 bp, Artificial Sequence
  primer
gtaaaacgacggccagtttgaaatggtgcaatgaggag

SEQ ID NO: 80488 - DNA, 24 bp, Artificial Sequence
  primer
gcccttagtttgaaagaaccaatc

SEQ ID NO: 80489 - DNA, 41 bp, Artificial Sequence
  primer
gtaaaacgacggccagttgttccttaagaggattggttcag

SEQ ID NO: 80490 - DNA, 38 bp, Artificial Sequence
  primer
gtaaaacgacggccagtatcccagtgccagagacctac

SEQ ID NO: 80491 - DNA, 22 bp, Artificial Sequence
  primer
tgtttcccgaatatgtgaagag

SEQ ID NO: 80492 - DNA, 36 bp, Artificial Sequence
  primer
gtaaaacgacggccagtacagcacagtgggatgagg

SEQ ID NO: 80493 - DNA, 37 bp, Artificial Sequence
  primer
gtaaaacgacggccagtgaaatcgggtctgaggatgg

SEQ ID NO: 80494 - DNA, 38 bp, Artificial Sequence
  primer
gtaaaacgacggccagtctcctcccagagtagcagagg

SEQ ID NO: 80495 - DNA, 21 bp, Artificial Sequence
  primer
gcttgagcccagaagtttgag

SEQ ID NO: 80496 - DNA, 21 bp, Artificial Sequence
  primer
tgaaaggatccctaggaagga

SEQ ID NO: 80497 - DNA, 21 bp, Artificial Sequence
  primer
atggagagatgagctggttcc

SEQ ID NO: 80498 - DNA, 25 bp, Artificial Sequence
  primer
agagatgctaacagtaatgagcagc

SEQ ID NO: 80499 - DNA, 38 bp, Artificial Sequence
  primer
gtaaaacgacggccagtacacacggaagctctggagtc

SEQ ID NO: 80500 - DNA, 21 bp, Artificial Sequence
  primer
aatgatggtgaacttggctcc

SEQ ID NO: 80501 - DNA, 38 bp, Artificial Sequence
  primer
gtaaaacgacggccagtaaggtcccactcttgttctgg

SEQ ID NO: 80502 - DNA, 38 bp, Artificial Sequence
  primer
gtaaaacgacggccagtgtctctcaagccttctccacc

SEQ ID NO: 80503 - DNA, 21 bp, Artificial Sequence
  primer
gaagatgggaaagtcagcctc

SEQ ID NO: 80504 - DNA, 18 bp, Artificial Sequence
  primer
aggcagctctcctggctc

SEQ ID NO: 80505 - DNA, 38 bp, Artificial Sequence
  primer
gtaaaacgacggccagtggtcacgtgatttggatcttg

SEQ ID NO: 80506 - DNA, 22 bp, Artificial Sequence
  primer
gatgtacgactccacctggttc

SEQ ID NO: 80507 - DNA, 38 bp, Artificial Sequence
  primer
gtaaaacgacggccagttactaccgggtcaaacacagg

SEQ ID NO: 80508 - DNA, 38 bp, Artificial Sequence
  primer
gtaaaacgacggccagtcaaagttccagctatttccgc

SEQ ID NO: 80509 - DNA, 21 bp, Artificial Sequence
  primer
ggatcaaatcagtgcaagcag

SEQ ID NO: 80510 - DNA, 21 bp, Artificial Sequence
  primer
aggactcctggctctaccctg

SEQ ID NO: 80511 - DNA, 20 bp, Artificial Sequence
  primer
ctgtgatttgctggtcccac

SEQ ID NO: 80512 - DNA, 19 bp, Artificial Sequence
  primer
gagtgaaggccacaggagg

SEQ ID NO: 80513 - DNA, 21 bp, Artificial Sequence
  primer
tactgtgctttgggactctgc

SEQ ID NO: 80514 - DNA, 36 bp, Artificial Sequence
  primer
gtaaaacgacggccagtccctgaacagtagcagggc

SEQ ID NO: 80515 - DNA, 38 bp, Artificial Sequence
  primer
gtaaaacgacggccagtacccgagtccttaccaagcag

SEQ ID NO: 80516 - DNA, 36 bp, Artificial Sequence
  primer
gtaaaacgacggccagtagcctgagggaatgtctgg

SEQ ID NO: 80517 - DNA, 21 bp, Artificial Sequence
  primer
gctgtaagtgccaggtgtctg

SEQ ID NO: 80518 - DNA, 21 bp, Artificial Sequence
  primer
tgctccagagcttaaagaggc

SEQ ID NO: 80519 - DNA, 38 bp, Artificial Sequence
  primer
gtaaaacgacggccagtcatctgagggtcagtccttgg

SEQ ID NO: 80520 - DNA, 21 bp, Artificial Sequence
  primer
ctgaccacctcaatttccctc

SEQ ID NO: 80521 - DNA, 38 bp, Artificial Sequence
  primer
gtaaaacgacggccagtctggtcatctggaaagccatc

SEQ ID NO: 80522 - DNA, 37 bp, Artificial Sequence
  primer
gtaaaacgacggccagtgggtccagatgccatttctc

SEQ ID NO: 80523 - DNA, 21 bp, Artificial Sequence
  primer
gtccatccacatatccacacg

SEQ ID NO: 80524 - DNA, 18 bp, Artificial Sequence
  primer
ggtccagggaggatccag

SEQ ID NO: 80525 - DNA, 20 bp, Artificial Sequence
  primer
gcgtgagatcttcatcccag

SEQ ID NO: 80526 - DNA, 38 bp, Artificial Sequence
  primer
gtaaaacgacggccagtagtcaaggatgcttggaggtc

SEQ ID NO: 80527 - DNA, 38 bp, Artificial Sequence
  primer
gtaaaacgacggccagtaacagagcccagtctcagtcc

SEQ ID NO: 80528 - DNA, 37 bp, Artificial Sequence
  primer
gtaaaacgacggccagtccactccatgcctccctatc

SEQ ID NO: 80529 - DNA, 22 bp, Artificial Sequence
  primer
gatgaaagtgaagtggcatgtg

SEQ ID NO: 80530 - DNA, 19 bp, Artificial Sequence
  primer
aatccgcttggctctcctc

SEQ ID NO: 80531 - DNA, 38 bp, Artificial Sequence
  primer
gtaaaacgacggccagtgaagggctatggtcaaaggtg

SEQ ID NO: 80532 - DNA, 38 bp, Artificial Sequence
  primer
gtaaaacgacggccagttacggaccaggaggtcaaatc

SEQ ID NO: 80533 - DNA, 21 bp, Artificial Sequence
  primer
agaacagtgaggagctgaggg

SEQ ID NO: 80534 - DNA, 25 bp, Artificial Sequence
  primer
aaccaagtggtacacttctgagttt

SEQ ID NO: 80535 - DNA, 24 bp, Artificial Sequence
  primer
ccacactctgagacaagaatttcc

SEQ ID NO: 80536 - DNA, 20 bp, Artificial Sequence
  primer
gcttgttccacccagtcttg

SEQ ID NO: 80537 - DNA, 38 bp, Artificial Sequence
  primer
gtaaaacgacggccagttgctggactggcatctaaagg

SEQ ID NO: 80538 - DNA, 38 bp, Artificial Sequence
  primer
gtaaaacgacggccagtagggttcagtgcaccactttc

SEQ ID NO: 80539 - DNA, 25 bp, Artificial Sequence
  primer
tgagctgtaacaggttcttaatgtg

SEQ ID NO: 80540 - DNA, 20 bp, Artificial Sequence
  primer
ggagttctcgagcagaggag

SEQ ID NO: 80541 - DNA, 39 bp, Artificial Sequence
  primer
gtaaaacgacggccagtaaactcagccaaatccctcttt

SEQ ID NO: 80542 - DNA, 21 bp, Artificial Sequence
  primer
tcacaaaccctgtttccaatg

SEQ ID NO: 80543 - DNA, 21 bp, Artificial Sequence
  primer
tttgcatggaatggtaggatg

SEQ ID NO: 80544 - DNA, 21 bp, Artificial Sequence
  primer
acagaattgctctctgctccc

SEQ ID NO: 80545 - DNA, 23 bp, Artificial Sequence
  primer
caaacagtgctccaattgtatgg

SEQ ID NO: 80546 - DNA, 21 bp, Artificial Sequence
  primer
ccatcacagctggtcaatttc

SEQ ID NO: 80547 - DNA, 37 bp, Artificial Sequence
  primer
gtaaaacgacggccagtcccacactgttctgcctcag

SEQ ID NO: 80548 - DNA, 21 bp, Artificial Sequence
  primer
tcttgctgtgtagaccctccc

SEQ ID NO: 80549 - DNA, 21 bp, Artificial Sequence
  primer
tgaagcagtttgacacgtctg

SEQ ID NO: 80550 - DNA, 38 bp, Artificial Sequence
  primer
gtaaaacgacggccagtaatctaccaggacgcttaggg

SEQ ID NO: 80551 - DNA, 37 bp, Artificial Sequence
  primer
gtaaaacgacggccagtgctcctgctgcactcaaatc

SEQ ID NO: 80552 - DNA, 22 bp, Artificial Sequence
  primer
caaagagaatgaaccgagcatc

SEQ ID NO: 80553 - DNA, 18 bp, Artificial Sequence
  primer
agaatggcgtgaacctgg

SEQ ID NO: 80554 - DNA, 39 bp, Artificial Sequence
  primer
gtaaaacgacggccagtttagggacataacgctgctacc

SEQ ID NO: 80555 - DNA, 38 bp, Artificial Sequence
  primer
gtaaaacgacggccagtcctcaaacatatcccatccca

SEQ ID NO: 80556 - DNA, 24 bp, Artificial Sequence
  primer
cgggctctttaacgtaaatatgtg

SEQ ID NO: 80557 - DNA, 37 bp, Artificial Sequence
  primer
gtaaaacgacggccagtagccaatcactgacctccac

SEQ ID NO: 80558 - DNA, 38 bp, Artificial Sequence
  primer
gtaaaacgacggccagtcccacagggacagacagaaac

SEQ ID NO: 80559 - DNA, 38 bp, Artificial Sequence
  primer
gtaaaacgacggccagttagatgtggtgccggatcttc

SEQ ID NO: 80560 - DNA, 37 bp, Artificial Sequence
  primer
gtaaaacgacggccagttgtcacacccagtgagaggg

SEQ ID NO: 80561 - DNA, 20 bp, Artificial Sequence
  primer
gctgctcccaagttctcctg

SEQ ID NO: 80562 - DNA, 38 bp, Artificial Sequence
  primer
gtaaaacgacggccagtgatcagaatcagggccatctc

SEQ ID NO: 80563 - DNA, 21 bp, Artificial Sequence
  primer
aggagaacttggtgaaagccc

SEQ ID NO: 80564 - DNA, 38 bp, Artificial Sequence
  primer
gtaaaacgacggccagtattgcgtagcttgctgtcttg

SEQ ID NO: 80565 - DNA, 21 bp, Artificial Sequence
  primer
ccttccttcatcatgtcctcc

SEQ ID NO: 80566 - DNA, 21 bp, Artificial Sequence
  primer
tccctttccactaggcatgag

SEQ ID NO: 80567 - DNA, 21 bp, Artificial Sequence
  primer
aaggaccatactgcccacttc

SEQ ID NO: 80568 - DNA, 37 bp, Artificial Sequence
  primer
gtaaaacgacggccagttctccacagcatctggaacc

SEQ ID NO: 80569 - DNA, 21 bp, Artificial Sequence
  primer
gccagggaagaacacagactc

SEQ ID NO: 80570 - DNA, 21 bp, Artificial Sequence
  primer
gcaagtctctccaaccactcc

SEQ ID NO: 80571 - DNA, 18 bp, Artificial Sequence
  primer
ctacctgcccagcccttg

SEQ ID NO: 80572 - DNA, 21 bp, Artificial Sequence
  primer
tggaagtaaggtatggccctg

SEQ ID NO: 80573 - DNA, 36 bp, Artificial Sequence
  primer
gtaaaacgacggccagtggttctgggagcagtggtg

SEQ ID NO: 80574 - DNA, 21 bp, Artificial Sequence
  primer
ggaaattccacgttagggtcc

SEQ ID NO: 80575 - DNA, 21 bp, Artificial Sequence
  primer
cacacacagacaaatccagcc

SEQ ID NO: 80576 - DNA, 21 bp, Artificial Sequence
  primer
aactctgggcaaagagcagac

SEQ ID NO: 80577 - DNA, 21 bp, Artificial Sequence
  primer
gctgggaccttggttactcag

SEQ ID NO: 80578 - DNA, 38 bp, Artificial Sequence
  primer
gtaaaacgacggccagtccattggagaaataaggctgc

SEQ ID NO: 80579 - DNA, 22 bp, Artificial Sequence
  primer
agctgaggtgggatgttaagtc

SEQ ID NO: 80580 - DNA, 38 bp, Artificial Sequence
  primer
gtaaaacgacggccagtctgggctctttccatgctaac

SEQ ID NO: 80581 - DNA, 21 bp, Artificial Sequence
  primer
ttgggagcatcattgtctgat

SEQ ID NO: 80582 - DNA, 27 bp, Artificial Sequence
  primer
tgagtgatcaaattcttagtgaagagg

SEQ ID NO: 80583 - DNA, 38 bp, Artificial Sequence
  primer
gtaaaacgacggccagtgcacccacagaaccaatatcc

SEQ ID NO: 80584 - DNA, 21 bp, Artificial Sequence
  primer
gccactgacaaagattccaac

SEQ ID NO: 80585 - DNA, 39 bp, Artificial Sequence
  primer
gtaaaacgacggccagtagatccaccgacaataccaaac

SEQ ID NO: 80586 - DNA, 23 bp, Artificial Sequence
  primer
cccaccgtctcactaccaaatag

SEQ ID NO: 80587 - DNA, 24 bp, Artificial Sequence
  primer
gcagcagtcaattgatacatttct

SEQ ID NO: 80588 - DNA, 21 bp, Artificial Sequence
  primer
ggctctgctcacagactcatt

SEQ ID NO: 80589 - DNA, 21 bp, Artificial Sequence
  primer
gagatgggatttgaagttggc

SEQ ID NO: 80590 - DNA, 37 bp, Artificial Sequence
  primer
gtaaaacgacggccagtaaccggctcctctctcagtg

SEQ ID NO: 80591 - DNA, 35 bp, Artificial Sequence
  primer
gtaaaacgacggccagtggtggctctgccctgaag

SEQ ID NO: 80592 - DNA, 21 bp, Artificial Sequence
  primer
agacagtcttgccagggactc

SEQ ID NO: 80593 - DNA, 38 bp, Artificial Sequence
  primer
gtaaaacgacggccagtgccttctcgaaccttaattcg

SEQ ID NO: 80594 - DNA, 22 bp, Artificial Sequence
  primer
tggagggataatgcatttaagg

SEQ ID NO: 80595 - DNA, 19 bp, Artificial Sequence
  primer
gacggagcaagaccctgtc

SEQ ID NO: 80596 - DNA, 21 bp, Artificial Sequence
  primer
tgggcctcttcaataggaaac

SEQ ID NO: 80597 - DNA, 38 bp, Artificial Sequence
  primer
gtaaaacgacggccagttgagagaaggtcccggtaaag

SEQ ID NO: 80598 - DNA, 19 bp, Artificial Sequence
  primer
gggctagcttgaggcatcc

SEQ ID NO: 80599 - DNA, 21 bp, Artificial Sequence
  primer
acccacttcaccctgtctctc

SEQ ID NO: 80600 - DNA, 21 bp, Artificial Sequence
  primer
aactgattgttgccctccttc

SEQ ID NO: 80601 - DNA, 21 bp, Artificial Sequence
  primer
tggtgtagctttcaggaaggg

SEQ ID NO: 80602 - DNA, 38 bp, Artificial Sequence
  primer
gtaaaacgacggccagtgcaggtcctattacctctgcc

SEQ ID NO: 80603 - DNA, 38 bp, Artificial Sequence
  primer
gtaaaacgacggccagtgtgcagacatcttggctgttg

SEQ ID NO: 80604 - DNA, 20 bp, Artificial Sequence
  primer
gttctggcaagccatacctg

SEQ ID NO: 80605 - DNA, 21 bp, Artificial Sequence
  primer
ctaaactgacagggacccagg

SEQ ID NO: 80606 - DNA, 21 bp, Artificial Sequence
  primer
ggtgccatctgtgtctcctac

SEQ ID NO: 80607 - DNA, 35 bp, Artificial Sequence
  primer
gtaaaacgacggccagtgttccccgctcttctgtg

SEQ ID NO: 80608 - DNA, 35 bp, Artificial Sequence
  primer
gtaaaacgacggccagtgacagctgctgctttggg

SEQ ID NO: 80609 - DNA, 36 bp, Artificial Sequence
  primer
gtaaaacgacggccagttctggctgtcatgctctgg

SEQ ID NO: 80610 - DNA, 37 bp, Artificial Sequence
  primer
gtaaaacgacggccagtccaagactcatgtgtcagcc

SEQ ID NO: 80611 - DNA, 20 bp, Artificial Sequence
  primer
cttccagatggcaggatgac

SEQ ID NO: 80612 - DNA, 38 bp, Artificial Sequence
  primer
gtaaaacgacggccagtccttctattggcatctacggg

SEQ ID NO: 80613 - DNA, 38 bp, Artificial Sequence
  primer
gtaaaacgacggccagttggcgcaatagttcagagatg

SEQ ID NO: 80614 - DNA, 22 bp, Artificial Sequence
  primer
ggagcagtaatatgtgtggctg

SEQ ID NO: 80615 - DNA, 37 bp, Artificial Sequence
  primer
gtaaaacgacggccagttgccatcaagaattgcttcc

SEQ ID NO: 80616 - DNA, 21 bp, Artificial Sequence
  primer
acagagattgaagacgggtgg

SEQ ID NO: 80617 - DNA, 21 bp, Artificial Sequence
  primer
agcagcagcaggacgattaag

SEQ ID NO: 80618 - DNA, 21 bp, Artificial Sequence
  primer
agaggaggaaggagctgtgtg

SEQ ID NO: 80619 - DNA, 18 bp, Artificial Sequence
  primer
gggaccacagagccaagc

SEQ ID NO: 80620 - DNA, 38 bp, Artificial Sequence
  primer
gtaaaacgacggccagtcagaggcaagagcggttattc

SEQ ID NO: 80621 - DNA, 21 bp, Artificial Sequence
  primer
ctgacaggacaggactcatgc

SEQ ID NO: 80622 - DNA, 21 bp, Artificial Sequence
  primer
aaactcctccaagttatgcgg

SEQ ID NO: 80623 - DNA, 38 bp, Artificial Sequence
  primer
gtaaaacgacggccagtgtccggtgcagaaatacttgg

SEQ ID NO: 80624 - DNA, 37 bp, Artificial Sequence
  primer
gtaaaacgacggccagtggtgggaggtgagagaggtc

SEQ ID NO: 80625 - DNA, 21 bp, Artificial Sequence
  primer
ttgctcccttgagacccttag

SEQ ID NO: 80626 - DNA, 20 bp, Artificial Sequence
  primer
agaaactggttcccggagag

SEQ ID NO: 80627 - DNA, 38 bp, Artificial Sequence
  primer
gtaaaacgacggccagtacttcaccaaacacaagagcc

SEQ ID NO: 80628 - DNA, 21 bp, Artificial Sequence
  primer
gaaacctcagcttcctgttcc

SEQ ID NO: 80629 - DNA, 21 bp, Artificial Sequence
  primer
ctgacaggacaggactcatgc

SEQ ID NO: 80630 - DNA, 39 bp, Artificial Sequence
  primer
gtaaaacgacggccagtcagacaacaccagctctcaatg

SEQ ID NO: 80631 - DNA, 20 bp, Artificial Sequence
  primer
ggcccatcttcctgagtagc

SEQ ID NO: 80632 - DNA, 39 bp, Artificial Sequence
  primer
gtaaaacgacggccagttcccttccaaatgtccctaaac

SEQ ID NO: 80633 - DNA, 21 bp, Artificial Sequence
  primer
ccacctgacaaggagactgtg

SEQ ID NO: 80634 - DNA, 38 bp, Artificial Sequence
  primer
gtaaaacgacggccagtttgcatttccttgatacctgc

SEQ ID NO: 80635 - DNA, 38 bp, Artificial Sequence
  primer
gtaaaacgacggccagtttcagacctttcatttggctg

SEQ ID NO: 80636 - DNA, 41 bp, Artificial Sequence
  primer
gtaaaacgacggccagtcaaagaataaagtccatgagggtc

SEQ ID NO: 80637 - DNA, 38 bp, Artificial Sequence
  primer
gtaaaacgacggccagttgataactgcatttggcaagg

SEQ ID NO: 80638 - DNA, 21 bp, Artificial Sequence
  primer
cctgctcacctcacattcttg

SEQ ID NO: 80639 - DNA, 37 bp, Artificial Sequence
  primer
gtaaaacgacggccagtcaaagggagctgatccacag

SEQ ID NO: 80640 - DNA, 30 bp, Artificial Sequence
  primer
agtaattgagcattatatctgacctagaaa

SEQ ID NO: 80641 - DNA, 22 bp, Artificial Sequence
  primer
cagaaatctgagatcccaccac

SEQ ID NO: 80642 - DNA, 39 bp, Artificial Sequence
  primer
gtaaaacgacggccagttcaaggagaaatcatggttgac

SEQ ID NO: 80643 - DNA, 22 bp, Artificial Sequence
  primer
gggacatggcacctagtacatc

SEQ ID NO: 80644 - DNA, 38 bp, Artificial Sequence
  primer
gtaaaacgacggccagtagctctccttggtgtctgtgg

SEQ ID NO: 80645 - DNA, 21 bp, Artificial Sequence
  primer
ctcatctccagacaggcagag

SEQ ID NO: 80646 - DNA, 38 bp, Artificial Sequence
  primer
gtaaaacgacggccagtgtgctgctgagatgtactggg

SEQ ID NO: 80647 - DNA, 21 bp, Artificial Sequence
  primer
cggctcagagaggtctttgtc

SEQ ID NO: 80648 - DNA, 38 bp, Artificial Sequence
  primer
gtaaaacgacggccagtctggttcctgatgttctgtgg

SEQ ID NO: 80649 - DNA, 21 bp, Artificial Sequence
  primer
agcacgtaagaacaatgtggg

SEQ ID NO: 80650 - DNA, 19 bp, Artificial Sequence
  primer
aacttccgcaaagggtgac

SEQ ID NO: 80651 - DNA, 21 bp, Artificial Sequence
  primer
tacaattctcggaggtgttgc

SEQ ID NO: 80652 - DNA, 37 bp, Artificial Sequence
  primer
gtaaaacgacggccagtagatgaacagtgccacaggc

SEQ ID NO: 80653 - DNA, 37 bp, Artificial Sequence
  primer
gtaaaacgacggccagtaaagcattcagtgcctgtgg

SEQ ID NO: 80654 - DNA, 21 bp, Artificial Sequence
  primer
ctggagctaggaaggaacagg

SEQ ID NO: 80655 - DNA, 20 bp, Artificial Sequence
  primer
ccctccaaaggagacagcac

SEQ ID NO: 80656 - DNA, 38 bp, Artificial Sequence
  primer
gtaaaacgacggccagtctggctccgattcatctcttc

SEQ ID NO: 80657 - DNA, 37 bp, Artificial Sequence
  primer
gtaaaacgacggccagtaaccaataacccacgcttcc

SEQ ID NO: 80658 - DNA, 19 bp, Artificial Sequence
  primer
tgggcgacaagagtgaaac

SEQ ID NO: 80659 - DNA, 38 bp, Artificial Sequence
  primer
gtaaaacgacggccagtatcaatgcagaatctgggtcc

SEQ ID NO: 80660 - DNA, 21 bp, Artificial Sequence
  primer
gaatccaggatctgaacccag

SEQ ID NO: 80661 - DNA, 21 bp, Artificial Sequence
  primer
ggtttgctcaggcaataggag

SEQ ID NO: 80662 - DNA, 21 bp, Artificial Sequence
  primer
taccacacaccacgctcctac

SEQ ID NO: 80663 - DNA, 38 bp, Artificial Sequence
  primer
gtaaaacgacggccagtatcaggtaaattccgctccag

SEQ ID NO: 80664 - DNA, 22 bp, Artificial Sequence
  primer
caaatctcaacaagcaacttcg

SEQ ID NO: 80665 - DNA, 38 bp, Artificial Sequence
  primer
gtaaaacgacggccagtcacattaaatgctgtggcctg

SEQ ID NO: 80666 - DNA, 22 bp, Artificial Sequence
  primer
aatagcttgatggccttgtcag

SEQ ID NO: 80667 - DNA, 19 bp, Artificial Sequence
  primer
ccctgcatgtgaacaggtg

SEQ ID NO: 80668 - DNA, 38 bp, Artificial Sequence
  primer
gtaaaacgacggccagtctaacttcccgtacctgaggc

SEQ ID NO: 80669 - DNA, 38 bp, Artificial Sequence
  primer
gtaaaacgacggccagtacgcatgttaaataggcaggg

SEQ ID NO: 80670 - DNA, 21 bp, Artificial Sequence
  primer
ttctgtagccacactcttggg

SEQ ID NO: 80671 - DNA, 38 bp, Artificial Sequence
  primer
gtaaaacgacggccagttgatctgcttcaaggttgctg

SEQ ID NO: 80672 - DNA, 22 bp, Artificial Sequence
  primer
cccaagttactgcataccaagc

SEQ ID NO: 80673 - DNA, 21 bp, Artificial Sequence
  primer
aaacccgatcctttacgaacc

SEQ ID NO: 80674 - DNA, 38 bp, Artificial Sequence
  primer
gtaaaacgacggccagtatggagcccattaaagcaaag

SEQ ID NO: 80675 - DNA, 39 bp, Artificial Sequence
  primer
gtaaaacgacggccagttgccacaaataagaaaggcatc

SEQ ID NO: 80676 - DNA, 21 bp, Artificial Sequence
  primer
gaaaccgagctgaggtaaagc

SEQ ID NO: 80677 - DNA, 22 bp, Artificial Sequence
  primer
tggcctgaatcttacaaacagc

SEQ ID NO: 80678 - DNA, 39 bp, Artificial Sequence
  primer
gtaaaacgacggccagttcttgtcatcaacaggcatttc

SEQ ID NO: 80679 - DNA, 21 bp, Artificial Sequence
  primer
ctcatcagttacgcagttgcc

SEQ ID NO: 80680 - DNA, 38 bp, Artificial Sequence
  primer
gtaaaacgacggccagtgccttgttcacctcacacatc

SEQ ID NO: 80681 - DNA, 21 bp, Artificial Sequence
  primer
tctgcttcctcttccaaatcc

SEQ ID NO: 80682 - DNA, 38 bp, Artificial Sequence
  primer
gtaaaacgacggccagtgtttccaaggacgttccagac

SEQ ID NO: 80683 - DNA, 38 bp, Artificial Sequence
  primer
gtaaaacgacggccagttcccattcatcagatttcagg

SEQ ID NO: 80684 - DNA, 21 bp, Artificial Sequence
  primer
ccaaacaaaccacaccacatc

SEQ ID NO: 80685 - DNA, 21 bp, Artificial Sequence
  primer
tctctagccggtcaagagcag

SEQ ID NO: 80686 - DNA, 20 bp, Artificial Sequence
  primer
caggaggcagaggttcaagc

SEQ ID NO: 80687 - DNA, 38 bp, Artificial Sequence
  primer
gtaaaacgacggccagtacaatctctggcaatgatccc

SEQ ID NO: 80688 - DNA, 18 bp, Artificial Sequence
  primer
cccaggaggcagaggttc

SEQ ID NO: 80689 - DNA, 21 bp, Artificial Sequence
  primer
tctctagccggtcaagagcag

SEQ ID NO: 80690 - DNA, 18 bp, Artificial Sequence
  primer
cccaggaggcagaggttc

SEQ ID NO: 80691 - DNA, 38 bp, Artificial Sequence
  primer
gtaaaacgacggccagtagagcttcagcattgagggag

SEQ ID NO: 80692 - DNA, 37 bp, Artificial Sequence
  primer
gtaaaacgacggccagtagacaggtcccgacttcctc

SEQ ID NO: 80693 - DNA, 21 bp, Artificial Sequence
  primer
agttcttgccattgaccttgg

SEQ ID NO: 80694 - DNA, 21 bp, Artificial Sequence
  primer
acacacaggccattgtagtcg

SEQ ID NO: 80695 - DNA, 18 bp, Artificial Sequence
  primer
cctcctcgtgaggtgcag

SEQ ID NO: 80696 - DNA, 37 bp, Artificial Sequence
  primer
gtaaaacgacggccagtctcagatcaacagcccaacc

SEQ ID NO: 80697 - DNA, 21 bp, Artificial Sequence
  primer
actggagtcccttgtcagctc

SEQ ID NO: 80698 - DNA, 38 bp, Artificial Sequence
  primer
gtaaaacgacggccagtgactcacgccaggtcaaactc

SEQ ID NO: 80699 - DNA, 21 bp, Artificial Sequence
  primer
agcgcagggatttgactacag

SEQ ID NO: 80700 - DNA, 21 bp, Artificial Sequence
  primer
agcagaatgagatcctctcgg

SEQ ID NO: 80701 - DNA, 38 bp, Artificial Sequence
  primer
gtaaaacgacggccagtagcaaacttaggcctctgtgg

SEQ ID NO: 80702 - DNA, 21 bp, Artificial Sequence
  primer
ctcgaggaaggagtcgaactg

SEQ ID NO: 80703 - DNA, 21 bp, Artificial Sequence
  primer
catctctcaagcagacatccc

SEQ ID NO: 80704 - DNA, 38 bp, Artificial Sequence
  primer
gtaaaacgacggccagttacacactctccagacagcgg

SEQ ID NO: 80705 - DNA, 21 bp, Artificial Sequence
  primer
cccaccctattcactcttcct

SEQ ID NO: 80706 - DNA, 38 bp, Artificial Sequence
  primer
gtaaaacgacggccagtgacaagagccctgcacctaag

SEQ ID NO: 80707 - DNA, 19 bp, Artificial Sequence
  primer
cactgcagagggacggaag

SEQ ID NO: 80708 - DNA, 38 bp, Artificial Sequence
  primer
gtaaaacgacggccagtaggttccaacctctgagcacc

SEQ ID NO: 80709 - DNA, 20 bp, Artificial Sequence
  primer
ctccctcctcagtcacatgc

SEQ ID NO: 80710 - DNA, 21 bp, Artificial Sequence
  primer
tcattatgaggacaggacggg

SEQ ID NO: 80711 - DNA, 21 bp, Artificial Sequence
  primer
gctgccacagagttctcacac

SEQ ID NO: 80712 - DNA, 20 bp, Artificial Sequence
  primer
gatctcccatgcctaggacc

SEQ ID NO: 80713 - DNA, 38 bp, Artificial Sequence
  primer
gtaaaacgacggccagtcatctctaaggtcgaggaggg

SEQ ID NO: 80714 - DNA, 38 bp, Artificial Sequence
  primer
gtaaaacgacggccagtgaccatcctgagatccaaacc

SEQ ID NO: 80715 - DNA, 21 bp, Artificial Sequence
  primer
acaaaggctgtctggtcactg

SEQ ID NO: 80716 - DNA, 38 bp, Artificial Sequence
  primer
gtaaaacgacggccagtagactccagaagggtggtgac

SEQ ID NO: 80717 - DNA, 21 bp, Artificial Sequence
  primer
ccttagaattcaggacggtcg

SEQ ID NO: 80718 - DNA, 21 bp, Artificial Sequence
  primer
aggcttagtggctgaggagtg

SEQ ID NO: 80719 - DNA, 38 bp, Artificial Sequence
  primer
gtaaaacgacggccagtacaagacctgaaacctgcacc

SEQ ID NO: 80720 - DNA, 21 bp, Artificial Sequence
  primer
gtgaccttcaagggaagaggc

SEQ ID NO: 80721 - DNA, 21 bp, Artificial Sequence
  primer
caagtccagcagagacactgg

SEQ ID NO: 80722 - DNA, 37 bp, Artificial Sequence
  primer
gtaaaacgacggccagtactccatggaagaacgaggg

SEQ ID NO: 80723 - DNA, 37 bp, Artificial Sequence
  primer
gtaaaacgacggccagtagatgatcagggtcacacgg

SEQ ID NO: 80724 - DNA, 38 bp, Artificial Sequence
  primer
gtaaaacgacggccagttgtgaagggtcactaccctgg

SEQ ID NO: 80725 - DNA, 38 bp, Artificial Sequence
  primer
gtaaaacgacggccagtagtctcagattgggcatggag

SEQ ID NO: 80726 - DNA, 20 bp, Artificial Sequence
  primer
gcctacccacaatctccctg

SEQ ID NO: 80727 - DNA, 21 bp, Artificial Sequence
  primer
aactgcacactgggttcagag

SEQ ID NO: 80728 - DNA, 37 bp, Artificial Sequence
  primer
gtaaaacgacggccagtagcaggagtggacagggatg

SEQ ID NO: 80729 - DNA, 36 bp, Artificial Sequence
  primer
gtaaaacgacggccagtcgtgtccagagccttctcc

SEQ ID NO: 80730 - DNA, 18 bp, Artificial Sequence
  primer
ctgaggtggatgaggcgg

SEQ ID NO: 80731 - DNA, 38 bp, Artificial Sequence
  primer
gtaaaacgacggccagtgtgtagctaggaggcagagcc

SEQ ID NO: 80732 - DNA, 21 bp, Artificial Sequence
  primer
caggtcctggaacatgtcttg

SEQ ID NO: 80733 - DNA, 21 bp, Artificial Sequence
  primer
aatccagggaagaagggagac

SEQ ID NO: 80734 - DNA, 35 bp, Artificial Sequence
  primer
gtaaaacgacggccagtgtgtctgtgcccgtctgc

SEQ ID NO: 80735 - DNA, 21 bp, Artificial Sequence
  primer
cgcaggtagagggagtacttg

SEQ ID NO: 80736 - DNA, 38 bp, Artificial Sequence
  primer
gtaaaacgacggccagtccacaggtgaattggctagag

SEQ ID NO: 80737 - DNA, 21 bp, Artificial Sequence
  primer
tgaacagatcattgctgctcc

SEQ ID NO: 80738 - DNA, 38 bp, Artificial Sequence
  primer
gtaaaacgacggccagtcaacatttggacaaggctcag

SEQ ID NO: 80739 - DNA, 21 bp, Artificial Sequence
  primer
agagacagacaggcacacacc

SEQ ID NO: 80740 - DNA, 38 bp, Artificial Sequence
  primer
gtaaaacgacggccagttgaatgaaaggaggaggcaac

SEQ ID NO: 80741 - DNA, 20 bp, Artificial Sequence
  primer
tcactggacctgactgcctc

SEQ ID NO: 80742 - DNA, 38 bp, Artificial Sequence
  primer
gtaaaacgacggccagtacttgctatcagtggctgtgg

SEQ ID NO: 80743 - DNA, 21 bp, Artificial Sequence
  primer
acatctcatggaaggctgtgg

SEQ ID NO: 80744 - DNA, 38 bp, Artificial Sequence
  primer
gtaaaacgacggccagtgagctctcacccacactcctc

SEQ ID NO: 80745 - DNA, 20 bp, Artificial Sequence
  primer
ccagacaaggagaggcacag

SEQ ID NO: 80746 - DNA, 21 bp, Artificial Sequence
  primer
cccactatagccacacttgcc

SEQ ID NO: 80747 - DNA, 38 bp, Artificial Sequence
  primer
gtaaaacgacggccagtaccaggtgaatgaagtcctcc

SEQ ID NO: 80748 - DNA, 21 bp, Artificial Sequence
  primer
agatgtggacaccgaagttgg

SEQ ID NO: 80749 - DNA, 21 bp, Artificial Sequence
  primer
gctcagtcctccttcccttac

SEQ ID NO: 80750 - DNA, 38 bp, Artificial Sequence
  primer
gtaaaacgacggccagtccatcagggacagagtgcttc

SEQ ID NO: 80751 - DNA, 21 bp, Artificial Sequence
  primer
atccacagtaaggccacatcc

SEQ ID NO: 80752 - DNA, 37 bp, Artificial Sequence
  primer
gtaaaacgacggccagtatgcacattcaggatcaccc

SEQ ID NO: 80753 - DNA, 22 bp, Artificial Sequence
  primer
aagttcagcaagatgatggagc

SEQ ID NO: 80754 - DNA, 38 bp, Artificial Sequence
  primer
gtaaaacgacggccagtaaacacacacactgcgctctc

SEQ ID NO: 80755 - DNA, 38 bp, Artificial Sequence
  primer
gtaaaacgacggccagtccaaagctgaacctctcttgc

SEQ ID NO: 80756 - DNA, 22 bp, Artificial Sequence
  primer
cagtcctagcacattccctcag

SEQ ID NO: 80757 - DNA, 21 bp, Artificial Sequence
  primer
ttgttgaagacgatgattccg

SEQ ID NO: 80758 - DNA, 20 bp, Artificial Sequence
  primer
ctgagtctccaagagcaccc

SEQ ID NO: 80759 - DNA, 20 bp, Artificial Sequence
  primer
gctgatatccctcctcctcc

SEQ ID NO: 80760 - DNA, 21 bp, Artificial Sequence
  primer
taagcataagggacagttgcg

SEQ ID NO: 80761 - DNA, 21 bp, Artificial Sequence
  primer
gagcctgaatcaaacccaatc

SEQ ID NO: 80762 - DNA, 21 bp, Artificial Sequence
  primer
gctcagggctgtctaacttcg

SEQ ID NO: 80763 - DNA, 21 bp, Artificial Sequence
  primer
ctggagagatccataggcagg

SEQ ID NO: 80764 - DNA, 21 bp, Artificial Sequence
  primer
gaaggattcacagacaccacg

SEQ ID NO: 80765 - DNA, 21 bp, Artificial Sequence
  primer
ctcttcacgttggtgctatgg

SEQ ID NO: 80766 - DNA, 37 bp, Artificial Sequence
  primer
gtaaaacgacggccagtgacacactccaccgcttctc

SEQ ID NO: 80767 - DNA, 21 bp, Artificial Sequence
  primer
caggacatgtctcctgctgac

SEQ ID NO: 80768 - DNA, 21 bp, Artificial Sequence
  primer
tcctgggtagttccaaagtgg

SEQ ID NO: 80769 - DNA, 18 bp, Artificial Sequence
  primer
tttccagcgtccaagtgc

SEQ ID NO: 80770 - DNA, 38 bp, Artificial Sequence
  primer
gtaaaacgacggccagtcccacatgattctgttctccc

SEQ ID NO: 80771 - DNA, 21 bp, Artificial Sequence
  primer
ggcacttaccttctttgggtg

SEQ ID NO: 80772 - DNA, 38 bp, Artificial Sequence
  primer
gtaaaacgacggccagttgagctatccagtcctcaccg

SEQ ID NO: 80773 - DNA, 27 bp, Artificial Sequence
  primer
ttcaattcacagctactttatttatgg

SEQ ID NO: 80774 - DNA, 21 bp, Artificial Sequence
  primer
taacaaatcgttccaaatgcg

SEQ ID NO: 80775 - DNA, 38 bp, Artificial Sequence
  primer
gtaaaacgacggccagtccaacgtgactgaatgaaggt

SEQ ID NO: 80776 - DNA, 20 bp, Artificial Sequence
  primer
ttctttcatgaccctctggc

SEQ ID NO: 80777 - DNA, 24 bp, Artificial Sequence
  primer
gaggaatatgacccttaaccaatg

SEQ ID NO: 80778 - DNA, 44 bp, Artificial Sequence
  primer
gtaaaacgacggccagttttgcttattggacagacttatttatg

SEQ ID NO: 80779 - DNA, 38 bp, Artificial Sequence
  primer
gtaaaacgacggccagtacattgctttctccttcaggc

SEQ ID NO: 80780 - DNA, 38 bp, Artificial Sequence
  primer
gtaaaacgacggccagtgcattatcttcctccagtccg

SEQ ID NO: 80781 - DNA, 23 bp, Artificial Sequence
  primer
ccagactggtatggtaacgatca

SEQ ID NO: 80782 - DNA, 40 bp, Artificial Sequence
  primer
gtaaaacgacggccagttttgctcacatgcagttaaacat

SEQ ID NO: 80783 - DNA, 38 bp, Artificial Sequence
  primer
gtaaaacgacggccagtgaccatgtcaaactcaggtcg

SEQ ID NO: 80784 - DNA, 22 bp, Artificial Sequence
  primer
gaatttgcagggctacagtcag

SEQ ID NO: 80785 - DNA, 26 bp, Artificial Sequence
  primer
tctggtgttatcagttgaaagaatga

SEQ ID NO: 80786 - DNA, 38 bp, Artificial Sequence
  primer
gtaaaacgacggccagttcctgttaactagcaggcagc

SEQ ID NO: 80787 - DNA, 38 bp, Artificial Sequence
  primer
gtaaaacgacggccagttgcagttccctggagaaacac

SEQ ID NO: 80788 - DNA, 43 bp, Artificial Sequence
  primer
gtaaaacgacggccagtttcatttattaaagctcaatcacacc

SEQ ID NO: 80789 - DNA, 39 bp, Artificial Sequence
  primer
gtaaaacgacggccagtccacagggaattaaatcaaggg

SEQ ID NO: 80790 - DNA, 23 bp, Artificial Sequence
  primer
aagttccaaatgaccaatgaatg

SEQ ID NO: 80791 - DNA, 37 bp, Artificial Sequence
  primer
gtaaaacgacggccagtagcagtgccaaccaagactc

SEQ ID NO: 80792 - DNA, 25 bp, Artificial Sequence
  primer
tgtaagagaaataccacactcccag

SEQ ID NO: 80793 - DNA, 21 bp, Artificial Sequence
  primer
aacgcagtcagtgatggtctg

SEQ ID NO: 80794 - DNA, 26 bp, Artificial Sequence
  primer
ccacaatagctataaagacagttgcc

SEQ ID NO: 80795 - DNA, 20 bp, Artificial Sequence
  primer
tgtcaatggaggagaccagc

SEQ ID NO: 80796 - DNA, 38 bp, Artificial Sequence
  primer
gtaaaacgacggccagtgtcctggactctgaagccatc

SEQ ID NO: 80797 - DNA, 20 bp, Artificial Sequence
  primer
ctcagctcctttggcatttg

SEQ ID NO: 80798 - DNA, 21 bp, Artificial Sequence
  primer
acacagttctccgcaattcac

SEQ ID NO: 80799 - DNA, 22 bp, Artificial Sequence
  primer
ctcagaggccatgaaattcttc

SEQ ID NO: 80800 - DNA, 21 bp, Artificial Sequence
  primer
ttcccacaccagtgtcacatc

SEQ ID NO: 80801 - DNA, 38 bp, Artificial Sequence
  primer
gtaaaacgacggccagttgttcccaccattaggaggtc

SEQ ID NO: 80802 - DNA, 38 bp, Artificial Sequence
  primer
gtaaaacgacggccagtagaaatgtcaggcttcccaag

SEQ ID NO: 80803 - DNA, 38 bp, Artificial Sequence
  primer
gtaaaacgacggccagtgcaggaaatcgagaataaggg

SEQ ID NO: 80804 - DNA, 22 bp, Artificial Sequence
  primer
gcacaccacgacactgttattg

SEQ ID NO: 80805 - DNA, 18 bp, Artificial Sequence
  primer
tttgcctggatggctctg

SEQ ID NO: 80806 - DNA, 37 bp, Artificial Sequence
  primer
gtaaaacgacggccagttctgcaagcactgtgtggtc

SEQ ID NO: 80807 - DNA, 39 bp, Artificial Sequence
  primer
gtaaaacgacggccagtgcaactgctagacagagggaag

SEQ ID NO: 80808 - DNA, 38 bp, Artificial Sequence
  primer
gtaaaacgacggccagtcgactgacctggctacgactc

SEQ ID NO: 80809 - DNA, 38 bp, Artificial Sequence
  primer
gtaaaacgacggccagttactacaactccgcgtgatgc

SEQ ID NO: 80810 - DNA, 40 bp, Artificial Sequence
  primer
gtaaaacgacggccagtgccttataatgatgtcaggctgt

SEQ ID NO: 80811 - DNA, 20 bp, Artificial Sequence
  primer
gaggccagttctgaccacac

SEQ ID NO: 80812 - DNA, 23 bp, Artificial Sequence
  primer
aggaatgacttgggagttacgag

SEQ ID NO: 80813 - DNA, 21 bp, Artificial Sequence
  primer
caatcatgacgttgcttggtc

SEQ ID NO: 80814 - DNA, 21 bp, Artificial Sequence
  primer
cattggccctttgacaatatg

SEQ ID NO: 80815 - DNA, 38 bp, Artificial Sequence
  primer
gtaaaacgacggccagtccctacttacctcctcgttgc

SEQ ID NO: 80816 - DNA, 39 bp, Artificial Sequence
  primer
gtaaaacgacggccagtggtaccaccacacccaacttag

SEQ ID NO: 80817 - DNA, 38 bp, Artificial Sequence
  primer
gtaaaacgacggccagtcacagagtaccctcccacctc

SEQ ID NO: 80818 - DNA, 21 bp, Artificial Sequence
  primer
gcagagtccactccctctgtg

SEQ ID NO: 80819 - DNA, 20 bp, Artificial Sequence
  primer
caaagcacttcccttcatgc

SEQ ID NO: 80820 - DNA, 21 bp, Artificial Sequence
  primer
gctcccacctttcacaaacac

SEQ ID NO: 80821 - DNA, 38 bp, Artificial Sequence
  primer
gtaaaacgacggccagtaatagacgctcaaggaggcag

SEQ ID NO: 80822 - DNA, 38 bp, Artificial Sequence
  primer
gtaaaacgacggccagttctgagtcagctttcactcgc

SEQ ID NO: 80823 - DNA, 21 bp, Artificial Sequence
  primer
agggatgaataaagctgccac

SEQ ID NO: 80824 - DNA, 21 bp, Artificial Sequence
  primer
ttggtttggtggtattcctgc

SEQ ID NO: 80825 - DNA, 21 bp, Artificial Sequence
  primer
gccgatccttgtgacaattac

SEQ ID NO: 80826 - DNA, 22 bp, Artificial Sequence
  primer
tttggtagggtaggagtcatgc

SEQ ID NO: 80827 - DNA, 21 bp, Artificial Sequence
  primer
cgagaggctggtaagacactg

SEQ ID NO: 80828 - DNA, 37 bp, Artificial Sequence
  primer
gtaaaacgacggccagtagtagagaaggcccagcacc

SEQ ID NO: 80829 - DNA, 21 bp, Artificial Sequence
  primer
aacaaaccagcgagagctgag

SEQ ID NO: 80830 - DNA, 18 bp, Artificial Sequence
  primer
aagtcccagcctcctggc

SEQ ID NO: 80831 - DNA, 21 bp, Artificial Sequence
  primer
agttctaccagctcaggaggc

SEQ ID NO: 80832 - DNA, 19 bp, Artificial Sequence
  primer
acccagcacccactttcag

SEQ ID NO: 80833 - DNA, 21 bp, Artificial Sequence
  primer
gctggacaactgggactgttc

SEQ ID NO: 80834 - DNA, 36 bp, Artificial Sequence
  primer
gtaaaacgacggccagtaaggagtggcaggcatttg

SEQ ID NO: 80835 - DNA, 21 bp, Artificial Sequence
  primer
cgaggtctaccagggacacac

SEQ ID NO: 80836 - DNA, 20 bp, Artificial Sequence
  primer
acgagagttcgagcctggac

SEQ ID NO: 80837 - DNA, 18 bp, Artificial Sequence
  primer
aaagagaaccctccgccc

SEQ ID NO: 80838 - DNA, 38 bp, Artificial Sequence
  primer
gtaaaacgacggccagtagggttgtggcatgactgtag

SEQ ID NO: 80839 - DNA, 20 bp, Artificial Sequence
  primer
cactgcccaggtcttctacg

SEQ ID NO: 80840 - DNA, 36 bp, Artificial Sequence
  primer
gtaaaacgacggccagttcaagcgtccagctctcag

SEQ ID NO: 80841 - DNA, 38 bp, Artificial Sequence
  primer
gtaaaacgacggccagtacacattcccaaatcatgcag

SEQ ID NO: 80842 - DNA, 21 bp, Artificial Sequence
  primer
gtcactcggagaaagcaggac

SEQ ID NO: 80843 - DNA, 21 bp, Artificial Sequence
  primer
ggaacgcacagatgatgacag

SEQ ID NO: 80844 - DNA, 20 bp, Artificial Sequence
  primer
acattgccagtgggagtgag

SEQ ID NO: 80845 - DNA, 39 bp, Artificial Sequence
  primer
gtaaaacgacggccagtaagtaccttcccgcgtaaagtc

SEQ ID NO: 80846 - DNA, 25 bp, Artificial Sequence
  primer
tgtgtactgtcattgcaaagttctg

SEQ ID NO: 80847 - DNA, 38 bp, Artificial Sequence
  primer
gtaaaacgacggccagttctcctctgttctggactggg

SEQ ID NO: 80848 - DNA, 21 bp, Artificial Sequence
  primer
cctgtctgctgctgatgagtc

SEQ ID NO: 80849 - DNA, 21 bp, Artificial Sequence
  primer
cctgtctgctgctgatgagtc

SEQ ID NO: 80850 - DNA, 38 bp, Artificial Sequence
  primer
gtaaaacgacggccagtccggctaacctcctcttaaac

SEQ ID NO: 80851 - DNA, 38 bp, Artificial Sequence
  primer
gtaaaacgacggccagtgggactacaggcacatgctac

SEQ ID NO: 80852 - DNA, 21 bp, Artificial Sequence
  primer
acctgtgattcccaccaacac

SEQ ID NO: 80853 - DNA, 39 bp, Artificial Sequence
  primer
gtaaaacgacggccagtcttgtttacctccaaaccttgc

SEQ ID NO: 80854 - DNA, 21 bp, Artificial Sequence
  primer
gtccacgaagacagtttgcag

SEQ ID NO: 80855 - DNA, 20 bp, Artificial Sequence
  primer
agagctgaggcttagggcag

SEQ ID NO: 80856 - DNA, 38 bp, Artificial Sequence
  primer
gtaaaacgacggccagtgaggatcaaaggcagcaagtc

SEQ ID NO: 80857 - DNA, 20 bp, Artificial Sequence
  primer
agttggtaaagcgagcaggg

SEQ ID NO: 80858 - DNA, 21 bp, Artificial Sequence
  primer
aaggcagaaacttgtcaaccc

SEQ ID NO: 80859 - DNA, 21 bp, Artificial Sequence
  primer
cttccctttccaggacatctg

SEQ ID NO: 80860 - DNA, 38 bp, Artificial Sequence
  primer
gtaaaacgacggccagtaggtgtgggatgcagagaatc

SEQ ID NO: 80861 - DNA, 37 bp, Artificial Sequence
  primer
gtaaaacgacggccagtaaggcctgtgtcagggactc

SEQ ID NO: 80862 - DNA, 38 bp, Artificial Sequence
  primer
gtaaaacgacggccagtgctgctagaggcttgaacgac

SEQ ID NO: 80863 - DNA, 38 bp, Artificial Sequence
  primer
gtaaaacgacggccagtgtgtgcctacctgtcaaatgg

SEQ ID NO: 80864 - DNA, 38 bp, Artificial Sequence
  primer
gtaaaacgacggccagttggccctaggagctagttacg

SEQ ID NO: 80865 - DNA, 39 bp, Artificial Sequence
  primer
gtaaaacgacggccagtggagggaaacctctatgtacgg

SEQ ID NO: 80866 - DNA, 18 bp, Artificial Sequence
  primer
agcgtagagcgggagcct

SEQ ID NO: 80867 - DNA, 35 bp, Artificial Sequence
  primer
gtaaaacgacggccagtgtctgccctcgatccctc

SEQ ID NO: 80868 - DNA, 22 bp, Artificial Sequence
  primer
cccactgaatgaatgaggaaac

SEQ ID NO: 80869 - DNA, 19 bp, Artificial Sequence
  primer
accttgcagatcctctccg

SEQ ID NO: 80870 - DNA, 21 bp, Artificial Sequence
  primer
gactgagtgaggccaggtagg

SEQ ID NO: 80871 - DNA, 21 bp, Artificial Sequence
  primer
gactgagtgaggccaggtagg

SEQ ID NO: 80872 - DNA, 22 bp, Artificial Sequence
  primer
tgttggaatcaagagatcctcc

SEQ ID NO: 80873 - DNA, 38 bp, Artificial Sequence
  primer
gtaaaacgacggccagtttcttggatctgctgctgttg

SEQ ID NO: 80874 - DNA, 18 bp, Artificial Sequence
  primer
acaggctggctctccacg

SEQ ID NO: 80875 - DNA, 38 bp, Artificial Sequence
  primer
gtaaaacgacggccagtgtggcacagctaactgcagac

SEQ ID NO: 80876 - DNA, 20 bp, Artificial Sequence
  primer
agcagggaagacaggtggtg

SEQ ID NO: 80877 - DNA, 38 bp, Artificial Sequence
  primer
gtaaaacgacggccagtactgtttgggtgatgatggtg

SEQ ID NO: 80878 - DNA, 21 bp, Artificial Sequence
  primer
agactttcagggcatacgtgg

SEQ ID NO: 80879 - DNA, 18 bp, Artificial Sequence
  primer
accaccctccaggcacag

SEQ ID NO: 80880 - DNA, 21 bp, Artificial Sequence
  primer
aaaggtcccagcagtcatacc

SEQ ID NO: 80881 - DNA, 22 bp, Artificial Sequence
  primer
cgatctgtttgaagtacctggc

SEQ ID NO: 80882 - DNA, 21 bp, Artificial Sequence
  primer
ctgtgagaccctggagagacc

SEQ ID NO: 80883 - DNA, 21 bp, Artificial Sequence
  primer
cacccactacctcctctgctg

SEQ ID NO: 80884 - DNA, 19 bp, Artificial Sequence
  primer
aggaggtctgtcgtgggtg

SEQ ID NO: 80885 - DNA, 20 bp, Artificial Sequence
  primer
cctcacctacccgtagcacc

SEQ ID NO: 80886 - DNA, 20 bp, Artificial Sequence
  primer
ctctcgcccacgtcatacag

SEQ ID NO: 80887 - DNA, 21 bp, Artificial Sequence
  primer
aaaggagggttggaagagctg

SEQ ID NO: 80888 - DNA, 21 bp, Artificial Sequence
  primer
ctctctgcaacagacaccacc

SEQ ID NO: 80889 - DNA, 38 bp, Artificial Sequence
  primer
gtaaaacgacggccagtcaaggaagcctagctcgtacc

SEQ ID NO: 80890 - DNA, 21 bp, Artificial Sequence
  primer
gagcaagggacacacctcatc

SEQ ID NO: 80891 - DNA, 38 bp, Artificial Sequence
  primer
gtaaaacgacggccagtgtcagccagggtcaggtagag

SEQ ID NO: 80892 - DNA, 21 bp, Artificial Sequence
  primer
acaccttaaccagcacgttcc

SEQ ID NO: 80893 - DNA, 18 bp, Artificial Sequence
  primer
gttgctgaggaggctggg

SEQ ID NO: 80894 - DNA, 38 bp, Artificial Sequence
  primer
gtaaaacgacggccagtgcagctccgtatagaagaggg

SEQ ID NO: 80895 - DNA, 35 bp, Artificial Sequence
  primer
gtaaaacgacggccagtgaccacgcagagctggag

SEQ ID NO: 80896 - DNA, 38 bp, Artificial Sequence
  primer
gtaaaacgacggccagtgtacatacttgcggatgtcgc

SEQ ID NO: 80897 - DNA, 20 bp, Artificial Sequence
  primer
ggaggagtagctcccacagg

SEQ ID NO: 80898 - DNA, 21 bp, Artificial Sequence
  primer
cagaatggcctggaggagtag

SEQ ID NO: 80899 - DNA, 19 bp, Artificial Sequence
  primer
ggacaaagggagggatcag

SEQ ID NO: 80900 - DNA, 36 bp, Artificial Sequence
  primer
gtaaaacgacggccagtgccacacctcggcattaac

SEQ ID NO: 80901 - DNA, 37 bp, Artificial Sequence
  primer
gtaaaacgacggccagtgcacttggagacctgactgc

SEQ ID NO: 80902 - DNA, 19 bp, Artificial Sequence
  primer
cctcgtaatggcaacggac

SEQ ID NO: 80903 - DNA, 20 bp, Artificial Sequence
  primer
cagtggaaagagatgcggtg

SEQ ID NO: 80904 - DNA, 21 bp, Artificial Sequence
  primer
gtccatgacggtgaacaacac

SEQ ID NO: 80905 - DNA, 37 bp, Artificial Sequence
  primer
gtaaaacgacggccagtagcgcagatctcactgcaag

SEQ ID NO: 80906 - DNA, 38 bp, Artificial Sequence
  primer
gtaaaacgacggccagtgacacacacgtcacagcacag

SEQ ID NO: 80907 - DNA, 37 bp, Artificial Sequence
  primer
gtaaaacgacggccagtctaacaaagcctctgcagcc

SEQ ID NO: 80908 - DNA, 21 bp, Artificial Sequence
  primer
gcagacatacaaagtcgtggc

SEQ ID NO: 80909 - DNA, 21 bp, Artificial Sequence
  primer
tgaaagctgtagtgcaaacgg

SEQ ID NO: 80910 - DNA, 21 bp, Artificial Sequence
  primer
tcatacgaattccagcttccc

SEQ ID NO: 80911 - DNA, 38 bp, Artificial Sequence
  primer
gtaaaacgacggccagttgcaaataaccctggtgacag

SEQ ID NO: 80912 - DNA, 37 bp, Artificial Sequence
  primer
gtaaaacgacggccagttgccattcagagcacacaag

SEQ ID NO: 80913 - DNA, 21 bp, Artificial Sequence
  primer
tttccttcgtagaggacaggg

SEQ ID NO: 80914 - DNA, 22 bp, Artificial Sequence
  primer
cgagtgcagttgtctaacgatg

SEQ ID NO: 80915 - DNA, 39 bp, Artificial Sequence
  primer
gtaaaacgacggccagtaggtttggcaacactacctttg

SEQ ID NO: 80916 - DNA, 41 bp, Artificial Sequence
  primer
gtaaaacgacggccagtttcctatcctgacaccagttattg

SEQ ID NO: 80917 - DNA, 21 bp, Artificial Sequence
  primer
ctccaaacaacaacaaccacc

SEQ ID NO: 80918 - DNA, 38 bp, Artificial Sequence
  primer
gtaaaacgacggccagtacaggaaacacctgcagaaca

SEQ ID NO: 80919 - DNA, 24 bp, Artificial Sequence
  primer
aaagcatgaatcctcttatccttc

SEQ ID NO: 80920 - DNA, 21 bp, Artificial Sequence
  primer
ctcatcagcagtgcagctacc

SEQ ID NO: 80921 - DNA, 23 bp, Artificial Sequence
  primer
tttcatgtgcctaatagtgcctt

SEQ ID NO: 80922 - DNA, 22 bp, Artificial Sequence
  primer
ttgtgtattccctctgggtagg

SEQ ID NO: 80923 - DNA, 21 bp, Artificial Sequence
  primer
atttgccactgcactatttgc

SEQ ID NO: 80924 - DNA, 23 bp, Artificial Sequence
  primer
gcattaattgcatcaccttatcc

SEQ ID NO: 80925 - DNA, 41 bp, Artificial Sequence
  primer
gtaaaacgacggccagttctgtcctaggaggctttactctg

SEQ ID NO: 80926 - DNA, 38 bp, Artificial Sequence
  primer
gtaaaacgacggccagtattgacttcaccaatggctgg

SEQ ID NO: 80927 - DNA, 21 bp, Artificial Sequence
  primer
gaactcaggcccaatcatctc

SEQ ID NO: 80928 - DNA, 38 bp, Artificial Sequence
  primer
gtaaaacgacggccagtagaattccaaactcacggtcc

SEQ ID NO: 80929 - DNA, 19 bp, Artificial Sequence
  primer
ttgcacacaaaggcacacc

SEQ ID NO: 80930 - DNA, 22 bp, Artificial Sequence
  primer
cagagcaatcacctttagcttg

SEQ ID NO: 80931 - DNA, 21 bp, Artificial Sequence
  primer
tttcatacgcagcatgcatta

SEQ ID NO: 80932 - DNA, 37 bp, Artificial Sequence
  primer
gtaaaacgacggccagttagaacctttggagggagcg

SEQ ID NO: 80933 - DNA, 38 bp, Artificial Sequence
  primer
gtaaaacgacggccagtatctccagcaaactgagccac

SEQ ID NO: 80934 - DNA, 36 bp, Artificial Sequence
  primer
gtaaaacgacggccagtcgcctggccactgtatcac

SEQ ID NO: 80935 - DNA, 20 bp, Artificial Sequence
  primer
ctactgatgccagcgtcctc

SEQ ID NO: 80936 - DNA, 18 bp, Artificial Sequence
  primer
aggctgtccgtgtgaagg

SEQ ID NO: 80937 - DNA, 38 bp, Artificial Sequence
  primer
gtaaaacgacggccagtagctatcactgtgctcccaaa

SEQ ID NO: 80938 - DNA, 21 bp, Artificial Sequence
  primer
cacttccagccagcagtagaa

SEQ ID NO: 80939 - DNA, 35 bp, Artificial Sequence
  primer
gtaaaacgacggccagtgcaatgcccacaatgacc

SEQ ID NO: 80940 - DNA, 38 bp, Artificial Sequence
  primer
gtaaaacgacggccagtctgcacaggaagagtcacgag

SEQ ID NO: 80941 - DNA, 22 bp, Artificial Sequence
  primer
cagttgataggatgctgttccc

SEQ ID NO: 80942 - DNA, 21 bp, Artificial Sequence
  primer
aagcagtagggaaggacagcc

SEQ ID NO: 80943 - DNA, 21 bp, Artificial Sequence
  primer
tgacatttgctctgaaggtcg

SEQ ID NO: 80944 - DNA, 21 bp, Artificial Sequence
  primer
aaagggaagcgctaaggaaag

SEQ ID NO: 80945 - DNA, 21 bp, Artificial Sequence
  primer
tctgcctatctcctcctcctg

SEQ ID NO: 80946 - DNA, 20 bp, Artificial Sequence
  primer
cctaggcctgtgtcctttcc

SEQ ID NO: 80947 - DNA, 21 bp, Artificial Sequence
  primer
attctgcttctcagggaggtg

SEQ ID NO: 80948 - DNA, 38 bp, Artificial Sequence
  primer
gtaaaacgacggccagtctgccactgggtaccacatac

SEQ ID NO: 80949 - DNA, 21 bp, Artificial Sequence
  primer
tggatactctctgtccctccc

SEQ ID NO: 80950 - DNA, 21 bp, Artificial Sequence
  primer
atcagagacaaatgctgtggg

SEQ ID NO: 80951 - DNA, 21 bp, Artificial Sequence
  primer
agaacactgcccaaggacatc

SEQ ID NO: 80952 - DNA, 21 bp, Artificial Sequence
  primer
ggatgaacaccaaggaaccac

SEQ ID NO: 80953 - DNA, 21 bp, Artificial Sequence
  primer
tcaacattatctgctgcaggg

SEQ ID NO: 80954 - DNA, 21 bp, Artificial Sequence
  primer
acagcacggttgtagcgtatg

SEQ ID NO: 80955 - DNA, 38 bp, Artificial Sequence
  primer
gtaaaacgacggccagtgacactttgtggtcacttggc

SEQ ID NO: 80956 - DNA, 38 bp, Artificial Sequence
  primer
gtaaaacgacggccagtcaatcaagaacttggcacctg

SEQ ID NO: 80957 - DNA, 38 bp, Artificial Sequence
  primer
gtaaaacgacggccagtaagactgagagcactggagcc

SEQ ID NO: 80958 - DNA, 38 bp, Artificial Sequence
  primer
gtaaaacgacggccagtgcgaagaggtagagacccttg

SEQ ID NO: 80959 - DNA, 21 bp, Artificial Sequence
  primer
tctccagctgggactattcag

SEQ ID NO: 80960 - DNA, 38 bp, Artificial Sequence
  primer
gtaaaacgacggccagttcctctaggtctttggaagcg

SEQ ID NO: 80961 - DNA, 19 bp, Artificial Sequence
  primer
gcagaacttcgggatttgg

SEQ ID NO: 80962 - DNA, 38 bp, Artificial Sequence
  primer
gtaaaacgacggccagtatagtaggagggctgcagtgg

SEQ ID NO: 80963 - DNA, 37 bp, Artificial Sequence
  primer
gtaaaacgacggccagtctggagctgggtttcacctc

SEQ ID NO: 80964 - DNA, 19 bp, Artificial Sequence
  primer
gggaacggaaggaggaaac

SEQ ID NO: 80965 - DNA, 23 bp, Artificial Sequence
  primer
aagtcatcctctttgagctttgg

SEQ ID NO: 80966 - DNA, 21 bp, Artificial Sequence
  primer
agtccggcttggacaacatag

SEQ ID NO: 80967 - DNA, 23 bp, Artificial Sequence
  primer
tctttggagtcaaattcaccatc

SEQ ID NO: 80968 - DNA, 21 bp, Artificial Sequence
  primer
tttacgtttgcatgaaggtgg

SEQ ID NO: 80969 - DNA, 20 bp, Artificial Sequence
  primer
acagccatattgggcaacag

SEQ ID NO: 80970 - DNA, 39 bp, Artificial Sequence
  primer
gtaaaacgacggccagtgaatctggcttctctggttcag

SEQ ID NO: 80971 - DNA, 22 bp, Artificial Sequence
  primer
ggtaaccaatttcttgcctgtc

SEQ ID NO: 80972 - DNA, 42 bp, Artificial Sequence
  primer
gtaaaacgacggccagtaaagtctgctttatcacacaccttg

SEQ ID NO: 80973 - DNA, 27 bp, Artificial Sequence
  primer
tgtctttgaatccacagtagctaatac

SEQ ID NO: 80974 - DNA, 22 bp, Artificial Sequence
  primer
gcaaagtatacagccatctccc

SEQ ID NO: 80975 - DNA, 40 bp, Artificial Sequence
  primer
gtaaaacgacggccagtcatcaagttccttaatcacaggc

SEQ ID NO: 80976 - DNA, 38 bp, Artificial Sequence
  primer
gtaaaacgacggccagtacctgtagctgttgaaagggc

SEQ ID NO: 80977 - DNA, 27 bp, Artificial Sequence
  primer
tgattcaaagacaaatatgaatgactc

SEQ ID NO: 80978 - DNA, 21 bp, Artificial Sequence
  primer
gctagagtagggtgcacaggc

SEQ ID NO: 80979 - DNA, 37 bp, Artificial Sequence
  primer
gtaaaacgacggccagtatgtcccgccatgtgtattc

SEQ ID NO: 80980 - DNA, 38 bp, Artificial Sequence
  primer
gtaaaacgacggccagtaacctgtagactcctggtccc

SEQ ID NO: 80981 - DNA, 18 bp, Artificial Sequence
  primer
acctgcgccctcagaaag

SEQ ID NO: 80982 - DNA, 21 bp, Artificial Sequence
  primer
tccctacggtatcaatctccg

SEQ ID NO: 80983 - DNA, 21 bp, Artificial Sequence
  primer
ttgtcgagtttggtcttgctg

SEQ ID NO: 80984 - DNA, 38 bp, Artificial Sequence
  primer
gtaaaacgacggccagtgagatctgctgaaggctgaag

SEQ ID NO: 80985 - DNA, 20 bp, Artificial Sequence
  primer
ccaggagggaagaagattgg

SEQ ID NO: 80986 - DNA, 19 bp, Artificial Sequence
  primer
cctggagcagggagaggac

SEQ ID NO: 80987 - DNA, 21 bp, Artificial Sequence
  primer
ctattctggaaagagcagggc

SEQ ID NO: 80988 - DNA, 20 bp, Artificial Sequence
  primer
aactgagaggattccggtgc

SEQ ID NO: 80989 - DNA, 38 bp, Artificial Sequence
  primer
gtaaaacgacggccagtaagtaaacttcttggacgcgg

SEQ ID NO: 80990 - DNA, 36 bp, Artificial Sequence
  primer
gtaaaacgacggccagtcaaagcacaggccacctac

SEQ ID NO: 80991 - DNA, 21 bp, Artificial Sequence
  primer
actgtaccagtgctgtggctc

SEQ ID NO: 80992 - DNA, 36 bp, Artificial Sequence
  primer
gtaaaacgacggccagtcccaaactgccaaatggtc

SEQ ID NO: 80993 - DNA, 21 bp, Artificial Sequence
  primer
atctcttcgcccgcagtttac

SEQ ID NO: 80994 - DNA, 21 bp, Artificial Sequence
  primer
aaagcacagcaaggagacagg

SEQ ID NO: 80995 - DNA, 21 bp, Artificial Sequence
  primer
ctgtgaggtcaggaaatgtgg

SEQ ID NO: 80996 - DNA, 22 bp, Artificial Sequence
  primer
ctaaccacacagtgagtccgtc

SEQ ID NO: 80997 - DNA, 22 bp, Artificial Sequence
  primer
ttctggtgacatctttcaggtg

SEQ ID NO: 80998 - DNA, 22 bp, Artificial Sequence
  primer
cagatgccactccatctctctc

SEQ ID NO: 80999 - DNA, 19 bp, Artificial Sequence
  primer
gtccttctcgccctccttc

SEQ ID NO: 81000 - DNA, 19 bp, Artificial Sequence
  primer
ctcttctgcagaggctgcg

SEQ ID NO: 81001 - DNA, 39 bp, Artificial Sequence
  primer
gtaaaacgacggccagtaggctgtccttgtcactctttc

SEQ ID NO: 81002 - DNA, 41 bp, Artificial Sequence
  primer
gtaaaacgacggccagtaatactatttggattctcccaccc

SEQ ID NO: 81003 - DNA, 21 bp, Artificial Sequence
  primer
aaacccttaccaccacctgag

SEQ ID NO: 81004 - DNA, 38 bp, Artificial Sequence
  primer
gtaaaacgacggccagtacagctgtcaggttgtcaagg

SEQ ID NO: 81005 - DNA, 22 bp, Artificial Sequence
  primer
tgttaagcatcatccatagccc

SEQ ID NO: 81006 - DNA, 37 bp, Artificial Sequence
  primer
gtaaaacgacggccagtgtccttgcactgaggtgctc

SEQ ID NO: 81007 - DNA, 38 bp, Artificial Sequence
  primer
gtaaaacgacggccagtcaagggagtctgaggaagagg

SEQ ID NO: 81008 - DNA, 38 bp, Artificial Sequence
  primer
gtaaaacgacggccagtgctcccaccttactcatgctc

SEQ ID NO: 81009 - DNA, 38 bp, Artificial Sequence
  primer
gtaaaacgacggccagtactgctgataccgagaaagcc

SEQ ID NO: 81010 - DNA, 21 bp, Artificial Sequence
  primer
aggaaagagacccagaggcag

SEQ ID NO: 81011 - DNA, 21 bp, Artificial Sequence
  primer
acctatgtgatgggatttcgg

SEQ ID NO: 81012 - DNA, 22 bp, Artificial Sequence
  primer
caggccttataggaattcaccc

SEQ ID NO: 81013 - DNA, 21 bp, Artificial Sequence
  primer
cagacacgcctttgtaggagg

SEQ ID NO: 81014 - DNA, 38 bp, Artificial Sequence
  primer
gtaaaacgacggccagtacgtggctggactaaaccaag

SEQ ID NO: 81015 - DNA, 21 bp, Artificial Sequence
  primer
gaaccaaaggagtgttctggg

SEQ ID NO: 81016 - DNA, 21 bp, Artificial Sequence
  primer
ctggcaccactacactccatc

SEQ ID NO: 81017 - DNA, 38 bp, Artificial Sequence
  primer
gtaaaacgacggccagttggaggacaagtgaacacagc

SEQ ID NO: 81018 - DNA, 38 bp, Artificial Sequence
  primer
gtaaaacgacggccagttcccaccctcccttctatctc

SEQ ID NO: 81019 - DNA, 22 bp, Artificial Sequence
  primer
tgatcctagactgagcctcctg

SEQ ID NO: 81020 - DNA, 21 bp, Artificial Sequence
  primer
cctttcacccacataaccctg

SEQ ID NO: 81021 - DNA, 20 bp, Artificial Sequence
  primer
ctcaccagaagctgattggg

SEQ ID NO: 81022 - DNA, 22 bp, Artificial Sequence
  primer
acaaccgcttcaattactcagc

SEQ ID NO: 81023 - DNA, 38 bp, Artificial Sequence
  primer
gtaaaacgacggccagttgctactggtactgccaccac

SEQ ID NO: 81024 - DNA, 38 bp, Artificial Sequence
  primer
gtaaaacgacggccagttaccaccctgcacctttaagc

SEQ ID NO: 81025 - DNA, 38 bp, Artificial Sequence
  primer
gtaaaacgacggccagtcgtgacaatggagacaactgg

SEQ ID NO: 81026 - DNA, 41 bp, Artificial Sequence
  primer
gtaaaacgacggccagtcgtaccagagtcacagtaagaccc

SEQ ID NO: 81027 - DNA, 21 bp, Artificial Sequence
  primer
cccaaagtacctttctcccag

SEQ ID NO: 81028 - DNA, 21 bp, Artificial Sequence
  primer
tctctgtgcgactctctctgc

SEQ ID NO: 81029 - DNA, 38 bp, Artificial Sequence
  primer
gtaaaacgacggccagttacgaatagtccctccgaagc

SEQ ID NO: 81030 - DNA, 21 bp, Artificial Sequence
  primer
ctccttgtctgaaggagccag

SEQ ID NO: 81031 - DNA, 38 bp, Artificial Sequence
  primer
gtaaaacgacggccagtacattgctacctccattgctg

SEQ ID NO: 81032 - DNA, 38 bp, Artificial Sequence
  primer
gtaaaacgacggccagttgacagatcaggagacttggc

SEQ ID NO: 81033 - DNA, 38 bp, Artificial Sequence
  primer
gtaaaacgacggccagtccgtttactcaaatccttggc

SEQ ID NO: 81034 - DNA, 38 bp, Artificial Sequence
  primer
gtaaaacgacggccagtgtttgttcctacccaccttcg

SEQ ID NO: 81035 - DNA, 38 bp, Artificial Sequence
  primer
gtaaaacgacggccagtcaatctccactccacccaaac

SEQ ID NO: 81036 - DNA, 20 bp, Artificial Sequence
  primer
gtccctaggccaggttctcc

SEQ ID NO: 81037 - DNA, 21 bp, Artificial Sequence
  primer
gacaacaagggagacacatgg

SEQ ID NO: 81038 - DNA, 21 bp, Artificial Sequence
  primer
aactctttcggctagtggctg

SEQ ID NO: 81039 - DNA, 21 bp, Artificial Sequence
  primer
gggacagccaagtgagagaac

SEQ ID NO: 81040 - DNA, 21 bp, Artificial Sequence
  primer
aaattggaatgcccagaacac

SEQ ID NO: 81041 - DNA, 21 bp, Artificial Sequence
  primer
ggcgtaagtctgagtcctgtg

SEQ ID NO: 81042 - DNA, 21 bp, Artificial Sequence
  primer
atccaggttcttggattgtgg

SEQ ID NO: 81043 - DNA, 22 bp, Artificial Sequence
  primer
caactctgcaacgtagaaaggc

SEQ ID NO: 81044 - DNA, 38 bp, Artificial Sequence
  primer
gtaaaacgacggccagtgctgttaggaagccagagtcc

SEQ ID NO: 81045 - DNA, 20 bp, Artificial Sequence
  primer
cagatcctggcgtacctgtc

SEQ ID NO: 81046 - DNA, 38 bp, Artificial Sequence
  primer
gtaaaacgacggccagtgaaatttgggtgtgcatgttg

SEQ ID NO: 81047 - DNA, 21 bp, Artificial Sequence
  primer
ggctttagttccactggatgc

SEQ ID NO: 81048 - DNA, 38 bp, Artificial Sequence
  primer
gtaaaacgacggccagtcaagggtttctccttcacctg

SEQ ID NO: 81049 - DNA, 21 bp, Artificial Sequence
  primer
agtcacagtgagaggtcagcg

SEQ ID NO: 81050 - DNA, 21 bp, Artificial Sequence
  primer
acaatgcaaacaactcatccc

SEQ ID NO: 81051 - DNA, 42 bp, Artificial Sequence
  primer
gtaaaacgacggccagtttgggtacatcctagcttctcatag

SEQ ID NO: 81052 - DNA, 24 bp, Artificial Sequence
  primer
gcataacacttagcaaatagcagg

SEQ ID NO: 81053 - DNA, 36 bp, Artificial Sequence
  primer
gtaaaacgacggccagtcccttatctcctgcatggc

SEQ ID NO: 81054 - DNA, 38 bp, Artificial Sequence
  primer
gtaaaacgacggccagtaggcccaagatgacacatttc

SEQ ID NO: 81055 - DNA, 39 bp, Artificial Sequence
  primer
gtaaaacgacggccagtcctataacaattcgctccttgg

SEQ ID NO: 81056 - DNA, 39 bp, Artificial Sequence
  primer
gtaaaacgacggccagtgaatcacacaatccactcaacc

SEQ ID NO: 81057 - DNA, 27 bp, Artificial Sequence
  primer
tgtataatctacttccatctgagcacc

SEQ ID NO: 81058 - DNA, 18 bp, Artificial Sequence
  primer
cgcacccagccctaaatg

SEQ ID NO: 81059 - DNA, 39 bp, Artificial Sequence
  primer
gtaaaacgacggccagtttctaagtcccgttccactctg

SEQ ID NO: 81060 - DNA, 23 bp, Artificial Sequence
  primer
aagtatacgggcagtgagagaga

SEQ ID NO: 81061 - DNA, 27 bp, Artificial Sequence
  primer
tttatgtctaatttcccagactactgc

SEQ ID NO: 81062 - DNA, 24 bp, Artificial Sequence
  primer
acaactctcaaaggaactgaaact

SEQ ID NO: 81063 - DNA, 43 bp, Artificial Sequence
  primer
gtaaaacgacggccagttggaatgatcttcagaaacactacac

SEQ ID NO: 81064 - DNA, 21 bp, Artificial Sequence
  primer
ttcacttctctgctcgtctgg

SEQ ID NO: 81065 - DNA, 21 bp, Artificial Sequence
  primer
gggacctgatcttctcacagg

SEQ ID NO: 81066 - DNA, 21 bp, Artificial Sequence
  primer
caggttccagaggcttctcag

SEQ ID NO: 81067 - DNA, 38 bp, Artificial Sequence
  primer
gtaaaacgacggccagtctgctggtcttgaatctggtc

SEQ ID NO: 81068 - DNA, 21 bp, Artificial Sequence
  primer
cgtgtttcactttcttctcgc

SEQ ID NO: 81069 - DNA, 21 bp, Artificial Sequence
  primer
acttctgactgccttgggttc

SEQ ID NO: 81070 - DNA, 38 bp, Artificial Sequence
  primer
gtaaaacgacggccagtttcgaggcctttctctagctg

SEQ ID NO: 81071 - DNA, 21 bp, Artificial Sequence
  primer
ttgcaatttccctctttggag

SEQ ID NO: 81072 - DNA, 38 bp, Artificial Sequence
  primer
gtaaaacgacggccagtaacgtagcaggcaaagactcc

SEQ ID NO: 81073 - DNA, 42 bp, Artificial Sequence
  primer
gtaaaacgacggccagtgccactatgtataccttgaatgtcc

SEQ ID NO: 81074 - DNA, 41 bp, Artificial Sequence
  primer
gtaaaacgacggccagtaaagatggtctttgctgtaagtca

SEQ ID NO: 81075 - DNA, 21 bp, Artificial Sequence
  primer
ctgaggcaagaatggtgacag

SEQ ID NO: 81076 - DNA, 38 bp, Artificial Sequence
  primer
gtaaaacgacggccagttgtgccattaggtgtttgagc

SEQ ID NO: 81077 - DNA, 22 bp, Artificial Sequence
  primer
tcagtattcctatgccattccc

SEQ ID NO: 81078 - DNA, 38 bp, Artificial Sequence
  primer
gtaaaacgacggccagttctcaaactcccggactcaag

SEQ ID NO: 81079 - DNA, 23 bp, Artificial Sequence
  primer
tgcaccatgatcaaagatattca

SEQ ID NO: 81080 - DNA, 39 bp, Artificial Sequence
  primer
gtaaaacgacggccagtgcagactgttgctgttcttctc

SEQ ID NO: 81081 - DNA, 38 bp, Artificial Sequence
  primer
gtaaaacgacggccagtaaagcagatggctttcagagg

SEQ ID NO: 81082 - DNA, 22 bp, Artificial Sequence
  primer
tcacaagcataataggcctcac

SEQ ID NO: 81083 - DNA, 37 bp, Artificial Sequence
  primer
gtaaaacgacggccagtaggctgaggtgggaagattg

SEQ ID NO: 81084 - DNA, 22 bp, Artificial Sequence
  primer
gccttatgcttagctgaaaggg

SEQ ID NO: 81085 - DNA, 23 bp, Artificial Sequence
  primer
tctaaatttccctttcaacccac

SEQ ID NO: 81086 - DNA, 38 bp, Artificial Sequence
  primer
gtaaaacgacggccagtgattacggcaaggaggatcag

SEQ ID NO: 81087 - DNA, 25 bp, Artificial Sequence
  primer
tggagattatgacttcaaagcaatg

SEQ ID NO: 81088 - DNA, 38 bp, Artificial Sequence
  primer
gtaaaacgacggccagtaaccatcctccatcttgcatc

SEQ ID NO: 81089 - DNA, 24 bp, Artificial Sequence
  primer
ccaattcttccaataaatttgtga

SEQ ID NO: 81090 - DNA, 23 bp, Artificial Sequence
  primer
gagctataatcatggcactgcac

SEQ ID NO: 81091 - DNA, 39 bp, Artificial Sequence
  primer
gtaaaacgacggccagtgtgcaaactgtgtaggaaatgg

SEQ ID NO: 81092 - DNA, 21 bp, Artificial Sequence
  primer
cccaagaggtggaagtttcag

SEQ ID NO: 81093 - DNA, 21 bp, Artificial Sequence
  primer
gtaaacccatggcctcagttc

SEQ ID NO: 81094 - DNA, 38 bp, Artificial Sequence
  primer
gtaaaacgacggccagtagaccaatagcacaccacagg

SEQ ID NO: 81095 - DNA, 20 bp, Artificial Sequence
  primer
catctctcagccaggtccac

SEQ ID NO: 81096 - DNA, 21 bp, Artificial Sequence
  primer
ccaagaggattggcagaaatg

SEQ ID NO: 81097 - DNA, 21 bp, Artificial Sequence
  primer
gccatggttcatttccttctc

SEQ ID NO: 81098 - DNA, 22 bp, Artificial Sequence
  primer
tccagggagggaaagagttatc

SEQ ID NO: 81099 - DNA, 20 bp, Artificial Sequence
  primer
ctaacctccttcaggcccag

SEQ ID NO: 81100 - DNA, 37 bp, Artificial Sequence
  primer
gtaaaacgacggccagtcctgttccctcacacctcag

SEQ ID NO: 81101 - DNA, 38 bp, Artificial Sequence
  primer
gtaaaacgacggccagttgtaaccttgaacctggaccc

SEQ ID NO: 81102 - DNA, 38 bp, Artificial Sequence
  primer
gtaaaacgacggccagtctgctggatagagagcaaggg

SEQ ID NO: 81103 - DNA, 37 bp, Artificial Sequence
  primer
gtaaaacgacggccagtattccaggaaagcaggaacc

SEQ ID NO: 81104 - DNA, 38 bp, Artificial Sequence
  primer
gtaaaacgacggccagtaatggcaagaaggtaccactg

SEQ ID NO: 81105 - DNA, 21 bp, Artificial Sequence
  primer
ccctaaaccaaggccatctac

SEQ ID NO: 81106 - DNA, 22 bp, Artificial Sequence
  primer
tttacctggcagagaagcagtc

SEQ ID NO: 81107 - DNA, 38 bp, Artificial Sequence
  primer
gtaaaacgacggccagtgaacctgcaccaaggactgag

SEQ ID NO: 81108 - DNA, 38 bp, Artificial Sequence
  primer
gtaaaacgacggccagtcccaaatccactatctgtggg

SEQ ID NO: 81109 - DNA, 21 bp, Artificial Sequence
  primer
agacatacgacgctgagggac

SEQ ID NO: 81110 - DNA, 20 bp, Artificial Sequence
  primer
ctcctcaggaagtggctgtg

SEQ ID NO: 81111 - DNA, 38 bp, Artificial Sequence
  primer
gtaaaacgacggccagtctcttctgctgttgttccagg

SEQ ID NO: 81112 - DNA, 21 bp, Artificial Sequence
  primer
tggataatagggacccattcc

SEQ ID NO: 81113 - DNA, 21 bp, Artificial Sequence
  primer
aacaagagctcccaccatctc

SEQ ID NO: 81114 - DNA, 38 bp, Artificial Sequence
  primer
gtaaaacgacggccagtaaatggtagcaccaggctgac

SEQ ID NO: 81115 - DNA, 22 bp, Artificial Sequence
  primer
ctggcttgtacaatttagcgtg

SEQ ID NO: 81116 - DNA, 21 bp, Artificial Sequence
  primer
cggttccagcagtctcctaag

SEQ ID NO: 81117 - DNA, 21 bp, Artificial Sequence
  primer
cttgtctctccatggctctcc

SEQ ID NO: 81118 - DNA, 39 bp, Artificial Sequence
  primer
gtaaaacgacggccagtcacaatgagacatgggtctgag

SEQ ID NO: 81119 - DNA, 38 bp, Artificial Sequence
  primer
gtaaaacgacggccagtcaggctttaaatccagggagc

SEQ ID NO: 81120 - DNA, 21 bp, Artificial Sequence
  primer
taagtccttagatcccgctcc

SEQ ID NO: 81121 - DNA, 38 bp, Artificial Sequence
  primer
gtaaaacgacggccagtatttctgactctcagcccgtc

SEQ ID NO: 81122 - DNA, 20 bp, Artificial Sequence
  primer
ttgcggataactggcttgac

SEQ ID NO: 81123 - DNA, 38 bp, Artificial Sequence
  primer
gtaaaacgacggccagtgcactgttgctcccaagttag

SEQ ID NO: 81124 - DNA, 37 bp, Artificial Sequence
  primer
gtaaaacgacggccagtgatggaagagggaagccaag

SEQ ID NO: 81125 - DNA, 21 bp, Artificial Sequence
  primer
ttctcaatgattccctctcgg

SEQ ID NO: 81126 - DNA, 21 bp, Artificial Sequence
  primer
agaagccagtgtctggtgctc

SEQ ID NO: 81127 - DNA, 21 bp, Artificial Sequence
  primer
gatagggtcaggagcagcaag

SEQ ID NO: 81128 - DNA, 21 bp, Artificial Sequence
  primer
aaaccatacagcactaggccc

SEQ ID NO: 81129 - DNA, 21 bp, Artificial Sequence
  primer
cttaccagcttctgtccctgg

SEQ ID NO: 81130 - DNA, 21 bp, Artificial Sequence
  primer
acaaggtctttagcgtggagc

SEQ ID NO: 81131 - DNA, 38 bp, Artificial Sequence
  primer
gtaaaacgacggccagtgaggtcaggtcagtgtgggag

SEQ ID NO: 81132 - DNA, 38 bp, Artificial Sequence
  primer
gtaaaacgacggccagtccttcacaacctcctagaccc

SEQ ID NO: 81133 - DNA, 38 bp, Artificial Sequence
  primer
gtaaaacgacggccagttcttcttccttgagcctccac

SEQ ID NO: 81134 - DNA, 21 bp, Artificial Sequence
  primer
ttgcccaacataaaggtcctc

SEQ ID NO: 81135 - DNA, 21 bp, Artificial Sequence
  primer
cactcaggatgtgagccagtg

SEQ ID NO: 81136 - DNA, 21 bp, Artificial Sequence
  primer
acatgatgtcctcaggaaccc

SEQ ID NO: 81137 - DNA, 21 bp, Artificial Sequence
  primer
ctccttccctgtgctggtatc

SEQ ID NO: 81138 - DNA, 22 bp, Artificial Sequence
  primer
ggacagacagacaccagtcctc

SEQ ID NO: 81139 - DNA, 38 bp, Artificial Sequence
  primer
gtaaaacgacggccagtgctcaccagaaacaaagccag

SEQ ID NO: 81140 - DNA, 38 bp, Artificial Sequence
  primer
gtaaaacgacggccagtcaaagttgtgcagatgcttcc

SEQ ID NO: 81141 - DNA, 21 bp, Artificial Sequence
  primer
gaggaacagtggtgagaaggg

SEQ ID NO: 81142 - DNA, 18 bp, Artificial Sequence
  primer
acctcccacaccctggtc

SEQ ID NO: 81143 - DNA, 38 bp, Artificial Sequence
  primer
gtaaaacgacggccagttgggcagggtttcttcactac

SEQ ID NO: 81144 - DNA, 20 bp, Artificial Sequence
  primer
ggaatgactttgtggcatgg

SEQ ID NO: 81145 - DNA, 38 bp, Artificial Sequence
  primer
gtaaaacgacggccagtatatttgacacacagcagccc

SEQ ID NO: 81146 - DNA, 21 bp, Artificial Sequence
  primer
ctcctgagttcagcttcctcc

SEQ ID NO: 81147 - DNA, 38 bp, Artificial Sequence
  primer
gtaaaacgacggccagtgggcagaacctaactcctctg

SEQ ID NO: 81148 - DNA, 21 bp, Artificial Sequence
  primer
gagcccagatcgtgatattgc

SEQ ID NO: 81149 - DNA, 38 bp, Artificial Sequence
  primer
gtaaaacgacggccagtccaacaccttcaggaccagac

SEQ ID NO: 81150 - DNA, 20 bp, Artificial Sequence
  primer
gtgggtacatgcaggtggac

SEQ ID NO: 81151 - DNA, 38 bp, Artificial Sequence
  primer
gtaaaacgacggccagtgaggctctgcacctcacctac

SEQ ID NO: 81152 - DNA, 20 bp, Artificial Sequence
  primer
gagaagagagcgtgaggctg

SEQ ID NO: 81153 - DNA, 37 bp, Artificial Sequence
  primer
gtaaaacgacggccagtcagggaaacgacatggtcag

SEQ ID NO: 81154 - DNA, 38 bp, Artificial Sequence
  primer
gtaaaacgacggccagtaagaaggagctcatgtccagg

SEQ ID NO: 81155 - DNA, 20 bp, Artificial Sequence
  primer
cagattccagcatcagcctc

SEQ ID NO: 81156 - DNA, 21 bp, Artificial Sequence
  primer
acccagcacctatgagtcacc

SEQ ID NO: 81157 - DNA, 21 bp, Artificial Sequence
  primer
ctgcatttatgttggctccag

SEQ ID NO: 81158 - DNA, 18 bp, Artificial Sequence
  primer
aatgagcctttgggctgg

SEQ ID NO: 81159 - DNA, 21 bp, Artificial Sequence
  primer
aggtcagatgtaggaaaggcg

SEQ ID NO: 81160 - DNA, 37 bp, Artificial Sequence
  primer
gtaaaacgacggccagtctcctgtggaggtaggaggg

SEQ ID NO: 81161 - DNA, 21 bp, Artificial Sequence
  primer
agtcaggtcccatgctgtgtc

SEQ ID NO: 81162 - DNA, 38 bp, Artificial Sequence
  primer
gtaaaacgacggccagtatttgctgtatctggcaaccc

SEQ ID NO: 81163 - DNA, 38 bp, Artificial Sequence
  primer
gtaaaacgacggccagttttgctggtttgaagcttgtc

SEQ ID NO: 81164 - DNA, 38 bp, Artificial Sequence
  primer
gtaaaacgacggccagtagggagctggtttattggagg

SEQ ID NO: 81165 - DNA, 38 bp, Artificial Sequence
  primer
gtaaaacgacggccagtgtaggagagatggcgctgttg

SEQ ID NO: 81166 - DNA, 38 bp, Artificial Sequence
  primer
gtaaaacgacggccagtacatgtgactcatcagggcag

SEQ ID NO: 81167 - DNA, 38 bp, Artificial Sequence
  primer
gtaaaacgacggccagtgtttccatttgctgacttccc

SEQ ID NO: 81168 - DNA, 38 bp, Artificial Sequence
  primer
gtaaaacgacggccagtgtacatgccagccttcaggtc

SEQ ID NO: 81169 - DNA, 21 bp, Artificial Sequence
  primer
tcaggaatgtgtgaaagggtg

SEQ ID NO: 81170 - DNA, 21 bp, Artificial Sequence
  primer
cacttcctccatcctcagctc

SEQ ID NO: 81171 - DNA, 38 bp, Artificial Sequence
  primer
gtaaaacgacggccagtccacacaagcagaatcaaagc

SEQ ID NO: 81172 - DNA, 20 bp, Artificial Sequence
  primer
cttgtccaggcctctgtctc

SEQ ID NO: 81173 - DNA, 21 bp, Artificial Sequence
  primer
gggcagaaggcactaatcaag

SEQ ID NO: 81174 - DNA, 38 bp, Artificial Sequence
  primer
gtaaaacgacggccagtgatcagagagccaggaacctc

SEQ ID NO: 81175 - DNA, 21 bp, Artificial Sequence
  primer
tgcagctccatgttactgtcc

SEQ ID NO: 81176 - DNA, 38 bp, Artificial Sequence
  primer
gtaaaacgacggccagtgaatgtttgcgctgagttgtg

SEQ ID NO: 81177 - DNA, 37 bp, Artificial Sequence
  primer
gtaaaacgacggccagtctctctccatgccctctgtg

SEQ ID NO: 81178 - DNA, 22 bp, Artificial Sequence
  primer
gggattgatcagacacgtaagg

SEQ ID NO: 81179 - DNA, 20 bp, Artificial Sequence
  primer
ccctcaagaccactcttccc

SEQ ID NO: 81180 - DNA, 36 bp, Artificial Sequence
  primer
gtaaaacgacggccagtcagtggctggacttctggg

SEQ ID NO: 81181 - DNA, 39 bp, Artificial Sequence
  primer
gtaaaacgacggccagtcctgaccaatacggagtaatgc

SEQ ID NO: 81182 - DNA, 20 bp, Artificial Sequence
  primer
aggagtctcacccaaccacc

SEQ ID NO: 81183 - DNA, 19 bp, Artificial Sequence
  primer
cgtcactttcaagtcgccc

SEQ ID NO: 81184 - DNA, 39 bp, Artificial Sequence
  primer
gtaaaacgacggccagtccttaggtcaccactttgtgtg

SEQ ID NO: 81185 - DNA, 19 bp, Artificial Sequence
  primer
aggcaggtgcctgtaatgc

SEQ ID NO: 81186 - DNA, 40 bp, Artificial Sequence
  primer
gtaaaacgacggccagtgcaatcacagtacttcccatttg

SEQ ID NO: 81187 - DNA, 20 bp, Artificial Sequence
  primer
aaccacctagcgattccagc

SEQ ID NO: 81188 - DNA, 21 bp, Artificial Sequence
  primer
tctaggctatggatgtgaggg

SEQ ID NO: 81189 - DNA, 37 bp, Artificial Sequence
  primer
gtaaaacgacggccagtaccagaaacatgccatttcg

SEQ ID NO: 81190 - DNA, 42 bp, Artificial Sequence
  primer
gtaaaacgacggccagtaagggagataaaccaatcaactttc

SEQ ID NO: 81191 - DNA, 42 bp, Artificial Sequence
  primer
gtaaaacgacggccagttgcttaactagctatttcctctcgg

SEQ ID NO: 81192 - DNA, 21 bp, Artificial Sequence
  primer
ccagagagatcccaactccag

SEQ ID NO: 81193 - DNA, 41 bp, Artificial Sequence
  primer
gtaaaacgacggccagttggtcaatgaaatctgtaatgctc

SEQ ID NO: 81194 - DNA, 21 bp, Artificial Sequence
  primer
tgtgcagtctgaggatttctg

SEQ ID NO: 81195 - DNA, 25 bp, Artificial Sequence
  primer
aaatttctcatcagctccttagttt

SEQ ID NO: 81196 - DNA, 40 bp, Artificial Sequence
  primer
gtaaaacgacggccagtccacattatagcaccatgtgaaa

SEQ ID NO: 81197 - DNA, 38 bp, Artificial Sequence
  primer
gtaaaacgacggccagtacctgtgatattggtggaggg

SEQ ID NO: 81198 - DNA, 38 bp, Artificial Sequence
  primer
gtaaaacgacggccagtcacagcctggaatcacaaatg

SEQ ID NO: 81199 - DNA, 21 bp, Artificial Sequence
  primer
cgacccaagggaaagatattg

SEQ ID NO: 81200 - DNA, 40 bp, Artificial Sequence
  primer
gtaaaacgacggccagttggatacctgaggatcttgagac

SEQ ID NO: 81201 - DNA, 38 bp, Artificial Sequence
  primer
gtaaaacgacggccagtcgcttaatcctgaatgaccag

SEQ ID NO: 81202 - DNA, 39 bp, Artificial Sequence
  primer
gtaaaacgacggccagtaaacgcttaatcctgaatgacc

SEQ ID NO: 81203 - DNA, 23 bp, Artificial Sequence
  primer
aacacatatgccttgtctatgcc

SEQ ID NO: 81204 - DNA, 25 bp, Artificial Sequence
  primer
tggttacaaatatcaaggtcctcac

SEQ ID NO: 81205 - DNA, 22 bp, Artificial Sequence
  primer
ccactgtgcctagctggtaatc

SEQ ID NO: 81206 - DNA, 21 bp, Artificial Sequence
  primer
cagtctccttcaggcacagtc

SEQ ID NO: 81207 - DNA, 38 bp, Artificial Sequence
  primer
gtaaaacgacggccagtcataagctaccgtgtccagcc

SEQ ID NO: 81208 - DNA, 22 bp, Artificial Sequence
  primer
ttcacttgactttgtggcaatg

SEQ ID NO: 81209 - DNA, 41 bp, Artificial Sequence
  primer
gtaaaacgacggccagttgatccaaagtatctcaacattcg

SEQ ID NO: 81210 - DNA, 18 bp, Artificial Sequence
  primer
gaacctgggaggcagagc

SEQ ID NO: 81211 - DNA, 22 bp, Artificial Sequence
  primer
cctcatggaatgccatctacac

SEQ ID NO: 81212 - DNA, 23 bp, Artificial Sequence
  primer
tgtggtcaatcaattgttattgc

SEQ ID NO: 81213 - DNA, 18 bp, Artificial Sequence
  primer
gcccttctccttccaggg

SEQ ID NO: 81214 - DNA, 38 bp, Artificial Sequence
  primer
gtaaaacgacggccagtggaacccagaaacccatacag

SEQ ID NO: 81215 - DNA, 28 bp, Artificial Sequence
  primer
catagaaatgtgttctgtaacctacgat

SEQ ID NO: 81216 - DNA, 25 bp, Artificial Sequence
  primer
cacacatttagttgctagagaaccc

SEQ ID NO: 81217 - DNA, 38 bp, Artificial Sequence
  primer
gtaaaacgacggccagtgtccataactgctgggaacag

SEQ ID NO: 81218 - DNA, 23 bp, Artificial Sequence
  primer
cctaccaacctcacataacaacc

SEQ ID NO: 81219 - DNA, 24 bp, Artificial Sequence
  primer
aggaatgtgaaagttagtgtgcag

SEQ ID NO: 81220 - DNA, 35 bp, Artificial Sequence
  primer
gtaaaacgacggccagttcttctgcgtgcctttgg

SEQ ID NO: 81221 - DNA, 21 bp, Artificial Sequence
  primer
agacttcgcaattcttctggg

SEQ ID NO: 81222 - DNA, 21 bp, Artificial Sequence
  primer
aactcttggtcctcataccgc

SEQ ID NO: 81223 - DNA, 38 bp, Artificial Sequence
  primer
gtaaaacgacggccagtggatttccgacagcttcattc

SEQ ID NO: 81224 - DNA, 38 bp, Artificial Sequence
  primer
gtaaaacgacggccagttctggtctccatgtggtcttg

SEQ ID NO: 81225 - DNA, 20 bp, Artificial Sequence
  primer
ctttcctggatttcccgttc

SEQ ID NO: 81226 - DNA, 44 bp, Artificial Sequence
  primer
gtaaaacgacggccagtcaataggtgctgggttattacatacag

SEQ ID NO: 81227 - DNA, 21 bp, Artificial Sequence
  primer
tgcaactctagcatttggcag

SEQ ID NO: 81228 - DNA, 21 bp, Artificial Sequence
  primer
aaacgtgggtttctctccttc

SEQ ID NO: 81229 - DNA, 39 bp, Artificial Sequence
  primer
gtaaaacgacggccagtcagtcacacaaagtatcctgcg

SEQ ID NO: 81230 - DNA, 39 bp, Artificial Sequence
  primer
gtaaaacgacggccagttgctggcaactgttctttagtg

SEQ ID NO: 81231 - DNA, 21 bp, Artificial Sequence
  primer
tgttgggaagtcaagaacagc

SEQ ID NO: 81232 - DNA, 38 bp, Artificial Sequence
  primer
gtaaaacgacggccagtaaacactcactcagggcacag

SEQ ID NO: 81233 - DNA, 38 bp, Artificial Sequence
  primer
gtaaaacgacggccagtgcacgacatttcaaagactgg

SEQ ID NO: 81234 - DNA, 38 bp, Artificial Sequence
  primer
gtaaaacgacggccagtaagacagagaatgtggctggc

SEQ ID NO: 81235 - DNA, 38 bp, Artificial Sequence
  primer
gtaaaacgacggccagtacccatggcagctaagttacg

SEQ ID NO: 81236 - DNA, 39 bp, Artificial Sequence
  primer
gtaaaacgacggccagttgatgaattcctaattgctggg

SEQ ID NO: 81237 - DNA, 38 bp, Artificial Sequence
  primer
gtaaaacgacggccagtcaaatggagaatctgcacagc

SEQ ID NO: 81238 - DNA, 38 bp, Artificial Sequence
  primer
gtaaaacgacggccagttccaggttcttggtcttcctc

SEQ ID NO: 81239 - DNA, 21 bp, Artificial Sequence
  primer
ccagagtcctgtttcctctcc

SEQ ID NO: 81240 - DNA, 39 bp, Artificial Sequence
  primer
gtaaaacgacggccagtaagttgatttctctccagcagc

SEQ ID NO: 81241 - DNA, 22 bp, Artificial Sequence
  primer
cagcccgaaggttagtgttatg

SEQ ID NO: 81242 - DNA, 37 bp, Artificial Sequence
  primer
gtaaaacgacggccagtagggtgcaaaggtttgaatg

SEQ ID NO: 81243 - DNA, 22 bp, Artificial Sequence
  primer
cactgcagagagctggaaagac

SEQ ID NO: 81244 - DNA, 38 bp, Artificial Sequence
  primer
gtaaaacgacggccagtgtctgccttaggcctacctgg

SEQ ID NO: 81245 - DNA, 38 bp, Artificial Sequence
  primer
gtaaaacgacggccagtgatttcccactcttaaggccc

SEQ ID NO: 81246 - DNA, 38 bp, Artificial Sequence
  primer
gtaaaacgacggccagtgctgctgacatccttatttgc

SEQ ID NO: 81247 - DNA, 38 bp, Artificial Sequence
  primer
gtaaaacgacggccagtaataggccaatagggaaaggc

SEQ ID NO: 81248 - DNA, 19 bp, Artificial Sequence
  primer
cttgtctggcccattcctc

SEQ ID NO: 81249 - DNA, 38 bp, Artificial Sequence
  primer
gtaaaacgacggccagtataagcagaacaggcccagag

SEQ ID NO: 81250 - DNA, 21 bp, Artificial Sequence
  primer
tgcaagccctaaggtagcaag

SEQ ID NO: 81251 - DNA, 21 bp, Artificial Sequence
  primer
ctaggatgctggattccaagg

SEQ ID NO: 81252 - DNA, 37 bp, Artificial Sequence
  primer
gtaaaacgacggccagtagtgacggatgtgggaaatg

SEQ ID NO: 81253 - DNA, 38 bp, Artificial Sequence
  primer
gtaaaacgacggccagtcaacctcacagcccagaaatc

SEQ ID NO: 81254 - DNA, 21 bp, Artificial Sequence
  primer
tggaaatgtctctcccattgc

SEQ ID NO: 81255 - DNA, 39 bp, Artificial Sequence
  primer
gtaaaacgacggccagtaaggagaggagtcaggaagaaa

SEQ ID NO: 81256 - DNA, 38 bp, Artificial Sequence
  primer
gtaaaacgacggccagtggaaggctacaagtcctccac

SEQ ID NO: 81257 - DNA, 21 bp, Artificial Sequence
  primer
aattacgggaaactggtgagg

SEQ ID NO: 81258 - DNA, 22 bp, Artificial Sequence
  primer
caacctagggagaaacacatgg

SEQ ID NO: 81259 - DNA, 21 bp, Artificial Sequence
  primer
gaatcacctaagcccaggagg

SEQ ID NO: 81260 - DNA, 21 bp, Artificial Sequence
  primer
caggtgggtaggcagctttac

SEQ ID NO: 81261 - DNA, 21 bp, Artificial Sequence
  primer
gctctgacccagtgacaaagg

SEQ ID NO: 81262 - DNA, 39 bp, Artificial Sequence
  primer
gtaaaacgacggccagttgtggcaagatgaaatcaagtg

SEQ ID NO: 81263 - DNA, 38 bp, Artificial Sequence
  primer
gtaaaacgacggccagtctcaacttcaggcagcagctc

SEQ ID NO: 81264 - DNA, 21 bp, Artificial Sequence
  primer
tgagcacatctctgtgagcag

SEQ ID NO: 81265 - DNA, 37 bp, Artificial Sequence
  primer
gtaaaacgacggccagtcaggctgttgtccctagcag

SEQ ID NO: 81266 - DNA, 21 bp, Artificial Sequence
  primer
acctgtgaagtagggacccag

SEQ ID NO: 81267 - DNA, 38 bp, Artificial Sequence
  primer
gtaaaacgacggccagtatctggagggagaaagtggtg

SEQ ID NO: 81268 - DNA, 21 bp, Artificial Sequence
  primer
gagctctccagcctctacctg

SEQ ID NO: 81269 - DNA, 22 bp, Artificial Sequence
  primer
ccaaggagaggagagattgagg

SEQ ID NO: 81270 - DNA, 23 bp, Artificial Sequence
  primer
tcaggaagcaaatatactgaccc

SEQ ID NO: 81271 - DNA, 21 bp, Artificial Sequence
  primer
cctctgagctggtgtacctgg

SEQ ID NO: 81272 - DNA, 18 bp, Artificial Sequence
  primer
agtctggacccagggcag

SEQ ID NO: 81273 - DNA, 25 bp, Artificial Sequence
  primer
actggtactgacaccataaatcacg

SEQ ID NO: 81274 - DNA, 27 bp, Artificial Sequence
  primer
cagactttgagagtcaagataaaccag

SEQ ID NO: 81275 - DNA, 39 bp, Artificial Sequence
  primer
gtaaaacgacggccagtaatttgtaactcacccgtttgg

SEQ ID NO: 81276 - DNA, 38 bp, Artificial Sequence
  primer
gtaaaacgacggccagtgaatgacatgattgcattgcc

SEQ ID NO: 81277 - DNA, 26 bp, Artificial Sequence
  primer
aatgacactttgaataactccatttg

SEQ ID NO: 81278 - DNA, 22 bp, Artificial Sequence
  primer
tgggaatgtctgaatctgttcc

SEQ ID NO: 81279 - DNA, 24 bp, Artificial Sequence
  primer
gaaatgcacaaagttgtgtgaaac

SEQ ID NO: 81280 - DNA, 39 bp, Artificial Sequence
  primer
gtaaaacgacggccagttcaccttccttagccaacctaa

SEQ ID NO: 81281 - DNA, 37 bp, Artificial Sequence
  primer
gtaaaacgacggccagtaaattccttgccctttgctc

SEQ ID NO: 81282 - DNA, 43 bp, Artificial Sequence
  primer
gtaaaacgacggccagtttgatgtatagctagcttcaggacac

SEQ ID NO: 81283 - DNA, 39 bp, Artificial Sequence
  primer
gtaaaacgacggccagtgaggccttaatgagtgcttacc

SEQ ID NO: 81284 - DNA, 41 bp, Artificial Sequence
  primer
gtaaaacgacggccagttgagagcagtgtcaatcctaagtc

SEQ ID NO: 81285 - DNA, 40 bp, Artificial Sequence
  primer
gtaaaacgacggccagtgccattattgctacaagaaacca

SEQ ID NO: 81286 - DNA, 44 bp, Artificial Sequence
  primer
gtaaaacgacggccagtggtaatcatttctttaaacacttggaa

SEQ ID NO: 81287 - DNA, 23 bp, Artificial Sequence
  primer
ctgttgggattagattagcttgc

SEQ ID NO: 81288 - DNA, 24 bp, Artificial Sequence
  primer
gatgtctcctaaacagctcaaagc

SEQ ID NO: 81289 - DNA, 38 bp, Artificial Sequence
  primer
gtaaaacgacggccagtacaccaataccaaagcaaggc

SEQ ID NO: 81290 - DNA, 27 bp, Artificial Sequence
  primer
taacacatacattggaactcttcctac

SEQ ID NO: 81291 - DNA, 38 bp, Artificial Sequence
  primer
gtaaaacgacggccagtagcagctctggcaaagaaatc

SEQ ID NO: 81292 - DNA, 27 bp, Artificial Sequence
  primer
tgtatgaagtgtaacctgacacaaatc

SEQ ID NO: 81293 - DNA, 42 bp, Artificial Sequence
  primer
gtaaaacgacggccagttttgtgctagtctgtaactttccaa

SEQ ID NO: 81294 - DNA, 40 bp, Artificial Sequence
  primer
gtaaaacgacggccagttgcaattcatatgctttactggg

SEQ ID NO: 81295 - DNA, 37 bp, Artificial Sequence
  primer
gtaaaacgacggccagtccgaatccatctgactccaa

SEQ ID NO: 81296 - DNA, 23 bp, Artificial Sequence
  primer
tttaaccttggcattaagcttgt

SEQ ID NO: 81297 - DNA, 38 bp, Artificial Sequence
  primer
gtaaaacgacggccagtcaagggctaggaggaagtgtg

SEQ ID NO: 81298 - DNA, 38 bp, Artificial Sequence
  primer
gtaaaacgacggccagtctgataagacaacgtgcaccc

SEQ ID NO: 81299 - DNA, 22 bp, Artificial Sequence
  primer
tgagcagaagatccaagaggag

SEQ ID NO: 81300 - DNA, 40 bp, Artificial Sequence
  primer
gtaaaacgacggccagttcctttcggatataccgttacag

SEQ ID NO: 81301 - DNA, 21 bp, Artificial Sequence
  primer
aggaaatgacaccatggaaat

SEQ ID NO: 81302 - DNA, 39 bp, Artificial Sequence
  primer
gtaaaacgacggccagtgaacccatgaatatgaaggacc

SEQ ID NO: 81303 - DNA, 24 bp, Artificial Sequence
  primer
ttactctgagcctggttccttaac

SEQ ID NO: 81304 - DNA, 38 bp, Artificial Sequence
  primer
gtaaaacgacggccagttgcaggagcagggacagtaac

SEQ ID NO: 81305 - DNA, 20 bp, Artificial Sequence
  primer
tcaaaggaggcagaagcaag

SEQ ID NO: 81306 - DNA, 21 bp, Artificial Sequence
  primer
cagaggatagcttgagcccag

SEQ ID NO: 81307 - DNA, 39 bp, Artificial Sequence
  primer
gtaaaacgacggccagtccaggcccaattataatctttc

SEQ ID NO: 81308 - DNA, 38 bp, Artificial Sequence
  primer
gtaaaacgacggccagtaaggcagggcctatatcttgc

SEQ ID NO: 81309 - DNA, 27 bp, Artificial Sequence
  primer
cgtttatgtaaatacagttcacattgc

SEQ ID NO: 81310 - DNA, 38 bp, Artificial Sequence
  primer
gtaaaacgacggccagttcctctcccacttctccagtt

SEQ ID NO: 81311 - DNA, 18 bp, Artificial Sequence
  primer
gagtccttgggcggctct

SEQ ID NO: 81312 - DNA, 36 bp, Artificial Sequence
  primer
gtaaaacgacggccagtggctgggagtccagtatgc

SEQ ID NO: 81313 - DNA, 21 bp, Artificial Sequence
  primer
tgcggttatatatgcgtgacc

SEQ ID NO: 81314 - DNA, 23 bp, Artificial Sequence
  primer
tctacccaaatgatatttgtcgg

SEQ ID NO: 81315 - DNA, 21 bp, Artificial Sequence
  primer
ctgtatcttcaatcaaggcgg

SEQ ID NO: 81316 - DNA, 21 bp, Artificial Sequence
  primer
gtgagcttggattgtgtttgg

SEQ ID NO: 81317 - DNA, 45 bp, Artificial Sequence
  primer
gtaaaacgacggccagtttgtgctgtttaaactttagattagtgg

SEQ ID NO: 81318 - DNA, 39 bp, Artificial Sequence
  primer
gtaaaacgacggccagttcagttgctcaccaagattctg

SEQ ID NO: 81319 - DNA, 38 bp, Artificial Sequence
  primer
gtaaaacgacggccagttgcaacagagcagaaaggatg

SEQ ID NO: 81320 - DNA, 21 bp, Artificial Sequence
  primer
tcggtttccctatctgacctc

SEQ ID NO: 81321 - DNA, 38 bp, Artificial Sequence
  primer
gtaaaacgacggccagtgagtctcagaatcccagaggc

SEQ ID NO: 81322 - DNA, 21 bp, Artificial Sequence
  primer
gaattccagagtatgctgggc

SEQ ID NO: 81323 - DNA, 21 bp, Artificial Sequence
  primer
tatagctgacctcctgccacc

SEQ ID NO: 81324 - DNA, 21 bp, Artificial Sequence
  primer
agtgactggatggacaaaggc

SEQ ID NO: 81325 - DNA, 38 bp, Artificial Sequence
  primer
gtaaaacgacggccagtcatcattctggcacattctgg

SEQ ID NO: 81326 - DNA, 21 bp, Artificial Sequence
  primer
gcatggctggaagggatatag

SEQ ID NO: 81327 - DNA, 38 bp, Artificial Sequence
  primer
gtaaaacgacggccagtgaactaactgtggagcatggg

SEQ ID NO: 81328 - DNA, 21 bp, Artificial Sequence
  primer
cacaagcctccaggtatcctc

SEQ ID NO: 81329 - DNA, 21 bp, Artificial Sequence
  primer
ggcttacagtggaaagaacgg

SEQ ID NO: 81330 - DNA, 20 bp, Artificial Sequence
  primer
ggtcggaagaggcagctaag

SEQ ID NO: 81331 - DNA, 20 bp, Artificial Sequence
  primer
cacccatgcttcatttccac

SEQ ID NO: 81332 - DNA, 21 bp, Artificial Sequence
  primer
tgacctacctagttggccgag

SEQ ID NO: 81333 - DNA, 37 bp, Artificial Sequence
  primer
gtaaaacgacggccagtcttagctgtgtggcagaggg

SEQ ID NO: 81334 - DNA, 21 bp, Artificial Sequence
  primer
ggtctgtggtgggagagtagg

SEQ ID NO: 81335 - DNA, 21 bp, Artificial Sequence
  primer
tgttggcactcacccttactg

SEQ ID NO: 81336 - DNA, 22 bp, Artificial Sequence
  primer
ccgccctaggtactcactaacc

SEQ ID NO: 81337 - DNA, 19 bp, Artificial Sequence
  primer
aggatggagccacaaggtg

SEQ ID NO: 81338 - DNA, 45 bp, Artificial Sequence
  primer
gtaaaacgacggccagtaaataaatgatctgatctcttctaagca

SEQ ID NO: 81339 - DNA, 20 bp, Artificial Sequence
  primer
tagcatgccatcgtttctcc

SEQ ID NO: 81340 - DNA, 25 bp, Artificial Sequence
  primer
aggagaagcttacacttctgtcaac

SEQ ID NO: 81341 - DNA, 37 bp, Artificial Sequence
  primer
gtaaaacgacggccagtaccacctgggtttggagatg

SEQ ID NO: 81342 - DNA, 38 bp, Artificial Sequence
  primer
gtaaaacgacggccagtccattggaccaaccagttatc

SEQ ID NO: 81343 - DNA, 21 bp, Artificial Sequence
  primer
aaacattgccaaggaacgaac

SEQ ID NO: 81344 - DNA, 24 bp, Artificial Sequence
  primer
ggatctcggtacaaatacttcagg

SEQ ID NO: 81345 - DNA, 38 bp, Artificial Sequence
  primer
gtaaaacgacggccagttccatatttgctgatcctccc

SEQ ID NO: 81346 - DNA, 18 bp, Artificial Sequence
  primer
ggtcgagaccatcttggc

SEQ ID NO: 81347 - DNA, 18 bp, Artificial Sequence
  primer
cccaagaatccactgggc

SEQ ID NO: 81348 - DNA, 41 bp, Artificial Sequence
  primer
gtaaaacgacggccagttttattacaggttacaagccaccc

SEQ ID NO: 81349 - DNA, 38 bp, Artificial Sequence
  primer
gtaaaacgacggccagtccacatgagaaatctatgccc

SEQ ID NO: 81350 - DNA, 38 bp, Artificial Sequence
  primer
gtaaaacgacggccagtcatggtgctcaggagctaaac

SEQ ID NO: 81351 - DNA, 25 bp, Artificial Sequence
  primer
aactttccctaagctataaaccagg

SEQ ID NO: 81352 - DNA, 21 bp, Artificial Sequence
  primer
ccagctctggagtgtgaaagg

SEQ ID NO: 81353 - DNA, 37 bp, Artificial Sequence
  primer
gtaaaacgacggccagtccaaagcaaaccagcatagg

SEQ ID NO: 81354 - DNA, 22 bp, Artificial Sequence
  primer
tgctaagtatccagacttgccc

SEQ ID NO: 81355 - DNA, 19 bp, Artificial Sequence
  primer
ccagaggcaaaggttgcag

SEQ ID NO: 81356 - DNA, 42 bp, Artificial Sequence
  primer
gtaaaacgacggccagtctgagatataaactgccacactctg

SEQ ID NO: 81357 - DNA, 23 bp, Artificial Sequence
  primer
ttgaacttgtttcttcaattgcc

SEQ ID NO: 81358 - DNA, 38 bp, Artificial Sequence
  primer
gtaaaacgacggccagtagcaggctggacctaggaatg

SEQ ID NO: 81359 - DNA, 38 bp, Artificial Sequence
  primer
gtaaaacgacggccagtagcaatgcctgcaaagttatg

SEQ ID NO: 81360 - DNA, 23 bp, Artificial Sequence
  primer
aaactgccattccctcatatttc

SEQ ID NO: 81361 - DNA, 21 bp, Artificial Sequence
  primer
tgcccagctaacctaaagcag

SEQ ID NO: 81362 - DNA, 21 bp, Artificial Sequence
  primer
ttacaggcatgagaccacacc

SEQ ID NO: 81363 - DNA, 38 bp, Artificial Sequence
  primer
gtaaaacgacggccagttatgatctgccttctgcaggg

SEQ ID NO: 81364 - DNA, 38 bp, Artificial Sequence
  primer
gtaaaacgacggccagtatggcctatgagagagaaggg

SEQ ID NO: 81365 - DNA, 22 bp, Artificial Sequence
  primer
tcaagctccaggacagtaatcc

SEQ ID NO: 81366 - DNA, 21 bp, Artificial Sequence
  primer
tgctatgtatggcaccacctc

SEQ ID NO: 81367 - DNA, 21 bp, Artificial Sequence
  primer
aaagccagaacagccatgaac

SEQ ID NO: 81368 - DNA, 20 bp, Artificial Sequence
  primer
cccttgtggccaatactacg

SEQ ID NO: 81369 - DNA, 21 bp, Artificial Sequence
  primer
gcctgtgtcatgtcacctttc

SEQ ID NO: 81370 - DNA, 21 bp, Artificial Sequence
  primer
gtcgtgctcaggttcacattc

SEQ ID NO: 81371 - DNA, 23 bp, Artificial Sequence
  primer
acactgacaaatgatgctgtttc

SEQ ID NO: 81372 - DNA, 21 bp, Artificial Sequence
  primer
caagaaccaaggttaaagccc

SEQ ID NO: 81373 - DNA, 39 bp, Artificial Sequence
  primer
gtaaaacgacggccagtcagtttggcctcgtaatttctg

SEQ ID NO: 81374 - DNA, 38 bp, Artificial Sequence
  primer
gtaaaacgacggccagtcttgaaaccataccctcaccc

SEQ ID NO: 81375 - DNA, 23 bp, Artificial Sequence
  primer
ggagacattccaggattatcaga

SEQ ID NO: 81376 - DNA, 42 bp, Artificial Sequence
  primer
gtaaaacgacggccagtgctctcagctaataactgctaccac

SEQ ID NO: 81377 - DNA, 25 bp, Artificial Sequence
  primer
aatataagcaggattcttcctctgg

SEQ ID NO: 81378 - DNA, 38 bp, Artificial Sequence
  primer
gtaaaacgacggccagttaatccaggagctatgcccac

SEQ ID NO: 81379 - DNA, 41 bp, Artificial Sequence
  primer
gtaaaacgacggccagtggtgtttcacacacaccattattt

SEQ ID NO: 81380 - DNA, 21 bp, Artificial Sequence
  primer
atgggaatagagaaggtgggc

SEQ ID NO: 81381 - DNA, 38 bp, Artificial Sequence
  primer
gtaaaacgacggccagtccatgacttatggcaggtgac

SEQ ID NO: 81382 - DNA, 21 bp, Artificial Sequence
  primer
cgtcagtggaaggaaggaatc

SEQ ID NO: 81383 - DNA, 22 bp, Artificial Sequence
  primer
tcccttggtattccagtttctg

SEQ ID NO: 81384 - DNA, 38 bp, Artificial Sequence
  primer
gtaaaacgacggccagtcccgcagactcatatctcaca

SEQ ID NO: 81385 - DNA, 40 bp, Artificial Sequence
  primer
gtaaaacgacggccagttcaaactgaaccaagttgtcaaa

SEQ ID NO: 81386 - DNA, 22 bp, Artificial Sequence
  primer
tggcaagttaccagaaagacaa

SEQ ID NO: 81387 - DNA, 40 bp, Artificial Sequence
  primer
gtaaaacgacggccagtaaggtgtgaattgctaagtctgc

SEQ ID NO: 81388 - DNA, 41 bp, Artificial Sequence
  primer
gtaaaacgacggccagtttatcctgcttaaaggcaagagtc

SEQ ID NO: 81389 - DNA, 23 bp, Artificial Sequence
  primer
agcactatttgaggtttgaggct

SEQ ID NO: 81390 - DNA, 23 bp, Artificial Sequence
  primer
aaacacaacccttgacctaagaa

SEQ ID NO: 81391 - DNA, 21 bp, Artificial Sequence
  primer
accactgcactccagtctagg

SEQ ID NO: 81392 - DNA, 38 bp, Artificial Sequence
  primer
gtaaaacgacggccagtagggaaagagaaccgacacag

SEQ ID NO: 81393 - DNA, 38 bp, Artificial Sequence
  primer
gtaaaacgacggccagttccaaacaattcatttcaggg

SEQ ID NO: 81394 - DNA, 21 bp, Artificial Sequence
  primer
tgggaaagtccaactcaaacc

SEQ ID NO: 81395 - DNA, 41 bp, Artificial Sequence
  primer
gtaaaacgacggccagttgttattgttgggaacttaggaaa

SEQ ID NO: 81396 - DNA, 40 bp, Artificial Sequence
  primer
gtaaaacgacggccagtgggtggattagctttaaagtgtg

SEQ ID NO: 81397 - DNA, 42 bp, Artificial Sequence
  primer
gtaaaacgacggccagtaaagttcgtatttccctcatgaatc

SEQ ID NO: 81398 - DNA, 23 bp, Artificial Sequence
  primer
gcttctcttacatgatccttggg

SEQ ID NO: 81399 - DNA, 44 bp, Artificial Sequence
  primer
gtaaaacgacggccagtgcatttgaaattaaagtacatacacag

SEQ ID NO: 81400 - DNA, 43 bp, Artificial Sequence
  primer
gtaaaacgacggccagttctcaatgtatttgaacattacccac

SEQ ID NO: 81401 - DNA, 22 bp, Artificial Sequence
  primer
tgcttcatatttgttgactggg

SEQ ID NO: 81402 - DNA, 25 bp, Artificial Sequence
  primer
aaatatgctatatctttgccactgc

SEQ ID NO: 81403 - DNA, 22 bp, Artificial Sequence
  primer
tcctcatggccttatttacacc

SEQ ID NO: 81404 - DNA, 21 bp, Artificial Sequence
  primer
ttcccacttatggttgagctg

SEQ ID NO: 81405 - DNA, 38 bp, Artificial Sequence
  primer
gtaaaacgacggccagttcgggagctgatttgactatg

SEQ ID NO: 81406 - DNA, 22 bp, Artificial Sequence
  primer
ttcaggctggacttacatagcc

SEQ ID NO: 81407 - DNA, 38 bp, Artificial Sequence
  primer
gtaaaacgacggccagttcataattccatgaggatggc

SEQ ID NO: 81408 - DNA, 42 bp, Artificial Sequence
  primer
gtaaaacgacggccagtgggtatctccaagtttctctatgcc

SEQ ID NO: 81409 - DNA, 21 bp, Artificial Sequence
  primer
cctctgtcaacattagctcgc

SEQ ID NO: 81410 - DNA, 38 bp, Artificial Sequence
  primer
gtaaaacgacggccagtaaacaaacagccagcccatac

SEQ ID NO: 81411 - DNA, 22 bp, Artificial Sequence
  primer
agattgtaggaagtcctgagcg

SEQ ID NO: 81412 - DNA, 39 bp, Artificial Sequence
  primer
gtaaaacgacggccagtaactccctactgcctcaattcc

SEQ ID NO: 81413 - DNA, 21 bp, Artificial Sequence
  primer
acaccacatgacacattgcct

SEQ ID NO: 81414 - DNA, 20 bp, Artificial Sequence
  primer
ccacctcagcctcctaaagc

SEQ ID NO: 81415 - DNA, 39 bp, Artificial Sequence
  primer
gtaaaacgacggccagtgctcttgaaccaagtttgaacc

SEQ ID NO: 81416 - DNA, 38 bp, Artificial Sequence
  primer
gtaaaacgacggccagtccaccacttggactcactagc

SEQ ID NO: 81417 - DNA, 23 bp, Artificial Sequence
  primer
tgtgtctgtggactcaggtaagg

SEQ ID NO: 81418 - DNA, 38 bp, Artificial Sequence
  primer
gtaaaacgacggccagtccagtctctagcagcagggag

SEQ ID NO: 81419 - DNA, 38 bp, Artificial Sequence
  primer
gtaaaacgacggccagtcgtagtggtaggtgagggctg

SEQ ID NO: 81420 - DNA, 20 bp, Artificial Sequence
  primer
tgctacaaggccttcccaac

SEQ ID NO: 81421 - DNA, 21 bp, Artificial Sequence
  primer
ctagagtgggagtcctgtggg

SEQ ID NO: 81422 - DNA, 21 bp, Artificial Sequence
  primer
aaactggtggaaggtgaaagc

SEQ ID NO: 81423 - DNA, 38 bp, Artificial Sequence
  primer
gtaaaacgacggccagtgactacagcactgagcttccg

SEQ ID NO: 81424 - DNA, 38 bp, Artificial Sequence
  primer
gtaaaacgacggccagtgtaggagtacggcacctggag

SEQ ID NO: 81425 - DNA, 38 bp, Artificial Sequence
  primer
gtaaaacgacggccagtacatgaactcgatctcctgcc

SEQ ID NO: 81426 - DNA, 21 bp, Artificial Sequence
  primer
agtacttgtagcgctgggctc

SEQ ID NO: 81427 - DNA, 20 bp, Artificial Sequence
  primer
acagctgagagcgagtccag

SEQ ID NO: 81428 - DNA, 18 bp, Artificial Sequence
  primer
agtggctgggtcctgtcc

SEQ ID NO: 81429 - DNA, 21 bp, Artificial Sequence
  primer
acctgtgtttggtgtctggtc

SEQ ID NO: 81430 - DNA, 21 bp, Artificial Sequence
  primer
cagctggaagtgacaggagtg

SEQ ID NO: 81431 - DNA, 21 bp, Artificial Sequence
  primer
ggacaccacagcatcactagg

SEQ ID NO: 81432 - DNA, 38 bp, Artificial Sequence
  primer
gtaaaacgacggccagtagtaatgcagggaaagggagg

SEQ ID NO: 81433 - DNA, 38 bp, Artificial Sequence
  primer
gtaaaacgacggccagtaccaagtgcctcttgccttag

SEQ ID NO: 81434 - DNA, 42 bp, Artificial Sequence
  primer
gtaaaacgacggccagttctaaacacaccaatgtcctattcc

SEQ ID NO: 81435 - DNA, 21 bp, Artificial Sequence
  primer
ctgtcaggatgcctctccttc

SEQ ID NO: 81436 - DNA, 18 bp, Artificial Sequence
  primer
ctggtgcagggtcaggtg

SEQ ID NO: 81437 - DNA, 20 bp, Artificial Sequence
  primer
atgcgctggtgctctatcag

SEQ ID NO: 81438 - DNA, 36 bp, Artificial Sequence
  primer
gtaaaacgacggccagtctggcacgtgtagggcttc

SEQ ID NO: 81439 - DNA, 18 bp, Artificial Sequence
  primer
ctggtgctgcgtcaggtg

SEQ ID NO: 81440 - DNA, 18 bp, Artificial Sequence
  primer
ctcaccggtgtgcacgag

SEQ ID NO: 81441 - DNA, 38 bp, Artificial Sequence
  primer
gtaaaacgacggccagtaacaagcttctctgagcctcg

SEQ ID NO: 81442 - DNA, 21 bp, Artificial Sequence
  primer
cacagctcagcccttatttcc

SEQ ID NO: 81443 - DNA, 38 bp, Artificial Sequence
  primer
gtaaaacgacggccagtacctttgcttccctctcacac

SEQ ID NO: 81444 - DNA, 19 bp, Artificial Sequence
  primer
gtccagcctgacacagcag

SEQ ID NO: 81445 - DNA, 21 bp, Artificial Sequence
  primer
gtctccttactcctgcttgcc

SEQ ID NO: 81446 - DNA, 21 bp, Artificial Sequence
  primer
gcaaagccctgagctaaactg

SEQ ID NO: 81447 - DNA, 21 bp, Artificial Sequence
  primer
catcaccctagcatcaacctg

SEQ ID NO: 81448 - DNA, 21 bp, Artificial Sequence
  primer
gcctggaagcttctgactctc

SEQ ID NO: 81449 - DNA, 20 bp, Artificial Sequence
  primer
cctgtctcctcgctctctcc

SEQ ID NO: 81450 - DNA, 38 bp, Artificial Sequence
  primer
gtaaaacgacggccagttacaggtcaggtgacccagag

SEQ ID NO: 81451 - DNA, 21 bp, Artificial Sequence
  primer
tgagaggcattgtggtttcac

SEQ ID NO: 81452 - DNA, 21 bp, Artificial Sequence
  primer
ttaatgaggaaggcggttagg

SEQ ID NO: 81453 - DNA, 21 bp, Artificial Sequence
  primer
gacacaacgaagggaggagag

SEQ ID NO: 81454 - DNA, 38 bp, Artificial Sequence
  primer
gtaaaacgacggccagtaaacatcagtccctctggtcc

SEQ ID NO: 81455 - DNA, 39 bp, Artificial Sequence
  primer
gtaaaacgacggccagttgacaggcaggactttaagtgg

SEQ ID NO: 81456 - DNA, 38 bp, Artificial Sequence
  primer
gtaaaacgacggccagtgagggcagttgaggcacttag

SEQ ID NO: 81457 - DNA, 21 bp, Artificial Sequence
  primer
gcctggaagcttctgactctc

SEQ ID NO: 81458 - DNA, 37 bp, Artificial Sequence
  primer
gtaaaacgacggccagtcctgtctcctcgctctctcc

SEQ ID NO: 81459 - DNA, 38 bp, Artificial Sequence
  primer
gtaaaacgacggccagtagaatgaaggcaaaggacagg

SEQ ID NO: 81460 - DNA, 22 bp, Artificial Sequence
  primer
gagacccataggtagaggtggg

SEQ ID NO: 81461 - DNA, 22 bp, Artificial Sequence
  primer
tcccatttccatctttcaaatc

SEQ ID NO: 81462 - DNA, 40 bp, Artificial Sequence
  primer
gtaaaacgacggccagtcaaggctattaatggtttcatgc

SEQ ID NO: 81463 - DNA, 40 bp, Artificial Sequence
  primer
gtaaaacgacggccagtggagatggctaaggctatctttg

SEQ ID NO: 81464 - DNA, 43 bp, Artificial Sequence
  primer
gtaaaacgacggccagtacctaattcgttaggtgagtttattt

SEQ ID NO: 81465 - DNA, 46 bp, Artificial Sequence
  primer
gtaaaacgacggccagtctgtgtatcaatagatcagtatccactct

SEQ ID NO: 81466 - DNA, 21 bp, Artificial Sequence
  primer
gcaacagagcgaaaggttgtc

SEQ ID NO: 81467 - DNA, 45 bp, Artificial Sequence
  primer
gtaaaacgacggccagtaataggtccaatggtataaatccactat

SEQ ID NO: 81468 - DNA, 43 bp, Artificial Sequence
  primer
gtaaaacgacggccagttcggtatcttagaagaacatttaggc

SEQ ID NO: 81469 - DNA, 41 bp, Artificial Sequence
  primer
gtaaaacgacggccagttttaaatcgtttaacaaagccagg

SEQ ID NO: 81470 - DNA, 20 bp, Artificial Sequence
  primer
gtcagagggctcaggatcag

SEQ ID NO: 81471 - DNA, 38 bp, Artificial Sequence
  primer
gtaaaacgacggccagttacgaaccggtcatagtgcat

SEQ ID NO: 81472 - DNA, 21 bp, Artificial Sequence
  primer
ttctacctgttccatcgggtc

SEQ ID NO: 81473 - DNA, 38 bp, Artificial Sequence
  primer
gtaaaacgacggccagtgaagaaccgactagcggtcag

SEQ ID NO: 81474 - DNA, 21 bp, Artificial Sequence
  primer
gccacagactgaggaggaatc

SEQ ID NO: 81475 - DNA, 19 bp, Artificial Sequence
  primer
gccctgaagaatgtggctc

SEQ ID NO: 81476 - DNA, 21 bp, Artificial Sequence
  primer
cccattcaaaccacttagcct

SEQ ID NO: 81477 - DNA, 38 bp, Artificial Sequence
  primer
gtaaaacgacggccagtccactcagtagggcagaggtg

SEQ ID NO: 81478 - DNA, 38 bp, Artificial Sequence
  primer
gtaaaacgacggccagtatgacgagctatgagctgtgg

SEQ ID NO: 81479 - DNA, 36 bp, Artificial Sequence
  primer
gtaaaacgacggccagtgaaatgccgctcgcttaac

SEQ ID NO: 81480 - DNA, 38 bp, Artificial Sequence
  primer
gtaaaacgacggccagtagaaggtggatgtctgcttgg

SEQ ID NO: 81481 - DNA, 21 bp, Artificial Sequence
  primer
gacctggtagatgtcatgccc

SEQ ID NO: 81482 - DNA, 38 bp, Artificial Sequence
  primer
gtaaaacgacggccagtactcacttcccactttgaccc

SEQ ID NO: 81483 - DNA, 38 bp, Artificial Sequence
  primer
gtaaaacgacggccagtggaataggaaaggtgggaacc

SEQ ID NO: 81484 - DNA, 21 bp, Artificial Sequence
  primer
tctggagccagtctcttcctg

SEQ ID NO: 81485 - DNA, 39 bp, Artificial Sequence
  primer
gtaaaacgacggccagtcatacacaccactgtcgaccac

SEQ ID NO: 81486 - DNA, 35 bp, Artificial Sequence
  primer
gtaaaacgacggccagtcagggcctccacagcaac

SEQ ID NO: 81487 - DNA, 21 bp, Artificial Sequence
  primer
ctgaagagcagtgaggcattg

SEQ ID NO: 81488 - DNA, 38 bp, Artificial Sequence
  primer
gtaaaacgacggccagtccagctgagaacaaatctccc

SEQ ID NO: 81489 - DNA, 38 bp, Artificial Sequence
  primer
gtaaaacgacggccagtcagacaacatgagaagctggg

SEQ ID NO: 81490 - DNA, 21 bp, Artificial Sequence
  primer
cttgaccctctccaccatgtc

SEQ ID NO: 81491 - DNA, 21 bp, Artificial Sequence
  primer
gactcttgacatgggagccag

SEQ ID NO: 81492 - DNA, 18 bp, Artificial Sequence
  primer
acccatctcagcctccca

SEQ ID NO: 81493 - DNA, 38 bp, Artificial Sequence
  primer
gtaaaacgacggccagtcaggctgcagcattatttagc

SEQ ID NO: 81494 - DNA, 21 bp, Artificial Sequence
  primer
tttggttacacaggtgcttcc

SEQ ID NO: 81495 - DNA, 21 bp, Artificial Sequence
  primer
gagtcgaagctctccatctcg

SEQ ID NO: 81496 - DNA, 19 bp, Artificial Sequence
  primer
gggaggtgccataatgctc

SEQ ID NO: 81497 - DNA, 38 bp, Artificial Sequence
  primer
gtaaaacgacggccagtagctattctgcgaacagtcgg

SEQ ID NO: 81498 - DNA, 38 bp, Artificial Sequence
  primer
gtaaaacgacggccagttaattctgcaaacccattccc

SEQ ID NO: 81499 - DNA, 38 bp, Artificial Sequence
  primer
gtaaaacgacggccagtgctgtgagcagttctgtgtgg

SEQ ID NO: 81500 - DNA, 20 bp, Artificial Sequence
  primer
tgcagtccatgctcagtacg

SEQ ID NO: 81501 - DNA, 38 bp, Artificial Sequence
  primer
gtaaaacgacggccagttttaatgggtgaggcagagtg

SEQ ID NO: 81502 - DNA, 21 bp, Artificial Sequence
  primer
gcgccctgaagtactgttacc

SEQ ID NO: 81503 - DNA, 21 bp, Artificial Sequence
  primer
tgagaatcacttaagcctggg

SEQ ID NO: 81504 - DNA, 21 bp, Artificial Sequence
  primer
ccttctacaagcaacgctgtc

SEQ ID NO: 81505 - DNA, 21 bp, Artificial Sequence
  primer
gtgaagtcagccatgctcttc

SEQ ID NO: 81506 - DNA, 25 bp, Artificial Sequence
  primer
tgcaatttacacgtttaatatcctg

SEQ ID NO: 81507 - DNA, 21 bp, Artificial Sequence
  primer
ggttatcctcgctccactgtc

SEQ ID NO: 81508 - DNA, 21 bp, Artificial Sequence
  primer
atggtagcccaaggaacaaac

SEQ ID NO: 81509 - DNA, 21 bp, Artificial Sequence
  primer
cagagaggaccttgtcttggg

SEQ ID NO: 81510 - DNA, 21 bp, Artificial Sequence
  primer
caagtggatacaccttggcac

SEQ ID NO: 81511 - DNA, 38 bp, Artificial Sequence
  primer
gtaaaacgacggccagttctgctgcaatgtgctatttg

SEQ ID NO: 81512 - DNA, 37 bp, Artificial Sequence
  primer
gtaaaacgacggccagttctctcccatgctccaacag

SEQ ID NO: 81513 - DNA, 21 bp, Artificial Sequence
  primer
acaagcaggcagacacaaatc

SEQ ID NO: 81514 - DNA, 42 bp, Artificial Sequence
  primer
gtaaaacgacggccagtaagaagaaacaccttccatacattg

SEQ ID NO: 81515 - DNA, 21 bp, Artificial Sequence
  primer
caatgttatcctccatgcgtc

SEQ ID NO: 81516 - DNA, 38 bp, Artificial Sequence
  primer
gtaaaacgacggccagtcctactacctgtggcatgagc

SEQ ID NO: 81517 - DNA, 21 bp, Artificial Sequence
  primer
attaaatgagttggctgtggc

SEQ ID NO: 81518 - DNA, 23 bp, Artificial Sequence
  primer
tgaagagccacatgtagaatttg

SEQ ID NO: 81519 - DNA, 21 bp, Artificial Sequence
  primer
caacagctcgggcttaatttc

SEQ ID NO: 81520 - DNA, 21 bp, Artificial Sequence
  primer
aggtcggtatctgcgagtttc

SEQ ID NO: 81521 - DNA, 22 bp, Artificial Sequence
  primer
gcattaagtgagttgtggagcc

SEQ ID NO: 81522 - DNA, 37 bp, Artificial Sequence
  primer
gtaaaacgacggccagtgattcaagcaatccaccagc

SEQ ID NO: 81523 - DNA, 20 bp, Artificial Sequence
  primer
ctgacctcaagcaatccacc

SEQ ID NO: 81524 - DNA, 21 bp, Artificial Sequence
  primer
catctggctgcagtctctttg

SEQ ID NO: 81525 - DNA, 39 bp, Artificial Sequence
  primer
gtaaaacgacggccagtcttataaagaggcagagacggg

SEQ ID NO: 81526 - DNA, 38 bp, Artificial Sequence
  primer
gtaaaacgacggccagtgggaagatgctgttgtccttc

SEQ ID NO: 81527 - DNA, 39 bp, Artificial Sequence
  primer
gtaaaacgacggccagtcaattcttcatttggtcttggc

SEQ ID NO: 81528 - DNA, 38 bp, Artificial Sequence
  primer
gtaaaacgacggccagttgtagtcccaccctacgaatg

SEQ ID NO: 81529 - DNA, 22 bp, Artificial Sequence
  primer
tctgtactgcggttatgctacc

SEQ ID NO: 81530 - DNA, 18 bp, Artificial Sequence
  primer
gaagctgggaggcagagg

SEQ ID NO: 81531 - DNA, 38 bp, Artificial Sequence
  primer
gtaaaacgacggccagtaccacagcagaaagtgaatgg

SEQ ID NO: 81532 - DNA, 39 bp, Artificial Sequence
  primer
gtaaaacgacggccagtaacatcaaagttctccctctgg

SEQ ID NO: 81533 - DNA, 38 bp, Artificial Sequence
  primer
gtaaaacgacggccagtctggtagagttctccatgccc

SEQ ID NO: 81534 - DNA, 41 bp, Artificial Sequence
  primer
gtaaaacgacggccagttgtaaggagaaagtgaggtaaccc

SEQ ID NO: 81535 - DNA, 40 bp, Artificial Sequence
  primer
gtaaaacgacggccagtggtaatcaactatggagcacagg

SEQ ID NO: 81536 - DNA, 38 bp, Artificial Sequence
  primer
gtaaaacgacggccagtgcagaacgatgcaaatcacag

SEQ ID NO: 81537 - DNA, 27 bp, Artificial Sequence
  primer
aaattgataatctcctaggccaaatac

SEQ ID NO: 81538 - DNA, 22 bp, Artificial Sequence
  primer
tccatattccatatttggctgg

SEQ ID NO: 81539 - DNA, 40 bp, Artificial Sequence
  primer
gtaaaacgacggccagtcacaaacatcaacattaagctgc

SEQ ID NO: 81540 - DNA, 41 bp, Artificial Sequence
  primer
gtaaaacgacggccagttcaccattactatactggctccaa

SEQ ID NO: 81541 - DNA, 24 bp, Artificial Sequence
  primer
gccattaagtcttatttgagctgg

SEQ ID NO: 81542 - DNA, 40 bp, Artificial Sequence
  primer
gtaaaacgacggccagtaaattggtttccagactactggg

SEQ ID NO: 81543 - DNA, 22 bp, Artificial Sequence
  primer
ttcgtagctgtatgcatgtcaa

SEQ ID NO: 81544 - DNA, 21 bp, Artificial Sequence
  primer
tggaccagtggtaatgtttgc

SEQ ID NO: 81545 - DNA, 22 bp, Artificial Sequence
  primer
tgccatgtttatggaagctaac

SEQ ID NO: 81546 - DNA, 38 bp, Artificial Sequence
  primer
gtaaaacgacggccagttctgcaacatgatactgtgcc

SEQ ID NO: 81547 - DNA, 20 bp, Artificial Sequence
  primer
aaagcatggcattgttcagc

SEQ ID NO: 81548 - DNA, 38 bp, Artificial Sequence
  primer
gtaaaacgacggccagtacaaacatatgcccacaaacg

SEQ ID NO: 81549 - DNA, 21 bp, Artificial Sequence
  primer
ggtggttgatgaaggaagagc

SEQ ID NO: 81550 - DNA, 35 bp, Artificial Sequence
  primer
gtaaaacgacggccagtctccgggagcgagaggat

SEQ ID NO: 81551 - DNA, 38 bp, Artificial Sequence
  primer
gtaaaacgacggccagtcctcctggttgctaactcacc

SEQ ID NO: 81552 - DNA, 21 bp, Artificial Sequence
  primer
tcaagtgatcctcccacattg

SEQ ID NO: 81553 - DNA, 21 bp, Artificial Sequence
  primer
tctgcagaagtgaaatgtgcc

SEQ ID NO: 81554 - DNA, 20 bp, Artificial Sequence
  primer
cacttgagcccaggagtttg

SEQ ID NO: 81555 - DNA, 21 bp, Artificial Sequence
  primer
cctccctgccaactatgtttc

SEQ ID NO: 81556 - DNA, 22 bp, Artificial Sequence
  primer
tctggcaacacaacctaggaac

SEQ ID NO: 81557 - DNA, 38 bp, Artificial Sequence
  primer
gtaaaacgacggccagtatgataaagcccatactgccc

SEQ ID NO: 81558 - DNA, 37 bp, Artificial Sequence
  primer
gtaaaacgacggccagtataggagtgaaccaccgtgc

SEQ ID NO: 81559 - DNA, 21 bp, Artificial Sequence
  primer
ttactgattggcgcttcacag

SEQ ID NO: 81560 - DNA, 22 bp, Artificial Sequence
  primer
aaagctactacagctggcttgc

SEQ ID NO: 81561 - DNA, 23 bp, Artificial Sequence
  primer
ttacttagcctttggaactgtgc

SEQ ID NO: 81562 - DNA, 39 bp, Artificial Sequence
  primer
gtaaaacgacggccagtttatttcaacactaggctgggc

SEQ ID NO: 81563 - DNA, 36 bp, Artificial Sequence
  primer
gtaaaacgacggccagttttgcatcttgggtctggg

SEQ ID NO: 81564 - DNA, 21 bp, Artificial Sequence
  primer
tctttcccatttctgctttgc

SEQ ID NO: 81565 - DNA, 40 bp, Artificial Sequence
  primer
gtaaaacgacggccagtctggcatgaagaaacaatcactc

SEQ ID NO: 81566 - DNA, 21 bp, Artificial Sequence
  primer
cctcattacagggtcctccac

SEQ ID NO: 81567 - DNA, 38 bp, Artificial Sequence
  primer
gtaaaacgacggccagtctaccaccactcactgccatc

SEQ ID NO: 81568 - DNA, 21 bp, Artificial Sequence
  primer
ggtacacctggcaagagacac

SEQ ID NO: 81569 - DNA, 38 bp, Artificial Sequence
  primer
gtaaaacgacggccagtctgggtgggattctgaatgag

SEQ ID NO: 81570 - DNA, 20 bp, Artificial Sequence
  primer
aagggacagcgtcaggagtc

SEQ ID NO: 81571 - DNA, 38 bp, Artificial Sequence
  primer
gtaaaacgacggccagtcttcatgtgacatccagaggc

SEQ ID NO: 81572 - DNA, 21 bp, Artificial Sequence
  primer
agcactagggcaggtgtaagg

SEQ ID NO: 81573 - DNA, 21 bp, Artificial Sequence
  primer
tgagaaagacagaggcccaac

SEQ ID NO: 81574 - DNA, 21 bp, Artificial Sequence
  primer
gaggttctgggacagaaggtg

SEQ ID NO: 81575 - DNA, 21 bp, Artificial Sequence
  primer
actactgaaggaggctggctg

SEQ ID NO: 81576 - DNA, 21 bp, Artificial Sequence
  primer
gtgagtcattggtagggaggc

SEQ ID NO: 81577 - DNA, 21 bp, Artificial Sequence
  primer
ggctgcagtgtgttaaagacc

SEQ ID NO: 81578 - DNA, 21 bp, Artificial Sequence
  primer
ggtgtgtgctaccacagttgg

SEQ ID NO: 81579 - DNA, 38 bp, Artificial Sequence
  primer
gtaaaacgacggccagttgggattacaagcatggtgag

SEQ ID NO: 81580 - DNA, 38 bp, Artificial Sequence
  primer
gtaaaacgacggccagtactgggtacagacccaacacc

SEQ ID NO: 81581 - DNA, 23 bp, Artificial Sequence
  primer
cccacttaaaccaaggacagaac

SEQ ID NO: 81582 - DNA, 39 bp, Artificial Sequence
  primer
gtaaaacgacggccagtgccacacttgaaagacttggac

SEQ ID NO: 81583 - DNA, 39 bp, Artificial Sequence
  primer
gtaaaacgacggccagtcccaaataatgttgtgtgcctg

SEQ ID NO: 81584 - DNA, 26 bp, Artificial Sequence
  primer
ggtatctcaaactctgaaagacactg

SEQ ID NO: 81585 - DNA, 21 bp, Artificial Sequence
  primer
gagacacatgggacagaaccc

SEQ ID NO: 81586 - DNA, 40 bp, Artificial Sequence
  primer
gtaaaacgacggccagttgctgaaataatcagtgcagatg

SEQ ID NO: 81587 - DNA, 21 bp, Artificial Sequence
  primer
ggactctgcggaattgctatc

SEQ ID NO: 81588 - DNA, 39 bp, Artificial Sequence
  primer
gtaaaacgacggccagttgtaatcaaagggatggaatgg

SEQ ID NO: 81589 - DNA, 21 bp, Artificial Sequence
  primer
cgctaagcacacactcaaagg

SEQ ID NO: 81590 - DNA, 22 bp, Artificial Sequence
  primer
ggtgacctgcatcatgaataac

SEQ ID NO: 81591 - DNA, 21 bp, Artificial Sequence
  primer
gtgtccagagcaccctctctc

SEQ ID NO: 81592 - DNA, 39 bp, Artificial Sequence
  primer
gtaaaacgacggccagttttgccagactagtccttctgc

SEQ ID NO: 81593 - DNA, 22 bp, Artificial Sequence
  primer
ccatgctaagagagtttcctgg

SEQ ID NO: 81594 - DNA, 38 bp, Artificial Sequence
  primer
gtaaaacgacggccagttgtaattccaaagccaaagcc

SEQ ID NO: 81595 - DNA, 21 bp, Artificial Sequence
  primer
cttaacctgctcggatgaatg

SEQ ID NO: 81596 - DNA, 23 bp, Artificial Sequence
  primer
aaatggctcagctgcttaaatac

SEQ ID NO: 81597 - DNA, 37 bp, Artificial Sequence
  primer
gtaaaacgacggccagtcgacagatgagtgtgcatcc

SEQ ID NO: 81598 - DNA, 39 bp, Artificial Sequence
  primer
gtaaaacgacggccagtggtttggacttctaacgaaccc

SEQ ID NO: 81599 - DNA, 21 bp, Artificial Sequence
  primer
aggtcagtgtttgggttccac

SEQ ID NO: 81600 - DNA, 38 bp, Artificial Sequence
  primer
gtaaaacgacggccagtgaatggctctggtgaacaatg

SEQ ID NO: 81601 - DNA, 38 bp, Artificial Sequence
  primer
gtaaaacgacggccagtgaagccaggagcaccatagac

SEQ ID NO: 81602 - DNA, 20 bp, Artificial Sequence
  primer
cttggtgaactccaaggcag

SEQ ID NO: 81603 - DNA, 20 bp, Artificial Sequence
  primer
catagccatgcatcactccc

SEQ ID NO: 81604 - DNA, 38 bp, Artificial Sequence
  primer
gtaaaacgacggccagttgacacagggagttgaaatgc

SEQ ID NO: 81605 - DNA, 35 bp, Artificial Sequence
  primer
gtaaaacgacggccagttcaccgtgccttggagag

SEQ ID NO: 81606 - DNA, 25 bp, Artificial Sequence
  primer
gaggaatcaatattatccttctggc

SEQ ID NO: 81607 - DNA, 21 bp, Artificial Sequence
  primer
ccttcatatccttcagggacc

SEQ ID NO: 81608 - DNA, 38 bp, Artificial Sequence
  primer
gtaaaacgacggccagtttgggaccagagaggagacag

SEQ ID NO: 81609 - DNA, 38 bp, Artificial Sequence
  primer
gtaaaacgacggccagtaaagaatctgtcctccttggg

SEQ ID NO: 81610 - DNA, 21 bp, Artificial Sequence
  primer
ccctggcttgtctctttcttg

SEQ ID NO: 81611 - DNA, 21 bp, Artificial Sequence
  primer
gaccagggctctagtggtgtc

SEQ ID NO: 81612 - DNA, 21 bp, Artificial Sequence
  primer
aggacgagaaccaggaaggag

SEQ ID NO: 81613 - DNA, 21 bp, Artificial Sequence
  primer
tacgctgaactgtcgtcactg

SEQ ID NO: 81614 - DNA, 21 bp, Artificial Sequence
  primer
tcaaagacaaggaagtggagg

SEQ ID NO: 81615 - DNA, 21 bp, Artificial Sequence
  primer
ggaagacagtggtgtgctgtc

SEQ ID NO: 81616 - DNA, 21 bp, Artificial Sequence
  primer
taagctgggatgcaaggattg

SEQ ID NO: 81617 - DNA, 40 bp, Artificial Sequence
  primer
gtaaaacgacggccagtatcaggaccacacacactgtaag

SEQ ID NO: 81618 - DNA, 22 bp, Artificial Sequence
  primer
aggaattcatccatacaatggg

SEQ ID NO: 81619 - DNA, 38 bp, Artificial Sequence
  primer
gtaaaacgacggccagttaagggtgggtggaagggtag

SEQ ID NO: 81620 - DNA, 23 bp, Artificial Sequence
  primer
aaactgggcattggatagcatac

SEQ ID NO: 81621 - DNA, 24 bp, Artificial Sequence
  primer
gatttcctctttgtttccacaatc

SEQ ID NO: 81622 - DNA, 41 bp, Artificial Sequence
  primer
gtaaaacgacggccagtagaaattagcatcagtagcaccag

SEQ ID NO: 81623 - DNA, 21 bp, Artificial Sequence
  primer
ttgtttccttgagcatgaagc

SEQ ID NO: 81624 - DNA, 40 bp, Artificial Sequence
  primer
gtaaaacgacggccagtgaaagcatgcactacatttccat

SEQ ID NO: 81625 - DNA, 38 bp, Artificial Sequence
  primer
gtaaaacgacggccagtctgatgattgctgtgtcttgg

SEQ ID NO: 81626 - DNA, 21 bp, Artificial Sequence
  primer
tagagagggagagaggccttg

SEQ ID NO: 81627 - DNA, 38 bp, Artificial Sequence
  primer
gtaaaacgacggccagtctcactggaagttcttgctgc

SEQ ID NO: 81628 - DNA, 21 bp, Artificial Sequence
  primer
acctttaggcaagcaatcgtc

SEQ ID NO: 81629 - DNA, 38 bp, Artificial Sequence
  primer
gtaaaacgacggccagtgcaggtcacagagtcatgagg

SEQ ID NO: 81630 - DNA, 22 bp, Artificial Sequence
  primer
tcttgtccaagaagtagcggac

SEQ ID NO: 81631 - DNA, 22 bp, Artificial Sequence
  primer
aaaggaggtcaggactacccac

SEQ ID NO: 81632 - DNA, 38 bp, Artificial Sequence
  primer
gtaaaacgacggccagtcatggttgagaaaccctgctc

SEQ ID NO: 81633 - DNA, 37 bp, Artificial Sequence
  primer
gtaaaacgacggccagtaactcccactcagggcaaac

SEQ ID NO: 81634 - DNA, 21 bp, Artificial Sequence
  primer
ctcatggccatctcaggattc

SEQ ID NO: 81635 - DNA, 20 bp, Artificial Sequence
  primer
gacaggacaggaggcttcag

SEQ ID NO: 81636 - DNA, 38 bp, Artificial Sequence
  primer
gtaaaacgacggccagtaagatgcagcagtgtgtggag

SEQ ID NO: 81637 - DNA, 21 bp, Artificial Sequence
  primer
ctgtgctaggactttccgctc

SEQ ID NO: 81638 - DNA, 35 bp, Artificial Sequence
  primer
gtaaaacgacggccagtctggcctgctctgcattt

SEQ ID NO: 81639 - DNA, 41 bp, Artificial Sequence
  primer
gtaaaacgacggccagttgaaacagtacgtgatcttaaggg

SEQ ID NO: 81640 - DNA, 23 bp, Artificial Sequence
  primer
aaggcaataaagtgtcattgtcg

SEQ ID NO: 81641 - DNA, 20 bp, Artificial Sequence
  primer
caatggttccagatgggatg

SEQ ID NO: 81642 - DNA, 38 bp, Artificial Sequence
  primer
gtaaaacgacggccagtttactgcttggctacagcacc

SEQ ID NO: 81643 - DNA, 20 bp, Artificial Sequence
  primer
ggctgccaagtgagtaatgg

SEQ ID NO: 81644 - DNA, 21 bp, Artificial Sequence
  primer
cggaagcctctctcgatactg

SEQ ID NO: 81645 - DNA, 38 bp, Artificial Sequence
  primer
gtaaaacgacggccagtctcgcatgacttggacttgac

SEQ ID NO: 81646 - DNA, 38 bp, Artificial Sequence
  primer
gtaaaacgacggccagttcgttctcgctcttgaacttg

SEQ ID NO: 81647 - DNA, 35 bp, Artificial Sequence
  primer
gtaaaacgacggccagtcgagctgttctcgtggtg

SEQ ID NO: 81648 - DNA, 38 bp, Artificial Sequence
  primer
gtaaaacgacggccagtactccttctcgagcttgatgc

SEQ ID NO: 81649 - DNA, 21 bp, Artificial Sequence
  primer
gtctccgaagctaaggaaggg

SEQ ID NO: 81650 - DNA, 38 bp, Artificial Sequence
  primer
gtaaaacgacggccagttcgcatttataaggcctttcg

SEQ ID NO: 81651 - DNA, 38 bp, Artificial Sequence
  primer
gtaaaacgacggccagtggcttcttggaggctactgtc

SEQ ID NO: 81652 - DNA, 21 bp, Artificial Sequence
  primer
cggaagcctctctcgatactg

SEQ ID NO: 81653 - DNA, 21 bp, Artificial Sequence
  primer
ctcgcatgacttggacttgac

SEQ ID NO: 81654 - DNA, 21 bp, Artificial Sequence
  primer
tcgttctcgctcttgaacttg

SEQ ID NO: 81655 - DNA, 35 bp, Artificial Sequence; identical to SEQ ID NO: 81647
  primer

SEQ ID NO: 81656 - DNA, 38 bp, Artificial Sequence; identical to SEQ ID NO: 81648
  primer

SEQ ID NO: 81657 - DNA, 19 bp, Artificial Sequence
  primer
agatccctccgtccagctc

SEQ ID NO: 81658 - DNA, 38 bp, Artificial Sequence
  primer
gtaaaacgacggccagttctccagggtactgtacacgc

SEQ ID NO: 81659 - DNA, 38 bp, Artificial Sequence
  primer
gtaaaacgacggccagtatcatgcattcaaacggtgag

SEQ ID NO: 81660 - DNA, 21 bp, Artificial Sequence
  primer
aaagaaactttcctatggccc

SEQ ID NO: 81661 - DNA, 20 bp, Artificial Sequence
  primer
atggtggaccctcagaaagg

SEQ ID NO: 81662 - DNA, 19 bp, Artificial Sequence
  primer
caggaaattcatgagcggg

SEQ ID NO: 81663 - DNA, 19 bp, Artificial Sequence
  primer
atgactcggtcgaaggcac

SEQ ID NO: 81664 - DNA, 21 bp, Artificial Sequence
  primer
ctggaacttgaaggtcttgcc

SEQ ID NO: 81665 - DNA, 38 bp, Artificial Sequence
  primer
gtaaaacgacggccagtcagtagcagctcctcctcctc

SEQ ID NO: 81666 - DNA, 18 bp, Artificial Sequence
  primer
gcctaggcccacgttctc

SEQ ID NO: 81667 - DNA, 20 bp, Artificial Sequence
  primer
gagtacacgttctcggacgg

SEQ ID NO: 81668 - DNA, 22 bp, Artificial Sequence
  primer
tttgacgtcgttagtcagcaag

SEQ ID NO: 81669 - DNA, 37 bp, Artificial Sequence
  primer
gtaaaacgacggccagtgtgacacggaggcaagtcag

SEQ ID NO: 81670 - DNA, 18 bp, Artificial Sequence
  primer
agctgcccttcctccctg

SEQ ID NO: 81671 - DNA, 38 bp, Artificial Sequence
  primer
gtaaaacgacggccagttcaaagaaggccacaatcctc

SEQ ID NO: 81672 - DNA, 39 bp, Artificial Sequence
  primer
gtaaaacgacggccagttcacatcaccaagtgcacctac

SEQ ID NO: 81673 - DNA, 38 bp, Artificial Sequence
  primer
gtaaaacgacggccagtttgtccagaggaggaggtagg

SEQ ID NO: 81674 - DNA, 38 bp, Artificial Sequence
  primer
gtaaaacgacggccagtaacagcctgcagctttgtttc

SEQ ID NO: 81675 - DNA, 21 bp, Artificial Sequence
  primer
tttccatcacacatacccagc

SEQ ID NO: 81676 - DNA, 39 bp, Artificial Sequence
  primer
gtaaaacgacggccagtggattcattggaaataagccag

SEQ ID NO: 81677 - DNA, 23 bp, Artificial Sequence
  primer
aagtatgtgttggcaatcgtttc

SEQ ID NO: 81678 - DNA, 37 bp, Artificial Sequence
  primer
gtaaaacgacggccagtcttgtctacgctttccacgc

SEQ ID NO: 81679 - DNA, 38 bp, Artificial Sequence
  primer
gtaaaacgacggccagttgcatgtagtggttctcctgg

SEQ ID NO: 81680 - DNA, 38 bp, Artificial Sequence
  primer
gtaaaacgacggccagtgcctcagtcctgttctcttcc

SEQ ID NO: 81681 - DNA, 21 bp, Artificial Sequence
  primer
ctggatccaaggctctaggtg

SEQ ID NO: 81682 - DNA, 39 bp, Artificial Sequence
  primer
gtaaaacgacggccagtgatacagaagaagggctgttgg

SEQ ID NO: 81683 - DNA, 19 bp, Artificial Sequence
  primer
ccctcctgctcctttagcc

SEQ ID NO: 81684 - DNA, 37 bp, Artificial Sequence
  primer
gtaaaacgacggccagttctgctttcacgaaacctcg

SEQ ID NO: 81685 - DNA, 38 bp, Artificial Sequence
  primer
gtaaaacgacggccagtgaaggtgctttccctcagttc

SEQ ID NO: 81686 - DNA, 21 bp, Artificial Sequence
  primer
gaaatacccactggaggatcg

SEQ ID NO: 81687 - DNA, 38 bp, Artificial Sequence
  primer
gtaaaacgacggccagttaaatgccacacacagccttc

SEQ ID NO: 81688 - DNA, 22 bp, Artificial Sequence
  primer
tgaaaggtcacaactaggcaac

SEQ ID NO: 81689 - DNA, 20 bp, Artificial Sequence
  primer
cttctgaaacgtcacctgcc

SEQ ID NO: 81690 - DNA, 40 bp, Artificial Sequence
  primer
gtaaaacgacggccagtgcagggaggatcttctcataaag

SEQ ID NO: 81691 - DNA, 21 bp, Artificial Sequence
  primer
taaatgccacacacagccttc

SEQ ID NO: 81692 - DNA, 20 bp, Artificial Sequence
  primer
ggacatgcactgggactttg

SEQ ID NO: 81693 - DNA, 36 bp, Artificial Sequence
  primer
gtaaaacgacggccagtagtagggccaggtgtggtg

SEQ ID NO: 81694 - DNA, 38 bp, Artificial Sequence
  primer
gtaaaacgacggccagtacagaacaccagccacaaatc

SEQ ID NO: 81695 - DNA, 21 bp, Artificial Sequence
  primer
aaccttgtcccagcctctttc

SEQ ID NO: 81696 - DNA, 38 bp, Artificial Sequence
  primer
gtaaaacgacggccagtccttggatatcagagaagcgg

SEQ ID NO: 81697 - DNA, 39 bp, Artificial Sequence
  primer
gtaaaacgacggccagtgagacagactgagaccaggagc

SEQ ID NO: 81698 - DNA, 38 bp, Artificial Sequence
  primer
gtaaaacgacggccagtggctggtgctagagactccac

SEQ ID NO: 81699 - DNA, 38 bp, Artificial Sequence
  primer
gtaaaacgacggccagtaggcagaagagaatttggctg

SEQ ID NO: 81700 - DNA, 21 bp, Artificial Sequence
  primer
aaccttgtcccagcctctttc

SEQ ID NO: 81701 - DNA, 21 bp, Artificial Sequence
  primer
gtggagctgggagaatacctg

SEQ ID NO: 81702 - DNA, 38 bp, Artificial Sequence
  primer
gtaaaacgacggccagttttcctcaatttgcgtaagcc

SEQ ID NO: 81703 - DNA, 21 bp, Artificial Sequence
  primer
cccagccctaacaggttattc

SEQ ID NO: 81704 - DNA, 39 bp, Artificial Sequence
  primer
gtaaaacgacggccagtgggaacttccatcaacatatcc

SEQ ID NO: 81705 - DNA, 21 bp, Artificial Sequence
  primer
acacagccctaaccaatccag

SEQ ID NO: 81706 - DNA, 39 bp, Artificial Sequence
  primer
gtaaaacgacggccagttgctagcaattcctcctacgtc

SEQ ID NO: 81707 - DNA, 21 bp, Artificial Sequence
  primer
cacagcaagaacccatctctt

SEQ ID NO: 81708 - DNA, 21 bp, Artificial Sequence
  primer
caggactcagggcctagtgac

SEQ ID NO: 81709 - DNA, 38 bp, Artificial Sequence
  primer
gtaaaacgacggccagtgatgtagcagggctggatttc

SEQ ID NO: 81710 - DNA, 21 bp, Artificial Sequence
  primer
tcttccacaaggctctcttcc

SEQ ID NO: 81711 - DNA, 38 bp, Artificial Sequence
  primer
gtaaaacgacggccagtagctgctggaggttcaaattc

SEQ ID NO: 81712 - DNA, 21 bp, Artificial Sequence
  primer
acagagtaggacagcccatcc

SEQ ID NO: 81713 - DNA, 23 bp, Artificial Sequence
  primer
tgcttcatagatgtgttcccttc

SEQ ID NO: 81714 - DNA, 38 bp, Artificial Sequence
  primer
gtaaaacgacggccagtgtagtccatctgaggccaacg

SEQ ID NO: 81715 - DNA, 21 bp, Artificial Sequence
  primer
aacgcatgccttctctaaagc

SEQ ID NO: 81716 - DNA, 22 bp, Artificial Sequence
  primer
gagccctgggatggataaatac

SEQ ID NO: 81717 - DNA, 41 bp, Artificial Sequence
  primer
gtaaaacgacggccagtccaggacttagaaagggaataagg

SEQ ID NO: 81718 - DNA, 21 bp, Artificial Sequence
  primer
agagcccagtgtgatgtgatg

SEQ ID NO: 81719 - DNA, 38 bp, Artificial Sequence
  primer
gtaaaacgacggccagttagcagaagttgcctcctcag

SEQ ID NO: 81720 - DNA, 20 bp, Artificial Sequence
  primer
tcccaacatagctgcctcag

SEQ ID NO: 81721 - DNA, 38 bp, Artificial Sequence
  primer
gtaaaacgacggccagtcaactccacttcttccaaggg

SEQ ID NO: 81722 - DNA, 21 bp, Artificial Sequence
  primer
ttggaacctgggcttatatcc

SEQ ID NO: 81723 - DNA, 38 bp, Artificial Sequence
  primer
gtaaaacgacggccagttggcctaggaggtaaatgctc

SEQ ID NO: 81724 - DNA, 18 bp, Artificial Sequence
  primer
aggcaccagtccctcctc

SEQ ID NO: 81725 - DNA, 36 bp, Artificial Sequence
  primer
gtaaaacgacggccagtgagccctgagggagaggag

SEQ ID NO: 81726 - DNA, 21 bp, Artificial Sequence
  primer
ttgggtctgatactccaagcc

SEQ ID NO: 81727 - DNA, 21 bp, Artificial Sequence
  primer
gccttaaaggatcagagctgg

SEQ ID NO: 81728 - DNA, 38 bp, Artificial Sequence
  primer
gtaaaacgacggccagtcagacaccctcactcctctgc

SEQ ID NO: 81729 - DNA, 37 bp, Artificial Sequence
  primer
gtaaaacgacggccagtgtcagagggaggaggctagg

SEQ ID NO: 81730 - DNA, 20 bp, Artificial Sequence
  primer
aaatcctggtcccgaagatg

SEQ ID NO: 81731 - DNA, 37 bp, Artificial Sequence
  primer
gtaaaacgacggccagtacatgttctgccttgcttgg

SEQ ID NO: 81732 - DNA, 22 bp, Artificial Sequence
  primer
tgtgggttgcagcatatcatag

SEQ ID NO: 81733 - DNA, 21 bp, Artificial Sequence
  primer
gtgcatatcacttcgtgcctc

SEQ ID NO: 81734 - DNA, 39 bp, Artificial Sequence
  primer
gtaaaacgacggccagtgaggatgcaggcattcttactg

SEQ ID NO: 81735 - DNA, 38 bp, Artificial Sequence
  primer
gtaaaacgacggccagtctggaggtcaaggttctcagg

SEQ ID NO: 81736 - DNA, 21 bp, Artificial Sequence
  primer
agaagaaacgacatggaaccc

SEQ ID NO: 81737 - DNA, 37 bp, Artificial Sequence
  primer
gtaaaacgacggccagtataggctcagcaattcaggc

SEQ ID NO: 81738 - DNA, 21 bp, Artificial Sequence
  primer
gctccaatcagagacaacagc

SEQ ID NO: 81739 - DNA, 23 bp, Artificial Sequence
  primer
cactaagcaaagacaagacaggg

SEQ ID NO: 81740 - DNA, 21 bp, Artificial Sequence
  primer
ggactgagtgggactttctcc

SEQ ID NO: 81741 - DNA, 21 bp, Artificial Sequence
  primer
actgtgtgcttgagatgggag

SEQ ID NO: 81742 - DNA, 22 bp, Artificial Sequence
  primer
gaaagaggcactacatcatggg

SEQ ID NO: 81743 - DNA, 20 bp, Artificial Sequence
  primer
gcttcggattccctctcaac

SEQ ID NO: 81744 - DNA, 38 bp, Artificial Sequence
  primer
gtaaaacgacggccagtagatgcccagaggttcatagc

SEQ ID NO: 81745 - DNA, 21 bp, Artificial Sequence
  primer
gaatgggtccttcttcactgc

SEQ ID NO: 81746 - DNA, 38 bp, Artificial Sequence
  primer
gtaaaacgacggccagtaccacctatctcccttcctcc

SEQ ID NO: 81747 - DNA, 38 bp, Artificial Sequence
  primer
gtaaaacgacggccagtcattggaataggcctttctgg

SEQ ID NO: 81748 - DNA, 21 bp, Artificial Sequence
  primer
agagaacatgggagatcaggg

SEQ ID NO: 81749 - DNA, 38 bp, Artificial Sequence
  primer
gtaaaacgacggccagtaacagaaccctccctattggc

SEQ ID NO: 81750 - DNA, 21 bp, Artificial Sequence
  primer
gccaccgctcatttctaagag

SEQ ID NO: 81751 - DNA, 21 bp, Artificial Sequence
  primer
caagcctgatagggaagcaag

SEQ ID NO: 81752 - DNA, 21 bp, Artificial Sequence
  primer
tctgggtccttctactcccag

SEQ ID NO: 81753 - DNA, 38 bp, Artificial Sequence
  primer
gtaaaacgacggccagtatgtgaacaaacctgctggag

SEQ ID NO: 81754 - DNA, 21 bp, Artificial Sequence
  primer
aacacctagccacagactgcc

SEQ ID NO: 81755 - DNA, 22 bp, Artificial Sequence
  primer
catagcccaatggacaaatgac

SEQ ID NO: 81756 - DNA, 21 bp, Artificial Sequence
  primer
gtagttctgttcgcacccaag

SEQ ID NO: 81757 - DNA, 21 bp, Artificial Sequence
  primer
gtggtggcagatgcctgtaac

SEQ ID NO: 81758 - DNA, 37 bp, Artificial Sequence
  primer
gtaaaacgacggccagtgtgtgagtcactgcacctgg

SEQ ID NO: 81759 - DNA, 22 bp, Artificial Sequence
  primer
tgctctctcgagcctgttactc

SEQ ID NO: 81760 - DNA, 20 bp, Artificial Sequence
  primer
ctagtctgggcaacagcgag

SEQ ID NO: 81761 - DNA, 21 bp, Artificial Sequence
  primer
aggaagatgatgctacagccc

SEQ ID NO: 81762 - DNA, 20 bp, Artificial Sequence
  primer
tggagatacaccgaacaccc

SEQ ID NO: 81763 - DNA, 38 bp, Artificial Sequence
  primer
gtaaaacgacggccagtgtctgtcctgctgcatctgag

SEQ ID NO: 81764 - DNA, 20 bp, Artificial Sequence
  primer
agatggttggcctgagatcc

SEQ ID NO: 81765 - DNA, 21 bp, Artificial Sequence
  primer
ggagcaggtatagggatgagc

SEQ ID NO: 81766 - DNA, 21 bp, Artificial Sequence
  primer
cctaagccttcagctctgtcc

SEQ ID NO: 81767 - DNA, 21 bp, Artificial Sequence
  primer
actgtctccaaagaccctccc

SEQ ID NO: 81768 - DNA, 20 bp, Artificial Sequence
  primer
tcctttcccatttgggtttc

SEQ ID NO: 81769 - DNA, 22 bp, Artificial Sequence
  primer
tgatattaggctctctggcctc

SEQ ID NO: 81770 - DNA, 38 bp, Artificial Sequence
  primer
gtaaaacgacggccagtctgaaagggaagcaaaggatg

SEQ ID NO: 81771 - DNA, 38 bp, Artificial Sequence
  primer
gtaaaacgacggccagtaatgcaactcatgccatcaag

SEQ ID NO: 81772 - DNA, 21 bp, Artificial Sequence
  primer
attgttgggagttgagttggg

SEQ ID NO: 81773 - DNA, 21 bp, Artificial Sequence
  primer
tccagctgctcctgagatagg

SEQ ID NO: 81774 - DNA, 21 bp, Artificial Sequence
  primer
cagtttcagccacgctatctg

SEQ ID NO: 81775 - DNA, 38 bp, Artificial Sequence
  primer
gtaaaacgacggccagtctggtctagatgcagggttgg

SEQ ID NO: 81776 - DNA, 37 bp, Artificial Sequence
  primer
gtaaaacgacggccagtttattcccaggctccatgtg

SEQ ID NO: 81777 - DNA, 38 bp, Artificial Sequence
  primer
gtaaaacgacggccagttgagagttggatcccatgttg

SEQ ID NO: 81778 - DNA, 21 bp, Artificial Sequence
  primer
gagacatgggaaggaatggtc

SEQ ID NO: 81779 - DNA, 38 bp, Artificial Sequence
  primer
gtaaaacgacggccagtcattggtgactggacttggtg

SEQ ID NO: 81780 - DNA, 21 bp, Artificial Sequence
  primer
taggtgcaactgtgaggatgc

SEQ ID NO: 81781 - DNA, 38 bp, Artificial Sequence
  primer
gtaaaacgacggccagtcaacaaagactgcctcctctg

SEQ ID NO: 81782 - DNA, 40 bp, Artificial Sequence
  primer
gtaaaacgacggccagttgttgaacttccacctattcagg

SEQ ID NO: 81783 - DNA, 38 bp, Artificial Sequence
  primer
gtaaaacgacggccagtattgtgagggaatggaacctg

SEQ ID NO: 81784 - DNA, 38 bp, Artificial Sequence
  primer
gtaaaacgacggccagtatgccaggtaatgctagtccc

SEQ ID NO: 81785 - DNA, 21 bp, Artificial Sequence
  primer
aggtccttggctaaatccacc

SEQ ID NO: 81786 - DNA, 38 bp, Artificial Sequence
  primer
gtaaaacgacggccagtactcctggaactgcctcaaag

SEQ ID NO: 81787 - DNA, 19 bp, Artificial Sequence
  primer
aggccttcccatgctaacc

SEQ ID NO: 81788 - DNA, 38 bp, Artificial Sequence
  primer
gtaaaacgacggccagtagaagaacgtgggatgaggac

SEQ ID NO: 81789 - DNA, 38 bp, Artificial Sequence
  primer
gtaaaacgacggccagttcccagtcctcacttctttcc

SEQ ID NO: 81790 - DNA, 20 bp, Artificial Sequence
  primer
tcagagaggtgagcaggagg

SEQ ID NO: 81791 - DNA, 19 bp, Artificial Sequence
  primer
ggcctgcagaaggacaaag

SEQ ID NO: 81792 - DNA, 38 bp, Artificial Sequence
  primer
gtaaaacgacggccagttgaggaagggctcagtctctc

SEQ ID NO: 81793 - DNA, 38 bp, Artificial Sequence
  primer
gtaaaacgacggccagtaatcatggactgcaagggttc

SEQ ID NO: 81794 - DNA, 20 bp, Artificial Sequence
  primer
aatctgttcctctttccgcc

SEQ ID NO: 81795 - DNA, 21 bp, Artificial Sequence
  primer
aacccaggtacccgttgtatc

SEQ ID NO: 81796 - DNA, 19 bp, Artificial Sequence
  primer
tgggtagggcatggtgttc

SEQ ID NO: 81797 - DNA, 18 bp, Artificial Sequence
  primer
ggcaggatccatctgtcg

SEQ ID NO: 81798 - DNA, 40 bp, Artificial Sequence
  primer
gtaaaacgacggccagtggttcatgttcatgttcatgttg

SEQ ID NO: 81799 - DNA, 21 bp, Artificial Sequence
  primer
aactgtgaaggcatcagcatc

SEQ ID NO: 81800 - DNA, 18 bp, Artificial Sequence
  primer
ctgaatgcacggtcccag

SEQ ID NO: 81801 - DNA, 22 bp, Artificial Sequence
  primer
gaagagttcatgttgagaggcg

SEQ ID NO: 81802 - DNA, 38 bp, Artificial Sequence
  primer
gtaaaacgacggccagtaggcccttactcactcactgc

SEQ ID NO: 81803 - DNA, 19 bp, Artificial Sequence
  primer
aaagccagcacaaccacag

SEQ ID NO: 81804 - DNA, 36 bp, Artificial Sequence
  primer
gtaaaacgacggccagtctgacgggtagtgctgctg

SEQ ID NO: 81805 - DNA, 21 bp, Artificial Sequence
  primer
agtactggagggtgctgcttg

SEQ ID NO: 81806 - DNA, 37 bp, Artificial Sequence
  primer
gtaaaacgacggccagtaggacatctgtccagggtgg

SEQ ID NO: 81807 - DNA, 20 bp, Artificial Sequence
  primer
ttctagaagggcaggttggc

SEQ ID NO: 81808 - DNA, 38 bp, Artificial Sequence
  primer
gtaaaacgacggccagtacatctggtttccacaaatgc

SEQ ID NO: 81809 - DNA, 40 bp, Artificial Sequence
  primer
gtaaaacgacggccagtaacaatagatccatttcacaggg

SEQ ID NO: 81810 - DNA, 22 bp, Artificial Sequence
  primer
cgagaagaggatgatcttggag

SEQ ID NO: 81811 - DNA, 20 bp, Artificial Sequence
  primer
gaaaggccaggccaaatatc

SEQ ID NO: 81812 - DNA, 38 bp, Artificial Sequence
  primer
gtaaaacgacggccagttgtctttgcaggacttcttcg

SEQ ID NO: 81813 - DNA, 38 bp, Artificial Sequence
  primer
gtaaaacgacggccagtttgcagtttcctgatctccac

SEQ ID NO: 81814 - DNA, 37 bp, Artificial Sequence
  primer
gtaaaacgacggccagtctgggctcaagagatcctcc

SEQ ID NO: 81815 - DNA, 21 bp, Artificial Sequence
  primer
ttcctcctcagtattccggtg

SEQ ID NO: 81816 - DNA, 21 bp, Artificial Sequence
  primer
ttgagtttgacttcaggacgg

SEQ ID NO: 81817 - DNA, 21 bp, Artificial Sequence
  primer
tcaaggaagcaggtctggaac

SEQ ID NO: 81818 - DNA, 40 bp, Artificial Sequence
  primer
gtaaaacgacggccagttcaatgctagcaagactagggac

SEQ ID NO: 81819 - DNA, 21 bp, Artificial Sequence
  primer
taactctaggcctccactgcc

SEQ ID NO: 81820 - DNA, 23 bp, Artificial Sequence
  primer
gtgtcaccttaatttcttccagg

SEQ ID NO: 81821 - DNA, 42 bp, Artificial Sequence
  primer
gtaaaacgacggccagtttgaaagcaattaagctgacaatta

SEQ ID NO: 81822 - DNA, 23 bp, Artificial Sequence
  primer
gacagcacttcaaacaccacttc

SEQ ID NO: 81823 - DNA, 38 bp, Artificial Sequence
  primer
gtaaaacgacggccagtaaggtttcccacataacggtg

SEQ ID NO: 81824 - DNA, 21 bp, Artificial Sequence
  primer
ggtgcaagttctgctctgttg

SEQ ID NO: 81825 - DNA, 44 bp, Artificial Sequence
  primer
gtaaaacgacggccagttgaccatatcttatagacaaagcagaa

SEQ ID NO: 81826 - DNA, 21 bp, Artificial Sequence
  primer
ctgtctgcttaccaccacagg

SEQ ID NO: 81827 - DNA, 20 bp, Artificial Sequence
  primer
cagccttaccctctccaagg

SEQ ID NO: 81828 - DNA, 21 bp, Artificial Sequence
  primer
gcgtacagcaaacacgttctc

SEQ ID NO: 81829 - DNA, 20 bp, Artificial Sequence
  primer
taggagagccaggtgtcagc

SEQ ID NO: 81830 - DNA, 21 bp, Artificial Sequence
  primer
ccaaatggagcatctctgttc

SEQ ID NO: 81831 - DNA, 19 bp, Artificial Sequence
  primer
gtggtgggaggatcgtttg

SEQ ID NO: 81832 - DNA, 38 bp, Artificial Sequence
  primer
gtaaaacgacggccagtgaatgtggccctatgaacacc

SEQ ID NO: 81833 - DNA, 21 bp, Artificial Sequence
  primer
tgacagatgattccaaatcgc

SEQ ID NO: 81834 - DNA, 20 bp, Artificial Sequence
  primer
taagctgcttgcaggctgag

SEQ ID NO: 81835 - DNA, 38 bp, Artificial Sequence
  primer
gtaaaacgacggccagtcgggagaaagtaccacactgg

SEQ ID NO: 81836 - DNA, 38 bp, Artificial Sequence
  primer
gtaaaacgacggccagtaaacttcaccctcctgcacac

SEQ ID NO: 81837 - DNA, 21 bp, Artificial Sequence
  primer
agggccaaagtaacttcccac

SEQ ID NO: 81838 - DNA, 36 bp, Artificial Sequence
  primer
gtaaaacgacggccagtcttgtccatgcacaggagg

SEQ ID NO: 81839 - DNA, 21 bp, Artificial Sequence
  primer
agcccattaggtaccactccc

SEQ ID NO: 81840 - DNA, 21 bp, Artificial Sequence
  primer
acttcaaagcaccaatccacc

SEQ ID NO: 81841 - DNA, 37 bp, Artificial Sequence
  primer
gtaaaacgacggccagtaaggtaacaaaggccctccc

SEQ ID NO: 81842 - DNA, 23 bp, Artificial Sequence
  primer
gctagttgatttgattcactgcc

SEQ ID NO: 81843 - DNA, 21 bp, Artificial Sequence
  primer
tgttcccaccagaaagaaatg

SEQ ID NO: 81844 - DNA, 21 bp, Artificial Sequence
  primer
atttgctgagcgccttcttag

SEQ ID NO: 81845 - DNA, 19 bp, Artificial Sequence
  primer
ctgtgagcccagattacgc

SEQ ID NO: 81846 - DNA, 40 bp, Artificial Sequence
  primer
gtaaaacgacggccagtcactgtgttgaaagtacattggg

SEQ ID NO: 81847 - DNA, 38 bp, Artificial Sequence
  primer
gtaaaacgacggccagttgatgtagggcttcactagcc

SEQ ID NO: 81848 - DNA, 21 bp, Artificial Sequence
  primer
actcttggcaggctttctttg

SEQ ID NO: 81849 - DNA, 22 bp, Artificial Sequence
  primer
tctcgcaaagagtaggagatgg

SEQ ID NO: 81850 - DNA, 19 bp, Artificial Sequence
  primer
ctgcatggagcatgtggac

SEQ ID NO: 81851 - DNA, 21 bp, Artificial Sequence
  primer
gcaaaggtctgaggttggaag

SEQ ID NO: 81852 - DNA, 20 bp, Artificial Sequence
  primer
ccacaaaccttgaggctgac

SEQ ID NO: 81853 - DNA, 19 bp, Artificial Sequence
  primer
atgctgcttactgccctgc

SEQ ID NO: 81854 - DNA, 21 bp, Artificial Sequence
  primer
ggtaaagaaagtgaggcctgg

SEQ ID NO: 81855 - DNA, 21 bp, Artificial Sequence
  primer
gagatcgggagagggtttagg

SEQ ID NO: 81856 - DNA, 21 bp, Artificial Sequence
  primer
gagatcgggagagggtttagg

SEQ ID NO: 81857 - DNA, 38 bp, Artificial Sequence
  primer
gtaaaacgacggccagttcaagcccattcttcgcttag

SEQ ID NO: 81858 - DNA, 23 bp, Artificial Sequence
  primer
agcagcctagaacaaattcagtg

SEQ ID NO: 81859 - DNA, 21 bp, Artificial Sequence
  primer
tctctccagggcacacttagc

SEQ ID NO: 81860 - DNA, 21 bp, Artificial Sequence
  primer
atttctgcacaacacacccag

SEQ ID NO: 81861 - DNA, 38 bp, Artificial Sequence
  primer
gtaaaacgacggccagtagcctcaaagagcattcttgc

SEQ ID NO: 81862 - DNA, 21 bp, Artificial Sequence
  primer
cagagagtatccatccctgcc

SEQ ID NO: 81863 - DNA, 38 bp, Artificial Sequence
  primer
gtaaaacgacggccagttcatgacaatcccatacaccc

SEQ ID NO: 81864 - DNA, 38 bp, Artificial Sequence
  primer
gtaaaacgacggccagtttaacatctacatcccgtccg

SEQ ID NO: 81865 - DNA, 37 bp, Artificial Sequence
  primer
gtaaaacgacggccagtacggtggctgtgagaagttg

SEQ ID NO: 81866 - DNA, 21 bp, Artificial Sequence
  primer
actcagccctgctctgaactg

SEQ ID NO: 81867 - DNA, 21 bp, Artificial Sequence
  primer
ccctccatgtaaggattgacc

SEQ ID NO: 81868 - DNA, 38 bp, Artificial Sequence
  primer
gtaaaacgacggccagtgataggcgtgggaatcaacag

SEQ ID NO: 81869 - DNA, 38 bp, Artificial Sequence
  primer
gtaaaacgacggccagtgggaactcgctgctaactgtc

SEQ ID NO: 81870 - DNA, 21 bp, Artificial Sequence
  primer
aatctcacttccggagagcac

SEQ ID NO: 81871 - DNA, 38 bp, Artificial Sequence
  primer
gtaaaacgacggccagtcgttagtgatgacagcatcgg

SEQ ID NO: 81872 - DNA, 21 bp, Artificial Sequence
  primer
acctgaatgcctcatttggag

SEQ ID NO: 81873 - DNA, 21 bp, Artificial Sequence
  primer
ctggatgtaacttggtgctgc

SEQ ID NO: 81874 - DNA, 21 bp, Artificial Sequence
  primer
tttcgtggaagtcactgatgc

SEQ ID NO: 81875 - DNA, 21 bp, Artificial Sequence
  primer
cttcggtttcagaactttgcc

SEQ ID NO: 81876 - DNA, 38 bp, Artificial Sequence
  primer
gtaaaacgacggccagtttcattcaccaaatctgcctg

SEQ ID NO: 81877 - DNA, 36 bp, Artificial Sequence
  primer
gtaaaacgacggccagtgcccacaaacttccctttg

SEQ ID NO: 81878 - DNA, 37 bp, Artificial Sequence
  primer
gtaaaacgacggccagtataaggacaatcggcccttc

SEQ ID NO: 81879 - DNA, 21 bp, Artificial Sequence
  primer
acatctcctgtccatccactg

SEQ ID NO: 81880 - DNA, 23 bp, Artificial Sequence
  primer
tgctatggccttctaagatctcc

SEQ ID NO: 81881 - DNA, 18 bp, Artificial Sequence
  primer
aagctgggaagcaggcag

SEQ ID NO: 81882 - DNA, 20 bp, Artificial Sequence
  primer
gagctctgctctccatgtcc

SEQ ID NO: 81883 - DNA, 38 bp, Artificial Sequence
  primer
gtaaaacgacggccagtaccctctgtctttcctcctgg

SEQ ID NO: 81884 - DNA, 37 bp, Artificial Sequence
  primer
gtaaaacgacggccagtcagcctttgtgatttctgcc

SEQ ID NO: 81885 - DNA, 38 bp, Artificial Sequence
  primer
gtaaaacgacggccagtttcccaagtgagtcctgcttc

SEQ ID NO: 81886 - DNA, 38 bp, Artificial Sequence
  primer
gtaaaacgacggccagttgctcaaagcgcatttctaac

SEQ ID NO: 81887 - DNA, 24 bp, Artificial Sequence
  primer
tgtttctaagtccttctgactgga

SEQ ID NO: 81888 - DNA, 21 bp, Artificial Sequence
  primer
ccctccatgtaaggattgacc

SEQ ID NO: 81889 - DNA, 21 bp, Artificial Sequence
  primer
gataggcgtgggaatcaacag

SEQ ID NO: 81890 - DNA, 21 bp, Artificial Sequence
  primer
gggaactcgctgctaactgtc

SEQ ID NO: 81891 - DNA, 21 bp, Artificial Sequence
  primer
aatctcacttccggagagcac

SEQ ID NO: 81892 - DNA, 38 bp, Artificial Sequence; identical to SEQ ID NO: 81871
  primer

SEQ ID NO: 81893 - DNA, 21 bp, Artificial Sequence
  primer
acctgaatgcctcatttggag

SEQ ID NO: 81894 - DNA, 38 bp, Artificial Sequence
  primer
gtaaaacgacggccagtctggatgtaacttggtgctgc

SEQ ID NO: 81895 - DNA, 21 bp, Artificial Sequence
  primer
tttcgtggaagtcactgatgc

SEQ ID NO: 81896 - DNA, 21 bp, Artificial Sequence
  primer
cttcggtttcagaactttgcc

SEQ ID NO: 81897 - DNA, 38 bp, Artificial Sequence; identical to SEQ ID NO: 81876
  primer

SEQ ID NO: 81898 - DNA, 21 bp, Artificial Sequence
  primer
tatgcagctatccctctggtg

SEQ ID NO: 81899 - DNA, 21 bp, Artificial Sequence
  primer
taccaactcctgggagagacc

SEQ ID NO: 81900 - DNA, 38 bp, Artificial Sequence
  primer
gtaaaacgacggccagtaacctggaatgcatctggaac

SEQ ID NO: 81901 - DNA, 38 bp, Artificial Sequence
  primer
gtaaaacgacggccagtgctgaaactgggactgaaagc

SEQ ID NO: 81902 - DNA, 37 bp, Artificial Sequence
  primer
gtaaaacgacggccagtcaccggtgtaggagcaaagg

SEQ ID NO: 81903 - DNA, 21 bp, Artificial Sequence
  primer
acagggagcgtaagagtggag

SEQ ID NO: 81904 - DNA, 19 bp, Artificial Sequence
  primer
aggtatctgccaaaggccc

SEQ ID NO: 81905 - DNA, 38 bp, Artificial Sequence
  primer
gtaaaacgacggccagtgcgctgagacctagacaggac

SEQ ID NO: 81906 - DNA, 21 bp, Artificial Sequence
  primer
cgggctggagtatatcgtttc

SEQ ID NO: 81907 - DNA, 38 bp, Artificial Sequence
  primer
gtaaaacgacggccagtatgccaatggaaagcagagac

SEQ ID NO: 81908 - DNA, 38 bp, Artificial Sequence
  primer
gtaaaacgacggccagtcagaggtggctctctgattcc

SEQ ID NO: 81909 - DNA, 38 bp, Artificial Sequence
  primer
gtaaaacgacggccagtgcacttggttcttaggcttcg

SEQ ID NO: 81910 - DNA, 21 bp, Artificial Sequence
  primer
ccctacgctttcctgtttcac

SEQ ID NO: 81911 - DNA, 38 bp, Artificial Sequence
  primer
gtaaaacgacggccagtggtcacaggaggttgctatcc

SEQ ID NO: 81912 - DNA, 39 bp, Artificial Sequence
  primer
gtaaaacgacggccagttttccagagtgaaggagtcagc

SEQ ID NO: 81913 - DNA, 21 bp, Artificial Sequence
  primer
aaactgctcaaccagatttcg

SEQ ID NO: 81914 - DNA, 37 bp, Artificial Sequence
  primer
gtaaaacgacggccagtctttggctggcgtagagatg

SEQ ID NO: 81915 - DNA, 21 bp, Artificial Sequence
  primer
atgggttaatttgatcctccc

SEQ ID NO: 81916 - DNA, 35 bp, Artificial Sequence; identical to SEQ ID NO: 45446
  primer

SEQ ID NO: 81917 - DNA, 38 bp, Artificial Sequence
  primer
gtaaaacgacggccagtagctgttcaaggtggaaggag

SEQ ID NO: 81918 - DNA, 21 bp, Artificial Sequence
  primer
ggtttggtctgaaagggtctg

SEQ ID NO: 81919 - DNA, 21 bp, Artificial Sequence
  primer
agcctttgtcatgtgtgatgg

SEQ ID NO: 81920 - DNA, 22 bp, Artificial Sequence
  primer
tgttggtccgtattattgcctc

SEQ ID NO: 81921 - DNA, 20 bp, Artificial Sequence
  primer
ttgtcgttgaccttcaccag

SEQ ID NO: 81922 - DNA, 38 bp, Artificial Sequence
  primer
gtaaaacgacggccagttttgtcgttgaccttcaccag

SEQ ID NO: 81923 - DNA, 37 bp, Artificial Sequence
  primer
gtaaaacgacggccagtaactcggcgtcctcgtagtc

SEQ ID NO: 81924 - DNA, 20 bp, Artificial Sequence
  primer
gactgctgctgtcgaaggac

SEQ ID NO: 81925 - DNA, 38 bp, Artificial Sequence
  primer
gtaaaacgacggccagtactcctccctcccaacttctg

SEQ ID NO: 81926 - DNA, 39 bp, Artificial Sequence
  primer
gtaaaacgacggccagtaccacctacctgctacataccc

SEQ ID NO: 81927 - DNA, 38 bp, Artificial Sequence
  primer
gtaaaacgacggccagtctctgacagctgacctgggac

SEQ ID NO: 81928 - DNA, 39 bp, Artificial Sequence
  primer
gtaaaacgacggccagtgatctggtgcactctgttctcc

SEQ ID NO: 81929 - DNA, 21 bp, Artificial Sequence
  primer
tttcctcgtgcccactctatc

SEQ ID NO: 81930 - DNA, 38 bp, Artificial Sequence
  primer
gtaaaacgacggccagtcttggctgcagctatgacaac

SEQ ID NO: 81931 - DNA, 38 bp, Artificial Sequence
  primer
gtaaaacgacggccagtaatctcaccaatcccagaagg

SEQ ID NO: 81932 - DNA, 38 bp, Artificial Sequence
  primer
gtaaaacgacggccagtatgacaagaccctccatgacc

SEQ ID NO: 81933 - DNA, 19 bp, Artificial Sequence
  primer
acggagaaagcacccactg

SEQ ID NO: 81934 - DNA, 21 bp, Artificial Sequence
  primer
ctataccctccctggagaccc

SEQ ID NO: 81935 - DNA, 38 bp, Artificial Sequence
  primer
gtaaaacgacggccagtaattagccctccatgcaacac

SEQ ID NO: 81936 - DNA, 22 bp, Artificial Sequence
  primer
ttccttctgaaccaaagtccac

SEQ ID NO: 81937 - DNA, 38 bp, Artificial Sequence
  primer
gtaaaacgacggccagtaccagcacaaacactccacag

SEQ ID NO: 81938 - DNA, 37 bp, Artificial Sequence
  primer
gtaaaacgacggccagtttcctggaattcagcagcac

SEQ ID NO: 81939 - DNA, 20 bp, Artificial Sequence
  primer
ggatgtttcagagccacagc

SEQ ID NO: 81940 - DNA, 21 bp, Artificial Sequence
  primer
cagccacctctgactgatttg

SEQ ID NO: 81941 - DNA, 21 bp, Artificial Sequence
  primer
aggagagacccacacatgctc

SEQ ID NO: 81942 - DNA, 37 bp, Artificial Sequence
  primer
gtaaaacgacggccagtcatgcatggctaggatggtt

SEQ ID NO: 81943 - DNA, 21 bp, Artificial Sequence
  primer
ttgaggagtagggacagggag

SEQ ID NO: 81944 - DNA, 20 bp, Artificial Sequence
  primer
ggtctagtgggagcagaggg

SEQ ID NO: 81945 - DNA, 38 bp, Artificial Sequence
  primer
gtaaaacgacggccagtgcaagtaagaagatgggcagg

SEQ ID NO: 81946 - DNA, 20 bp, Artificial Sequence
  primer
aaaccacagtctgaggccag

SEQ ID NO: 81947 - DNA, 22 bp, Artificial Sequence
  primer
gagtgagtgaatgggtcaaacc

SEQ ID NO: 81948 - DNA, 38 bp, Artificial Sequence
  primer
gtaaaacgacggccagtttcaattaggtggagctgtgc

SEQ ID NO: 81949 - DNA, 21 bp, Artificial Sequence
  primer
cctggaagcctgataaccttg

SEQ ID NO: 81950 - DNA, 21 bp, Artificial Sequence
  primer
tacctcacaccctgatgttcc

SEQ ID NO: 81951 - DNA, 38 bp, Artificial Sequence
  primer
gtaaaacgacggccagtttatccatgtgtcttgtgggc

SEQ ID NO: 81952 - DNA, 21 bp, Artificial Sequence
  primer
gggaaagcaggtcacactagc

SEQ ID NO: 81953 - DNA, 21 bp, Artificial Sequence
  primer
ccaatccagtgatgaagggag

SEQ ID NO: 81954 - DNA, 21 bp, Artificial Sequence
  primer
ctcatcaccgcctacactgtc

SEQ ID NO: 81955 - DNA, 38 bp, Artificial Sequence
  primer
gtaaaacgacggccagtgtcctggaaacactaaggccc

SEQ ID NO: 81956 - DNA, 21 bp, Artificial Sequence
  primer
taagcaaaggtgagccagttg

SEQ ID NO: 81957 - DNA, 38 bp, Artificial Sequence
  primer
gtaaaacgacggccagtataaggaagggagtgtggtgg

SEQ ID NO: 81958 - DNA, 21 bp, Artificial Sequence
  primer
agctgctgggacaggtatttc

SEQ ID NO: 81959 - DNA, 21 bp, Artificial Sequence
  primer
gcagtaggtctccatcttggc

SEQ ID NO: 81960 - DNA, 38 bp, Artificial Sequence
  primer
gtaaaacgacggccagtaccagttatgggtcttcctgg

SEQ ID NO: 81961 - DNA, 21 bp, Artificial Sequence
  primer
aacaaattggccttgatgacc

SEQ ID NO: 81962 - DNA, 21 bp, Artificial Sequence
  primer
gaggccaggatgtggtagttg

SEQ ID NO: 81963 - DNA, 38 bp, Artificial Sequence
  primer
gtaaaacgacggccagtcagggagctgttagtgaaggc

SEQ ID NO: 81964 - DNA, 38 bp, Artificial Sequence
  primer
gtaaaacgacggccagtgccaagcttcttggttcaatg

SEQ ID NO: 81965 - DNA, 40 bp, Artificial Sequence
  primer
gtaaaacgacggccagtggtaacattcatcaagtccaggg

SEQ ID NO: 81966 - DNA, 38 bp, Artificial Sequence
  primer
gtaaaacgacggccagtggcatgagagttgagctttcc

SEQ ID NO: 81967 - DNA, 21 bp, Artificial Sequence
  primer
tcgaagttgttggagatggtg

SEQ ID NO: 81968 - DNA, 38 bp, Artificial Sequence
  primer
gtaaaacgacggccagtttggtgaacacttcccagatg

SEQ ID NO: 81969 - DNA, 21 bp, Artificial Sequence
  primer
tgtgattacatcgatgatgcg

SEQ ID NO: 81970 - DNA, 21 bp, Artificial Sequence
  primer
aaagcaactgtccctcaatcc

SEQ ID NO: 81971 - DNA, 38 bp, Artificial Sequence
  primer
gtaaaacgacggccagtcgtgcatagatgtctccttgg

SEQ ID NO: 81972 - DNA, 21 bp, Artificial Sequence
  primer
gaagtgctaggaagagccgtg

SEQ ID NO: 81973 - DNA, 21 bp, Artificial Sequence
  primer
catggacatgtttgcagcatc

SEQ ID NO: 81974 - DNA, 38 bp, Artificial Sequence
  primer
gtaaaacgacggccagttatccttatgaatcgccagcc

SEQ ID NO: 81975 - DNA, 38 bp, Artificial Sequence
  primer
gtaaaacgacggccagtctgtttcccttctggtcatgg

SEQ ID NO: 81976 - DNA, 21 bp, Artificial Sequence
  primer
ctactgagcatcaccctggac

SEQ ID NO: 81977 - DNA, 21 bp, Artificial Sequence
  primer
acgtacgactgggtagttcgg

SEQ ID NO: 81978 - DNA, 38 bp, Artificial Sequence; identical to SEQ ID NO: 81975
  primer

SEQ ID NO: 81979 - DNA, 20 bp, Artificial Sequence
  primer
tcatttgctcagcttccagg

SEQ ID NO: 81980 - DNA, 19 bp, Artificial Sequence
  primer
agctacccgcgaatctgag

SEQ ID NO: 81981 - DNA, 20 bp, Artificial Sequence
  primer
agtgaaccactgtgcccaac

SEQ ID NO: 81982 - DNA, 21 bp, Artificial Sequence
  primer
ggccaatacagaaagaggacc

SEQ ID NO: 81983 - DNA, 19 bp, Artificial Sequence
  primer
cactgcacctggctgagac

SEQ ID NO: 81984 - DNA, 43 bp, Artificial Sequence
  primer
gtaaaacgacggccagtactaagatttaaaccaaaggtaagcg

SEQ ID NO: 81985 - DNA, 39 bp, Artificial Sequence
  primer
gtaaaacgacggccagtcagactgcttcctcttaatgcc

SEQ ID NO: 81986 - DNA, 38 bp, Artificial Sequence
  primer
gtaaaacgacggccagtctccaactggatgctttgatg

SEQ ID NO: 81987 - DNA, 40 bp, Artificial Sequence
  primer
gtaaaacgacggccagtcagcgttagcacagtaccattag

SEQ ID NO: 81988 - DNA, 39 bp, Artificial Sequence
  primer
gtaaaacgacggccagtggcaaatccacagttacagatg

SEQ ID NO: 81989 - DNA, 38 bp, Artificial Sequence
  primer
gtaaaacgacggccagtccctcgaatccctaaatgaag

SEQ ID NO: 81990 - DNA, 23 bp, Artificial Sequence
  primer
atctgaaatgattacatcccagg

SEQ ID NO: 81991 - DNA, 25 bp, Artificial Sequence
  primer
aaacgaacttaaagtatgctgcttg

SEQ ID NO: 81992 - DNA, 38 bp, Artificial Sequence
  primer
gtaaaacgacggccagtagtatgtgggtgaagggaagc

SEQ ID NO: 81993 - DNA, 24 bp, Artificial Sequence
  primer
caaatccatctaaattgcttctgc

SEQ ID NO: 81994 - DNA, 21 bp, Artificial Sequence
  primer
agaggcttaacctcctctggg

SEQ ID NO: 81995 - DNA, 38 bp, Artificial Sequence
  primer
gtaaaacgacggccagttcttccagttgcgttcaaatc

SEQ ID NO: 81996 - DNA, 21 bp, Artificial Sequence
  primer
ttcctcaatggcatcaatcac

SEQ ID NO: 81997 - DNA, 38 bp, Artificial Sequence
  primer
gtaaaacgacggccagtcccttgaggaaccctctcttc

SEQ ID NO: 81998 - DNA, 38 bp, Artificial Sequence
  primer
gtaaaacgacggccagtcaacaacagccatctttcctg

SEQ ID NO: 81999 - DNA, 21 bp, Artificial Sequence
  primer
agtgaaggcacagcactgaag

SEQ ID NO: 82000 - DNA, 42 bp, Artificial Sequence
  primer
gtaaaacgacggccagtgcactgaaacatagaaacttagggc

SEQ ID NO: 82001 - DNA, 38 bp, Artificial Sequence
  primer
gtaaaacgacggccagtatcctctctcccagtcttccc

SEQ ID NO: 82002 - DNA, 21 bp, Artificial Sequence
  primer
tgggagcaatatcacatgcag

SEQ ID NO: 82003 - DNA, 38 bp, Artificial Sequence
  primer
gtaaaacgacggccagtgcaggcaaccattagaaggtg

SEQ ID NO: 82004 - DNA, 41 bp, Artificial Sequence
  primer
gtaaaacgacggccagttgtcagatgcctgtatttctaagc

SEQ ID NO: 82005 - DNA, 21 bp, Artificial Sequence
  primer
tcagccatgcaattcatacag

SEQ ID NO: 82006 - DNA, 21 bp, Artificial Sequence
  primer
acaagcagttggttgctcatc

SEQ ID NO: 82007 - DNA, 23 bp, Artificial Sequence
  primer
catgtctaatggactcaacaccc

SEQ ID NO: 82008 - DNA, 38 bp, Artificial Sequence
  primer
gtaaaacgacggccagtctgagcagaaacaggttcagg

SEQ ID NO: 82009 - DNA, 36 bp, Artificial Sequence
  primer
gtaaaacgacggccagtctgggccatagggactgag

SEQ ID NO: 82010 - DNA, 42 bp, Artificial Sequence
  primer
gtaaaacgacggccagtcagctccttacaaagagaaattagc

SEQ ID NO: 82011 - DNA, 21 bp, Artificial Sequence
  primer
ccatttgtgaagatccagagg

SEQ ID NO: 82012 - DNA, 41 bp, Artificial Sequence
  primer
gtaaaacgacggccagtgcatgatcttgaattagctgtcac

SEQ ID NO: 82013 - DNA, 41 bp, Artificial Sequence
  primer
gtaaaacgacggccagtaagggtaagaaattagcattgcct

SEQ ID NO: 82014 - DNA, 42 bp, Artificial Sequence
  primer
gtaaaacgacggccagtaaattgatcaaacaaatgtagcaaa

SEQ ID NO: 82015 - DNA, 36 bp, Artificial Sequence
  primer
gtaaaacgacggccagttcgtgatcctcccgtcttg

SEQ ID NO: 82016 - DNA, 38 bp, Artificial Sequence
  primer
gtaaaacgacggccagttgggcaacagaacaagactgt

SEQ ID NO: 82017 - DNA, 21 bp, Artificial Sequence
  primer
cacgatgagtttgtggcagac

SEQ ID NO: 82018 - DNA, 20 bp, Artificial Sequence
  primer
ggagctctagaagcgccaag

SEQ ID NO: 82019 - DNA, 21 bp, Artificial Sequence
  primer
atccatactggaaggtgacgg

SEQ ID NO: 82020 - DNA, 38 bp, Artificial Sequence
  primer
gtaaaacgacggccagtagtgacctggaagtgtgggag

SEQ ID NO: 82021 - DNA, 21 bp, Artificial Sequence
  primer
catttgcctgagtggagtacg

SEQ ID NO: 82022 - DNA, 21 bp, Artificial Sequence
  primer
agacacattcagctggaagcc

SEQ ID NO: 82023 - DNA, 36 bp, Artificial Sequence
  primer
gtaaaacgacggccagtgcacccaggcttagtggtc

SEQ ID NO: 82024 - DNA, 38 bp, Artificial Sequence
  primer
gtaaaacgacggccagtgtggacagcagtaccaggttg

SEQ ID NO: 82025 - DNA, 21 bp, Artificial Sequence
  primer
gcccatatcccttctcaacag

SEQ ID NO: 82026 - DNA, 38 bp, Artificial Sequence
  primer
gtaaaacgacggccagttgcctccattattactgctgc

SEQ ID NO: 82027 - DNA, 21 bp, Artificial Sequence
  primer
gatggcatgttgtagctctgg

SEQ ID NO: 82028 - DNA, 20 bp, Artificial Sequence
  primer
gtccggtctgggtctctctc

SEQ ID NO: 82029 - DNA, 21 bp, Artificial Sequence
  primer
ccaggaattatttacgcttgc

SEQ ID NO: 82030 - DNA, 38 bp, Artificial Sequence
  primer
gtaaaacgacggccagtcacaagcaaagttaggcctcc

SEQ ID NO: 82031 - DNA, 21 bp, Artificial Sequence
  primer
aacaaagtgtggtgtcatcgc

SEQ ID NO: 82032 - DNA, 38 bp, Artificial Sequence
  primer
gtaaaacgacggccagtctgggacaaatggtgtgtttc

SEQ ID NO: 82033 - DNA, 24 bp, Artificial Sequence
  primer
cagctctgtttgagacattacagc

SEQ ID NO: 82034 - DNA, 38 bp, Artificial Sequence
  primer
gtaaaacgacggccagtgacgggaatcaaggacttacg

SEQ ID NO: 82035 - DNA, 25 bp, Artificial Sequence
  primer
ccacagtatttgaacactaggaatg

SEQ ID NO: 82036 - DNA, 21 bp, Artificial Sequence
  primer
atgcagaacgatctcacaggg

SEQ ID NO: 82037 - DNA, 37 bp, Artificial Sequence
  primer
gtaaaacgacggccagtacagccacgaattggatgag

SEQ ID NO: 82038 - DNA, 38 bp, Artificial Sequence
  primer
gtaaaacgacggccagtgaagcttccggttgtcttgtc

SEQ ID NO: 82039 - DNA, 18 bp, Artificial Sequence
  primer
cgagacctctgtgcggtg

SEQ ID NO: 82040 - DNA, 38 bp, Artificial Sequence
  primer
gtaaaacgacggccagttcctccagaatggacaggttc

SEQ ID NO: 82041 - DNA, 37 bp, Artificial Sequence
  primer
gtaaaacgacggccagtcagtcctcaaacacgtgcag

SEQ ID NO: 82042 - DNA, 37 bp, Artificial Sequence
  primer
gtaaaacgacggccagtccaacttcttcacggtggtg

SEQ ID NO: 82043 - DNA, 37 bp, Artificial Sequence
  primer
gtaaaacgacggccagtctccgagttgtcgtctgagg

SEQ ID NO: 82044 - DNA, 36 bp, Artificial Sequence
  primer
gtaaaacgacggccagtctcattcccaagaggctgg

SEQ ID NO: 82045 - DNA, 38 bp, Artificial Sequence
  primer
gtaaaacgacggccagtcaaatagtggaggcagggaag

SEQ ID NO: 82046 - DNA, 21 bp, Artificial Sequence
  primer
ctgctttgtcaactttgggac

SEQ ID NO: 82047 - DNA, 20 bp, Artificial Sequence
  primer
atgtctgcgctggtctcctc

SEQ ID NO: 82048 - DNA, 20 bp, Artificial Sequence
  primer
tctccaggctcgaagattcc

SEQ ID NO: 82049 - DNA, 21 bp, Artificial Sequence
  primer
ttgggataaacgaaggacagg

SEQ ID NO: 82050 - DNA, 38 bp, Artificial Sequence
  primer
gtaaaacgacggccagtccctcctccttgtccatcttc

SEQ ID NO: 82051 - DNA, 37 bp, Artificial Sequence
  primer
gtaaaacgacggccagtctcgtcgtccaggaagtctg

SEQ ID NO: 82052 - DNA, 38 bp, Artificial Sequence
  primer
gtaaaacgacggccagtccctggtcacgtacacctttg

SEQ ID NO: 82053 - DNA, 21 bp, Artificial Sequence
  primer
gcttcggaggacaagtttgag

SEQ ID NO: 82054 - DNA, 20 bp, Artificial Sequence
  primer
gacacctgggacaagctcag

SEQ ID NO: 82055 - DNA, 35 bp, Artificial Sequence
  primer
gtaaaacgacggccagtgccaggacctcctctccc

SEQ ID NO: 82056 - DNA, 21 bp, Artificial Sequence
  primer
gaagaacttcatcccggacac

SEQ ID NO: 82057 - DNA, 38 bp, Artificial Sequence
  primer
gtaaaacgacggccagtgagtcacaggcacgatctctg

SEQ ID NO: 82058 - DNA, 37 bp, Artificial Sequence
  primer
gtaaaacgacggccagtagaggaacacgatgctgctg

SEQ ID NO: 82059 - DNA, 20 bp, Artificial Sequence
  primer
gagcactgatggactcccag

SEQ ID NO: 82060 - DNA, 21 bp, Artificial Sequence
  primer
ggcctacaggatactgggaag

SEQ ID NO: 82061 - DNA, 40 bp, Artificial Sequence
  primer
gtaaaacgacggccagtagacccacgtaaacaagtgacag

SEQ ID NO: 82062 - DNA, 22 bp, Artificial Sequence
  primer
cgacaaaggtacaccacaaatg

SEQ ID NO: 82063 - DNA, 38 bp, Artificial Sequence
  primer
gtaaaacgacggccagttagaagccagaaggacacacg

SEQ ID NO: 82064 - DNA, 38 bp, Artificial Sequence
  primer
gtaaaacgacggccagttcctagtcctgaccttgctgc

SEQ ID NO: 82065 - DNA, 38 bp, Artificial Sequence
  primer
gtaaaacgacggccagtatcgaggtaagcactgaagcc

SEQ ID NO: 82066 - DNA, 21 bp, Artificial Sequence
  primer
agtgaggaaagagcagggttg

SEQ ID NO: 82067 - DNA, 21 bp, Artificial Sequence
  primer
ctcaggctccagcattaacag

SEQ ID NO: 82068 - DNA, 21 bp, Artificial Sequence
  primer
ggaggacagaataggacctgg

SEQ ID NO: 82069 - DNA, 21 bp, Artificial Sequence
  primer
gttcccactaacctccattgc

SEQ ID NO: 82070 - DNA, 21 bp, Artificial Sequence
  primer
gctatgagtcacattcagggc

SEQ ID NO: 82071 - DNA, 21 bp, Artificial Sequence
  primer
gtctttcttggaagccaaagc

SEQ ID NO: 82072 - DNA, 21 bp, Artificial Sequence
  primer
ccaggcaactagagcttcagg

SEQ ID NO: 82073 - DNA, 22 bp, Artificial Sequence
  primer
aagtactcagacaccacagccc

SEQ ID NO: 82074 - DNA, 38 bp, Artificial Sequence
  primer
gtaaaacgacggccagtttgaggatgggtggagtgtag

SEQ ID NO: 82075 - DNA, 21 bp, Artificial Sequence
  primer
tttgttgctggcaagtggtag

SEQ ID NO: 82076 - DNA, 21 bp, Artificial Sequence
  primer
tagacctccttccgagtcagc

SEQ ID NO: 82077 - DNA, 21 bp, Artificial Sequence
  primer
tcacagctgcctttctgtagg

SEQ ID NO: 82078 - DNA, 38 bp, Artificial Sequence
  primer
gtaaaacgacggccagtcccagataggaaagggaggac

SEQ ID NO: 82079 - DNA, 38 bp, Artificial Sequence
  primer
gtaaaacgacggccagtaagacatgcggtcctaaggtg

SEQ ID NO: 82080 - DNA, 20 bp, Artificial Sequence
  primer
gtaacaacatggccagtgcc

SEQ ID NO: 82081 - DNA, 38 bp, Artificial Sequence
  primer
gtaaaacgacggccagtcgagacgccatctctgttaaa

SEQ ID NO: 82082 - DNA, 38 bp, Artificial Sequence
  primer
gtaaaacgacggccagttgacttcagtggaaatcaggg

SEQ ID NO: 82083 - DNA, 21 bp, Artificial Sequence
  primer
gcctggcctggattatatctc

SEQ ID NO: 82084 - DNA, 18 bp, Artificial Sequence
  primer
cctgggcgacagagaagg

SEQ ID NO: 82085 - DNA, 21 bp, Artificial Sequence
  primer
aactgaagaaacatggcaccc

SEQ ID NO: 82086 - DNA, 38 bp, Artificial Sequence
  primer
gtaaaacgacggccagttctgggtggatggaggattta

SEQ ID NO: 82087 - DNA, 21 bp, Artificial Sequence
  primer
aaataggaagtccgctccctg

SEQ ID NO: 82088 - DNA, 35 bp, Artificial Sequence
  primer
gtaaaacgacggccagtgcggttgctctcgacttg

SEQ ID NO: 82089 - DNA, 35 bp, Artificial Sequence
  primer
gtaaaacgacggccagtgtagcagcgtgctcccag

SEQ ID NO: 82090 - DNA, 21 bp, Artificial Sequence
  primer
aaacctgcacttccaccattc

SEQ ID NO: 82091 - DNA, 21 bp, Artificial Sequence
  primer
acgcacaaaggtatgccactc

SEQ ID NO: 82092 - DNA, 38 bp, Artificial Sequence
  primer
gtaaaacgacggccagtagaatacaaggcaggagtggg

SEQ ID NO: 82093 - DNA, 39 bp, Artificial Sequence
  primer
gtaaaacgacggccagtggatatgttcagcgtgtgacag

SEQ ID NO: 82094 - DNA, 21 bp, Artificial Sequence
  primer
catgcccactgcctataactg

SEQ ID NO: 82095 - DNA, 21 bp, Artificial Sequence
  primer
tccagatggatctgaagcaag

SEQ ID NO: 82096 - DNA, 38 bp, Artificial Sequence
  primer
gtaaaacgacggccagtcacctttagctgtgatggagg

SEQ ID NO: 82097 - DNA, 38 bp, Artificial Sequence
  primer
gtaaaacgacggccagtcttctgctcctagtcccaagc

SEQ ID NO: 82098 - DNA, 38 bp, Artificial Sequence
  primer
gtaaaacgacggccagtatccaaacaggaaccctcacc

SEQ ID NO: 82099 - DNA, 37 bp, Artificial Sequence
  primer
gtaaaacgacggccagtatccgcagttgtgtttccag

SEQ ID NO: 82100 - DNA, 38 bp, Artificial Sequence
  primer
gtaaaacgacggccagttactcacaaccctacccgctg

SEQ ID NO: 82101 - DNA, 39 bp, Artificial Sequence
  primer
gtaaaacgacggccagtgagctggataatcatggctctg

SEQ ID NO: 82102 - DNA, 22 bp, Artificial Sequence
  primer
gaaatgagctactgtggccttg

SEQ ID NO: 82103 - DNA, 40 bp, Artificial Sequence
  primer
gtaaaacgacggccagtgcacattgactagtttgcagctc

SEQ ID NO: 82104 - DNA, 21 bp, Artificial Sequence
  primer
ctgatgatccttgggagtcag

SEQ ID NO: 82105 - DNA, 22 bp, Artificial Sequence
  primer
ggtgcctatgtgagaggaagtc

SEQ ID NO: 82106 - DNA, 38 bp, Artificial Sequence
  primer
gtaaaacgacggccagtggagaaagctcctcaagcaac

SEQ ID NO: 82107 - DNA, 22 bp, Artificial Sequence
  primer
ttcatttcccaggtgaagaaac

SEQ ID NO: 82108 - DNA, 19 bp, Artificial Sequence
  primer
gtggaaccagcaagatccc

SEQ ID NO: 82109 - DNA, 20 bp, Artificial Sequence
  primer
agtgggcagttggagaggag

SEQ ID NO: 82110 - DNA, 18 bp, Artificial Sequence
  primer
gaggaggcaggatggtgg

SEQ ID NO: 82111 - DNA, 38 bp, Artificial Sequence
  primer
gtaaaacgacggccagtaaggttccgtgtgagttggag

SEQ ID NO: 82112 - DNA, 37 bp, Artificial Sequence
  primer
gtaaaacgacggccagtctgtagccagatgcagggag

SEQ ID NO: 82113 - DNA, 21 bp, Artificial Sequence
  primer
gggctgttctacctatcccag

SEQ ID NO: 82114 - DNA, 21 bp, Artificial Sequence
  primer
cacacacaaatgcactcaggg

SEQ ID NO: 82115 - DNA, 37 bp, Artificial Sequence
  primer
gtaaaacgacggccagtacaggcatggcgtatcagac

SEQ ID NO: 82116 - DNA, 36 bp, Artificial Sequence
  primer
gtaaaacgacggccagtccaactggcatgcaaagag

SEQ ID NO: 82117 - DNA, 20 bp, Artificial Sequence
  primer
tgagctcagacaatctgccc

SEQ ID NO: 82118 - DNA, 21 bp, Artificial Sequence
  primer
ctgtgctgaatgtggcttctg

SEQ ID NO: 82119 - DNA, 20 bp, Artificial Sequence
  primer
gcttcctaacaggcacctcc

SEQ ID NO: 82120 - DNA, 37 bp, Artificial Sequence
  primer
gtaaaacgacggccagtcctgtgcccagactgaagag

SEQ ID NO: 82121 - DNA, 21 bp, Artificial Sequence
  primer
aggtggttagactgcaaaggg

SEQ ID NO: 82122 - DNA, 21 bp, Artificial Sequence
  primer
cagccattgatacaggtagcg

SEQ ID NO: 82123 - DNA, 21 bp, Artificial Sequence
  primer
gattgagctcacacacctccc

SEQ ID NO: 82124 - DNA, 37 bp, Artificial Sequence
  primer
gtaaaacgacggccagtgggaagaggaaagaagggtg

SEQ ID NO: 82125 - DNA, 38 bp, Artificial Sequence
  primer
gtaaaacgacggccagtcacttacatcatgctcgccac

SEQ ID NO: 82126 - DNA, 21 bp, Artificial Sequence
  primer
gctcaaacccacatgagtgag

SEQ ID NO: 82127 - DNA, 38 bp, Artificial Sequence
  primer
gtaaaacgacggccagtggtatcccttggtctcccttc

SEQ ID NO: 82128 - DNA, 38 bp, Artificial Sequence
  primer
gtaaaacgacggccagtactgttgagcctttccctgag

SEQ ID NO: 82129 - DNA, 21 bp, Artificial Sequence
  primer
caaaggctggaggtaaggatg

SEQ ID NO: 82130 - DNA, 21 bp, Artificial Sequence
  primer
ctctgccacatctttctggtg

SEQ ID NO: 82131 - DNA, 37 bp, Artificial Sequence
  primer
gtaaaacgacggccagtctggcttagcttcctggctc

SEQ ID NO: 82132 - DNA, 21 bp, Artificial Sequence
  primer
gcagtgagctatgactgcacc

SEQ ID NO: 82133 - DNA, 40 bp, Artificial Sequence
  primer
gtaaaacgacggccagttttcgccaattaacctttgtatc

SEQ ID NO: 82134 - DNA, 21 bp, Artificial Sequence
  primer
tgctaactagggcgttcatcc

SEQ ID NO: 82135 - DNA, 37 bp, Artificial Sequence
  primer
gtaaaacgacggccagtaacagatgcatggccctatc

SEQ ID NO: 82136 - DNA, 21 bp, Artificial Sequence
  primer
ctttgagagttcccacccttg

SEQ ID NO: 82137 - DNA, 21 bp, Artificial Sequence
  primer
gcgtactagaccctggaatgc

SEQ ID NO: 82138 - DNA, 22 bp, Artificial Sequence
  primer
gagcattaagatgagggcagag

SEQ ID NO: 82139 - DNA, 20 bp, Artificial Sequence
  primer
caagtggagaagggctgatg

SEQ ID NO: 82140 - DNA, 21 bp, Artificial Sequence
  primer
gatcattctggagacaccacg

SEQ ID NO: 82141 - DNA, 21 bp, Artificial Sequence
  primer
tcctcttggaaggtgaggaac

SEQ ID NO: 82142 - DNA, 38 bp, Artificial Sequence
  primer
gtaaaacgacggccagtctgattcatctcacactgccc

SEQ ID NO: 82143 - DNA, 21 bp, Artificial Sequence
  primer
tccctggctggtttcatagac

SEQ ID NO: 82144 - DNA, 38 bp, Artificial Sequence
  primer
gtaaaacgacggccagtgactctgaatgcatagcccag

SEQ ID NO: 82145 - DNA, 38 bp, Artificial Sequence
  primer
gtaaaacgacggccagtcaggaagagagaccaggaagg

SEQ ID NO: 82146 - DNA, 21 bp, Artificial Sequence
  primer
agcagagtagcacccagaacc

SEQ ID NO: 82147 - DNA, 21 bp, Artificial Sequence
  primer
tcatttgcatgagtcagccag

SEQ ID NO: 82148 - DNA, 38 bp, Artificial Sequence
  primer
gtaaaacgacggccagttgcataagcaatttgttgcag

SEQ ID NO: 82149 - DNA, 21 bp, Artificial Sequence
  primer
ggtgggataccagcacttctc

SEQ ID NO: 82150 - DNA, 38 bp, Artificial Sequence
  primer
gtaaaacgacggccagtacacacacaccctgaatctgc

SEQ ID NO: 82151 - DNA, 38 bp, Artificial Sequence
  primer
gtaaaacgacggccagtacagaaatcagcatcaggcac

SEQ ID NO: 82152 - DNA, 22 bp, Artificial Sequence
  primer
tctttcctctggactgttctgc

SEQ ID NO: 82153 - DNA, 38 bp, Artificial Sequence
  primer
gtaaaacgacggccagtgagcacctactccagtttgcg

SEQ ID NO: 82154 - DNA, 38 bp, Artificial Sequence
  primer
gtaaaacgacggccagtggtgagggagtcctgacactg

SEQ ID NO: 82155 - DNA, 21 bp, Artificial Sequence
  primer
aatccagcttcatcctcttgg

SEQ ID NO: 82156 - DNA, 38 bp, Artificial Sequence
  primer
gtaaaacgacggccagtcgccgggtacagatacttctc

SEQ ID NO: 82157 - DNA, 38 bp, Artificial Sequence
  primer
gtaaaacgacggccagttgtttatgcctgtcgtgcatc

SEQ ID NO: 82158 - DNA, 18 bp, Artificial Sequence
  primer
gaaggcgtcgtcctcgtc

SEQ ID NO: 82159 - DNA, 39 bp, Artificial Sequence
  primer
gtaaaacgacggccagtcgcctgcatgaggatatagttc

SEQ ID NO: 82160 - DNA, 38 bp, Artificial Sequence
  primer
gtaaaacgacggccagtgcttctcgtgacagtgtttgc

SEQ ID NO: 82161 - DNA, 36 bp, Artificial Sequence
  primer
gtaaaacgacggccagtacaggctggaagcgaagtc

SEQ ID NO: 82162 - DNA, 36 bp, Artificial Sequence
  primer
gtaaaacgacggccagtctttcgccgtacttgaggc

SEQ ID NO: 82163 - DNA, 19 bp, Artificial Sequence
  primer
gctttcgccgtacttgagg

SEQ ID NO: 82164 - DNA, 21 bp, Artificial Sequence
  primer
aggatgtagttcttggcgagc

SEQ ID NO: 82165 - DNA, 38 bp, Artificial Sequence
  primer
gtaaaacgacggccagtggtgtgtttaaggcttctccg

SEQ ID NO: 82166 - DNA, 39 bp, Artificial Sequence
  primer
gtaaaacgacggccagtttgtttgctctgcaagtgtttc

SEQ ID NO: 82167 - DNA, 38 bp, Artificial Sequence
  primer
gtaaaacgacggccagtttacatgtggagctggtggac

SEQ ID NO: 82168 - DNA, 38 bp, Artificial Sequence
  primer
gtaaaacgacggccagtgcattgggccagatagttacc

SEQ ID NO: 82169 - DNA, 38 bp, Artificial Sequence
  primer
gtaaaacgacggccagtcctccctgatcctgatttgac

SEQ ID NO: 82170 - DNA, 21 bp, Artificial Sequence
  primer
ataaactcttgggcaaatggg

SEQ ID NO: 82171 - DNA, 38 bp, Artificial Sequence
  primer
gtaaaacgacggccagtattgatcatgtctctggctgc

SEQ ID NO: 82172 - DNA, 24 bp, Artificial Sequence
  primer
tgcctctttctggttaaagatgag

SEQ ID NO: 82173 - DNA, 41 bp, Artificial Sequence
  primer
gtaaaacgacggccagtggtgactctgtgttaaagatgcag

SEQ ID NO: 82174 - DNA, 21 bp, Artificial Sequence
  primer
ctggaagcacattctggtctg

SEQ ID NO: 82175 - DNA, 38 bp, Artificial Sequence
  primer
gtaaaacgacggccagtctcaagtggtcttcccacctc

SEQ ID NO: 82176 - DNA, 38 bp, Artificial Sequence
  primer
gtaaaacgacggccagtatctgcttcgctaaatgcctc

SEQ ID NO: 82177 - DNA, 25 bp, Artificial Sequence
  primer
gctagttatgattgtcacctaaccc

SEQ ID NO: 82178 - DNA, 35 bp, Artificial Sequence
  primer
gtaaaacgacggccagtgatccacccgtctctgcc

SEQ ID NO: 82179 - DNA, 21 bp, Artificial Sequence
  primer
atgaggagacaccaagccatc

SEQ ID NO: 82180 - DNA, 41 bp, Artificial Sequence
  primer
gtaaaacgacggccagttgattcttcatcatcacacaacaa

SEQ ID NO: 82181 - DNA, 43 bp, Artificial Sequence
  primer
gtaaaacgacggccagtagtgaacctgttcaagatttactttg

SEQ ID NO: 82182 - DNA, 38 bp, Artificial Sequence
  primer
gtaaaacgacggccagttccataaacgctaaccaaccc

SEQ ID NO: 82183 - DNA, 40 bp, Artificial Sequence
  primer
gtaaaacgacggccagtcgcctgtatactgccattatctc

SEQ ID NO: 82184 - DNA, 20 bp, Artificial Sequence
  primer
ctgggctcaagtggtctgtc

SEQ ID NO: 82185 - DNA, 38 bp, Artificial Sequence
  primer
gtaaaacgacggccagtgcagaatgttgtccaataccc

SEQ ID NO: 82186 - DNA, 38 bp, Artificial Sequence
  primer
gtaaaacgacggccagtcctccacctcccacaatttac

SEQ ID NO: 82187 - DNA, 40 bp, Artificial Sequence
  primer
gtaaaacgacggccagttgatgcattcttctgatagctca

SEQ ID NO: 82188 - DNA, 39 bp, Artificial Sequence
  primer
gtaaaacgacggccagttgcatgcatgacatttacaaca

SEQ ID NO: 82189 - DNA, 37 bp, Artificial Sequence
  primer
gtaaaacgacggccagtaggatgaaggtgaggaacgg

SEQ ID NO: 82190 - DNA, 23 bp, Artificial Sequence
  primer
tcctttcaatcacctcctttatg

SEQ ID NO: 82191 - DNA, 25 bp, Artificial Sequence
  primer
aaagtgttattcctctctgctatgg

SEQ ID NO: 82192 - DNA, 35 bp, Artificial Sequence
  primer
gtaaaacgacggccagtggagggttgggacattgc

SEQ ID NO: 82193 - DNA, 38 bp, Artificial Sequence
  primer
gtaaaacgacggccagtgaagtcccacaacatgctacc

SEQ ID NO: 82194 - DNA, 38 bp, Artificial Sequence
  primer
gtaaaacgacggccagttgcgagaatcagaagtcccac

SEQ ID NO: 82195 - DNA, 38 bp, Artificial Sequence
  primer
gtaaaacgacggccagtctcatcctgggccgtattaag

SEQ ID NO: 82196 - DNA, 38 bp, Artificial Sequence
  primer
gtaaaacgacggccagtaatactggagatgacggtggg

SEQ ID NO: 82197 - DNA, 21 bp, Artificial Sequence
  primer
ctgcttgttggctttcaacac

SEQ ID NO: 82198 - DNA, 37 bp, Artificial Sequence
  primer
gtaaaacgacggccagtttctgatctggcactgggac

SEQ ID NO: 82199 - DNA, 19 bp, Artificial Sequence
  primer
caacatgcacaaaggcagg

SEQ ID NO: 82200 - DNA, 21 bp, Artificial Sequence
  primer
cctccacaacaagagcacatt

SEQ ID NO: 82201 - DNA, 21 bp, Artificial Sequence
  primer
atactctgcagctgggtgagc

SEQ ID NO: 82202 - DNA, 23 bp, Artificial Sequence
  primer
tccaatgtgtgtctatgtagccc

SEQ ID NO: 82203 - DNA, 19 bp, Artificial Sequence
  primer
aaacacccgctggatcttg

SEQ ID NO: 82204 - DNA, 36 bp, Artificial Sequence
  primer
gtaaaacgacggccagtactcccacatactgcccgt

SEQ ID NO: 82205 - DNA, 38 bp, Artificial Sequence
  primer
gtaaaacgacggccagtaccaggaaagcaagacagacc

SEQ ID NO: 82206 - DNA, 21 bp, Artificial Sequence
  primer
cgggtgtgtggaataagacag

SEQ ID NO: 82207 - DNA, 38 bp, Artificial Sequence
  primer
gtaaaacgacggccagtgtgtcaggtaagcactgctcg

SEQ ID NO: 82208 - DNA, 21 bp, Artificial Sequence
  primer
gccttctctagcagggagacc

SEQ ID NO: 82209 - DNA, 21 bp, Artificial Sequence
  primer
ttgtagatgttcatgggctcc

SEQ ID NO: 82210 - DNA, 21 bp, Artificial Sequence
  primer
aggcagtcgagctactatggg

SEQ ID NO: 82211 - DNA, 21 bp, Artificial Sequence
  primer
agaggctaagggttccagagg

SEQ ID NO: 82212 - DNA, 20 bp, Artificial Sequence
  primer
aaatgctgtgcttctcgctg

SEQ ID NO: 82213 - DNA, 38 bp, Artificial Sequence
  primer
gtaaaacgacggccagtttaggttgcccttccttcctc

SEQ ID NO: 82214 - DNA, 21 bp, Artificial Sequence
  primer
atggtcttaaacccaaagccc

SEQ ID NO: 82215 - DNA, 20 bp, Artificial Sequence
  primer
gtccatctgctcctcacctg

SEQ ID NO: 82216 - DNA, 38 bp, Artificial Sequence
  primer
gtaaaacgacggccagtcagggaaaggtaggacttccc

SEQ ID NO: 82217 - DNA, 21 bp, Artificial Sequence
  primer
actgcagaggcagagtgatcc

SEQ ID NO: 82218 - DNA, 38 bp, Artificial Sequence
  primer
gtaaaacgacggccagtagctgaaatcttctgcaaggc

SEQ ID NO: 82219 - DNA, 38 bp, Artificial Sequence
  primer
gtaaaacgacggccagtggacagcctgtaacccttgtg

SEQ ID NO: 82220 - DNA, 21 bp, Artificial Sequence
  primer
ctccgtctacactggaagcag

SEQ ID NO: 82221 - DNA, 21 bp, Artificial Sequence
  primer
ggacctgacagtcacgagttg

SEQ ID NO: 82222 - DNA, 38 bp, Artificial Sequence
  primer
gtaaaacgacggccagtagaatgtctgctcatccagcc

SEQ ID NO: 82223 - DNA, 38 bp, Artificial Sequence
  primer
gtaaaacgacggccagtgccaagggtttcagtatagcc

SEQ ID NO: 82224 - DNA, 37 bp, Artificial Sequence
  primer
gtaaaacgacggccagttgatgatacggagtggtggg

SEQ ID NO: 82225 - DNA, 21 bp, Artificial Sequence
  primer
gtgttccagcactatctcggg

SEQ ID NO: 82226 - DNA, 35 bp, Artificial Sequence
  primer
gtaaaacgacggccagtaccagatcctggcgaagg

SEQ ID NO: 82227 - DNA, 38 bp, Artificial Sequence
  primer
gtaaaacgacggccagttcctccaagctctcgtactcc

SEQ ID NO: 82228 - DNA, 21 bp, Artificial Sequence
  primer
tcctgcagacactcattcagc

SEQ ID NO: 82229 - DNA, 21 bp, Artificial Sequence
  primer
gagaaccagagaggcttgtcc

SEQ ID NO: 82230 - DNA, 21 bp, Artificial Sequence
  primer
agacccaaagggacaggaaag

SEQ ID NO: 82231 - DNA, 20 bp, Artificial Sequence
  primer
cacaagggcctctcactcac

SEQ ID NO: 82232 - DNA, 21 bp, Artificial Sequence
  primer
actcagaaatacccacccacg

SEQ ID NO: 82233 - DNA, 21 bp, Artificial Sequence
  primer
acccaggacactctcaaagcc

SEQ ID NO: 82234 - DNA, 38 bp, Artificial Sequence
  primer
gtaaaacgacggccagtgacaggaaggtccctagaccc

SEQ ID NO: 82235 - DNA, 21 bp, Artificial Sequence
  primer
attacgggttagtggcacctg

SEQ ID NO: 82236 - DNA, 37 bp, Artificial Sequence
  primer
gtaaaacgacggccagtacagaggagtgggaggatgg

SEQ ID NO: 82237 - DNA, 20 bp, Artificial Sequence
  primer
aggaagagagctctggtggc

SEQ ID NO: 82238 - DNA, 38 bp, Artificial Sequence
  primer
gtaaaacgacggccagtggagtgacctagtagcgcctg

SEQ ID NO: 82239 - DNA, 21 bp, Artificial Sequence
  primer
tacaggaagaagcgggtatgg

SEQ ID NO: 82240 - DNA, 21 bp, Artificial Sequence
  primer
cctcttgatttccctttgctc

SEQ ID NO: 82241 - DNA, 36 bp, Artificial Sequence
  primer
gtaaaacgacggccagtctcagccggttctttgacc

SEQ ID NO: 82242 - DNA, 38 bp, Artificial Sequence
  primer
gtaaaacgacggccagtcatagaggatgaaggccatgc

SEQ ID NO: 82243 - DNA, 38 bp, Artificial Sequence
  primer
gtaaaacgacggccagtcaataggcaacatgagcccag

SEQ ID NO: 82244 - DNA, 21 bp, Artificial Sequence
  primer
acctgtgaacaggctaggagc

SEQ ID NO: 82245 - DNA, 38 bp, Artificial Sequence
  primer
gtaaaacgacggccagtagcctagctcaggaccctgtc

SEQ ID NO: 82246 - DNA, 21 bp, Artificial Sequence
  primer
ctccgacctctctccaatctg

SEQ ID NO: 82247 - DNA, 37 bp, Artificial Sequence
  primer
gtaaaacgacggccagtaacaggtcaccctgtagccc

SEQ ID NO: 82248 - DNA, 21 bp, Artificial Sequence
  primer
tgggtgacaaatcagtggttc

SEQ ID NO: 82249 - DNA, 38 bp, Artificial Sequence
  primer
gtaaaacgacggccagtatgcacagtgtgaactggctc

SEQ ID NO: 82250 - DNA, 23 bp, Artificial Sequence
  primer
aacctcttgtctaaccctcaacc

SEQ ID NO: 82251 - DNA, 37 bp, Artificial Sequence
  primer
gtaaaacgacggccagtctatacccatgttggcccag

SEQ ID NO: 82252 - DNA, 23 bp, Artificial Sequence
  primer
gagctgagattgagtgctactgc

SEQ ID NO: 82253 - DNA, 23 bp, Artificial Sequence
  primer
ggcctaacctcctttattcatgc

SEQ ID NO: 82254 - DNA, 21 bp, Artificial Sequence
  primer
tgcacataagggacaggtcag

SEQ ID NO: 82255 - DNA, 38 bp, Artificial Sequence
  primer
gtaaaacgacggccagtacttggccctttcagtggtag

SEQ ID NO: 82256 - DNA, 37 bp, Artificial Sequence
  primer
gtaaaacgacggccagtagaggctgtagggctggaag

SEQ ID NO: 82257 - DNA, 21 bp, Artificial Sequence
  primer
gactgcaatgagctgtgatcg

SEQ ID NO: 82258 - DNA, 37 bp, Artificial Sequence
  primer
gtaaaacgacggccagtgttagggccctcagtgcttc

SEQ ID NO: 82259 - DNA, 21 bp, Artificial Sequence
  primer
cccttgtagcctgtggtgaag

SEQ ID NO: 82260 - DNA, 38 bp, Artificial Sequence
  primer
gtaaaacgacggccagtctactgagaacccagggatgg

SEQ ID NO: 82261 - DNA, 21 bp, Artificial Sequence
  primer
taagaggatcatccgccactc

SEQ ID NO: 82262 - DNA, 37 bp, Artificial Sequence
  primer
gtaaaacgacggccagtcataagcaggaagaaggccc

SEQ ID NO: 82263 - DNA, 38 bp, Artificial Sequence
  primer
gtaaaacgacggccagtcccaaaggctatgagtgaatg

SEQ ID NO: 82264 - DNA, 21 bp, Artificial Sequence
  primer
tcaggacactgggtacacgtc

SEQ ID NO: 82265 - DNA, 37 bp, Artificial Sequence
  primer
gtaaaacgacggccagtgtctggaaagagccctgtgg

SEQ ID NO: 82266 - DNA, 21 bp, Artificial Sequence
  primer
cttaggccacaggtcacagag

SEQ ID NO: 82267 - DNA, 21 bp, Artificial Sequence
  primer
aactctctcactgctgggtgc

SEQ ID NO: 82268 - DNA, 38 bp, Artificial Sequence
  primer
gtaaaacgacggccagtgccctgtctttacggagaatg

SEQ ID NO: 82269 - DNA, 21 bp, Artificial Sequence
  primer
agaggagcagctagccctgag

SEQ ID NO: 82270 - DNA, 37 bp, Artificial Sequence
  primer
gtaaaacgacggccagtggcaccaaagaggattaggc

SEQ ID NO: 82271 - DNA, 39 bp, Artificial Sequence
  primer
gtaaaacgacggccagtaaacgccagagaaacacttcag

SEQ ID NO: 82272 - DNA, 41 bp, Artificial Sequence
  primer
gtaaaacgacggccagtctaaggtccaagtttaaggagacg

SEQ ID NO: 82273 - DNA, 21 bp, Artificial Sequence
  primer
aatttgcaccgagctgaagtc

SEQ ID NO: 82274 - DNA, 21 bp, Artificial Sequence
  primer
agaggatccatttagcctgga

SEQ ID NO: 82275 - DNA, 21 bp, Artificial Sequence
  primer
agcacgagcaagactcctttc

SEQ ID NO: 82276 - DNA, 38 bp, Artificial Sequence
  primer
gtaaaacgacggccagtagaggtggatcccagactagc

SEQ ID NO: 82277 - DNA, 38 bp, Artificial Sequence
  primer
gtaaaacgacggccagtctcattcgagctgcatgtgtc

SEQ ID NO: 82278 - DNA, 38 bp, Artificial Sequence
  primer
gtaaaacgacggccagtcatcatcattgcgaccttcag

SEQ ID NO: 82279 - DNA, 44 bp, Artificial Sequence
  primer
gtaaaacgacggccagtaaagaggctttgttataatttaaaggt

SEQ ID NO: 82280 - DNA, 41 bp, Artificial Sequence
  primer
gtaaaacgacggccagtaaaccaaagatgtcattaacatgg

SEQ ID NO: 82281 - DNA, 21 bp, Artificial Sequence
  primer
gactacaggcacatcacaccc

SEQ ID NO: 82282 - DNA, 38 bp, Artificial Sequence
  primer
gtaaaacgacggccagtggatgtgaaacaagcatggtg

SEQ ID NO: 82283 - DNA, 39 bp, Artificial Sequence
  primer
gtaaaacgacggccagtcctgaaacatcttctgttggaa

SEQ ID NO: 82284 - DNA, 21 bp, Artificial Sequence
  primer
ttgcaacctcctcaattgttc

SEQ ID NO: 82285 - DNA, 46 bp, Artificial Sequence
  primer
gtaaaacgacggccagtaatcttcccttgtaaataaacagattaag

SEQ ID NO: 82286 - DNA, 38 bp, Artificial Sequence
  primer
gtaaaacgacggccagtaagagccacggaaatatccac

SEQ ID NO: 82287 - DNA, 38 bp, Artificial Sequence
  primer
gtaaaacgacggccagtaaagcaagccactctgtctcc

SEQ ID NO: 82288 - DNA, 21 bp, Artificial Sequence
  primer
tgcaagctgctcaggattaac

SEQ ID NO: 82289 - DNA, 38 bp, Artificial Sequence
  primer
gtaaaacgacggccagtattcccaacacctgagtccac

SEQ ID NO: 82290 - DNA, 40 bp, Artificial Sequence
  primer
gtaaaacgacggccagttcgttgtcttaagtccatcgaaa

SEQ ID NO: 82291 - DNA, 28 bp, Artificial Sequence
  primer
caggagactaccatttatggatctattt

SEQ ID NO: 82292 - DNA, 39 bp, Artificial Sequence
  primer
gtaaaacgacggccagtgcactgaagtttgggaaatacc

SEQ ID NO: 82293 - DNA, 37 bp, Artificial Sequence
  primer
gtaaaacgacggccagttcagcctcccaaggtgttag

SEQ ID NO: 82294 - DNA, 38 bp, Artificial Sequence
  primer
gtaaaacgacggccagtagtctccgcaattgttcttcc

SEQ ID NO: 82295 - DNA, 24 bp, Artificial Sequence
  primer
ttgtgtttgtagtgctacctcttt

SEQ ID NO: 82296 - DNA, 21 bp, Artificial Sequence
  primer
tcctgtgtcttccaactgctg

SEQ ID NO: 82297 - DNA, 38 bp, Artificial Sequence
  primer
gtaaaacgacggccagtgtctgcatgtgtctcagatgg

SEQ ID NO: 82298 - DNA, 38 bp, Artificial Sequence
  primer
gtaaaacgacggccagtaatctgccatggatggatttc

SEQ ID NO: 82299 - DNA, 22 bp, Artificial Sequence
  primer
gcaagctgctccttgttaactg

SEQ ID NO: 82300 - DNA, 38 bp, Artificial Sequence
  primer
gtaaaacgacggccagttcaagccatagtgaaggcaaa

SEQ ID NO: 82301 - DNA, 21 bp, Artificial Sequence
  primer
actgcccagctagctctcatc

SEQ ID NO: 82302 - DNA, 37 bp, Artificial Sequence
  primer
gtaaaacgacggccagtgcgcatcacaagatcaggag

SEQ ID NO: 82303 - DNA, 35 bp, Artificial Sequence
  primer
gtaaaacgacggccagttgtcccagcctcccaaag

SEQ ID NO: 82304 - DNA, 23 bp, Artificial Sequence
  primer
acttggtagcaaatgctaatgga

SEQ ID NO: 82305 - DNA, 35 bp, Artificial Sequence
  primer
gtaaaacgacggccagtccagtcacagtggcctcg

SEQ ID NO: 82306 - DNA, 20 bp, Artificial Sequence
  primer
ggaaagcaaccctcccatac

SEQ ID NO: 82307 - DNA, 24 bp, Artificial Sequence
  primer
gggcaacaagagtgaaactctatc

SEQ ID NO: 82308 - DNA, 37 bp, Artificial Sequence
  primer
gtaaaacgacggccagtcactgttaccagcagcaccc

SEQ ID NO: 82309 - DNA, 18 bp, Artificial Sequence
  primer
ctgccctctcgccatctc

SEQ ID NO: 82310 - DNA, 27 bp, Artificial Sequence
  primer
tgaagttgtggtcaataagtaaattgt

SEQ ID NO: 82311 - DNA, 35 bp, Artificial Sequence
  primer
gtaaaacgacggccagtgtgcccagccagtttcaa

SEQ ID NO: 82312 - DNA, 23 bp, Artificial Sequence
  primer
tgtggctttataatcccttcaaa

SEQ ID NO: 82313 - DNA, 22 bp, Artificial Sequence
  primer
ccatgcatacaagcaagcatac

SEQ ID NO: 82314 - DNA, 21 bp, Artificial Sequence
  primer
cagggctagctcattctcagg

SEQ ID NO: 82315 - DNA, 38 bp, Artificial Sequence
  primer
gtaaaacgacggccagtcaactcctgagcttgggtctc

SEQ ID NO: 82316 - DNA, 27 bp, Artificial Sequence
  primer
ccaattgacatagattgtgatagaaag

SEQ ID NO: 82317 - DNA, 43 bp, Artificial Sequence
  primer
gtaaaacgacggccagtcactgtaattcctttggctcaaatag

SEQ ID NO: 82318 - DNA, 21 bp, Artificial Sequence
  primer
aaccatccagtgacctgtgag

SEQ ID NO: 82319 - DNA, 21 bp, Artificial Sequence
  primer
ggcttgggaaacacagagttc

SEQ ID NO: 82320 - DNA, 21 bp, Artificial Sequence
  primer
tgcactcaaggattcaacagg

SEQ ID NO: 82321 - DNA, 21 bp, Artificial Sequence
  primer
ttcctcacagtcatcctctcg

SEQ ID NO: 82322 - DNA, 38 bp, Artificial Sequence
  primer
gtaaaacgacggccagtatgtgtcctgttcctcagtgc

SEQ ID NO: 82323 - DNA, 24 bp, Artificial Sequence
  primer
tcattaatggctgaaatgtttgtt

SEQ ID NO: 82324 - DNA, 21 bp, Artificial Sequence
  primer
cctgggtgacagagtgagact

SEQ ID NO: 82325 - DNA, 38 bp, Artificial Sequence
  primer
gtaaaacgacggccagtggacagaaagggacacgaaac

SEQ ID NO: 82326 - DNA, 38 bp, Artificial Sequence
  primer
gtaaaacgacggccagtagccataaggaaatcttgccc

SEQ ID NO: 82327 - DNA, 20 bp, Artificial Sequence
  primer
ttcgaacgaaagtcccaaag

SEQ ID NO: 82328 - DNA, 27 bp, Artificial Sequence
  primer
aaagttaactcaaacattcttcttccc

SEQ ID NO: 82329 - DNA, 25 bp, Artificial Sequence
  primer
cactgtgcggacactagagataaac

SEQ ID NO: 82330 - DNA, 38 bp, Artificial Sequence
  primer
gtaaaacgacggccagtcatttccttcctttgagctgc

SEQ ID NO: 82331 - DNA, 21 bp, Artificial Sequence
  primer
aggcagagaagctcagcagac

SEQ ID NO: 82332 - DNA, 21 bp, Artificial Sequence
  primer
ccacccagctacaatctatcg

SEQ ID NO: 82333 - DNA, 24 bp, Artificial Sequence
  primer
aaacctcaggctattatcgtatgg

SEQ ID NO: 82334 - DNA, 42 bp, Artificial Sequence
  primer
gtaaaacgacggccagttcacaaccctttcaaatatgacttt

SEQ ID NO: 82335 - DNA, 21 bp, Artificial Sequence
  primer
ccctcccacaaataaatttcc

SEQ ID NO: 82336 - DNA, 39 bp, Artificial Sequence
  primer
gtaaaacgacggccagtagctcagatcagtcaacctacg

SEQ ID NO: 82337 - DNA, 23 bp, Artificial Sequence
  primer
tgtacttaacccaagaggaaacg

SEQ ID NO: 82338 - DNA, 21 bp, Artificial Sequence
  primer
ctcccgtaacgtccaataaca

SEQ ID NO: 82339 - DNA, 41 bp, Artificial Sequence
  primer
gtaaaacgacggccagtaacgtgctaatctcctacttcctc

SEQ ID NO: 82340 - DNA, 29 bp, Artificial Sequence
  primer
caacttagtatccacatttcaaagatttc

SEQ ID NO: 82341 - DNA, 38 bp, Artificial Sequence
  primer
gtaaaacgacggccagtatggcagtcaatcacatgagg

SEQ ID NO: 82342 - DNA, 38 bp, Artificial Sequence
  primer
gtaaaacgacggccagtctggtagctccaggccaatag

SEQ ID NO: 82343 - DNA, 43 bp, Artificial Sequence
  primer
gtaaaacgacggccagtgcccattaaatgttatacctcacatc

SEQ ID NO: 82344 - DNA, 39 bp, Artificial Sequence
  primer
gtaaaacgacggccagtgtccagagtaggttggcttctc

SEQ ID NO: 82345 - DNA, 38 bp, Artificial Sequence
  primer
gtaaaacgacggccagttcagataatccacccacctca

SEQ ID NO: 82346 - DNA, 39 bp, Artificial Sequence
  primer
gtaaaacgacggccagtcatcacaccgattaaacagacc

SEQ ID NO: 82347 - DNA, 44 bp, Artificial Sequence
  primer
gtaaaacgacggccagttggatctagtttataaggccaaagaac

SEQ ID NO: 82348 - DNA, 36 bp, Artificial Sequence; identical to SEQ ID NO: 11702
  primer

SEQ ID NO: 82349 - DNA, 38 bp, Artificial Sequence
  primer
gtaaaacgacggccagtacccaggctcaacttctcaag

SEQ ID NO: 82350 - DNA, 38 bp, Artificial Sequence
  primer
gtaaaacgacggccagttgtccttgatgaatccacctg

SEQ ID NO: 82351 - DNA, 40 bp, Artificial Sequence
  primer
gtaaaacgacggccagttccctgacaggattagaatgaac

SEQ ID NO: 82352 - DNA, 21 bp, Artificial Sequence
  primer
ggcataccacagaccagagag

SEQ ID NO: 82353 - DNA, 21 bp, Artificial Sequence
  primer
ggccaactcaaccactttgac

SEQ ID NO: 82354 - DNA, 28 bp, Artificial Sequence
  primer
ttaccacctgctattatttagtgtcagt

SEQ ID NO: 82355 - DNA, 38 bp, Artificial Sequence
  primer
gtaaaacgacggccagttaccgtcctcctgcttatttg

SEQ ID NO: 82356 - DNA, 38 bp, Artificial Sequence
  primer
gtaaaacgacggccagtcctattgcctgaaagaggcag

SEQ ID NO: 82357 - DNA, 21 bp, Artificial Sequence
  primer
gccatggcactgctattacac

SEQ ID NO: 82358 - DNA, 22 bp, Artificial Sequence
  primer
cacctatggtcccagctacttg

SEQ ID NO: 82359 - DNA, 38 bp, Artificial Sequence
  primer
gtaaaacgacggccagtcagccctcttgtactgatgct

SEQ ID NO: 82360 - DNA, 38 bp, Artificial Sequence
  primer
gtaaaacgacggccagtcgatctcaggacagatggttc

SEQ ID NO: 82361 - DNA, 21 bp, Artificial Sequence
  primer
caaacaaagcattccctctca

SEQ ID NO: 82362 - DNA, 22 bp, Artificial Sequence
  primer
tcacacctaagtgtatttccgc

SEQ ID NO: 82363 - DNA, 21 bp, Artificial Sequence
  primer
cctatggaacaaagaccttcc

SEQ ID NO: 82364 - DNA, 21 bp, Artificial Sequence
  primer
ttaagcacgaagatcgcacag

SEQ ID NO: 82365 - DNA, 22 bp, Artificial Sequence
  primer
tcgtgtgaggcatatggtaaac

SEQ ID NO: 82366 - DNA, 21 bp, Artificial Sequence
  primer
tgaaccacagcaacatctaca

SEQ ID NO: 82367 - DNA, 38 bp, Artificial Sequence
  primer
gtaaaacgacggccagttggattgacttcagaaccacc

SEQ ID NO: 82368 - DNA, 38 bp, Artificial Sequence
  primer
gtaaaacgacggccagtccttaaaggcactcaaccctc

SEQ ID NO: 82369 - DNA, 39 bp, Artificial Sequence
  primer
gtaaaacgacggccagtcataggaggtaactgcaggctc

SEQ ID NO: 82370 - DNA, 21 bp, Artificial Sequence
  primer
tcatcaatggttgcaaagtgg

SEQ ID NO: 82371 - DNA, 26 bp, Artificial Sequence
  primer
cagatgacaacctatttagtggaaag

SEQ ID NO: 82372 - DNA, 38 bp, Artificial Sequence
  primer
gtaaaacgacggccagtactgatctcatcaatggcacc

SEQ ID NO: 82373 - DNA, 24 bp, Artificial Sequence
  primer
tcagaaattaaagtacatgcgctc

SEQ ID NO: 82374 - DNA, 27 bp, Artificial Sequence
  primer
gcaaagggtatttctacaaagttaatc

SEQ ID NO: 82375 - DNA, 25 bp, Artificial Sequence
  primer
tgatgaataataggcaatgatctgg

SEQ ID NO: 82376 - DNA, 21 bp, Artificial Sequence
  primer
atggaacacccaagtctctga

SEQ ID NO: 82377 - DNA, 25 bp, Artificial Sequence
  primer
cataaacatagctgaggaaagttgg

SEQ ID NO: 82378 - DNA, 24 bp, Artificial Sequence
  primer
tgacaaagtatcaaattaagggca

SEQ ID NO: 82379 - DNA, 20 bp, Artificial Sequence
  primer
cccagccgagggtgtatatg

SEQ ID NO: 82380 - DNA, 39 bp, Artificial Sequence
  primer
gtaaaacgacggccagtaaacacaaaggcaggtttcagt

SEQ ID NO: 82381 - DNA, 41 bp, Artificial Sequence
  primer
gtaaaacgacggccagtcagacataaattcaagaggcaaag

SEQ ID NO: 82382 - DNA, 36 bp, Artificial Sequence
  primer
gtaaaacgacggccagtggaggctcctttcactgcc

SEQ ID NO: 82383 - DNA, 38 bp, Artificial Sequence
  primer
gtaaaacgacggccagttacaaagaaacccatgccctc

SEQ ID NO: 82384 - DNA, 28 bp, Artificial Sequence
  primer
ctccattatgctaacttctcacctataa

SEQ ID NO: 82385 - DNA, 22 bp, Artificial Sequence
  primer
ttaagtagaaatgcggtttcgc

SEQ ID NO: 82386 - DNA, 21 bp, Artificial Sequence
  primer
ctccctcccattatcttctgg

SEQ ID NO: 82387 - DNA, 26 bp, Artificial Sequence
  primer
tggatctccttaagggcatagtatag

SEQ ID NO: 82388 - DNA, 20 bp, Artificial Sequence
  primer
atgctacggaggaggcagag

SEQ ID NO: 82389 - DNA, 38 bp, Artificial Sequence
  primer
gtaaaacgacggccagtcagaagcacctcccacagaag

SEQ ID NO: 82390 - DNA, 21 bp, Artificial Sequence
  primer
gaaggagccagagaccatcag

SEQ ID NO: 82391 - DNA, 19 bp, Artificial Sequence
  primer
actctccctgctgtctggg

SEQ ID NO: 82392 - DNA, 19 bp, Artificial Sequence
  primer
ctatgggccatggaaggtc

SEQ ID NO: 82393 - DNA, 22 bp, Artificial Sequence
  primer
acctaagcgtcaagggaggtag

SEQ ID NO: 82394 - DNA, 38 bp, Artificial Sequence
  primer
gtaaaacgacggccagtacgtccttgaaatcaaatccc

SEQ ID NO: 82395 - DNA, 38 bp, Artificial Sequence
  primer
gtaaaacgacggccagtttgcttgaaatcaataaccgc

SEQ ID NO: 82396 - DNA, 21 bp, Artificial Sequence
  primer
gcaaatgctgatggaattcag

SEQ ID NO: 82397 - DNA, 21 bp, Artificial Sequence
  primer
cagggtttcttcatcaggagc

SEQ ID NO: 82398 - DNA, 38 bp, Artificial Sequence
  primer
gtaaaacgacggccagtaattaggtctgctggtcctgg

SEQ ID NO: 82399 - DNA, 38 bp, Artificial Sequence
  primer
gtaaaacgacggccagttagggaaatgctgtttcctcc

SEQ ID NO: 82400 - DNA, 36 bp, Artificial Sequence
  primer
gtaaaacgacggccagtcgagaggtagcttgcccag

SEQ ID NO: 82401 - DNA, 42 bp, Artificial Sequence
  primer
gtaaaacgacggccagtcaaggaaactatgtgtaatggcaag

SEQ ID NO: 82402 - DNA, 21 bp, Artificial Sequence
  primer
taagccgagtttgggaaagac

SEQ ID NO: 82403 - DNA, 20 bp, Artificial Sequence
  primer
ccactgtacccagcccattt

SEQ ID NO: 82404 - DNA, 23 bp, Artificial Sequence
  primer
cagcagctggatacatggtttac

SEQ ID NO: 82405 - DNA, 22 bp, Artificial Sequence
  primer
cgaactctaaaccgtgtgtgtg

SEQ ID NO: 82406 - DNA, 35 bp, Artificial Sequence; identical to SEQ ID NO: 5167
  primer

SEQ ID NO: 82407 - DNA, 38 bp, Artificial Sequence
  primer
gtaaaacgacggccagtgggtggtgattatacaggtgc

SEQ ID NO: 82408 - DNA, 21 bp, Artificial Sequence
  primer
agacagccgtgtgtccttaaa

SEQ ID NO: 82409 - DNA, 26 bp, Artificial Sequence
  primer
gatctgctcctatttaatgtaggctt

SEQ ID NO: 82410 - DNA, 20 bp, Artificial Sequence
  primer
tgaagacgcggacacacttc

SEQ ID NO: 82411 - DNA, 20 bp, Artificial Sequence
  primer
gtcgttgaggtgggtctttg

SEQ ID NO: 82412 - DNA, 38 bp, Artificial Sequence
  primer
gtaaaacgacggccagtgttgttgtgcttgacggtctg

SEQ ID NO: 82413 - DNA, 38 bp, Artificial Sequence
  primer
gtaaaacgacggccagtcaattatctggactctcgccc

SEQ ID NO: 82414 - DNA, 20 bp, Artificial Sequence
  primer
atatggaggagggccatctg

SEQ ID NO: 82415 - DNA, 38 bp, Artificial Sequence
  primer
gtaaaacgacggccagtggtccacatttcttgcctctc

SEQ ID NO: 82416 - DNA, 35 bp, Artificial Sequence
  primer
gtaaaacgacggccagtttgctgtagacagcggcg

SEQ ID NO: 82417 - DNA, 38 bp, Artificial Sequence
  primer
gtaaaacgacggccagttctcagcagatggtgaaatcc

SEQ ID NO: 82418 - DNA, 20 bp, Artificial Sequence
  primer
cgggatttgaaactccaatg

SEQ ID NO: 82419 - DNA, 20 bp, Artificial Sequence
  primer
ataagccacttgcccgagag

SEQ ID NO: 82420 - DNA, 38 bp, Artificial Sequence
  primer
gtaaaacgacggccagtagctggaaacggctctcatag

SEQ ID NO: 82421 - DNA, 38 bp, Artificial Sequence
  primer
gtaaaacgacggccagtgacaaggaggaagacaggagg

SEQ ID NO: 82422 - DNA, 38 bp, Artificial Sequence
  primer
gtaaaacgacggccagtcattgcagatcgttacatccc

SEQ ID NO: 82423 - DNA, 38 bp, Artificial Sequence
  primer
gtaaaacgacggccagtgtgtcttccctgggactcttg

SEQ ID NO: 82424 - DNA, 21 bp, Artificial Sequence
  primer
ggagaagacttccagggtcag

SEQ ID NO: 82425 - DNA, 21 bp, Artificial Sequence
  primer
tttcccagcagagctcatttc

SEQ ID NO: 82426 - DNA, 21 bp, Artificial Sequence
  primer
ctgaattgggagggacacaag

SEQ ID NO: 82427 - DNA, 39 bp, Artificial Sequence
  primer
gtaaaacgacggccagtcacaattgggaatcttagcgag

SEQ ID NO: 82428 - DNA, 21 bp, Artificial Sequence
  primer
gctgaacctggactcaggatg

SEQ ID NO: 82429 - DNA, 21 bp, Artificial Sequence
  primer
ctgtttctcaccctccctctg

SEQ ID NO: 82430 - DNA, 38 bp, Artificial Sequence
  primer
gtaaaacgacggccagtctagaggaaggtggccttcag

SEQ ID NO: 82431 - DNA, 21 bp, Artificial Sequence
  primer
gtgctgggagaagttaaaggc

SEQ ID NO: 82432 - DNA, 21 bp, Artificial Sequence
  primer
cagagcaatagtgatgcaggg

SEQ ID NO: 82433 - DNA, 35 bp, Artificial Sequence
  primer
gtaaaacgacggccagtcactggattccgggtctg

SEQ ID NO: 82434 - DNA, 21 bp, Artificial Sequence
  primer
accattaattggcaaagtggg

SEQ ID NO: 82435 - DNA, 21 bp, Artificial Sequence
  primer
cccgggatttctttacagttg

SEQ ID NO: 82436 - DNA, 38 bp, Artificial Sequence
  primer
gtaaaacgacggccagtcatcgctgcttaaccattctg

SEQ ID NO: 82437 - DNA, 22 bp, Artificial Sequence
  primer
ttatatgcacttcagcaatggg

SEQ ID NO: 82438 - DNA, 38 bp, Artificial Sequence
  primer
gtaaaacgacggccagtttcatcagtacgtcctgcctc

SEQ ID NO: 82439 - DNA, 24 bp, Artificial Sequence
  primer
ggacttcatctttagaatgcaacc

SEQ ID NO: 82440 - DNA, 39 bp, Artificial Sequence
  primer
gtaaaacgacggccagtgctggctaaccagtaaacaagg

SEQ ID NO: 82441 - DNA, 36 bp, Artificial Sequence
  primer
gtaaaacgacggccagtcaggccagaaagcctgaac

SEQ ID NO: 82442 - DNA, 21 bp, Artificial Sequence
  primer
tcttcctggtggcagagaatc

SEQ ID NO: 82443 - DNA, 21 bp, Artificial Sequence
  primer
tgatttaattggccgaccttc

SEQ ID NO: 82444 - DNA, 38 bp, Artificial Sequence
  primer
gtaaaacgacggccagtggcaatgatgatttgctatgg

SEQ ID NO: 82445 - DNA, 24 bp, Artificial Sequence
  primer
ggaggtttaagaggtccctaaatg

SEQ ID NO: 82446 - DNA, 23 bp, Artificial Sequence
  primer
aactgcaaatttaactgctgtgc

SEQ ID NO: 82447 - DNA, 24 bp, Artificial Sequence
  primer
tgcagagagagaatacaaagcaat

SEQ ID NO: 82448 - DNA, 21 bp, Artificial Sequence
  primer
gactcgttcactcagtgtggg

SEQ ID NO: 82449 - DNA, 38 bp, Artificial Sequence
  primer
gtaaaacgacggccagtatttagctgccatcgggttac

SEQ ID NO: 82450 - DNA, 41 bp, Artificial Sequence
  primer
gtaaaacgacggccagtagcaagttagtgctgtcataatgc

SEQ ID NO: 82451 - DNA, 39 bp, Artificial Sequence
  primer
gtaaaacgacggccagtcattctacatgtgcatgtttgg

SEQ ID NO: 82452 - DNA, 40 bp, Artificial Sequence
  primer
gtaaaacgacggccagtccagaagtaccacaatagcagga

SEQ ID NO: 82453 - DNA, 22 bp, Artificial Sequence
  primer
tgttaatctgtcggagaccacc

SEQ ID NO: 82454 - DNA, 26 bp, Artificial Sequence
  primer
ttcttctttgtatgtgaaaccatctc

SEQ ID NO: 82455 - DNA, 24 bp, Artificial Sequence
  primer
ttgacaggtgtcatattacttggg

SEQ ID NO: 82456 - DNA, 37 bp, Artificial Sequence
  primer
gtaaaacgacggccagtggttgaggctgcagtgagtc

SEQ ID NO: 82457 - DNA, 21 bp, Artificial Sequence
  primer
ggatgtcagtgtgacgaggtg

SEQ ID NO: 82458 - DNA, 21 bp, Artificial Sequence
  primer
atccttcaaagcaaggcagag

SEQ ID NO: 82459 - DNA, 37 bp, Artificial Sequence
  primer
gtaaaacgacggccagtagaaacaacggccacaacac

SEQ ID NO: 82460 - DNA, 19 bp, Artificial Sequence
  primer
gaaacccataagcggcatc

SEQ ID NO: 82461 - DNA, 21 bp, Artificial Sequence
  primer
tagacctgcctgtacctgtgc

SEQ ID NO: 82462 - DNA, 23 bp, Artificial Sequence
  primer
tgtctcacctattatgaaagggc

SEQ ID NO: 82463 - DNA, 38 bp, Artificial Sequence
  primer
gtaaaacgacggccagtaattggcccatgcctaactac

SEQ ID NO: 82464 - DNA, 44 bp, Artificial Sequence
  primer
gtaaaacgacggccagtcagacattgacattggtagttatcttg

SEQ ID NO: 82465 - DNA, 24 bp, Artificial Sequence
  primer
caattcaattaaacattcgttgcc

SEQ ID NO: 82466 - DNA, 38 bp, Artificial Sequence
  primer
gtaaaacgacggccagtataaatcctggcaccaccaac

SEQ ID NO: 82467 - DNA, 21 bp, Artificial Sequence
  primer
tttccaacatcacagccaaac

SEQ ID NO: 82468 - DNA, 38 bp, Artificial Sequence
  primer
gtaaaacgacggccagtttcatctttggatgaacctcg

SEQ ID NO: 82469 - DNA, 21 bp, Artificial Sequence
  primer
aagtgacgcaggtacgatgtc

SEQ ID NO: 82470 - DNA, 37 bp, Artificial Sequence
  primer
gtaaaacgacggccagtcagtctcagagccaacctgg

SEQ ID NO: 82471 - DNA, 21 bp, Artificial Sequence
  primer
cttcagtccctggatctgtcc

SEQ ID NO: 82472 - DNA, 21 bp, Artificial Sequence
  primer
cccactggaaactagcaaagc

SEQ ID NO: 82473 - DNA, 38 bp, Artificial Sequence
  primer
gtaaaacgacggccagtcagaatgtagacctggccacc

SEQ ID NO: 82474 - DNA, 21 bp, Artificial Sequence
  primer
cctcagatctgtgtgtgcctg

SEQ ID NO: 82475 - DNA, 21 bp, Artificial Sequence
  primer
gaacaccagcactgaagttgg

SEQ ID NO: 82476 - DNA, 21 bp, Artificial Sequence
  primer
agcttgggatcctttacctcg

SEQ ID NO: 82477 - DNA, 20 bp, Artificial Sequence
  primer
gggcagtcaatagcaggttg

SEQ ID NO: 82478 - DNA, 20 bp, Artificial Sequence
  primer
cctgggcactgtcatttctg

SEQ ID NO: 82479 - DNA, 37 bp, Artificial Sequence
  primer
gtaaaacgacggccagtgaggatgaggactggccttc

SEQ ID NO: 82480 - DNA, 38 bp, Artificial Sequence
  primer
gtaaaacgacggccagtagggctccttactcttggtcc

SEQ ID NO: 82481 - DNA, 38 bp, Artificial Sequence
  primer
gtaaaacgacggccagtagcttctcttggactgcttgg

SEQ ID NO: 82482 - DNA, 37 bp, Artificial Sequence
  primer
gtaaaacgacggccagttgctgttcattgctcattgc

SEQ ID NO: 82483 - DNA, 43 bp, Artificial Sequence
  primer
gtaaaacgacggccagtaattaacccaattagtaggtctctgc

SEQ ID NO: 82484 - DNA, 22 bp, Artificial Sequence
  primer
gtgaaataaacattcttggccc

SEQ ID NO: 82485 - DNA, 39 bp, Artificial Sequence
  primer
gtaaaacgacggccagtttctcaaggttcactccaaatg

SEQ ID NO: 82486 - DNA, 20 bp, Artificial Sequence
  primer
cacttgaacttgggaggcag

SEQ ID NO: 82487 - DNA, 43 bp, Artificial Sequence
  primer
gtaaaacgacggccagtgacatttatgcaagcattagaacaag

SEQ ID NO: 82488 - DNA, 22 bp, Artificial Sequence
  primer
tggatgaccacttcaatagctg

SEQ ID NO: 82489 - DNA, 21 bp, Artificial Sequence
  primer
gttactcgagatccaggctcc

SEQ ID NO: 82490 - DNA, 38 bp, Artificial Sequence
  primer
gtaaaacgacggccagtaattagtggaacatcccaccc

SEQ ID NO: 82491 - DNA, 38 bp, Artificial Sequence
  primer
gtaaaacgacggccagtgctttacttggacccaccaac

SEQ ID NO: 82492 - DNA, 21 bp, Artificial Sequence
  primer
ctttgaaccttccactcccac

SEQ ID NO: 82493 - DNA, 21 bp, Artificial Sequence
  primer
gaagggagctgcagactgatg

SEQ ID NO: 82494 - DNA, 21 bp, Artificial Sequence
  primer
caagtgcactcctctcaccag

SEQ ID NO: 82495 - DNA, 21 bp, Artificial Sequence
  primer
gaagggagctgcagactgatg

SEQ ID NO: 82496 - DNA, 21 bp, Artificial Sequence
  primer
caaggatgtcatgttccctcc

SEQ ID NO: 82497 - DNA, 21 bp, Artificial Sequence
  primer
cttgggcaacaagagtgaaac

SEQ ID NO: 82498 - DNA, 22 bp, Artificial Sequence
  primer
caattcatcagcctcaggattc

SEQ ID NO: 82499 - DNA, 35 bp, Artificial Sequence
  primer
gtaaaacgacggccagtcgaagttgcaggagcgag

SEQ ID NO: 82500 - DNA, 22 bp, Artificial Sequence
  primer
cacaggagacagagtcaggtcc

SEQ ID NO: 82501 - DNA, 20 bp, Artificial Sequence
  primer
caaccctgccttcccttaac

SEQ ID NO: 82502 - DNA, 21 bp, Artificial Sequence
  primer
agtcactgaccctggccatac

SEQ ID NO: 82503 - DNA, 21 bp, Artificial Sequence
  primer
gataagccatgattgcaccac

SEQ ID NO: 82504 - DNA, 38 bp, Artificial Sequence
  primer
gtaaaacgacggccagtttaaccaaacaaatgccctcc

SEQ ID NO: 82505 - DNA, 37 bp, Artificial Sequence
  primer
gtaaaacgacggccagtactccagatgcagcgacaag

SEQ ID NO: 82506 - DNA, 38 bp, Artificial Sequence
  primer
gtaaaacgacggccagtgcagacatcaactggcttgac

SEQ ID NO: 82507 - DNA, 22 bp, Artificial Sequence
  primer
gcaaatttctggttaaagtccc

SEQ ID NO: 82508 - DNA, 40 bp, Artificial Sequence
  primer
gtaaaacgacggccagtcacgtggtaggatctgagtgaag

SEQ ID NO: 82509 - DNA, 22 bp, Artificial Sequence
  primer
tcacaccacatcaactcctacg

SEQ ID NO: 82510 - DNA, 20 bp, Artificial Sequence
  primer
gacaaatgagcgtgggattg

SEQ ID NO: 82511 - DNA, 38 bp, Artificial Sequence
  primer
gtaaaacgacggccagtatccacagtgggagaggattc

SEQ ID NO: 82512 - DNA, 20 bp, Artificial Sequence
  primer
agttgttgtgatggccttgg

SEQ ID NO: 82513 - DNA, 38 bp, Artificial Sequence
  primer
gtaaaacgacggccagtgtgtccaggaagatgacgatg

SEQ ID NO: 82514 - DNA, 38 bp, Artificial Sequence
  primer
gtaaaacgacggccagtttaggatcccagctcctgttg

SEQ ID NO: 82515 - DNA, 21 bp, Artificial Sequence
  primer
agttcttcctgcatcacccag

SEQ ID NO: 82516 - DNA, 38 bp, Artificial Sequence
  primer
gtaaaacgacggccagtttctcagttgggagatggctc

SEQ ID NO: 82517 - DNA, 20 bp, Artificial Sequence
  primer
cttctgactcctttgcaggg

SEQ ID NO: 82518 - DNA, 21 bp, Artificial Sequence
  primer
cagtgtagccaggaggaggag

SEQ ID NO: 82519 - DNA, 21 bp, Artificial Sequence
  primer
aagtggccctgagtcagagag

SEQ ID NO: 82520 - DNA, 38 bp, Artificial Sequence
  primer
gtaaaacgacggccagtctccctttggatcatacctgc

SEQ ID NO: 82521 - DNA, 23 bp, Artificial Sequence
  primer
cccaaatatcccaacatagctca

SEQ ID NO: 82522 - DNA, 38 bp, Artificial Sequence
  primer
gtaaaacgacggccagtagccctggacttacacacgac

SEQ ID NO: 82523 - DNA, 21 bp, Artificial Sequence
  primer
acagagagtggctgtcactgg

SEQ ID NO: 82524 - DNA, 37 bp, Artificial Sequence
  primer
gtaaaacgacggccagtgcttcagcgtcacctttcag

SEQ ID NO: 82525 - DNA, 37 bp, Artificial Sequence
  primer
gtaaaacgacggccagttttagggtggtcagggaagg

SEQ ID NO: 82526 - DNA, 38 bp, Artificial Sequence
  primer
gtaaaacgacggccagtttggctcaacatttattgccc

SEQ ID NO: 82527 - DNA, 21 bp, Artificial Sequence
  primer
atctggctcaaacgttccttc

SEQ ID NO: 82528 - DNA, 38 bp, Artificial Sequence
  primer
gtaaaacgacggccagtactccctctgactgaccaagg

SEQ ID NO: 82529 - DNA, 38 bp, Artificial Sequence
  primer
gtaaaacgacggccagtgcacctcacacctccatcttc

SEQ ID NO: 82530 - DNA, 41 bp, Artificial Sequence
  primer
gtaaaacgacggccagtctatccagaggagagagagtccac

SEQ ID NO: 82531 - DNA, 21 bp, Artificial Sequence
  primer
tccctcccagagcatctattt

SEQ ID NO: 82532 - DNA, 38 bp, Artificial Sequence
  primer
gtaaaacgacggccagttcctaatgccaaatgctttcc

SEQ ID NO: 82533 - DNA, 46 bp, Artificial Sequence
  primer
gtaaaacgacggccagttgatattatttctagcattgtaagaaccc

SEQ ID NO: 82534 - DNA, 23 bp, Artificial Sequence
  primer
tccactgcagttgtatatagccc

SEQ ID NO: 82535 - DNA, 21 bp, Artificial Sequence
  primer
ggtgagctgagatggcgttac

SEQ ID NO: 82536 - DNA, 38 bp, Artificial Sequence
  primer
gtaaaacgacggccagtcaatctcagctcgctgtaacc

SEQ ID NO: 82537 - DNA, 22 bp, Artificial Sequence
  primer
aatggacaggagagaggaaagg

SEQ ID NO: 82538 - DNA, 39 bp, Artificial Sequence
  primer
gtaaaacgacggccagtcactgcacctggcctagtattc

SEQ ID NO: 82539 - DNA, 38 bp, Artificial Sequence
  primer
gtaaaacgacggccagtgtgatcaggtgatttggaagc

SEQ ID NO: 82540 - DNA, 21 bp, Artificial Sequence
  primer
ttcaggttgctgtggttgttg

SEQ ID NO: 82541 - DNA, 38 bp, Artificial Sequence
  primer
gtaaaacgacggccagttcctcgggtctgtacaggaag

SEQ ID NO: 82542 - DNA, 37 bp, Artificial Sequence
  primer
gtaaaacgacggccagtactctgcatgcactggcttc

SEQ ID NO: 82543 - DNA, 37 bp, Artificial Sequence
  primer
gtaaaacgacggccagtaaggaaacagcaaagggcag

SEQ ID NO: 82544 - DNA, 21 bp, Artificial Sequence
  primer
ggcagagacagagttgctgac

SEQ ID NO: 82545 - DNA, 38 bp, Artificial Sequence
  primer
gtaaaacgacggccagtaacagtgtttgacaaaggccc

SEQ ID NO: 82546 - DNA, 21 bp, Artificial Sequence
  primer
agtgagtcctgaggaaggctg

SEQ ID NO: 82547 - DNA, 20 bp, Artificial Sequence
  primer
cccacactggactgtcctcc

SEQ ID NO: 82548 - DNA, 21 bp, Artificial Sequence
  primer
aaactcatggcctctgtcctg

SEQ ID NO: 82549 - DNA, 38 bp, Artificial Sequence
  primer
gtaaaacgacggccagtcaccactgaagagtcacagcc

SEQ ID NO: 82550 - DNA, 21 bp, Artificial Sequence
  primer
ataaagggacccaaggctgtg

SEQ ID NO: 82551 - DNA, 36 bp, Artificial Sequence
  primer
gtaaaacgacggccagtgaggaaatgcctcaagggc

SEQ ID NO: 82552 - DNA, 39 bp, Artificial Sequence
  primer
gtaaaacgacggccagtaggcaggaggagaatagcctac

SEQ ID NO: 82553 - DNA, 21 bp, Artificial Sequence
  primer
cttgcagcctaagccttcttg

SEQ ID NO: 82554 - DNA, 38 bp, Artificial Sequence
  primer
gtaaaacgacggccagtttacggtagccaggtaggtcg

SEQ ID NO: 82555 - DNA, 21 bp, Artificial Sequence
  primer
tgggactaatgatgccaggac

SEQ ID NO: 82556 - DNA, 21 bp, Artificial Sequence
  primer
tctctctgcttcttcccttgg

SEQ ID NO: 82557 - DNA, 20 bp, Artificial Sequence
  primer
aggcttcatcagtggaaggg

SEQ ID NO: 82558 - DNA, 37 bp, Artificial Sequence
  primer
gtaaaacgacggccagtctcctggagtctccgtgttg

SEQ ID NO: 82559 - DNA, 21 bp, Artificial Sequence
  primer
gggaggctatggtgagctaag

SEQ ID NO: 82560 - DNA, 37 bp, Artificial Sequence
  primer
gtaaaacgacggccagtgacaggaagcaggcactgag

SEQ ID NO: 82561 - DNA, 38 bp, Artificial Sequence
  primer
gtaaaacgacggccagttgatgggagagtgaagtggtg

SEQ ID NO: 82562 - DNA, 21 bp, Artificial Sequence
  primer
ccagaatctaaacggaggctg

SEQ ID NO: 82563 - DNA, 35 bp, Artificial Sequence
  primer
gtaaaacgacggccagtcagcctgtgtggctctgg

SEQ ID NO: 82564 - DNA, 21 bp, Artificial Sequence
  primer
cctctgtaccttcatacccgc

SEQ ID NO: 82565 - DNA, 21 bp, Artificial Sequence
  primer
gctaggtcttggagactgggc

SEQ ID NO: 82566 - DNA, 21 bp, Artificial Sequence
  primer
tgtcttgtggaagctctgctc

SEQ ID NO: 82567 - DNA, 37 bp, Artificial Sequence
  primer
gtaaaacgacggccagtagggaaagcagttcagggag

SEQ ID NO: 82568 - DNA, 24 bp, Artificial Sequence
  primer
cccttacctatatcattcccatgc

SEQ ID NO: 82569 - DNA, 38 bp, Artificial Sequence
  primer
gtaaaacgacggccagtacgtctgatggcatctgtgac

SEQ ID NO: 82570 - DNA, 38 bp, Artificial Sequence
  primer
gtaaaacgacggccagtattcgggcagtggagtcatag

SEQ ID NO: 82571 - DNA, 38 bp, Artificial Sequence
  primer
gtaaaacgacggccagttctacagccacattcggagac

SEQ ID NO: 82572 - DNA, 37 bp, Artificial Sequence
  primer
gtaaaacgacggccagttgtccatttcctgaaggcag

SEQ ID NO: 82573 - DNA, 21 bp, Artificial Sequence
  primer
aagcctgacagtaaacccacc

SEQ ID NO: 82574 - DNA, 38 bp, Artificial Sequence
  primer
gtaaaacgacggccagtacaagaaggcaatgtccaagg

SEQ ID NO: 82575 - DNA, 38 bp, Artificial Sequence
  primer
gtaaaacgacggccagtcttatacgggacacaggaggg

SEQ ID NO: 82576 - DNA, 21 bp, Artificial Sequence
  primer
ttacccaagcattaagggctc

SEQ ID NO: 82577 - DNA, 38 bp, Artificial Sequence
  primer
gtaaaacgacggccagtacagaagcaagagtggaaacg

SEQ ID NO: 82578 - DNA, 21 bp, Artificial Sequence
  primer
ggtgcaaagacctgcttatcc

SEQ ID NO: 82579 - DNA, 20 bp, Artificial Sequence
  primer
accaacgtctgaacaatggc

SEQ ID NO: 82580 - DNA, 21 bp, Artificial Sequence
  primer
tgctgtactagcgacacccac

SEQ ID NO: 82581 - DNA, 21 bp, Artificial Sequence
  primer
tgctgtactagcgacacccac

SEQ ID NO: 82582 - DNA, 41 bp, Artificial Sequence
  primer
gtaaaacgacggccagttcaagcaactgatttctaatgcac

SEQ ID NO: 82583 - DNA, 38 bp, Artificial Sequence
  primer
gtaaaacgacggccagtataagagtcagtccggagggc

SEQ ID NO: 82584 - DNA, 19 bp, Artificial Sequence
  primer
cactgcactccatcccaag

SEQ ID NO: 82585 - DNA, 40 bp, Artificial Sequence
  primer
gtaaaacgacggccagtcagctaccctggaaataacaaag

SEQ ID NO: 82586 - DNA, 38 bp, Artificial Sequence
  primer
gtaaaacgacggccagtagagaccaacctcaaagccag

SEQ ID NO: 82587 - DNA, 40 bp, Artificial Sequence
  primer
gtaaaacgacggccagtaaatttgtattagcagtgctggc

SEQ ID NO: 82588 - DNA, 42 bp, Artificial Sequence
  primer
gtaaaacgacggccagttgatacataagctttccatctcagg

SEQ ID NO: 82589 - DNA, 21 bp, Artificial Sequence
  primer
acattatcccttggtgtgtgc

SEQ ID NO: 82590 - DNA, 23 bp, Artificial Sequence
  primer
ggtatctcagtgcatagtttggg

SEQ ID NO: 82591 - DNA, 38 bp, Artificial Sequence
  primer
gtaaaacgacggccagttccagtgagatgatgccagac

SEQ ID NO: 82592 - DNA, 39 bp, Artificial Sequence
  primer
gtaaaacgacggccagtcctgaggtcaggaaatcaaatc

SEQ ID NO: 82593 - DNA, 21 bp, Artificial Sequence
  primer
gttcaaggtgcccatgataca

SEQ ID NO: 82594 - DNA, 37 bp, Artificial Sequence
  primer
gtaaaacgacggccagtggtgccatagttcagtgcaa

SEQ ID NO: 82595 - DNA, 38 bp, Artificial Sequence
  primer
gtaaaacgacggccagtttaatgaccgaccattcaacg

SEQ ID NO: 82596 - DNA, 41 bp, Artificial Sequence; identical to SEQ ID NO: 82582
  primer

SEQ ID NO: 82597 - DNA, 42 bp, Artificial Sequence
  primer
gtaaaacgacggccagtaagaagagtaggatggctaaaggtt

SEQ ID NO: 82598 - DNA, 21 bp, Artificial Sequence
  primer
caaattcctcctgctccagtc

SEQ ID NO: 82599 - DNA, 38 bp, Artificial Sequence
  primer
gtaaaacgacggccagtctactttgagagtctcggcgg

SEQ ID NO: 82600 - DNA, 38 bp, Artificial Sequence
  primer
gtaaaacgacggccagttgggactgatgtggagtgatg

SEQ ID NO: 82601 - DNA, 21 bp, Artificial Sequence
  primer
ttaatgccgagaatccatcag

SEQ ID NO: 82602 - DNA, 43 bp, Artificial Sequence
  primer
gtaaaacgacggccagttttctcctgaagaggaatcaagttac

SEQ ID NO: 82603 - DNA, 36 bp, Artificial Sequence
  primer
gtaaaacgacggccagtgcagacaaggaagctgtgg

SEQ ID NO: 82604 - DNA, 38 bp, Artificial Sequence
  primer
gtaaaacgacggccagtcagtagagcgcttcttcctcc

SEQ ID NO: 82605 - DNA, 21 bp, Artificial Sequence
  primer
agaacaatggctacctttggc

SEQ ID NO: 82606 - DNA, 41 bp, Artificial Sequence
  primer
gtaaaacgacggccagtaaacacaaacacttacacaaaccc

SEQ ID NO: 82607 - DNA, 24 bp, Artificial Sequence
  primer
tcttcagtctatttgctcattccc

SEQ ID NO: 82608 - DNA, 21 bp, Artificial Sequence
  primer
ggaagagactgaccttcgtgg

SEQ ID NO: 82609 - DNA, 38 bp, Artificial Sequence
  primer
gtaaaacgacggccagtgggctttgatgtaacccgaac

SEQ ID NO: 82610 - DNA, 20 bp, Artificial Sequence
  primer
attgtggtggaccagtctcg

SEQ ID NO: 82611 - DNA, 22 bp, Artificial Sequence
  primer
cacatcgctgaagtccacatag

SEQ ID NO: 82612 - DNA, 37 bp, Artificial Sequence
  primer
gtaaaacgacggccagtgatgggaacgtgtgtgtgtg

SEQ ID NO: 82613 - DNA, 21 bp, Artificial Sequence
  primer
gctggctagaggaggactctg

SEQ ID NO: 82614 - DNA, 38 bp, Artificial Sequence
  primer
gtaaaacgacggccagtgcagctcctttaccattaggg

SEQ ID NO: 82615 - DNA, 25 bp, Artificial Sequence
  primer
ggctctaaatgttactacattgccc

SEQ ID NO: 82616 - DNA, 23 bp, Artificial Sequence
  primer
gcactaccctatagaatgcgttg

SEQ ID NO: 82617 - DNA, 24 bp, Artificial Sequence
  primer
ccatccgaaggtatacatagaggg

SEQ ID NO: 82618 - DNA, 25 bp, Artificial Sequence
  primer
ttagtgttctatgtctcattcagcg

SEQ ID NO: 82619 - DNA, 38 bp, Artificial Sequence
  primer
gtaaaacgacggccagtctctaaaccagcccgagtttc

SEQ ID NO: 82620 - DNA, 21 bp, Artificial Sequence
  primer
ggactcagcataacccattga

SEQ ID NO: 82621 - DNA, 37 bp, Artificial Sequence
  primer
gtaaaacgacggccagtagggcgttgtacagatccag

SEQ ID NO: 82622 - DNA, 38 bp, Artificial Sequence
  primer
gtaaaacgacggccagtccttacccaggttcacaaagc

SEQ ID NO: 82623 - DNA, 38 bp, Artificial Sequence
  primer
gtaaaacgacggccagttcagggagtccgcaaatacac

SEQ ID NO: 82624 - DNA, 38 bp, Artificial Sequence
  primer
gtaaaacgacggccagttttacaacacccacctcatcg

SEQ ID NO: 82625 - DNA, 21 bp, Artificial Sequence
  primer
ccacggttctatcacaactgc

SEQ ID NO: 82626 - DNA, 19 bp, Artificial Sequence
  primer
aagctgcccgacatctgag

SEQ ID NO: 82627 - DNA, 38 bp, Artificial Sequence
  primer
gtaaaacgacggccagtgaagcagctcagccttcaatc

SEQ ID NO: 82628 - DNA, 21 bp, Artificial Sequence
  primer
agaaccgagatggcatttagc

SEQ ID NO: 82629 - DNA, 21 bp, Artificial Sequence
  primer
aaagtctcatcgtcccacctc

SEQ ID NO: 82630 - DNA, 38 bp, Artificial Sequence
  primer
gtaaaacgacggccagtctccctcccagtctcaaagtg

SEQ ID NO: 82631 - DNA, 37 bp, Artificial Sequence
  primer
gtaaaacgacggccagtccctcaccaccttcttcctc

SEQ ID NO: 82632 - DNA, 38 bp, Artificial Sequence
  primer
gtaaaacgacggccagtgtgaagcaagcatgagcactg

SEQ ID NO: 82633 - DNA, 19 bp, Artificial Sequence
  primer
ttgagtcagtctcctgccg

SEQ ID NO: 82634 - DNA, 38 bp, Artificial Sequence
  primer
gtaaaacgacggccagttgtatccttagcccaagtccc

SEQ ID NO: 82635 - DNA, 38 bp, Artificial Sequence
  primer
gtaaaacgacggccagtgcaatgggctgacatctactc

SEQ ID NO: 82636 - DNA, 38 bp, Artificial Sequence
  primer
gtaaaacgacggccagtgccatatgctgctcatgtttc

SEQ ID NO: 82637 - DNA, 35 bp, Artificial Sequence
  primer
gtaaaacgacggccagtgcgtccaccgtctgtgat

SEQ ID NO: 82638 - DNA, 21 bp, Artificial Sequence
  primer
agcatccttcccatctttgag

SEQ ID NO: 82639 - DNA, 21 bp, Artificial Sequence
  primer
ggcaatgctgacagcttagtt

SEQ ID NO: 82640 - DNA, 38 bp, Artificial Sequence
  primer
gtaaaacgacggccagtgtgtggctgtatgaggaccag

SEQ ID NO: 82641 - DNA, 20 bp, Artificial Sequence
  primer
gtaggcaccgagagtgaggg

SEQ ID NO: 82642 - DNA, 21 bp, Artificial Sequence
  primer
cccatctttgaggctctcttt

SEQ ID NO: 82643 - DNA, 21 bp, Artificial Sequence
  primer
acagaaactcccaaggtggag

SEQ ID NO: 82644 - DNA, 21 bp, Artificial Sequence
  primer
tctcagttaccctgcagcaat

SEQ ID NO: 82645 - DNA, 22 bp, Artificial Sequence
  primer
tgtgggaagttagcgacgttac

SEQ ID NO: 82646 - DNA, 21 bp, Artificial Sequence
  primer
tttgagggtttcctgcttctg

SEQ ID NO: 82647 - DNA, 20 bp, Artificial Sequence
  primer
aacctcttcaccagccttcc

SEQ ID NO: 82648 - DNA, 22 bp, Artificial Sequence
  primer
gatgaaatggaaattgccaaag

SEQ ID NO: 82649 - DNA, 22 bp, Artificial Sequence
  primer
gctcacatactttcatccctcc

SEQ ID NO: 82650 - DNA, 21 bp, Artificial Sequence
  primer
atctatgctgcacctgtctcg

SEQ ID NO: 82651 - DNA, 21 bp, Artificial Sequence
  primer
gccaagcggatatttctatgc

SEQ ID NO: 82652 - DNA, 21 bp, Artificial Sequence
  primer
tcagtagtgctgagccaggtg

SEQ ID NO: 82653 - DNA, 38 bp, Artificial Sequence
  primer
gtaaaacgacggccagtcaagccacgaaataggacaac

SEQ ID NO: 82654 - DNA, 38 bp, Artificial Sequence
  primer
gtaaaacgacggccagtgctttggctatggctgtgatg

SEQ ID NO: 82655 - DNA, 21 bp, Artificial Sequence
  primer
tatgggataacccaatctgcc

SEQ ID NO: 82656 - DNA, 21 bp, Artificial Sequence
  primer
agtctgtgttcggaagatggc

SEQ ID NO: 82657 - DNA, 39 bp, Artificial Sequence
  primer
gtaaaacgacggccagtaatgtgtgggaaacatacaccc

SEQ ID NO: 82658 - DNA, 18 bp, Artificial Sequence
  primer
ccgagcagtgctgctgaa

SEQ ID NO: 82659 - DNA, 22 bp, Artificial Sequence
  primer
catacaccatgttccaaggtca

SEQ ID NO: 82660 - DNA, 38 bp, Artificial Sequence
  primer
gtaaaacgacggccagttgtcagcatccacaagtctcc

SEQ ID NO: 82661 - DNA, 21 bp, Artificial Sequence
  primer
cagtccttcattggctcttcc

SEQ ID NO: 82662 - DNA, 22 bp, Artificial Sequence
  primer
gggcctaactattcaaacaggg

SEQ ID NO: 82663 - DNA, 25 bp, Artificial Sequence
  primer
aaaccgcagacaagtttaataattc

SEQ ID NO: 82664 - DNA, 38 bp, Artificial Sequence
  primer
gtaaaacgacggccagtacaccaggcatgtttctcctg

SEQ ID NO: 82665 - DNA, 41 bp, Artificial Sequence
  primer
gtaaaacgacggccagttgacgtgttcaattctaggtagcc

SEQ ID NO: 82666 - DNA, 38 bp, Artificial Sequence
  primer
gtaaaacgacggccagtcaactggctttacaaacagcg

SEQ ID NO: 82667 - DNA, 22 bp, Artificial Sequence
  primer
ccattattgttccctgatctgc

SEQ ID NO: 82668 - DNA, 21 bp, Artificial Sequence
  primer
tttcaaagcacatatggaggc

SEQ ID NO: 82669 - DNA, 44 bp, Artificial Sequence
  primer
gtaaaacgacggccagtccattatcttgaatacaaatagggaaa

SEQ ID NO: 82670 - DNA, 20 bp, Artificial Sequence
  primer
catggcatgcctgtatcaaa

SEQ ID NO: 82671 - DNA, 21 bp, Artificial Sequence
  primer
ggcccagcattctgacattag

SEQ ID NO: 82672 - DNA, 39 bp, Artificial Sequence
  primer
gtaaaacgacggccagtttagcagcctgtgaacacgtag

SEQ ID NO: 82673 - DNA, 27 bp, Artificial Sequence
  primer
aatgtgttctttgaaacactagcctac

SEQ ID NO: 82674 - DNA, 37 bp, Artificial Sequence
  primer
gtaaaacgacggccagttatgggaccaccatccactg

SEQ ID NO: 82675 - DNA, 20 bp, Artificial Sequence
  primer
gtcatctggcctcagtgctc

SEQ ID NO: 82676 - DNA, 26 bp, Artificial Sequence
  primer
ccagtctctgaagtctctaactaccc

SEQ ID NO: 82677 - DNA, 38 bp, Artificial Sequence
  primer
gtaaaacgacggccagttctccttgtccagtgccctat

SEQ ID NO: 82678 - DNA, 39 bp, Artificial Sequence
  primer
gtaaaacgacggccagtgcaacgggtctagacagatgag

SEQ ID NO: 82679 - DNA, 38 bp, Artificial Sequence
  primer
gtaaaacgacggccagttcctagaagcactgcgctaca

SEQ ID NO: 82680 - DNA, 23 bp, Artificial Sequence
  primer
ggaagcactatgactgcatcaac

SEQ ID NO: 82681 - DNA, 24 bp, Artificial Sequence
  primer
catataaattactgcaatgaggcg

SEQ ID NO: 82682 - DNA, 38 bp, Artificial Sequence
  primer
gtaaaacgacggccagtgaagcaggacgatgttcaagg

SEQ ID NO: 82683 - DNA, 21 bp, Artificial Sequence
  primer
tattaaaggcgatttccctgg

SEQ ID NO: 82684 - DNA, 22 bp, Artificial Sequence
  primer
catgttattacccaggctggtc

SEQ ID NO: 82685 - DNA, 18 bp, Artificial Sequence
  primer
atcacgcctggcttcaac

SEQ ID NO: 82686 - DNA, 38 bp, Artificial Sequence
  primer
gtaaaacgacggccagtcgtgatactattgaggctggg

SEQ ID NO: 82687 - DNA, 23 bp, Artificial Sequence
  primer
tgttcacctatgttcctagtgcc

SEQ ID NO: 82688 - DNA, 20 bp, Artificial Sequence
  primer
ggtcctgaactcttggcctc

SEQ ID NO: 82689 - DNA, 38 bp, Artificial Sequence
  primer
gtaaaacgacggccagttcagctatcaagcaccaggac

SEQ ID NO: 82690 - DNA, 35 bp, Artificial Sequence
  primer
gtaaaacgacggccagtcacctgggcctaccaaag

SEQ ID NO: 82691 - DNA, 44 bp, Artificial Sequence
  primer
gtaaaacgacggccagtgcaatgaactaaaggtttaaatgaaag

SEQ ID NO: 82692 - DNA, 37 bp, Artificial Sequence
  primer
gtaaaacgacggccagtttgtggcattaggcaactcc

SEQ ID NO: 82693 - DNA, 43 bp, Artificial Sequence
  primer
gtaaaacgacggccagtggtaatcattgaactattaggctggt

SEQ ID NO: 82694 - DNA, 21 bp, Artificial Sequence
  primer
gcagtctgtgtgaagtcctgc

SEQ ID NO: 82695 - DNA, 38 bp, Artificial Sequence
  primer
gtaaaacgacggccagttggaattaatattcagccggg

SEQ ID NO: 82696 - DNA, 21 bp, Artificial Sequence
  primer
tatactgctgccatccaggac

SEQ ID NO: 82697 - DNA, 35 bp, Artificial Sequence; identical to SEQ ID NO: 60668
  primer

SEQ ID NO: 82698 - DNA, 22 bp, Artificial Sequence
  primer
ggtgctgacaggaggataaagc

SEQ ID NO: 82699 - DNA, 21 bp, Artificial Sequence
  primer
atgtcacctgtgagaggctcc

SEQ ID NO: 82700 - DNA, 41 bp, Artificial Sequence
  primer
gtaaaacgacggccagtaagagaagtcccatgatatgacaa

SEQ ID NO: 82701 - DNA, 45 bp, Artificial Sequence
  primer
gtaaaacgacggccagtcaattcaatcatatctaccgtatcactg

SEQ ID NO: 82702 - DNA, 21 bp, Artificial Sequence
  primer
ctaggctcaagtgatccgacc

SEQ ID NO: 82703 - DNA, 19 bp, Artificial Sequence
  primer
aaggcacggcatctttgag

SEQ ID NO: 82704 - DNA, 19 bp, Artificial Sequence
  primer
ctccagcaaggccatcttc

SEQ ID NO: 82705 - DNA, 21 bp, Artificial Sequence
  primer
acaatatgcatttgggccttt

SEQ ID NO: 82706 - DNA, 21 bp, Artificial Sequence
  primer
agaatgaatcccaccgaaatg

SEQ ID NO: 82707 - DNA, 38 bp, Artificial Sequence
  primer
gtaaaacgacggccagttaccttctccagcagcctttg

SEQ ID NO: 82708 - DNA, 21 bp, Artificial Sequence
  primer
accatttcgagagccaagttc

SEQ ID NO: 82709 - DNA, 21 bp, Artificial Sequence
  primer
ccaatgccaacctccagttag

SEQ ID NO: 82710 - DNA, 21 bp, Artificial Sequence
  primer
aatcctccaaccaattccctc

SEQ ID NO: 82711 - DNA, 21 bp, Artificial Sequence
  primer
agcgcccactacaatatctgg

SEQ ID NO: 82712 - DNA, 21 bp, Artificial Sequence
  primer
tccatacgcagtaaatcagcc

SEQ ID NO: 82713 - DNA, 21 bp, Artificial Sequence
  primer
cccaccctttaggaaggaatc

SEQ ID NO: 82714 - DNA, 38 bp, Artificial Sequence
  primer
gtaaaacgacggccagtcccaaacaaagtcagggattc

SEQ ID NO: 82715 - DNA, 38 bp, Artificial Sequence
  primer
gtaaaacgacggccagtaccagcgatgtttcttcagac

SEQ ID NO: 82716 - DNA, 24 bp, Artificial Sequence
  primer
tggatatggacatttagatttgga

SEQ ID NO: 82717 - DNA, 38 bp, Artificial Sequence
  primer
gtaaaacgacggccagtcttagcacatggtgagcactg

SEQ ID NO: 82718 - DNA, 22 bp, Artificial Sequence
  primer
aatatgtggcagtctcacatgg

SEQ ID NO: 82719 - DNA, 39 bp, Artificial Sequence
  primer
gtaaaacgacggccagtctctagagacctgactccagcc

SEQ ID NO: 82720 - DNA, 22 bp, Artificial Sequence
  primer
agatcatgtggtcaacctcaaa

SEQ ID NO: 82721 - DNA, 21 bp, Artificial Sequence
  primer
ccagtgccctgaataactgag

SEQ ID NO: 82722 - DNA, 39 bp, Artificial Sequence
  primer
gtaaaacgacggccagttctcttgagctctttcccactg

SEQ ID NO: 82723 - DNA, 38 bp, Artificial Sequence
  primer
gtaaaacgacggccagtcaacaaatcccaagcccttac

SEQ ID NO: 82724 - DNA, 38 bp, Artificial Sequence
  primer
gtaaaacgacggccagtgcttgtgcctcaagaacacac

SEQ ID NO: 82725 - DNA, 21 bp, Artificial Sequence
  primer
gggaaagacagggctctactg

SEQ ID NO: 82726 - DNA, 21 bp, Artificial Sequence
  primer
ttcccacaagaccagtcattc

SEQ ID NO: 82727 - DNA, 21 bp, Artificial Sequence
  primer
tcttgggctttgctctttctc

SEQ ID NO: 82728 - DNA, 21 bp, Artificial Sequence
  primer
cacttcctgactcaaaccgag

SEQ ID NO: 82729 - DNA, 38 bp, Artificial Sequence
  primer
gtaaaacgacggccagtagtatgacatggtcttggccc

SEQ ID NO: 82730 - DNA, 20 bp, Artificial Sequence
  primer
agggtcagcaaaggcaaatc

SEQ ID NO: 82731 - DNA, 21 bp, Artificial Sequence
  primer
tagaatgaagcatgccaggtg

SEQ ID NO: 82732 - DNA, 21 bp, Artificial Sequence
  primer
gcaggagagttgaccatcagg

SEQ ID NO: 82733 - DNA, 27 bp, Artificial Sequence
  primer
ttcattatgatcaagtactttgtggag

SEQ ID NO: 82734 - DNA, 20 bp, Artificial Sequence
  primer
gaaggcagattggtggacag

SEQ ID NO: 82735 - DNA, 21 bp, Artificial Sequence
  primer
acattccctgaggttggtagg

SEQ ID NO: 82736 - DNA, 20 bp, Artificial Sequence
  primer
ctggcctctggcaggtttag

SEQ ID NO: 82737 - DNA, 21 bp, Artificial Sequence
  primer
atccgctattcaataccaccc

SEQ ID NO: 82738 - DNA, 38 bp, Artificial Sequence
  primer
gtaaaacgacggccagtaacagctttgaggctgaggtc

SEQ ID NO: 82739 - DNA, 21 bp, Artificial Sequence
  primer
tcagggttcagagaggcaaac

SEQ ID NO: 82740 - DNA, 21 bp, Artificial Sequence
  primer
tggtaacaacccagctcattg

SEQ ID NO: 82741 - DNA, 38 bp, Artificial Sequence
  primer
gtaaaacgacggccagtaaatgcatcaacctctggacc

SEQ ID NO: 82742 - DNA, 38 bp, Artificial Sequence
  primer
gtaaaacgacggccagttggtggaggcaactacaaatg

SEQ ID NO: 82743 - DNA, 25 bp, Artificial Sequence
  primer
ggagagaatcatgttatattcctgg

SEQ ID NO: 82744 - DNA, 21 bp, Artificial Sequence
  primer
gtgctggaggctaataatggg

SEQ ID NO: 82745 - DNA, 21 bp, Artificial Sequence
  primer
aggccttgcaaagttaacagc

SEQ ID NO: 82746 - DNA, 38 bp, Artificial Sequence
  primer
gtaaaacgacggccagtcttgccttccctaccagtgac

SEQ ID NO: 82747 - DNA, 40 bp, Artificial Sequence
  primer
gtaaaacgacggccagtcaaagccttcaattatgatggtg

SEQ ID NO: 82748 - DNA, 21 bp, Artificial Sequence
  primer
tcaccttcttcaacagcttgc

SEQ ID NO: 82749 - DNA, 38 bp, Artificial Sequence
  primer
gtaaaacgacggccagtcccagtggtgatgcagtaatc

SEQ ID NO: 82750 - DNA, 38 bp, Artificial Sequence
  primer
gtaaaacgacggccagttgtgcttctgctataggctgg

SEQ ID NO: 82751 - DNA, 35 bp, Artificial Sequence
  primer
gtaaaacgacggccagtgagaccacggtccctccc

SEQ ID NO: 82752 - DNA, 23 bp, Artificial Sequence
  primer
tgaatcttagcctgttacctggg

SEQ ID NO: 82753 - DNA, 38 bp, Artificial Sequence
  primer
gtaaaacgacggccagttagcattgggaggtaactggg

SEQ ID NO: 82754 - DNA, 21 bp, Artificial Sequence
  primer
aggcagagggttgaagaactg

SEQ ID NO: 82755 - DNA, 21 bp, Artificial Sequence
  primer
ttcaagtggacggcattgtag

SEQ ID NO: 82756 - DNA, 21 bp, Artificial Sequence
  primer
tggaatcctctcctgaaccag

SEQ ID NO: 82757 - DNA, 21 bp, Artificial Sequence
  primer
tttgaaatgagctgttctggg

SEQ ID NO: 82758 - DNA, 21 bp, Artificial Sequence
  primer
atgatcaatgctggtgtctgc

SEQ ID NO: 82759 - DNA, 38 bp, Artificial Sequence
  primer
gtaaaacgacggccagtggtagcattacagccctccac

SEQ ID NO: 82760 - DNA, 39 bp, Artificial Sequence
  primer
gtaaaacgacggccagtgaagtggaaattctagggtggg

SEQ ID NO: 82761 - DNA, 21 bp, Artificial Sequence
  primer
actgtggacttgcgttattgg

SEQ ID NO: 82762 - DNA, 21 bp, Artificial Sequence
  primer
gtgttgcagcctggtactttg

SEQ ID NO: 82763 - DNA, 21 bp, Artificial Sequence
  primer
tctgagcatacttggtttgcc

SEQ ID NO: 82764 - DNA, 38 bp, Artificial Sequence
  primer
gtaaaacgacggccagtcatcttcccacgaggtttgtc

SEQ ID NO: 82765 - DNA, 21 bp, Artificial Sequence
  primer
ccctgcacattccagtaacac

SEQ ID NO: 82766 - DNA, 21 bp, Artificial Sequence
  primer
tcttctccaggccagtgactc

SEQ ID NO: 82767 - DNA, 37 bp, Artificial Sequence
  primer
gtaaaacgacggccagtctgcgaggtttgtcaaggac

SEQ ID NO: 82768 - DNA, 38 bp, Artificial Sequence
  primer
gtaaaacgacggccagttggtcagggcatttctattgg

SEQ ID NO: 82769 - DNA, 21 bp, Artificial Sequence
  primer
cactgtggcgattacgacttc

SEQ ID NO: 82770 - DNA, 39 bp, Artificial Sequence
  primer
gtaaaacgacggccagttttgcaagacagggtctagagg

SEQ ID NO: 82771 - DNA, 21 bp, Artificial Sequence
  primer
tcggcggtatcaataatttcc

SEQ ID NO: 82772 - DNA, 20 bp, Artificial Sequence
  primer
accttgatgacgtcctggtg

SEQ ID NO: 82773 - DNA, 38 bp, Artificial Sequence
  primer
gtaaaacgacggccagtgtgcagacgtgcatctctttc

SEQ ID NO: 82774 - DNA, 21 bp, Artificial Sequence
  primer
ctgcaacaatccttcatgagc

SEQ ID NO: 82775 - DNA, 21 bp, Artificial Sequence
  primer
aggaccatgtagtcctctgcc

SEQ ID NO: 82776 - DNA, 21 bp, Artificial Sequence
  primer
attagggttctgactgtgccg

SEQ ID NO: 82777 - DNA, 38 bp, Artificial Sequence
  primer
gtaaaacgacggccagttaagcgcacactgactatggc

SEQ ID NO: 82778 - DNA, 21 bp, Artificial Sequence
  primer
gacactgccaagctcacagac

SEQ ID NO: 82779 - DNA, 21 bp, Artificial Sequence
  primer
gtgtttgaagaacccagacgg

SEQ ID NO: 82780 - DNA, 21 bp, Artificial Sequence
  primer
tcacagtgagccaagatcagg

SEQ ID NO: 82781 - DNA, 18 bp, Artificial Sequence
  primer
aagagggcaccactgcac

SEQ ID NO: 82782 - DNA, 38 bp, Artificial Sequence
  primer
gtaaaacgacggccagtagtcagtgaacatcgtgtggg

SEQ ID NO: 82783 - DNA, 21 bp, Artificial Sequence
  primer
gcctagagctcaggaaccagg

SEQ ID NO: 82784 - DNA, 38 bp, Artificial Sequence
  primer
gtaaaacgacggccagttggccatgtgcttattaggtc

SEQ ID NO: 82785 - DNA, 18 bp, Artificial Sequence
  primer
gggaggtggaggcagaag

SEQ ID NO: 82786 - DNA, 27 bp, Artificial Sequence
  primer
aggcagaccttatagatacctcttacc

SEQ ID NO: 82787 - DNA, 22 bp, Artificial Sequence
  primer
ttcaagggttagcacaatttcc

SEQ ID NO: 82788 - DNA, 20 bp, Artificial Sequence
  primer
ctctcaacctagcgcctgtg

SEQ ID NO: 82789 - DNA, 38 bp, Artificial Sequence
  primer
gtaaaacgacggccagtgatctgcccacttcagtctcc

SEQ ID NO: 82790 - DNA, 21 bp, Artificial Sequence
  primer
gggcaacaagagtgaaactcc

SEQ ID NO: 82791 - DNA, 38 bp, Artificial Sequence
  primer
gtaaaacgacggccagtggctgaatttcgagctatgga

SEQ ID NO: 82792 - DNA, 21 bp, Artificial Sequence
  primer
gttacacacacacacacacgc

SEQ ID NO: 82793 - DNA, 39 bp, Artificial Sequence
  primer
gtaaaacgacggccagttgcaaaccagtacagcagtgaa

SEQ ID NO: 82794 - DNA, 38 bp, Artificial Sequence
  primer
gtaaaacgacggccagtctgtcctagaggtgacacggg

SEQ ID NO: 82795 - DNA, 21 bp, Artificial Sequence
  primer
caggaaacacccttaaagccc

SEQ ID NO: 82796 - DNA, 22 bp, Artificial Sequence
  primer
ttaaagaggaactccctgaggc

SEQ ID NO: 82797 - DNA, 39 bp, Artificial Sequence
  primer
gtaaaacgacggccagtgatctggacttcaggaaacagg

SEQ ID NO: 82798 - DNA, 24 bp, Artificial Sequence
  primer
tcagtctgacatgcttattgatcc

SEQ ID NO: 82799 - DNA, 20 bp, Artificial Sequence
  primer
gtcagtcacctggacatccc

SEQ ID NO: 82800 - DNA, 22 bp, Artificial Sequence
  primer
gcactgaagcacctgtcaatta

SEQ ID NO: 82801 - DNA, 25 bp, Artificial Sequence
  primer
ggagtgcgacaagaactatatcatc

SEQ ID NO: 82802 - DNA, 35 bp, Artificial Sequence
  primer
gtaaaacgacggccagtattaccaggcccattgcc

SEQ ID NO: 82803 - DNA, 22 bp, Artificial Sequence
  primer
tgtagaacaattgtgcacccac

SEQ ID NO: 82804 - DNA, 20 bp, Artificial Sequence
  primer
aaacagggtggtaggttggg

SEQ ID NO: 82805 - DNA, 38 bp, Artificial Sequence
  primer
gtaaaacgacggccagtgcagtcccattaagtccatcc

SEQ ID NO: 82806 - DNA, 38 bp, Artificial Sequence
  primer
gtaaaacgacggccagttccaatgactgagtctccagc

SEQ ID NO: 82807 - DNA, 21 bp, Artificial Sequence
  primer
tgaaattgcagggaaggtatg

SEQ ID NO: 82808 - DNA, 40 bp, Artificial Sequence
  primer
gtaaaacgacggccagttccttgactccaagagaagacag

SEQ ID NO: 82809 - DNA, 21 bp, Artificial Sequence
  primer
gatccagggatatgagttggg

SEQ ID NO: 82810 - DNA, 38 bp, Artificial Sequence
  primer
gtaaaacgacggccagttctctgggtgtgtgcagtttc

SEQ ID NO: 82811 - DNA, 38 bp, Artificial Sequence
  primer
gtaaaacgacggccagtgaagatccggtggtactgagg

SEQ ID NO: 82812 - DNA, 38 bp, Artificial Sequence
  primer
gtaaaacgacggccagtctgctccatttccatcttgtg

SEQ ID NO: 82813 - DNA, 38 bp, Artificial Sequence
  primer
gtaaaacgacggccagttgaaggccaatgggaataaag

SEQ ID NO: 82814 - DNA, 19 bp, Artificial Sequence
  primer
caagaggcagcatgaatgg

SEQ ID NO: 82815 - DNA, 21 bp, Artificial Sequence
  primer
agctgccctagctttgttgag

SEQ ID NO: 82816 - DNA, 22 bp, Artificial Sequence
  primer
cacctccaggtatctacctccc

SEQ ID NO: 82817 - DNA, 22 bp, Artificial Sequence
  primer
ttgtgagcctgggttacatttc

SEQ ID NO: 82818 - DNA, 21 bp, Artificial Sequence
  primer
gtcaaactgggttccacagaa

SEQ ID NO: 82819 - DNA, 19 bp, Artificial Sequence
  primer
aggcttcaggagctcaagg

SEQ ID NO: 82820 - DNA, 21 bp, Artificial Sequence
  primer
gtgagcaggaattctcacctg

SEQ ID NO: 82821 - DNA, 21 bp, Artificial Sequence
  primer
ccctggacctacagaagcaag

SEQ ID NO: 82822 - DNA, 21 bp, Artificial Sequence
  primer
accacagacagcaacatggag

SEQ ID NO: 82823 - DNA, 21 bp, Artificial Sequence
  primer
taagagcctcccaaattccac

SEQ ID NO: 82824 - DNA, 21 bp, Artificial Sequence
  primer
tgcaggtttatgcttcaccag

SEQ ID NO: 82825 - DNA, 20 bp, Artificial Sequence
  primer
acagggaatggtgactctgc

SEQ ID NO: 82826 - DNA, 37 bp, Artificial Sequence
  primer
gtaaaacgacggccagtaggcagaggcctccttagtg

SEQ ID NO: 82827 - DNA, 20 bp, Artificial Sequence
  primer
ctgagaccctaggagggagg

SEQ ID NO: 82828 - DNA, 21 bp, Artificial Sequence
  primer
tggttcagaggagcatgattg

SEQ ID NO: 82829 - DNA, 38 bp, Artificial Sequence
  primer
gtaaaacgacggccagttactggcttgtggatgcctac

SEQ ID NO: 82830 - DNA, 21 bp, Artificial Sequence
  primer
ctctccaacctcaacgggtag

SEQ ID NO: 82831 - DNA, 35 bp, Artificial Sequence
  primer
gtaaaacgacggccagtaggcctgagagggcagat

SEQ ID NO: 82832 - DNA, 38 bp, Artificial Sequence
  primer
gtaaaacgacggccagtcaagagaccctgaatgctgtg

SEQ ID NO: 82833 - DNA, 20 bp, Artificial Sequence
  primer
ccaccactccctcctgtacc

SEQ ID NO: 82834 - DNA, 37 bp, Artificial Sequence
  primer
gtaaaacgacggccagtagggttagagtgctccaggc

SEQ ID NO: 82835 - DNA, 18 bp, Artificial Sequence
  primer
gagccagtcctcaagccc

SEQ ID NO: 82836 - DNA, 21 bp, Artificial Sequence
  primer
catcttgagaagccactcacc

SEQ ID NO: 82837 - DNA, 21 bp, Artificial Sequence
  primer
aagctggcactgcattctctc

SEQ ID NO: 82838 - DNA, 21 bp, Artificial Sequence
  primer
agtcctgtttcgtgattgcag

SEQ ID NO: 82839 - DNA, 38 bp, Artificial Sequence
  primer
gtaaaacgacggccagttttggtgactgcttagggaag

SEQ ID NO: 82840 - DNA, 21 bp, Artificial Sequence
  primer
ccacagcaagtcagtgaggat

SEQ ID NO: 82841 - DNA, 37 bp, Artificial Sequence
  primer
gtaaaacgacggccagtaaccagatagcgagcgtttg

SEQ ID NO: 82842 - DNA, 21 bp, Artificial Sequence
  primer
ccacagcaagtcagtgaggat

SEQ ID NO: 82843 - DNA, 22 bp, Artificial Sequence
  primer
ccacccatgcaagaataacttc

SEQ ID NO: 82844 - DNA, 22 bp, Artificial Sequence
  primer
ttcctagagaccaatgccaatc

SEQ ID NO: 82845 - DNA, 25 bp, Artificial Sequence
  primer
tttggttgatgtgtgttattatttg

SEQ ID NO: 82846 - DNA, 21 bp, Artificial Sequence
  primer
attctctgtaacctcgccagc

SEQ ID NO: 82847 - DNA, 42 bp, Artificial Sequence
  primer
gtaaaacgacggccagttttagtattcatgcagtcatcacaa

SEQ ID NO: 82848 - DNA, 38 bp, Artificial Sequence
  primer
gtaaaacgacggccagtaagcagtttcaatgagggtcg

SEQ ID NO: 82849 - DNA, 45 bp, Artificial Sequence
  primer
gtaaaacgacggccagtagaattatatttccttcacatgagtttg

SEQ ID NO: 82850 - DNA, 38 bp, Artificial Sequence
  primer
gtaaaacgacggccagtggttcgttgaagctggatctc

SEQ ID NO: 82851 - DNA, 38 bp, Artificial Sequence
  primer
gtaaaacgacggccagtgaaggcagtacagtggcagtc

SEQ ID NO: 82852 - DNA, 38 bp, Artificial Sequence
  primer
gtaaaacgacggccagtgaaattgctcttgcagatggg

SEQ ID NO: 82853 - DNA, 38 bp, Artificial Sequence
  primer
gtaaaacgacggccagtgtagctctccattgtcctgcc

SEQ ID NO: 82854 - DNA, 21 bp, Artificial Sequence
  primer
tacttcgggagcaatcctttc

SEQ ID NO: 82855 - DNA, 38 bp, Artificial Sequence
  primer
gtaaaacgacggccagttgcttcgggtaacaggaacag

SEQ ID NO: 82856 - DNA, 21 bp, Artificial Sequence
  primer
agcactgaggcatcctaaagc

SEQ ID NO: 82857 - DNA, 21 bp, Artificial Sequence
  primer
ctgcccagtatctcttgggac

SEQ ID NO: 82858 - DNA, 21 bp, Artificial Sequence
  primer
ctcccaaattatgggcaactg

SEQ ID NO: 82859 - DNA, 38 bp, Artificial Sequence
  primer
gtaaaacgacggccagtagctggactgtgggctatttc

SEQ ID NO: 82860 - DNA, 21 bp, Artificial Sequence
  primer
gagccatggaagtttcactcc

SEQ ID NO: 82861 - DNA, 21 bp, Artificial Sequence
  primer
gttaagccagattgactgccc

SEQ ID NO: 82862 - DNA, 21 bp, Artificial Sequence
  primer
tttccttccagtagctttgcc

SEQ ID NO: 82863 - DNA, 38 bp, Artificial Sequence
  primer
gtaaaacgacggccagtcaaaggcggagagtttcaaag

SEQ ID NO: 82864 - DNA, 38 bp, Artificial Sequence
  primer
gtaaaacgacggccagtgtgctatgagtgtgccaggtg

SEQ ID NO: 82865 - DNA, 21 bp, Artificial Sequence
  primer
tgatgtaaatgcaggctttgg

SEQ ID NO: 82866 - DNA, 38 bp, Artificial Sequence
  primer
gtaaaacgacggccagtgacgctgactctctaatcccg

SEQ ID NO: 82867 - DNA, 21 bp, Artificial Sequence
  primer
tcggaatacagggatgattgg

SEQ ID NO: 82868 - DNA, 38 bp, Artificial Sequence
  primer
gtaaaacgacggccagtgtggtttcaaagggccataag

SEQ ID NO: 82869 - DNA, 21 bp, Artificial Sequence
  primer
gacttgacccaatgctagctg

SEQ ID NO: 82870 - DNA, 38 bp, Artificial Sequence
  primer
gtaaaacgacggccagtgagagggtggtggtgagtcag

SEQ ID NO: 82871 - DNA, 37 bp, Artificial Sequence
  primer
gtaaaacgacggccagtgggccgatattggaactcag

SEQ ID NO: 82872 - DNA, 38 bp, Artificial Sequence
  primer
gtaaaacgacggccagtgtgtgttatgttgggtggagg

SEQ ID NO: 82873 - DNA, 21 bp, Artificial Sequence
  primer
ccagacaggattcacatggtc

SEQ ID NO: 82874 - DNA, 38 bp, Artificial Sequence
  primer
gtaaaacgacggccagtagcatgagtttcatggtctgc

SEQ ID NO: 82875 - DNA, 21 bp, Artificial Sequence
  primer
agtatggagcagggattctgg

SEQ ID NO: 82876 - DNA, 21 bp, Artificial Sequence
  primer
aggtggctgtgggtaatcaac

SEQ ID NO: 82877 - DNA, 37 bp, Artificial Sequence
  primer
gtaaaacgacggccagtaggaagcattgcagccatag

SEQ ID NO: 82878 - DNA, 38 bp, Artificial Sequence
  primer
gtaaaacgacggccagtagtcgaagaagtttgcaaggg

SEQ ID NO: 82879 - DNA, 21 bp, Artificial Sequence
  primer
ttcacagctacgcacacacac

SEQ ID NO: 82880 - DNA, 21 bp, Artificial Sequence
  primer
cagtggagagtgctcatctgg

SEQ ID NO: 82881 - DNA, 21 bp, Artificial Sequence
  primer
acagagagtcaagaggcctgg

SEQ ID NO: 82882 - DNA, 38 bp, Artificial Sequence
  primer
gtaaaacgacggccagtttaaagtcctgagtgggcagc

SEQ ID NO: 82883 - DNA, 21 bp, Artificial Sequence
  primer
tgcctgaaatcccactctttc

SEQ ID NO: 82884 - DNA, 38 bp, Artificial Sequence
  primer
gtaaaacgacggccagtgagctcacaattcagtcaccc

SEQ ID NO: 82885 - DNA, 21 bp, Artificial Sequence
  primer
actcctagatgccactccctg

SEQ ID NO: 82886 - DNA, 19 bp, Artificial Sequence
  primer
ggaggtctccctaggctgg

SEQ ID NO: 82887 - DNA, 21 bp, Artificial Sequence
  primer
gacagagtgtgatgtctgggc

SEQ ID NO: 82888 - DNA, 38 bp, Artificial Sequence
  primer
gtaaaacgacggccagtcacattcaaggaacagcgaag

SEQ ID NO: 82889 - DNA, 38 bp, Artificial Sequence
  primer
gtaaaacgacggccagtagaattcaggacagggtctgg

SEQ ID NO: 82890 - DNA, 21 bp, Artificial Sequence
  primer
atggactgactggccactgtc

SEQ ID NO: 82891 - DNA, 37 bp, Artificial Sequence
  primer
gtaaaacgacggccagtctgctagactccagaggccc

SEQ ID NO: 82892 - DNA, 38 bp, Artificial Sequence
  primer
gtaaaacgacggccagtttgcagttaaggattcatggc

SEQ ID NO: 82893 - DNA, 38 bp, Artificial Sequence
  primer
gtaaaacgacggccagtcagtccagcttgttggtgatg

SEQ ID NO: 82894 - DNA, 21 bp, Artificial Sequence
  primer
gtacggcgtttctcagtcagg

SEQ ID NO: 82895 - DNA, 38 bp, Artificial Sequence
  primer
gtaaaacgacggccagtgggcttccatagaattcctcc

SEQ ID NO: 82896 - DNA, 23 bp, Artificial Sequence
  primer
ttcctaatttaagcctcacctgg

SEQ ID NO: 82897 - DNA, 38 bp, Artificial Sequence
  primer
gtaaaacgacggccagttcagccatttgtaaaccttcc

SEQ ID NO: 82898 - DNA, 35 bp, Artificial Sequence
  primer
gtaaaacgacggccagtgggcacctgtagtcccag

SEQ ID NO: 82899 - DNA, 38 bp, Artificial Sequence
  primer
gtaaaacgacggccagttgctcgtgagggtttagttcc

SEQ ID NO: 82900 - DNA, 38 bp, Artificial Sequence
  primer
gtaaaacgacggccagtgcccagtccataatcattgtt

SEQ ID NO: 82901 - DNA, 38 bp, Artificial Sequence
  primer
gtaaaacgacggccagtaaggtcccagaatcgaaattg

SEQ ID NO: 82902 - DNA, 21 bp, Artificial Sequence
  primer
tgatggaatattgtggaaggc

SEQ ID NO: 82903 - DNA, 20 bp, Artificial Sequence
  primer
ttcagcctcccaagacactg

SEQ ID NO: 82904 - DNA, 21 bp, Artificial Sequence
  primer
tcacacaatggttaacgtccc

SEQ ID NO: 82905 - DNA, 38 bp, Artificial Sequence
  primer
gtaaaacgacggccagtggaggaatcaaggactccaag

SEQ ID NO: 82906 - DNA, 38 bp, Artificial Sequence
  primer
gtaaaacgacggccagtggtggaaagtcccaaacaatc

SEQ ID NO: 82907 - DNA, 21 bp, Artificial Sequence
  primer
actgtggatttggctgctaag

SEQ ID NO: 82908 - DNA, 22 bp, Artificial Sequence
  primer
cacaagggctttacaattccag

SEQ ID NO: 82909 - DNA, 21 bp, Artificial Sequence
  primer
agtttacttggagctcacggg

SEQ ID NO: 82910 - DNA, 38 bp, Artificial Sequence
  primer
gtaaaacgacggccagtatccctcaccagctccattac

SEQ ID NO: 82911 - DNA, 21 bp, Artificial Sequence
  primer
ttcctgacaaaggtagggacc

SEQ ID NO: 82912 - DNA, 21 bp, Artificial Sequence
  primer
gcaggaatttaggcacaggac

SEQ ID NO: 82913 - DNA, 38 bp, Artificial Sequence
  primer
gtaaaacgacggccagttcagtcaatcagggtcagcac

SEQ ID NO: 82914 - DNA, 38 bp, Artificial Sequence
  primer
gtaaaacgacggccagtaagcctcctctagtcccaagg

SEQ ID NO: 82915 - DNA, 38 bp, Artificial Sequence
  primer
gtaaaacgacggccagtctagtccagccacctgtcctg

SEQ ID NO: 82916 - DNA, 21 bp, Artificial Sequence
  primer
agaaactcaaatcggtcctgc

SEQ ID NO: 82917 - DNA, 21 bp, Artificial Sequence
  primer
aagtcccactgcaggacagac

SEQ ID NO: 82918 - DNA, 21 bp, Artificial Sequence
  primer
ctgatccatgacttggctgtc

SEQ ID NO: 82919 - DNA, 38 bp, Artificial Sequence
  primer
gtaaaacgacggccagtgtggatcagctcggtagtgtg

SEQ ID NO: 82920 - DNA, 20 bp, Artificial Sequence
  primer
tcatctgcctccatttcagg

SEQ ID NO: 82921 - DNA, 38 bp, Artificial Sequence
  primer
gtaaaacgacggccagtgatagggctttgagaccaccc

SEQ ID NO: 82922 - DNA, 21 bp, Artificial Sequence
  primer
atccctggtcaaggagtgttc

SEQ ID NO: 82923 - DNA, 21 bp, Artificial Sequence
  primer
tctcctgtttattggcaaggc

SEQ ID NO: 82924 - DNA, 21 bp, Artificial Sequence
  primer
ttagaaccaagcgtcttgcag

SEQ ID NO: 82925 - DNA, 27 bp, Artificial Sequence
  primer
ttaagacaactggcttagaaatagacc

SEQ ID NO: 82926 - DNA, 22 bp, Artificial Sequence
  primer
gatatcaagtttctggttgccc

SEQ ID NO: 82927 - DNA, 42 bp, Artificial Sequence
  primer
gtaaaacgacggccagtccatgagcacaaatatagctttagg

SEQ ID NO: 82928 - DNA, 27 bp, Artificial Sequence
  primer
aggtttctcatcagttaatagcatagc

SEQ ID NO: 82929 - DNA, 42 bp, Artificial Sequence
  primer
gtaaaacgacggccagtaatgggatggctaaactcttatttc

SEQ ID NO: 82930 - DNA, 41 bp, Artificial Sequence
  primer
gtaaaacgacggccagttggactggataatctctaagctgc

SEQ ID NO: 82931 - DNA, 38 bp, Artificial Sequence
  primer
gtaaaacgacggccagttaattcctcagtgtggccagg

SEQ ID NO: 82932 - DNA, 18 bp, Artificial Sequence
  primer
gtgcgcctaacggtgaag

SEQ ID NO: 82933 - DNA, 38 bp, Artificial Sequence
  primer
gtaaaacgacggccagtatttatagctgcatcccaccc

SEQ ID NO: 82934 - DNA, 21 bp, Artificial Sequence
  primer
cgggtgtcttgagaggatctg

SEQ ID NO: 82935 - DNA, 21 bp, Artificial Sequence
  primer
gtgccacacagcctgatacac

SEQ ID NO: 82936 - DNA, 21 bp, Artificial Sequence
  primer
cttccagaaactggacttggg

SEQ ID NO: 82937 - DNA, 37 bp, Artificial Sequence
  primer
gtaaaacgacggccagtcatcttctcgaagagcacgg

SEQ ID NO: 82938 - DNA, 20 bp, Artificial Sequence
  primer
cagcacatacatgtccagcc

SEQ ID NO: 82939 - DNA, 20 bp, Artificial Sequence
  primer
tctcgcaggaacctcaagtg

SEQ ID NO: 82940 - DNA, 37 bp, Artificial Sequence
  primer
gtaaaacgacggccagtctttctcagtcttgcgtggg

SEQ ID NO: 82941 - DNA, 19 bp, Artificial Sequence
  primer
gaagccagagtgggacgtg

SEQ ID NO: 82942 - DNA, 18 bp, Artificial Sequence
  primer
gtggccttgggattgagc

SEQ ID NO: 82943 - DNA, 19 bp, Artificial Sequence
  primer
gggtagtgagggcgtggtc

SEQ ID NO: 82944 - DNA, 20 bp, Artificial Sequence
  primer
tgcgatgctcaaattcacag

SEQ ID NO: 82945 - DNA, 37 bp, Artificial Sequence
  primer
gtaaaacgacggccagtgatccgagtcagacagggtg

SEQ ID NO: 82946 - DNA, 38 bp, Artificial Sequence
  primer
gtaaaacgacggccagtcagctccagtactcacccgac

SEQ ID NO: 82947 - DNA, 37 bp, Artificial Sequence
  primer
gtaaaacgacggccagtctgtgaccacaccactgcac

SEQ ID NO: 82948 - DNA, 38 bp, Artificial Sequence
  primer
gtaaaacgacggccagtttagtctctgagggtcgaggg

SEQ ID NO: 82949 - DNA, 37 bp, Artificial Sequence
  primer
gtaaaacgacggccagtaaagaagagaggccacagcc

SEQ ID NO: 82950 - DNA, 18 bp, Artificial Sequence
  primer
aaggtggctgagggcatc

SEQ ID NO: 82951 - DNA, 26 bp, Artificial Sequence
  primer
tctcttcccaaatctattcctaatcc

SEQ ID NO: 82952 - DNA, 43 bp, Artificial Sequence
  primer
gtaaaacgacggccagtcctcatatggcctacagtatttcttc

SEQ ID NO: 82953 - DNA, 25 bp, Artificial Sequence
  primer
ttactcatccatatttcacattccc

SEQ ID NO: 82954 - DNA, 23 bp, Artificial Sequence
  primer
gggagagaaatactgtccattcc

SEQ ID NO: 82955 - DNA, 44 bp, Artificial Sequence
  primer
gtaaaacgacggccagttctgagtggtatgataagttatttggg

SEQ ID NO: 82956 - DNA, 22 bp, Artificial Sequence
  primer
tcatcagagagaaaccagaagc

SEQ ID NO: 82957 - DNA, 27 bp, Artificial Sequence
  primer
gttacttgaaagaggcaagtataaagg

SEQ ID NO: 82958 - DNA, 22 bp, Artificial Sequence
  primer
gcagtgccgtagaaatatgctt

SEQ ID NO: 82959 - DNA, 42 bp, Artificial Sequence
  primer
gtaaaacgacggccagtcgaacagtgaatatttcctttgatg

SEQ ID NO: 82960 - DNA, 23 bp, Artificial Sequence
  primer
aatagttgctaccactgggaacc

SEQ ID NO: 82961 - DNA, 40 bp, Artificial Sequence
  primer
gtaaaacgacggccagtttagcatccttatgttcctggac

SEQ ID NO: 82962 - DNA, 22 bp, Artificial Sequence
  primer
cctatacatgcatgcacaatcc

SEQ ID NO: 82963 - DNA, 42 bp, Artificial Sequence
  primer
gtaaaacgacggccagttttgtgaatactgggaactatgaaa

SEQ ID NO: 82964 - DNA, 38 bp, Artificial Sequence
  primer
gtaaaacgacggccagtttcacgcttacccaggagtta

SEQ ID NO: 82965 - DNA, 38 bp, Artificial Sequence
  primer
gtaaaacgacggccagtctcaaccctcatgaagccatc

SEQ ID NO: 82966 - DNA, 39 bp, Artificial Sequence
  primer
gtaaaacgacggccagtccacacaagtgttctttggttc

SEQ ID NO: 82967 - DNA, 38 bp, Artificial Sequence
  primer
gtaaaacgacggccagtaagagagggatcccgattacc

SEQ ID NO: 82968 - DNA, 22 bp, Artificial Sequence
  primer
tttggaaacactaacatgtggc

SEQ ID NO: 82969 - DNA, 23 bp, Artificial Sequence
  primer
tccttcaggacaagagactatgc

SEQ ID NO: 82970 - DNA, 44 bp, Artificial Sequence
  primer
gtaaaacgacggccagtaaatgttgtaaatcacacacagctatc

SEQ ID NO: 82971 - DNA, 38 bp, Artificial Sequence
  primer
gtaaaacgacggccagttcttcctgccctgataaccac

SEQ ID NO: 82972 - DNA, 38 bp, Artificial Sequence
  primer
gtaaaacgacggccagtaatggttcatttctgctggtg

SEQ ID NO: 82973 - DNA, 21 bp, Artificial Sequence
  primer
ggcaacacagtaagccctgtc

SEQ ID NO: 82974 - DNA, 21 bp, Artificial Sequence
  primer
aaagtgaaggcgttgtgaagg

SEQ ID NO: 82975 - DNA, 35 bp, Artificial Sequence
  primer
gtaaaacgacggccagtcaggcataagccactgcg

SEQ ID NO: 82976 - DNA, 21 bp, Artificial Sequence
  primer
tttccctgtactctgccttcc

SEQ ID NO: 82977 - DNA, 40 bp, Artificial Sequence
  primer
gtaaaacgacggccagtgggtgtttccataggaatgaaag

SEQ ID NO: 82978 - DNA, 21 bp, Artificial Sequence
  primer
tttagctgaaggtcccagcac

SEQ ID NO: 82979 - DNA, 21 bp, Artificial Sequence
  primer
tgcagaaccaatcaagacaga

SEQ ID NO: 82980 - DNA, 41 bp, Artificial Sequence
  primer
gtaaaacgacggccagtaagttaggtgtttcctgggttatg

SEQ ID NO: 82981 - DNA, 27 bp, Artificial Sequence
  primer
agaaaggcagtaagtttctaatacctg

SEQ ID NO: 82982 - DNA, 21 bp, Artificial Sequence
  primer
aaggtgtgagaccagtgggag

SEQ ID NO: 82983 - DNA, 20 bp, Artificial Sequence
  primer
aggactgcttctagcctggg

SEQ ID NO: 82984 - DNA, 21 bp, Artificial Sequence
  primer
tcacttcccaaagctgcctac

SEQ ID NO: 82985 - DNA, 21 bp, Artificial Sequence
  primer
tgcacatacatccctgaacct

SEQ ID NO: 82986 - DNA, 38 bp, Artificial Sequence
  primer
gtaaaacgacggccagtaaggtcccaaatggtcttcag

SEQ ID NO: 82987 - DNA, 21 bp, Artificial Sequence
  primer
tccagcccatctgttatgttg

SEQ ID NO: 82988 - DNA, 43 bp, Artificial Sequence
  primer
gtaaaacgacggccagttgtgagtcatcagaacctaacagttc

SEQ ID NO: 82989 - DNA, 37 bp, Artificial Sequence
  primer
gtaaaacgacggccagtctcaggatgaaggcctgatg

SEQ ID NO: 82990 - DNA, 42 bp, Artificial Sequence
  primer
gtaaaacgacggccagttcgagttccatattgcttatactgc

SEQ ID NO: 82991 - DNA, 38 bp, Artificial Sequence
  primer
gtaaaacgacggccagtagctctgggaaagtatcgctg

SEQ ID NO: 82992 - DNA, 38 bp, Artificial Sequence
  primer
gtaaaacgacggccagttctatgcttgtttcccgactg

SEQ ID NO: 82993 - DNA, 38 bp, Artificial Sequence
  primer
gtaaaacgacggccagttgttgcacattcctcttctgc

SEQ ID NO: 82994 - DNA, 21 bp, Artificial Sequence
  primer
aatgagtccagtttcgttgcc

SEQ ID NO: 82995 - DNA, 22 bp, Artificial Sequence
  primer
acttggaatgttctcatttccc

SEQ ID NO: 82996 - DNA, 39 bp, Artificial Sequence
  primer
gtaaaacgacggccagttgcatgactacttcccataggc

SEQ ID NO: 82997 - DNA, 21 bp, Artificial Sequence
  primer
accctgagccaaatgtgtatg

SEQ ID NO: 82998 - DNA, 38 bp, Artificial Sequence
  primer
gtaaaacgacggccagtgcctttgccaatattacctgg

SEQ ID NO: 82999 - DNA, 39 bp, Artificial Sequence
  primer
gtaaaacgacggccagtaatccatgctttgctcttcttg

SEQ ID NO: 83000 - DNA, 38 bp, Artificial Sequence
  primer
gtaaaacgacggccagtgacgtcctagctgtgtgaagg

SEQ ID NO: 83001 - DNA, 22 bp, Artificial Sequence
  primer
tcagcaaacctaagaatgtggg

SEQ ID NO: 83002 - DNA, 39 bp, Artificial Sequence
  primer
gtaaaacgacggccagtaattacccatgtgctgagcaag

SEQ ID NO: 83003 - DNA, 38 bp, Artificial Sequence
  primer
gtaaaacgacggccagtcagtttccaagcttgttcagg

SEQ ID NO: 83004 - DNA, 39 bp, Artificial Sequence
  primer
gtaaaacgacggccagttgcctggcctgaaataatacat

SEQ ID NO: 83005 - DNA, 27 bp, Artificial Sequence
  primer
tcctctaggttattaattgacaatacc

SEQ ID NO: 83006 - DNA, 38 bp, Artificial Sequence
  primer
gtaaaacgacggccagttcctaatctcgtgatctgccc

SEQ ID NO: 83007 - DNA, 40 bp, Artificial Sequence
  primer
gtaaaacgacggccagtggtaactcagactcagcatcagc

SEQ ID NO: 83008 - DNA, 20 bp, Artificial Sequence
  primer
gacatcaggtgatccaagcg

SEQ ID NO: 83009 - DNA, 21 bp, Artificial Sequence
  primer
cgagacgggaatccaaattac

SEQ ID NO: 83010 - DNA, 38 bp, Artificial Sequence
  primer
gtaaaacgacggccagttttcagcaatctgaggaaccc

SEQ ID NO: 83011 - DNA, 21 bp, Artificial Sequence
  primer
gcatccatagggactgacagg

SEQ ID NO: 83012 - DNA, 38 bp, Artificial Sequence
  primer
gtaaaacgacggccagtctgtgctactcaagcaccagg

SEQ ID NO: 83013 - DNA, 38 bp, Artificial Sequence
  primer
gtaaaacgacggccagtaagagtgagaggagctcccag

SEQ ID NO: 83014 - DNA, 26 bp, Artificial Sequence
  primer
tgtgagtcatcagaacctaacagttc

SEQ ID NO: 83015 - DNA, 22 bp, Artificial Sequence
  primer
aactgccaaatctgctttcttg

SEQ ID NO: 83016 - DNA, 42 bp, Artificial Sequence; identical to SEQ ID NO: 82990
  primer

SEQ ID NO: 83017 - DNA, 38 bp, Artificial Sequence
  primer
gtaaaacgacggccagtactcttcttggctccagttgc

SEQ ID NO: 83018 - DNA, 40 bp, Artificial Sequence
  primer
gtaaaacgacggccagttctcttggaaggctaggattgac

SEQ ID NO: 83019 - DNA, 38 bp, Artificial Sequence; identical to SEQ ID NO: 82992
  primer

SEQ ID NO: 83020 - DNA, 38 bp, Artificial Sequence; identical to SEQ ID NO: 82993
  primer

SEQ ID NO: 83021 - DNA, 21 bp, Artificial Sequence
  primer
aatgagtccagtttcgttgcc

SEQ ID NO: 83022 - DNA, 22 bp, Artificial Sequence
  primer
acttggaatgttctcatttccc

SEQ ID NO: 83023 - DNA, 39 bp, Artificial Sequence; identical to SEQ ID NO: 82996
  primer

SEQ ID NO: 83024 - DNA, 21 bp, Artificial Sequence
  primer
accctgagccaaatgtgtatg

SEQ ID NO: 83025 - DNA, 38 bp, Artificial Sequence; identical to SEQ ID NO: 82998
  primer

SEQ ID NO: 83026 - DNA, 39 bp, Artificial Sequence; identical to SEQ ID NO: 82999
  primer

SEQ ID NO: 83027 - DNA, 38 bp, Artificial Sequence; identical to SEQ ID NO: 83000
  primer

SEQ ID NO: 83028 - DNA, 38 bp, Artificial Sequence
  primer
gtaaaacgacggccagtggtgtgcacttacagtcccag

SEQ ID NO: 83029 - DNA, 21 bp, Artificial Sequence
  primer
gtggttaacctgcaaacgatg

SEQ ID NO: 83030 - DNA, 36 bp, Artificial Sequence
  primer
gtaaaacgacggccagtgatttgcccagcatgacac

SEQ ID NO: 83031 - DNA, 39 bp, Artificial Sequence
  primer
gtaaaacgacggccagtaaaccagccaattcaacatcac

SEQ ID NO: 83032 - DNA, 21 bp, Artificial Sequence
  primer
aaactcccacataccactggg

SEQ ID NO: 83033 - DNA, 39 bp, Artificial Sequence
  primer
gtaaaacgacggccagtctgtatgaggcagaatgctagg

SEQ ID NO: 83034 - DNA, 38 bp, Artificial Sequence
  primer
gtaaaacgacggccagtgcttgacaccactggactacc

SEQ ID NO: 83035 - DNA, 42 bp, Artificial Sequence
  primer
gtaaaacgacggccagtccaggtttagagactttctcaaagg

SEQ ID NO: 83036 - DNA, 20 bp, Artificial Sequence
  primer
aggcagaggttgcggtaaac

SEQ ID NO: 83037 - DNA, 38 bp, Artificial Sequence
  primer
gtaaaacgacggccagttcacttccactctcaaagggc

SEQ ID NO: 83038 - DNA, 39 bp, Artificial Sequence
  primer
gtaaaacgacggccagtaggctagaaatacgtggcaaag

SEQ ID NO: 83039 - DNA, 39 bp, Artificial Sequence
  primer
gtaaaacgacggccagtagtcctccttctgtgagcaaac

SEQ ID NO: 83040 - DNA, 21 bp, Artificial Sequence
  primer
aagcatttgcttcaaactggg

SEQ ID NO: 83041 - DNA, 21 bp, Artificial Sequence
  primer
ctgcaggcatgacagagaatc

SEQ ID NO: 83042 - DNA, 42 bp, Artificial Sequence
  primer
gtaaaacgacggccagtgactaggtttgacagaacatccttg

SEQ ID NO: 83043 - DNA, 20 bp, Artificial Sequence
  primer
tcaggtggcaacagctcaac

SEQ ID NO: 83044 - DNA, 24 bp, Artificial Sequence
  primer
cctttcttgaaggtgatgctactc

SEQ ID NO: 83045 - DNA, 24 bp, Artificial Sequence
  primer
gtcaagtctgtttcatgaagttcc

SEQ ID NO: 83046 - DNA, 23 bp, Artificial Sequence
  primer
tctcctctgcaagaacataaacc

SEQ ID NO: 83047 - DNA, 41 bp, Artificial Sequence
  primer
gtaaaacgacggccagttgccaaggtatttacaatttcaac

SEQ ID NO: 83048 - DNA, 38 bp, Artificial Sequence
  primer
gtaaaacgacggccagtttcaaattgcttgctgctgtc

SEQ ID NO: 83049 - DNA, 21 bp, Artificial Sequence
  primer
ttccctccttcataaactggc

SEQ ID NO: 83050 - DNA, 21 bp, Artificial Sequence
  primer
ctttagggtctttgcccattg

SEQ ID NO: 83051 - DNA, 21 bp, Artificial Sequence
  primer
cttaggtggcaccacagtctc

SEQ ID NO: 83052 - DNA, 23 bp, Artificial Sequence
  primer
tctggttgaccatcaaatattcc

SEQ ID NO: 83053 - DNA, 39 bp, Artificial Sequence
  primer
gtaaaacgacggccagtctagtcacaagttcctcaacgc

SEQ ID NO: 83054 - DNA, 21 bp, Artificial Sequence
  primer
ggctatcctaaatgcaggtgg

SEQ ID NO: 83055 - DNA, 20 bp, Artificial Sequence
  primer
cctctgaatcatccaatgcc

SEQ ID NO: 83056 - DNA, 38 bp, Artificial Sequence
  primer
gtaaaacgacggccagtgtgagctggtctgaatgttcg

SEQ ID NO: 83057 - DNA, 21 bp, Artificial Sequence
  primer
ggaaacttgctttccacttgc

SEQ ID NO: 83058 - DNA, 23 bp, Artificial Sequence
  primer
accaactgttgtttgtcttgttg

SEQ ID NO: 83059 - DNA, 24 bp, Artificial Sequence
  primer
cactttggttcctaataccaactg

SEQ ID NO: 83060 - DNA, 20 bp, Artificial Sequence
  primer
gtgattggcaacacgaaagg

SEQ ID NO: 83061 - DNA, 37 bp, Artificial Sequence
  primer
gtaaaacgacggccagtagcactttgagaggcaggtg

SEQ ID NO: 83062 - DNA, 26 bp, Artificial Sequence
  primer
ttcctctcaaccttagtacttcatcc

SEQ ID NO: 83063 - DNA, 23 bp, Artificial Sequence
  primer
cagctactgcttgattggagttg

SEQ ID NO: 83064 - DNA, 23 bp, Artificial Sequence
  primer
tccattcctgcactaatgtgttc

SEQ ID NO: 83065 - DNA, 43 bp, Artificial Sequence
  primer
gtaaaacgacggccagttcgagagacagttaagagaagaaaga

SEQ ID NO: 83066 - DNA, 42 bp, Artificial Sequence
  primer
gtaaaacgacggccagtttgacatggaagtcacagactacac

SEQ ID NO: 83067 - DNA, 39 bp, Artificial Sequence
  primer
gtaaaacgacggccagtaagaaagatctctggacctccc

SEQ ID NO: 83068 - DNA, 19 bp, Artificial Sequence
  primer
ctgggcaagagaccgaaac

SEQ ID NO: 83069 - DNA, 39 bp, Artificial Sequence
  primer
gtaaaacgacggccagttgtcccttgttgctattctttg

SEQ ID NO: 83070 - DNA, 37 bp, Artificial Sequence
  primer
gtaaaacgacggccagtcctgtgatggccagagagtc

SEQ ID NO: 83071 - DNA, 22 bp, Artificial Sequence
  primer
tctttgtgggcattagtagtgg

SEQ ID NO: 83072 - DNA, 21 bp, Artificial Sequence
  primer
cacctcagaacaagatggctg

SEQ ID NO: 83073 - DNA, 22 bp, Artificial Sequence
  primer
caaatttgccaactggtagctc

SEQ ID NO: 83074 - DNA, 43 bp, Artificial Sequence
  primer
gtaaaacgacggccagtaaagctatttccttgatactggactg

SEQ ID NO: 83075 - DNA, 23 bp, Artificial Sequence
  primer
cccagagtttcatatcttgcttc

SEQ ID NO: 83076 - DNA, 37 bp, Artificial Sequence
  primer
gtaaaacgacggccagtgcctgggaactctcctgttc

SEQ ID NO: 83077 - DNA, 20 bp, Artificial Sequence
  primer
ccgatacacaaacgctgagg

SEQ ID NO: 83078 - DNA, 37 bp, Artificial Sequence
  primer
gtaaaacgacggccagtttccttctgtgttgtgcagc

SEQ ID NO: 83079 - DNA, 38 bp, Artificial Sequence
  primer
gtaaaacgacggccagtgatctccagccaggcatagtc

SEQ ID NO: 83080 - DNA, 38 bp, Artificial Sequence
  primer
gtaaaacgacggccagtcatgtcgcagaagaggatcac

SEQ ID NO: 83081 - DNA, 39 bp, Artificial Sequence
  primer
gtaaaacgacggccagttggaatgctgtgtagcagtttg

SEQ ID NO: 83082 - DNA, 38 bp, Artificial Sequence
  primer
gtaaaacgacggccagttggacatcacagtaagcggtc

SEQ ID NO: 83083 - DNA, 38 bp, Artificial Sequence
  primer
gtaaaacgacggccagtagaaacgcaatgaccacacag

SEQ ID NO: 83084 - DNA, 19 bp, Artificial Sequence
  primer
ctgaaccaggtgccctctc

SEQ ID NO: 83085 - DNA, 21 bp, Artificial Sequence
  primer
ctccacttagggctctgcaac

SEQ ID NO: 83086 - DNA, 38 bp, Artificial Sequence
  primer
gtaaaacgacggccagtctagccaatcacacgtttccc

SEQ ID NO: 83087 - DNA, 21 bp, Artificial Sequence
  primer
gcaacacagagcaggacagag

SEQ ID NO: 83088 - DNA, 36 bp, Artificial Sequence
  primer
gtaaaacgacggccagtctaacctgagcctccgtgc

SEQ ID NO: 83089 - DNA, 38 bp, Artificial Sequence
  primer
gtaaaacgacggccagtcaccaatgatcctgaaggacg

SEQ ID NO: 83090 - DNA, 21 bp, Artificial Sequence
  primer
aaactgtccacaagggcagag

SEQ ID NO: 83091 - DNA, 19 bp, Artificial Sequence
  primer
ccagcagtcgagccctaag

SEQ ID NO: 83092 - DNA, 38 bp, Artificial Sequence
  primer
gtaaaacgacggccagtagctgtggaacctccttggac

SEQ ID NO: 83093 - DNA, 36 bp, Artificial Sequence
  primer
gtaaaacgacggccagtagggacactcaggtcaccg

SEQ ID NO: 83094 - DNA, 19 bp, Artificial Sequence
  primer
cccagacggagatgggttc

SEQ ID NO: 83095 - DNA, 21 bp, Artificial Sequence
  primer
tgctgttcaacctcactccac

SEQ ID NO: 83096 - DNA, 37 bp, Artificial Sequence
  primer
gtaaaacgacggccagtgccgcagcatctacactagg

SEQ ID NO: 83097 - DNA, 40 bp, Artificial Sequence
  primer
gtaaaacgacggccagttccgactaccctacctggataac

SEQ ID NO: 83098 - DNA, 21 bp, Artificial Sequence
  primer
actggtaacactgccctggag

SEQ ID NO: 83099 - DNA, 38 bp, Artificial Sequence
  primer
gtaaaacgacggccagttagggaacctgtcactccaag

SEQ ID NO: 83100 - DNA, 38 bp, Artificial Sequence
  primer
gtaaaacgacggccagtgaaccaaagactgctgtgtgc

SEQ ID NO: 83101 - DNA, 21 bp, Artificial Sequence
  primer
gaccctcacgttgaggctatg

SEQ ID NO: 83102 - DNA, 21 bp, Artificial Sequence
  primer
tgtactgcccgaagctaaagg

SEQ ID NO: 83103 - DNA, 43 bp, Artificial Sequence
  primer
gtaaaacgacggccagtaaagcctattgtatctgttaactggc

SEQ ID NO: 83104 - DNA, 21 bp, Artificial Sequence
  primer
atcctgaatgcaaacagaccc

SEQ ID NO: 83105 - DNA, 21 bp, Artificial Sequence
  primer
aaggcgtgacactgctacttg

SEQ ID NO: 83106 - DNA, 21 bp, Artificial Sequence
  primer
gtaaatgtccctgcatccctc

SEQ ID NO: 83107 - DNA, 36 bp, Artificial Sequence
  primer
gtaaaacgacggccagtgcagtctttccaggatggg

SEQ ID NO: 83108 - DNA, 19 bp, Artificial Sequence
  primer
cccaagagctgctgcaaag

SEQ ID NO: 83109 - DNA, 37 bp, Artificial Sequence
  primer
gtaaaacgacggccagtagatggctaaaggatcgcgt

SEQ ID NO: 83110 - DNA, 21 bp, Artificial Sequence
  primer
agaaacactcccaagagccag

SEQ ID NO: 83111 - DNA, 20 bp, Artificial Sequence
  primer
atcgggtgcttgatgatgtc

SEQ ID NO: 83112 - DNA, 37 bp, Artificial Sequence
  primer
gtaaaacgacggccagtcacaagacatcagcacccac

SEQ ID NO: 83113 - DNA, 37 bp, Artificial Sequence
  primer
gtaaaacgacggccagtctctctaaggccttcctcgg

SEQ ID NO: 83114 - DNA, 20 bp, Artificial Sequence
  primer
aaggaaccatgcaaagggac

SEQ ID NO: 83115 - DNA, 21 bp, Artificial Sequence
  primer
cttcccagcacaggtctcatc

SEQ ID NO: 83116 - DNA, 35 bp, Artificial Sequence
  primer
gtaaaacgacggccagtcacagggtccgtgaggag

SEQ ID NO: 83117 - DNA, 21 bp, Artificial Sequence
  primer
gctcatcaggaggtaagccac

SEQ ID NO: 83118 - DNA, 21 bp, Artificial Sequence
  primer
ctgcacaccatggaacagaag

SEQ ID NO: 83119 - DNA, 20 bp, Artificial Sequence
  primer
aactgccctgaccaggagac

SEQ ID NO: 83120 - DNA, 21 bp, Artificial Sequence
  primer
cctctacctccaagggtctcc

SEQ ID NO: 83121 - DNA, 21 bp, Artificial Sequence
  primer
caaacccaatctcacatgtcc

SEQ ID NO: 83122 - DNA, 39 bp, Artificial Sequence
  primer
gtaaaacgacggccagtggacaggctctgtgtaaagcac

SEQ ID NO: 83123 - DNA, 38 bp, Artificial Sequence
  primer
gtaaaacgacggccagtgctgagtttcttcgagttggc

SEQ ID NO: 83124 - DNA, 20 bp, Artificial Sequence
  primer
ccacagaagtctgctcccac

SEQ ID NO: 83125 - DNA, 21 bp, Artificial Sequence
  primer
ggtccagtgggaattatgctc

SEQ ID NO: 83126 - DNA, 38 bp, Artificial Sequence
  primer
gtaaaacgacggccagtgtgcagctaagtcctgtgtgc

SEQ ID NO: 83127 - DNA, 20 bp, Artificial Sequence
  primer
agtggactgagcaaggaggg

SEQ ID NO: 83128 - DNA, 21 bp, Artificial Sequence
  primer
acagaggaacccagcaagttc

SEQ ID NO: 83129 - DNA, 19 bp, Artificial Sequence
  primer
gcatctgctgatggtggtg

SEQ ID NO: 83130 - DNA, 38 bp, Artificial Sequence
  primer
gtaaaacgacggccagtgcagctgaggctaagaagctg

SEQ ID NO: 83131 - DNA, 21 bp, Artificial Sequence
  primer
caccttcacggaagggagtag

SEQ ID NO: 83132 - DNA, 38 bp, Artificial Sequence
  primer
gtaaaacgacggccagtaaactataggcccagcaccag

SEQ ID NO: 83133 - DNA, 38 bp, Artificial Sequence
  primer
gtaaaacgacggccagtcttctcctccttcaccaccac

SEQ ID NO: 83134 - DNA, 20 bp, Artificial Sequence
  primer
cccacagcaagcttatgtcc

SEQ ID NO: 83135 - DNA, 21 bp, Artificial Sequence
  primer
tcctgcagaacagagaggttg

SEQ ID NO: 83136 - DNA, 35 bp, Artificial Sequence
  primer
gtaaaacgacggccagtagagggtcccagtcagcc

SEQ ID NO: 83137 - DNA, 20 bp, Artificial Sequence
  primer
gagtccagaggaccacatgc

SEQ ID NO: 83138 - DNA, 21 bp, Artificial Sequence
  primer
acttgctcgtaacaaggcgtg

SEQ ID NO: 83139 - DNA, 18 bp, Artificial Sequence
  primer
accagagacccaccggac

SEQ ID NO: 83140 - DNA, 38 bp, Artificial Sequence
  primer
gtaaaacgacggccagtgccagatcttagaggcgtttg

SEQ ID NO: 83141 - DNA, 43 bp, Artificial Sequence
  primer
gtaaaacgacggccagtcacaaagctccaacttagaagctaaa

SEQ ID NO: 83142 - DNA, 38 bp, Artificial Sequence
  primer
gtaaaacgacggccagtttaggcacaaatgtggtttgg

SEQ ID NO: 83143 - DNA, 24 bp, Artificial Sequence
  primer
tcagaggacctatttcatctggtt

SEQ ID NO: 83144 - DNA, 27 bp, Artificial Sequence
  primer
ttgtatctgtattactatggccaacaa

SEQ ID NO: 83145 - DNA, 38 bp, Artificial Sequence
  primer
gtaaaacgacggccagtccgacacactagcacttggtc

SEQ ID NO: 83146 - DNA, 38 bp, Artificial Sequence
  primer
gtaaaacgacggccagtcccattgtagggaattgtctg

SEQ ID NO: 83147 - DNA, 21 bp, Artificial Sequence
  primer
ttatggctttgttaatggcgg

SEQ ID NO: 83148 - DNA, 21 bp, Artificial Sequence
  primer
gcataatcgtgcttcctttcc

SEQ ID NO: 83149 - DNA, 21 bp, Artificial Sequence
  primer
gccagctttgtcagtctatcc

SEQ ID NO: 83150 - DNA, 20 bp, Artificial Sequence
  primer
ttcagggccacagagttcag

SEQ ID NO: 83151 - DNA, 21 bp, Artificial Sequence
  primer
cttcttacccaatgggccttc

SEQ ID NO: 83152 - DNA, 21 bp, Artificial Sequence
  primer
atgacatcaacacgccatacc

SEQ ID NO: 83153 - DNA, 39 bp, Artificial Sequence
  primer
gtaaaacgacggccagttggcatcaccactgtactcaag

SEQ ID NO: 83154 - DNA, 38 bp, Artificial Sequence
  primer
gtaaaacgacggccagtataccaatctcgggcagacac

SEQ ID NO: 83155 - DNA, 21 bp, Artificial Sequence
  primer
agtccaacctctggaacatcc

SEQ ID NO: 83156 - DNA, 38 bp, Artificial Sequence
  primer
gtaaaacgacggccagttctccctgagaaacaagaccc

SEQ ID NO: 83157 - DNA, 35 bp, Artificial Sequence
  primer
gtaaaacgacggccagtcctgggcaacagaaggag

SEQ ID NO: 83158 - DNA, 40 bp, Artificial Sequence
  primer
gtaaaacgacggccagttggatggattagcaaacagtagg

SEQ ID NO: 83159 - DNA, 38 bp, Artificial Sequence
  primer
gtaaaacgacggccagtacagtttccaccacttctccc

SEQ ID NO: 83160 - DNA, 21 bp, Artificial Sequence
  primer
atccagtctgctgtccatgtg

SEQ ID NO: 83161 - DNA, 38 bp, Artificial Sequence
  primer
gtaaaacgacggccagttctcaagtctaaagggacggc

SEQ ID NO: 83162 - DNA, 38 bp, Artificial Sequence
  primer
gtaaaacgacggccagtgcacaacgcatgttctaggag

SEQ ID NO: 83163 - DNA, 38 bp, Artificial Sequence
  primer
gtaaaacgacggccagtaaagtggtttcctcatcgctc

SEQ ID NO: 83164 - DNA, 21 bp, Artificial Sequence
  primer
atccatgctgtggtcaatcag

SEQ ID NO: 83165 - DNA, 22 bp, Artificial Sequence
  primer
agaagaagcatctgaatcggag

SEQ ID NO: 83166 - DNA, 19 bp, Artificial Sequence
  primer
cagcagcaccaaagtgagg

SEQ ID NO: 83167 - DNA, 21 bp, Artificial Sequence
  primer
tctggtggctccatacttgtg

SEQ ID NO: 83168 - DNA, 38 bp, Artificial Sequence
  primer
gtaaaacgacggccagtcctatgggctttggacacatc

SEQ ID NO: 83169 - DNA, 38 bp, Artificial Sequence
  primer
gtaaaacgacggccagtcctcctctacttgcccacaac

SEQ ID NO: 83170 - DNA, 38 bp, Artificial Sequence
  primer
gtaaaacgacggccagtgtttcatatgggaggcacctg

SEQ ID NO: 83171 - DNA, 21 bp, Artificial Sequence
  primer
gcatgggtgagtgagaacaag

SEQ ID NO: 83172 - DNA, 21 bp, Artificial Sequence
  primer
taccagcagttccacagaagc

SEQ ID NO: 83173 - DNA, 20 bp, Artificial Sequence
  primer
gctcaagtgattcacccacc

SEQ ID NO: 83174 - DNA, 36 bp, Artificial Sequence
  primer
gtaaaacgacggccagtccacagcaacccttcttgg

SEQ ID NO: 83175 - DNA, 21 bp, Artificial Sequence
  primer
aacataagggtccttggatgc

SEQ ID NO: 83176 - DNA, 38 bp, Artificial Sequence
  primer
gtaaaacgacggccagtagtctgcatgttggatttccc

SEQ ID NO: 83177 - DNA, 21 bp, Artificial Sequence
  primer
gcaatgaacttaatccctgcc

SEQ ID NO: 83178 - DNA, 26 bp, Artificial Sequence
  primer
gcctatgtgctctaactactctgttc

SEQ ID NO: 83179 - DNA, 23 bp, Artificial Sequence
  primer
cacctagccttgaaagacagtcc

SEQ ID NO: 83180 - DNA, 21 bp, Artificial Sequence
  primer
actttgggataaatcgggctt

SEQ ID NO: 83181 - DNA, 22 bp, Artificial Sequence
  primer
tccctgcattccttcttaaatg

SEQ ID NO: 83182 - DNA, 37 bp, Artificial Sequence
  primer
gtaaaacgacggccagtccttcagggccttaatcacc

SEQ ID NO: 83183 - DNA, 39 bp, Artificial Sequence
  primer
gtaaaacgacggccagtgacatggcaaagaagtaccagg

SEQ ID NO: 83184 - DNA, 21 bp, Artificial Sequence
  primer
actcctcctgccagaataagc

SEQ ID NO: 83185 - DNA, 21 bp, Artificial Sequence
  primer
agaaggtgcagggtctgtttc

SEQ ID NO: 83186 - DNA, 38 bp, Artificial Sequence
  primer
gtaaaacgacggccagttcatccgaacacagaaacacc

SEQ ID NO: 83187 - DNA, 38 bp, Artificial Sequence
  primer
gtaaaacgacggccagtgagcacgtgttcactgtgagg

SEQ ID NO: 83188 - DNA, 21 bp, Artificial Sequence
  primer
actcctcctgccagaataagc

SEQ ID NO: 83189 - DNA, 21 bp, Artificial Sequence
  primer
tgtgctagatcacacagcacc

SEQ ID NO: 83190 - DNA, 19 bp, Artificial Sequence
  primer
cgtccacacctccactcag

SEQ ID NO: 83191 - DNA, 20 bp, Artificial Sequence
  primer
atatggacggctgcaagatg

SEQ ID NO: 83192 - DNA, 19 bp, Artificial Sequence
  primer
gtcaggctgcaggctcttc

SEQ ID NO: 83193 - DNA, 21 bp, Artificial Sequence
  primer
ggaagaatgtactgcggcttc

SEQ ID NO: 83194 - DNA, 38 bp, Artificial Sequence
  primer
gtaaaacgacggccagttagtcaggaagggagaggagg

SEQ ID NO: 83195 - DNA, 21 bp, Artificial Sequence
  primer
cacaactacaatgctgcccac

SEQ ID NO: 83196 - DNA, 21 bp, Artificial Sequence
  primer
atatggccttcgcgtatgact

SEQ ID NO: 83197 - DNA, 41 bp, Artificial Sequence
  primer
gtaaaacgacggccagtaatttcaacagaaacaaggaggtc

SEQ ID NO: 83198 - DNA, 36 bp, Artificial Sequence
  primer
gtaaaacgacggccagtgttcctgtgatcattggcg

SEQ ID NO: 83199 - DNA, 20 bp, Artificial Sequence
  primer
gagtatctggtttcgtggcg

SEQ ID NO: 83200 - DNA, 38 bp, Artificial Sequence
  primer
gtaaaacgacggccagtgcatggatcatagggtgttca

SEQ ID NO: 83201 - DNA, 38 bp, Artificial Sequence
  primer
gtaaaacgacggccagtccctggcttaacaagagcaag

SEQ ID NO: 83202 - DNA, 38 bp, Artificial Sequence
  primer
gtaaaacgacggccagtacatagcaggtgctgatctgg

SEQ ID NO: 83203 - DNA, 37 bp, Artificial Sequence
  primer
gtaaaacgacggccagtagggctccttaacttggctg

SEQ ID NO: 83204 - DNA, 39 bp, Artificial Sequence
  primer
gtaaaacgacggccagttgcctggctggtactatcaatc

SEQ ID NO: 83205 - DNA, 22 bp, Artificial Sequence
  primer
tccctgtgaattggtttcattc

SEQ ID NO: 83206 - DNA, 21 bp, Artificial Sequence
  primer
ctcccaaagtgctgggattat

SEQ ID NO: 83207 - DNA, 24 bp, Artificial Sequence
  primer
caaacgaagagaattgaaatctga

SEQ ID NO: 83208 - DNA, 21 bp, Artificial Sequence
  primer
ttggcagattgtttcaaatgg

SEQ ID NO: 83209 - DNA, 21 bp, Artificial Sequence
  primer
aatgcatagagaggcggaaac

SEQ ID NO: 83210 - DNA, 23 bp, Artificial Sequence
  primer
tcactccagatagtgtgacttgg

SEQ ID NO: 83211 - DNA, 27 bp, Artificial Sequence
  primer
ttgccatttaatacttagaggtgtagg

SEQ ID NO: 83212 - DNA, 42 bp, Artificial Sequence
  primer
gtaaaacgacggccagttgccaataagtaaataaagccacag

SEQ ID NO: 83213 - DNA, 38 bp, Artificial Sequence
  primer
gtaaaacgacggccagtctcgcccaagtttatctccag

SEQ ID NO: 83214 - DNA, 22 bp, Artificial Sequence
  primer
gctgtgtgatttaggagggaag

SEQ ID NO: 83215 - DNA, 38 bp, Artificial Sequence
  primer
gtaaaacgacggccagtgggcaatatcacaagaccctg

SEQ ID NO: 83216 - DNA, 22 bp, Artificial Sequence
  primer
caaaccatggattctgggtaag

SEQ ID NO: 83217 - DNA, 40 bp, Artificial Sequence
  primer
gtaaaacgacggccagtgaagccaaatagcttccctattc

SEQ ID NO: 83218 - DNA, 21 bp, Artificial Sequence
  primer
acgtgtccaaagccctgttat

SEQ ID NO: 83219 - DNA, 44 bp, Artificial Sequence
  primer
gtaaaacgacggccagtattgttggtatttcccagatatttaac

SEQ ID NO: 83220 - DNA, 23 bp, Artificial Sequence
  primer
caacatttcatttaagtcagggc

SEQ ID NO: 83221 - DNA, 39 bp, Artificial Sequence
  primer
gtaaaacgacggccagttgcaattacaatttgctctgtg

SEQ ID NO: 83222 - DNA, 39 bp, Artificial Sequence
  primer
gtaaaacgacggccagtccaaatgcatccttgaacatac

SEQ ID NO: 83223 - DNA, 24 bp, Artificial Sequence
  primer
tgaacgaatatctgggaatttgtc

SEQ ID NO: 83224 - DNA, 21 bp, Artificial Sequence
  primer
ctgtgagaaggctgactgtgg

SEQ ID NO: 83225 - DNA, 39 bp, Artificial Sequence
  primer
gtaaaacgacggccagtcactgcaacagatgtcaggttc

SEQ ID NO: 83226 - DNA, 21 bp, Artificial Sequence
  primer
gtctggtaaggaagggctgtc

SEQ ID NO: 83227 - DNA, 38 bp, Artificial Sequence
  primer
gtaaaacgacggccagtaacaactaacagccggaaatg

SEQ ID NO: 83228 - DNA, 39 bp, Artificial Sequence
  primer
gtaaaacgacggccagttgttaagcaactgctgaaagcc

SEQ ID NO: 83229 - DNA, 22 bp, Artificial Sequence
  primer
ggctacctggaccatgtttatc

SEQ ID NO: 83230 - DNA, 27 bp, Artificial Sequence
  primer
tgacaaaccagtcatacaaatattgag

SEQ ID NO: 83231 - DNA, 22 bp, Artificial Sequence
  primer
aactgcatttactctgcaatgg

SEQ ID NO: 83232 - DNA, 38 bp, Artificial Sequence
  primer
gtaaaacgacggccagtctgaaactgagcagtcggtcc

SEQ ID NO: 83233 - DNA, 18 bp, Artificial Sequence
  primer
atttgctgggtgtggtgg

SEQ ID NO: 83234 - DNA, 38 bp, Artificial Sequence
  primer
gtaaaacgacggccagtaaaggaaccgagacaggacag

SEQ ID NO: 83235 - DNA, 38 bp, Artificial Sequence
  primer
gtaaaacgacggccagtatgcacagggcaggaactaac

SEQ ID NO: 83236 - DNA, 38 bp, Artificial Sequence
  primer
gtaaaacgacggccagtcaagttggatttcagcagtcg

SEQ ID NO: 83237 - DNA, 21 bp, Artificial Sequence
  primer
aggtctacattctcgccaagg

SEQ ID NO: 83238 - DNA, 38 bp, Artificial Sequence
  primer
gtaaaacgacggccagtacaattcctcctggaaagcag

SEQ ID NO: 83239 - DNA, 20 bp, Artificial Sequence
  primer
caagtcccaatattcgaggg

SEQ ID NO: 83240 - DNA, 21 bp, Artificial Sequence
  primer
cacaagtctcggactgtgacc

SEQ ID NO: 83241 - DNA, 38 bp, Artificial Sequence
  primer
gtaaaacgacggccagttttccctccactgttcaaagg

SEQ ID NO: 83242 - DNA, 21 bp, Artificial Sequence
  primer
cagtgctctgcaaacatacgg

SEQ ID NO: 83243 - DNA, 21 bp, Artificial Sequence
  primer
acgtccaagccatagtgtgac

SEQ ID NO: 83244 - DNA, 20 bp, Artificial Sequence
  primer
gcaccagctctgctacaacc

SEQ ID NO: 83245 - DNA, 41 bp, Artificial Sequence
  primer
gtaaaacgacggccagtcctggtaactggatatttcacctg

SEQ ID NO: 83246 - DNA, 22 bp, Artificial Sequence
  primer
gcccggtggtaaacttacattc

SEQ ID NO: 83247 - DNA, 36 bp, Artificial Sequence
  primer
gtaaaacgacggccagtaccacacctcccgacagag

SEQ ID NO: 83248 - DNA, 21 bp, Artificial Sequence
  primer
cactggagaagagagtgtggg

SEQ ID NO: 83249 - DNA, 21 bp, Artificial Sequence
  primer
gtagatgccgagctccttctc

SEQ ID NO: 83250 - DNA, 20 bp, Artificial Sequence
  primer
ggcctagaccctcctgtcac

SEQ ID NO: 83251 - DNA, 20 bp, Artificial Sequence
  primer
cactccaggcacttctgtgg

SEQ ID NO: 83252 - DNA, 36 bp, Artificial Sequence
  primer
gtaaaacgacggccagttctgtcaggcctgctctcc

SEQ ID NO: 83253 - DNA, 38 bp, Artificial Sequence
  primer
gtaaaacgacggccagtcaagttcagggatcatgaggg

SEQ ID NO: 83254 - DNA, 38 bp, Artificial Sequence
  primer
gtaaaacgacggccagttaagttccacatgggacgagg

SEQ ID NO: 83255 - DNA, 21 bp, Artificial Sequence
  primer
cagctccctcgctcactttag

SEQ ID NO: 83256 - DNA, 38 bp, Artificial Sequence
  primer
gtaaaacgacggccagtctgggactacaggtacatgcc

SEQ ID NO: 83257 - DNA, 37 bp, Artificial Sequence
  primer
gtaaaacgacggccagtggccaaaggtcaaaggattc

SEQ ID NO: 83258 - DNA, 20 bp, Artificial Sequence
  primer
aggtcaccgatgtgcttcac

SEQ ID NO: 83259 - DNA, 21 bp, Artificial Sequence
  primer
agaacaggatgaagtgctccc

SEQ ID NO: 83260 - DNA, 39 bp, Artificial Sequence
  primer
gtaaaacgacggccagtaagcaatacctacggactggtg

SEQ ID NO: 83261 - DNA, 19 bp, Artificial Sequence
  primer
acctccagctccaggaagg

SEQ ID NO: 83262 - DNA, 38 bp, Artificial Sequence
  primer
gtaaaacgacggccagtcacaagcagagctgtgaggtc

SEQ ID NO: 83263 - DNA, 19 bp, Artificial Sequence
  primer
agcagcactgcctctccac

SEQ ID NO: 83264 - DNA, 35 bp, Artificial Sequence
  primer
gtaaaacgacggccagtagacccgcactggtcagg

SEQ ID NO: 83265 - DNA, 38 bp, Artificial Sequence
  primer
gtaaaacgacggccagttatcctcactgaccagccctc

SEQ ID NO: 83266 - DNA, 21 bp, Artificial Sequence
  primer
agtctgacctgcttctccagg

SEQ ID NO: 83267 - DNA, 38 bp, Artificial Sequence
  primer
gtaaaacgacggccagtctacacagcgccactttcttg

SEQ ID NO: 83268 - DNA, 22 bp, Artificial Sequence
  primer
gctgcaatcagtagtttcccag

SEQ ID NO: 83269 - DNA, 37 bp, Artificial Sequence
  primer
gtaaaacgacggccagtacagcatggctgaaccagtc

SEQ ID NO: 83270 - DNA, 37 bp, Artificial Sequence
  primer
gtaaaacgacggccagttttgccttgccttccttaaa

SEQ ID NO: 83271 - DNA, 39 bp, Artificial Sequence
  primer
gtaaaacgacggccagtaaacaccatgcagtttcacttg

SEQ ID NO: 83272 - DNA, 21 bp, Artificial Sequence
  primer
ctgagtgggttgctactgtcc

SEQ ID NO: 83273 - DNA, 22 bp, Artificial Sequence
  primer
tcccaagctttaagaccaaatc

SEQ ID NO: 83274 - DNA, 21 bp, Artificial Sequence
  primer
cctgctgtaatcccacttcag

SEQ ID NO: 83275 - DNA, 21 bp, Artificial Sequence
  primer
caattcatttcccaagaagcc

SEQ ID NO: 83276 - DNA, 37 bp, Artificial Sequence
  primer
gtaaaacgacggccagtcacccacaatttacccatgc

SEQ ID NO: 83277 - DNA, 42 bp, Artificial Sequence
  primer
gtaaaacgacggccagttttcaattctcctatttactcaccc

SEQ ID NO: 83278 - DNA, 19 bp, Artificial Sequence
  primer
tgggtgaagagcaagaccc

SEQ ID NO: 83279 - DNA, 21 bp, Artificial Sequence
  primer
tttacttgctggcacttcagg

SEQ ID NO: 83280 - DNA, 21 bp, Artificial Sequence
  primer
ccagccttgctctttcagact

SEQ ID NO: 83281 - DNA, 40 bp, Artificial Sequence
  primer
gtaaaacgacggccagtactgaagactgtgagatgatggc

SEQ ID NO: 83282 - DNA, 21 bp, Artificial Sequence
  primer
tgctgaaagacttgcacaatg

SEQ ID NO: 83283 - DNA, 23 bp, Artificial Sequence
  primer
cataccagttcctatggttccag

SEQ ID NO: 83284 - DNA, 21 bp, Artificial Sequence
  primer
tatagcggtggttgtcagtgg

SEQ ID NO: 83285 - DNA, 20 bp, Artificial Sequence
  primer
tctgattgagggcatgatcc

SEQ ID NO: 83286 - DNA, 38 bp, Artificial Sequence
  primer
gtaaaacgacggccagtcagctttcacttctctggctg

SEQ ID NO: 83287 - DNA, 41 bp, Artificial Sequence
  primer
gtaaaacgacggccagttttcccagttccagttcatttatc

SEQ ID NO: 83288 - DNA, 20 bp, Artificial Sequence
  primer
aacctggaggtgaaggttgc

SEQ ID NO: 83289 - DNA, 21 bp, Artificial Sequence
  primer
tgtgtgtaggcgctgtatgtg

SEQ ID NO: 83290 - DNA, 38 bp, Artificial Sequence
  primer
gtaaaacgacggccagtacacatacccagcacccattc

SEQ ID NO: 83291 - DNA, 21 bp, Artificial Sequence
  primer
tagatccctgcagagaaaggg

SEQ ID NO: 83292 - DNA, 38 bp, Artificial Sequence
  primer
gtaaaacgacggccagtaatagctcagcaggacggatg

SEQ ID NO: 83293 - DNA, 20 bp, Artificial Sequence
  primer
aggacatctgaagcccaaag

SEQ ID NO: 83294 - DNA, 21 bp, Artificial Sequence
  primer
gtgtgactgtcctccatgtcc

SEQ ID NO: 83295 - DNA, 21 bp, Artificial Sequence
  primer
aagccttggtgagcagagaac

SEQ ID NO: 83296 - DNA, 38 bp, Artificial Sequence
  primer
gtaaaacgacggccagtcagtcacagcctttctctggg

SEQ ID NO: 83297 - DNA, 20 bp, Artificial Sequence
  primer
ctgtctgcaggaggaagacg

SEQ ID NO: 83298 - DNA, 19 bp, Artificial Sequence
  primer
ccatcaggagccagacagc

SEQ ID NO: 83299 - DNA, 38 bp, Artificial Sequence
  primer
gtaaaacgacggccagttctttcaaattggtctgtcgc

SEQ ID NO: 83300 - DNA, 26 bp, Artificial Sequence
  primer
gtaaatatgcttgtaatcccatcaac

SEQ ID NO: 83301 - DNA, 23 bp, Artificial Sequence
  primer
caatacagcttccaatgcaactc

SEQ ID NO: 83302 - DNA, 38 bp, Artificial Sequence
  primer
gtaaaacgacggccagtctttgctgggacatttcattt

SEQ ID NO: 83303 - DNA, 21 bp, Artificial Sequence
  primer
gccacctctcctgacctaaag

SEQ ID NO: 83304 - DNA, 24 bp, Artificial Sequence
  primer
caatcaaactgctgacatgtctct

SEQ ID NO: 83305 - DNA, 38 bp, Artificial Sequence
  primer
gtaaaacgacggccagtttcctcataatttcaggcacg

SEQ ID NO: 83306 - DNA, 23 bp, Artificial Sequence
  primer
aaaggatccacaagcaactaatg

SEQ ID NO: 83307 - DNA, 44 bp, Artificial Sequence
  primer
gtaaaacgacggccagtacaaatacacattctctcatgattcag

SEQ ID NO: 83308 - DNA, 36 bp, Artificial Sequence
  primer
gtaaaacgacggccagtctgacaagcgcaccctctc

SEQ ID NO: 83309 - DNA, 38 bp, Artificial Sequence
  primer
gtaaaacgacggccagtatgcaaaggatgctaagcctg

SEQ ID NO: 83310 - DNA, 38 bp, Artificial Sequence
  primer
gtaaaacgacggccagtcttccatgccatcacattctg

SEQ ID NO: 83311 - DNA, 23 bp, Artificial Sequence
  primer
cgcatctatacacactccagtcc

SEQ ID NO: 83312 - DNA, 21 bp, Artificial Sequence
  primer
tgtaaggcagcagagagttgg

SEQ ID NO: 83313 - DNA, 21 bp, Artificial Sequence
  primer
tccaggttgtcaaagatgctg

SEQ ID NO: 83314 - DNA, 38 bp, Artificial Sequence
  primer
gtaaaacgacggccagttgtgcctctcacctctctctg

SEQ ID NO: 83315 - DNA, 21 bp, Artificial Sequence
  primer
cactggccctcagggatatag

SEQ ID NO: 83316 - DNA, 38 bp, Artificial Sequence
  primer
gtaaaacgacggccagtatgtcgcagtaggctgtcttg

SEQ ID NO: 83317 - DNA, 21 bp, Artificial Sequence
  primer
aacttctatgcagctcctggg

SEQ ID NO: 83318 - DNA, 21 bp, Artificial Sequence
  primer
aagccctctgacactggaaac

SEQ ID NO: 83319 - DNA, 21 bp, Artificial Sequence
  primer
acacgctattccttctcctgg

SEQ ID NO: 83320 - DNA, 21 bp, Artificial Sequence
  primer
gtccaactgggagaggaacag

SEQ ID NO: 83321 - DNA, 21 bp, Artificial Sequence
  primer
gctttctgcctacactgcctg

SEQ ID NO: 83322 - DNA, 21 bp, Artificial Sequence
  primer
gctgtgtaggagggacctctg

SEQ ID NO: 83323 - DNA, 21 bp, Artificial Sequence
  primer
gggtaactgggagtatgctgg

SEQ ID NO: 83324 - DNA, 21 bp, Artificial Sequence
  primer
aacagggaaacctacacaggc

SEQ ID NO: 83325 - DNA, 21 bp, Artificial Sequence
  primer
ttaccacttcacaggaatggg

SEQ ID NO: 83326 - DNA, 38 bp, Artificial Sequence
  primer
gtaaaacgacggccagtagctgtatctgcccaccagtc

SEQ ID NO: 83327 - DNA, 20 bp, Artificial Sequence
  primer
ctgcctgttgctggagtttc

SEQ ID NO: 83328 - DNA, 21 bp, Artificial Sequence
  primer
gaaatgagtcagtgcagaggc

SEQ ID NO: 83329 - DNA, 21 bp, Artificial Sequence
  primer
gtagcggtagtaggcagcagg

SEQ ID NO: 83330 - DNA, 38 bp, Artificial Sequence
  primer
gtaaaacgacggccagttacagccaggttgcagatgtc

SEQ ID NO: 83331 - DNA, 21 bp, Artificial Sequence
  primer
ttcaccttatggcactggatg

SEQ ID NO: 83332 - DNA, 38 bp, Artificial Sequence
  primer
gtaaaacgacggccagtctctccatcaccctccttcag

SEQ ID NO: 83333 - DNA, 38 bp, Artificial Sequence
  primer
gtaaaacgacggccagttccaactgtgtttagcgaagg

SEQ ID NO: 83334 - DNA, 38 bp, Artificial Sequence
  primer
gtaaaacgacggccagtcagacaggtaggcaaaggctc

SEQ ID NO: 83335 - DNA, 21 bp, Artificial Sequence
  primer
agcctacaatcctgggtaggg

SEQ ID NO: 83336 - DNA, 21 bp, Artificial Sequence
  primer
tactagctttgccagacccac

SEQ ID NO: 83337 - DNA, 39 bp, Artificial Sequence
  primer
gtaaaacgacggccagtaccctgatccctcactctgtag

SEQ ID NO: 83338 - DNA, 19 bp, Artificial Sequence
  primer
gcttgcccacaagtgtcag

SEQ ID NO: 83339 - DNA, 38 bp, Artificial Sequence
  primer
gtaaaacgacggccagtcttgaagaggactgatgtgcg

SEQ ID NO: 83340 - DNA, 38 bp, Artificial Sequence
  primer
gtaaaacgacggccagtactattgctgtccaatggtgc

SEQ ID NO: 83341 - DNA, 38 bp, Artificial Sequence
  primer
gtaaaacgacggccagttcaggaaatagcaggagtggg

SEQ ID NO: 83342 - DNA, 36 bp, Artificial Sequence
  primer
gtaaaacgacggccagtggagctcaaggactggctg

SEQ ID NO: 83343 - DNA, 21 bp, Artificial Sequence
  primer
tctgactcccaccacactctg

SEQ ID NO: 83344 - DNA, 21 bp, Artificial Sequence
  primer
acacctcactagcacagcacc

SEQ ID NO: 83345 - DNA, 20 bp, Artificial Sequence
  primer
agtccctggcctaccatgag

SEQ ID NO: 83346 - DNA, 38 bp, Artificial Sequence
  primer
gtaaaacgacggccagtaagacccgagctgagcatatc

SEQ ID NO: 83347 - DNA, 38 bp, Artificial Sequence
  primer
gtaaaacgacggccagttgtggagatgcctggacctac

SEQ ID NO: 83348 - DNA, 21 bp, Artificial Sequence
  primer
ccacgggtccagagtaaacag

SEQ ID NO: 83349 - DNA, 21 bp, Artificial Sequence
  primer
ggaagcaatgacaaagatccc

SEQ ID NO: 83350 - DNA, 23 bp, Artificial Sequence
  primer
gatgtttacacaacctggcctaa

SEQ ID NO: 83351 - DNA, 20 bp, Artificial Sequence
  primer
ccttagccctgccaagtctc

SEQ ID NO: 83352 - DNA, 38 bp, Artificial Sequence
  primer
gtaaaacgacggccagtgcaacataagagcatgatggg

SEQ ID NO: 83353 - DNA, 38 bp, Artificial Sequence
  primer
gtaaaacgacggccagtgttcacaaccctaccctcctc

SEQ ID NO: 83354 - DNA, 21 bp, Artificial Sequence
  primer
aaagcaggaggattgcttgag

SEQ ID NO: 83355 - DNA, 38 bp, Artificial Sequence
  primer
gtaaaacgacggccagtgacacaacagggctgtgactg

SEQ ID NO: 83356 - DNA, 22 bp, Artificial Sequence
  primer
tttgattctttctgccactgag

SEQ ID NO: 83357 - DNA, 39 bp, Artificial Sequence
  primer
gtaaaacgacggccagtcgctttggctaacacataccac

SEQ ID NO: 83358 - DNA, 21 bp, Artificial Sequence
  primer
aaattgccaacagtctcccac

SEQ ID NO: 83359 - DNA, 21 bp, Artificial Sequence
  primer
atcaagctcagattgcgtgac

SEQ ID NO: 83360 - DNA, 21 bp, Artificial Sequence
  primer
cccaaatcgaggtgtcttcag

SEQ ID NO: 83361 - DNA, 20 bp, Artificial Sequence
  primer
acaggttgtgtgtggaaggc

SEQ ID NO: 83362 - DNA, 38 bp, Artificial Sequence
  primer
gtaaaacgacggccagtaatcatttgggttgaaggtgc

SEQ ID NO: 83363 - DNA, 21 bp, Artificial Sequence
  primer
aacaaacaaacaggcacgttg

SEQ ID NO: 83364 - DNA, 21 bp, Artificial Sequence
  primer
acacaccaacagaagtgagcc

SEQ ID NO: 83365 - DNA, 39 bp, Artificial Sequence
  primer
gtaaaacgacggccagtcaatttcaacttctcctccgtg

SEQ ID NO: 83366 - DNA, 21 bp, Artificial Sequence
  primer
accggagcctatgctcataac

SEQ ID NO: 83367 - DNA, 20 bp, Artificial Sequence
  primer
gtcagcaacaggaggctcag

SEQ ID NO: 83368 - DNA, 38 bp, Artificial Sequence
  primer
gtaaaacgacggccagtggacaccatacacctgcacac

SEQ ID NO: 83369 - DNA, 39 bp, Artificial Sequence
  primer
gtaaaacgacggccagtcccaagtcccttctctatgagg

SEQ ID NO: 83370 - DNA, 21 bp, Artificial Sequence
  primer
gacatgtgggtgttcgatgag

SEQ ID NO: 83371 - DNA, 38 bp, Artificial Sequence
  primer
gtaaaacgacggccagtgtttctggagaagtcccaccc

SEQ ID NO: 83372 - DNA, 38 bp, Artificial Sequence
  primer
gtaaaacgacggccagttcaatgggataaaggtttggg

SEQ ID NO: 83373 - DNA, 21 bp, Artificial Sequence
  primer
acctctggacacgcataatgg

SEQ ID NO: 83374 - DNA, 39 bp, Artificial Sequence
  primer
gtaaaacgacggccagtgaaggccagttgtgacttcatc

SEQ ID NO: 83375 - DNA, 38 bp, Artificial Sequence
  primer
gtaaaacgacggccagtagatgacctgaggatggaagg

SEQ ID NO: 83376 - DNA, 20 bp, Artificial Sequence
  primer
caggttctggaaacccatcc

SEQ ID NO: 83377 - DNA, 37 bp, Artificial Sequence
  primer
gtaaaacgacggccagtcagccgcttctactgctttg

SEQ ID NO: 83378 - DNA, 20 bp, Artificial Sequence
  primer
atgagaggccagggttcctc

SEQ ID NO: 83379 - DNA, 39 bp, Artificial Sequence
  primer
gtaaaacgacggccagtcaagcagtctaaagctggaagc

SEQ ID NO: 83380 - DNA, 38 bp, Artificial Sequence
  primer
gtaaaacgacggccagtaaggacacagcacatttgagg

SEQ ID NO: 83381 - DNA, 38 bp, Artificial Sequence
  primer
gtaaaacgacggccagtaaatactttggaggccttggg

SEQ ID NO: 83382 - DNA, 21 bp, Artificial Sequence
  primer
cacattaggactcggcagttc

SEQ ID NO: 83383 - DNA, 38 bp, Artificial Sequence
  primer
gtaaaacgacggccagtggttggaggagggttaggaag

SEQ ID NO: 83384 - DNA, 22 bp, Artificial Sequence
  primer
cctatgctaaggtggttagccc

SEQ ID NO: 83385 - DNA, 21 bp, Artificial Sequence
  primer
gaacaccatttcctcctcctg

SEQ ID NO: 83386 - DNA, 21 bp, Artificial Sequence
  primer
cagctacgacaatggtgaagg

SEQ ID NO: 83387 - DNA, 23 bp, Artificial Sequence
  primer
catgttccttgggccttatttac

SEQ ID NO: 83388 - DNA, 35 bp, Artificial Sequence
  primer
gtaaaacgacggccagtacaaccttggctcccacc

SEQ ID NO: 83389 - DNA, 21 bp, Artificial Sequence
  primer
tttggtccagaagcagagacc

SEQ ID NO: 83390 - DNA, 38 bp, Artificial Sequence
  primer
gtaaaacgacggccagtacctcggaatagcaccatagg

SEQ ID NO: 83391 - DNA, 21 bp, Artificial Sequence
  primer
ctctcagtccactggctcctc

SEQ ID NO: 83392 - DNA, 35 bp, Artificial Sequence
  primer
gtaaaacgacggccagtgcagcctagcagcacctg

SEQ ID NO: 83393 - DNA, 21 bp, Artificial Sequence
  primer
ctgtcgcaagttgtcatcgtc

SEQ ID NO: 83394 - DNA, 21 bp, Artificial Sequence
  primer
tcacccacacctgaacacaag

SEQ ID NO: 83395 - DNA, 20 bp, Artificial Sequence
  primer
ccttcatcctgccactctcc

SEQ ID NO: 83396 - DNA, 21 bp, Artificial Sequence
  primer
tctcctggttctccctacagc

SEQ ID NO: 83397 - DNA, 19 bp, Artificial Sequence
  primer
gaaggtcaggccagacagc

SEQ ID NO: 83398 - DNA, 19 bp, Artificial Sequence
  primer
atgggtagcgatgagccag

SEQ ID NO: 83399 - DNA, 19 bp, Artificial Sequence
  primer
atgggcaggaggattagcc

SEQ ID NO: 83400 - DNA, 35 bp, Artificial Sequence
  primer
gtaaaacgacggccagtcggactggtctggcactg

SEQ ID NO: 83401 - DNA, 38 bp, Artificial Sequence
  primer
gtaaaacgacggccagtacttcagagactcagtggccg

SEQ ID NO: 83402 - DNA, 21 bp, Artificial Sequence
  primer
ctacgtgaggaggctggattc

SEQ ID NO: 83403 - DNA, 37 bp, Artificial Sequence
  primer
gtaaaacgacggccagtctccaccaccctcttgaagc

SEQ ID NO: 83404 - DNA, 21 bp, Artificial Sequence
  primer
gttctacggtggacaagaggc

SEQ ID NO: 83405 - DNA, 37 bp, Artificial Sequence
  primer
gtaaaacgacggccagtgctgctcctggtagaggatg

SEQ ID NO: 83406 - DNA, 36 bp, Artificial Sequence
  primer
gtaaaacgacggccagtaccaggcaggctgttcttg

SEQ ID NO: 83407 - DNA, 38 bp, Artificial Sequence
  primer
gtaaaacgacggccagtaggcttcctctcgcttagtcc

SEQ ID NO: 83408 - DNA, 18 bp, Artificial Sequence
  primer
gagagcccagggatttgg

SEQ ID NO: 83409 - DNA, 21 bp, Artificial Sequence
  primer
ccctcctgtctctctccacac

SEQ ID NO: 83410 - DNA, 21 bp, Artificial Sequence
  primer
aagagacaccaagaagcccag

SEQ ID NO: 83411 - DNA, 21 bp, Artificial Sequence
  primer
cggaataagggtcatgctttc

SEQ ID NO: 83412 - DNA, 20 bp, Artificial Sequence
  primer
gtttcatgtcccgctctctg

SEQ ID NO: 83413 - DNA, 38 bp, Artificial Sequence
  primer
gtaaaacgacggccagtatcacacggtagactgcatgg

SEQ ID NO: 83414 - DNA, 21 bp, Artificial Sequence
  primer
gttataacagcaagggcaggg

SEQ ID NO: 83415 - DNA, 20 bp, Artificial Sequence
  primer
ccacttgcctgaagttctgc

SEQ ID NO: 83416 - DNA, 21 bp, Artificial Sequence
  primer
cacaagaagcggacctctacc

SEQ ID NO: 83417 - DNA, 37 bp, Artificial Sequence
  primer
gtaaaacgacggccagtggtagggaaagccaagaagc

SEQ ID NO: 83418 - DNA, 36 bp, Artificial Sequence
  primer
gtaaaacgacggccagtgtctggttccctcccaacc

SEQ ID NO: 83419 - DNA, 35 bp, Artificial Sequence
  primer
gtaaaacgacggccagtaggagggatggtgatggg

SEQ ID NO: 83420 - DNA, 38 bp, Artificial Sequence
  primer
gtaaaacgacggccagtcccgagacacacagaattcac

SEQ ID NO: 83421 - DNA, 38 bp, Artificial Sequence
  primer
gtaaaacgacggccagtatgcgactactgcatgctttg

SEQ ID NO: 83422 - DNA, 20 bp, Artificial Sequence
  primer
cctcacccacagactccacc

SEQ ID NO: 83423 - DNA, 21 bp, Artificial Sequence
  primer
acgtgtatacccactccaggg

SEQ ID NO: 83424 - DNA, 22 bp, Artificial Sequence
  primer
gcttggtctcaatttggagttg

SEQ ID NO: 83425 - DNA, 21 bp, Artificial Sequence
  primer
attggcatagacggtttccag

SEQ ID NO: 83426 - DNA, 20 bp, Artificial Sequence
  primer
ccctgggcactgtgatgtag

SEQ ID NO: 83427 - DNA, 20 bp, Artificial Sequence
  primer
acagaagaacgacacgtccg

SEQ ID NO: 83428 - DNA, 21 bp, Artificial Sequence
  primer
acagagagggagattcccagg

SEQ ID NO: 83429 - DNA, 38 bp, Artificial Sequence
  primer
gtaaaacgacggccagtcacaggctggttctgattgtg

SEQ ID NO: 83430 - DNA, 21 bp, Artificial Sequence
  primer
tagcctcttgaagcatcaccc

SEQ ID NO: 83431 - DNA, 21 bp, Artificial Sequence
  primer
ttctagttctcggtcccaacc

SEQ ID NO: 83432 - DNA, 38 bp, Artificial Sequence
  primer
gtaaaacgacggccagtgggtaggacagactccaggtg

SEQ ID NO: 83433 - DNA, 21 bp, Artificial Sequence
  primer
gactcccgaacttcacaaagg

SEQ ID NO: 83434 - DNA, 19 bp, Artificial Sequence
  primer
ttcccatcaggtcctttcg

SEQ ID NO: 83435 - DNA, 21 bp, Artificial Sequence
  primer
tctttgagaggaaagatgggc

SEQ ID NO: 83436 - DNA, 35 bp, Artificial Sequence
  primer
gtaaaacgacggccagtgtctgagagtcaggccgc

SEQ ID NO: 83437 - DNA, 19 bp, Artificial Sequence
  primer
agacagcagggaaggaggg

SEQ ID NO: 83438 - DNA, 37 bp, Artificial Sequence
  primer
gtaaaacgacggccagtttgaccaattcagcccagtc

SEQ ID NO: 83439 - DNA, 21 bp, Artificial Sequence
  primer
tgaagaggttacagccttcgg

SEQ ID NO: 83440 - DNA, 21 bp, Artificial Sequence
  primer
ggcaatcgtagggtctgtagg

SEQ ID NO: 83441 - DNA, 38 bp, Artificial Sequence
  primer
gtaaaacgacggccagtaaaggaggaccatcaaagctg

SEQ ID NO: 83442 - DNA, 21 bp, Artificial Sequence
  primer
ctgcaagaacctagcgatcag

SEQ ID NO: 83443 - DNA, 38 bp, Artificial Sequence
  primer
gtaaaacgacggccagttcctccctccacacttaaagc

SEQ ID NO: 83444 - DNA, 21 bp, Artificial Sequence
  primer
ctacgggtacccagatcgaag

SEQ ID NO: 83445 - DNA, 37 bp, Artificial Sequence
  primer
gtaaaacgacggccagtagctctagaacctcgtcggc

SEQ ID NO: 83446 - DNA, 26 bp, Artificial Sequence
  primer
agcaggaatctttgagatctctattc

SEQ ID NO: 83447 - DNA, 39 bp, Artificial Sequence
  primer
gtaaaacgacggccagttggactagccatgaaactcctc

SEQ ID NO: 83448 - DNA, 35 bp, Artificial Sequence
  primer
gtaaaacgacggccagtcaatgccatgcagtctgg

SEQ ID NO: 83449 - DNA, 21 bp, Artificial Sequence
  primer
cagggtaggagcaaagtccag

SEQ ID NO: 83450 - DNA, 22 bp, Artificial Sequence
  primer
cagagcgagactctgtctcaaa

SEQ ID NO: 83451 - DNA, 27 bp, Artificial Sequence
  primer
tcaaccttacacattacttagagtcca

SEQ ID NO: 83452 - DNA, 39 bp, Artificial Sequence
  primer
gtaaaacgacggccagtccaatggaatcatctgacaatc

SEQ ID NO: 83453 - DNA, 38 bp, Artificial Sequence
  primer
gtaaaacgacggccagttagctgcatctgagggaatgg

SEQ ID NO: 83454 - DNA, 38 bp, Artificial Sequence
  primer
gtaaaacgacggccagttcagcaatgttcctgtcatcc

SEQ ID NO: 83455 - DNA, 38 bp, Artificial Sequence
  primer
gtaaaacgacggccagtcaggtatagcgcgtgtcatcc

SEQ ID NO: 83456 - DNA, 21 bp, Artificial Sequence
  primer
atcttgaaaggctcaactggc

SEQ ID NO: 83457 - DNA, 20 bp, Artificial Sequence
  primer
tgtgatctgcacagccaaac

SEQ ID NO: 83458 - DNA, 23 bp, Artificial Sequence
  primer
ccagagtttagcaggaggcatac

SEQ ID NO: 83459 - DNA, 27 bp, Artificial Sequence
  primer
acaaatgatgagattatgagacttcaa

SEQ ID NO: 83460 - DNA, 27 bp, Artificial Sequence
  primer
acgaagtgaactcactggaataatatg

SEQ ID NO: 83461 - DNA, 22 bp, Artificial Sequence
  primer
cttaacacacaactgctgcctc

SEQ ID NO: 83462 - DNA, 21 bp, Artificial Sequence
  primer
acccttaaacccaaatggatg

SEQ ID NO: 83463 - DNA, 36 bp, Artificial Sequence
  primer
gtaaaacgacggccagtctcggcttccagccaatac

SEQ ID NO: 83464 - DNA, 30 bp, Artificial Sequence
  primer
caaattataatgaaacattctagcctctac

SEQ ID NO: 83465 - DNA, 23 bp, Artificial Sequence
  primer
tgagcagagcagataagacactg

SEQ ID NO: 83466 - DNA, 27 bp, Artificial Sequence
  primer
tcatcttatcttggatacacaatcaac

SEQ ID NO: 83467 - DNA, 22 bp, Artificial Sequence
  primer
ttctctcccattgagcactgta

SEQ ID NO: 83468 - DNA, 21 bp, Artificial Sequence
  primer
gccacacacaatgtgcataag

SEQ ID NO: 83469 - DNA, 23 bp, Artificial Sequence
  primer
aaacaagggaagaactgagcatt

SEQ ID NO: 83470 - DNA, 21 bp, Artificial Sequence
  primer
aacttcatctggaaaggcagc

SEQ ID NO: 83471 - DNA, 43 bp, Artificial Sequence
  primer
gtaaaacgacggccagtaactgaagtgtacagtgagaaactgc

SEQ ID NO: 83472 - DNA, 23 bp, Artificial Sequence
  primer
tctcagcctttcttctctatccc

SEQ ID NO: 83473 - DNA, 23 bp, Artificial Sequence
  primer
tgctgtgattcttacctcctctg

SEQ ID NO: 83474 - DNA, 38 bp, Artificial Sequence
  primer
gtaaaacgacggccagtaagacgctggtattcagccag

SEQ ID NO: 83475 - DNA, 21 bp, Artificial Sequence
  primer
tgggtacccttactgcatcac

SEQ ID NO: 83476 - DNA, 46 bp, Artificial Sequence
  primer
gtaaaacgacggccagttcacactaatcacactactactttcacaa

SEQ ID NO: 83477 - DNA, 22 bp, Artificial Sequence
  primer
ggagcagagttagaaggcagtc

SEQ ID NO: 83478 - DNA, 21 bp, Artificial Sequence
  primer
atgcatgcctaacaagcaatc

SEQ ID NO: 83479 - DNA, 43 bp, Artificial Sequence
  primer
gtaaaacgacggccagtgcataagagtttaggaaacaaacaaa

SEQ ID NO: 83480 - DNA, 41 bp, Artificial Sequence
  primer
gtaaaacgacggccagttgttctttgcactataaaccatgc

SEQ ID NO: 83481 - DNA, 25 bp, Artificial Sequence
  primer
ccagttatgaatatgaaatgccatc

SEQ ID NO: 83482 - DNA, 37 bp, Artificial Sequence
  primer
gtaaaacgacggccagtcctagtgccacctccacctc

SEQ ID NO: 83483 - DNA, 38 bp, Artificial Sequence
  primer
gtaaaacgacggccagtttcatcatctgcaatacgtgc

SEQ ID NO: 83484 - DNA, 22 bp, Artificial Sequence
  primer
cctggtaaattccctgcagtag

SEQ ID NO: 83485 - DNA, 41 bp, Artificial Sequence
  primer
gtaaaacgacggccagtcaacttgctttgtagatttcctgg

SEQ ID NO: 83486 - DNA, 19 bp, Artificial Sequence
  primer
ctggaagcacacctggctc

SEQ ID NO: 83487 - DNA, 21 bp, Artificial Sequence
  primer
gcccggccagtctcttattac

SEQ ID NO: 83488 - DNA, 37 bp, Artificial Sequence
  primer
gtaaaacgacggccagtggccagtcttgaactcctgg

SEQ ID NO: 83489 - DNA, 21 bp, Artificial Sequence
  primer
tcctgccgctagcactcttac

SEQ ID NO: 83490 - DNA, 38 bp, Artificial Sequence
  primer
gtaaaacgacggccagtaaacccaagtcagctctgctc

SEQ ID NO: 83491 - DNA, 21 bp, Artificial Sequence
  primer
caggaccctcatgccttaatc

SEQ ID NO: 83492 - DNA, 21 bp, Artificial Sequence
  primer
gcctttcctttgacccttgtc

SEQ ID NO: 83493 - DNA, 21 bp, Artificial Sequence
  primer
tgatctggtttctcctcctcg

SEQ ID NO: 83494 - DNA, 37 bp, Artificial Sequence
  primer
gtaaaacgacggccagtatcttcccaggagcctgaac

SEQ ID NO: 83495 - DNA, 20 bp, Artificial Sequence
  primer
acacagggtgttcaaatggc

SEQ ID NO: 83496 - DNA, 36 bp, Artificial Sequence
  primer
gtaaaacgacggccagtgccgggaggaacctctagt

SEQ ID NO: 83497 - DNA, 35 bp, Artificial Sequence
  primer
gtaaaacgacggccagttactgagcaggagccggg

SEQ ID NO: 83498 - DNA, 20 bp, Artificial Sequence
  primer
ttgttctcacggaccacagg

SEQ ID NO: 83499 - DNA, 21 bp, Artificial Sequence
  primer
agaagctcccttcctttgtcc

SEQ ID NO: 83500 - DNA, 21 bp, Artificial Sequence
  primer
gagagagaggagcctggaacc

SEQ ID NO: 83501 - DNA, 35 bp, Artificial Sequence
  primer
gtaaaacgacggccagtacccagtctggagggctg

SEQ ID NO: 83502 - DNA, 35 bp, Artificial Sequence
  primer
gtaaaacgacggccagtcccatcaactccctgcct

SEQ ID NO: 83503 - DNA, 21 bp, Artificial Sequence
  primer
ccgcaagtcactctctccaag

SEQ ID NO: 83504 - DNA, 36 bp, Artificial Sequence
  primer
gtaaaacgacggccagtacctggctcaggagttccc

SEQ ID NO: 83505 - DNA, 19 bp, Artificial Sequence
  primer
gtcgaacctcgctgtccac

SEQ ID NO: 83506 - DNA, 21 bp, Artificial Sequence
  primer
ctggtggtcaagggaaatgac

SEQ ID NO: 83507 - DNA, 21 bp, Artificial Sequence
  primer
ccgaagagcttaccagtgagg

SEQ ID NO: 83508 - DNA, 38 bp, Artificial Sequence
  primer
gtaaaacgacggccagttctggttcccatgacactcac

SEQ ID NO: 83509 - DNA, 38 bp, Artificial Sequence
  primer
gtaaaacgacggccagtaagtgaatgggactgacctcc

SEQ ID NO: 83510 - DNA, 38 bp, Artificial Sequence
  primer
gtaaaacgacggccagtcacctgtcctgagcctacagc

SEQ ID NO: 83511 - DNA, 21 bp, Artificial Sequence
  primer
gcagagtcttcgtcttcctcc

SEQ ID NO: 83512 - DNA, 38 bp, Artificial Sequence
  primer
gtaaaacgacggccagtctgctgtcctccacatagtcg

SEQ ID NO: 83513 - DNA, 20 bp, Artificial Sequence
  primer
ctttctgggtgccatgtttg

SEQ ID NO: 83514 - DNA, 38 bp, Artificial Sequence
  primer
gtaaaacgacggccagtgaggcaggcaatgtagaggag

SEQ ID NO: 83515 - DNA, 37 bp, Artificial Sequence
  primer
gtaaaacgacggccagtcgaagcagctcctcttcctc

SEQ ID NO: 83516 - DNA, 38 bp, Artificial Sequence
  primer
gtaaaacgacggccagtgaaggtgggcaggttgtactc

SEQ ID NO: 83517 - DNA, 21 bp, Artificial Sequence
  primer
ttgatattcgaaggagcccag

SEQ ID NO: 83518 - DNA, 21 bp, Artificial Sequence
  primer
atgctgagtgacacggacatc

SEQ ID NO: 83519 - DNA, 37 bp, Artificial Sequence
  primer
gtaaaacgacggccagtatatatcctcgtggcagccc

SEQ ID NO: 83520 - DNA, 38 bp, Artificial Sequence
  primer
gtaaaacgacggccagttaccctgggctaccataggtg

SEQ ID NO: 83521 - DNA, 21 bp, Artificial Sequence
  primer
ggctgggtttcagtaggtgag

SEQ ID NO: 83522 - DNA, 38 bp, Artificial Sequence
  primer
gtaaaacgacggccagttccagggcaagaccatacttc

SEQ ID NO: 83523 - DNA, 21 bp, Artificial Sequence
  primer
cagaggagctacttggttggg

SEQ ID NO: 83524 - DNA, 20 bp, Artificial Sequence
  primer
agtgtggtcacagtgcctgc

SEQ ID NO: 83525 - DNA, 21 bp, Artificial Sequence
  primer
catctgccatgctcttctcag

SEQ ID NO: 83526 - DNA, 21 bp, Artificial Sequence
  primer
atcctctgggcatggtagttg

SEQ ID NO: 83527 - DNA, 38 bp, Artificial Sequence
  primer
gtaaaacgacggccagtaggtctgtaggatgacgcagg

SEQ ID NO: 83528 - DNA, 21 bp, Artificial Sequence
  primer
gctggtactgcacaaggtcag

SEQ ID NO: 83529 - DNA, 39 bp, Artificial Sequence
  primer
gtaaaacgacggccagtgtcgagtagatcatgccatcag

SEQ ID NO: 83530 - DNA, 21 bp, Artificial Sequence
  primer
cagatagacaggcccttctgc

SEQ ID NO: 83531 - DNA, 38 bp, Artificial Sequence
  primer
gtaaaacgacggccagtctctcctcctgtgatgcttcc

SEQ ID NO: 83532 - DNA, 21 bp, Artificial Sequence
  primer
cacatggtgcttgatggtctg

SEQ ID NO: 83533 - DNA, 19 bp, Artificial Sequence
  primer
aggaaagggagccttctgc

SEQ ID NO: 83534 - DNA, 38 bp, Artificial Sequence
  primer
gtaaaacgacggccagtgcagtgacatgtctgaggcag

SEQ ID NO: 83535 - DNA, 38 bp, Artificial Sequence
  primer
gtaaaacgacggccagtactcaagaggtagcggctctc

SEQ ID NO: 83536 - DNA, 20 bp, Artificial Sequence
  primer
cacactgcagtcagcactcc

SEQ ID NO: 83537 - DNA, 21 bp, Artificial Sequence
  primer
gagcagtcactgatggtctgg

SEQ ID NO: 83538 - DNA, 37 bp, Artificial Sequence
  primer
gtaaaacgacggccagtatggcagttggccctacaag

SEQ ID NO: 83539 - DNA, 20 bp, Artificial Sequence
  primer
ctggtacccaatctccaggg

SEQ ID NO: 83540 - DNA, 19 bp, Artificial Sequence
  primer
cagccgtgaagtgcttctg

SEQ ID NO: 83541 - DNA, 21 bp, Artificial Sequence
  primer
cctgttcccatacctggctac

SEQ ID NO: 83542 - DNA, 37 bp, Artificial Sequence
  primer
gtaaaacgacggccagtgggagcatctgctcattgac

SEQ ID NO: 83543 - DNA, 21 bp, Artificial Sequence
  primer
cagctggttgagctcactgtc

SEQ ID NO: 83544 - DNA, 19 bp, Artificial Sequence
  primer
aggagctgggtacgtgctg

SEQ ID NO: 83545 - DNA, 38 bp, Artificial Sequence
  primer
gtaaaacgacggccagtgatcacctcatagttggtggg

SEQ ID NO: 83546 - DNA, 39 bp, Artificial Sequence
  primer
gtaaaacgacggccagttggctatcaggagcagtagagg

SEQ ID NO: 83547 - DNA, 38 bp, Artificial Sequence
  primer
gtaaaacgacggccagtcccatgcctgtagtcactgtc

SEQ ID NO: 83548 - DNA, 39 bp, Artificial Sequence
  primer
gtaaaacgacggccagtttgctgctcatacacgttcttc

SEQ ID NO: 83549 - DNA, 38 bp, Artificial Sequence
  primer
gtaaaacgacggccagttacttagggatgagggcttgg

SEQ ID NO: 83550 - DNA, 38 bp, Artificial Sequence
  primer
gtaaaacgacggccagtattaccttcgctgtcggaaac

SEQ ID NO: 83551 - DNA, 38 bp, Artificial Sequence
  primer
gtaaaacgacggccagtaagccatgcaaagaaaccaag

SEQ ID NO: 83552 - DNA, 21 bp, Artificial Sequence
  primer
gagcccttcttgctgtcagag

SEQ ID NO: 83553 - DNA, 21 bp, Artificial Sequence
  primer
agggtatttgcctggatgatg

SEQ ID NO: 83554 - DNA, 21 bp, Artificial Sequence
  primer
atgcatgggagctctgcttac

SEQ ID NO: 83555 - DNA, 38 bp, Artificial Sequence
  primer
gtaaaacgacggccagttagctaagattctgcccatgc

SEQ ID NO: 83556 - DNA, 21 bp, Artificial Sequence
  primer
gggcaccttctcagggattag

SEQ ID NO: 83557 - DNA, 20 bp, Artificial Sequence
  primer
ggagaacaactgggcatcag

SEQ ID NO: 83558 - DNA, 38 bp, Artificial Sequence
  primer
gtaaaacgacggccagtggtactgaaccagccgaagac

SEQ ID NO: 83559 - DNA, 20 bp, Artificial Sequence
  primer
gatggatggatgggacagac

SEQ ID NO: 83560 - DNA, 38 bp, Artificial Sequence
  primer
gtaaaacgacggccagtctcgtccctgacaagacaaag

SEQ ID NO: 83561 - DNA, 37 bp, Artificial Sequence
  primer
gtaaaacgacggccagttccactgccctctccttacc

SEQ ID NO: 83562 - DNA, 38 bp, Artificial Sequence
  primer
gtaaaacgacggccagtaaactgaggccctgtgatgtc

SEQ ID NO: 83563 - DNA, 21 bp, Artificial Sequence
  primer
catttccaccctcctcatacc

SEQ ID NO: 83564 - DNA, 22 bp, Artificial Sequence
  primer
aagcagttctctaagccaaggg

SEQ ID NO: 83565 - DNA, 21 bp, Artificial Sequence
  primer
atcatctcagaagcacgggtc

SEQ ID NO: 83566 - DNA, 38 bp, Artificial Sequence
  primer
gtaaaacgacggccagtctgcaagtccagcactacacc

SEQ ID NO: 83567 - DNA, 20 bp, Artificial Sequence
  primer
ggttatgggccctgtttctc

SEQ ID NO: 83568 - DNA, 21 bp, Artificial Sequence
  primer
gtctccacactcacctctccc

SEQ ID NO: 83569 - DNA, 38 bp, Artificial Sequence
  primer
gtaaaacgacggccagtatgtgtgctgcctgatgtttc

SEQ ID NO: 83570 - DNA, 22 bp, Artificial Sequence
  primer
aggacttggagaggatcaagtg

SEQ ID NO: 83571 - DNA, 23 bp, Artificial Sequence
  primer
ggcccagactctgaatgactatg

SEQ ID NO: 83572 - DNA, 20 bp, Artificial Sequence
  primer
cagaagcacgcatgagatgg

SEQ ID NO: 83573 - DNA, 38 bp, Artificial Sequence
  primer
gtaaaacgacggccagtcaaagaaggctgtcatttccc

SEQ ID NO: 83574 - DNA, 21 bp, Artificial Sequence
  primer
agctgagagccatcaataccc

SEQ ID NO: 83575 - DNA, 21 bp, Artificial Sequence
  primer
ccaaaccagaatccaatgagc

SEQ ID NO: 83576 - DNA, 21 bp, Artificial Sequence
  primer
tgactcccaatgctttgtgtc

SEQ ID NO: 83577 - DNA, 19 bp, Artificial Sequence
  primer
cctgggtcagatttctggg

SEQ ID NO: 83578 - DNA, 37 bp, Artificial Sequence
  primer
gtaaaacgacggccagtactctgggacagaacctccc

SEQ ID NO: 83579 - DNA, 38 bp, Artificial Sequence
  primer
gtaaaacgacggccagtcaaaggagatcctgggtcttg

SEQ ID NO: 83580 - DNA, 38 bp, Artificial Sequence
  primer
gtaaaacgacggccagtagacttcggagcctctgcttc

SEQ ID NO: 83581 - DNA, 21 bp, Artificial Sequence
  primer
aacagctctaacgtgccaagg

SEQ ID NO: 83582 - DNA, 21 bp, Artificial Sequence
  primer
gattcaaatttgtgccacagg

SEQ ID NO: 83583 - DNA, 40 bp, Artificial Sequence
  primer
gtaaaacgacggccagttcatttcctgacaaagctgtacc

SEQ ID NO: 83584 - DNA, 21 bp, Artificial Sequence
  primer
acctcccattcatagcatccc

SEQ ID NO: 83585 - DNA, 38 bp, Artificial Sequence
  primer
gtaaaacgacggccagttggcactaagcagcaatgaac

SEQ ID NO: 83586 - DNA, 44 bp, Artificial Sequence
  primer
gtaaaacgacggccagtatgtttctataaatcaagcagacacag

SEQ ID NO: 83587 - DNA, 38 bp, Artificial Sequence
  primer
gtaaaacgacggccagtcaagctcctgacctcgtgata

SEQ ID NO: 83588 - DNA, 38 bp, Artificial Sequence
  primer
gtaaaacgacggccagtattgctcttgacattgttccc

SEQ ID NO: 83589 - DNA, 39 bp, Artificial Sequence
  primer
gtaaaacgacggccagtcacggcacatactcgttacttc

SEQ ID NO: 83590 - DNA, 38 bp, Artificial Sequence
  primer
gtaaaacgacggccagtctggtgccacaacctacagac

SEQ ID NO: 83591 - DNA, 21 bp, Artificial Sequence
  primer
agaatctacggccatttcgtc

SEQ ID NO: 83592 - DNA, 18 bp, Artificial Sequence
  primer
gcatgcatcagagggctg

SEQ ID NO: 83593 - DNA, 21 bp, Artificial Sequence
  primer
acggtagtctttggcatctcc

SEQ ID NO: 83594 - DNA, 21 bp, Artificial Sequence
  primer
ggttaccataccactaggccc

SEQ ID NO: 83595 - DNA, 26 bp, Artificial Sequence
  primer
tgctacatgtaagaagcctagttctc

SEQ ID NO: 83596 - DNA, 26 bp, Artificial Sequence
  primer
tgttaattaaatcacacttaaggcaa

SEQ ID NO: 83597 - DNA, 38 bp, Artificial Sequence
  primer
gtaaaacgacggccagttggagacagcagaggaatctt

SEQ ID NO: 83598 - DNA, 41 bp, Artificial Sequence
  primer
gtaaaacgacggccagtaaatgggagagaaataatcttcaa

SEQ ID NO: 83599 - DNA, 21 bp, Artificial Sequence
  primer
caggctaccaagccacataca

SEQ ID NO: 83600 - DNA, 21 bp, Artificial Sequence
  primer
gccactttgtgttggtactgg

SEQ ID NO: 83601 - DNA, 41 bp, Artificial Sequence
  primer
gtaaaacgacggccagtcactaacatgaactggatttgtgc

SEQ ID NO: 83602 - DNA, 27 bp, Artificial Sequence
  primer
aaacaactctggaagctaatacaactt

SEQ ID NO: 83603 - DNA, 25 bp, Artificial Sequence
  primer
aataaacaggtagaggcatagaggc

SEQ ID NO: 83604 - DNA, 41 bp, Artificial Sequence
  primer
gtaaaacgacggccagtcatcaaagctgtacctttcaaacc

SEQ ID NO: 83605 - DNA, 22 bp, Artificial Sequence
  primer
tttggaacaaggcaggttattt

SEQ ID NO: 83606 - DNA, 36 bp, Artificial Sequence
  primer
gtaaaacgacggccagtgagcctttgtacctggccc

SEQ ID NO: 83607 - DNA, 21 bp, Artificial Sequence
  primer
agtgaaccatgattctgccac

SEQ ID NO: 83608 - DNA, 38 bp, Artificial Sequence
  primer
gtaaaacgacggccagtttcctgggccctttacaatag

SEQ ID NO: 83609 - DNA, 25 bp, Artificial Sequence
  primer
cctcactgattatatcttcccaaag

SEQ ID NO: 83610 - DNA, 21 bp, Artificial Sequence
  primer
ttacctggattggtgttccag

SEQ ID NO: 83611 - DNA, 38 bp, Artificial Sequence
  primer
gtaaaacgacggccagtaattcaccgccaaataccaag

SEQ ID NO: 83612 - DNA, 38 bp, Artificial Sequence
  primer
gtaaaacgacggccagtaaacggtagtacttggcggtg

SEQ ID NO: 83613 - DNA, 38 bp, Artificial Sequence
  primer
gtaaaacgacggccagtgcatctgataaagccaaaggc

SEQ ID NO: 83614 - DNA, 21 bp, Artificial Sequence
  primer
ggcatgatagcttgaacccag

SEQ ID NO: 83615 - DNA, 38 bp, Artificial Sequence
  primer
gtaaaacgacggccagttctgtttgggtggtggaaata

SEQ ID NO: 83616 - DNA, 38 bp, Artificial Sequence
  primer
gtaaaacgacggccagttgcatttgcagatatttagcc

SEQ ID NO: 83617 - DNA, 22 bp, Artificial Sequence
  primer
caaggtttcctatctttctggg

SEQ ID NO: 83618 - DNA, 21 bp, Artificial Sequence
  primer
ccttgtggcaagacactgaag

SEQ ID NO: 83619 - DNA, 38 bp, Artificial Sequence
  primer
gtaaaacgacggccagtcagtgaaacaagagccagcat

SEQ ID NO: 83620 - DNA, 21 bp, Artificial Sequence
  primer
agttgaagaggaaggcgaagc

SEQ ID NO: 83621 - DNA, 38 bp, Artificial Sequence
  primer
gtaaaacgacggccagtgttgaacatggcgtcaaagac

SEQ ID NO: 83622 - DNA, 35 bp, Artificial Sequence
  primer
gtaaaacgacggccagtggtcagaagagcccagcc

SEQ ID NO: 83623 - DNA, 22 bp, Artificial Sequence
  primer
ccatccatggcctctaatacac

SEQ ID NO: 83624 - DNA, 21 bp, Artificial Sequence
  primer
ttctccaacaaggctgacaag

SEQ ID NO: 83625 - DNA, 35 bp, Artificial Sequence
  primer
gtaaaacgacggccagtttgacaaggctggtgtcg

SEQ ID NO: 83626 - DNA, 21 bp, Artificial Sequence
  primer
ggatgcctcagtgacttcttg

SEQ ID NO: 83627 - DNA, 44 bp, Artificial Sequence
  primer
gtaaaacgacggccagtaaacagaactctttatgcttacaatgc

SEQ ID NO: 83628 - DNA, 22 bp, Artificial Sequence
  primer
ggctcagctgtcagtgactctc

SEQ ID NO: 83629 - DNA, 43 bp, Artificial Sequence
  primer
gtaaaacgacggccagtaaatcatgcaaagatttaaataagca

SEQ ID NO: 83630 - DNA, 37 bp, Artificial Sequence
  primer
gtaaaacgacggccagttgaagatgaccagccagtcc

SEQ ID NO: 83631 - DNA, 38 bp, Artificial Sequence
  primer
gtaaaacgacggccagttcagttaatgctgcagggatg

SEQ ID NO: 83632 - DNA, 21 bp, Artificial Sequence
  primer
cttccagacacttccatgcag

SEQ ID NO: 83633 - DNA, 21 bp, Artificial Sequence
  primer
gcttagccctgagagaactgg

SEQ ID NO: 83634 - DNA, 21 bp, Artificial Sequence
  primer
agcagtagaggcagctccttg

SEQ ID NO: 83635 - DNA, 21 bp, Artificial Sequence
  primer
agacatgggaagacctggttg

SEQ ID NO: 83636 - DNA, 38 bp, Artificial Sequence
  primer
gtaaaacgacggccagtttagttctcttggcctcagcc

SEQ ID NO: 83637 - DNA, 21 bp, Artificial Sequence
  primer
cttgtcccactgtttctgcac

SEQ ID NO: 83638 - DNA, 21 bp, Artificial Sequence
  primer
cactgtcccatcttctcccag

SEQ ID NO: 83639 - DNA, 38 bp, Artificial Sequence
  primer
gtaaaacgacggccagtacgacccacttgtgtgatgag

SEQ ID NO: 83640 - DNA, 21 bp, Artificial Sequence
  primer
aatggtcaggatttgactggg

SEQ ID NO: 83641 - DNA, 39 bp, Artificial Sequence
  primer
gtaaaacgacggccagtaaggttcctgatctgcatcaac

SEQ ID NO: 83642 - DNA, 21 bp, Artificial Sequence
  primer
gggtctgggaagaacagtcac

SEQ ID NO: 83643 - DNA, 38 bp, Artificial Sequence
  primer
gtaaaacgacggccagtcagaagttcctggagagacgg

SEQ ID NO: 83644 - DNA, 21 bp, Artificial Sequence
  primer
ctcatcgtcactgtctccgac

SEQ ID NO: 83645 - DNA, 38 bp, Artificial Sequence
  primer
gtaaaacgacggccagtatttcctctgggtagtgcagc

SEQ ID NO: 83646 - DNA, 20 bp, Artificial Sequence
  primer
tcctggctactcactgggtg

SEQ ID NO: 83647 - DNA, 38 bp, Artificial Sequence
  primer
gtaaaacgacggccagtaagtgtcatgcctcaggtcag

SEQ ID NO: 83648 - DNA, 21 bp, Artificial Sequence
  primer
ctgcagacctttcttcccaag

SEQ ID NO: 83649 - DNA, 38 bp, Artificial Sequence
  primer
gtaaaacgacggccagtttaggtctcactcgtgccaac

SEQ ID NO: 83650 - DNA, 20 bp, Artificial Sequence
  primer
agttccgctccaccttcttc

SEQ ID NO: 83651 - DNA, 36 bp, Artificial Sequence
  primer
gtaaaacgacggccagtcccagaaatgcctgtggag

SEQ ID NO: 83652 - DNA, 21 bp, Artificial Sequence
  primer
ctcaccttgaacatgaggtcg

SEQ ID NO: 83653 - DNA, 38 bp, Artificial Sequence
  primer
gtaaaacgacggccagtgcttcatgctttactcgggtc

SEQ ID NO: 83654 - DNA, 37 bp, Artificial Sequence
  primer
gtaaaacgacggccagtgtcctcctcgttgtggtacg

SEQ ID NO: 83655 - DNA, 38 bp, Artificial Sequence
  primer
gtaaaacgacggccagtcatccaggaccaagtctgaac

SEQ ID NO: 83656 - DNA, 42 bp, Artificial Sequence
  primer
gtaaaacgacggccagttgactgattggtgatgagtacattg

SEQ ID NO: 83657 - DNA, 38 bp, Artificial Sequence
  primer
gtaaaacgacggccagtcacaaccctggacgatcagac

SEQ ID NO: 83658 - DNA, 22 bp, Artificial Sequence
  primer
aacgttaacacctcgagacctg

SEQ ID NO: 83659 - DNA, 21 bp, Artificial Sequence
  primer
cactcaggtcaacattcacgg

SEQ ID NO: 83660 - DNA, 38 bp, Artificial Sequence
  primer
gtaaaacgacggccagttggcttgatcacatttgtttg

SEQ ID NO: 83661 - DNA, 21 bp, Artificial Sequence
  primer
accttgaggaagaactcggtg

SEQ ID NO: 83662 - DNA, 18 bp, Artificial Sequence
  primer
ttctggccactgtcccac

SEQ ID NO: 83663 - DNA, 38 bp, Artificial Sequence
  primer
gtaaaacgacggccagtcgttcatcatgctgtacatgg

SEQ ID NO: 83664 - DNA, 38 bp, Artificial Sequence
  primer
gtaaaacgacggccagtgttgataagttcagccgggag

SEQ ID NO: 83665 - DNA, 38 bp, Artificial Sequence
  primer
gtaaaacgacggccagtatagggaaactgaggtgctgg

SEQ ID NO: 83666 - DNA, 20 bp, Artificial Sequence
  primer
cgttggtagaagagcggatg

SEQ ID NO: 83667 - DNA, 38 bp, Artificial Sequence
  primer
gtaaaacgacggccagttttcccagcaaggctagaatg

SEQ ID NO: 83668 - DNA, 22 bp, Artificial Sequence
  primer
agtagctcatgaccaagatggc

SEQ ID NO: 83669 - DNA, 38 bp, Artificial Sequence
  primer
gtaaaacgacggccagtacactgcactctgaggacacg

SEQ ID NO: 83670 - DNA, 21 bp, Artificial Sequence
  primer
actgacaggctgggacacttc

SEQ ID NO: 83671 - DNA, 38 bp, Artificial Sequence
  primer
gtaaaacgacggccagtttgtcccagcagataccattc

SEQ ID NO: 83672 - DNA, 40 bp, Artificial Sequence
  primer
gtaaaacgacggccagttgagatgaaatgcttgaatttgg

SEQ ID NO: 83673 - DNA, 38 bp, Artificial Sequence
  primer
gtaaaacgacggccagtgacactgcatcatttcagcaa

SEQ ID NO: 83674 - DNA, 38 bp, Artificial Sequence
  primer
gtaaaacgacggccagtcactcgtaaatccgaggcttg

SEQ ID NO: 83675 - DNA, 38 bp, Artificial Sequence
  primer
gtaaaacgacggccagtagaaggccttagaaaccatcg

SEQ ID NO: 83676 - DNA, 35 bp, Artificial Sequence
  primer
gtaaaacgacggccagtggcctgccagttgtacgc

SEQ ID NO: 83677 - DNA, 35 bp, Artificial Sequence
  primer
gtaaaacgacggccagtgagcctgaggatgcaggg

SEQ ID NO: 83678 - DNA, 38 bp, Artificial Sequence
  primer
gtaaaacgacggccagttggtgtcagacagggtctacg

SEQ ID NO: 83679 - DNA, 37 bp, Artificial Sequence
  primer
gtaaaacgacggccagttttactaccaggcaggagcc

SEQ ID NO: 83680 - DNA, 38 bp, Artificial Sequence
  primer
gtaaaacgacggccagtctgtgctaggacccaaactcc

SEQ ID NO: 83681 - DNA, 21 bp, Artificial Sequence
  primer
ctcacaagccaggtttcttcc

SEQ ID NO: 83682 - DNA, 21 bp, Artificial Sequence
  primer
atcatccctgagttctccacc

SEQ ID NO: 83683 - DNA, 21 bp, Artificial Sequence
  primer
atcggtgtgaataatctgcgg

SEQ ID NO: 83684 - DNA, 20 bp, Artificial Sequence
  primer
ctggagagtgtgtgctgtgc

SEQ ID NO: 83685 - DNA, 19 bp, Artificial Sequence
  primer
aaggtggcatggagtggac

SEQ ID NO: 83686 - DNA, 46 bp, Artificial Sequence
  primer
gtaaaacgacggccagtgaaacagatttgtgttcaaatacattaca

SEQ ID NO: 83687 - DNA, 21 bp, Artificial Sequence
  primer
aaacatgcactgcctgacatc

SEQ ID NO: 83688 - DNA, 21 bp, Artificial Sequence
  primer
aggtaagcagcaccctctttc

SEQ ID NO: 83689 - DNA, 20 bp, Artificial Sequence
  primer
atcaatcacctcccagcaac

SEQ ID NO: 83690 - DNA, 37 bp, Artificial Sequence
  primer
gtaaaacgacggccagtacacgactggaaacggtgac

SEQ ID NO: 83691 - DNA, 38 bp, Artificial Sequence
  primer
gtaaaacgacggccagttctgaggagcactgaaactgg

SEQ ID NO: 83692 - DNA, 38 bp, Artificial Sequence
  primer
gtaaaacgacggccagtttagaacctgcctaccgcttc

SEQ ID NO: 83693 - DNA, 24 bp, Artificial Sequence
  primer
tgtcacttgaatgttacagcttgc

SEQ ID NO: 83694 - DNA, 20 bp, Artificial Sequence
  primer
agatgagagcttccgtgctg

SEQ ID NO: 83695 - DNA, 38 bp, Artificial Sequence
  primer
gtaaaacgacggccagtttctgtactgcaccgtccttg

SEQ ID NO: 83696 - DNA, 38 bp, Artificial Sequence
  primer
gtaaaacgacggccagtgtgaccctagaaagccaccag

SEQ ID NO: 83697 - DNA, 38 bp, Artificial Sequence
  primer
gtaaaacgacggccagtacagaccctcagcctcatctc

SEQ ID NO: 83698 - DNA, 18 bp, Artificial Sequence
  primer
cagagtggacccggtgtg

SEQ ID NO: 83699 - DNA, 21 bp, Artificial Sequence
  primer
cccaactcacttcatgtctgg

SEQ ID NO: 83700 - DNA, 38 bp, Artificial Sequence
  primer
gtaaaacgacggccagtctcttcagtctggcaaacagc

SEQ ID NO: 83701 - DNA, 21 bp, Artificial Sequence
  primer
atccaaacaggcaaagagtcc

SEQ ID NO: 83702 - DNA, 21 bp, Artificial Sequence
  primer
tggataaagtgtgcacttggg

SEQ ID NO: 83703 - DNA, 37 bp, Artificial Sequence
  primer
gtaaaacgacggccagttcatgtgggcaggaccatac

SEQ ID NO: 83704 - DNA, 38 bp, Artificial Sequence
  primer
gtaaaacgacggccagtgccggaagttcattcatacac

SEQ ID NO: 83705 - DNA, 41 bp, Artificial Sequence
  primer
gtaaaacgacggccagtccaaggaactattattgcaagcac

SEQ ID NO: 83706 - DNA, 19 bp, Artificial Sequence
  primer
tgcagcttgtgggtttcag

SEQ ID NO: 83707 - DNA, 37 bp, Artificial Sequence
  primer
gtaaaacgacggccagtagccaagacgtactgggagg

SEQ ID NO: 83708 - DNA, 21 bp, Artificial Sequence
  primer
gagtccatcagctcctgtgtg

SEQ ID NO: 83709 - DNA, 21 bp, Artificial Sequence
  primer
ctcctctagggtcatggttgg

SEQ ID NO: 83710 - DNA, 38 bp, Artificial Sequence
  primer
gtaaaacgacggccagtcagaccgggaaggtgttactg

SEQ ID NO: 83711 - DNA, 38 bp, Artificial Sequence
  primer
gtaaaacgacggccagttaagagcagcctttcatggtg

SEQ ID NO: 83712 - DNA, 23 bp, Artificial Sequence
  primer
tggagactgctagtttgcctaag

SEQ ID NO: 83713 - DNA, 23 bp, Artificial Sequence
  primer
ggtctagccaaactggcttgtag

SEQ ID NO: 83714 - DNA, 39 bp, Artificial Sequence
  primer
gtaaaacgacggccagtgaaaccttgagtcctccattcc

SEQ ID NO: 83715 - DNA, 38 bp, Artificial Sequence
  primer
gtaaaacgacggccagtcgtgcagaaataacagccttg

SEQ ID NO: 83716 - DNA, 38 bp, Artificial Sequence
  primer
gtaaaacgacggccagtaagttccatggcttcttctgc

SEQ ID NO: 83717 - DNA, 26 bp, Artificial Sequence
  primer
aaccacattaatactgaccctcaatc

SEQ ID NO: 83718 - DNA, 40 bp, Artificial Sequence
  primer
gtaaaacgacggccagtttgatcacagcctgtttctcttc

SEQ ID NO: 83719 - DNA, 20 bp, Artificial Sequence
  primer
tttcaagactgatgtgcggc

SEQ ID NO: 83720 - DNA, 24 bp, Artificial Sequence
  primer
tctctgtcctcacagaattacagc

SEQ ID NO: 83721 - DNA, 21 bp, Artificial Sequence
  primer
aaggctgagaaactcaagggt

SEQ ID NO: 83722 - DNA, 38 bp, Artificial Sequence
  primer
gtaaaacgacggccagtataagccaaggactcgtcagg

SEQ ID NO: 83723 - DNA, 20 bp, Artificial Sequence
  primer
aatgaacgtgaagggtgctg

SEQ ID NO: 83724 - DNA, 38 bp, Artificial Sequence
  primer
gtaaaacgacggccagtcaatacttctgggcactgctg

SEQ ID NO: 83725 - DNA, 21 bp, Artificial Sequence
  primer
caacgacatccaggtgtatcg

SEQ ID NO: 83726 - DNA, 21 bp, Artificial Sequence
  primer
cacatctcaggcacagacgac

SEQ ID NO: 83727 - DNA, 38 bp, Artificial Sequence
  primer
gtaaaacgacggccagttggcattgatgaactggtctg

SEQ ID NO: 83728 - DNA, 38 bp, Artificial Sequence
  primer
gtaaaacgacggccagtgctcccttcattgtctgcttc

SEQ ID NO: 83729 - DNA, 20 bp, Artificial Sequence
  primer
agagccgaaagaagcctcag

SEQ ID NO: 83730 - DNA, 44 bp, Artificial Sequence
  primer
gtaaaacgacggccagtaagataatttggaatttaagtgaatgg

SEQ ID NO: 83731 - DNA, 24 bp, Artificial Sequence
  primer
tttcagttctccatgcttattaaa

SEQ ID NO: 83732 - DNA, 38 bp, Artificial Sequence
  primer
gtaaaacgacggccagtcaccgtgctggtaagagacag

SEQ ID NO: 83733 - DNA, 38 bp, Artificial Sequence
  primer
gtaaaacgacggccagtccttgaacatccagggaaatc

SEQ ID NO: 83734 - DNA, 21 bp, Artificial Sequence
  primer
cactttgcaacacagctcaac

SEQ ID NO: 83735 - DNA, 40 bp, Artificial Sequence
  primer
gtaaaacgacggccagttcctactcaatacctaccctccc

SEQ ID NO: 83736 - DNA, 45 bp, Artificial Sequence
  primer
gtaaaacgacggccagtaagctacttacttacattgtgtccaaga

SEQ ID NO: 83737 - DNA, 38 bp, Artificial Sequence
  primer
gtaaaacgacggccagtttatctgaattggttcacgcc

SEQ ID NO: 83738 - DNA, 22 bp, Artificial Sequence
  primer
ccaatgataacgctttgatacc

SEQ ID NO: 83739 - DNA, 21 bp, Artificial Sequence
  primer
cacctgcactacacggttctg

SEQ ID NO: 83740 - DNA, 41 bp, Artificial Sequence
  primer
gtaaaacgacggccagtaaaccaaccttcaagagatagcag

SEQ ID NO: 83741 - DNA, 39 bp, Artificial Sequence
  primer
gtaaaacgacggccagtaatgcagttctgcttctccaag

SEQ ID NO: 83742 - DNA, 24 bp, Artificial Sequence
  primer
aaggcatttaaatcaaccagagtc

SEQ ID NO: 83743 - DNA, 21 bp, Artificial Sequence
  primer
ggctcccactcctttcttgat

SEQ ID NO: 83744 - DNA, 19 bp, Artificial Sequence
  primer
tttgagcctcccaatccac

SEQ ID NO: 83745 - DNA, 38 bp, Artificial Sequence
  primer
gtaaaacgacggccagtgaatagcaggccattagcagg

SEQ ID NO: 83746 - DNA, 36 bp, Artificial Sequence
  primer
gtaaaacgacggccagtccctgctcagggaggagac

SEQ ID NO: 83747 - DNA, 21 bp, Artificial Sequence
  primer
ctctcccagccttcaaagttc

SEQ ID NO: 83748 - DNA, 21 bp, Artificial Sequence
  primer
gcatttgaattccagatttgc

SEQ ID NO: 83749 - DNA, 39 bp, Artificial Sequence
  primer
gtaaaacgacggccagtgcatggttagctcacactttcc

SEQ ID NO: 83750 - DNA, 38 bp, Artificial Sequence
  primer
gtaaaacgacggccagtatcaacaatggcaaagctcaa

SEQ ID NO: 83751 - DNA, 39 bp, Artificial Sequence
  primer
gtaaaacgacggccagttgcaagtaagcccaatctaacc

SEQ ID NO: 83752 - DNA, 19 bp, Artificial Sequence
  primer
agcagcaacgcacaaacag

SEQ ID NO: 83753 - DNA, 21 bp, Artificial Sequence
  primer
gtaggaagcctgggattaccc

SEQ ID NO: 83754 - DNA, 21 bp, Artificial Sequence
  primer
gatctttgggagtttgggttg

SEQ ID NO: 83755 - DNA, 21 bp, Artificial Sequence
  primer
tgaatctcaattgctgccaag

SEQ ID NO: 83756 - DNA, 38 bp, Artificial Sequence
  primer
gtaaaacgacggccagtaaatgtgggaggagcattcac

SEQ ID NO: 83757 - DNA, 38 bp, Artificial Sequence
  primer
gtaaaacgacggccagttgtgtgaagcccatcaaagac

SEQ ID NO: 83758 - DNA, 38 bp, Artificial Sequence
  primer
gtaaaacgacggccagtatagtggtcattctcccagcc

SEQ ID NO: 83759 - DNA, 38 bp, Artificial Sequence
  primer
gtaaaacgacggccagtggcttgtagcctgtggaagtg

SEQ ID NO: 83760 - DNA, 21 bp, Artificial Sequence
  primer
tccgtgaatttccctcgatag

SEQ ID NO: 83761 - DNA, 26 bp, Artificial Sequence
  primer
ggtagaaacacatcttagggactttg

SEQ ID NO: 83762 - DNA, 22 bp, Artificial Sequence
  primer
gcaaacttgagcaaggacagtt

SEQ ID NO: 83763 - DNA, 38 bp, Artificial Sequence
  primer
gtaaaacgacggccagtgatcccaaacagaaacaagcc

SEQ ID NO: 83764 - DNA, 38 bp, Artificial Sequence
  primer
gtaaaacgacggccagtaaagagctgcagtgtccaagg

SEQ ID NO: 83765 - DNA, 38 bp, Artificial Sequence
  primer
gtaaaacgacggccagttgtggctatttccattgcatc

SEQ ID NO: 83766 - DNA, 24 bp, Artificial Sequence
  primer
cacagtccttcaaagacatcagag

SEQ ID NO: 83767 - DNA, 23 bp, Artificial Sequence
  primer
gcaaatccaaattaagatgggac

SEQ ID NO: 83768 - DNA, 38 bp, Artificial Sequence
  primer
gtaaaacgacggccagtctaaggtgggtgcttacgttg

SEQ ID NO: 83769 - DNA, 38 bp, Artificial Sequence
  primer
gtaaaacgacggccagtaaatatcctgggaggaagtgc

SEQ ID NO: 83770 - DNA, 21 bp, Artificial Sequence
  primer
gttgtgcgtgttgtcttctcc

SEQ ID NO: 83771 - DNA, 21 bp, Artificial Sequence
  primer
tttgagtgctacctcctgctg

SEQ ID NO: 83772 - DNA, 21 bp, Artificial Sequence
  primer
gaaaccaccctaggacttccc

SEQ ID NO: 83773 - DNA, 36 bp, Artificial Sequence
  primer
gtaaaacgacggccagtgagtcccaaagctgctccc

SEQ ID NO: 83774 - DNA, 21 bp, Artificial Sequence
  primer
ccaggttgaggtatgtggtgg

SEQ ID NO: 83775 - DNA, 38 bp, Artificial Sequence
  primer
gtaaaacgacggccagttctgcacacccttcaatcatc

SEQ ID NO: 83776 - DNA, 39 bp, Artificial Sequence
  primer
gtaaaacgacggccagtccataaagatacacaggcaggc

SEQ ID NO: 83777 - DNA, 38 bp, Artificial Sequence
  primer
gtaaaacgacggccagtctcaagtcagaaaccttgggc

SEQ ID NO: 83778 - DNA, 38 bp, Artificial Sequence
  primer
gtaaaacgacggccagttggtttggcccatctaacttc

SEQ ID NO: 83779 - DNA, 39 bp, Artificial Sequence
  primer
gtaaaacgacggccagttcaaacaaataaactcgagccc

SEQ ID NO: 83780 - DNA, 21 bp, Artificial Sequence
  primer
accaagaagtatccctgctgc

SEQ ID NO: 83781 - DNA, 22 bp, Artificial Sequence
  primer
gggaatacattgtgcagtgaag

SEQ ID NO: 83782 - DNA, 39 bp, Artificial Sequence
  primer
gtaaaacgacggccagttgggcctctcaaccttaaattc

SEQ ID NO: 83783 - DNA, 38 bp, Artificial Sequence
  primer
gtaaaacgacggccagtgctccagaaatcaccctgaag

SEQ ID NO: 83784 - DNA, 38 bp, Artificial Sequence
  primer
gtaaaacgacggccagtcctttgactttccggctttag

SEQ ID NO: 83785 - DNA, 21 bp, Artificial Sequence
  primer
aaggaaacttgaccgtgttcc

SEQ ID NO: 83786 - DNA, 22 bp, Artificial Sequence
  primer
catccttgtccacctcaacttc

SEQ ID NO: 83787 - DNA, 20 bp, Artificial Sequence
  primer
cttccttcctgtctccctcc

SEQ ID NO: 83788 - DNA, 38 bp, Artificial Sequence
  primer
gtaaaacgacggccagtcaggaccctttgtttagcacc

SEQ ID NO: 83789 - DNA, 21 bp, Artificial Sequence
  primer
ctttccatcgaggaggaaatc

SEQ ID NO: 83790 - DNA, 38 bp, Artificial Sequence
  primer
gtaaaacgacggccagtagcatgttcagtctggtgtgg

SEQ ID NO: 83791 - DNA, 21 bp, Artificial Sequence
  primer
tggtggcatcatttgattcag

SEQ ID NO: 83792 - DNA, 21 bp, Artificial Sequence
  primer
agacgatggcagctttgacac

SEQ ID NO: 83793 - DNA, 38 bp, Artificial Sequence
  primer
gtaaaacgacggccagtagagacagaggaagtgggacg

SEQ ID NO: 83794 - DNA, 38 bp, Artificial Sequence
  primer
gtaaaacgacggccagtaaagagtcagtccctgttggg

SEQ ID NO: 83795 - DNA, 38 bp, Artificial Sequence
  primer
gtaaaacgacggccagtaggacactccctaaggcaagg

SEQ ID NO: 83796 - DNA, 21 bp, Artificial Sequence
  primer
ttaagcctcagtgggttgttg

SEQ ID NO: 83797 - DNA, 21 bp, Artificial Sequence
  primer
aaattgaaatgatggcaccag

SEQ ID NO: 83798 - DNA, 23 bp, Artificial Sequence
  primer
gagaaaggaaggaaagggatatg

SEQ ID NO: 83799 - DNA, 25 bp, Artificial Sequence
  primer
aagcaagaacaatatctctgtggag

SEQ ID NO: 83800 - DNA, 38 bp, Artificial Sequence
  primer
gtaaaacgacggccagttcagtctttggtggctgaatg

SEQ ID NO: 83801 - DNA, 21 bp, Artificial Sequence
  primer
aaagaagaggtgcattcccag

SEQ ID NO: 83802 - DNA, 23 bp, Artificial Sequence
  primer
tttatgctctacgatgtcttcgg

SEQ ID NO: 83803 - DNA, 41 bp, Artificial Sequence
  primer
gtaaaacgacggccagtcagatgtgctataggagttggctt

SEQ ID NO: 83804 - DNA, 38 bp, Artificial Sequence
  primer
gtaaaacgacggccagttggaatactgtgcgtggtgag

SEQ ID NO: 83805 - DNA, 21 bp, Artificial Sequence
  primer
gactgccttccatgaacttcc

SEQ ID NO: 83806 - DNA, 39 bp, Artificial Sequence
  primer
gtaaaacgacggccagtttatttgacatcctgttgagcc

SEQ ID NO: 83807 - DNA, 21 bp, Artificial Sequence
  primer
ggacagacaccgaccagattc

SEQ ID NO: 83808 - DNA, 24 bp, Artificial Sequence
  primer
tttccaaagtaactgatccatacg

SEQ ID NO: 83809 - DNA, 36 bp, Artificial Sequence
  primer
gtaaaacgacggccagtgaggtcacatctgggcagg

SEQ ID NO: 83810 - DNA, 21 bp, Artificial Sequence
  primer
tgcccagcctcaaatatcttc

SEQ ID NO: 83811 - DNA, 21 bp, Artificial Sequence
  primer
ctgtcatcaccgtttcccttc

SEQ ID NO: 83812 - DNA, 38 bp, Artificial Sequence
  primer
gtaaaacgacggccagtctgtcatcaccgtttcccttc

SEQ ID NO: 83813 - DNA, 21 bp, Artificial Sequence
  primer
gcccagtacccatttccatac

SEQ ID NO: 83814 - DNA, 21 bp, Artificial Sequence
  primer
gctgggttgggtagggattag

SEQ ID NO: 83815 - DNA, 39 bp, Artificial Sequence
  primer
gtaaaacgacggccagtggtaaagctagcaggtgaagcc

SEQ ID NO: 83816 - DNA, 21 bp, Artificial Sequence
  primer
ttgcaattgtacatgcactcg

SEQ ID NO: 83817 - DNA, 21 bp, Artificial Sequence
  primer
atgggcctgaggttaggagag

SEQ ID NO: 83818 - DNA, 21 bp, Artificial Sequence
  primer
tccttagggcccaggactatt

SEQ ID NO: 83819 - DNA, 38 bp, Artificial Sequence
  primer
gtaaaacgacggccagtacagggtctcactttatcgcc

SEQ ID NO: 83820 - DNA, 21 bp, Artificial Sequence
  primer
gctggctagtgtggagaaagc

SEQ ID NO: 83821 - DNA, 21 bp, Artificial Sequence
  primer
attgctgggacactgttgatg

SEQ ID NO: 83822 - DNA, 21 bp, Artificial Sequence
  primer
ttctgaggaatcagcaggacc

SEQ ID NO: 83823 - DNA, 21 bp, Artificial Sequence
  primer
ccactctgtgaagtgtcaggc

SEQ ID NO: 83824 - DNA, 21 bp, Artificial Sequence
  primer
tagtgggtgtgaaagaggcag

SEQ ID NO: 83825 - DNA, 21 bp, Artificial Sequence
  primer
tccttctttccctttgcagac

SEQ ID NO: 83826 - DNA, 37 bp, Artificial Sequence
  primer
gtaaaacgacggccagtggcctgaggttaagggagaa

SEQ ID NO: 83827 - DNA, 18 bp, Artificial Sequence
  primer
ctctgggctccatctggg

SEQ ID NO: 83828 - DNA, 21 bp, Artificial Sequence
  primer
ggtacctgtgagagctgtggc

SEQ ID NO: 83829 - DNA, 20 bp, Artificial Sequence
  primer
ctgcaagggacagacagagg

SEQ ID NO: 83830 - DNA, 21 bp, Artificial Sequence
  primer
ggttcattaagagctgctggg

SEQ ID NO: 83831 - DNA, 38 bp, Artificial Sequence
  primer
gtaaaacgacggccagttagatgtgcgatctgtccctc

SEQ ID NO: 83832 - DNA, 38 bp, Artificial Sequence
  primer
gtaaaacgacggccagtgagggcgtgtctttcattagg

SEQ ID NO: 83833 - DNA, 22 bp, Artificial Sequence
  primer
tccacagtccttctttctttgc

SEQ ID NO: 83834 - DNA, 21 bp, Artificial Sequence
  primer
ctgcaatgggctggaatttag

SEQ ID NO: 83835 - DNA, 38 bp, Artificial Sequence
  primer
gtaaaacgacggccagtagaaccattcattccacccac

SEQ ID NO: 83836 - DNA, 21 bp, Artificial Sequence
  primer
cagggtctcactttattgccc

SEQ ID NO: 83837 - DNA, 21 bp, Artificial Sequence
  primer
attgctgggacactgttgatg

SEQ ID NO: 83838 - DNA, 21 bp, Artificial Sequence
  primer
gacctcccatttcctctcaac

SEQ ID NO: 83839 - DNA, 20 bp, Artificial Sequence
  primer
ggaactgattctgtgggctg

SEQ ID NO: 83840 - DNA, 38 bp, Artificial Sequence
  primer
gtaaaacgacggccagtctggagtgggtgtgaaagagg

SEQ ID NO: 83841 - DNA, 38 bp, Artificial Sequence
  primer
gtaaaacgacggccagtctcttggcctcattccaagtc

SEQ ID NO: 83842 - DNA, 38 bp, Artificial Sequence
  primer
gtaaaacgacggccagtatggacttcaggtttgggaag

SEQ ID NO: 83843 - DNA, 20 bp, Artificial Sequence
  primer
tgcaagagggactctgcatc

SEQ ID NO: 83844 - DNA, 38 bp, Artificial Sequence
  primer
gtaaaacgacggccagtctgcagacactaacacctccc

SEQ ID NO: 83845 - DNA, 19 bp, Artificial Sequence
  primer
aaagcaactgagctctgcg

SEQ ID NO: 83846 - DNA, 38 bp, Artificial Sequence
  primer
gtaaaacgacggccagtgcaatgactaggaattggcac

SEQ ID NO: 83847 - DNA, 21 bp, Artificial Sequence
  primer
tccaatcagccacactctttc

SEQ ID NO: 83848 - DNA, 38 bp, Artificial Sequence
  primer
gtaaaacgacggccagtagaacatcaatgggtcacagc

SEQ ID NO: 83849 - DNA, 21 bp, Artificial Sequence
  primer
cagaaagggtcttggagatgg

SEQ ID NO: 83850 - DNA, 21 bp, Artificial Sequence
  primer
cactttcgttagctaagcccg

SEQ ID NO: 83851 - DNA, 21 bp, Artificial Sequence
  primer
tgcctaacccaataccctgac

SEQ ID NO: 83852 - DNA, 21 bp, Artificial Sequence
  primer
acaggtgatccttcaggttgg

SEQ ID NO: 83853 - DNA, 21 bp, Artificial Sequence
  primer
tattcagtgcagagacccagg

SEQ ID NO: 83854 - DNA, 21 bp, Artificial Sequence
  primer
ccttaaacatgatgcagtgcc

SEQ ID NO: 83855 - DNA, 38 bp, Artificial Sequence
  primer
gtaaaacgacggccagtaccctgggctatgacttatgg

SEQ ID NO: 83856 - DNA, 38 bp, Artificial Sequence; identical to SEQ ID NO: 83855
  primer

SEQ ID NO: 83857 - DNA, 37 bp, Artificial Sequence
  primer
gtaaaacgacggccagtagaacatccacgggtcacag

SEQ ID NO: 83858 - DNA, 21 bp, Artificial Sequence
  primer
cttcaggttgggatggacttc

SEQ ID NO: 83859 - DNA, 21 bp, Artificial Sequence
  primer
gttgaccgcagagactcacac

SEQ ID NO: 83860 - DNA, 21 bp, Artificial Sequence
  primer
acttgatgcagtgtcagggtg

SEQ ID NO: 83861 - DNA, 38 bp, Artificial Sequence
  primer
gtaaaacgacggccagtagggaagggttatcaaggtgc

SEQ ID NO: 83862 - DNA, 21 bp, Artificial Sequence
  primer
agagagactccttctgggtgg

SEQ ID NO: 83863 - DNA, 38 bp, Artificial Sequence
  primer
gtaaaacgacggccagttccaactgagaacgtcaatgg

SEQ ID NO: 83864 - DNA, 38 bp, Artificial Sequence
  primer
gtaaaacgacggccagtgagagcaattctccctggttc

SEQ ID NO: 83865 - DNA, 21 bp, Artificial Sequence
  primer
caggcccatagtccagtatcc

SEQ ID NO: 83866 - DNA, 21 bp, Artificial Sequence
  primer
agtgcgtgcctgtagcttatg

SEQ ID NO: 83867 - DNA, 22 bp, Artificial Sequence
  primer
ttagatcccagctctgctgttc

SEQ ID NO: 83868 - DNA, 21 bp, Artificial Sequence
  primer
ttggaagagggactctgcatc

SEQ ID NO: 83869 - DNA, 21 bp, Artificial Sequence
  primer
gttgttctcgacctttggacc

SEQ ID NO: 83870 - DNA, 23 bp, Artificial Sequence
  primer
aactgtcacaaagcttaccacaa

SEQ ID NO: 83871 - DNA, 38 bp, Artificial Sequence
  primer
gtaaaacgacggccagtatacgaggtgctatggtgcag

SEQ ID NO: 83872 - DNA, 38 bp, Artificial Sequence
  primer
gtaaaacgacggccagtgaggccattactttgctggtc

SEQ ID NO: 83873 - DNA, 23 bp, Artificial Sequence
  primer
gagaaattgtccaggaactagca

SEQ ID NO: 83874 - DNA, 21 bp, Artificial Sequence
  primer
aggatagcaggagacctcgtc

SEQ ID NO: 83875 - DNA, 21 bp, Artificial Sequence
  primer
gtcttcctcaattcctgctgc

SEQ ID NO: 83876 - DNA, 22 bp, Artificial Sequence
  primer
ccagaaacctcaggtcagtgat

SEQ ID NO: 83877 - DNA, 21 bp, Artificial Sequence
  primer
tggaacacaatatgctcccag

SEQ ID NO: 83878 - DNA, 20 bp, Artificial Sequence
  primer
agagcccagaggtgtgtgag

SEQ ID NO: 83879 - DNA, 21 bp, Artificial Sequence
  primer
agcagagagagcaggcagttc

SEQ ID NO: 83880 - DNA, 37 bp, Artificial Sequence
  primer
gtaaaacgacggccagtctcctagctgacccagtccc

SEQ ID NO: 83881 - DNA, 38 bp, Artificial Sequence
  primer
gtaaaacgacggccagttgaagaaggagatggtcccac

SEQ ID NO: 83882 - DNA, 38 bp, Artificial Sequence
  primer
gtaaaacgacggccagtctcagggcagaagaacctcag

SEQ ID NO: 83883 - DNA, 21 bp, Artificial Sequence
  primer
gacacaagctgctgctctacc

SEQ ID NO: 83884 - DNA, 20 bp, Artificial Sequence
  primer
agagcccagaggtgtgtgag

SEQ ID NO: 83885 - DNA, 21 bp, Artificial Sequence
  primer
gcagtggatggagagagtgag

SEQ ID NO: 83886 - DNA, 38 bp, Artificial Sequence
  primer
gtaaaacgacggccagttataattgtttccacagcgcc

SEQ ID NO: 83887 - DNA, 21 bp, Artificial Sequence
  primer
tcactacaggctgggtaatgc

SEQ ID NO: 83888 - DNA, 39 bp, Artificial Sequence
  primer
gtaaaacgacggccagttgtgactccacctctacttggc

SEQ ID NO: 83889 - DNA, 20 bp, Artificial Sequence
  primer
tttcaggtgtcaaggccaac

SEQ ID NO: 83890 - DNA, 39 bp, Artificial Sequence
  primer
gtaaaacgacggccagttgtccatatgaacgatcttccc

SEQ ID NO: 83891 - DNA, 37 bp, Artificial Sequence
  primer
gtaaaacgacggccagtgcctctcatccacaagatgg

SEQ ID NO: 83892 - DNA, 38 bp, Artificial Sequence
  primer
gtaaaacgacggccagtgaatggcaaatcaagggtttc

SEQ ID NO: 83893 - DNA, 23 bp, Artificial Sequence
  primer
tctgttgcaattaagaggtggag

SEQ ID NO: 83894 - DNA, 21 bp, Artificial Sequence
  primer
agggcaagactccatctcaaa

SEQ ID NO: 83895 - DNA, 42 bp, Artificial Sequence
  primer
gtaaaacgacggccagttttgtgagtgacaggtaagaagaaa

SEQ ID NO: 83896 - DNA, 38 bp, Artificial Sequence
  primer
gtaaaacgacggccagtgggcttgctgtaaccatactg

SEQ ID NO: 83897 - DNA, 21 bp, Artificial Sequence
  primer
gctttgggactggaaacaatc

SEQ ID NO: 83898 - DNA, 25 bp, Artificial Sequence
  primer
tcttctttagtttcagaactgtgcc

SEQ ID NO: 83899 - DNA, 41 bp, Artificial Sequence
  primer
gtaaaacgacggccagtcgtttaaatatgaaattgcccttg

SEQ ID NO: 83900 - DNA, 20 bp, Artificial Sequence
  primer
gctttgctgtgctgcttctc

SEQ ID NO: 83901 - DNA, 22 bp, Artificial Sequence
  primer
ccaaggagaggtaaatacacgg

SEQ ID NO: 83902 - DNA, 22 bp, Artificial Sequence
  primer
catattccacagcacatcaacg

SEQ ID NO: 83903 - DNA, 21 bp, Artificial Sequence
  primer
tatcccgtctcctacccacag

SEQ ID NO: 83904 - DNA, 40 bp, Artificial Sequence
  primer
gtaaaacgacggccagttcttaagagtggatcagtctggg

SEQ ID NO: 83905 - DNA, 21 bp, Artificial Sequence
  primer
acacattccaaacccaggaag

SEQ ID NO: 83906 - DNA, 38 bp, Artificial Sequence
  primer
gtaaaacgacggccagttgaatcttgggtcattgtggt

SEQ ID NO: 83907 - DNA, 21 bp, Artificial Sequence
  primer
taaagtgatcgacctgccttg

SEQ ID NO: 83908 - DNA, 23 bp, Artificial Sequence
  primer
aaacacaaagatacccacacagg

SEQ ID NO: 83909 - DNA, 21 bp, Artificial Sequence
  primer
aggactacagatgcccaccac

SEQ ID NO: 83910 - DNA, 21 bp, Artificial Sequence
  primer
ggagctcagagccatgaagag

SEQ ID NO: 83911 - DNA, 38 bp, Artificial Sequence
  primer
gtaaaacgacggccagtctcttcgttccctacaatggg

SEQ ID NO: 83912 - DNA, 23 bp, Artificial Sequence
  primer
ggatgagatgaagactttcttgc

SEQ ID NO: 83913 - DNA, 41 bp, Artificial Sequence
  primer
gtaaaacgacggccagtgcacatagaaaggaacaaatcaaa

SEQ ID NO: 83914 - DNA, 25 bp, Artificial Sequence
  primer
gataatgcaggtcatgtaaagaagg

SEQ ID NO: 83915 - DNA, 38 bp, Artificial Sequence
  primer
gtaaaacgacggccagtaagccttcataaaccacagcc

SEQ ID NO: 83916 - DNA, 43 bp, Artificial Sequence
  primer
gtaaaacgacggccagtgaagtgtaggagcctgaaacatattc

SEQ ID NO: 83917 - DNA, 38 bp, Artificial Sequence
  primer
gtaaaacgacggccagtgacaagctaatcaagggcagg

SEQ ID NO: 83918 - DNA, 21 bp, Artificial Sequence
  primer
ttggcagttcacattctctcc

SEQ ID NO: 83919 - DNA, 40 bp, Artificial Sequence
  primer
gtaaaacgacggccagttgcacataccctgtttcttcttg

SEQ ID NO: 83920 - DNA, 24 bp, Artificial Sequence
  primer
tttaggaagacaatatgccaaagg

SEQ ID NO: 83921 - DNA, 38 bp, Artificial Sequence
  primer
gtaaaacgacggccagtaccggcctgatgtatcaagtg

SEQ ID NO: 83922 - DNA, 21 bp, Artificial Sequence
  primer
cactgtgggtttctttcatgg

SEQ ID NO: 83923 - DNA, 39 bp, Artificial Sequence
  primer
gtaaaacgacggccagtcacacacacacacgttaccatc

SEQ ID NO: 83924 - DNA, 21 bp, Artificial Sequence
  primer
atgaactgttgctgcaatgtg

SEQ ID NO: 83925 - DNA, 21 bp, Artificial Sequence
  primer
ttcaaattgagagctttgccc

SEQ ID NO: 83926 - DNA, 20 bp, Artificial Sequence
  primer
aggctgcatgagcacaaatg

SEQ ID NO: 83927 - DNA, 21 bp, Artificial Sequence
  primer
ttggccttaggctcatctctc

SEQ ID NO: 83928 - DNA, 19 bp, Artificial Sequence
  primer
gcataggatttccatgcgg

SEQ ID NO: 83929 - DNA, 21 bp, Artificial Sequence
  primer
ttctcacaaatgcttgcatcc

SEQ ID NO: 83930 - DNA, 20 bp, Artificial Sequence
  primer
ctccacctccggcattctac

SEQ ID NO: 83931 - DNA, 20 bp, Artificial Sequence
  primer
ggatccacacccacgttatc

SEQ ID NO: 83932 - DNA, 20 bp, Artificial Sequence
  primer
cccaatttgagaaacatggc

SEQ ID NO: 83933 - DNA, 21 bp, Artificial Sequence
  primer
gggtgacagagtgagaccttg

SEQ ID NO: 83934 - DNA, 38 bp, Artificial Sequence
  primer
gtaaaacgacggccagtcttaacatgccaatccaccag

SEQ ID NO: 83935 - DNA, 26 bp, Artificial Sequence
  primer
gatgcttcctaaatgttaggtctttc

SEQ ID NO: 83936 - DNA, 21 bp, Artificial Sequence
  primer
acgaggctggagatgaagaag

SEQ ID NO: 83937 - DNA, 38 bp, Artificial Sequence
  primer
gtaaaacgacggccagtgaagaaactgcctttgggaag

SEQ ID NO: 83938 - DNA, 24 bp, Artificial Sequence
  primer
tggctgatacacagaaagaaacag

SEQ ID NO: 83939 - DNA, 21 bp, Artificial Sequence
  primer
tactttcccgctcaactttcc

SEQ ID NO: 83940 - DNA, 20 bp, Artificial Sequence
  primer
cctccctcatcagcatcaaa

SEQ ID NO: 83941 - DNA, 23 bp, Artificial Sequence
  primer
ccctgtctttcaatccctttatc

SEQ ID NO: 83942 - DNA, 19 bp, Artificial Sequence
  primer
ggatctgcaggaggactgg

SEQ ID NO: 83943 - DNA, 41 bp, Artificial Sequence
  primer
gtaaaacgacggccagtcatgtgcttaattcaagtcagtgg

SEQ ID NO: 83944 - DNA, 38 bp, Artificial Sequence
  primer
gtaaaacgacggccagtgggcagccctactctcatgta

SEQ ID NO: 83945 - DNA, 38 bp, Artificial Sequence
  primer
gtaaaacgacggccagttgagtttgattgtgccactgc

SEQ ID NO: 83946 - DNA, 39 bp, Artificial Sequence
  primer
gtaaaacgacggccagtttacagtgctcaagcatcaagc

SEQ ID NO: 83947 - DNA, 21 bp, Artificial Sequence
  primer
caggccagaaagtatcagcag

SEQ ID NO: 83948 - DNA, 22 bp, Artificial Sequence
  primer
tatttatgcttgacaacggacc

SEQ ID NO: 83949 - DNA, 21 bp, Artificial Sequence
  primer
ggtgacagagtgagaccctcg

SEQ ID NO: 83950 - DNA, 42 bp, Artificial Sequence
  primer
gtaaaacgacggccagtggagtcggtatcagtaaacagtagc

SEQ ID NO: 83951 - DNA, 21 bp, Artificial Sequence
  primer
tttcctgcactagctgctctg

SEQ ID NO: 83952 - DNA, 43 bp, Artificial Sequence
  primer
gtaaaacgacggccagtttacagcacatacagtttcagtgttc

SEQ ID NO: 83953 - DNA, 21 bp, Artificial Sequence
  primer
acagacgcctctacccaacac

SEQ ID NO: 83954 - DNA, 21 bp, Artificial Sequence
  primer
ggcgaccataactggctttac

SEQ ID NO: 83955 - DNA, 39 bp, Artificial Sequence
  primer
gtaaaacgacggccagtgcatagtcaacaatcatgcacc

SEQ ID NO: 83956 - DNA, 21 bp, Artificial Sequence
  primer
attcaaaccacttcctgagca

SEQ ID NO: 83957 - DNA, 38 bp, Artificial Sequence
  primer
gtaaaacgacggccagttacaaagccatcagaaccacc

SEQ ID NO: 83958 - DNA, 21 bp, Artificial Sequence
  primer
cagctgtaatatcgagcaggc

SEQ ID NO: 83959 - DNA, 20 bp, Artificial Sequence
  primer
atgcagcaaaccatcaaacc

SEQ ID NO: 83960 - DNA, 21 bp, Artificial Sequence
  primer
ttggttccatacctttcagcc

SEQ ID NO: 83961 - DNA, 21 bp, Artificial Sequence
  primer
gggtgcacagcacctaatatc

SEQ ID NO: 83962 - DNA, 21 bp, Artificial Sequence
  primer
cccactggtctctctgattcc

SEQ ID NO: 83963 - DNA, 21 bp, Artificial Sequence
  primer
ccagttcctttcccaagacac

SEQ ID NO: 83964 - DNA, 20 bp, Artificial Sequence
  primer
taggctcatgggcttctttg

SEQ ID NO: 83965 - DNA, 21 bp, Artificial Sequence
  primer
tcatcgccaccaacacttaac

SEQ ID NO: 83966 - DNA, 21 bp, Artificial Sequence
  primer
gaaaggcacaaacctgtttcc

SEQ ID NO: 83967 - DNA, 21 bp, Artificial Sequence
  primer
cctactgtgtgtgatgccctg

SEQ ID NO: 83968 - DNA, 21 bp, Artificial Sequence
  primer
ggttcagacaggaaaggatgg

SEQ ID NO: 83969 - DNA, 21 bp, Artificial Sequence
  primer
cgggaggtatactgaagcctg

SEQ ID NO: 83970 - DNA, 21 bp, Artificial Sequence
  primer
accaaggctgcacaggtaaag

SEQ ID NO: 83971 - DNA, 21 bp, Artificial Sequence
  primer
tccagtgatacctagcccgtc

SEQ ID NO: 83972 - DNA, 20 bp, Artificial Sequence
  primer
caccctcgtcctcaccatag

SEQ ID NO: 83973 - DNA, 37 bp, Artificial Sequence
  primer
gtaaaacgacggccagtttgctatgggcctgacaaag

SEQ ID NO: 83974 - DNA, 43 bp, Artificial Sequence
  primer
gtaaaacgacggccagtttcactttcaggcataatgtaaacag

SEQ ID NO: 83975 - DNA, 38 bp, Artificial Sequence
  primer
gtaaaacgacggccagtccattcacttccttcccagag

SEQ ID NO: 83976 - DNA, 30 bp, Artificial Sequence
  primer
acaatactatatatgccctatggtaacttg

SEQ ID NO: 83977 - DNA, 40 bp, Artificial Sequence
  primer
gtaaaacgacggccagttccctgacaattgtagactcctt

SEQ ID NO: 83978 - DNA, 40 bp, Artificial Sequence
  primer
gtaaaacgacggccagtttgcctttcaaatagttacctgc

SEQ ID NO: 83979 - DNA, 21 bp, Artificial Sequence
  primer
ttgacccttcctcacttcctc

SEQ ID NO: 83980 - DNA, 21 bp, Artificial Sequence
  primer
cgagacagtaccaccctcatc

SEQ ID NO: 83981 - DNA, 21 bp, Artificial Sequence
  primer
ccacgcaaggtaaataaaccc

SEQ ID NO: 83982 - DNA, 23 bp, Artificial Sequence
  primer
tgcaaggacattcaatacaaatg

SEQ ID NO: 83983 - DNA, 38 bp, Artificial Sequence
  primer
gtaaaacgacggccagttccctcacacaggatgacttc

SEQ ID NO: 83984 - DNA, 21 bp, Artificial Sequence
  primer
tcctctgaagaggcaagaacc

SEQ ID NO: 83985 - DNA, 23 bp, Artificial Sequence
  primer
ccacagtctgaagtctaacagcc

SEQ ID NO: 83986 - DNA, 38 bp, Artificial Sequence
  primer
gtaaaacgacggccagttagcaaagtgccaccagtgag

SEQ ID NO: 83987 - DNA, 21 bp, Artificial Sequence
  primer
atcctgccaactctccaagaa

SEQ ID NO: 83988 - DNA, 20 bp, Artificial Sequence
  primer
tcctgaccttgtgatccacc

SEQ ID NO: 83989 - DNA, 21 bp, Artificial Sequence
  primer
gcacaccagggtgtaatgtct

SEQ ID NO: 83990 - DNA, 38 bp, Artificial Sequence
  primer
gtaaaacgacggccagtgttaacacccgggctactctg

SEQ ID NO: 83991 - DNA, 20 bp, Artificial Sequence
  primer
gaaggcattcctggaccttc

SEQ ID NO: 83992 - DNA, 43 bp, Artificial Sequence
  primer
gtaaaacgacggccagtaatttggaagaccagttattgaagag

SEQ ID NO: 83993 - DNA, 23 bp, Artificial Sequence
  primer
aaagtttgcttcattctcaaccc

SEQ ID NO: 83994 - DNA, 21 bp, Artificial Sequence
  primer
ccagtcatcttcagttcagcg

SEQ ID NO: 83995 - DNA, 46 bp, Artificial Sequence
  primer
gtaaaacgacggccagttggctataacctcattataaatgtacctg

SEQ ID NO: 83996 - DNA, 20 bp, Artificial Sequence
  primer
tttgggatgataccgtggtg

SEQ ID NO: 83997 - DNA, 20 bp, Artificial Sequence
  primer
agggagcagaagcttgaacc

SEQ ID NO: 83998 - DNA, 25 bp, Artificial Sequence
  primer
gggagtaatttccaagtttctatgc

SEQ ID NO: 83999 - DNA, 42 bp, Artificial Sequence
  primer
gtaaaacgacggccagtgaaattaactgatgaattctggtga

SEQ ID NO: 84000 - DNA, 38 bp, Artificial Sequence
  primer
gtaaaacgacggccagttgttgactcgaagcaattccc

SEQ ID NO: 84001 - DNA, 21 bp, Artificial Sequence
  primer
gggaatcataagtctgccagg

SEQ ID NO: 84002 - DNA, 21 bp, Artificial Sequence
  primer
caggaatctgaacccacacac

SEQ ID NO: 84003 - DNA, 21 bp, Artificial Sequence
  primer
aactggctaactgggtcttgg

SEQ ID NO: 84004 - DNA, 21 bp, Artificial Sequence
  primer
ggacagctagcaatttcccac

SEQ ID NO: 84005 - DNA, 21 bp, Artificial Sequence
  primer
tagctccttctccactctgcc

SEQ ID NO: 84006 - DNA, 20 bp, Artificial Sequence
  primer
catcttcagtcaccaacggg

SEQ ID NO: 84007 - DNA, 19 bp, Artificial Sequence
  primer
agaggacaggtgggcattg

SEQ ID NO: 84008 - DNA, 38 bp, Artificial Sequence
  primer
gtaaaacgacggccagtgtccttggcaactctaggcag

SEQ ID NO: 84009 - DNA, 20 bp, Artificial Sequence
  primer
ctgagaccgtgactcccaag

SEQ ID NO: 84010 - DNA, 21 bp, Artificial Sequence
  primer
cttgtctgcatcccacaacag

SEQ ID NO: 84011 - DNA, 18 bp, Artificial Sequence
  primer
agatcccggtggtcgttc

SEQ ID NO: 84012 - DNA, 21 bp, Artificial Sequence
  primer
cttcttgctgagctccgattc

SEQ ID NO: 84013 - DNA, 20 bp, Artificial Sequence
  primer
cagccaggaaaggaaaggag

SEQ ID NO: 84014 - DNA, 37 bp, Artificial Sequence
  primer
gtaaaacgacggccagtcagtgacagggagttgggtg

SEQ ID NO: 84015 - DNA, 21 bp, Artificial Sequence
  primer
caaaggaaactgagcctggag

SEQ ID NO: 84016 - DNA, 21 bp, Artificial Sequence
  primer
tcagggacctggtctttgttc

SEQ ID NO: 84017 - DNA, 38 bp, Artificial Sequence
  primer
gtaaaacgacggccagtagaaataggccagtggtggag

SEQ ID NO: 84018 - DNA, 19 bp, Artificial Sequence
  primer
gtcctgtgggaactccacc

SEQ ID NO: 84019 - DNA, 21 bp, Artificial Sequence
  primer
cctgaactccctgctctatcc

SEQ ID NO: 84020 - DNA, 19 bp, Artificial Sequence
  primer
cagaagaggtcagggccac

SEQ ID NO: 84021 - DNA, 21 bp, Artificial Sequence
  primer
accacttccagaggtctccag

SEQ ID NO: 84022 - DNA, 21 bp, Artificial Sequence
  primer
tcctgtgacactctctccacc

SEQ ID NO: 84023 - DNA, 20 bp, Artificial Sequence
  primer
atcctcctcctcaggtctgg

SEQ ID NO: 84024 - DNA, 21 bp, Artificial Sequence
  primer
atctcagcagatgtggctgtc

SEQ ID NO: 84025 - DNA, 38 bp, Artificial Sequence
  primer
gtaaaacgacggccagtacgcaaataagatcagggtcc

SEQ ID NO: 84026 - DNA, 38 bp, Artificial Sequence
  primer
gtaaaacgacggccagttgctcttaacccatctgcctc

SEQ ID NO: 84027 - DNA, 37 bp, Artificial Sequence
  primer
gtaaaacgacggccagtgcactgaggaaggacccaag

SEQ ID NO: 84028 - DNA, 21 bp, Artificial Sequence
  primer
gacacatagcacagccaaagg

SEQ ID NO: 84029 - DNA, 38 bp, Artificial Sequence
  primer
gtaaaacgacggccagtagagcacctgctgacacacag

SEQ ID NO: 84030 - DNA, 21 bp, Artificial Sequence
  primer
gctgcttccaccaactaatcc

SEQ ID NO: 84031 - DNA, 39 bp, Artificial Sequence
  primer
gtaaaacgacggccagttcctccgaatcatattcaatgc

SEQ ID NO: 84032 - DNA, 21 bp, Artificial Sequence
  primer
ccttcctacagttgctgtgcc

SEQ ID NO: 84033 - DNA, 37 bp, Artificial Sequence
  primer
gtaaaacgacggccagtaaagcagtggaatgtgggtg

SEQ ID NO: 84034 - DNA, 38 bp, Artificial Sequence
  primer
gtaaaacgacggccagtaaagatcctgacgggtaggtg

SEQ ID NO: 84035 - DNA, 21 bp, Artificial Sequence
  primer
ttctccaccatgattctgtgc

SEQ ID NO: 84036 - DNA, 21 bp, Artificial Sequence
  primer
agacacaacaattgctcaggg

SEQ ID NO: 84037 - DNA, 20 bp, Artificial Sequence
  primer
gtctgccgattccctttacc

SEQ ID NO: 84038 - DNA, 38 bp, Artificial Sequence
  primer
gtaaaacgacggccagtctctctggagagccctacacc

SEQ ID NO: 84039 - DNA, 38 bp, Artificial Sequence
  primer
gtaaaacgacggccagtgctgggatatggtacaccctc

SEQ ID NO: 84040 - DNA, 20 bp, Artificial Sequence
  primer
gttccattcctccggacttc

SEQ ID NO: 84041 - DNA, 38 bp, Artificial Sequence
  primer
gtaaaacgacggccagtgctggacacagtgcttacctg

SEQ ID NO: 84042 - DNA, 21 bp, Artificial Sequence
  primer
ggactacagtgggaaagctgg

SEQ ID NO: 84043 - DNA, 38 bp, Artificial Sequence
  primer
gtaaaacgacggccagtccagtgtcatatgtgatgccc

SEQ ID NO: 84044 - DNA, 22 bp, Artificial Sequence
  primer
gctctaagcatgcagaaagcac

SEQ ID NO: 84045 - DNA, 21 bp, Artificial Sequence
  primer
acccactatggtggtgagagg

SEQ ID NO: 84046 - DNA, 22 bp, Artificial Sequence
  primer
tgaattatgtgcttctggagcc

SEQ ID NO: 84047 - DNA, 21 bp, Artificial Sequence
  primer
gtgaaccctaactccacagcc

SEQ ID NO: 84048 - DNA, 22 bp, Artificial Sequence
  primer
tgcaagtacctgtcagagaagg

SEQ ID NO: 84049 - DNA, 43 bp, Artificial Sequence
  primer
gtaaaacgacggccagtacaagtttgccaaatagttcatattc

SEQ ID NO: 84050 - DNA, 39 bp, Artificial Sequence
  primer
gtaaaacgacggccagtccgttgcaccaagaacagtatc

SEQ ID NO: 84051 - DNA, 20 bp, Artificial Sequence
  primer
ctgagactgagccactgcac

SEQ ID NO: 84052 - DNA, 21 bp, Artificial Sequence
  primer
acctggatgccaaaggtattc

SEQ ID NO: 84053 - DNA, 22 bp, Artificial Sequence
  primer
tttgcttattggcaggaaagag

SEQ ID NO: 84054 - DNA, 41 bp, Artificial Sequence
  primer
gtaaaacgacggccagttcatcctggtgaagtaagttcctc

SEQ ID NO: 84055 - DNA, 21 bp, Artificial Sequence
  primer
gatggcttgctctgctacaag

SEQ ID NO: 84056 - DNA, 22 bp, Artificial Sequence
  primer
ggacgcataatgatggctttag

SEQ ID NO: 84057 - DNA, 21 bp, Artificial Sequence
  primer
tggcatcagaaagaaggaagc

SEQ ID NO: 84058 - DNA, 40 bp, Artificial Sequence
  primer
gtaaaacgacggccagttcatgcttgatacagggaggtag

SEQ ID NO: 84059 - DNA, 21 bp, Artificial Sequence
  primer
gggaaacagggatcattcaga

SEQ ID NO: 84060 - DNA, 39 bp, Artificial Sequence
  primer
gtaaaacgacggccagtccattccaaatcctaaaccagg

SEQ ID NO: 84061 - DNA, 40 bp, Artificial Sequence
  primer
gtaaaacgacggccagtaagtgggtggactgtagagcttc

SEQ ID NO: 84062 - DNA, 38 bp, Artificial Sequence
  primer
gtaaaacgacggccagtactcctgaccttgtgacccac

SEQ ID NO: 84063 - DNA, 38 bp, Artificial Sequence
  primer
gtaaaacgacggccagtaggcatcaagtcttccatgag

SEQ ID NO: 84064 - DNA, 21 bp, Artificial Sequence
  primer
caagtcaacacagatccaggg

SEQ ID NO: 84065 - DNA, 38 bp, Artificial Sequence
  primer
gtaaaacgacggccagtggaaagcctttgctacacagc

SEQ ID NO: 84066 - DNA, 21 bp, Artificial Sequence
  primer
agttcaaagttgcagtgagcg

SEQ ID NO: 84067 - DNA, 22 bp, Artificial Sequence
  primer
caaattagcatcttgctgtccc

SEQ ID NO: 84068 - DNA, 26 bp, Artificial Sequence
  primer
tcctccatcagagtggataatttaag

SEQ ID NO: 84069 - DNA, 19 bp, Artificial Sequence
  primer
tccctctgcacaagggaag

SEQ ID NO: 84070 - DNA, 22 bp, Artificial Sequence
  primer
gtccatctgtctatgtggaccc

SEQ ID NO: 84071 - DNA, 38 bp, Artificial Sequence
  primer
gtaaaacgacggccagtagacgagaggagatgcagacc

SEQ ID NO: 84072 - DNA, 39 bp, Artificial Sequence
  primer
gtaaaacgacggccagtaagcatttccctttcagagacc

SEQ ID NO: 84073 - DNA, 38 bp, Artificial Sequence
  primer
gtaaaacgacggccagttgaaatcagggcaaactcatc

SEQ ID NO: 84074 - DNA, 38 bp, Artificial Sequence
  primer
gtaaaacgacggccagtaatagccttgctgagtttggg

SEQ ID NO: 84075 - DNA, 22 bp, Artificial Sequence
  primer
caattcagtgacgtagctgtgg

SEQ ID NO: 84076 - DNA, 21 bp, Artificial Sequence
  primer
gagggtggatgccactgatac

SEQ ID NO: 84077 - DNA, 24 bp, Artificial Sequence
  primer
ccaaactgttcactgttctgactt

SEQ ID NO: 84078 - DNA, 40 bp, Artificial Sequence
  primer
gtaaaacgacggccagtgcagttaaagatccagatgctga

SEQ ID NO: 84079 - DNA, 38 bp, Artificial Sequence
  primer
gtaaaacgacggccagttttagttcgtttcctcccacc

SEQ ID NO: 84080 - DNA, 21 bp, Artificial Sequence
  primer
gaacttcgtcataagcatcgc

SEQ ID NO: 84081 - DNA, 38 bp, Artificial Sequence
  primer
gtaaaacgacggccagttaagtgatggagacacgacgc

SEQ ID NO: 84082 - DNA, 37 bp, Artificial Sequence
  primer
gtaaaacgacggccagttcttctcgtgttggtctggg

SEQ ID NO: 84083 - DNA, 19 bp, Artificial Sequence
  primer
attctcagggacacggctg

SEQ ID NO: 84084 - DNA, 21 bp, Artificial Sequence
  primer
tgtaaggagtccacgttggtg

SEQ ID NO: 84085 - DNA, 38 bp, Artificial Sequence
  primer
gtaaaacgacggccagtaagtaggtggttcctgatggg

SEQ ID NO: 84086 - DNA, 21 bp, Artificial Sequence
  primer
ctcgctcatcaagtcctaccc

SEQ ID NO: 84087 - DNA, 20 bp, Artificial Sequence
  primer
caggtatttgtgcagggtgg

SEQ ID NO: 84088 - DNA, 22 bp, Artificial Sequence
  primer
gggaaacccactgatatgtacc

SEQ ID NO: 84089 - DNA, 21 bp, Artificial Sequence
  primer
tgtttggccaacaatgtatcc

SEQ ID NO: 84090 - DNA, 37 bp, Artificial Sequence
  primer
gtaaaacgacggccagtaggcagcagtaatgagccag

SEQ ID NO: 84091 - DNA, 38 bp, Artificial Sequence
  primer
gtaaaacgacggccagtgagaggcaatgtgggctattg

SEQ ID NO: 84092 - DNA, 38 bp, Artificial Sequence
  primer
gtaaaacgacggccagtaaggcatacgtgattccagtg

SEQ ID NO: 84093 - DNA, 38 bp, Artificial Sequence
  primer
gtaaaacgacggccagttgtgtaggcatttccgatttg

SEQ ID NO: 84094 - DNA, 21 bp, Artificial Sequence
  primer
agcaacaggttcaactcctgg

SEQ ID NO: 84095 - DNA, 21 bp, Artificial Sequence
  primer
ttaggtcagaagcaacctgcc

SEQ ID NO: 84096 - DNA, 37 bp, Artificial Sequence
  primer
gtaaaacgacggccagtatcacctgaacctgtgaggc

SEQ ID NO: 84097 - DNA, 21 bp, Artificial Sequence
  primer
ggcagcatcatttacatcacc

SEQ ID NO: 84098 - DNA, 38 bp, Artificial Sequence
  primer
gtaaaacgacggccagtggatggaaacagaactcaggc

SEQ ID NO: 84099 - DNA, 21 bp, Artificial Sequence
  primer
aggagaaaccacagagccttc

SEQ ID NO: 84100 - DNA, 23 bp, Artificial Sequence
  primer
ggcttaaagaaatgtcattctgg

SEQ ID NO: 84101 - DNA, 20 bp, Artificial Sequence
  primer
gtctcagtggaggaccgagc

SEQ ID NO: 84102 - DNA, 38 bp, Artificial Sequence
  primer
gtaaaacgacggccagtccacagtgcctgtaggcttag

SEQ ID NO: 84103 - DNA, 38 bp, Artificial Sequence
  primer
gtaaaacgacggccagtctcttgggatgagaggactgg

SEQ ID NO: 84104 - DNA, 21 bp, Artificial Sequence
  primer
aaactccgtgcctgtctcttc

SEQ ID NO: 84105 - DNA, 42 bp, Artificial Sequence
  primer
gtaaaacgacggccagtagaaagcaaagttatttccatgaag

SEQ ID NO: 84106 - DNA, 38 bp, Artificial Sequence
  primer
gtaaaacgacggccagtaggtgaacaccttgaaccacc

SEQ ID NO: 84107 - DNA, 18 bp, Artificial Sequence
  primer
tggcccaaatcatcaagc

SEQ ID NO: 84108 - DNA, 40 bp, Artificial Sequence
  primer
gtaaaacgacggccagtcaaagtgaccttgaaatgagcag

SEQ ID NO: 84109 - DNA, 44 bp, Artificial Sequence
  primer
gtaaaacgacggccagttgtatgcttataggtaacaagggaatc

SEQ ID NO: 84110 - DNA, 20 bp, Artificial Sequence
  primer
gttgcagtgagccaagatca

SEQ ID NO: 84111 - DNA, 38 bp, Artificial Sequence
  primer
gtaaaacgacggccagtgttcctgaccatacctgcctc

SEQ ID NO: 84112 - DNA, 35 bp, Artificial Sequence; identical to SEQ ID NO: 9190
  primer

SEQ ID NO: 84113 - DNA, 25 bp, Artificial Sequence
  primer
gtatcaaacatttcaggagttgaca

SEQ ID NO: 84114 - DNA, 38 bp, Artificial Sequence
  primer
gtaaaacgacggccagttcatctattgctctccttgcc

SEQ ID NO: 84115 - DNA, 21 bp, Artificial Sequence
  primer
tgatcacatcacagtttcccg

SEQ ID NO: 84116 - DNA, 39 bp, Artificial Sequence
  primer
gtaaaacgacggccagtgcttcaagtaaaggctggtgac

SEQ ID NO: 84117 - DNA, 21 bp, Artificial Sequence
  primer
acaggtcagacaaccctcctg

SEQ ID NO: 84118 - DNA, 37 bp, Artificial Sequence
  primer
gtaaaacgacggccagtagatgcatggcactggaaag

SEQ ID NO: 84119 - DNA, 37 bp, Artificial Sequence; identical to SEQ ID NO: 84118
  primer

SEQ ID NO: 84120 - DNA, 23 bp, Artificial Sequence
  primer
tggatacccacctaatgacactg

SEQ ID NO: 84121 - DNA, 21 bp, Artificial Sequence
  primer
ttccacaactgcaccctacag

SEQ ID NO: 84122 - DNA, 38 bp, Artificial Sequence
  primer
gtaaaacgacggccagtcaatccagatacccaactggc

SEQ ID NO: 84123 - DNA, 22 bp, Artificial Sequence
  primer
tttcaacctcagaaatccatcc

SEQ ID NO: 84124 - DNA, 21 bp, Artificial Sequence
  primer
tgcaaagggtcattcttcctc

SEQ ID NO: 84125 - DNA, 20 bp, Artificial Sequence
  primer
caagaatcctcacctccacc

SEQ ID NO: 84126 - DNA, 40 bp, Artificial Sequence
  primer
gtaaaacgacggccagtgcatgttctcccttattcattcc

SEQ ID NO: 84127 - DNA, 21 bp, Artificial Sequence
  primer
tttatctcgaatccctgtgcc

SEQ ID NO: 84128 - DNA, 21 bp, Artificial Sequence
  primer
gctacgattacaggcatgagc

SEQ ID NO: 84129 - DNA, 21 bp, Artificial Sequence
  primer
acgtctggcctaatggcttac

SEQ ID NO: 84130 - DNA, 43 bp, Artificial Sequence
  primer
gtaaaacgacggccagttgcagacaagtaatagaacacttgaa

SEQ ID NO: 84131 - DNA, 23 bp, Artificial Sequence
  primer
ttcaggtccaaactaacttgcag

SEQ ID NO: 84132 - DNA, 21 bp, Artificial Sequence
  primer
cgagactgtgccattgaactc

SEQ ID NO: 84133 - DNA, 24 bp, Artificial Sequence
  primer
catccataccctccttaaatgttc

SEQ ID NO: 84134 - DNA, 39 bp, Artificial Sequence
  primer
gtaaaacgacggccagtgaagttgctaggaaattgctcc

SEQ ID NO: 84135 - DNA, 23 bp, Artificial Sequence
  primer
tgccactaccaatgtttaaggaa

SEQ ID NO: 84136 - DNA, 26 bp, Artificial Sequence
  primer
aaagtcagtgtccaggaaagaactta

SEQ ID NO: 84137 - DNA, 21 bp, Artificial Sequence
  primer
cagcttcaatcaatgtggcag

SEQ ID NO: 84138 - DNA, 21 bp, Artificial Sequence
  primer
aggtgatccactcatctcgtc

SEQ ID NO: 84139 - DNA, 42 bp, Artificial Sequence
  primer
gtaaaacgacggccagttctatcaccttaaaggaaagacgtg

SEQ ID NO: 84140 - DNA, 41 bp, Artificial Sequence
  primer
gtaaaacgacggccagttgctagatcagactgtgaaacagg

SEQ ID NO: 84141 - DNA, 20 bp, Artificial Sequence
  primer
caggctgtcatattgcacca

SEQ ID NO: 84142 - DNA, 18 bp, Artificial Sequence
  primer
ccctcgagatggtaccgc

SEQ ID NO: 84143 - DNA, 42 bp, Artificial Sequence
  primer
gtaaaacgacggccagtgccacctagaggcataatgtataag

SEQ ID NO: 84144 - DNA, 39 bp, Artificial Sequence
  primer
gtaaaacgacggccagtcccacactctgctacatctcta

SEQ ID NO: 84145 - DNA, 21 bp, Artificial Sequence
  primer
tttgcaacctagggttctttg

SEQ ID NO: 84146 - DNA, 22 bp, Artificial Sequence
  primer
tcagtgacaaatacttagcccg

SEQ ID NO: 84147 - DNA, 23 bp, Artificial Sequence
  primer
aactctgataaattgccagctcc

SEQ ID NO: 84148 - DNA, 21 bp, Artificial Sequence
  primer
ggaacaaatgcaaatgctcag

SEQ ID NO: 84149 - DNA, 25 bp, Artificial Sequence
  primer
tgcaagtgtttacaactggtacatc

SEQ ID NO: 84150 - DNA, 40 bp, Artificial Sequence
  primer
gtaaaacgacggccagttgtgaggaatgaagacctgactc

SEQ ID NO: 84151 - DNA, 38 bp, Artificial Sequence
  primer
gtaaaacgacggccagtaatgacaccagcaatcttccc

SEQ ID NO: 84152 - DNA, 20 bp, Artificial Sequence
  primer
atttggcaggctttgtttcc

SEQ ID NO: 84153 - DNA, 39 bp, Artificial Sequence
  primer
gtaaaacgacggccagtgccaagcctttatcttacgttg

SEQ ID NO: 84154 - DNA, 21 bp, Artificial Sequence
  primer
taagcggtaccaagaaacagc

SEQ ID NO: 84155 - DNA, 27 bp, Artificial Sequence
  primer
aaagacaataatggagtaacagaggaa

SEQ ID NO: 84156 - DNA, 21 bp, Artificial Sequence
  primer
atcaccagccaaactcgattc

SEQ ID NO: 84157 - DNA, 39 bp, Artificial Sequence
  primer
gtaaaacgacggccagtcaggaaatgtcactggtttgtg

SEQ ID NO: 84158 - DNA, 21 bp, Artificial Sequence
  primer
ttgtgtacagctggcataggg

SEQ ID NO: 84159 - DNA, 21 bp, Artificial Sequence
  primer
gctggaattgtaagggtctgc

SEQ ID NO: 84160 - DNA, 38 bp, Artificial Sequence
  primer
gtaaaacgacggccagtgttcggcttaatctttgtggg

SEQ ID NO: 84161 - DNA, 38 bp, Artificial Sequence
  primer
gtaaaacgacggccagtaacctcagcactgatgctttg

SEQ ID NO: 84162 - DNA, 38 bp, Artificial Sequence
  primer
gtaaaacgacggccagttttacatcaccgtcctctccc

SEQ ID NO: 84163 - DNA, 21 bp, Artificial Sequence
  primer
ttcaaagtctgcctggtgatg

SEQ ID NO: 84164 - DNA, 38 bp, Artificial Sequence
  primer
gtaaaacgacggccagtttccaatctctctccaggcag

SEQ ID NO: 84165 - DNA, 21 bp, Artificial Sequence
  primer
tagcagcatcaccacttccac

SEQ ID NO: 84166 - DNA, 38 bp, Artificial Sequence
  primer
gtaaaacgacggccagttttggctgttcatctaccacg

SEQ ID NO: 84167 - DNA, 21 bp, Artificial Sequence
  primer
tgatttgttccttgctcttgg

SEQ ID NO: 84168 - DNA, 21 bp, Artificial Sequence
  primer
cgctcagcctgtagtgaactg

SEQ ID NO: 84169 - DNA, 21 bp, Artificial Sequence
  primer
attaaacgttgctgggctctg

SEQ ID NO: 84170 - DNA, 21 bp, Artificial Sequence
  primer
gatttcagacacctgcttccc

SEQ ID NO: 84171 - DNA, 19 bp, Artificial Sequence
  primer
tgcttctgtcccttgcagc

SEQ ID NO: 84172 - DNA, 21 bp, Artificial Sequence
  primer
ttccaatcactttgcatccag

SEQ ID NO: 84173 - DNA, 40 bp, Artificial Sequence
  primer
gtaaaacgacggccagtcatctcaaattacggtgttctcc

SEQ ID NO: 84174 - DNA, 21 bp, Artificial Sequence
  primer
ctacactagccaggctgaggc

SEQ ID NO: 84175 - DNA, 21 bp, Artificial Sequence
  primer
tcagccaatgggagtctactg

SEQ ID NO: 84176 - DNA, 38 bp, Artificial Sequence
  primer
gtaaaacgacggccagtaaggctgatgatttcccagag

SEQ ID NO: 84177 - DNA, 22 bp, Artificial Sequence
  primer
gatcactgaagtggtctctccg

SEQ ID NO: 84178 - DNA, 38 bp, Artificial Sequence
  primer
gtaaaacgacggccagttcaggaagcctcgtcaggtag

SEQ ID NO: 84179 - DNA, 19 bp, Artificial Sequence
  primer
cccacgaggtctcagttcc

SEQ ID NO: 84180 - DNA, 21 bp, Artificial Sequence
  primer
ctgtctgcacccttcacactg

SEQ ID NO: 84181 - DNA, 21 bp, Artificial Sequence
  primer
atgactgcagcctagagggag

SEQ ID NO: 84182 - DNA, 19 bp, Artificial Sequence
  primer
gaaggagtgccagtggtcc

SEQ ID NO: 84183 - DNA, 21 bp, Artificial Sequence
  primer
gaagctgagaagagggtaggg

SEQ ID NO: 84184 - DNA, 38 bp, Artificial Sequence
  primer
gtaaaacgacggccagtgtggtactggagctcagggtg

SEQ ID NO: 84185 - DNA, 38 bp, Artificial Sequence
  primer
gtaaaacgacggccagtctttagtcccatgaagctccc

SEQ ID NO: 84186 - DNA, 21 bp, Artificial Sequence
  primer
attctgggcatgagtcactgg

SEQ ID NO: 84187 - DNA, 21 bp, Artificial Sequence
  primer
gacaagtgtgttaccggaggg

SEQ ID NO: 84188 - DNA, 21 bp, Artificial Sequence
  primer
tgtgtctgggctttgtattcc

SEQ ID NO: 84189 - DNA, 20 bp, Artificial Sequence
  primer
agcacctgcttccagaagtg

SEQ ID NO: 84190 - DNA, 36 bp, Artificial Sequence
  primer
gtaaaacgacggccagtcttcctcttgccctcgttg

SEQ ID NO: 84191 - DNA, 21 bp, Artificial Sequence
  primer
taagacgcccttagctttccc

SEQ ID NO: 84192 - DNA, 20 bp, Artificial Sequence
  primer
aagtgatcctcccacctcag

SEQ ID NO: 84193 - DNA, 21 bp, Artificial Sequence
  primer
ttcgtccatctgactctctgg

SEQ ID NO: 84194 - DNA, 38 bp, Artificial Sequence
  primer
gtaaaacgacggccagttttctttcttgccctgaaacc

SEQ ID NO: 84195 - DNA, 40 bp, Artificial Sequence
  primer
gtaaaacgacggccagttggagcattaacaaagtgcaaag

SEQ ID NO: 84196 - DNA, 21 bp, Artificial Sequence
  primer
ccacccactagtgatgtccac

SEQ ID NO: 84197 - DNA, 38 bp, Artificial Sequence
  primer
gtaaaacgacggccagtgccacctttactgtgtcatgg

SEQ ID NO: 84198 - DNA, 38 bp, Artificial Sequence
  primer
gtaaaacgacggccagtgagatgagccctcactaagcc

SEQ ID NO: 84199 - DNA, 21 bp, Artificial Sequence
  primer
aatccctgagatcccttcagc

SEQ ID NO: 84200 - DNA, 22 bp, Artificial Sequence
  primer
tgtagcgggaaatcttcttgag

SEQ ID NO: 84201 - DNA, 20 bp, Artificial Sequence
  primer
ggctgaggaccactgatgtg

SEQ ID NO: 84202 - DNA, 21 bp, Artificial Sequence
  primer
aaagaatgactcagaagcggg

SEQ ID NO: 84203 - DNA, 20 bp, Artificial Sequence
  primer
agaagcctccagaatctgcc

SEQ ID NO: 84204 - DNA, 26 bp, Artificial Sequence
  primer
tcgacaagttaataggcattacaaac

SEQ ID NO: 84205 - DNA, 27 bp, Artificial Sequence
  primer
aaccatcaatatattattaccactgcc

SEQ ID NO: 84206 - DNA, 38 bp, Artificial Sequence
  primer
gtaaaacgacggccagtatttccactttggccattctc

SEQ ID NO: 84207 - DNA, 38 bp, Artificial Sequence
  primer
gtaaaacgacggccagtcttcatgcaacagtctacccg

SEQ ID NO: 84208 - DNA, 19 bp, Artificial Sequence
  primer
cccattccataagctgaca

SEQ ID NO: 84209 - DNA, 38 bp, Artificial Sequence
  primer
gtaaaacgacggccagtgcaacctcagtctgatggaac

SEQ ID NO: 84210 - DNA, 21 bp, Artificial Sequence
  primer
gccgtaaagactttggtgagg

SEQ ID NO: 84211 - DNA, 21 bp, Artificial Sequence
  primer
ctatatcgctgccacttgctg

SEQ ID NO: 84212 - DNA, 21 bp, Artificial Sequence
  primer
agccttggtttggaaactgtg

SEQ ID NO: 84213 - DNA, 38 bp, Artificial Sequence
  primer
gtaaaacgacggccagtacggaatatgaatcaggaggc

SEQ ID NO: 84214 - DNA, 43 bp, Artificial Sequence
  primer
gtaaaacgacggccagtccatgaaaggtttattgaagtaatgg

SEQ ID NO: 84215 - DNA, 22 bp, Artificial Sequence
  primer
tgtttgatctgaaagatttggg

SEQ ID NO: 84216 - DNA, 40 bp, Artificial Sequence
  primer
gtaaaacgacggccagttctcaatgcctttcaattaatgc

SEQ ID NO: 84217 - DNA, 38 bp, Artificial Sequence
  primer
gtaaaacgacggccagtcacacacaggattggaaacag

SEQ ID NO: 84218 - DNA, 36 bp, Artificial Sequence
  primer
gtaaaacgacggccagtcaacaagagcgaaactccg

SEQ ID NO: 84219 - DNA, 21 bp, Artificial Sequence
  primer
tgccacagttctttgcttgac

SEQ ID NO: 84220 - DNA, 39 bp, Artificial Sequence
  primer
gtaaaacgacggccagttttcacgatctgtctggtgttg

SEQ ID NO: 84221 - DNA, 22 bp, Artificial Sequence
  primer
tggcctcactgacttctttctc

SEQ ID NO: 84222 - DNA, 22 bp, Artificial Sequence
  primer
ttaggacagcagttcacctgag

SEQ ID NO: 84223 - DNA, 38 bp, Artificial Sequence
  primer
gtaaaacgacggccagtattcacaggcctgccttactc

SEQ ID NO: 84224 - DNA, 26 bp, Artificial Sequence
  primer
acacacacgtccactatatacattca

SEQ ID NO: 84225 - DNA, 19 bp, Artificial Sequence
  primer
gtgtgagccaatgtgcctg

SEQ ID NO: 84226 - DNA, 38 bp, Artificial Sequence
  primer
gtaaaacgacggccagtaaagcaccgaatgaacaaacc

SEQ ID NO: 84227 - DNA, 19 bp, Artificial Sequence
  primer
tgccgtacagcaccttgag

SEQ ID NO: 84228 - DNA, 38 bp, Artificial Sequence
  primer
gtaaaacgacggccagtcacccggtaatagtggcagtc

SEQ ID NO: 84229 - DNA, 38 bp, Artificial Sequence
  primer
gtaaaacgacggccagtcattccagtagatccaacgcc

SEQ ID NO: 84230 - DNA, 21 bp, Artificial Sequence
  primer
ggagcctggaaggaataagaa

SEQ ID NO: 84231 - DNA, 38 bp, Artificial Sequence
  primer
gtaaaacgacggccagtgttaccaatgcgggagtcttc

SEQ ID NO: 84232 - DNA, 38 bp, Artificial Sequence
  primer
gtaaaacgacggccagtgcaaacaagaagggagactgg

SEQ ID NO: 84233 - DNA, 38 bp, Artificial Sequence
  primer
gtaaaacgacggccagtttccactcaccaacactgtcc

SEQ ID NO: 84234 - DNA, 39 bp, Artificial Sequence
  primer
gtaaaacgacggccagtccaccaatattcagtgtgagcc

SEQ ID NO: 84235 - DNA, 20 bp, Artificial Sequence
  primer
cttctctttgctgtcgggtg

SEQ ID NO: 84236 - DNA, 38 bp, Artificial Sequence
  primer
gtaaaacgacggccagtgaggactgacagaggccttcc

SEQ ID NO: 84237 - DNA, 39 bp, Artificial Sequence
  primer
gtaaaacgacggccagtggaaccaagtggctgtactctg

SEQ ID NO: 84238 - DNA, 21 bp, Artificial Sequence
  primer
ccatcaattcttgcttcccag

SEQ ID NO: 84239 - DNA, 21 bp, Artificial Sequence
  primer
tcactgacctaagagcgatgg

SEQ ID NO: 84240 - DNA, 21 bp, Artificial Sequence
  primer
gggagggatctccttacacag

SEQ ID NO: 84241 - DNA, 21 bp, Artificial Sequence
  primer
tcctaggcaccagtatccctg

SEQ ID NO: 84242 - DNA, 21 bp, Artificial Sequence
  primer
agctgagggacatttgagtcc

SEQ ID NO: 84243 - DNA, 38 bp, Artificial Sequence
  primer
gtaaaacgacggccagtggcttgggtagcactagaagg

SEQ ID NO: 84244 - DNA, 20 bp, Artificial Sequence
  primer
gaaatgagcagcatccttgg

SEQ ID NO: 84245 - DNA, 38 bp, Artificial Sequence
  primer
gtaaaacgacggccagtgtggtggagacagaaacaccc

SEQ ID NO: 84246 - DNA, 39 bp, Artificial Sequence
  primer
gtaaaacgacggccagttgtctctgcaaaggtgcattag

SEQ ID NO: 84247 - DNA, 21 bp, Artificial Sequence
  primer
tgatgtttgcatgctttgttg

SEQ ID NO: 84248 - DNA, 39 bp, Artificial Sequence
  primer
gtaaaacgacggccagtgagcaaggacagctgtatcagg

SEQ ID NO: 84249 - DNA, 40 bp, Artificial Sequence
  primer
gtaaaacgacggccagtcctgtagtgtccatcatacatgc

SEQ ID NO: 84250 - DNA, 22 bp, Artificial Sequence
  primer
ggaggaagcacaatctgacaag

SEQ ID NO: 84251 - DNA, 21 bp, Artificial Sequence
  primer
tcttcggcagttcttagttcg

SEQ ID NO: 84252 - DNA, 21 bp, Artificial Sequence
  primer
gactcccagctctcctcaatg

SEQ ID NO: 84253 - DNA, 44 bp, Artificial Sequence
  primer
gtaaaacgacggccagttctacaagcctattagtttattgcagg

SEQ ID NO: 84254 - DNA, 38 bp, Artificial Sequence
  primer
gtaaaacgacggccagtgacaataaaccagcctgatgc

SEQ ID NO: 84255 - DNA, 38 bp, Artificial Sequence
  primer
gtaaaacgacggccagttgccctattacctacactggc

SEQ ID NO: 84256 - DNA, 37 bp, Artificial Sequence
  primer
gtaaaacgacggccagtttccaacatggtcatttccc

SEQ ID NO: 84257 - DNA, 21 bp, Artificial Sequence
  primer
tgaaacatcttctcctggacg

SEQ ID NO: 84258 - DNA, 38 bp, Artificial Sequence
  primer
gtaaaacgacggccagtagggtgattccaaagaactgc

SEQ ID NO: 84259 - DNA, 19 bp, Artificial Sequence
  primer
acagggaacacggcaagag

SEQ ID NO: 84260 - DNA, 23 bp, Artificial Sequence
  primer
ttgggaagcatgtcttaacaaac

SEQ ID NO: 84261 - DNA, 21 bp, Artificial Sequence
  primer
aacagaccgagactttgcctc

SEQ ID NO: 84262 - DNA, 38 bp, Artificial Sequence
  primer
gtaaaacgacggccagtatcacccattagcctgtgttg

SEQ ID NO: 84263 - DNA, 42 bp, Artificial Sequence
  primer
gtaaaacgacggccagttctagtggtcaaatagtccctgaca

SEQ ID NO: 84264 - DNA, 21 bp, Artificial Sequence
  primer
tgccatcacacctcaagaatc

SEQ ID NO: 84265 - DNA, 21 bp, Artificial Sequence
  primer
tctgaattgatgctcaaaggg

SEQ ID NO: 84266 - DNA, 37 bp, Artificial Sequence
  primer
gtaaaacgacggccagtaagagaaatgcacagcagcc

SEQ ID NO: 84267 - DNA, 20 bp, Artificial Sequence
  primer
ggcaggtaattatgggaggg

SEQ ID NO: 84268 - DNA, 38 bp, Artificial Sequence
  primer
gtaaaacgacggccagtacagcaagacagcaaggtgag

SEQ ID NO: 84269 - DNA, 42 bp, Artificial Sequence
  primer
gtaaaacgacggccagtttcccacatatagtctgcaagtttc

SEQ ID NO: 84270 - DNA, 21 bp, Artificial Sequence
  primer
gaatggctaaattggcaatgg

SEQ ID NO: 84271 - DNA, 38 bp, Artificial Sequence
  primer
gtaaaacgacggccagtctattcaatgcaagtggcctg

SEQ ID NO: 84272 - DNA, 21 bp, Artificial Sequence
  primer
gccttgagaagctccaatgac

SEQ ID NO: 84273 - DNA, 20 bp, Artificial Sequence
  primer
agcctgacatcacaaggctc

SEQ ID NO: 84274 - DNA, 21 bp, Artificial Sequence
  primer
ctctgaactgagcctgcactc

SEQ ID NO: 84275 - DNA, 19 bp, Artificial Sequence
  primer
cactggagacgagctgctg

SEQ ID NO: 84276 - DNA, 38 bp, Artificial Sequence
  primer
gtaaaacgacggccagtctgtgttctgcttctgcattg

SEQ ID NO: 84277 - DNA, 21 bp, Artificial Sequence
  primer
agcctacaattcccaagatgc

SEQ ID NO: 84278 - DNA, 21 bp, Artificial Sequence
  primer
aacatttccacttccctgtgg

SEQ ID NO: 84279 - DNA, 38 bp, Artificial Sequence
  primer
gtaaaacgacggccagtatcgagaaagtcatccttggc

SEQ ID NO: 84280 - DNA, 21 bp, Artificial Sequence
  primer
aatttgagggcaggtgtcaac

SEQ ID NO: 84281 - DNA, 38 bp, Artificial Sequence
  primer
gtaaaacgacggccagtcccagaggacagctgtgtaag

SEQ ID NO: 84282 - DNA, 20 bp, Artificial Sequence
  primer
ccagagaaggcaagcatttg

SEQ ID NO: 84283 - DNA, 20 bp, Artificial Sequence
  primer
ctgcagatgagcattcgacc

SEQ ID NO: 84284 - DNA, 38 bp, Artificial Sequence
  primer
gtaaaacgacggccagtttaaaccctgaaaccgaatcc

SEQ ID NO: 84285 - DNA, 21 bp, Artificial Sequence
  primer
tctaggacaatccaaccaggc

SEQ ID NO: 84286 - DNA, 38 bp, Artificial Sequence
  primer
gtaaaacgacggccagtgtctaggcatcgagacaatgg

SEQ ID NO: 84287 - DNA, 21 bp, Artificial Sequence
  primer
aaaggctcagactcgaaccac

SEQ ID NO: 84288 - DNA, 38 bp, Artificial Sequence
  primer
gtaaaacgacggccagtgggttaagtggatcgtgtgtg

SEQ ID NO: 84289 - DNA, 38 bp, Artificial Sequence
  primer
gtaaaacgacggccagtgggaccttccaaatctgagac

SEQ ID NO: 84290 - DNA, 21 bp, Artificial Sequence
  primer
tttgcatctcacaccctgatg

SEQ ID NO: 84291 - DNA, 39 bp, Artificial Sequence
  primer
gtaaaacgacggccagtgcaagtgtttcaccttctgacc

SEQ ID NO: 84292 - DNA, 21 bp, Artificial Sequence
  primer
ctgtgaaggttgaacaccagg

SEQ ID NO: 84293 - DNA, 21 bp, Artificial Sequence
  primer
cagttgtcaatcctgaatggg

SEQ ID NO: 84294 - DNA, 38 bp, Artificial Sequence
  primer
gtaaaacgacggccagtagcagagaggtcatagccagg

SEQ ID NO: 84295 - DNA, 21 bp, Artificial Sequence
  primer
ctccttctccaagtctctggc

SEQ ID NO: 84296 - DNA, 21 bp, Artificial Sequence
  primer
aacttcctgggaagctgatcc

SEQ ID NO: 84297 - DNA, 21 bp, Artificial Sequence
  primer
aagacgctagctccagtgagg

SEQ ID NO: 84298 - DNA, 38 bp, Artificial Sequence
  primer
gtaaaacgacggccagtcctccaaatatgcctgctctc

SEQ ID NO: 84299 - DNA, 21 bp, Artificial Sequence
  primer
aagctggtttcagactcctgg

SEQ ID NO: 84300 - DNA, 26 bp, Artificial Sequence
  primer
gaggtgatagacaagttaatgatggg

SEQ ID NO: 84301 - DNA, 38 bp, Artificial Sequence
  primer
gtaaaacgacggccagttgcctttctcccacatagtgc

SEQ ID NO: 84302 - DNA, 21 bp, Artificial Sequence
  primer
aagagagggtctgaatggcac

SEQ ID NO: 84303 - DNA, 21 bp, Artificial Sequence
  primer
aataagatgtgatcgccctgc

SEQ ID NO: 84304 - DNA, 21 bp, Artificial Sequence
  primer
tatccacgcagcatgctttac

SEQ ID NO: 84305 - DNA, 21 bp, Artificial Sequence
  primer
ctaaattcctgggaggtgctg

SEQ ID NO: 84306 - DNA, 21 bp, Artificial Sequence
  primer
ataaaggctgtgagagcacgg

SEQ ID NO: 84307 - DNA, 38 bp, Artificial Sequence
  primer
gtaaaacgacggccagttggacagctcagcctgtagtc

SEQ ID NO: 84308 - DNA, 38 bp, Artificial Sequence
  primer
gtaaaacgacggccagttacttccgttccttccagctc

SEQ ID NO: 84309 - DNA, 21 bp, Artificial Sequence
  primer
ttcgctaccactctgttccac

SEQ ID NO: 84310 - DNA, 21 bp, Artificial Sequence
  primer
tcatcgtcttcctcttcctcg

SEQ ID NO: 84311 - DNA, 39 bp, Artificial Sequence
  primer
gtaaaacgacggccagtggcaaacaggaatgcagtaaac

SEQ ID NO: 84312 - DNA, 21 bp, Artificial Sequence
  primer
ccttactcacacctgtgcctg

SEQ ID NO: 84313 - DNA, 20 bp, Artificial Sequence
  primer
ggcagaacaccaaagaccag

SEQ ID NO: 84314 - DNA, 19 bp, Artificial Sequence
  primer
ctctgtccaggccatcctc

SEQ ID NO: 84315 - DNA, 38 bp, Artificial Sequence
  primer
gtaaaacgacggccagtgtgtgggttaggaaggctgag

SEQ ID NO: 84316 - DNA, 20 bp, Artificial Sequence
  primer
gagcagtgtgaggaaggctc

SEQ ID NO: 84317 - DNA, 21 bp, Artificial Sequence
  primer
gagtgtgtcagatctcccagg

SEQ ID NO: 84318 - DNA, 20 bp, Artificial Sequence
  primer
gtttccggtagtccagctcc

SEQ ID NO: 84319 - DNA, 21 bp, Artificial Sequence
  primer
tgaagctccaagtgaagaccc

SEQ ID NO: 84320 - DNA, 20 bp, Artificial Sequence
  primer
gtagtggttggaggtgtggc

SEQ ID NO: 84321 - DNA, 20 bp, Artificial Sequence
  primer
ctaccacccagctcagctcc

SEQ ID NO: 84322 - DNA, 20 bp, Artificial Sequence
  primer
agttgatcgaatggcaggtg

SEQ ID NO: 84323 - DNA, 24 bp, Artificial Sequence
  primer
tcttctttccctttcaataaaccc

SEQ ID NO: 84324 - DNA, 25 bp, Artificial Sequence
  primer
tgagatgaaaccttctatttcttgc

SEQ ID NO: 84325 - DNA, 25 bp, Artificial Sequence
  primer
aaagcctatttgacttcacaagatt

SEQ ID NO: 84326 - DNA, 38 bp, Artificial Sequence
  primer
gtaaaacgacggccagttgacagaatcagaaggcacag

SEQ ID NO: 84327 - DNA, 38 bp, Artificial Sequence
  primer
gtaaaacgacggccagtgggctgaacaccttgactaaa

SEQ ID NO: 84328 - DNA, 22 bp, Artificial Sequence
  primer
tgacacatcataaacgcaggac

SEQ ID NO: 84329 - DNA, 43 bp, Artificial Sequence
  primer
gtaaaacgacggccagtgaatgatcttaatgactccaattcag

SEQ ID NO: 84330 - DNA, 21 bp, Artificial Sequence
  primer
gagactttgggaagctccaag

SEQ ID NO: 84331 - DNA, 21 bp, Artificial Sequence
  primer
caagaatagggcatagcggac

SEQ ID NO: 84332 - DNA, 38 bp, Artificial Sequence
  primer
gtaaaacgacggccagttctcagccagtttcctctcaa

SEQ ID NO: 84333 - DNA, 22 bp, Artificial Sequence
  primer
cacagcaagatacgattcatgg

SEQ ID NO: 84334 - DNA, 39 bp, Artificial Sequence
  primer
gtaaaacgacggccagtggcagtccttggcattaaatag

SEQ ID NO: 84335 - DNA, 38 bp, Artificial Sequence
  primer
gtaaaacgacggccagtccaaagacaaaccacacaagc

SEQ ID NO: 84336 - DNA, 20 bp, Artificial Sequence
  primer
agttgaggtaactcgcctgc

SEQ ID NO: 84337 - DNA, 40 bp, Artificial Sequence
  primer
gtaaaacgacggccagtcctaagcccaccttaactgaaag

SEQ ID NO: 84338 - DNA, 22 bp, Artificial Sequence
  primer
gagaaatccctttctctcctgg

SEQ ID NO: 84339 - DNA, 22 bp, Artificial Sequence
  primer
tgtttctcaaggttacccaagg

SEQ ID NO: 84340 - DNA, 22 bp, Artificial Sequence
  primer
ttcaagccctttcttagctttg

SEQ ID NO: 84341 - DNA, 25 bp, Artificial Sequence
  primer
gaatattgcctaatacacaagtggc

SEQ ID NO: 84342 - DNA, 38 bp, Artificial Sequence
  primer
gtaaaacgacggccagtatttgaagaaccgtggctgtg

SEQ ID NO: 84343 - DNA, 39 bp, Artificial Sequence
  primer
gtaaaacgacggccagtccttcttccctcagatcctttc

SEQ ID NO: 84344 - DNA, 38 bp, Artificial Sequence
  primer
gtaaaacgacggccagttttgtttgctgaaacattcgc

SEQ ID NO: 84345 - DNA, 20 bp, Artificial Sequence
  primer
ccttaggatgctccaagcac

SEQ ID NO: 84346 - DNA, 21 bp, Artificial Sequence
  primer
gggtaacccggttctaggatg

SEQ ID NO: 84347 - DNA, 38 bp, Artificial Sequence
  primer
gtaaaacgacggccagtcactggcacgtctggtaaatc

SEQ ID NO: 84348 - DNA, 38 bp, Artificial Sequence
  primer
gtaaaacgacggccagttttgccctgagattgagaagg

SEQ ID NO: 84349 - DNA, 21 bp, Artificial Sequence
  primer
tcacagaacttggaggtggag

SEQ ID NO: 84350 - DNA, 37 bp, Artificial Sequence
  primer
gtaaaacgacggccagtgaagcggagctttctccaag

SEQ ID NO: 84351 - DNA, 40 bp, Artificial Sequence
  primer
gtaaaacgacggccagtttgtgtgaggcataattcaagtg

SEQ ID NO: 84352 - DNA, 44 bp, Artificial Sequence
  primer
gtaaaacgacggccagtttaacaagcttccaaatgtgtattaga

SEQ ID NO: 84353 - DNA, 22 bp, Artificial Sequence
  primer
aagtactcatgtgggtgactgc

SEQ ID NO: 84354 - DNA, 22 bp, Artificial Sequence
  primer
gggtttacgtgacaatgctctc

SEQ ID NO: 84355 - DNA, 38 bp, Artificial Sequence
  primer
gtaaaacgacggccagtacacatacagaaccactgccc

SEQ ID NO: 84356 - DNA, 21 bp, Artificial Sequence
  primer
accatttctcccatgtcaagc

SEQ ID NO: 84357 - DNA, 21 bp, Artificial Sequence
  primer
cttcaagggagagggattgag

SEQ ID NO: 84358 - DNA, 38 bp, Artificial Sequence
  primer
gtaaaacgacggccagttttgctggatgatgaaactgc

SEQ ID NO: 84359 - DNA, 20 bp, Artificial Sequence
  primer
cgttggtgacgatgatgttg

SEQ ID NO: 84360 - DNA, 20 bp, Artificial Sequence
  primer
gaagcagagggacttcccag

SEQ ID NO: 84361 - DNA, 37 bp, Artificial Sequence
  primer
gtaaaacgacggccagtctcacgaactctccctgagc

SEQ ID NO: 84362 - DNA, 38 bp, Artificial Sequence
  primer
gtaaaacgacggccagtaggcacctctagactccgatg

SEQ ID NO: 84363 - DNA, 35 bp, Artificial Sequence
  primer
gtaaaacgacggccagtccgtcacagctcaccacc

SEQ ID NO: 84364 - DNA, 38 bp, Artificial Sequence
  primer
gtaaaacgacggccagtcatccctctccaggtagaagc

SEQ ID NO: 84365 - DNA, 21 bp, Artificial Sequence
  primer
aagaaccgttaaggcaccatc

SEQ ID NO: 84366 - DNA, 40 bp, Artificial Sequence
  primer
gtaaaacgacggccagttgggcaatatgtgaataatctga

SEQ ID NO: 84367 - DNA, 21 bp, Artificial Sequence
  primer
tctggatgatgcagctggtag

SEQ ID NO: 84368 - DNA, 22 bp, Artificial Sequence
  primer
gaagaggtttgggagagagtca

SEQ ID NO: 84369 - DNA, 21 bp, Artificial Sequence
  primer
attgtgtcctacatgcacacg

SEQ ID NO: 84370 - DNA, 38 bp, Artificial Sequence
  primer
gtaaaacgacggccagtgacctcatctctggacttggg

SEQ ID NO: 84371 - DNA, 21 bp, Artificial Sequence
  primer
ctgactgtgggagaggaggag

SEQ ID NO: 84372 - DNA, 18 bp, Artificial Sequence
  primer
acatggcaaagccctgtc

SEQ ID NO: 84373 - DNA, 38 bp, Artificial Sequence
  primer
gtaaaacgacggccagttgggaaagattgctggaacac

SEQ ID NO: 84374 - DNA, 38 bp, Artificial Sequence
  primer
gtaaaacgacggccagtgaagacttcctggagaggtgg

SEQ ID NO: 84375 - DNA, 20 bp, Artificial Sequence
  primer
aacccaatttgaatccaggc

SEQ ID NO: 84376 - DNA, 22 bp, Artificial Sequence
  primer
cccttattctggaaacagaccc

SEQ ID NO: 84377 - DNA, 36 bp, Artificial Sequence
  primer
gtaaaacgacggccagtcccacagttcccactccag

SEQ ID NO: 84378 - DNA, 21 bp, Artificial Sequence
  primer
gtgaaggtcctggaacgtgag

SEQ ID NO: 84379 - DNA, 38 bp, Artificial Sequence
  primer
gtaaaacgacggccagtccagcacagtgtcatgaatgg

SEQ ID NO: 84380 - DNA, 21 bp, Artificial Sequence
  primer
gactccagagcagatggaagg

SEQ ID NO: 84381 - DNA, 37 bp, Artificial Sequence
  primer
gtaaaacgacggccagtaaaggaattgtgcctgcatc

SEQ ID NO: 84382 - DNA, 21 bp, Artificial Sequence
  primer
aggagaacagccaatctgcac

SEQ ID NO: 84383 - DNA, 37 bp, Artificial Sequence
  primer
gtaaaacgacggccagtgaactcttcagggagggcag

SEQ ID NO: 84384 - DNA, 36 bp, Artificial Sequence
  primer
gtaaaacgacggccagtggaagagcgggtcagacag

SEQ ID NO: 84385 - DNA, 37 bp, Artificial Sequence
  primer
gtaaaacgacggccagtagggtagaggccagaggacc

SEQ ID NO: 84386 - DNA, 21 bp, Artificial Sequence
  primer
taaactgaggtccggtaaggg

SEQ ID NO: 84387 - DNA, 38 bp, Artificial Sequence
  primer
gtaaaacgacggccagtaagacaaggacgctaagagcc

SEQ ID NO: 84388 - DNA, 37 bp, Artificial Sequence
  primer
gtaaaacgacggccagtattgtgcttgcacgacttcc

SEQ ID NO: 84389 - DNA, 38 bp, Artificial Sequence
  primer
gtaaaacgacggccagtagtgccttaaggtgaaccgac

SEQ ID NO: 84390 - DNA, 39 bp, Artificial Sequence
  primer
gtaaaacgacggccagtttactgggtactgcctctgctc

SEQ ID NO: 84391 - DNA, 40 bp, Artificial Sequence
  primer
gtaaaacgacggccagtaaattactgcacctcctctaccc

SEQ ID NO: 84392 - DNA, 21 bp, Artificial Sequence
  primer
aacagcacctaagccaagcac

SEQ ID NO: 84393 - DNA, 38 bp, Artificial Sequence
  primer
gtaaaacgacggccagtaaggctaaagctggcttaccg

SEQ ID NO: 84394 - DNA, 21 bp, Artificial Sequence
  primer
tacctgggccacctgactatc

SEQ ID NO: 84395 - DNA, 22 bp, Artificial Sequence
  primer
gcttgctagaaggaaggctagg

SEQ ID NO: 84396 - DNA, 21 bp, Artificial Sequence
  primer
actccttagggacacgagtgg

SEQ ID NO: 84397 - DNA, 20 bp, Artificial Sequence
  primer
agggagctgagggtatagcg

SEQ ID NO: 84398 - DNA, 22 bp, Artificial Sequence
  primer
gcaattgatatttatcgagccc

SEQ ID NO: 84399 - DNA, 25 bp, Artificial Sequence
  primer
gaaggactagctattgatcagcaaa

SEQ ID NO: 84400 - DNA, 21 bp, Artificial Sequence
  primer
atgacgacggccgtaagtatc

SEQ ID NO: 84401 - DNA, 38 bp, Artificial Sequence
  primer
gtaaaacgacggccagttgctctgttcagaatggcaac

SEQ ID NO: 84402 - DNA, 22 bp, Artificial Sequence
  primer
gcaaacacatatttgctccaag

SEQ ID NO: 84403 - DNA, 24 bp, Artificial Sequence
  primer
cgttcaagtccctactttcacttc

SEQ ID NO: 84404 - DNA, 19 bp, Artificial Sequence
  primer
atggcgggaactggaagag

SEQ ID NO: 84405 - DNA, 30 bp, Artificial Sequence
  primer
atataacctccctatggctctataaattac

SEQ ID NO: 84406 - DNA, 24 bp, Artificial Sequence
  primer
tggctaaatatttggaggctagtg

SEQ ID NO: 84407 - DNA, 22 bp, Artificial Sequence
  primer
ggaaagactgcttgcttctgag

SEQ ID NO: 84408 - DNA, 38 bp, Artificial Sequence
  primer
gtaaaacgacggccagtccttcaggaaagacgtcaatg

SEQ ID NO: 84409 - DNA, 21 bp, Artificial Sequence
  primer
gtcaaggcttgcagttgagtc

SEQ ID NO: 84410 - DNA, 38 bp, Artificial Sequence
  primer
gtaaaacgacggccagtatattctgagcgcaaaggtcc

SEQ ID NO: 84411 - DNA, 21 bp, Artificial Sequence
  primer
caggaggctttcctgtagctg

SEQ ID NO: 84412 - DNA, 44 bp, Artificial Sequence
  primer
gtaaaacgacggccagtgatatggaaactcatttaccaaacaag

SEQ ID NO: 84413 - DNA, 21 bp, Artificial Sequence
  primer
ggctcaagtaatcttgcctgg

SEQ ID NO: 84414 - DNA, 21 bp, Artificial Sequence
  primer
tgcctttcaaacccattacag

SEQ ID NO: 84415 - DNA, 42 bp, Artificial Sequence
  primer
gtaaaacgacggccagtcaaacaactatcctacactgcttcc

SEQ ID NO: 84416 - DNA, 40 bp, Artificial Sequence
  primer
gtaaaacgacggccagtcactgacatcatggatgtgctac

SEQ ID NO: 84417 - DNA, 20 bp, Artificial Sequence
  primer
gtgtcactgcacttcagccc

SEQ ID NO: 84418 - DNA, 21 bp, Artificial Sequence
  primer
cctgctaaacatgatgatggc

SEQ ID NO: 84419 - DNA, 21 bp, Artificial Sequence
  primer
tctcctgaccttgtgatctgc

SEQ ID NO: 84420 - DNA, 21 bp, Artificial Sequence
  primer
atccgccaaagatcttgagtt

SEQ ID NO: 84421 - DNA, 38 bp, Artificial Sequence
  primer
gtaaaacgacggccagtgcagaatcaggctatcaatgc

SEQ ID NO: 84422 - DNA, 22 bp, Artificial Sequence
  primer
tggtggagggtgcaatattatc

SEQ ID NO: 84423 - DNA, 39 bp, Artificial Sequence
  primer
gtaaaacgacggccagtgtccaaatccagaaatgcctac

SEQ ID NO: 84424 - DNA, 21 bp, Artificial Sequence
  primer
agcatgctcactcattccatc

SEQ ID NO: 84425 - DNA, 21 bp, Artificial Sequence
  primer
aactcctggcttcaagcaatc

SEQ ID NO: 84426 - DNA, 21 bp, Artificial Sequence
  primer
aaatgggctcaaccacttctg

SEQ ID NO: 84427 - DNA, 40 bp, Artificial Sequence
  primer
gtaaaacgacggccagttttgaaaggtcagttgccttaac

SEQ ID NO: 84428 - DNA, 18 bp, Artificial Sequence
  primer
ctcctgctttgtggcagc

SEQ ID NO: 84429 - DNA, 22 bp, Artificial Sequence
  primer
tgggaggcacaaagactaactc

SEQ ID NO: 84430 - DNA, 18 bp, Artificial Sequence
  primer
agcccaggacggcttatg

SEQ ID NO: 84431 - DNA, 23 bp, Artificial Sequence
  primer
caatacaacaagtttgcattccc

SEQ ID NO: 84432 - DNA, 18 bp, Artificial Sequence
  primer
agcccaggacggcttatg

SEQ ID NO: 84433 - DNA, 37 bp, Artificial Sequence
  primer
gtaaaacgacggccagttgcagggtagtgctgcaaag

SEQ ID NO: 84434 - DNA, 20 bp, Artificial Sequence
  primer
attgagggctgaatccaagg

SEQ ID NO: 84435 - DNA, 38 bp, Artificial Sequence
  primer
gtaaaacgacggccagttctttccacaacccacaacag

SEQ ID NO: 84436 - DNA, 21 bp, Artificial Sequence
  primer
aggacgtacttgcaaaggcac

SEQ ID NO: 84437 - DNA, 21 bp, Artificial Sequence
  primer
gcctcaatcgacagactgaac

SEQ ID NO: 84438 - DNA, 41 bp, Artificial Sequence
  primer
gtaaaacgacggccagtaaattcctcacctttggctagtct

SEQ ID NO: 84439 - DNA, 45 bp, Artificial Sequence
  primer
gtaaaacgacggccagtcttagtaggtattaacaattgccagaaa

SEQ ID NO: 84440 - DNA, 24 bp, Artificial Sequence
  primer
cattatctatggagacaaggctgg

SEQ ID NO: 84441 - DNA, 21 bp, Artificial Sequence
  primer
caggcagggtgaatagacttg

SEQ ID NO: 84442 - DNA, 24 bp, Artificial Sequence
  primer
tgagcaggtgaggttctatttagc

SEQ ID NO: 84443 - DNA, 38 bp, Artificial Sequence
  primer
gtaaaacgacggccagttcctcctggttgatgtccttg

SEQ ID NO: 84444 - DNA, 38 bp, Artificial Sequence
  primer
gtaaaacgacggccagtacagacgtgtgtgtgagccag

SEQ ID NO: 84445 - DNA, 38 bp, Artificial Sequence
  primer
gtaaaacgacggccagttcctccaaggctacttcatcg

SEQ ID NO: 84446 - DNA, 26 bp, Artificial Sequence
  primer
ttctgtttaatatgaggtaaagctgc

SEQ ID NO: 84447 - DNA, 41 bp, Artificial Sequence
  primer
gtaaaacgacggccagtcagattgcagaagaatgagaatca

SEQ ID NO: 84448 - DNA, 25 bp, Artificial Sequence
  primer
aacccaaagagattgttctgatttc

SEQ ID NO: 84449 - DNA, 24 bp, Artificial Sequence
  primer
gcatattgcctaagcattctgatt

SEQ ID NO: 84450 - DNA, 43 bp, Artificial Sequence
  primer
gtaaaacgacggccagtaaatatttctcactgggaataactgc

SEQ ID NO: 84451 - DNA, 22 bp, Artificial Sequence
  primer
cttcactatgcaatcatcccag

SEQ ID NO: 84452 - DNA, 20 bp, Artificial Sequence
  primer
cctaaggcactcagtggcag

SEQ ID NO: 84453 - DNA, 20 bp, Artificial Sequence
  primer
aaacgaatgaccctcttggg

SEQ ID NO: 84454 - DNA, 21 bp, Artificial Sequence
  primer
aagcatctacgggaagcattg

SEQ ID NO: 84455 - DNA, 21 bp, Artificial Sequence
  primer
ttgtagaaagtgggccctcag

SEQ ID NO: 84456 - DNA, 38 bp, Artificial Sequence
  primer
gtaaaacgacggccagtgaggtctctctggccatgttc

SEQ ID NO: 84457 - DNA, 22 bp, Artificial Sequence
  primer
caggagaagaccctctgtagcc

SEQ ID NO: 84458 - DNA, 22 bp, Artificial Sequence
  primer
gatcagatgctgtacctttcgc

SEQ ID NO: 84459 - DNA, 39 bp, Artificial Sequence
  primer
gtaaaacgacggccagtcactttctgttgcatttgatgg

SEQ ID NO: 84460 - DNA, 21 bp, Artificial Sequence
  primer
ggccaagagaggatcattagc

SEQ ID NO: 84461 - DNA, 37 bp, Artificial Sequence
  primer
gtaaaacgacggccagtaaatgcctgagcaaatgtgg

SEQ ID NO: 84462 - DNA, 21 bp, Artificial Sequence
  primer
aagtagccattgacagggtcc

SEQ ID NO: 84463 - DNA, 39 bp, Artificial Sequence
  primer
gtaaaacgacggccagtgaagctacctctcctccaggtc

SEQ ID NO: 84464 - DNA, 38 bp, Artificial Sequence
  primer
gtaaaacgacggccagtctgagtacacatgcgcaagac

SEQ ID NO: 84465 - DNA, 21 bp, Artificial Sequence
  primer
aagctgtcttgggtcagaagg

SEQ ID NO: 84466 - DNA, 20 bp, Artificial Sequence
  primer
ccatctgtccctgcagtctc

SEQ ID NO: 84467 - DNA, 21 bp, Artificial Sequence
  primer
tgtaaaggatccctcagcagg

SEQ ID NO: 84468 - DNA, 21 bp, Artificial Sequence
  primer
tacccataaccttccacggac

SEQ ID NO: 84469 - DNA, 21 bp, Artificial Sequence
  primer
gatgcctaagggaaggaattg

SEQ ID NO: 84470 - DNA, 21 bp, Artificial Sequence
  primer
tcttagggcaaggtctggttc

SEQ ID NO: 84471 - DNA, 21 bp, Artificial Sequence
  primer
tgtgtaccctcccttggtctc

SEQ ID NO: 84472 - DNA, 38 bp, Artificial Sequence
  primer
gtaaaacgacggccagtgcagaacaaggagacaggacc

SEQ ID NO: 84473 - DNA, 21 bp, Artificial Sequence
  primer
tgtgaagcaccaccctattcc

SEQ ID NO: 84474 - DNA, 38 bp, Artificial Sequence
  primer
gtaaaacgacggccagtagaagccaaggttggaaacag

SEQ ID NO: 84475 - DNA, 21 bp, Artificial Sequence
  primer
actaccatctgcagacccagc

SEQ ID NO: 84476 - DNA, 21 bp, Artificial Sequence
  primer
tcacaaggagttcccacactg

SEQ ID NO: 84477 - DNA, 20 bp, Artificial Sequence
  primer
aggcaaaggagcctctatcg

SEQ ID NO: 84478 - DNA, 21 bp, Artificial Sequence
  primer
cccgtaaataacccttcagcc

SEQ ID NO: 84479 - DNA, 40 bp, Artificial Sequence
  primer
gtaaaacgacggccagtcagctatcattcagctgtttgtc

SEQ ID NO: 84480 - DNA, 21 bp, Artificial Sequence
  primer
tgcaaattacactgccctcac

SEQ ID NO: 84481 - DNA, 38 bp, Artificial Sequence
  primer
gtaaaacgacggccagtctggaaacacagactgggaag

SEQ ID NO: 84482 - DNA, 38 bp, Artificial Sequence
  primer
gtaaaacgacggccagtggcacagagtcacagagatcg

SEQ ID NO: 84483 - DNA, 40 bp, Artificial Sequence
  primer
gtaaaacgacggccagtttgtatgctatccagtgactccc

SEQ ID NO: 84484 - DNA, 26 bp, Artificial Sequence
  primer
tgccaagtgataaatactctagcttt

SEQ ID NO: 84485 - DNA, 21 bp, Artificial Sequence
  primer
aagggccagaaatctctcaac

SEQ ID NO: 84486 - DNA, 27 bp, Artificial Sequence
  primer
atatgctcaactacatagtcatgaacc

SEQ ID NO: 84487 - DNA, 23 bp, Artificial Sequence
  primer
tggcctattattgtcctgagatg

SEQ ID NO: 84488 - DNA, 39 bp, Artificial Sequence
  primer
gtaaaacgacggccagtcattcaggaatcaaaggcaaag

SEQ ID NO: 84489 - DNA, 25 bp, Artificial Sequence
  primer
tgaagtacacactgacgaatcaaag

SEQ ID NO: 84490 - DNA, 40 bp, Artificial Sequence
  primer
gtaaaacgacggccagtagaagaagcatatggttgaaggc

SEQ ID NO: 84491 - DNA, 38 bp, Artificial Sequence
  primer
gtaaaacgacggccagttgggcaccattgctattaagg

SEQ ID NO: 84492 - DNA, 38 bp, Artificial Sequence
  primer
gtaaaacgacggccagttccatcatctagcccttctgc

SEQ ID NO: 84493 - DNA, 40 bp, Artificial Sequence
  primer
gtaaaacgacggccagttctgcaagcatattctaaggtca

SEQ ID NO: 84494 - DNA, 21 bp, Artificial Sequence
  primer
tttaggtcacaacagccttgc

SEQ ID NO: 84495 - DNA, 41 bp, Artificial Sequence
  primer
gtaaaacgacggccagttgtgtgtgtgtaattatggaaggg

SEQ ID NO: 84496 - DNA, 42 bp, Artificial Sequence
  primer
gtaaaacgacggccagttctttaattgtgcattgatagtccc

SEQ ID NO: 84497 - DNA, 38 bp, Artificial Sequence
  primer
gtaaaacgacggccagtgctttggaaatgcctacattg

SEQ ID NO: 84498 - DNA, 39 bp, Artificial Sequence
  primer
gtaaaacgacggccagtaaattcatgaagacatttgccc

SEQ ID NO: 84499 - DNA, 24 bp, Artificial Sequence
  primer
actatgaagtatcatgctgccaat

SEQ ID NO: 84500 - DNA, 43 bp, Artificial Sequence
  primer
gtaaaacgacggccagtttgccaaactgttatatgactaaagc

SEQ ID NO: 84501 - DNA, 38 bp, Artificial Sequence
  primer
gtaaaacgacggccagtgaagaaggaagcccagaggtt

SEQ ID NO: 84502 - DNA, 38 bp, Artificial Sequence
  primer
gtaaaacgacggccagtgtcaggccttctgtgatctgg

SEQ ID NO: 84503 - DNA, 21 bp, Artificial Sequence
  primer
tgctgatgtacttccctctcg

SEQ ID NO: 84504 - DNA, 38 bp, Artificial Sequence
  primer
gtaaaacgacggccagtctaaagggaaagaatggtgcc

SEQ ID NO: 84505 - DNA, 42 bp, Artificial Sequence
  primer
gtaaaacgacggccagtaaatttaaatactgcactgggcttc

SEQ ID NO: 84506 - DNA, 40 bp, Artificial Sequence
  primer
gtaaaacgacggccagttgcacttaaaccttgacgctaac

SEQ ID NO: 84507 - DNA, 41 bp, Artificial Sequence
  primer
gtaaaacgacggccagtgaccctctgtagggatatgaaatg

SEQ ID NO: 84508 - DNA, 19 bp, Artificial Sequence
  primer
ggcagagacgcaggaagtc

SEQ ID NO: 84509 - DNA, 38 bp, Artificial Sequence
  primer
gtaaaacgacggccagttttcagtggctttaggttccc

SEQ ID NO: 84510 - DNA, 38 bp, Artificial Sequence
  primer
gtaaaacgacggccagttgtcaacacagcattccagag

SEQ ID NO: 84511 - DNA, 27 bp, Artificial Sequence
  primer
ggatacacaccatagtaaataaggtcc

SEQ ID NO: 84512 - DNA, 21 bp, Artificial Sequence
  primer
gagctcaaatgatctccctgc

SEQ ID NO: 84513 - DNA, 38 bp, Artificial Sequence
  primer
gtaaaacgacggccagtatgcgtctgaagaacaagcag

SEQ ID NO: 84514 - DNA, 24 bp, Artificial Sequence
  primer
tctaggtgatacaggattccaatg

SEQ ID NO: 84515 - DNA, 21 bp, Artificial Sequence
  primer
acaagtagcaaagtccctccg

SEQ ID NO: 84516 - DNA, 38 bp, Artificial Sequence
  primer
gtaaaacgacggccagtcttgcccttctgcatctcaag

SEQ ID NO: 84517 - DNA, 27 bp, Artificial Sequence
  primer
gggatatcataacaatatctggtgaac

SEQ ID NO: 84518 - DNA, 21 bp, Artificial Sequence
  primer
tgccataaatgtgaaagctgc

SEQ ID NO: 84519 - DNA, 21 bp, Artificial Sequence
  primer
agacaggcttattgctgctcc

SEQ ID NO: 84520 - DNA, 21 bp, Artificial Sequence
  primer
gccatttctggattcttggag

SEQ ID NO: 84521 - DNA, 21 bp, Artificial Sequence
  primer
ctcttagcaaggtcgtgtccc

SEQ ID NO: 84522 - DNA, 38 bp, Artificial Sequence
  primer
gtaaaacgacggccagtatacaaaggtgggcctctctg

SEQ ID NO: 84523 - DNA, 38 bp, Artificial Sequence
  primer
gtaaaacgacggccagtgaggttgaacagcaggctagg

SEQ ID NO: 84524 - DNA, 38 bp, Artificial Sequence
  primer
gtaaaacgacggccagtcatcagcgggtctctccttag

SEQ ID NO: 84525 - DNA, 21 bp, Artificial Sequence
  primer
acagatctggagagcccattc

SEQ ID NO: 84526 - DNA, 38 bp, Artificial Sequence
  primer
gtaaaacgacggccagtatccttccgcatcacattctc

SEQ ID NO: 84527 - DNA, 38 bp, Artificial Sequence
  primer
gtaaaacgacggccagtccacacccacctaatttgcag

SEQ ID NO: 84528 - DNA, 19 bp, Artificial Sequence
  primer
aggcgtcctctgaaccttg

SEQ ID NO: 84529 - DNA, 21 bp, Artificial Sequence
  primer
tctagtgcaacacagccaacc

SEQ ID NO: 84530 - DNA, 38 bp, Artificial Sequence
  primer
gtaaaacgacggccagtaaatgaggagagaccaggcac

SEQ ID NO: 84531 - DNA, 38 bp, Artificial Sequence
  primer
gtaaaacgacggccagtggaagaagcacatcaaacagg

SEQ ID NO: 84532 - DNA, 37 bp, Artificial Sequence
  primer
gtaaaacgacggccagtttcaccgtggtctcgatctc

SEQ ID NO: 84533 - DNA, 19 bp, Artificial Sequence
  primer
acacccaggtctggattcg

SEQ ID NO: 84534 - DNA, 37 bp, Artificial Sequence
  primer
gtaaaacgacggccagtggtctggttccctctatggc

SEQ ID NO: 84535 - DNA, 38 bp, Artificial Sequence
  primer
gtaaaacgacggccagtagggcaccaaacaactagagg

SEQ ID NO: 84536 - DNA, 22 bp, Artificial Sequence
  primer
ccactcctacagacatcaaggc

SEQ ID NO: 84537 - DNA, 21 bp, Artificial Sequence
  primer
caaacgcagacagcatcactc

SEQ ID NO: 84538 - DNA, 21 bp, Artificial Sequence
  primer
gcatcttctcttactgcctgg

SEQ ID NO: 84539 - DNA, 38 bp, Artificial Sequence
  primer
gtaaaacgacggccagtaagtgcggtcttcaccaagag

SEQ ID NO: 84540 - DNA, 38 bp, Artificial Sequence
  primer
gtaaaacgacggccagtcttggtgaacaacctggactg

SEQ ID NO: 84541 - DNA, 38 bp, Artificial Sequence
  primer
gtaaaacgacggccagtatcttccagaagcagcagagg

SEQ ID NO: 84542 - DNA, 36 bp, Artificial Sequence
  primer
gtaaaacgacggccagtccagagctgacagccagtg

SEQ ID NO: 84543 - DNA, 37 bp, Artificial Sequence
  primer
gtaaaacgacggccagtagggagtggagaactgcctg

SEQ ID NO: 84544 - DNA, 38 bp, Artificial Sequence
  primer
gtaaaacgacggccagtagctcttgaggagtctgtccc

SEQ ID NO: 84545 - DNA, 37 bp, Artificial Sequence
  primer
gtaaaacgacggccagtccatcctggctaatacggtg

SEQ ID NO: 84546 - DNA, 21 bp, Artificial Sequence
  primer
gctgcagtagagggagagagc

SEQ ID NO: 84547 - DNA, 38 bp, Artificial Sequence
  primer
gtaaaacgacggccagtggtgacccagtgactctagcc

SEQ ID NO: 84548 - DNA, 20 bp, Artificial Sequence
  primer
agattgcaccactgcaacag

SEQ ID NO: 84549 - DNA, 38 bp, Artificial Sequence
  primer
gtaaaacgacggccagtgagctcaactcgactccacag

SEQ ID NO: 84550 - DNA, 40 bp, Artificial Sequence
  primer
gtaaaacgacggccagtccgtagaatttaaaccaccactg

SEQ ID NO: 84551 - DNA, 38 bp, Artificial Sequence
  primer
gtaaaacgacggccagtttctcctgaacctgcttcacc

SEQ ID NO: 84552 - DNA, 39 bp, Artificial Sequence
  primer
gtaaaacgacggccagttgaattaaagctgttggaagcc

SEQ ID NO: 84553 - DNA, 22 bp, Artificial Sequence
  primer
caggatgacaagagcgaaactc

SEQ ID NO: 84554 - DNA, 40 bp, Artificial Sequence; identical to SEQ ID NO: 84550
  primer

SEQ ID NO: 84555 - DNA, 21 bp, Artificial Sequence
  primer
aggagtgggaaagacaactgg

SEQ ID NO: 84556 - DNA, 35 bp, Artificial Sequence
  primer
gtaaaacgacggccagttccagcctaggcaacagg

SEQ ID NO: 84557 - DNA, 42 bp, Artificial Sequence
  primer
gtaaaacgacggccagttttcatgtctatttccttcgataaa

SEQ ID NO: 84558 - DNA, 40 bp, Artificial Sequence
  primer
gtaaaacgacggccagttcatcaaattgacccaatcacat

SEQ ID NO: 84559 - DNA, 38 bp, Artificial Sequence
  primer
gtaaaacgacggccagttgccaatcaaatgagatcagg

SEQ ID NO: 84560 - DNA, 21 bp, Artificial Sequence
  primer
ggtagaatgccaacagcacag

SEQ ID NO: 84561 - DNA, 41 bp, Artificial Sequence
  primer
gtaaaacgacggccagttggctcataatagtaaatggcaac

SEQ ID NO: 84562 - DNA, 20 bp, Artificial Sequence
  primer
tgcagcatactctgctcctc

SEQ ID NO: 84563 - DNA, 37 bp, Artificial Sequence
  primer
gtaaaacgacggccagtctcctgttcgcattgctttg

SEQ ID NO: 84564 - DNA, 21 bp, Artificial Sequence
  primer
tgctatggttccactcttggg

SEQ ID NO: 84565 - DNA, 20 bp, Artificial Sequence
  primer
aggacagacctgggtatggg

SEQ ID NO: 84566 - DNA, 22 bp, Artificial Sequence
  primer
gcaccaactatgtaccaagcag

SEQ ID NO: 84567 - DNA, 19 bp, Artificial Sequence
  primer
tgagtcaggaagcccagag

SEQ ID NO: 84568 - DNA, 26 bp, Artificial Sequence
  primer
ggttgctcaaatatattgtatgatgg

SEQ ID NO: 84569 - DNA, 21 bp, Artificial Sequence
  primer
tacttccaatggcaagcaagg

SEQ ID NO: 84570 - DNA, 39 bp, Artificial Sequence
  primer
gtaaaacgacggccagtaacaaactttctttgcactggc

SEQ ID NO: 84571 - DNA, 41 bp, Artificial Sequence
  primer
gtaaaacgacggccagtttctctcagacgtagcttattccc

SEQ ID NO: 84572 - DNA, 21 bp, Artificial Sequence
  primer
atgattgggctgtgtttaggg

SEQ ID NO: 84573 - DNA, 39 bp, Artificial Sequence
  primer
gtaaaacgacggccagtagggaggtatagttcctcaggg

SEQ ID NO: 84574 - DNA, 38 bp, Artificial Sequence
  primer
gtaaaacgacggccagtgtctggctggcctagatgttc

SEQ ID NO: 84575 - DNA, 21 bp, Artificial Sequence
  primer
ggaaccaagagacagggacac

SEQ ID NO: 84576 - DNA, 39 bp, Artificial Sequence
  primer
gtaaaacgacggccagtccaactcaaacctgaacaaagg

SEQ ID NO: 84577 - DNA, 18 bp, Artificial Sequence
  primer
gtgtgagccactgtgccc

SEQ ID NO: 84578 - DNA, 39 bp, Artificial Sequence
  primer
gtaaaacgacggccagtccagtacaatcacttcccacag

SEQ ID NO: 84579 - DNA, 21 bp, Artificial Sequence
  primer
tagtgcctggaggagagaagg

SEQ ID NO: 84580 - DNA, 21 bp, Artificial Sequence
  primer
cttgaactcctagcctcctgc

SEQ ID NO: 84581 - DNA, 40 bp, Artificial Sequence
  primer
gtaaaacgacggccagtcgggaaatgctgaaatcaataac

SEQ ID NO: 84582 - DNA, 39 bp, Artificial Sequence
  primer
gtaaaacgacggccagtcacaagatgagactggagaggg

SEQ ID NO: 84583 - DNA, 21 bp, Artificial Sequence
  primer
gtaggaatggtgcaaggaagg

SEQ ID NO: 84584 - DNA, 23 bp, Artificial Sequence
  primer
ccgtgcttacacagatccttaac

SEQ ID NO: 84585 - DNA, 21 bp, Artificial Sequence
  primer
tagccttcaatagcaccaggg

SEQ ID NO: 84586 - DNA, 20 bp, Artificial Sequence
  primer
aacgtgggaaagttccatcc

SEQ ID NO: 84587 - DNA, 39 bp, Artificial Sequence
  primer
gtaaaacgacggccagtgcctagctaagggttaaggctg

SEQ ID NO: 84588 - DNA, 23 bp, Artificial Sequence
  primer
tttgaaacactcctggcttagaa

SEQ ID NO: 84589 - DNA, 37 bp, Artificial Sequence
  primer
gtaaaacgacggccagtcattagttgcggttgcaaag

SEQ ID NO: 84590 - DNA, 20 bp, Artificial Sequence
  primer
cccaaacctcagcatcacac

SEQ ID NO: 84591 - DNA, 26 bp, Artificial Sequence
  primer
gctacttcaatttcccagtaagaaag

SEQ ID NO: 84592 - DNA, 21 bp, Artificial Sequence
  primer
aggaggtaaagaggccagagc

SEQ ID NO: 84593 - DNA, 21 bp, Artificial Sequence
  primer
accagcctagaggtgccaata

SEQ ID NO: 84594 - DNA, 38 bp, Artificial Sequence
  primer
gtaaaacgacggccagtttcaagaagacactggcaagc

SEQ ID NO: 84595 - DNA, 38 bp, Artificial Sequence
  primer
gtaaaacgacggccagttgggaatagagactgtggagg

SEQ ID NO: 84596 - DNA, 38 bp, Artificial Sequence
  primer
gtaaaacgacggccagttgaagggaatttgctgctttc

SEQ ID NO: 84597 - DNA, 38 bp, Artificial Sequence
  primer
gtaaaacgacggccagttagagccaacacaggctctcc

SEQ ID NO: 84598 - DNA, 20 bp, Artificial Sequence
  primer
atggagccctgggttacaag

SEQ ID NO: 84599 - DNA, 24 bp, Artificial Sequence
  primer
ggccagtgaatcatagactgtagg

SEQ ID NO: 84600 - DNA, 22 bp, Artificial Sequence
  primer
tttgcaacagtttgtgaccatc

SEQ ID NO: 84601 - DNA, 21 bp, Artificial Sequence
  primer
aggaccatgatctccacatcc

SEQ ID NO: 84602 - DNA, 37 bp, Artificial Sequence
  primer
gtaaaacgacggccagtgctgccttcagtgagactgg

SEQ ID NO: 84603 - DNA, 21 bp, Artificial Sequence
  primer
gaggaaggaagtttcgaaggg

SEQ ID NO: 84604 - DNA, 38 bp, Artificial Sequence
  primer
gtaaaacgacggccagttgagcaacaagcatgactacg

SEQ ID NO: 84605 - DNA, 38 bp, Artificial Sequence
  primer
gtaaaacgacggccagtaaacctcgcttctcattgtgc

SEQ ID NO: 84606 - DNA, 21 bp, Artificial Sequence
  primer
atacaggacatgcaatgctgc

SEQ ID NO: 84607 - DNA, 21 bp, Artificial Sequence
  primer
agactggctcattgtgtggag

SEQ ID NO: 84608 - DNA, 22 bp, Artificial Sequence
  primer
tgcaactctgtgactgttcacc

SEQ ID NO: 84609 - DNA, 38 bp, Artificial Sequence
  primer
gtaaaacgacggccagttttccatcctggattctcagc

SEQ ID NO: 84610 - DNA, 38 bp, Artificial Sequence
  primer
gtaaaacgacggccagttatgcctgtagtgccagctcc

SEQ ID NO: 84611 - DNA, 21 bp, Artificial Sequence
  primer
aatttcaatggaacctcggtg

SEQ ID NO: 84612 - DNA, 21 bp, Artificial Sequence
  primer
agcttgaagcaggttcctttg

SEQ ID NO: 84613 - DNA, 21 bp, Artificial Sequence
  primer
atttgaggtttgtagcgtggg

SEQ ID NO: 84614 - DNA, 27 bp, Artificial Sequence
  primer
tgtattaaagccagttactaaggaggc

SEQ ID NO: 84615 - DNA, 38 bp, Artificial Sequence
  primer
gtaaaacgacggccagttgaggctcatctgtggtatgg

SEQ ID NO: 84616 - DNA, 40 bp, Artificial Sequence
  primer
gtaaaacgacggccagttgaccatagcctaatattgcacg

SEQ ID NO: 84617 - DNA, 22 bp, Artificial Sequence
  primer
tggaaactggtctctggtaatg

SEQ ID NO: 84618 - DNA, 22 bp, Artificial Sequence
  primer
caatgacagggagaagatggtc

SEQ ID NO: 84619 - DNA, 21 bp, Artificial Sequence
  primer
accctgatttctgcctcaaag

SEQ ID NO: 84620 - DNA, 21 bp, Artificial Sequence
  primer
ctcctcttgggagctctgttc

SEQ ID NO: 84621 - DNA, 38 bp, Artificial Sequence
  primer
gtaaaacgacggccagtgacacagacagtgggtcaagg

SEQ ID NO: 84622 - DNA, 37 bp, Artificial Sequence
  primer
gtaaaacgacggccagtctttgcatttggtgctgacc

SEQ ID NO: 84623 - DNA, 38 bp, Artificial Sequence
  primer
gtaaaacgacggccagttagtcctagtgctgggatggg

SEQ ID NO: 84624 - DNA, 38 bp, Artificial Sequence
  primer
gtaaaacgacggccagtagctaagcagaaaggccactg

SEQ ID NO: 84625 - DNA, 21 bp, Artificial Sequence
  primer
ggcaacatagtgagcgagacc

SEQ ID NO: 84626 - DNA, 21 bp, Artificial Sequence
  primer
agggagtgagacaaggtcagg

SEQ ID NO: 84627 - DNA, 21 bp, Artificial Sequence
  primer
actatggattgctggacaccc

SEQ ID NO: 84628 - DNA, 21 bp, Artificial Sequence
  primer
catacaaggcctctgctccac

SEQ ID NO: 84629 - DNA, 21 bp, Artificial Sequence
  primer
tccatctccctccctgttaag

SEQ ID NO: 84630 - DNA, 40 bp, Artificial Sequence
  primer
gtaaaacgacggccagtttcaacaatttctacaatggcct

SEQ ID NO: 84631 - DNA, 21 bp, Artificial Sequence
  primer
ggtttcatttgaggacggttc

SEQ ID NO: 84632 - DNA, 39 bp, Artificial Sequence
  primer
gtaaaacgacggccagtggacaagtactttaggcgaggc

SEQ ID NO: 84633 - DNA, 40 bp, Artificial Sequence
  primer
gtaaaacgacggccagtgaaacaaacctctctgatccagg

SEQ ID NO: 84634 - DNA, 44 bp, Artificial Sequence
  primer
gtaaaacgacggccagttgaacatgtttacttagagaccaaagc

SEQ ID NO: 84635 - DNA, 43 bp, Artificial Sequence
  primer
gtaaaacgacggccagttctgacatattaacataggcaggaaa

SEQ ID NO: 84636 - DNA, 20 bp, Artificial Sequence
  primer
acatggctccttgtctcgtg

SEQ ID NO: 84637 - DNA, 21 bp, Artificial Sequence
  primer
gctataatgaaacggttcccg

SEQ ID NO: 84638 - DNA, 23 bp, Artificial Sequence
  primer
tctgcatatggatatgagcacag

SEQ ID NO: 84639 - DNA, 38 bp, Artificial Sequence
  primer
gtaaaacgacggccagtaagtctccaaacaacggcatc

SEQ ID NO: 84640 - DNA, 20 bp, Artificial Sequence
  primer
ctccagacccgcacacttag

SEQ ID NO: 84641 - DNA, 41 bp, Artificial Sequence
  primer
gtaaaacgacggccagtttacatacagctgaaattgccttt

SEQ ID NO: 84642 - DNA, 37 bp, Artificial Sequence
  primer
gtaaaacgacggccagtttgccagctcccttctacag

SEQ ID NO: 84643 - DNA, 19 bp, Artificial Sequence
  primer
tttagacgctggccatgtt

SEQ ID NO: 84644 - DNA, 21 bp, Artificial Sequence
  primer
atgaacatttaggcactgggc

SEQ ID NO: 84645 - DNA, 21 bp, Artificial Sequence
  primer
cgcagaaccactatccctttc

SEQ ID NO: 84646 - DNA, 38 bp, Artificial Sequence
  primer
gtaaaacgacggccagtagccaataatgcttgaggtcc

SEQ ID NO: 84647 - DNA, 38 bp, Artificial Sequence
  primer
gtaaaacgacggccagtacttatgaccctgtccatgcc

SEQ ID NO: 84648 - DNA, 21 bp, Artificial Sequence
  primer
acactagcgccctggtttatg

SEQ ID NO: 84649 - DNA, 21 bp, Artificial Sequence
  primer
tggagccttactcttgactgc

SEQ ID NO: 84650 - DNA, 20 bp, Artificial Sequence
  primer
ttctttctttgcacgttcgg

SEQ ID NO: 84651 - DNA, 38 bp, Artificial Sequence
  primer
gtaaaacgacggccagtcttggcacaaagacacctgag

SEQ ID NO: 84652 - DNA, 21 bp, Artificial Sequence
  primer
tttcggtgagaaaggctatgc

SEQ ID NO: 84653 - DNA, 38 bp, Artificial Sequence
  primer
gtaaaacgacggccagtcacacacagcaccctgagttc

SEQ ID NO: 84654 - DNA, 21 bp, Artificial Sequence
  primer
tgccctctgaatgatgctatg

SEQ ID NO: 84655 - DNA, 21 bp, Artificial Sequence
  primer
agaggctacatgactttcccg

SEQ ID NO: 84656 - DNA, 20 bp, Artificial Sequence
  primer
gaactacccggattccaagg

SEQ ID NO: 84657 - DNA, 38 bp, Artificial Sequence
  primer
gtaaaacgacggccagttgccctccaaaggttcttaac

SEQ ID NO: 84658 - DNA, 39 bp, Artificial Sequence
  primer
gtaaaacgacggccagtgggctaccaatacctacttccc

SEQ ID NO: 84659 - DNA, 39 bp, Artificial Sequence
  primer
gtaaaacgacggccagtggagattagaagccagtgatcc

SEQ ID NO: 84660 - DNA, 36 bp, Artificial Sequence
  primer
gtaaaacgacggccagtaaaggcaacggaatgcttg

SEQ ID NO: 84661 - DNA, 38 bp, Artificial Sequence
  primer
gtaaaacgacggccagtacctggtaccaactgctctcc

SEQ ID NO: 84662 - DNA, 25 bp, Artificial Sequence
  primer
tgtaaacttctatgcctactggcac

SEQ ID NO: 84663 - DNA, 38 bp, Artificial Sequence
  primer
gtaaaacgacggccagtaagcaagcaagcaagttggac

SEQ ID NO: 84664 - DNA, 38 bp, Artificial Sequence
  primer
gtaaaacgacggccagttcttgctgaatgaatgaatgc

SEQ ID NO: 84665 - DNA, 38 bp, Artificial Sequence
  primer
gtaaaacgacggccagtcacctaccaaatcgaaactcg

SEQ ID NO: 84666 - DNA, 38 bp, Artificial Sequence
  primer
gtaaaacgacggccagtacagctcctttccattcatgc

SEQ ID NO: 84667 - DNA, 24 bp, Artificial Sequence
  primer
cactttgtgtaagacaatgatccc

SEQ ID NO: 84668 - DNA, 38 bp, Artificial Sequence
  primer
gtaaaacgacggccagtaacttcacctcccacaccaag

SEQ ID NO: 84669 - DNA, 29 bp, Artificial Sequence
  primer
cataacctcctaatcaagttaaattctca

SEQ ID NO: 84670 - DNA, 40 bp, Artificial Sequence
  primer
gtaaaacgacggccagtccaacatagacaaagcactgacc

SEQ ID NO: 84671 - DNA, 38 bp, Artificial Sequence
  primer
gtaaaacgacggccagtagtttaacaatcggctttgcc

SEQ ID NO: 84672 - DNA, 39 bp, Artificial Sequence
  primer
gtaaaacgacggccagttgttggatggatgaacactcag

SEQ ID NO: 84673 - DNA, 23 bp, Artificial Sequence
  primer
gcgcttaacgtatagaaaggtgc

SEQ ID NO: 84674 - DNA, 21 bp, Artificial Sequence
  primer
tagggcagaaactcccatgac

SEQ ID NO: 84675 - DNA, 22 bp, Artificial Sequence
  primer
ttgctgggtgatgtttgatatg

SEQ ID NO: 84676 - DNA, 20 bp, Artificial Sequence
  primer
cccacaaccaaccagcttag

SEQ ID NO: 84677 - DNA, 21 bp, Artificial Sequence
  primer
gtttcaaccacgctcatttgg

SEQ ID NO: 84678 - DNA, 38 bp, Artificial Sequence
  primer
gtaaaacgacggccagtcataatctggtggcacttcgg

SEQ ID NO: 84679 - DNA, 38 bp, Artificial Sequence
  primer
gtaaaacgacggccagtctcactccgctgagtaacagg

SEQ ID NO: 84680 - DNA, 21 bp, Artificial Sequence
  primer
gcattctgcgctatacagacc

SEQ ID NO: 84681 - DNA, 22 bp, Artificial Sequence
  primer
aatgtgaccacatgcatctctg

SEQ ID NO: 84682 - DNA, 19 bp, Artificial Sequence
  primer
actgacgcttcctccaagc

SEQ ID NO: 84683 - DNA, 21 bp, Artificial Sequence
  primer
tagggcagaaactcccatgac

SEQ ID NO: 84684 - DNA, 21 bp, Artificial Sequence
  primer
caagttggcccaggtctttag

SEQ ID NO: 84685 - DNA, 39 bp, Artificial Sequence
  primer
gtaaaacgacggccagtgctgcaagcttacaaattgttg

SEQ ID NO: 84686 - DNA, 20 bp, Artificial Sequence
  primer
cagggtctctcctctttggg

SEQ ID NO: 84687 - DNA, 21 bp, Artificial Sequence
  primer
cccagtacttgcgtctctcac

SEQ ID NO: 84688 - DNA, 38 bp, Artificial Sequence
  primer
gtaaaacgacggccagtacaattgaggttgagcgacag

SEQ ID NO: 84689 - DNA, 21 bp, Artificial Sequence
  primer
accactcacctgccctgtaac

SEQ ID NO: 84690 - DNA, 41 bp, Artificial Sequence
  primer
gtaaaacgacggccagtgcagatcactgcaagtctactgag

SEQ ID NO: 84691 - DNA, 38 bp, Artificial Sequence
  primer
gtaaaacgacggccagtaggtccaggtaggcaatcaac

SEQ ID NO: 84692 - DNA, 21 bp, Artificial Sequence
  primer
aggtgcaagtgaggttgtgtg

SEQ ID NO: 84693 - DNA, 21 bp, Artificial Sequence
  primer
tgtcagtggcatcatttggag

SEQ ID NO: 84694 - DNA, 38 bp, Artificial Sequence
  primer
gtaaaacgacggccagttggacctagaagcagtggtcc

SEQ ID NO: 84695 - DNA, 21 bp, Artificial Sequence
  primer
tggttagaccgcattcctttg

SEQ ID NO: 84696 - DNA, 21 bp, Artificial Sequence
  primer
attgtttctgtttggcttggg

SEQ ID NO: 84697 - DNA, 21 bp, Artificial Sequence
  primer
cttgaggccagtaggtgcttc

SEQ ID NO: 84698 - DNA, 19 bp, Artificial Sequence
  primer
cagacctcttggcaggacc

SEQ ID NO: 84699 - DNA, 38 bp, Artificial Sequence
  primer
gtaaaacgacggccagtgataagggattgtgcctctgg

SEQ ID NO: 84700 - DNA, 20 bp, Artificial Sequence
  primer
accactgcctgtcattgctg

SEQ ID NO: 84701 - DNA, 37 bp, Artificial Sequence
  primer
gtaaaacgacggccagtaggtgcacagtggtggagac

SEQ ID NO: 84702 - DNA, 21 bp, Artificial Sequence
  primer
catttcttccctcacgcctac

SEQ ID NO: 84703 - DNA, 38 bp, Artificial Sequence
  primer
gtaaaacgacggccagtccagaaccatcctcctctgtg

SEQ ID NO: 84704 - DNA, 20 bp, Artificial Sequence
  primer
gctcccactgcttaaggacc

SEQ ID NO: 84705 - DNA, 18 bp, Artificial Sequence
  primer
gcggctgcagtgtctgtc

SEQ ID NO: 84706 - DNA, 21 bp, Artificial Sequence
  primer
ctggagacaggtcacaggaag

SEQ ID NO: 84707 - DNA, 19 bp, Artificial Sequence
  primer
acacagccctgctcacctc

SEQ ID NO: 84708 - DNA, 21 bp, Artificial Sequence
  primer
tgtttgtgcttcagggatcag

SEQ ID NO: 84709 - DNA, 36 bp, Artificial Sequence
  primer
gtaaaacgacggccagtgccacagcactggacacac

SEQ ID NO: 84710 - DNA, 20 bp, Artificial Sequence
  primer
cttgtgggactcctgggttc

SEQ ID NO: 84711 - DNA, 19 bp, Artificial Sequence
  primer
gaccacaggtgcacaccac

SEQ ID NO: 84712 - DNA, 21 bp, Artificial Sequence
  primer
gcccatcaaaggatacacttg

SEQ ID NO: 84713 - DNA, 20 bp, Artificial Sequence
  primer
gtatgggtccacgacgactg

SEQ ID NO: 84714 - DNA, 38 bp, Artificial Sequence
  primer
gtaaaacgacggccagtaagcacatatgcagatttcgg

SEQ ID NO: 84715 - DNA, 38 bp, Artificial Sequence
  primer
gtaaaacgacggccagtagcattgcatgctgtatgtgg

SEQ ID NO: 84716 - DNA, 35 bp, Artificial Sequence
  primer
gtaaaacgacggccagtgacagtggccctgctctg

SEQ ID NO: 84717 - DNA, 38 bp, Artificial Sequence
  primer
gtaaaacgacggccagtctctcaccgttcttgaaaccc

SEQ ID NO: 84718 - DNA, 21 bp, Artificial Sequence
  primer
taacgtctggagtcccaggtc

SEQ ID NO: 84719 - DNA, 18 bp, Artificial Sequence
  primer
agagcgagctgggagctg

SEQ ID NO: 84720 - DNA, 38 bp, Artificial Sequence
  primer
gtaaaacgacggccagttcacggaaaccactcacagag

SEQ ID NO: 84721 - DNA, 36 bp, Artificial Sequence
  primer
gtaaaacgacggccagtgaaagctgctgggttcagg

SEQ ID NO: 84722 - DNA, 21 bp, Artificial Sequence
  primer
gtctagcctggcattgctctg

SEQ ID NO: 84723 - DNA, 20 bp, Artificial Sequence
  primer
gctgacgagatgagggagtg

SEQ ID NO: 84724 - DNA, 20 bp, Artificial Sequence
  primer
cccagtgatgtggaactccc

SEQ ID NO: 84725 - DNA, 22 bp, Artificial Sequence
  primer
catctttgcattggatgaactg

SEQ ID NO: 84726 - DNA, 36 bp, Artificial Sequence
  primer
gtaaaacgacggccagtactccagactcacaggccc

SEQ ID NO: 84727 - DNA, 21 bp, Artificial Sequence
  primer
tgcaaaggtggttctagttgc

SEQ ID NO: 84728 - DNA, 21 bp, Artificial Sequence
  primer
caataatgggactggtggagg

SEQ ID NO: 84729 - DNA, 21 bp, Artificial Sequence
  primer
tctaatggactgcagtggagc

SEQ ID NO: 84730 - DNA, 21 bp, Artificial Sequence
  primer
gcatgtaactatggcagtcgc

SEQ ID NO: 84731 - DNA, 38 bp, Artificial Sequence
  primer
gtaaaacgacggccagtgcaaggatgctgattatctgg

SEQ ID NO: 84732 - DNA, 20 bp, Artificial Sequence
  primer
cacaggagagaggcaagctg

SEQ ID NO: 84733 - DNA, 21 bp, Artificial Sequence
  primer
actactgccagctgttggagc

SEQ ID NO: 84734 - DNA, 38 bp, Artificial Sequence
  primer
gtaaaacgacggccagtgggaacatcttcaccaccttg

SEQ ID NO: 84735 - DNA, 21 bp, Artificial Sequence
  primer
gaggaagaagtgaccgtttgg

SEQ ID NO: 84736 - DNA, 21 bp, Artificial Sequence
  primer
ctgatgcttcacgtcttccag

SEQ ID NO: 84737 - DNA, 21 bp, Artificial Sequence
  primer
ctgttgttggcacttctgctg

SEQ ID NO: 84738 - DNA, 21 bp, Artificial Sequence
  primer
aaggaagaggaggaaagggtg

SEQ ID NO: 84739 - DNA, 21 bp, Artificial Sequence
  primer
gtgtccagggtgggaatttac

SEQ ID NO: 84740 - DNA, 21 bp, Artificial Sequence
  primer
atgtggtgtcttcattgccac

SEQ ID NO: 84741 - DNA, 21 bp, Artificial Sequence
  primer
atcccaaatcgaacattcagc

SEQ ID NO: 84742 - DNA, 37 bp, Artificial Sequence
  primer
gtaaaacgacggccagtgaagtccggtagctgcagag

SEQ ID NO: 84743 - DNA, 37 bp, Artificial Sequence
  primer
gtaaaacgacggccagtaggtgagggctcacttctgc

SEQ ID NO: 84744 - DNA, 20 bp, Artificial Sequence
  primer
ctaacggctctgaccactgc

SEQ ID NO: 84745 - DNA, 38 bp, Artificial Sequence
  primer
gtaaaacgacggccagtattgaaggtgtcacgggattc

SEQ ID NO: 84746 - DNA, 38 bp, Artificial Sequence
  primer
gtaaaacgacggccagtacctgctaatatgcacatgga

SEQ ID NO: 84747 - DNA, 38 bp, Artificial Sequence
  primer
gtaaaacgacggccagttaacccaatttgctcatgaaa

SEQ ID NO: 84748 - DNA, 27 bp, Artificial Sequence
  primer
aaatatcagatctcacgttgattagtg

SEQ ID NO: 84749 - DNA, 44 bp, Artificial Sequence
  primer
gtaaaacgacggccagttgatgcacttagctttatactgaaatc

SEQ ID NO: 84750 - DNA, 27 bp, Artificial Sequence
  primer
cctgatcctagttatcttcattattgc

SEQ ID NO: 84751 - DNA, 38 bp, Artificial Sequence
  primer
gtaaaacgacggccagtccgttgtaacgggtaccattc

SEQ ID NO: 84752 - DNA, 22 bp, Artificial Sequence
  primer
tctagaaagtccagcttcagcg

SEQ ID NO: 84753 - DNA, 21 bp, Artificial Sequence
  primer
tttctgaaagtcagggaacgc

SEQ ID NO: 84754 - DNA, 22 bp, Artificial Sequence
  primer
aacagttctaggaaatgcaccg

SEQ ID NO: 84755 - DNA, 23 bp, Artificial Sequence
  primer
tcaagcagaagttaaccagaaca

SEQ ID NO: 84756 - DNA, 40 bp, Artificial Sequence
  primer
gtaaaacgacggccagtgcaaattaatcctgaagcaatgg

SEQ ID NO: 84757 - DNA, 37 bp, Artificial Sequence
  primer
gtaaaacgacggccagtgcaacgagtgagtgctgagg

SEQ ID NO: 84758 - DNA, 40 bp, Artificial Sequence
  primer
gtaaaacgacggccagtttcatacatcaagcaaacaatgc

SEQ ID NO: 84759 - DNA, 39 bp, Artificial Sequence
  primer
gtaaaacgacggccagtcctggctccaagattaatggtc

SEQ ID NO: 84760 - DNA, 38 bp, Artificial Sequence
  primer
gtaaaacgacggccagttgctcaaatgtgctgtcagag

SEQ ID NO: 84761 - DNA, 23 bp, Artificial Sequence
  primer
tgggaatagactgaagtttgcac

SEQ ID NO: 84762 - DNA, 22 bp, Artificial Sequence
  primer
agaaacccaactcaacaaggac

SEQ ID NO: 84763 - DNA, 37 bp, Artificial Sequence
  primer
gtaaaacgacggccagtctgggtgggaaaggaaactc

SEQ ID NO: 84764 - DNA, 38 bp, Artificial Sequence
  primer
gtaaaacgacggccagtacattccctctgtctgggaag

SEQ ID NO: 84765 - DNA, 21 bp, Artificial Sequence
  primer
ttgtacgggaatcgaacattg

SEQ ID NO: 84766 - DNA, 19 bp, Artificial Sequence
  primer
atccagccaattgccagtc

SEQ ID NO: 84767 - DNA, 38 bp, Artificial Sequence
  primer
gtaaaacgacggccagtgttcaggagaaagagcccatc

SEQ ID NO: 84768 - DNA, 38 bp, Artificial Sequence
  primer
gtaaaacgacggccagtgatcagtgtgtgtggctggtc

SEQ ID NO: 84769 - DNA, 37 bp, Artificial Sequence
  primer
gtaaaacgacggccagtctgctgtgaaggctgaaagg

SEQ ID NO: 84770 - DNA, 39 bp, Artificial Sequence
  primer
gtaaaacgacggccagtcatccacatatcgtaaccaccc

SEQ ID NO: 84771 - DNA, 23 bp, Artificial Sequence
  primer
tgcaccagaagttattacatccc

SEQ ID NO: 84772 - DNA, 19 bp, Artificial Sequence
  primer
cgcccagcctcacttattc

SEQ ID NO: 84773 - DNA, 39 bp, Artificial Sequence
  primer
gtaaaacgacggccagttgtgctccctcctacatttcac

SEQ ID NO: 84774 - DNA, 21 bp, Artificial Sequence
  primer
ctaaggagttcatggcaaggg

SEQ ID NO: 84775 - DNA, 21 bp, Artificial Sequence
  primer
cctgaacttgggaaataaggc

SEQ ID NO: 84776 - DNA, 21 bp, Artificial Sequence
  primer
gtccctacccattccactgag

SEQ ID NO: 84777 - DNA, 21 bp, Artificial Sequence
  primer
agatgtttcaggcacctcctc

SEQ ID NO: 84778 - DNA, 21 bp, Artificial Sequence
  primer
gaaggccttagttcactgctg

SEQ ID NO: 84779 - DNA, 21 bp, Artificial Sequence
  primer
atgcccaagcttcttcctctc

SEQ ID NO: 84780 - DNA, 38 bp, Artificial Sequence
  primer
gtaaaacgacggccagttaagccctttgactaatgccc

SEQ ID NO: 84781 - DNA, 38 bp, Artificial Sequence
  primer
gtaaaacgacggccagtgagcaggccatacttgctcac

SEQ ID NO: 84782 - DNA, 38 bp, Artificial Sequence
  primer
gtaaaacgacggccagtaggtaaaggtgacctccaggg

SEQ ID NO: 84783 - DNA, 21 bp, Artificial Sequence
  primer
ggtgtgaagtgggtggttctc

SEQ ID NO: 84784 - DNA, 21 bp, Artificial Sequence
  primer
ccattcagggcaaagcagtag

SEQ ID NO: 84785 - DNA, 38 bp, Artificial Sequence
  primer
gtaaaacgacggccagtctggaaggatagcctcagcac

SEQ ID NO: 84786 - DNA, 21 bp, Artificial Sequence
  primer
catgacgtgggttaccttgtg

SEQ ID NO: 84787 - DNA, 38 bp, Artificial Sequence
  primer
gtaaaacgacggccagtaccaatctcttccagtgagcc

SEQ ID NO: 84788 - DNA, 21 bp, Artificial Sequence
  primer
ccatccatcctctcctctctg

SEQ ID NO: 84789 - DNA, 38 bp, Artificial Sequence
  primer
gtaaaacgacggccagtaagtcagactcccagtccagc

SEQ ID NO: 84790 - DNA, 38 bp, Artificial Sequence
  primer
gtaaaacgacggccagtaatcggactgagagagatgcg

SEQ ID NO: 84791 - DNA, 38 bp, Artificial Sequence
  primer
gtaaaacgacggccagtctgaagttcccacaacaccag

SEQ ID NO: 84792 - DNA, 36 bp, Artificial Sequence
  primer
gtaaaacgacggccagtgagcggtgattgagccaag

SEQ ID NO: 84793 - DNA, 20 bp, Artificial Sequence
  primer
aatcgggcagtgatctgatg

SEQ ID NO: 84794 - DNA, 21 bp, Artificial Sequence
  primer
gagagccctagagcacagagg

SEQ ID NO: 84795 - DNA, 38 bp, Artificial Sequence
  primer
gtaaaacgacggccagtacctcttcctcctcgtcattg

SEQ ID NO: 84796 - DNA, 21 bp, Artificial Sequence
  primer
tgcagtagaggtcttggaagg

SEQ ID NO: 84797 - DNA, 38 bp, Artificial Sequence
  primer
gtaaaacgacggccagtctagcgtgctgagatgaccag

SEQ ID NO: 84798 - DNA, 37 bp, Artificial Sequence
  primer
gtaaaacgacggccagtgtgcctgaggctaaactgcc

SEQ ID NO: 84799 - DNA, 21 bp, Artificial Sequence
  primer
ctggcttgaagagttgggaag

SEQ ID NO: 84800 - DNA, 19 bp, Artificial Sequence
  primer
attcctctgcaccctgagc

SEQ ID NO: 84801 - DNA, 19 bp, Artificial Sequence
  primer
gctcctgaacagccaggtc

SEQ ID NO: 84802 - DNA, 20 bp, Artificial Sequence
  primer
gttgggaagtcagcttggag

SEQ ID NO: 84803 - DNA, 39 bp, Artificial Sequence
  primer
gtaaaacgacggccagtccctcactaggctgtcacagag

SEQ ID NO: 84804 - DNA, 21 bp, Artificial Sequence
  primer
actgtccatgcatctcctgtc

SEQ ID NO: 84805 - DNA, 20 bp, Artificial Sequence
  primer
cgtatggctgtcaggaatgg

SEQ ID NO: 84806 - DNA, 38 bp, Artificial Sequence
  primer
gtaaaacgacggccagtgcatttgatgaacattctggg

SEQ ID NO: 84807 - DNA, 21 bp, Artificial Sequence
  primer
ccacaaaccatgtcagtgagg

SEQ ID NO: 84808 - DNA, 38 bp, Artificial Sequence
  primer
gtaaaacgacggccagtgatctgcttcagcacgtgaac

SEQ ID NO: 84809 - DNA, 21 bp, Artificial Sequence
  primer
tggctgactttgagctgtgtg

SEQ ID NO: 84810 - DNA, 21 bp, Artificial Sequence
  primer
tcaggaagcaagtctgtccac

SEQ ID NO: 84811 - DNA, 39 bp, Artificial Sequence
  primer
gtaaaacgacggccagtcaagaaaccagcctgctagatg

SEQ ID NO: 84812 - DNA, 21 bp, Artificial Sequence
  primer
taagctgtagacgcagccttg

SEQ ID NO: 84813 - DNA, 38 bp, Artificial Sequence
  primer
gtaaaacgacggccagttgaggaggaagaaacagccag

SEQ ID NO: 84814 - DNA, 38 bp, Artificial Sequence
  primer
gtaaaacgacggccagtccttagaaagcaagcccactc

SEQ ID NO: 84815 - DNA, 38 bp, Artificial Sequence
  primer
gtaaaacgacggccagtttcctaagggacatgtgggag

SEQ ID NO: 84816 - DNA, 40 bp, Artificial Sequence
  primer
gtaaaacgacggccagtgtctaagacccatgtgaggagtc

SEQ ID NO: 84817 - DNA, 21 bp, Artificial Sequence
  primer
gaacacctgctctcctgaacc

SEQ ID NO: 84818 - DNA, 20 bp, Artificial Sequence
  primer
ccctctaaatcccttgctgg

SEQ ID NO: 84819 - DNA, 19 bp, Artificial Sequence
  primer
ggacggagggtgacgttag

SEQ ID NO: 84820 - DNA, 21 bp, Artificial Sequence
  primer
gagggagaggtagtgaagggc

SEQ ID NO: 84821 - DNA, 21 bp, Artificial Sequence
  primer
tttctcagctccttctccagc

SEQ ID NO: 84822 - DNA, 21 bp, Artificial Sequence
  primer
agtgagttgtcaccaccaccc

SEQ ID NO: 84823 - DNA, 38 bp, Artificial Sequence
  primer
gtaaaacgacggccagtgaacaaggaacacccaagagg

SEQ ID NO: 84824 - DNA, 38 bp, Artificial Sequence
  primer
gtaaaacgacggccagtagaacctgaaaccacacccag

SEQ ID NO: 84825 - DNA, 20 bp, Artificial Sequence
  primer
gtacacacaggcagctggtc

SEQ ID NO: 84826 - DNA, 37 bp, Artificial Sequence
  primer
gtaaaacgacggccagtgactgccagtgatcctctgc

SEQ ID NO: 84827 - DNA, 20 bp, Artificial Sequence
  primer
tgctcaagaggttggtgtcc

SEQ ID NO: 84828 - DNA, 21 bp, Artificial Sequence
  primer
cagttggtcacagagtcctgg

SEQ ID NO: 84829 - DNA, 38 bp, Artificial Sequence
  primer
gtaaaacgacggccagtccacacatgtttattaggccg

SEQ ID NO: 84830 - DNA, 38 bp, Artificial Sequence
  primer
gtaaaacgacggccagtaaatggcaacagtcacactgg

SEQ ID NO: 84831 - DNA, 44 bp, Artificial Sequence
  primer
gtaaaacgacggccagtcttatacaacctgaacttaaggcaaag

SEQ ID NO: 84832 - DNA, 21 bp, Artificial Sequence
  primer
ctaatcccatgcattccttcc

SEQ ID NO: 84833 - DNA, 21 bp, Artificial Sequence
  primer
agatcgctgctattctccctg

SEQ ID NO: 84834 - DNA, 37 bp, Artificial Sequence
  primer
gtaaaacgacggccagttttcaaggcacatgattccc

SEQ ID NO: 84835 - DNA, 38 bp, Artificial Sequence
  primer
gtaaaacgacggccagttcagcaactgcaattcaaagg

SEQ ID NO: 84836 - DNA, 38 bp, Artificial Sequence
  primer
gtaaaacgacggccagttcctaaggcccgtacacattc

SEQ ID NO: 84837 - DNA, 22 bp, Artificial Sequence
  primer
aacctcaagccctttaaacctc

SEQ ID NO: 84838 - DNA, 38 bp, Artificial Sequence
  primer
gtaaaacgacggccagttttctgactagggcaaggagg

SEQ ID NO: 84839 - DNA, 24 bp, Artificial Sequence
  primer
gctacatgcatttctacttgaccc

SEQ ID NO: 84840 - DNA, 21 bp, Artificial Sequence
  primer
catcccaggcaggtaattagg

SEQ ID NO: 84841 - DNA, 21 bp, Artificial Sequence
  primer
aagagcaggttcctcccactc

SEQ ID NO: 84842 - DNA, 37 bp, Artificial Sequence
  primer
gtaaaacgacggccagtcatccacacagggactcacc

SEQ ID NO: 84843 - DNA, 19 bp, Artificial Sequence
  primer
caacaagggcatttctggc

SEQ ID NO: 84844 - DNA, 21 bp, Artificial Sequence
  primer
gctcctttgccaattgttcac

SEQ ID NO: 84845 - DNA, 22 bp, Artificial Sequence
  primer
acacacgttaacagcaaacacc

SEQ ID NO: 84846 - DNA, 21 bp, Artificial Sequence
  primer
ggacatcagacccaccatctc

SEQ ID NO: 84847 - DNA, 39 bp, Artificial Sequence
  primer
gtaaaacgacggccagtttaatgtttgaggtttctgccc

SEQ ID NO: 84848 - DNA, 21 bp, Artificial Sequence
  primer
ctgcgctaaggagaggaactg

SEQ ID NO: 84849 - DNA, 20 bp, Artificial Sequence
  primer
aaggttgctggtcctgatcc

SEQ ID NO: 84850 - DNA, 19 bp, Artificial Sequence
  primer
gttggcctgacaacccttc

SEQ ID NO: 84851 - DNA, 38 bp, Artificial Sequence
  primer
gtaaaacgacggccagtagtgcaagtgtcatgggagtg

SEQ ID NO: 84852 - DNA, 21 bp, Artificial Sequence
  primer
gcatgggtgtggatttatttg

SEQ ID NO: 84853 - DNA, 38 bp, Artificial Sequence
  primer
gtaaaacgacggccagttaacagcaccaccagaaggag

SEQ ID NO: 84854 - DNA, 38 bp, Artificial Sequence
  primer
gtaaaacgacggccagtatttggaagcacttggtttgg

SEQ ID NO: 84855 - DNA, 38 bp, Artificial Sequence
  primer
gtaaaacgacggccagttccatgcaaacagctatgacc

SEQ ID NO: 84856 - DNA, 38 bp, Artificial Sequence
  primer
gtaaaacgacggccagtagcaccaacaatttgaacacc

SEQ ID NO: 84857 - DNA, 41 bp, Artificial Sequence
  primer
gtaaaacgacggccagtctcaggaatctgctacacaatagg

SEQ ID NO: 84858 - DNA, 47 bp, Artificial Sequence
  primer
gtaaaacgacggccagtttcagaattagagtttcctactatgtttca

SEQ ID NO: 84859 - DNA, 38 bp, Artificial Sequence
  primer
gtaaaacgacggccagttccaggaaggcaggtctaatc

SEQ ID NO: 84860 - DNA, 22 bp, Artificial Sequence
  primer
cagcataatgccaagcacatag

SEQ ID NO: 84861 - DNA, 39 bp, Artificial Sequence
  primer
gtaaaacgacggccagttccaaagcagagaaacataccc

SEQ ID NO: 84862 - DNA, 38 bp, Artificial Sequence
  primer
gtaaaacgacggccagtataccgtgttcatggactgga

SEQ ID NO: 84863 - DNA, 39 bp, Artificial Sequence
  primer
gtaaaacgacggccagtaagttaacgtcagggcagtcag

SEQ ID NO: 84864 - DNA, 26 bp, Artificial Sequence
  primer
ttgagatcaaatataatccttcaatg

SEQ ID NO: 84865 - DNA, 20 bp, Artificial Sequence
  primer
agccattctggctattgtgg

SEQ ID NO: 84866 - DNA, 41 bp, Artificial Sequence
  primer
gtaaaacgacggccagtttcaaatttctacccgggaattat

SEQ ID NO: 84867 - DNA, 24 bp, Artificial Sequence
  primer
tgtgaaatgtgtagaagcaacctc

SEQ ID NO: 84868 - DNA, 43 bp, Artificial Sequence
  primer
gtaaaacgacggccagtcaatgattatagacaagtccagaggg

SEQ ID NO: 84869 - DNA, 21 bp, Artificial Sequence
  primer
acagggtaaatcccaaggatg

SEQ ID NO: 84870 - DNA, 23 bp, Artificial Sequence
  primer
gggccatataaacaccataaagc

SEQ ID NO: 84871 - DNA, 25 bp, Artificial Sequence
  primer
cactctacgttccaattatttctcc

SEQ ID NO: 84872 - DNA, 38 bp, Artificial Sequence
  primer
gtaaaacgacggccagtctgtgcttgttcttgctggag

SEQ ID NO: 84873 - DNA, 37 bp, Artificial Sequence
  primer
gtaaaacgacggccagtcttgccaggagaaagcactg

SEQ ID NO: 84874 - DNA, 20 bp, Artificial Sequence
  primer
catgtgggtggagggtaatg

SEQ ID NO: 84875 - DNA, 21 bp, Artificial Sequence
  primer
tggcttgattcttcctgtgac

SEQ ID NO: 84876 - DNA, 38 bp, Artificial Sequence
  primer
gtaaaacgacggccagtagcctaagtacgggcaaagtg

SEQ ID NO: 84877 - DNA, 21 bp, Artificial Sequence
  primer
gctagtgctagggagagacgg

SEQ ID NO: 84878 - DNA, 38 bp, Artificial Sequence
  primer
gtaaaacgacggccagtcacgagcacgtctctgaagtc

SEQ ID NO: 84879 - DNA, 21 bp, Artificial Sequence
  primer
ttctcttcctcaacagcggtc

SEQ ID NO: 84880 - DNA, 20 bp, Artificial Sequence
  primer
aggtgaccggagctaccaac

SEQ ID NO: 84881 - DNA, 38 bp, Artificial Sequence
  primer
gtaaaacgacggccagtcggagacctgggataggagac

SEQ ID NO: 84882 - DNA, 20 bp, Artificial Sequence
  primer
cacttcggaggcaatctgtg

SEQ ID NO: 84883 - DNA, 41 bp, Artificial Sequence
  primer
gtaaaacgacggccagtaaatgacactcacttcctttccag

SEQ ID NO: 84884 - DNA, 38 bp, Artificial Sequence
  primer
gtaaaacgacggccagtgagcagagatgcccttcactc

SEQ ID NO: 84885 - DNA, 39 bp, Artificial Sequence
  primer
gtaaaacgacggccagtgatcttccacagacattccctg

SEQ ID NO: 84886 - DNA, 21 bp, Artificial Sequence
  primer
aaggctcccagcttcctctac

SEQ ID NO: 84887 - DNA, 38 bp, Artificial Sequence
  primer
gtaaaacgacggccagttaccaggtagcctttgttccc

SEQ ID NO: 84888 - DNA, 21 bp, Artificial Sequence
  primer
ggaggaagccatcatcgatac

SEQ ID NO: 84889 - DNA, 21 bp, Artificial Sequence
  primer
tctctaggcaagaggtggagg

SEQ ID NO: 84890 - DNA, 21 bp, Artificial Sequence
  primer
tttattgagtggcaggcacag

SEQ ID NO: 84891 - DNA, 21 bp, Artificial Sequence
  primer
gggtccatatgcaggtgaaag

SEQ ID NO: 84892 - DNA, 40 bp, Artificial Sequence
  primer
gtaaaacgacggccagtcgctcttatacttggacagcagc

SEQ ID NO: 84893 - DNA, 20 bp, Artificial Sequence
  primer
tccagctagaaaccacaggg

SEQ ID NO: 84894 - DNA, 38 bp, Artificial Sequence
  primer
gtaaaacgacggccagtctgccacagcacagtaacacc

SEQ ID NO: 84895 - DNA, 21 bp, Artificial Sequence
  primer
gaaagaatggaagcccagatg

SEQ ID NO: 84896 - DNA, 21 bp, Artificial Sequence
  primer
gtctacagggtgagccagacc

SEQ ID NO: 84897 - DNA, 38 bp, Artificial Sequence
  primer
gtaaaacgacggccagtgtcctgaatgggctgacacac

SEQ ID NO: 84898 - DNA, 22 bp, Artificial Sequence
  primer
cacagatgtatgggattcctcc

SEQ ID NO: 84899 - DNA, 39 bp, Artificial Sequence
  primer
gtaaaacgacggccagttggcttccaagtgctctaattc

SEQ ID NO: 84900 - DNA, 40 bp, Artificial Sequence
  primer
gtaaaacgacggccagtagcaataaggtttcctttcatcc

SEQ ID NO: 84901 - DNA, 22 bp, Artificial Sequence
  primer
tttcaagaacacctgtaagccc

SEQ ID NO: 84902 - DNA, 21 bp, Artificial Sequence
  primer
gagtgcagggtttgcagttag

SEQ ID NO: 84903 - DNA, 38 bp, Artificial Sequence
  primer
gtaaaacgacggccagttctgatttcaaatggatgccc

SEQ ID NO: 84904 - DNA, 38 bp, Artificial Sequence
  primer
gtaaaacgacggccagttggcaggattctcagacactg

SEQ ID NO: 84905 - DNA, 38 bp, Artificial Sequence
  primer
gtaaaacgacggccagtagacctccctggtgacagaag

SEQ ID NO: 84906 - DNA, 38 bp, Artificial Sequence
  primer
gtaaaacgacggccagtgtgtctagcacctcccaggtc

SEQ ID NO: 84907 - DNA, 38 bp, Artificial Sequence
  primer
gtaaaacgacggccagtttgaccagcgataatctcagc

SEQ ID NO: 84908 - DNA, 37 bp, Artificial Sequence
  primer
gtaaaacgacggccagtgtccctacctccctctctgg

SEQ ID NO: 84909 - DNA, 38 bp, Artificial Sequence
  primer
gtaaaacgacggccagtactgaggctgtcactgtcctg

SEQ ID NO: 84910 - DNA, 21 bp, Artificial Sequence
  primer
ttctgtgaaatgagtgctccc

SEQ ID NO: 84911 - DNA, 38 bp, Artificial Sequence
  primer
gtaaaacgacggccagttcaagtgatctgcctgactcc

SEQ ID NO: 84912 - DNA, 37 bp, Artificial Sequence
  primer
gtaaaacgacggccagtaggccagcaacgtacatgag

SEQ ID NO: 84913 - DNA, 21 bp, Artificial Sequence
  primer
taggactctgtgcctggtgtg

SEQ ID NO: 84914 - DNA, 21 bp, Artificial Sequence
  primer
gtccacctccctgctttactg

SEQ ID NO: 84915 - DNA, 21 bp, Artificial Sequence
  primer
gagtggttagatcgggattcg

SEQ ID NO: 84916 - DNA, 20 bp, Artificial Sequence
  primer
aggatttccaggtgacaggg

SEQ ID NO: 84917 - DNA, 38 bp, Artificial Sequence
  primer
gtaaaacgacggccagtccctacccactcatctccttg

SEQ ID NO: 84918 - DNA, 18 bp, Artificial Sequence
  primer
catggctgcagcaagagg

SEQ ID NO: 84919 - DNA, 21 bp, Artificial Sequence
  primer
gtcacaaggagagggaagcac

SEQ ID NO: 84920 - DNA, 21 bp, Artificial Sequence
  primer
ctgcctgatctcccaagctac

SEQ ID NO: 84921 - DNA, 38 bp, Artificial Sequence
  primer
gtaaaacgacggccagtcagcaggctaagaggctaagg

SEQ ID NO: 84922 - DNA, 38 bp, Artificial Sequence
  primer
gtaaaacgacggccagtctgtatgagccagagaagccc

SEQ ID NO: 84923 - DNA, 21 bp, Artificial Sequence
  primer
tcccaccaatgagtatttggg

SEQ ID NO: 84924 - DNA, 22 bp, Artificial Sequence
  primer
tgacaagtctgaacccagacag

SEQ ID NO: 84925 - DNA, 38 bp, Artificial Sequence
  primer
gtaaaacgacggccagtagccctccagaagagacagtg

SEQ ID NO: 84926 - DNA, 38 bp, Artificial Sequence
  primer
gtaaaacgacggccagtatcccaccatgcaggaaatac

SEQ ID NO: 84927 - DNA, 21 bp, Artificial Sequence
  primer
ataactcccagcttctgctcc

SEQ ID NO: 84928 - DNA, 37 bp, Artificial Sequence
  primer
gtaaaacgacggccagtcccagccctaccacatactg

SEQ ID NO: 84929 - DNA, 20 bp, Artificial Sequence
  primer
gtagggccagtgaacagcag

SEQ ID NO: 84930 - DNA, 21 bp, Artificial Sequence
  primer
ctatcggagtgaccctgttgg

SEQ ID NO: 84931 - DNA, 21 bp, Artificial Sequence
  primer
cagtggatggctgaattggag

SEQ ID NO: 84932 - DNA, 21 bp, Artificial Sequence
  primer
agtgctgagtgctgtgtgagc

SEQ ID NO: 84933 - DNA, 21 bp, Artificial Sequence
  primer
tggaatttgctagggcttagg

SEQ ID NO: 84934 - DNA, 21 bp, Artificial Sequence
  primer
aagaggttgaggttgtctgcc

SEQ ID NO: 84935 - DNA, 21 bp, Artificial Sequence
  primer
ggcagaaagagggagtacagc

SEQ ID NO: 84936 - DNA, 20 bp, Artificial Sequence
  primer
aatgatttgggaagcaaggc

SEQ ID NO: 84937 - DNA, 21 bp, Artificial Sequence
  primer
aagggcagcgttatgtaccac

SEQ ID NO: 84938 - DNA, 22 bp, Artificial Sequence
  primer
tgtagggaaagcctagaatggg

SEQ ID NO: 84939 - DNA, 42 bp, Artificial Sequence
  primer
gtaaaacgacggccagtcgtaaacatgtaaacatgctgtctc

SEQ ID NO: 84940 - DNA, 38 bp, Artificial Sequence
  primer
gtaaaacgacggccagtagggaaacgctaccagtcaag

SEQ ID NO: 84941 - DNA, 44 bp, Artificial Sequence
  primer
gtaaaacgacggccagttgtcttgacatagaggtttactttgaa

SEQ ID NO: 84942 - DNA, 35 bp, Artificial Sequence
  primer
gtaaaacgacggccagtctcccatctcagcctccc

SEQ ID NO: 84943 - DNA, 38 bp, Artificial Sequence
  primer
gtaaaacgacggccagtggaatgtcttccctgaggatg

SEQ ID NO: 84944 - DNA, 41 bp, Artificial Sequence
  primer
gtaaaacgacggccagtcttcactgagttcattgagtcctg

SEQ ID NO: 84945 - DNA, 37 bp, Artificial Sequence
  primer
gtaaaacgacggccagttggcaaataaatggcaaagc

SEQ ID NO: 84946 - DNA, 40 bp, Artificial Sequence
  primer
gtaaaacgacggccagtcagaccttagcatttaacgagca

SEQ ID NO: 84947 - DNA, 27 bp, Artificial Sequence
  primer
tttaaagattatcatggtgaaggaatc

SEQ ID NO: 84948 - DNA, 22 bp, Artificial Sequence
  primer
tgaaatgtggacttccttcctc

SEQ ID NO: 84949 - DNA, 21 bp, Artificial Sequence
  primer
ttgtgcccaagaaagatcctc

SEQ ID NO: 84950 - DNA, 19 bp, Artificial Sequence
  primer
gtgatctgcttgcctcagc

SEQ ID NO: 84951 - DNA, 44 bp, Artificial Sequence
  primer
gtaaaacgacggccagtcagggttacaatcaatataactaagcc

SEQ ID NO: 84952 - DNA, 42 bp, Artificial Sequence
  primer
gtaaaacgacggccagtgtccaggcaacataactataccatc

SEQ ID NO: 84953 - DNA, 22 bp, Artificial Sequence
  primer
aaagcaggagacttacacagcc

SEQ ID NO: 84954 - DNA, 21 bp, Artificial Sequence
  primer
ccacaccaggctattctgttc

SEQ ID NO: 84955 - DNA, 21 bp, Artificial Sequence
  primer
gatccacacatgccatacacc

SEQ ID NO: 84956 - DNA, 21 bp, Artificial Sequence
  primer
taccaactgtttgccaaatgc

SEQ ID NO: 84957 - DNA, 19 bp, Artificial Sequence
  primer
gtggcgggcacctataaac

SEQ ID NO: 84958 - DNA, 23 bp, Artificial Sequence
  primer
tgtacctaaacacaggcaaactg

SEQ ID NO: 84959 - DNA, 21 bp, Artificial Sequence
  primer
tctttcaggaattcgagccac

SEQ ID NO: 84960 - DNA, 21 bp, Artificial Sequence
  primer
cggacaatttcctcttcaagg

SEQ ID NO: 84961 - DNA, 38 bp, Artificial Sequence
  primer
gtaaaacgacggccagtcctacctgtaagcgtttggtg

SEQ ID NO: 84962 - DNA, 38 bp, Artificial Sequence
  primer
gtaaaacgacggccagtggctactgctcccatctaagc

SEQ ID NO: 84963 - DNA, 20 bp, Artificial Sequence
  primer
gaggtcgaggctgcagtaag

SEQ ID NO: 84964 - DNA, 38 bp, Artificial Sequence
  primer
gtaaaacgacggccagttgatcgtttcctttgttgtgc

SEQ ID NO: 84965 - DNA, 21 bp, Artificial Sequence
  primer
tgatgattaagggcaaatccc

SEQ ID NO: 84966 - DNA, 23 bp, Artificial Sequence
  primer
gcagtgagctaatatcatgccag

SEQ ID NO: 84967 - DNA, 20 bp, Artificial Sequence
  primer
atgttcagtggcacccacac

SEQ ID NO: 84968 - DNA, 21 bp, Artificial Sequence
  primer
ctctaggatgcacacacccag

SEQ ID NO: 84969 - DNA, 21 bp, Artificial Sequence
  primer
gagctacaagccacgagtgag

SEQ ID NO: 84970 - DNA, 21 bp, Artificial Sequence
  primer
gaggtcttcaccatcccacag

SEQ ID NO: 84971 - DNA, 38 bp, Artificial Sequence
  primer
gtaaaacgacggccagtctcaaacaatcctttcccacc

SEQ ID NO: 84972 - DNA, 21 bp, Artificial Sequence
  primer
aagcttccctcagagaccctc

SEQ ID NO: 84973 - DNA, 38 bp, Artificial Sequence
  primer
gtaaaacgacggccagtagatcgcactactgcactcca

SEQ ID NO: 84974 - DNA, 23 bp, Artificial Sequence
  primer
cagtatctcaccctctaagcagc

SEQ ID NO: 84975 - DNA, 38 bp, Artificial Sequence
  primer
gtaaaacgacggccagtgtgagtaacgggagctaaggc

SEQ ID NO: 84976 - DNA, 21 bp, Artificial Sequence
  primer
atggtggtttgtgcctttagc

SEQ ID NO: 84977 - DNA, 18 bp, Artificial Sequence
  primer
gcctggcccagtatgttc

SEQ ID NO: 84978 - DNA, 44 bp, Artificial Sequence
  primer
gtaaaacgacggccagtcaataccatcctaaacatacaggacac

SEQ ID NO: 84979 - DNA, 21 bp, Artificial Sequence
  primer
tcacatttaaggcagaaagcc

SEQ ID NO: 84980 - DNA, 38 bp, Artificial Sequence
  primer
gtaaaacgacggccagttgattaatgaaagagggctgc

SEQ ID NO: 84981 - DNA, 20 bp, Artificial Sequence
  primer
tacttgtaaggaggccggtg

SEQ ID NO: 84982 - DNA, 38 bp, Artificial Sequence
  primer
gtaaaacgacggccagtcccaaatagaagcatggaacc

SEQ ID NO: 84983 - DNA, 20 bp, Artificial Sequence
  primer
tagtggttagggtggcatcg

SEQ ID NO: 84984 - DNA, 21 bp, Artificial Sequence
  primer
caggagacgggaatcactagg

SEQ ID NO: 84985 - DNA, 39 bp, Artificial Sequence
  primer
gtaaaacgacggccagtttctgcctcttaacgactgacc

SEQ ID NO: 84986 - DNA, 20 bp, Artificial Sequence
  primer
agccctgtgactagggttgg

SEQ ID NO: 84987 - DNA, 21 bp, Artificial Sequence
  primer
ttgaacaaattaggcacagcg

SEQ ID NO: 84988 - DNA, 38 bp, Artificial Sequence
  primer
gtaaaacgacggccagtttgcaagaggatgttcgtttc

SEQ ID NO: 84989 - DNA, 37 bp, Artificial Sequence
  primer
gtaaaacgacggccagtcccagggaaacctacagagg

SEQ ID NO: 84990 - DNA, 39 bp, Artificial Sequence
  primer
gtaaaacgacggccagtaagagcaaatgcctcatttcag

SEQ ID NO: 84991 - DNA, 27 bp, Artificial Sequence
  primer
tcactcatttcaatatgcagtaatttg

SEQ ID NO: 84992 - DNA, 43 bp, Artificial Sequence
  primer
gtaaaacgacggccagttttgacgctttattgtcacagactac

SEQ ID NO: 84993 - DNA, 27 bp, Artificial Sequence
  primer
ctgtgaatgtaaagttaacagaaatgg

SEQ ID NO: 84994 - DNA, 22 bp, Artificial Sequence
  primer
aaatggtggtacatgggatgag

SEQ ID NO: 84995 - DNA, 37 bp, Artificial Sequence
  primer
gtaaaacgacggccagtaatccagcctttgtccaagc

SEQ ID NO: 84996 - DNA, 18 bp, Artificial Sequence
  primer
agtactcccggagcctgc

SEQ ID NO: 84997 - DNA, 18 bp, Artificial Sequence
  primer
acatctgtgcctcgcgtc

SEQ ID NO: 84998 - DNA, 40 bp, Artificial Sequence
  primer
gtaaaacgacggccagtggcaaattacatgtctctgcttc

SEQ ID NO: 84999 - DNA, 23 bp, Artificial Sequence
  primer
aaaggcgtatcgttcaaatatcc

SEQ ID NO: 85000 - DNA, 21 bp, Artificial Sequence
  primer
ggagtccagttccttctctcc

SEQ ID NO: 85001 - DNA, 38 bp, Artificial Sequence
  primer
gtaaaacgacggccagtgatggcctcgatgatttaagg

SEQ ID NO: 85002 - DNA, 38 bp, Artificial Sequence
  primer
gtaaaacgacggccagtgtgaggagacgctttctttcg

SEQ ID NO: 85003 - DNA, 36 bp, Artificial Sequence
  primer
gtaaaacgacggccagttcttgggcctcactcaagc

SEQ ID NO: 85004 - DNA, 21 bp, Artificial Sequence
  primer
caggacctgaagcaatgaaag

SEQ ID NO: 85005 - DNA, 21 bp, Artificial Sequence
  primer
tgttatggctgtttccaaagc

SEQ ID NO: 85006 - DNA, 21 bp, Artificial Sequence
  primer
cgatttcaggattaccacagc

SEQ ID NO: 85007 - DNA, 21 bp, Artificial Sequence
  primer
atgaggaccctcccagttgta

SEQ ID NO: 85008 - DNA, 21 bp, Artificial Sequence
  primer
acctaagggagctgttgttgg

SEQ ID NO: 85009 - DNA, 39 bp, Artificial Sequence
  primer
gtaaaacgacggccagtcccaaataatccacataaagcc

SEQ ID NO: 85010 - DNA, 19 bp, Artificial Sequence
  primer
aaggtgggtggattgcttg

SEQ ID NO: 85011 - DNA, 23 bp, Artificial Sequence
  primer
tttggtctacttggatgtcaagg

SEQ ID NO: 85012 - DNA, 43 bp, Artificial Sequence
  primer
gtaaaacgacggccagttttcctatcttccaccaacataattt

SEQ ID NO: 85013 - DNA, 18 bp, Artificial Sequence
  primer
caccactgtgctccagcc

SEQ ID NO: 85014 - DNA, 25 bp, Artificial Sequence
  primer
aggacaatgctatagctctctgaac

SEQ ID NO: 85015 - DNA, 24 bp, Artificial Sequence
  primer
caaatagccttgtatttcaaaggg

SEQ ID NO: 85016 - DNA, 21 bp, Artificial Sequence
  primer
ggcaggatgcctagctgtatc

SEQ ID NO: 85017 - DNA, 38 bp, Artificial Sequence
  primer
gtaaaacgacggccagtgctgcaagttctctttctggg

SEQ ID NO: 85018 - DNA, 21 bp, Artificial Sequence
  primer
aacaaagcaatcccagcattc

SEQ ID NO: 85019 - DNA, 40 bp, Artificial Sequence
  primer
gtaaaacgacggccagtcaaatagctgtcttcaaccctcc

SEQ ID NO: 85020 - DNA, 21 bp, Artificial Sequence
  primer
accactgttacaactgcccac

SEQ ID NO: 85021 - DNA, 19 bp, Artificial Sequence
  primer
ccgagtgacagtgcgagac

SEQ ID NO: 85022 - DNA, 38 bp, Artificial Sequence
  primer
gtaaaacgacggccagtaaactgctggccttgattcag

SEQ ID NO: 85023 - DNA, 42 bp, Artificial Sequence
  primer
gtaaaacgacggccagtccacaaagactaacctattctcacc

SEQ ID NO: 85024 - DNA, 38 bp, Artificial Sequence
  primer
gtaaaacgacggccagtcctccaggagcacatgctatc

SEQ ID NO: 85025 - DNA, 21 bp, Artificial Sequence
  primer
aggtagtctgggttgcctgtg

SEQ ID NO: 85026 - DNA, 40 bp, Artificial Sequence
  primer
gtaaaacgacggccagttcaagaatcacaattagtggctg

SEQ ID NO: 85027 - DNA, 21 bp, Artificial Sequence
  primer
ctgcgtgcaaagaataaggag

SEQ ID NO: 85028 - DNA, 38 bp, Artificial Sequence
  primer
gtaaaacgacggccagtttcatgagccaatgaatttcc

SEQ ID NO: 85029 - DNA, 21 bp, Artificial Sequence
  primer
ggcccttaggtcttgtgtgtc

SEQ ID NO: 85030 - DNA, 40 bp, Artificial Sequence
  primer
gtaaaacgacggccagttgacaacaagcagactttcattg

SEQ ID NO: 85031 - DNA, 38 bp, Artificial Sequence
  primer
gtaaaacgacggccagtaggcattgatttgaagatggg

SEQ ID NO: 85032 - DNA, 38 bp, Artificial Sequence
  primer
gtaaaacgacggccagtgaggccctttctgttgttctg

SEQ ID NO: 85033 - DNA, 19 bp, Artificial Sequence
  primer
gtgggcgctcactaccttg

SEQ ID NO: 85034 - DNA, 37 bp, Artificial Sequence
  primer
gtaaaacgacggccagtgacaatgaaggcagagaccg

SEQ ID NO: 85035 - DNA, 23 bp, Artificial Sequence
  primer
cattggaaacatgagctaacacc

SEQ ID NO: 85036 - DNA, 23 bp, Artificial Sequence
  primer
ccctttcagtttacaatgctacc

SEQ ID NO: 85037 - DNA, 21 bp, Artificial Sequence
  primer
gctatctaagacctgccgtcg

SEQ ID NO: 85038 - DNA, 40 bp, Artificial Sequence
  primer
gtaaaacgacggccagttctgtaatcccaattcacaatgg

SEQ ID NO: 85039 - DNA, 38 bp, Artificial Sequence
  primer
gtaaaacgacggccagtgcagtgaacagagactgcacc

SEQ ID NO: 85040 - DNA, 39 bp, Artificial Sequence
  primer
gtaaaacgacggccagttcactgattcgaaatccctagc

SEQ ID NO: 85041 - DNA, 22 bp, Artificial Sequence
  primer
gccactgcttcatattcaaagg

SEQ ID NO: 85042 - DNA, 38 bp, Artificial Sequence
  primer
gtaaaacgacggccagttccctgtattgggagtgactg

SEQ ID NO: 85043 - DNA, 21 bp, Artificial Sequence
  primer
aaataaagccaatggcactcc

SEQ ID NO: 85044 - DNA, 38 bp, Artificial Sequence
  primer
gtaaaacgacggccagttgagacacaggcctactgtgg

SEQ ID NO: 85045 - DNA, 21 bp, Artificial Sequence
  primer
ggataagcccatctccatcac

SEQ ID NO: 85046 - DNA, 38 bp, Artificial Sequence
  primer
gtaaaacgacggccagtgacaaggcctctatttctgcc

SEQ ID NO: 85047 - DNA, 21 bp, Artificial Sequence
  primer
ctgatttctcaccgtcttccc

SEQ ID NO: 85048 - DNA, 20 bp, Artificial Sequence
  primer
actacccatccagagggcac

SEQ ID NO: 85049 - DNA, 21 bp, Artificial Sequence
  primer
agtgtgcaaggctttcatgtg

SEQ ID NO: 85050 - DNA, 21 bp, Artificial Sequence
  primer
accgttgctacagaccacctc

SEQ ID NO: 85051 - DNA, 21 bp, Artificial Sequence
  primer
gctgggtattcctgttccaag

SEQ ID NO: 85052 - DNA, 38 bp, Artificial Sequence
  primer
gtaaaacgacggccagtttctggagctcctccttcttc

SEQ ID NO: 85053 - DNA, 21 bp, Artificial Sequence
  primer
attccacaagggactcacagc

SEQ ID NO: 85054 - DNA, 38 bp, Artificial Sequence
  primer
gtaaaacgacggccagtgagatctgcgagacgaaatgg

SEQ ID NO: 85055 - DNA, 38 bp, Artificial Sequence
  primer
gtaaaacgacggccagtacaacaagaggtggaagaccc

SEQ ID NO: 85056 - DNA, 38 bp, Artificial Sequence
  primer
gtaaaacgacggccagttcaaaccacaaactcccagac

SEQ ID NO: 85057 - DNA, 39 bp, Artificial Sequence
  primer
gtaaaacgacggccagtgaagaaggatgtgtttgcttcc

SEQ ID NO: 85058 - DNA, 21 bp, Artificial Sequence
  primer
tggttccttagacagcatcaa

SEQ ID NO: 85059 - DNA, 37 bp, Artificial Sequence
  primer
gtaaaacgacggccagtacgaggaggagaagccacag

SEQ ID NO: 85060 - DNA, 35 bp, Artificial Sequence; identical to SEQ ID NO: 79170
  primer

SEQ ID NO: 85061 - DNA, 22 bp, Artificial Sequence
  primer
ttaaactgggagtggtcctgag

SEQ ID NO: 85062 - DNA, 43 bp, Artificial Sequence
  primer
gtaaaacgacggccagtaagagtagatattacttgcctctgcg

SEQ ID NO: 85063 - DNA, 24 bp, Artificial Sequence
  primer
tctcttggaccacagaatacatca

SEQ ID NO: 85064 - DNA, 43 bp, Artificial Sequence
  primer
gtaaaacgacggccagtaaagtgactaaggctaatttcccact

SEQ ID NO: 85065 - DNA, 38 bp, Artificial Sequence
  primer
gtaaaacgacggccagtcaggctacaaagtggaggtgt

SEQ ID NO: 85066 - DNA, 21 bp, Artificial Sequence
  primer
ttaatgttcattcaccacggc

SEQ ID NO: 85067 - DNA, 38 bp, Artificial Sequence
  primer
gtaaaacgacggccagtcccaataaaggcaagaccaac

SEQ ID NO: 85068 - DNA, 42 bp, Artificial Sequence
  primer
gtaaaacgacggccagtggaagaaaccaaaccatattgtcat

SEQ ID NO: 85069 - DNA, 18 bp, Artificial Sequence
  primer
ggattacaggtgcctgcc

SEQ ID NO: 85070 - DNA, 21 bp, Artificial Sequence
  primer
aggcctacttgattccaatgc

SEQ ID NO: 85071 - DNA, 44 bp, Artificial Sequence
  primer
gtaaaacgacggccagtattaactataattcaaatcaccaaggg

SEQ ID NO: 85072 - DNA, 21 bp, Artificial Sequence
  primer
agccaacaaacacccttgtag

SEQ ID NO: 85073 - DNA, 23 bp, Artificial Sequence
  primer
ccaccatctgatgtatgctcttc

SEQ ID NO: 85074 - DNA, 43 bp, Artificial Sequence
  primer
gtaaaacgacggccagtgagaatggtacatacaatggtcagat

SEQ ID NO: 85075 - DNA, 38 bp, Artificial Sequence
  primer
gtaaaacgacggccagttgtatgccagggattaccaac

SEQ ID NO: 85076 - DNA, 25 bp, Artificial Sequence
  primer
ttgttcatttcacagtatttcatgg

SEQ ID NO: 85077 - DNA, 39 bp, Artificial Sequence
  primer
gtaaaacgacggccagtgcattaggacattctttgaggg

SEQ ID NO: 85078 - DNA, 19 bp, Artificial Sequence
  primer
cctgcctggactatgggtc

SEQ ID NO: 85079 - DNA, 39 bp, Artificial Sequence
  primer
gtaaaacgacggccagttgtgaaatccatcttcatcaca

SEQ ID NO: 85080 - DNA, 21 bp, Artificial Sequence
  primer
ggactgacctttattgcagcc

SEQ ID NO: 85081 - DNA, 37 bp, Artificial Sequence
  primer
gtaaaacgacggccagtgcacgcactctccctctctc

SEQ ID NO: 85082 - DNA, 38 bp, Artificial Sequence
  primer
gtaaaacgacggccagtaaatgcagacaagctgctgag

SEQ ID NO: 85083 - DNA, 20 bp, Artificial Sequence
  primer
gaaggctgtgccttgttcag

SEQ ID NO: 85084 - DNA, 21 bp, Artificial Sequence
  primer
cgtgacacctgaaaggacatc

SEQ ID NO: 85085 - DNA, 22 bp, Artificial Sequence
  primer
ggcaaattccaattcttcactg

SEQ ID NO: 85086 - DNA, 37 bp, Artificial Sequence
  primer
gtaaaacgacggccagttttcctcacatgccctcaac

SEQ ID NO: 85087 - DNA, 39 bp, Artificial Sequence
  primer
gtaaaacgacggccagttgagctcagaacatctctttgg

SEQ ID NO: 85088 - DNA, 42 bp, Artificial Sequence
  primer
gtaaaacgacggccagtggtaaagaatggatcacaagatttc

SEQ ID NO: 85089 - DNA, 22 bp, Artificial Sequence
  primer
cacacgtaccctgagcctaaag

SEQ ID NO: 85090 - DNA, 36 bp, Artificial Sequence
  primer
gtaaaacgacggccagtctccgagatgaggagcagg

SEQ ID NO: 85091 - DNA, 19 bp, Artificial Sequence
  primer
ggatgagcagagagcagcc

SEQ ID NO: 85092 - DNA, 21 bp, Artificial Sequence
  primer
tgctagagggctgttctgttg

SEQ ID NO: 85093 - DNA, 38 bp, Artificial Sequence
  primer
gtaaaacgacggccagtccgtgactcgacagattatgg

SEQ ID NO: 85094 - DNA, 40 bp, Artificial Sequence
  primer
gtaaaacgacggccagttgccatctgccaactaaatacac

SEQ ID NO: 85095 - DNA, 38 bp, Artificial Sequence
  primer
gtaaaacgacggccagtacgcctcatattcttcatggg

SEQ ID NO: 85096 - DNA, 42 bp, Artificial Sequence
  primer
gtaaaacgacggccagttgaagtagaaatcaaggtcataccc

SEQ ID NO: 85097 - DNA, 40 bp, Artificial Sequence
  primer
gtaaaacgacggccagtgaacccaatcagctgtaagttcc

SEQ ID NO: 85098 - DNA, 40 bp, Artificial Sequence
  primer
gtaaaacgacggccagtttgagcagaaattctcaggtgtc

SEQ ID NO: 85099 - DNA, 38 bp, Artificial Sequence
  primer
gtaaaacgacggccagtcacccgatgagagtatcctgg

SEQ ID NO: 85100 - DNA, 37 bp, Artificial Sequence
  primer
gtaaaacgacggccagtaggcaggctttagagcaagg

SEQ ID NO: 85101 - DNA, 38 bp, Artificial Sequence
  primer
gtaaaacgacggccagtttctggcagtctccatcaatc

SEQ ID NO: 85102 - DNA, 20 bp, Artificial Sequence
  primer
ctgaaggttcaggcttccac

SEQ ID NO: 85103 - DNA, 21 bp, Artificial Sequence
  primer
ggtttgaatgccactgtaacg

SEQ ID NO: 85104 - DNA, 21 bp, Artificial Sequence
  primer
ctaaagtgggcccagaatgtc

SEQ ID NO: 85105 - DNA, 21 bp, Artificial Sequence
  primer
tttaaagtgaacagggcaggc

SEQ ID NO: 85106 - DNA, 38 bp, Artificial Sequence
  primer
gtaaaacgacggccagtactgccatagagtcaggtggg

SEQ ID NO: 85107 - DNA, 36 bp, Artificial Sequence
  primer
gtaaaacgacggccagtaatgcgctgccctactttg

SEQ ID NO: 85108 - DNA, 20 bp, Artificial Sequence
  primer
cccaagctagtgtgatgtgc

SEQ ID NO: 85109 - DNA, 21 bp, Artificial Sequence
  primer
aaagagatggcatgatttccc

SEQ ID NO: 85110 - DNA, 21 bp, Artificial Sequence
  primer
agcatacaagcacacaccagc

SEQ ID NO: 85111 - DNA, 38 bp, Artificial Sequence
  primer
gtaaaacgacggccagtaccacaactatcagccctgtg

SEQ ID NO: 85112 - DNA, 19 bp, Artificial Sequence
  primer
ctgaacccagctctcagcc

SEQ ID NO: 85113 - DNA, 23 bp, Artificial Sequence
  primer
ggcttaaggcagtgataaacttg

SEQ ID NO: 85114 - DNA, 37 bp, Artificial Sequence
  primer
gtaaaacgacggccagtcttgtttcccgcagaaactg

SEQ ID NO: 85115 - DNA, 23 bp, Artificial Sequence
  primer
tgtaagatttccgtggaagacac

SEQ ID NO: 85116 - DNA, 21 bp, Artificial Sequence
  primer
cgaacatctttacgcaaccaa

SEQ ID NO: 85117 - DNA, 38 bp, Artificial Sequence
  primer
gtaaaacgacggccagtcttcgagcacagtccagtcac

SEQ ID NO: 85118 - DNA, 38 bp, Artificial Sequence
  primer
gtaaaacgacggccagtaagtcaaggctgcaaggagac

SEQ ID NO: 85119 - DNA, 37 bp, Artificial Sequence
  primer
gtaaaacgacggccagtatggaacagctctgccctac

SEQ ID NO: 85120 - DNA, 23 bp, Artificial Sequence
  primer
aagcaaactgtagtgtctggtgc

SEQ ID NO: 85121 - DNA, 37 bp, Artificial Sequence
  primer
gtaaaacgacggccagtcactggccagatagagcgag

SEQ ID NO: 85122 - DNA, 21 bp, Artificial Sequence
  primer
ggcgagaatggagagagaaag

SEQ ID NO: 85123 - DNA, 20 bp, Artificial Sequence
  primer
agcatcacccacagaacacg

SEQ ID NO: 85124 - DNA, 42 bp, Artificial Sequence
  primer
gtaaaacgacggccagtcagaatttaactgtgaaactgaggc

SEQ ID NO: 85125 - DNA, 40 bp, Artificial Sequence
  primer
gtaaaacgacggccagtcagctgtactgactgcatgtttg

SEQ ID NO: 85126 - DNA, 21 bp, Artificial Sequence
  primer
ctgagatgtgacacgttctgg

SEQ ID NO: 85127 - DNA, 21 bp, Artificial Sequence
  primer
aagcctttaacccaacttccc

SEQ ID NO: 85128 - DNA, 20 bp, Artificial Sequence
  primer
atgggaggaggcttacttgc

SEQ ID NO: 85129 - DNA, 38 bp, Artificial Sequence
  primer
gtaaaacgacggccagtatcatttggagacccatcctg

SEQ ID NO: 85130 - DNA, 21 bp, Artificial Sequence
  primer
cgcaggcattatttgtcagag

SEQ ID NO: 85131 - DNA, 21 bp, Artificial Sequence
  primer
tacatgcttcatgggcagaac

SEQ ID NO: 85132 - DNA, 38 bp, Artificial Sequence
  primer
gtaaaacgacggccagttttcaatcagtggtgagcctg

SEQ ID NO: 85133 - DNA, 39 bp, Artificial Sequence
  primer
gtaaaacgacggccagttccctcatccattcactctctc

SEQ ID NO: 85134 - DNA, 21 bp, Artificial Sequence
  primer
atctgctgcagtgttgtaggc

SEQ ID NO: 85135 - DNA, 38 bp, Artificial Sequence
  primer
gtaaaacgacggccagtacgtcatgccaaacaactgtc

SEQ ID NO: 85136 - DNA, 41 bp, Artificial Sequence
  primer
gtaaaacgacggccagtaaattcagttaacacgtgcatttc

SEQ ID NO: 85137 - DNA, 38 bp, Artificial Sequence
  primer
gtaaaacgacggccagtaagagtggaccgtggtgtagg

SEQ ID NO: 85138 - DNA, 38 bp, Artificial Sequence
  primer
gtaaaacgacggccagtcaccagcaattacaggagtcg

SEQ ID NO: 85139 - DNA, 38 bp, Artificial Sequence
  primer
gtaaaacgacggccagtccacagctaactggcactgac

SEQ ID NO: 85140 - DNA, 21 bp, Artificial Sequence
  primer
acctaaagtgccatgagaggg

SEQ ID NO: 85141 - DNA, 21 bp, Artificial Sequence
  primer
ggtggctattaatgaccctgg

SEQ ID NO: 85142 - DNA, 37 bp, Artificial Sequence
  primer
gtaaaacgacggccagtgaatcctgggaggactggag

SEQ ID NO: 85143 - DNA, 21 bp, Artificial Sequence
  primer
caaactatccacatacccggc

SEQ ID NO: 85144 - DNA, 24 bp, Artificial Sequence
  primer
tcatcaaatctctatgcattctgc

SEQ ID NO: 85145 - DNA, 23 bp, Artificial Sequence
  primer
tctccaggattaccctcattctc

SEQ ID NO: 85146 - DNA, 43 bp, Artificial Sequence
  primer
gtaaaacgacggccagttcatttcaagttcagataatgtgtgt

SEQ ID NO: 85147 - DNA, 21 bp, Artificial Sequence
  primer
cagtcacaaacatgaacaggc

SEQ ID NO: 85148 - DNA, 21 bp, Artificial Sequence
  primer
tcaacaccattcaccatccat

SEQ ID NO: 85149 - DNA, 40 bp, Artificial Sequence
  primer
gtaaaacgacggccagtccttatcacaaatcctgagggac

SEQ ID NO: 85150 - DNA, 38 bp, Artificial Sequence
  primer
gtaaaacgacggccagtataaacccaacaaactgccaa

SEQ ID NO: 85151 - DNA, 21 bp, Artificial Sequence
  primer
tggtcaacagggaaagactcc

SEQ ID NO: 85152 - DNA, 20 bp, Artificial Sequence
  primer
ccaaagccaagagttccctc

SEQ ID NO: 85153 - DNA, 25 bp, Artificial Sequence
  primer
gacataacaggaataacagagcaaa

SEQ ID NO: 85154 - DNA, 22 bp, Artificial Sequence
  primer
gaagggccataaggaaactctc

SEQ ID NO: 85155 - DNA, 27 bp, Artificial Sequence
  primer
tttgtttctcaacaattctagtccttt

SEQ ID NO: 85156 - DNA, 20 bp, Artificial Sequence
  primer
caagtgatttgcccaccttg

SEQ ID NO: 85157 - DNA, 24 bp, Artificial Sequence
  primer
aaacaaggtccttatcatcgaatc

SEQ ID NO: 85158 - DNA, 22 bp, Artificial Sequence
  primer
tctgggcatttaatctcccttt

SEQ ID NO: 85159 - DNA, 23 bp, Artificial Sequence
  primer
tgatttacaacccaaattcacct

SEQ ID NO: 85160 - DNA, 42 bp, Artificial Sequence
  primer
gtaaaacgacggccagtgggaaattcagtgacagatatcaac

SEQ ID NO: 85161 - DNA, 45 bp, Artificial Sequence
  primer
gtaaaacgacggccagtttcatgaaacatatttgtggaatctact

SEQ ID NO: 85162 - DNA, 23 bp, Artificial Sequence
  primer
tgaacatttatgaaagctccaaa

SEQ ID NO: 85163 - DNA, 23 bp, Artificial Sequence
  primer
ccatacaaattcagcataatccc

SEQ ID NO: 85164 - DNA, 21 bp, Artificial Sequence
  primer
actagcactggaagtggtggc

SEQ ID NO: 85165 - DNA, 21 bp, Artificial Sequence
  primer
tctgtgcagattgagctctcc

SEQ ID NO: 85166 - DNA, 37 bp, Artificial Sequence
  primer
gtaaaacgacggccagtgtgggacataccgtccactc

SEQ ID NO: 85167 - DNA, 21 bp, Artificial Sequence
  primer
tgcctttatgaaatcaatgcc

SEQ ID NO: 85168 - DNA, 42 bp, Artificial Sequence
  primer
gtaaaacgacggccagtggctacagttgtcttaatcatgctg

SEQ ID NO: 85169 - DNA, 22 bp, Artificial Sequence
  primer
gggttacaattacgggctcttc

SEQ ID NO: 85170 - DNA, 44 bp, Artificial Sequence
  primer
gtaaaacgacggccagtcccattgtgtaatcttcatttaaacac

SEQ ID NO: 85171 - DNA, 18 bp, Artificial Sequence
  primer
tgggtgacagagcaagcc

SEQ ID NO: 85172 - DNA, 43 bp, Artificial Sequence
  primer
gtaaaacgacggccagtcatgctgaatgaaatggtacttaatg

SEQ ID NO: 85173 - DNA, 38 bp, Artificial Sequence
  primer
gtaaaacgacggccagtccctccagaaatgcactgtaa

SEQ ID NO: 85174 - DNA, 25 bp, Artificial Sequence
  primer
gcacactagcccaatgataaataag

SEQ ID NO: 85175 - DNA, 35 bp, Artificial Sequence
  primer
gtaaaacgacggccagttgtgcaccaccacacctg

SEQ ID NO: 85176 - DNA, 35 bp, Artificial Sequence
  primer
gtaaaacgacggccagtcagaggcagggcaatgtg

SEQ ID NO: 85177 - DNA, 37 bp, Artificial Sequence
  primer
gtaaaacgacggccagtcatcaagaacgcgggttagc

SEQ ID NO: 85178 - DNA, 21 bp, Artificial Sequence
  primer
gttggccaaatagcatcactg

SEQ ID NO: 85179 - DNA, 40 bp, Artificial Sequence
  primer
gtaaaacgacggccagtaaagaaatgcttccatctgttcc

SEQ ID NO: 85180 - DNA, 22 bp, Artificial Sequence
  primer
tgctcatccagagattctgtcc

SEQ ID NO: 85181 - DNA, 37 bp, Artificial Sequence
  primer
gtaaaacgacggccagtaaacaaaccctcacagcagc

SEQ ID NO: 85182 - DNA, 20 bp, Artificial Sequence
  primer
ctgctttctggcactatcgc

SEQ ID NO: 85183 - DNA, 38 bp, Artificial Sequence
  primer
gtaaaacgacggccagttgagctgaaggcaactaaggg

SEQ ID NO: 85184 - DNA, 38 bp, Artificial Sequence
  primer
gtaaaacgacggccagtttcactggatgttcttgtccg

SEQ ID NO: 85185 - DNA, 38 bp, Artificial Sequence
  primer
gtaaaacgacggccagttggacaagaactggaatggag

SEQ ID NO: 85186 - DNA, 39 bp, Artificial Sequence
  primer
gtaaaacgacggccagttcaggcacaaaggaagtagacc

SEQ ID NO: 85187 - DNA, 42 bp, Artificial Sequence
  primer
gtaaaacgacggccagtaaccacaaatgacacctttctaatg

SEQ ID NO: 85188 - DNA, 39 bp, Artificial Sequence
  primer
gtaaaacgacggccagtggtacaggttaatccaccatcc

SEQ ID NO: 85189 - DNA, 22 bp, Artificial Sequence
  primer
tacatcttgctggtgaagaagc

SEQ ID NO: 85190 - DNA, 21 bp, Artificial Sequence
  primer
tggttctggagaaggaacagg

SEQ ID NO: 85191 - DNA, 38 bp, Artificial Sequence
  primer
gtaaaacgacggccagtcttccgagattctggagatgc

SEQ ID NO: 85192 - DNA, 21 bp, Artificial Sequence
  primer
caggagacacagatggagcag

SEQ ID NO: 85193 - DNA, 38 bp, Artificial Sequence
  primer
gtaaaacgacggccagtcttccaaagatctggtgaccc

SEQ ID NO: 85194 - DNA, 21 bp, Artificial Sequence
  primer
gatatctgaggctgctttggg

SEQ ID NO: 85195 - DNA, 21 bp, Artificial Sequence
  primer
accaagctcaacagccttctg

SEQ ID NO: 85196 - DNA, 38 bp, Artificial Sequence
  primer
gtaaaacgacggccagtcaacctgctcttgatcactgc

SEQ ID NO: 85197 - DNA, 38 bp, Artificial Sequence
  primer
gtaaaacgacggccagtaaatttgctgctcctccagtg

SEQ ID NO: 85198 - DNA, 39 bp, Artificial Sequence
  primer
gtaaaacgacggccagtcaactgagacagtgaaacacgg

SEQ ID NO: 85199 - DNA, 35 bp, Artificial Sequence
  primer
gtaaaacgacggccagtcgagggccgtgagctaag

SEQ ID NO: 85200 - DNA, 21 bp, Artificial Sequence
  primer
ctaggcaatacagcgagaccc

SEQ ID NO: 85201 - DNA, 22 bp, Artificial Sequence
  primer
cggaaagacaatgataactggg

SEQ ID NO: 85202 - DNA, 24 bp, Artificial Sequence
  primer
ccttccatcatattaacaagccac

SEQ ID NO: 85203 - DNA, 39 bp, Artificial Sequence
  primer
gtaaaacgacggccagttgggcaagttctacaatcacag

SEQ ID NO: 85204 - DNA, 38 bp, Artificial Sequence
  primer
gtaaaacgacggccagtcagaagggaattaggcacagc

SEQ ID NO: 85205 - DNA, 38 bp, Artificial Sequence
  primer
gtaaaacgacggccagtaattccaccatttccttagcc

SEQ ID NO: 85206 - DNA, 23 bp, Artificial Sequence
  primer
ttcagaaagccaatgtaaaccac

SEQ ID NO: 85207 - DNA, 27 bp, Artificial Sequence
  primer
aacatgtcagttgacaataaccatatc

SEQ ID NO: 85208 - DNA, 40 bp, Artificial Sequence
  primer
gtaaaacgacggccagtaacccttcctcaaattgtattcg

SEQ ID NO: 85209 - DNA, 38 bp, Artificial Sequence
  primer
gtaaaacgacggccagtcactagggatggcaaacttgg

SEQ ID NO: 85210 - DNA, 26 bp, Artificial Sequence
  primer
aaagaaagcacctcactcactaattc

SEQ ID NO: 85211 - DNA, 20 bp, Artificial Sequence
  primer
agtcatcacggcaaagatgg

SEQ ID NO: 85212 - DNA, 40 bp, Artificial Sequence
  primer
gtaaaacgacggccagtcaataaattctcaattgatcggg

SEQ ID NO: 85213 - DNA, 21 bp, Artificial Sequence
  primer
ctgatgtacagcctggtttgg

SEQ ID NO: 85214 - DNA, 21 bp, Artificial Sequence
  primer
gcttggagggaatgtaacctg

SEQ ID NO: 85215 - DNA, 21 bp, Artificial Sequence
  primer
gcatacccaggatggagaaac

SEQ ID NO: 85216 - DNA, 38 bp, Artificial Sequence
  primer
gtaaaacgacggccagtgaaggagacacagtgggcttc

SEQ ID NO: 85217 - DNA, 21 bp, Artificial Sequence
  primer
cgggatccttaaaccacattc

SEQ ID NO: 85218 - DNA, 37 bp, Artificial Sequence
  primer
gtaaaacgacggccagtgtatgagccaccctgccttg

SEQ ID NO: 85219 - DNA, 38 bp, Artificial Sequence
  primer
gtaaaacgacggccagtccattaggcaccaagaaatcc

SEQ ID NO: 85220 - DNA, 20 bp, Artificial Sequence
  primer
gtgcccagccaatatttgag

SEQ ID NO: 85221 - DNA, 44 bp, Artificial Sequence
  primer
gtaaaacgacggccagttgctaacccaagtttatgtaacacatc

SEQ ID NO: 85222 - DNA, 40 bp, Artificial Sequence
  primer
gtaaaacgacggccagttcccaacacccagtgataactac

SEQ ID NO: 85223 - DNA, 24 bp, Artificial Sequence
  primer
tttatctccttgaaattcaccaaa

SEQ ID NO: 85224 - DNA, 38 bp, Artificial Sequence
  primer
gtaaaacgacggccagttccttggacagttcctcatcc

SEQ ID NO: 85225 - DNA, 22 bp, Artificial Sequence
  primer
ccagtgtgacagagtgagaccc

SEQ ID NO: 85226 - DNA, 20 bp, Artificial Sequence
  primer
cattgagcggagatcacacc

SEQ ID NO: 85227 - DNA, 20 bp, Artificial Sequence
  primer
tcctgaccttgtgatccacc

SEQ ID NO: 85228 - DNA, 42 bp, Artificial Sequence
  primer
gtaaaacgacggccagtaatagtccaaatgtggtctcagttc

SEQ ID NO: 85229 - DNA, 40 bp, Artificial Sequence
  primer
gtaaaacgacggccagtgcaatatttggtcctattgcttc

SEQ ID NO: 85230 - DNA, 38 bp, Artificial Sequence
  primer
gtaaaacgacggccagtaccaaacaacaaagacctggc

SEQ ID NO: 85231 - DNA, 21 bp, Artificial Sequence
  primer
atctacccacctaggcttccc

SEQ ID NO: 85232 - DNA, 44 bp, Artificial Sequence
  primer
gtaaaacgacggccagtactaagtcatgccctattgttaagttt

SEQ ID NO: 85233 - DNA, 21 bp, Artificial Sequence
  primer
tttgtctccaaacgccataaa

SEQ ID NO: 85234 - DNA, 21 bp, Artificial Sequence
  primer
ccagcctggtgatagagtgag

SEQ ID NO: 85235 - DNA, 21 bp, Artificial Sequence
  primer
taccaagtggcatcaatcagc

SEQ ID NO: 85236 - DNA, 29 bp, Artificial Sequence
  primer
cattaagatatactgacaatcttgttccc

SEQ ID NO: 85237 - DNA, 21 bp, Artificial Sequence
  primer
aacagaagtgggctctggaac

SEQ ID NO: 85238 - DNA, 24 bp, Artificial Sequence
  primer
gggtgataataaggcagctactgt

SEQ ID NO: 85239 - DNA, 22 bp, Artificial Sequence
  primer
tgtgttagggaaaccaagcaac

SEQ ID NO: 85240 - DNA, 21 bp, Artificial Sequence
  primer
tcagcatgctagattatcccg

SEQ ID NO: 85241 - DNA, 39 bp, Artificial Sequence
  primer
gtaaaacgacggccagtcagatgccactgcaatcaatac

SEQ ID NO: 85242 - DNA, 21 bp, Artificial Sequence
  primer
atcaaaggccatattccaagg

SEQ ID NO: 85243 - DNA, 41 bp, Artificial Sequence
  primer
gtaaaacgacggccagtcaaagagatgaactcagaaatccc

SEQ ID NO: 85244 - DNA, 43 bp, Artificial Sequence
  primer
gtaaaacgacggccagtcagctaggagagtcatttatttggag

SEQ ID NO: 85245 - DNA, 38 bp, Artificial Sequence
  primer
gtaaaacgacggccagttgaagcccattgctattcagc

SEQ ID NO: 85246 - DNA, 40 bp, Artificial Sequence
  primer
gtaaaacgacggccagtggagaactctgggatacaaatgg

SEQ ID NO: 85247 - DNA, 21 bp, Artificial Sequence
  primer
atcacaatgatgccatttccc

SEQ ID NO: 85248 - DNA, 38 bp, Artificial Sequence
  primer
gtaaaacgacggccagtaatttgcggcaacaattaagg

SEQ ID NO: 85249 - DNA, 20 bp, Artificial Sequence
  primer
ggcagacagtgccaagagag

SEQ ID NO: 85250 - DNA, 21 bp, Artificial Sequence
  primer
gctgcacagtccatcagtttg

SEQ ID NO: 85251 - DNA, 38 bp, Artificial Sequence
  primer
gtaaaacgacggccagtctccttaccaaacatggcctc

SEQ ID NO: 85252 - DNA, 38 bp, Artificial Sequence
  primer
gtaaaacgacggccagtactctactggccctattgccc

SEQ ID NO: 85253 - DNA, 39 bp, Artificial Sequence
  primer
gtaaaacgacggccagttccacaccacctctcattatcc

SEQ ID NO: 85254 - DNA, 24 bp, Artificial Sequence
  primer
gggaacccatgacatctacttaac

SEQ ID NO: 85255 - DNA, 21 bp, Artificial Sequence
  primer
cagcaggaaggaagtttccac

SEQ ID NO: 85256 - DNA, 20 bp, Artificial Sequence
  primer
gggcatagttccagggagag

SEQ ID NO: 85257 - DNA, 38 bp, Artificial Sequence
  primer
gtaaaacgacggccagtggagctggattggagacacag

SEQ ID NO: 85258 - DNA, 21 bp, Artificial Sequence
  primer
gtgcatcagtgtgatggcttc

SEQ ID NO: 85259 - DNA, 20 bp, Artificial Sequence
  primer
ctgagacccagcaaggtcag

SEQ ID NO: 85260 - DNA, 38 bp, Artificial Sequence
  primer
gtaaaacgacggccagtgagtgaaatatggcctcccag

SEQ ID NO: 85261 - DNA, 38 bp, Artificial Sequence
  primer
gtaaaacgacggccagtgtaccttgggacagggtatgg

SEQ ID NO: 85262 - DNA, 22 bp, Artificial Sequence
  primer
tcctaacacacacgttctctgc

SEQ ID NO: 85263 - DNA, 21 bp, Artificial Sequence
  primer
tatgcccagtgtcaaatttcc

SEQ ID NO: 85264 - DNA, 21 bp, Artificial Sequence
  primer
gtggctcctttcagtcctacg

SEQ ID NO: 85265 - DNA, 23 bp, Artificial Sequence
  primer
ggtggtgacaccgtagtattcac

SEQ ID NO: 85266 - DNA, 39 bp, Artificial Sequence
  primer
gtaaaacgacggccagttttgatacggctccagaaactc

SEQ ID NO: 85267 - DNA, 24 bp, Artificial Sequence
  primer
aagtgtatcaggtagcatgggaag

SEQ ID NO: 85268 - DNA, 26 bp, Artificial Sequence
  primer
tcttagttcactagcattatcccaga

SEQ ID NO: 85269 - DNA, 22 bp, Artificial Sequence
  primer
gaacagtgtaactcaaagcggg

SEQ ID NO: 85270 - DNA, 39 bp, Artificial Sequence
  primer
gtaaaacgacggccagttgactgtcatgaagacctcaat

SEQ ID NO: 85271 - DNA, 38 bp, Artificial Sequence
  primer
gtaaaacgacggccagttctactcactctgcattcccg

SEQ ID NO: 85272 - DNA, 38 bp, Artificial Sequence
  primer
gtaaaacgacggccagtttctccaggtaccctttggtc

SEQ ID NO: 85273 - DNA, 37 bp, Artificial Sequence
  primer
gtaaaacgacggccagtgctcaagactacgtggtggg

SEQ ID NO: 85274 - DNA, 21 bp, Artificial Sequence
  primer
tggaccctagaagtgacatgc

SEQ ID NO: 85275 - DNA, 40 bp, Artificial Sequence
  primer
gtaaaacgacggccagtgactcagccatagttcagattcc

SEQ ID NO: 85276 - DNA, 29 bp, Artificial Sequence
  primer
agaacacatttatgtaagtgggaataaat

SEQ ID NO: 85277 - DNA, 21 bp, Artificial Sequence
  primer
ggaacctcatgattaccagca

SEQ ID NO: 85278 - DNA, 25 bp, Artificial Sequence
  primer
tttgaaagtcaaagcagtagtcatt

SEQ ID NO: 85279 - DNA, 40 bp, Artificial Sequence
  primer
gtaaaacgacggccagtccctcagaatagaaatcagtgcc

SEQ ID NO: 85280 - DNA, 38 bp, Artificial Sequence
  primer
gtaaaacgacggccagttcaacatcagtgccacagttc

SEQ ID NO: 85281 - DNA, 26 bp, Artificial Sequence
  primer
aacaagcatgacattaaatcactacg

SEQ ID NO: 85282 - DNA, 21 bp, Artificial Sequence
  primer
ttagtggcagttgccattctg

SEQ ID NO: 85283 - DNA, 38 bp, Artificial Sequence
  primer
gtaaaacgacggccagtagcttcctctgaagctgctgt

SEQ ID NO: 85284 - DNA, 19 bp, Artificial Sequence
  primer
ccggccggtaatagcaaat

SEQ ID NO: 85285 - DNA, 20 bp, Artificial Sequence
  primer
gcatgctcctgtagtcccag

SEQ ID NO: 85286 - DNA, 40 bp, Artificial Sequence
  primer
gtaaaacgacggccagttgctgtcgaatccaggtatattg

SEQ ID NO: 85287 - DNA, 25 bp, Artificial Sequence
  primer
gatctttaatgacctgcacactacc

SEQ ID NO: 85288 - DNA, 41 bp, Artificial Sequence
  primer
gtaaaacgacggccagtaaggaaactttaaactccagaggc

SEQ ID NO: 85289 - DNA, 24 bp, Artificial Sequence
  primer
ttctgagatcatggagacagtcag

SEQ ID NO: 85290 - DNA, 39 bp, Artificial Sequence
  primer
gtaaaacgacggccagtaaagcgaaatcattgctaaagg

SEQ ID NO: 85291 - DNA, 21 bp, Artificial Sequence
  primer
catgaaaggaccagtgtgctc

SEQ ID NO: 85292 - DNA, 38 bp, Artificial Sequence
  primer
gtaaaacgacggccagtgatatattcatgtggcagggc

SEQ ID NO: 85293 - DNA, 23 bp, Artificial Sequence
  primer
tccctcccttggtagtttatttg

SEQ ID NO: 85294 - DNA, 21 bp, Artificial Sequence
  primer
ccaaagtgatttgctgtcctc

SEQ ID NO: 85295 - DNA, 21 bp, Artificial Sequence
  primer
cttgatggctgttcttgcttg

SEQ ID NO: 85296 - DNA, 37 bp, Artificial Sequence
  primer
gtaaaacgacggccagttgagctacacaagggcaagg

SEQ ID NO: 85297 - DNA, 40 bp, Artificial Sequence
  primer
gtaaaacgacggccagtcacagctaaagtttaatgcccac

SEQ ID NO: 85298 - DNA, 21 bp, Artificial Sequence
  primer
gttgcgaagtcccttctgttg

SEQ ID NO: 85299 - DNA, 38 bp, Artificial Sequence
  primer
gtaaaacgacggccagtgctcaagctcttgaagaacgg

SEQ ID NO: 85300 - DNA, 39 bp, Artificial Sequence
  primer
gtaaaacgacggccagttgaagcatacaggttcaaatcc

SEQ ID NO: 85301 - DNA, 39 bp, Artificial Sequence
  primer
gtaaaacgacggccagtttaggtctttgctttgtggagg

SEQ ID NO: 85302 - DNA, 21 bp, Artificial Sequence
  primer
ctgggtgacagagcaagactc

SEQ ID NO: 85303 - DNA, 19 bp, Artificial Sequence
  primer
tggacatggtggcacacac

SEQ ID NO: 85304 - DNA, 38 bp, Artificial Sequence
  primer
gtaaaacgacggccagtagtgaagaagcaggaatgtgg

SEQ ID NO: 85305 - DNA, 38 bp, Artificial Sequence
  primer
gtaaaacgacggccagtgtccctgatatggtcccaaac

SEQ ID NO: 85306 - DNA, 22 bp, Artificial Sequence
  primer
cccagattaaagaaggcaaacc

SEQ ID NO: 85307 - DNA, 21 bp, Artificial Sequence
  primer
tcagaggtgagcatttgttcc

SEQ ID NO: 85308 - DNA, 24 bp, Artificial Sequence
  primer
ttggaaactctttcctaacaccag

SEQ ID NO: 85309 - DNA, 23 bp, Artificial Sequence
  primer
tcctcatacttaggctttcctcg

SEQ ID NO: 85310 - DNA, 21 bp, Artificial Sequence
  primer
atggaagcagagacccaggta

SEQ ID NO: 85311 - DNA, 39 bp, Artificial Sequence
  primer
gtaaaacgacggccagttcagcacattgtttgccataag

SEQ ID NO: 85312 - DNA, 21 bp, Artificial Sequence
  primer
cctcttcccattactggcatc

SEQ ID NO: 85313 - DNA, 22 bp, Artificial Sequence
  primer
tgcttacctcattcatggcttc

SEQ ID NO: 85314 - DNA, 25 bp, Artificial Sequence
  primer
cttcttcatctaaagattccacagc

SEQ ID NO: 85315 - DNA, 25 bp, Artificial Sequence
  primer
ttgaacacaaacatatgaaaccttc

SEQ ID NO: 85316 - DNA, 21 bp, Artificial Sequence
  primer
tgttaactggctagcccaagg

SEQ ID NO: 85317 - DNA, 38 bp, Artificial Sequence
  primer
gtaaaacgacggccagtaaatggacaagcctgcagaag

SEQ ID NO: 85318 - DNA, 21 bp, Artificial Sequence
  primer
caccttgcaagtcactgttcc

SEQ ID NO: 85319 - DNA, 38 bp, Artificial Sequence
  primer
gtaaaacgacggccagtgttcccagctaagctaatccc

SEQ ID NO: 85320 - DNA, 21 bp, Artificial Sequence
  primer
accgtgcctggtctaaatctt

SEQ ID NO: 85321 - DNA, 40 bp, Artificial Sequence
  primer
gtaaaacgacggccagtcaaagacaatttactgtgggaca

SEQ ID NO: 85322 - DNA, 20 bp, Artificial Sequence
  primer
cttctcatggctcttggctc

SEQ ID NO: 85323 - DNA, 38 bp, Artificial Sequence
  primer
gtaaaacgacggccagttacagacatcccgccactatg

SEQ ID NO: 85324 - DNA, 38 bp, Artificial Sequence
  primer
gtaaaacgacggccagtataaacaagaaggcggcagag

SEQ ID NO: 85325 - DNA, 18 bp, Artificial Sequence
  primer
agggtgacccaggaccag

SEQ ID NO: 85326 - DNA, 37 bp, Artificial Sequence
  primer
gtaaaacgacggccagtgtaacaggcacgacaggctc

SEQ ID NO: 85327 - DNA, 21 bp, Artificial Sequence
  primer
gcacctactgaaagtgctggg

SEQ ID NO: 85328 - DNA, 40 bp, Artificial Sequence
  primer
gtaaaacgacggccagtaagaccaaactcagagggaaatc

SEQ ID NO: 85329 - DNA, 18 bp, Artificial Sequence
  primer
caggcgacagtgcaagac

SEQ ID NO: 85330 - DNA, 18 bp, Artificial Sequence
  primer
ggcgagattgtgccactg

SEQ ID NO: 85331 - DNA, 21 bp, Artificial Sequence
  primer
aattaaatgccagttgggctg

SEQ ID NO: 85332 - DNA, 21 bp, Artificial Sequence
  primer
cataacagtcaccgcttggag

SEQ ID NO: 85333 - DNA, 20 bp, Artificial Sequence
  primer
ttaattcccatcgcctttcc

SEQ ID NO: 85334 - DNA, 35 bp, Artificial Sequence
  primer
gtaaaacgacggccagtagctcagggaaagcctgg

SEQ ID NO: 85335 - DNA, 39 bp, Artificial Sequence
  primer
gtaaaacgacggccagtggccagcaattcagttaacaag

SEQ ID NO: 85336 - DNA, 40 bp, Artificial Sequence
  primer
gtaaaacgacggccagtcacaactaactggccaagaaatc

SEQ ID NO: 85337 - DNA, 21 bp, Artificial Sequence
  primer
acgtgaaacccatgtctcctc

SEQ ID NO: 85338 - DNA, 21 bp, Artificial Sequence
  primer
tgctcttgctcttgctttgtc

SEQ ID NO: 85339 - DNA, 20 bp, Artificial Sequence
  primer
taatctgactgggctggtgc

SEQ ID NO: 85340 - DNA, 21 bp, Artificial Sequence
  primer
agtgccagcccttaacttcac

SEQ ID NO: 85341 - DNA, 24 bp, Artificial Sequence
  primer
agttacatttcatgattcactgcc

SEQ ID NO: 85342 - DNA, 41 bp, Artificial Sequence
  primer
gtaaaacgacggccagttcttgatccatctggaatttattt

SEQ ID NO: 85343 - DNA, 20 bp, Artificial Sequence
  primer
gcctggaatttcctttccac

SEQ ID NO: 85344 - DNA, 38 bp, Artificial Sequence
  primer
gtaaaacgacggccagtccaggcatctacaaatctggc

SEQ ID NO: 85345 - DNA, 40 bp, Artificial Sequence
  primer
gtaaaacgacggccagttttaaggcatctccatccaatac

SEQ ID NO: 85346 - DNA, 38 bp, Artificial Sequence
  primer
gtaaaacgacggccagtccctactacaagccttctccc

SEQ ID NO: 85347 - DNA, 21 bp, Artificial Sequence
  primer
ctgttctctgctatggcctgg

SEQ ID NO: 85348 - DNA, 21 bp, Artificial Sequence
  primer
agtggacagactcagccacag

SEQ ID NO: 85349 - DNA, 38 bp, Artificial Sequence
  primer
gtaaaacgacggccagtaatgagggttaatgtccctgg

SEQ ID NO: 85350 - DNA, 38 bp, Artificial Sequence
  primer
gtaaaacgacggccagtactgtgcctaagcagccaatg

SEQ ID NO: 85351 - DNA, 21 bp, Artificial Sequence
  primer
gcagaagcatcctgggattag

SEQ ID NO: 85352 - DNA, 21 bp, Artificial Sequence
  primer
tcactttggagtcgatcatgc

SEQ ID NO: 85353 - DNA, 21 bp, Artificial Sequence
  primer
aagtactggtggcggaagaag

SEQ ID NO: 85354 - DNA, 38 bp, Artificial Sequence
  primer
gtaaaacgacggccagtgcatagtaggttgagcgggag

SEQ ID NO: 85355 - DNA, 21 bp, Artificial Sequence
  primer
tcttccaaggaattacagccc

SEQ ID NO: 85356 - DNA, 38 bp, Artificial Sequence
  primer
gtaaaacgacggccagtaggccctccctctacatcttc

SEQ ID NO: 85357 - DNA, 38 bp, Artificial Sequence
  primer
gtaaaacgacggccagtacctccctgtcagccatctac

SEQ ID NO: 85358 - DNA, 38 bp, Artificial Sequence
  primer
gtaaaacgacggccagtcagtttcctacgggagaccag

SEQ ID NO: 85359 - DNA, 38 bp, Artificial Sequence
  primer
gtaaaacgacggccagttcgtttggctaccattgtgtc

SEQ ID NO: 85360 - DNA, 21 bp, Artificial Sequence
  primer
tctgctgattcacacaatccg

SEQ ID NO: 85361 - DNA, 21 bp, Artificial Sequence
  primer
agtggctggtttgaaagaagg

SEQ ID NO: 85362 - DNA, 39 bp, Artificial Sequence
  primer
gtaaaacgacggccagtttcccaagtctgatctactggc

SEQ ID NO: 85363 - DNA, 22 bp, Artificial Sequence
  primer
aatgtgtgattgaaggcatgag

SEQ ID NO: 85364 - DNA, 39 bp, Artificial Sequence
  primer
gtaaaacgacggccagtcattccagttggctccattaac

SEQ ID NO: 85365 - DNA, 21 bp, Artificial Sequence
  primer
tgccacaggtttaggatgttg

SEQ ID NO: 85366 - DNA, 21 bp, Artificial Sequence
  primer
ttcacccaaagcagctctacc

SEQ ID NO: 85367 - DNA, 23 bp, Artificial Sequence
  primer
cactgctctgcctcagtttctac

SEQ ID NO: 85368 - DNA, 23 bp, Artificial Sequence
  primer
ttcagagtcagcaagaactaggc

SEQ ID NO: 85369 - DNA, 38 bp, Artificial Sequence
  primer
gtaaaacgacggccagtggtgaaaggactgggaatgtc

SEQ ID NO: 85370 - DNA, 38 bp, Artificial Sequence
  primer
gtaaaacgacggccagttcagaagccaacgctttattc

SEQ ID NO: 85371 - DNA, 21 bp, Artificial Sequence
  primer
gatcccaaagatgtagctggc

SEQ ID NO: 85372 - DNA, 38 bp, Artificial Sequence
  primer
gtaaaacgacggccagtaccagttccagagctttaggc

SEQ ID NO: 85373 - DNA, 18 bp, Artificial Sequence
  primer
ctccgggacaggaaggtc

SEQ ID NO: 85374 - DNA, 38 bp, Artificial Sequence
  primer
gtaaaacgacggccagtctcagtgtccacccacttctg

SEQ ID NO: 85375 - DNA, 38 bp, Artificial Sequence
  primer
gtaaaacgacggccagtgccctggtactcacctgattc

SEQ ID NO: 85376 - DNA, 21 bp, Artificial Sequence
  primer
agcctcagactccctcctctc

SEQ ID NO: 85377 - DNA, 38 bp, Artificial Sequence
  primer
gtaaaacgacggccagtttcccacgttatagctcctgc

SEQ ID NO: 85378 - DNA, 38 bp, Artificial Sequence
  primer
gtaaaacgacggccagttgctcttggttcttgctatgc

SEQ ID NO: 85379 - DNA, 38 bp, Artificial Sequence
  primer
gtaaaacgacggccagttcagcatggtagatggtgtcc

SEQ ID NO: 85380 - DNA, 21 bp, Artificial Sequence
  primer
aggcctaaatgggtagatggg

SEQ ID NO: 85381 - DNA, 20 bp, Artificial Sequence
  primer
aaggaggagactggcctcac

SEQ ID NO: 85382 - DNA, 38 bp, Artificial Sequence
  primer
gtaaaacgacggccagtcatcatgctctgaggttctgg

SEQ ID NO: 85383 - DNA, 21 bp, Artificial Sequence
  primer
ggtcaaggatggaggtgtcag

SEQ ID NO: 85384 - DNA, 38 bp, Artificial Sequence
  primer
gtaaaacgacggccagtgtgtgggtgtacctctggagc

SEQ ID NO: 85385 - DNA, 38 bp, Artificial Sequence
  primer
gtaaaacgacggccagtctgtagagggcctggagtagg

SEQ ID NO: 85386 - DNA, 21 bp, Artificial Sequence
  primer
cctggataaagtgccacacag

SEQ ID NO: 85387 - DNA, 38 bp, Artificial Sequence
  primer
gtaaaacgacggccagttgctgaagaactgcttgaagg

SEQ ID NO: 85388 - DNA, 38 bp, Artificial Sequence
  primer
gtaaaacgacggccagtaggtgactgttgagggagagg

SEQ ID NO: 85389 - DNA, 21 bp, Artificial Sequence
  primer
acagaggctagatggagccag

SEQ ID NO: 85390 - DNA, 21 bp, Artificial Sequence
  primer
gcttgagggacttgttcttgc

SEQ ID NO: 85391 - DNA, 21 bp, Artificial Sequence
  primer
gccagaggtaatacggtgagc

SEQ ID NO: 85392 - DNA, 37 bp, Artificial Sequence
  primer
gtaaaacgacggccagtattgatgaggatgctggtgc

SEQ ID NO: 85393 - DNA, 38 bp, Artificial Sequence
  primer
gtaaaacgacggccagtggtccagagcatcaaggaaag

SEQ ID NO: 85394 - DNA, 38 bp, Artificial Sequence
  primer
gtaaaacgacggccagtctgtgcaaataggtcaaaggg

SEQ ID NO: 85395 - DNA, 21 bp, Artificial Sequence
  primer
agggaaacgtttacttgctcg

SEQ ID NO: 85396 - DNA, 21 bp, Artificial Sequence
  primer
ctcagtccagtgataggcacc

SEQ ID NO: 85397 - DNA, 38 bp, Artificial Sequence
  primer
gtaaaacgacggccagtaggacttgctaggtctctggg

SEQ ID NO: 85398 - DNA, 21 bp, Artificial Sequence
  primer
tggtctcaactctgcatgtcc

SEQ ID NO: 85399 - DNA, 22 bp, Artificial Sequence
  primer
tgccattcattattcattgctg

SEQ ID NO: 85400 - DNA, 38 bp, Artificial Sequence
  primer
gtaaaacgacggccagtggagggtgattagggagacag

SEQ ID NO: 85401 - DNA, 20 bp, Artificial Sequence
  primer
gttgggctggattgagattg

SEQ ID NO: 85402 - DNA, 22 bp, Artificial Sequence
  primer
cagcagcattagagggactagc

SEQ ID NO: 85403 - DNA, 38 bp, Artificial Sequence
  primer
gtaaaacgacggccagtactgtctctggcatttgggtc

SEQ ID NO: 85404 - DNA, 23 bp, Artificial Sequence
  primer
gggaaatttctcacagagactgg

SEQ ID NO: 85405 - DNA, 21 bp, Artificial Sequence
  primer
gcattctcccattaagcttgg

SEQ ID NO: 85406 - DNA, 38 bp, Artificial Sequence
  primer
gtaaaacgacggccagttctactgaaccaccagggatg

SEQ ID NO: 85407 - DNA, 21 bp, Artificial Sequence
  primer
caggccctggagtagagagag

SEQ ID NO: 85408 - DNA, 38 bp, Artificial Sequence
  primer
gtaaaacgacggccagttgtgttgacttctcactgccc

SEQ ID NO: 85409 - DNA, 37 bp, Artificial Sequence
  primer
gtaaaacgacggccagtagaggaaggaagatgctggg

SEQ ID NO: 85410 - DNA, 21 bp, Artificial Sequence
  primer
ggaagaggacctgatgtggac

SEQ ID NO: 85411 - DNA, 21 bp, Artificial Sequence
  primer
tggcagttgtcagtctgttcc

SEQ ID NO: 85412 - DNA, 38 bp, Artificial Sequence
  primer
gtaaaacgacggccagttggctccctctgttctagtcc

SEQ ID NO: 85413 - DNA, 21 bp, Artificial Sequence
  primer
ccacacatccacctgtcgtag

SEQ ID NO: 85414 - DNA, 38 bp, Artificial Sequence
  primer
gtaaaacgacggccagtaaggaacgaccttggttcatc

SEQ ID NO: 85415 - DNA, 21 bp, Artificial Sequence
  primer
gggcaagtgagagtttcaagg

SEQ ID NO: 85416 - DNA, 38 bp, Artificial Sequence
  primer
gtaaaacgacggccagtcaaacagcaagtagtgggtcc

SEQ ID NO: 85417 - DNA, 19 bp, Artificial Sequence
  primer
ccctcaccttgcctctcag

SEQ ID NO: 85418 - DNA, 39 bp, Artificial Sequence
  primer
gtaaaacgacggccagtcagtcagcctgtctcctgattc

SEQ ID NO: 85419 - DNA, 21 bp, Artificial Sequence
  primer
gcccataccctgaacatcaag

SEQ ID NO: 85420 - DNA, 22 bp, Artificial Sequence
  primer
gcaaattcacattctgagaggc

SEQ ID NO: 85421 - DNA, 21 bp, Artificial Sequence
  primer
ctcccaaacttgtcccaagag

SEQ ID NO: 85422 - DNA, 38 bp, Artificial Sequence
  primer
gtaaaacgacggccagtgcttgttgagtgaagcacagg

SEQ ID NO: 85423 - DNA, 38 bp, Artificial Sequence
  primer
gtaaaacgacggccagtcactaccaccctcagcatgac

SEQ ID NO: 85424 - DNA, 21 bp, Artificial Sequence
  primer
agctcatcctgtcggagaaag

SEQ ID NO: 85425 - DNA, 38 bp, Artificial Sequence
  primer
gtaaaacgacggccagttgggagctccattacccatag

SEQ ID NO: 85426 - DNA, 38 bp, Artificial Sequence
  primer
gtaaaacgacggccagtgtgctctggtgtgtgcatagc

SEQ ID NO: 85427 - DNA, 38 bp, Artificial Sequence
  primer
gtaaaacgacggccagtgctagaagtggtggcatcctc

SEQ ID NO: 85428 - DNA, 21 bp, Artificial Sequence
  primer
agaaccagatggcttcagctc

SEQ ID NO: 85429 - DNA, 20 bp, Artificial Sequence
  primer
ggacgagtcaccgagacaac

SEQ ID NO: 85430 - DNA, 19 bp, Artificial Sequence
  primer
acaggtcaccgtacccagc

SEQ ID NO: 85431 - DNA, 21 bp, Artificial Sequence
  primer
tccaattagcaggtgcagagt

SEQ ID NO: 85432 - DNA, 36 bp, Artificial Sequence
  primer
gtaaaacgacggccagtgccctgcaaatcaaatgtt

SEQ ID NO: 85433 - DNA, 39 bp, Artificial Sequence
  primer
gtaaaacgacggccagtaagcctaagttggaagcaagtg

SEQ ID NO: 85434 - DNA, 19 bp, Artificial Sequence
  primer
aggaagcggcagactaacg

SEQ ID NO: 85435 - DNA, 41 bp, Artificial Sequence
  primer
gtaaaacgacggccagtttcattagtgttcaactgctttgc

SEQ ID NO: 85436 - DNA, 21 bp, Artificial Sequence
  primer
ggccatctgcaaagaataagc

SEQ ID NO: 85437 - DNA, 21 bp, Artificial Sequence
  primer
cagaggctcggatatgacaag

SEQ ID NO: 85438 - DNA, 37 bp, Artificial Sequence
  primer
gtaaaacgacggccagtaatggcaccaagatgctgtg

SEQ ID NO: 85439 - DNA, 21 bp, Artificial Sequence
  primer
tgatccatctgtcttgttggc

SEQ ID NO: 85440 - DNA, 35 bp, Artificial Sequence
  primer
gtaaaacgacggccagtgctggtctcaaacccgtg

SEQ ID NO: 85441 - DNA, 22 bp, Artificial Sequence
  primer
ccatttcttccacaaacattcc

SEQ ID NO: 85442 - DNA, 37 bp, Artificial Sequence
  primer
gtaaaacgacggccagtaaagcagctgaatacccacc

SEQ ID NO: 85443 - DNA, 20 bp, Artificial Sequence
  primer
tcctgaccttgtgatccacc

SEQ ID NO: 85444 - DNA, 38 bp, Artificial Sequence
  primer
gtaaaacgacggccagtgccaaatgtgaaccacacctc

SEQ ID NO: 85445 - DNA, 22 bp, Artificial Sequence
  primer
ctagagaccagcagtttgaggc

SEQ ID NO: 85446 - DNA, 39 bp, Artificial Sequence
  primer
gtaaaacgacggccagtctacaagcataagccactgcac

SEQ ID NO: 85447 - DNA, 38 bp, Artificial Sequence
  primer
gtaaaacgacggccagtcaaaccgctacctcctcttcc

SEQ ID NO: 85448 - DNA, 21 bp, Artificial Sequence
  primer
gcaatcctgggtacatctgtg

SEQ ID NO: 85449 - DNA, 21 bp, Artificial Sequence
  primer
ggtggttcaggtggaagtcac

SEQ ID NO: 85450 - DNA, 38 bp, Artificial Sequence
  primer
gtaaaacgacggccagttgtgacaatgtcctcctcctg

SEQ ID NO: 85451 - DNA, 21 bp, Artificial Sequence
  primer
cattgcttgccatagaccttc

SEQ ID NO: 85452 - DNA, 21 bp, Artificial Sequence
  primer
catttgtcttgcagggatcag

SEQ ID NO: 85453 - DNA, 39 bp, Artificial Sequence
  primer
gtaaaacgacggccagtaactgggtctgaatcacagctc

SEQ ID NO: 85454 - DNA, 38 bp, Artificial Sequence
  primer
gtaaaacgacggccagtgtaagaaaggcagtgagctgg

SEQ ID NO: 85455 - DNA, 39 bp, Artificial Sequence
  primer
gtaaaacgacggccagttttcccaagtatcttctcctgg

SEQ ID NO: 85456 - DNA, 19 bp, Artificial Sequence
  primer
cctaacacccagctgccac

SEQ ID NO: 85457 - DNA, 21 bp, Artificial Sequence
  primer
tccctagaagtcacctttgcc

SEQ ID NO: 85458 - DNA, 38 bp, Artificial Sequence
  primer
gtaaaacgacggccagtctaagttgcaccctttcccag

SEQ ID NO: 85459 - DNA, 23 bp, Artificial Sequence
  primer
ttgccactgactttcaaccttag

SEQ ID NO: 85460 - DNA, 38 bp, Artificial Sequence
  primer
gtaaaacgacggccagtagaatcctacacctccaaggg

SEQ ID NO: 85461 - DNA, 38 bp, Artificial Sequence
  primer
gtaaaacgacggccagtcttcaaaccaacacagccatc

SEQ ID NO: 85462 - DNA, 38 bp, Artificial Sequence
  primer
gtaaaacgacggccagtgcttgtcttccaagcacttcc

SEQ ID NO: 85463 - DNA, 35 bp, Artificial Sequence
  primer
gtaaaacgacggccagtcccatcccaggttcaagc

SEQ ID NO: 85464 - DNA, 38 bp, Artificial Sequence
  primer
gtaaaacgacggccagtcttcctgcctatccattccac

SEQ ID NO: 85465 - DNA, 38 bp, Artificial Sequence
  primer
gtaaaacgacggccagttaagaaatgacccacgtgcag

SEQ ID NO: 85466 - DNA, 38 bp, Artificial Sequence
  primer
gtaaaacgacggccagtgcttccaggtggatttctgag

SEQ ID NO: 85467 - DNA, 21 bp, Artificial Sequence
  primer
cagggttacaaagcaacatcc

SEQ ID NO: 85468 - DNA, 22 bp, Artificial Sequence
  primer
aagagaaagcatacatggcaaa

SEQ ID NO: 85469 - DNA, 19 bp, Artificial Sequence
  primer
agagcagatcgggtctccc

SEQ ID NO: 85470 - DNA, 21 bp, Artificial Sequence
  primer
gagcacctcaggatcttggac

SEQ ID NO: 85471 - DNA, 21 bp, Artificial Sequence
  primer
ttagccaactgcaatccttcc

SEQ ID NO: 85472 - DNA, 38 bp, Artificial Sequence
  primer
gtaaaacgacggccagttgtcaagagtagctggcactg

SEQ ID NO: 85473 - DNA, 37 bp, Artificial Sequence
  primer
gtaaaacgacggccagtcatgtttcgatggtgcattg

SEQ ID NO: 85474 - DNA, 40 bp, Artificial Sequence
  primer
gtaaaacgacggccagtagtccacctatcaacatgtgctt

SEQ ID NO: 85475 - DNA, 21 bp, Artificial Sequence
  primer
aggtggcaaagtgttcaaagc

SEQ ID NO: 85476 - DNA, 23 bp, Artificial Sequence
  primer
aactgggcatacagctagtcctc

SEQ ID NO: 85477 - DNA, 21 bp, Artificial Sequence
  primer
tttctgtgagccagtccaaag

SEQ ID NO: 85478 - DNA, 38 bp, Artificial Sequence
  primer
gtaaaacgacggccagtaattggctcctcttcagttgg

SEQ ID NO: 85479 - DNA, 21 bp, Artificial Sequence
  primer
gggtgtggagaagtcctcaag

SEQ ID NO: 85480 - DNA, 38 bp, Artificial Sequence
  primer
gtaaaacgacggccagttcgactgaggtgtaggcacag

SEQ ID NO: 85481 - DNA, 21 bp, Artificial Sequence
  primer
tatgaagtcgggtggagaagg

SEQ ID NO: 85482 - DNA, 21 bp, Artificial Sequence
  primer
ctcaacatgcttcaccaggtc

SEQ ID NO: 85483 - DNA, 21 bp, Artificial Sequence
  primer
gagctcagaagcaagcgtttc

SEQ ID NO: 85484 - DNA, 38 bp, Artificial Sequence
  primer
gtaaaacgacggccagtgaatgttgccctccagctaac

SEQ ID NO: 85485 - DNA, 21 bp, Artificial Sequence
  primer
cagacagtgggtacctgctcc

SEQ ID NO: 85486 - DNA, 38 bp, Artificial Sequence
  primer
gtaaaacgacggccagtggccttgggtagacattatgg

SEQ ID NO: 85487 - DNA, 38 bp, Artificial Sequence
  primer
gtaaaacgacggccagttggatccttctgagttcctcc

SEQ ID NO: 85488 - DNA, 38 bp, Artificial Sequence
  primer
gtaaaacgacggccagtacctttaactctgctcctggg

SEQ ID NO: 85489 - DNA, 21 bp, Artificial Sequence
  primer
actgcctatgaaccgtgacat

SEQ ID NO: 85490 - DNA, 21 bp, Artificial Sequence
  primer
ggcagagtgagacccagacac

SEQ ID NO: 85491 - DNA, 21 bp, Artificial Sequence
  primer
ctgggctgaggtgttaagagg

SEQ ID NO: 85492 - DNA, 21 bp, Artificial Sequence
  primer
gtcttacatggatggcagcag

SEQ ID NO: 85493 - DNA, 21 bp, Artificial Sequence
  primer
aatgtcaagaaatcacgacgg

SEQ ID NO: 85494 - DNA, 39 bp, Artificial Sequence
  primer
gtaaaacgacggccagtcatggaaggacccatagctaac

SEQ ID NO: 85495 - DNA, 21 bp, Artificial Sequence
  primer
tacttattgcatgcctgtgcc

SEQ ID NO: 85496 - DNA, 21 bp, Artificial Sequence
  primer
tgagacccagtgagaccagtg

SEQ ID NO: 85497 - DNA, 37 bp, Artificial Sequence
  primer
gtaaaacgacggccagttttcctttagctcacagccc

SEQ ID NO: 85498 - DNA, 39 bp, Artificial Sequence
  primer
gtaaaacgacggccagttctgcatgaagttatgtgtggg

SEQ ID NO: 85499 - DNA, 25 bp, Artificial Sequence
  primer
agccttaaagttcaagcattagtca

SEQ ID NO: 85500 - DNA, 24 bp, Artificial Sequence
  primer
ttcaaagggctgtaaactgttctg

SEQ ID NO: 85501 - DNA, 38 bp, Artificial Sequence
  primer
gtaaaacgacggccagtaaatgggacataccacccaaa

SEQ ID NO: 85502 - DNA, 38 bp, Artificial Sequence
  primer
gtaaaacgacggccagtgcaagtatgaaaccagggagg

SEQ ID NO: 85503 - DNA, 40 bp, Artificial Sequence
  primer
gtaaaacgacggccagtttgaaccaattgactccacatag

SEQ ID NO: 85504 - DNA, 23 bp, Artificial Sequence
  primer
ggctggtgtttgtactagctttc

SEQ ID NO: 85505 - DNA, 20 bp, Artificial Sequence
  primer
tgacgtgagcatcacaaagg

SEQ ID NO: 85506 - DNA, 23 bp, Artificial Sequence
  primer
gggtcctgaatgaaagagaaatg

SEQ ID NO: 85507 - DNA, 26 bp, Artificial Sequence
  primer
aagacataaggattcgtctatcaagg

SEQ ID NO: 85508 - DNA, 21 bp, Artificial Sequence
  primer
gcagtgaggtcagaaaggtcc

SEQ ID NO: 85509 - DNA, 38 bp, Artificial Sequence
  primer
gtaaaacgacggccagtcccttcagtgcttgggaatac

SEQ ID NO: 85510 - DNA, 21 bp, Artificial Sequence
  primer
ggcaccaatacaacttccctg

SEQ ID NO: 85511 - DNA, 28 bp, Artificial Sequence
  primer
tccataataataatctgactaccacaca

SEQ ID NO: 85512 - DNA, 39 bp, Artificial Sequence
  primer
gtaaaacgacggccagttggactgcagtgatatcttccc

SEQ ID NO: 85513 - DNA, 38 bp, Artificial Sequence
  primer
gtaaaacgacggccagtgcttggaaatagtccaaaggg

SEQ ID NO: 85514 - DNA, 21 bp, Artificial Sequence
  primer
tgtccttgtcaccctatttgc

SEQ ID NO: 85515 - DNA, 38 bp, Artificial Sequence
  primer
gtaaaacgacggccagtctttggtgtgctgtgaaatcc

SEQ ID NO: 85516 - DNA, 27 bp, Artificial Sequence
  primer
tcttgtgctaatacataagttgcattg

SEQ ID NO: 85517 - DNA, 40 bp, Artificial Sequence
  primer
gtaaaacgacggccagtctccatttccacagaattgaaag

SEQ ID NO: 85518 - DNA, 44 bp, Artificial Sequence
  primer
gtaaaacgacggccagttggttatttaagttattctgagaagcg

SEQ ID NO: 85519 - DNA, 20 bp, Artificial Sequence
  primer
ctgggccaaattgctgtaag

SEQ ID NO: 85520 - DNA, 21 bp, Artificial Sequence
  primer
cggatctcaagagttctcgtc

SEQ ID NO: 85521 - DNA, 39 bp, Artificial Sequence
  primer
gtaaaacgacggccagtcatctgatggtctcattccaac

SEQ ID NO: 85522 - DNA, 21 bp, Artificial Sequence
  primer
aatccaccagccaaacttacc

SEQ ID NO: 85523 - DNA, 38 bp, Artificial Sequence
  primer
gtaaaacgacggccagtactccacacgctgtatgcaag

SEQ ID NO: 85524 - DNA, 20 bp, Artificial Sequence
  primer
aggtgggaggcagaagtcag

SEQ ID NO: 85525 - DNA, 20 bp, Artificial Sequence
  primer
ctcctgcagtaccttgtgcc

SEQ ID NO: 85526 - DNA, 20 bp, Artificial Sequence
  primer
gagctgtagccctcgttgtg

SEQ ID NO: 85527 - DNA, 38 bp, Artificial Sequence
  primer
gtaaaacgacggccagtaatgtagttagtcgcgtcccg

SEQ ID NO: 85528 - DNA, 38 bp, Artificial Sequence
  primer
gtaaaacgacggccagtttagttgccagagttccagcc

SEQ ID NO: 85529 - DNA, 37 bp, Artificial Sequence
  primer
gtaaaacgacggccagtccacattcaaagccatcctg

SEQ ID NO: 85530 - DNA, 38 bp, Artificial Sequence
  primer
gtaaaacgacggccagtatactgtaaggcaattcgggc

SEQ ID NO: 85531 - DNA, 38 bp, Artificial Sequence
  primer
gtaaaacgacggccagttatcaaacacccaactcaggc

SEQ ID NO: 85532 - DNA, 43 bp, Artificial Sequence
  primer
gtaaaacgacggccagttaatgactttatatttagccacaggg

SEQ ID NO: 85533 - DNA, 21 bp, Artificial Sequence
  primer
agcatttcacagtgccatcag

SEQ ID NO: 85534 - DNA, 22 bp, Artificial Sequence
  primer
tttcccagaccaaccaatacag

SEQ ID NO: 85535 - DNA, 21 bp, Artificial Sequence
  primer
tggttgctgaggatgtactcg

SEQ ID NO: 85536 - DNA, 21 bp, Artificial Sequence
  primer
tcagactcggagtgaatgtgg

SEQ ID NO: 85537 - DNA, 19 bp, Artificial Sequence
  primer
ggtactgctggctgcacac

SEQ ID NO: 85538 - DNA, 20 bp, Artificial Sequence
  primer
gaggcctgtgtccattgaag

SEQ ID NO: 85539 - DNA, 37 bp, Artificial Sequence
  primer
gtaaaacgacggccagtctgcttaggtgaggtggctg

SEQ ID NO: 85540 - DNA, 38 bp, Artificial Sequence
  primer
gtaaaacgacggccagttactgtgtgaggctggtgtgc

SEQ ID NO: 85541 - DNA, 21 bp, Artificial Sequence
  primer
ggaatacttctgggagaagcg

SEQ ID NO: 85542 - DNA, 21 bp, Artificial Sequence
  primer
caccagggtagtctcaggtcc

SEQ ID NO: 85543 - DNA, 21 bp, Artificial Sequence
  primer
aagacattgaagatgggtggg

SEQ ID NO: 85544 - DNA, 37 bp, Artificial Sequence
  primer
gtaaaacgacggccagtctgaagggtcactgcctgag

SEQ ID NO: 85545 - DNA, 36 bp, Artificial Sequence
  primer
gtaaaacgacggccagtggctgtgcagaacagggag

SEQ ID NO: 85546 - DNA, 18 bp, Artificial Sequence
  primer
tgacctcgtgatctgccc

SEQ ID NO: 85547 - DNA, 37 bp, Artificial Sequence
  primer
gtaaaacgacggccagtgggtgtgcaagagaacttgg

SEQ ID NO: 85548 - DNA, 18 bp, Artificial Sequence
  primer
agaatggcgtgaacccag

SEQ ID NO: 85549 - DNA, 21 bp, Artificial Sequence
  primer
tgacaacaagctggcctagag

SEQ ID NO: 85550 - DNA, 38 bp, Artificial Sequence
  primer
gtaaaacgacggccagtagcttggacctgaataccagc

SEQ ID NO: 85551 - DNA, 38 bp, Artificial Sequence
  primer
gtaaaacgacggccagttaactgctctctctcccggtc

SEQ ID NO: 85552 - DNA, 38 bp, Artificial Sequence
  primer
gtaaaacgacggccagtcacgtctacctcttcaccctg

SEQ ID NO: 85553 - DNA, 38 bp, Artificial Sequence
  primer
gtaaaacgacggccagtatgatggtgccagtgtactcc

SEQ ID NO: 85554 - DNA, 26 bp, Artificial Sequence
  primer
tggaatatttatggactcaattcctc

SEQ ID NO: 85555 - DNA, 20 bp, Artificial Sequence
  primer
ctcactgaagcccttccctc

SEQ ID NO: 85556 - DNA, 21 bp, Artificial Sequence
  primer
tgggtaggtggaataacagcc

SEQ ID NO: 85557 - DNA, 21 bp, Artificial Sequence
  primer
acgggttctggtctcaagatg

SEQ ID NO: 85558 - DNA, 38 bp, Artificial Sequence
  primer
gtaaaacgacggccagtatggcttaaatttgctgtgcc

SEQ ID NO: 85559 - DNA, 23 bp, Artificial Sequence
  primer
aatgcagttgagaattatttgcg

SEQ ID NO: 85560 - DNA, 20 bp, Artificial Sequence
  primer
tgggattacagaccacaccc

SEQ ID NO: 85561 - DNA, 38 bp, Artificial Sequence
  primer
gtaaaacgacggccagtagatcctttggcgtcttcaac

SEQ ID NO: 85562 - DNA, 38 bp, Artificial Sequence
  primer
gtaaaacgacggccagtaggaaacacagcgatgtgaac

SEQ ID NO: 85563 - DNA, 38 bp, Artificial Sequence
  primer
gtaaaacgacggccagtgagctggaggcgtagtcattc

SEQ ID NO: 85564 - DNA, 21 bp, Artificial Sequence
  primer
tcatttcctgtccatgctttc

SEQ ID NO: 85565 - DNA, 21 bp, Artificial Sequence
  primer
cccgacgatttatgtttcagg

SEQ ID NO: 85566 - DNA, 21 bp, Artificial Sequence
  primer
gatggctgtacttggacatgg

SEQ ID NO: 85567 - DNA, 38 bp, Artificial Sequence
  primer
gtaaaacgacggccagtctgagggagaccgaatttcac

SEQ ID NO: 85568 - DNA, 38 bp, Artificial Sequence
  primer
gtaaaacgacggccagtgaaagctgaagttctcgagcc

SEQ ID NO: 85569 - DNA, 21 bp, Artificial Sequence
  primer
ttcagcaggagtttcatctgc

SEQ ID NO: 85570 - DNA, 38 bp, Artificial Sequence
  primer
gtaaaacgacggccagtagaagctgaattgcagcagag

SEQ ID NO: 85571 - DNA, 38 bp, Artificial Sequence
  primer
gtaaaacgacggccagtgagagtgtactgcagcaaggg

SEQ ID NO: 85572 - DNA, 38 bp, Artificial Sequence
  primer
gtaaaacgacggccagttttgttcagatggtggaggtg

SEQ ID NO: 85573 - DNA, 21 bp, Artificial Sequence
  primer
tttcaagagtgggagcctgtc

SEQ ID NO: 85574 - DNA, 38 bp, Artificial Sequence
  primer
gtaaaacgacggccagtattgacaaagctacttcccgc

SEQ ID NO: 85575 - DNA, 37 bp, Artificial Sequence
  primer
gtaaaacgacggccagtcaagggacatccctaaacgg

SEQ ID NO: 85576 - DNA, 24 bp, Artificial Sequence
  primer
agcatttatcctttgacttatggg

SEQ ID NO: 85577 - DNA, 21 bp, Artificial Sequence
  primer
caagcattaaggcagcttcag

SEQ ID NO: 85578 - DNA, 38 bp, Artificial Sequence
  primer
gtaaaacgacggccagtggcaaagtaacctcttgcttg

SEQ ID NO: 85579 - DNA, 22 bp, Artificial Sequence
  primer
tccaaggttccagtttcttctg

SEQ ID NO: 85580 - DNA, 38 bp, Artificial Sequence
  primer
gtaaaacgacggccagtctgaggctggacagagaggtc

SEQ ID NO: 85581 - DNA, 20 bp, Artificial Sequence
  primer
gctagaaatggctgagctgg

SEQ ID NO: 85582 - DNA, 38 bp, Artificial Sequence
  primer
gtaaaacgacggccagttcttaggcccaactccaagag

SEQ ID NO: 85583 - DNA, 44 bp, Artificial Sequence
  primer
gtaaaacgacggccagtgagaatatgctttcaagaactagaccc

SEQ ID NO: 85584 - DNA, 42 bp, Artificial Sequence
  primer
gtaaaacgacggccagtcactacctagagaccatcaatgtca

SEQ ID NO: 85585 - DNA, 37 bp, Artificial Sequence
  primer
gtaaaacgacggccagtctgcagatgctgattccctc

SEQ ID NO: 85586 - DNA, 21 bp, Artificial Sequence
  primer
ccagggacctgttacttccag

SEQ ID NO: 85587 - DNA, 20 bp, Artificial Sequence
  primer
gaagaattgctcgaacccag

SEQ ID NO: 85588 - DNA, 37 bp, Artificial Sequence
  primer
gtaaaacgacggccagtaagaagagcttctggcctgg

SEQ ID NO: 85589 - DNA, 21 bp, Artificial Sequence
  primer
gagacctctgcttcaaggctg

SEQ ID NO: 85590 - DNA, 38 bp, Artificial Sequence
  primer
gtaaaacgacggccagttactagcaggattgtcgccag

SEQ ID NO: 85591 - DNA, 38 bp, Artificial Sequence
  primer
gtaaaacgacggccagtgacagggaaatacgaacaggg

SEQ ID NO: 85592 - DNA, 21 bp, Artificial Sequence
  primer
atagccatgtccttgtcccac

SEQ ID NO: 85593 - DNA, 19 bp, Artificial Sequence
  primer
agggcgaattgtatggtgc

SEQ ID NO: 85594 - DNA, 39 bp, Artificial Sequence
  primer
gtaaaacgacggccagttcctgcctcctatacactcacc

SEQ ID NO: 85595 - DNA, 21 bp, Artificial Sequence
  primer
accgaatgcaatgtaaatgct

SEQ ID NO: 85596 - DNA, 38 bp, Artificial Sequence
  primer
gtaaaacgacggccagtcattcccaagttgaaaccctc

SEQ ID NO: 85597 - DNA, 43 bp, Artificial Sequence
  primer
gtaaaacgacggccagtaatttctcttatttctgacccaagtg

SEQ ID NO: 85598 - DNA, 22 bp, Artificial Sequence
  primer
tttgtttgtttgtttgctaccc

SEQ ID NO: 85599 - DNA, 38 bp, Artificial Sequence
  primer
gtaaaacgacggccagtaatcaccaagtcagacccacc

SEQ ID NO: 85600 - DNA, 23 bp, Artificial Sequence
  primer
caatgcagtggttatctttgacc

SEQ ID NO: 85601 - DNA, 23 bp, Artificial Sequence
  primer
caatattgggaaacaattggaag

SEQ ID NO: 85602 - DNA, 44 bp, Artificial Sequence
  primer
gtaaaacgacggccagtagactgaacatagtagagggtatttgg

SEQ ID NO: 85603 - DNA, 41 bp, Artificial Sequence
  primer
gtaaaacgacggccagtcagatggcaacttacatctacagg

SEQ ID NO: 85604 - DNA, 44 bp, Artificial Sequence
  primer
gtaaaacgacggccagtggatttacatgacataacaaatcactt

SEQ ID NO: 85605 - DNA, 38 bp, Artificial Sequence
  primer
gtaaaacgacggccagtggcatatagcggatgtcaaag

SEQ ID NO: 85606 - DNA, 41 bp, Artificial Sequence
  primer
gtaaaacgacggccagttttctgctgccagttaaacattac

SEQ ID NO: 85607 - DNA, 22 bp, Artificial Sequence
  primer
aaccatatccaccaatgaaagg

SEQ ID NO: 85608 - DNA, 23 bp, Artificial Sequence
  primer
gcaatacaactagcaccacttcc

SEQ ID NO: 85609 - DNA, 43 bp, Artificial Sequence
  primer
gtaaaacgacggccagtttgtcttgcatctcatctcaagttac

SEQ ID NO: 85610 - DNA, 38 bp, Artificial Sequence
  primer
gtaaaacgacggccagtgacaggacacacagaccttgc

SEQ ID NO: 85611 - DNA, 21 bp, Artificial Sequence
  primer
tgggagcaaagagtgattgtg

SEQ ID NO: 85612 - DNA, 42 bp, Artificial Sequence
  primer
gtaaaacgacggccagtagaatcactatgcatacagcatcac

SEQ ID NO: 85613 - DNA, 39 bp, Artificial Sequence
  primer
gtaaaacgacggccagttcttaatgtacagccatgcagc

SEQ ID NO: 85614 - DNA, 24 bp, Artificial Sequence
  primer
cctagtgttgcctttctttaggac

SEQ ID NO: 85615 - DNA, 37 bp, Artificial Sequence
  primer
gtaaaacgacggccagtgtggcacatggaggttcttc

SEQ ID NO: 85616 - DNA, 20 bp, Artificial Sequence
  primer
tggatgacagagcaagaccc

SEQ ID NO: 85617 - DNA, 20 bp, Artificial Sequence
  primer
tggtaggttgccagttggac

SEQ ID NO: 85618 - DNA, 21 bp, Artificial Sequence
  primer
tgggaaccaaggataaagtca

SEQ ID NO: 85619 - DNA, 30 bp, Artificial Sequence
  primer
caatgtatttatccttgtaaccctatactc

SEQ ID NO: 85620 - DNA, 21 bp, Artificial Sequence
  primer
atgggtaggcaatcacacaaa

SEQ ID NO: 85621 - DNA, 20 bp, Artificial Sequence
  primer
aaatgggaagcagggagagt

SEQ ID NO: 85622 - DNA, 22 bp, Artificial Sequence
  primer
tctggatctttctagctcggtg

SEQ ID NO: 85623 - DNA, 38 bp, Artificial Sequence
  primer
gtaaaacgacggccagtatttgcaagaactcctggctc

SEQ ID NO: 85624 - DNA, 38 bp, Artificial Sequence
  primer
gtaaaacgacggccagttgttattcccaccattcctgg

SEQ ID NO: 85625 - DNA, 21 bp, Artificial Sequence
  primer
gtccatcacacaaattctgcc

SEQ ID NO: 85626 - DNA, 21 bp, Artificial Sequence
  primer
aagccctggcataagacattt

SEQ ID NO: 85627 - DNA, 39 bp, Artificial Sequence
  primer
gtaaaacgacggccagtgcttaatggaatggaacactgc

SEQ ID NO: 85628 - DNA, 38 bp, Artificial Sequence
  primer
gtaaaacgacggccagtctggctgactggttcagagac

SEQ ID NO: 85629 - DNA, 38 bp, Artificial Sequence
  primer
gtaaaacgacggccagtatgccgagacaggagtaggtg

SEQ ID NO: 85630 - DNA, 23 bp, Artificial Sequence
  primer
gaaatccagctttcctaacactg

SEQ ID NO: 85631 - DNA, 22 bp, Artificial Sequence
  primer
ggcaccatttccaaattctaac

SEQ ID NO: 85632 - DNA, 22 bp, Artificial Sequence
  primer
aacataaatgctgtctgcatgg

SEQ ID NO: 85633 - DNA, 39 bp, Artificial Sequence
  primer
gtaaaacgacggccagtggatttagcatagtgcaggcag

SEQ ID NO: 85634 - DNA, 23 bp, Artificial Sequence
  primer
tcaatttgctttaggaagcactg

SEQ ID NO: 85635 - DNA, 22 bp, Artificial Sequence
  primer
ttaaggccatttatttcctccc

SEQ ID NO: 85636 - DNA, 38 bp, Artificial Sequence
  primer
gtaaaacgacggccagttttgatttccaaacatgccag

SEQ ID NO: 85637 - DNA, 21 bp, Artificial Sequence
  primer
tgtgggtttaggctccatagg

SEQ ID NO: 85638 - DNA, 37 bp, Artificial Sequence
  primer
gtaaaacgacggccagtcctctggcttgtctccagtg

SEQ ID NO: 85639 - DNA, 39 bp, Artificial Sequence
  primer
gtaaaacgacggccagtaaggacatggtctggttcaatg

SEQ ID NO: 85640 - DNA, 38 bp, Artificial Sequence
  primer
gtaaaacgacggccagtcagctctaccatttgctgtgc

SEQ ID NO: 85641 - DNA, 36 bp, Artificial Sequence
  primer
gtaaaacgacggccagtgagattccgctctgccaag

SEQ ID NO: 85642 - DNA, 37 bp, Artificial Sequence
  primer
gtaaaacgacggccagtaagaggcttaggatggcagg

SEQ ID NO: 85643 - DNA, 21 bp, Artificial Sequence
  primer
ctctccagtactctgcagccc

SEQ ID NO: 85644 - DNA, 24 bp, Artificial Sequence
  primer
accttgccaaagagagaattacac

SEQ ID NO: 85645 - DNA, 41 bp, Artificial Sequence
  primer
gtaaaacgacggccagtgccagcttctggaattacatattg

SEQ ID NO: 85646 - DNA, 38 bp, Artificial Sequence
  primer
gtaaaacgacggccagttgttgcaaacctattgaaggg

SEQ ID NO: 85647 - DNA, 22 bp, Artificial Sequence
  primer
tgtttccactttctctctgtgc

SEQ ID NO: 85648 - DNA, 37 bp, Artificial Sequence
  primer
gtaaaacgacggccagttcttcatgattccatgccac

SEQ ID NO: 85649 - DNA, 25 bp, Artificial Sequence
  primer
ggatatataaggttggcattaccag

SEQ ID NO: 85650 - DNA, 18 bp, Artificial Sequence
  primer
gtggccgtatggctctcg

SEQ ID NO: 85651 - DNA, 38 bp, Artificial Sequence
  primer
gtaaaacgacggccagtccctggtagtaggtgtggtcc

SEQ ID NO: 85652 - DNA, 18 bp, Artificial Sequence
  primer
aaagcctgcggacagagg

SEQ ID NO: 85653 - DNA, 38 bp, Artificial Sequence
  primer
gtaaaacgacggccagtgtacgtggacaaggtgaggtg

SEQ ID NO: 85654 - DNA, 38 bp, Artificial Sequence
  primer
gtaaaacgacggccagtacgtttacaggttctccagcc

SEQ ID NO: 85655 - DNA, 38 bp, Artificial Sequence
  primer
gtaaaacgacggccagtttccaagcacttgggttcttc

SEQ ID NO: 85656 - DNA, 21 bp, Artificial Sequence
  primer
cgaggtttgtgacactgaagc

SEQ ID NO: 85657 - DNA, 39 bp, Artificial Sequence
  primer
gtaaaacgacggccagtccacatgtgtctgtaggaaggg

SEQ ID NO: 85658 - DNA, 20 bp, Artificial Sequence
  primer
atggtgtggcttggtctctg

SEQ ID NO: 85659 - DNA, 38 bp, Artificial Sequence
  primer
gtaaaacgacggccagtatataaggtgcctctggcctc

SEQ ID NO: 85660 - DNA, 20 bp, Artificial Sequence
  primer
actcacaggctggcattcac

SEQ ID NO: 85661 - DNA, 38 bp, Artificial Sequence
  primer
gtaaaacgacggccagtggtccttgttctcctgcactg

SEQ ID NO: 85662 - DNA, 21 bp, Artificial Sequence
  primer
gatgacacacacctcctcctg

SEQ ID NO: 85663 - DNA, 37 bp, Artificial Sequence
  primer
gtaaaacgacggccagtaggacttcctggaggcacag

SEQ ID NO: 85664 - DNA, 21 bp, Artificial Sequence
  primer
tcctcagtggttaggacatcg

SEQ ID NO: 85665 - DNA, 38 bp, Artificial Sequence
  primer
gtaaaacgacggccagtaaggacttgtccagggatgtg

SEQ ID NO: 85666 - DNA, 37 bp, Artificial Sequence
  primer
gtaaaacgacggccagtcacccaagtcacctctcctg

SEQ ID NO: 85667 - DNA, 35 bp, Artificial Sequence
  primer
gtaaaacgacggccagtgggctggagagaagccag

SEQ ID NO: 85668 - DNA, 38 bp, Artificial Sequence
  primer
gtaaaacgacggccagtaaacctcagacatggtttccg

SEQ ID NO: 85669 - DNA, 38 bp, Artificial Sequence
  primer
gtaaaacgacggccagttccgctcaggtagttctgtcc

SEQ ID NO: 85670 - DNA, 38 bp, Artificial Sequence
  primer
gtaaaacgacggccagttcaacttgtgggttgatctcc

SEQ ID NO: 85671 - DNA, 39 bp, Artificial Sequence
  primer
gtaaaacgacggccagtggtgctctagctcatcgtttcc

SEQ ID NO: 85672 - DNA, 38 bp, Artificial Sequence
  primer
gtaaaacgacggccagttcttcagagacccgttccttc

SEQ ID NO: 85673 - DNA, 21 bp, Artificial Sequence
  primer
ggaagcctagctggctaatcc

SEQ ID NO: 85674 - DNA, 40 bp, Artificial Sequence
  primer
gtaaaacgacggccagtactccttccggtaaagaggtaag

SEQ ID NO: 85675 - DNA, 21 bp, Artificial Sequence
  primer
gacaccattgacagaagtggg

SEQ ID NO: 85676 - DNA, 19 bp, Artificial Sequence
  primer
actgtgccattgcactcca

SEQ ID NO: 85677 - DNA, 21 bp, Artificial Sequence
  primer
ctgcttgtgacctctccactc

SEQ ID NO: 85678 - DNA, 21 bp, Artificial Sequence
  primer
cagatccaagggcagaaacac

SEQ ID NO: 85679 - DNA, 21 bp, Artificial Sequence
  primer
tccatgctagaccctaccacc

SEQ ID NO: 85680 - DNA, 21 bp, Artificial Sequence
  primer
actcaaaggacctcagagccc

SEQ ID NO: 85681 - DNA, 21 bp, Artificial Sequence
  primer
cacgactttctccagatgcac

SEQ ID NO: 85682 - DNA, 19 bp, Artificial Sequence
  primer
tgatgctgctggtgtctgc

SEQ ID NO: 85683 - DNA, 18 bp, Artificial Sequence
  primer
gcaccggccagtaccttg

SEQ ID NO: 85684 - DNA, 21 bp, Artificial Sequence
  primer
gtgaccatgaacttgctgtgg

SEQ ID NO: 85685 - DNA, 21 bp, Artificial Sequence
  primer
cgtcctgactcagtgttctgg

SEQ ID NO: 85686 - DNA, 21 bp, Artificial Sequence
  primer
actcggaaatcagagagcagg

SEQ ID NO: 85687 - DNA, 21 bp, Artificial Sequence
  primer
atagctgacatgtgctccctg

SEQ ID NO: 85688 - DNA, 38 bp, Artificial Sequence
  primer
gtaaaacgacggccagtggcatagcaaacttcaagctg

SEQ ID NO: 85689 - DNA, 38 bp, Artificial Sequence
  primer
gtaaaacgacggccagtgtacagtgacgttccacgctc

SEQ ID NO: 85690 - DNA, 20 bp, Artificial Sequence
  primer
gactgaaggtgagtgggtgg

SEQ ID NO: 85691 - DNA, 21 bp, Artificial Sequence
  primer
gacaggaaatgggagatgtgc

SEQ ID NO: 85692 - DNA, 21 bp, Artificial Sequence
  primer
ttagctgggaaagtgacctcc

SEQ ID NO: 85693 - DNA, 37 bp, Artificial Sequence
  primer
gtaaaacgacggccagttgtgtgagatggctctggtg

SEQ ID NO: 85694 - DNA, 39 bp, Artificial Sequence
  primer
gtaaaacgacggccagttccctgctataagattgccttg

SEQ ID NO: 85695 - DNA, 36 bp, Artificial Sequence
  primer
gtaaaacgacggccagtccctgccgaccctagaaag

SEQ ID NO: 85696 - DNA, 21 bp, Artificial Sequence
  primer
aaatcatcacacacctcagcg

SEQ ID NO: 85697 - DNA, 38 bp, Artificial Sequence
  primer
gtaaaacgacggccagttcaagctaattcttcccggtc

SEQ ID NO: 85698 - DNA, 38 bp, Artificial Sequence
  primer
gtaaaacgacggccagtagggcactatggacacaaagg

SEQ ID NO: 85699 - DNA, 38 bp, Artificial Sequence
  primer
gtaaaacgacggccagttagggacaagaagggcatcag

SEQ ID NO: 85700 - DNA, 21 bp, Artificial Sequence
  primer
gtgggcacctttatcctaagc

SEQ ID NO: 85701 - DNA, 21 bp, Artificial Sequence
  primer
cattcctgtgaactccttggg

SEQ ID NO: 85702 - DNA, 38 bp, Artificial Sequence
  primer
gtaaaacgacggccagtagtcagacgcttgctaaaccc

SEQ ID NO: 85703 - DNA, 22 bp, Artificial Sequence
  primer
gaaggtacagtccagggaaagc

SEQ ID NO: 85704 - DNA, 21 bp, Artificial Sequence
  primer
agacttcccagctacccagtg

SEQ ID NO: 85705 - DNA, 23 bp, Artificial Sequence
  primer
gccctctctgactttaccttgag

SEQ ID NO: 85706 - DNA, 21 bp, Artificial Sequence
  primer
tctcagtgagcagaaacaggg

SEQ ID NO: 85707 - DNA, 21 bp, Artificial Sequence
  primer
aaaggtcccttccactcaatg

SEQ ID NO: 85708 - DNA, 24 bp, Artificial Sequence
  primer
cctattgtttctccttcagtttgg

SEQ ID NO: 85709 - DNA, 38 bp, Artificial Sequence
  primer
gtaaaacgacggccagtagagagctacatgttgggcag

SEQ ID NO: 85710 - DNA, 42 bp, Artificial Sequence
  primer
gtaaaacgacggccagttcccactgaataaagaatgtgaaag

SEQ ID NO: 85711 - DNA, 23 bp, Artificial Sequence
  primer
tggacttcagatttgtattgctg

SEQ ID NO: 85712 - DNA, 37 bp, Artificial Sequence
  primer
gtaaaacgacggccagtcagcatggcatatgtggtcc

SEQ ID NO: 85713 - DNA, 41 bp, Artificial Sequence
  primer
gtaaaacgacggccagttttgctttgtattcatcaatcagc

SEQ ID NO: 85714 - DNA, 22 bp, Artificial Sequence
  primer
cacctacccactatgtgcactg

SEQ ID NO: 85715 - DNA, 37 bp, Artificial Sequence
  primer
gtaaaacgacggccagtgatagcaagggcaaccaaag

SEQ ID NO: 85716 - DNA, 21 bp, Artificial Sequence
  primer
gcttattgccagaacaccctc

SEQ ID NO: 85717 - DNA, 38 bp, Artificial Sequence
  primer
gtaaaacgacggccagttttgggacctagagaagctcg

SEQ ID NO: 85718 - DNA, 21 bp, Artificial Sequence
  primer
ccgtagtcagtccctcctctg

SEQ ID NO: 85719 - DNA, 21 bp, Artificial Sequence
  primer
actggctgctgcctttgatag

SEQ ID NO: 85720 - DNA, 37 bp, Artificial Sequence
  primer
gtaaaacgacggccagtctgttgcactgccagaaacc

SEQ ID NO: 85721 - DNA, 23 bp, Artificial Sequence
  primer
aaggaaatatcaaatccgacagc

SEQ ID NO: 85722 - DNA, 38 bp, Artificial Sequence
  primer
gtaaaacgacggccagtcccatctaagaagcgcagaac

SEQ ID NO: 85723 - DNA, 21 bp, Artificial Sequence
  primer
cggctctaatcaaagtttggc

SEQ ID NO: 85724 - DNA, 38 bp, Artificial Sequence
  primer
gtaaaacgacggccagtcagctcacaccctttccctac

SEQ ID NO: 85725 - DNA, 21 bp, Artificial Sequence
  primer
agagaagtcaatggcctcagc

SEQ ID NO: 85726 - DNA, 21 bp, Artificial Sequence
  primer
ttctgccacatgattactgcc

SEQ ID NO: 85727 - DNA, 21 bp, Artificial Sequence
  primer
agattcccaaagaggaatcaa

SEQ ID NO: 85728 - DNA, 21 bp, Artificial Sequence
  primer
gggactgaggatataccagcg

SEQ ID NO: 85729 - DNA, 20 bp, Artificial Sequence
  primer
ggcatcacaaagaatttggc

SEQ ID NO: 85730 - DNA, 21 bp, Artificial Sequence
  primer
aatggaaatgaaatccttcgg

SEQ ID NO: 85731 - DNA, 39 bp, Artificial Sequence
  primer
gtaaaacgacggccagttgaactactgaacctgtggcag

SEQ ID NO: 85732 - DNA, 21 bp, Artificial Sequence
  primer
ttagggtcatgtgctacggac

SEQ ID NO: 85733 - DNA, 21 bp, Artificial Sequence
  primer
tctcaatctggagtgtcccag

SEQ ID NO: 85734 - DNA, 21 bp, Artificial Sequence
  primer
ttgctctccagacaccagttc

SEQ ID NO: 85735 - DNA, 21 bp, Artificial Sequence
  primer
gtccagtctctggtctagggc

SEQ ID NO: 85736 - DNA, 38 bp, Artificial Sequence
  primer
gtaaaacgacggccagtaagaacagaggcttcccaacc

SEQ ID NO: 85737 - DNA, 26 bp, Artificial Sequence
  primer
gaaagagctatgtttagggtgaagaa

SEQ ID NO: 85738 - DNA, 38 bp, Artificial Sequence
  primer
gtaaaacgacggccagtacgtagcccagttaggaccat

SEQ ID NO: 85739 - DNA, 38 bp, Artificial Sequence
  primer
gtaaaacgacggccagttaggatactgccctcccattc

SEQ ID NO: 85740 - DNA, 20 bp, Artificial Sequence
  primer
tcctgaaggcacttggaaag

SEQ ID NO: 85741 - DNA, 42 bp, Artificial Sequence
  primer
gtaaaacgacggccagttttaaatgctttacctgaaggtttg

SEQ ID NO: 85742 - DNA, 21 bp, Artificial Sequence
  primer
acgcatccaagtacaagaggc

SEQ ID NO: 85743 - DNA, 23 bp, Artificial Sequence
  primer
tttctaggtcatcggtgttcatc

SEQ ID NO: 85744 - DNA, 21 bp, Artificial Sequence
  primer
tgggctgaaagttagtgcttg

SEQ ID NO: 85745 - DNA, 38 bp, Artificial Sequence
  primer
gtaaaacgacggccagtggaacagctgtgctgacactc

SEQ ID NO: 85746 - DNA, 38 bp, Artificial Sequence
  primer
gtaaaacgacggccagttctcccgtactttggagcaag

SEQ ID NO: 85747 - DNA, 37 bp, Artificial Sequence
  primer
gtaaaacgacggccagtccaagcaatcctcacacctc

SEQ ID NO: 85748 - DNA, 39 bp, Artificial Sequence
  primer
gtaaaacgacggccagtggctgcctcactcattctattc

SEQ ID NO: 85749 - DNA, 21 bp, Artificial Sequence
  primer
tggcccagctgtagtttactg

SEQ ID NO: 85750 - DNA, 21 bp, Artificial Sequence
  primer
tggcaatgaaagaaggctgtc

SEQ ID NO: 85751 - DNA, 38 bp, Artificial Sequence
  primer
gtaaaacgacggccagttactgcaagttgccctgaatc

SEQ ID NO: 85752 - DNA, 38 bp, Artificial Sequence
  primer
gtaaaacgacggccagtccacccaagcatcattaaacc

SEQ ID NO: 85753 - DNA, 21 bp, Artificial Sequence
  primer
atctactacccagcacccagc

SEQ ID NO: 85754 - DNA, 40 bp, Artificial Sequence
  primer
gtaaaacgacggccagtgccaacaataagttgccctaaac

SEQ ID NO: 85755 - DNA, 40 bp, Artificial Sequence; identical to SEQ ID NO: 85754
  primer

SEQ ID NO: 85756 - DNA, 42 bp, Artificial Sequence
  primer
gtaaaacgacggccagtaacaaggcacattaagacttgattc

SEQ ID NO: 85757 - DNA, 18 bp, Artificial Sequence
  primer
ttgggaggctgaggcaaa

SEQ ID NO: 85758 - DNA, 42 bp, Artificial Sequence
  primer
gtaaaacgacggccagtgtccatttagtaagtgatggaaagg

SEQ ID NO: 85759 - DNA, 21 bp, Artificial Sequence
  primer
caccaaagttgcttgcttctg

SEQ ID NO: 85760 - DNA, 22 bp, Artificial Sequence
  primer
aacctttctccacattaggctc

SEQ ID NO: 85761 - DNA, 42 bp, Artificial Sequence
  primer
gtaaaacgacggccagttgtaaatattagtggtttgggatgg

SEQ ID NO: 85762 - DNA, 24 bp, Artificial Sequence
  primer
tttgtttgctctcagaaagattca

SEQ ID NO: 85763 - DNA, 21 bp, Artificial Sequence
  primer
ccttgagtttgcactaatggc

SEQ ID NO: 85764 - DNA, 39 bp, Artificial Sequence
  primer
gtaaaacgacggccagtaaacggcaaatacctttatccc

SEQ ID NO: 85765 - DNA, 40 bp, Artificial Sequence
  primer
gtaaaacgacggccagtccagagatgcaaataatcgaaac

SEQ ID NO: 85766 - DNA, 24 bp, Artificial Sequence
  primer
aaacctgatcaccaagctaacaac

SEQ ID NO: 85767 - DNA, 38 bp, Artificial Sequence
  primer
gtaaaacgacggccagttgatgggtaaatggaggtgtg

SEQ ID NO: 85768 - DNA, 25 bp, Artificial Sequence
  primer
gaacagatgtcaatatgaggcattc

SEQ ID NO: 85769 - DNA, 38 bp, Artificial Sequence
  primer
gtaaaacgacggccagtgggaggtcaataaccttggag

SEQ ID NO: 85770 - DNA, 20 bp, Artificial Sequence
  primer
gttctacctgaccacggctc

SEQ ID NO: 85771 - DNA, 21 bp, Artificial Sequence
  primer
caggtagcaagattgtctccg

SEQ ID NO: 85772 - DNA, 38 bp, Artificial Sequence
  primer
gtaaaacgacggccagtatcaacgtggttgagctgttg

SEQ ID NO: 85773 - DNA, 20 bp, Artificial Sequence
  primer
ctctgacggttcagctctgg

SEQ ID NO: 85774 - DNA, 38 bp, Artificial Sequence
  primer
gtaaaacgacggccagtgttaagcagcgtctgcggtag

SEQ ID NO: 85775 - DNA, 19 bp, Artificial Sequence
  primer
accgacgaagaggtcgaag

SEQ ID NO: 85776 - DNA, 38 bp, Artificial Sequence
  primer
gtaaaacgacggccagtatgcactggagtacacgttgc

SEQ ID NO: 85777 - DNA, 18 bp, Artificial Sequence
  primer
agctggcgtccaggtagg

SEQ ID NO: 85778 - DNA, 18 bp, Artificial Sequence
  primer
gttcgccatccactgctg

SEQ ID NO: 85779 - DNA, 37 bp, Artificial Sequence
  primer
gtaaaacgacggccagtctgtgcccagagtatctgcc

SEQ ID NO: 85780 - DNA, 18 bp, Artificial Sequence
  primer
gtgcacttggtccatgcc

SEQ ID NO: 85781 - DNA, 38 bp, Artificial Sequence
  primer
gtaaaacgacggccagtttggagaggagctggtctagg

SEQ ID NO: 85782 - DNA, 38 bp, Artificial Sequence
  primer
gtaaaacgacggccagttgcaaatgacccaaccaatac

SEQ ID NO: 85783 - DNA, 38 bp, Artificial Sequence
  primer
gtaaaacgacggccagtgactgtggcagttccatgttg

SEQ ID NO: 85784 - DNA, 20 bp, Artificial Sequence
  primer
gctgcgtggaaagaattcag

SEQ ID NO: 85785 - DNA, 38 bp, Artificial Sequence
  primer
gtaaaacgacggccagtctgggttcatatctgggttgg

SEQ ID NO: 85786 - DNA, 21 bp, Artificial Sequence
  primer
gggccagtgatgtaggaacag

SEQ ID NO: 85787 - DNA, 36 bp, Artificial Sequence
  primer
gtaaaacgacggccagtgtgctctggatcactccgc

SEQ ID NO: 85788 - DNA, 38 bp, Artificial Sequence
  primer
gtaaaacgacggccagttaggcaagaagcaaatcctgc

SEQ ID NO: 85789 - DNA, 21 bp, Artificial Sequence
  primer
cattgccatgttctcctttcc

SEQ ID NO: 85790 - DNA, 36 bp, Artificial Sequence
  primer
gtaaaacgacggccagtcacaggctgagatgcctcc

SEQ ID NO: 85791 - DNA, 21 bp, Artificial Sequence
  primer
cagggccacatacagaagctc

SEQ ID NO: 85792 - DNA, 21 bp, Artificial Sequence
  primer
ctgtcagcaggtcttccactg

SEQ ID NO: 85793 - DNA, 21 bp, Artificial Sequence
  primer
cataggtcctgagcagcagac

SEQ ID NO: 85794 - DNA, 21 bp, Artificial Sequence
  primer
ttatctaccctcctcctcccg

SEQ ID NO: 85795 - DNA, 21 bp, Artificial Sequence
  primer
taagagggattggtcactggc

SEQ ID NO: 85796 - DNA, 21 bp, Artificial Sequence
  primer
gctgtcagggacactgtcttc

SEQ ID NO: 85797 - DNA, 38 bp, Artificial Sequence
  primer
gtaaaacgacggccagtagtcctgctctaccctccctc

SEQ ID NO: 85798 - DNA, 20 bp, Artificial Sequence
  primer
gacaccgcctgtacctcttc

SEQ ID NO: 85799 - DNA, 21 bp, Artificial Sequence
  primer
aaagtccgagaggttcaggtc

SEQ ID NO: 85800 - DNA, 20 bp, Artificial Sequence
  primer
agatgaagcccagagacacg

SEQ ID NO: 85801 - DNA, 21 bp, Artificial Sequence
  primer
agcagttccttcctcttctgg

SEQ ID NO: 85802 - DNA, 38 bp, Artificial Sequence
  primer
gtaaaacgacggccagtggccctgactaaatccctatg

SEQ ID NO: 85803 - DNA, 21 bp, Artificial Sequence
  primer
tgttgagaagtgctttccagg

SEQ ID NO: 85804 - DNA, 38 bp, Artificial Sequence
  primer
gtaaaacgacggccagtagaaccgcaattgttccagtc

SEQ ID NO: 85805 - DNA, 39 bp, Artificial Sequence
  primer
gtaaaacgacggccagtgctgtgattacaggagcctacc

SEQ ID NO: 85806 - DNA, 22 bp, Artificial Sequence
  primer
tggatgaaatcaacacaagcag

SEQ ID NO: 85807 - DNA, 24 bp, Artificial Sequence
  primer
accagtggctattctaaagtttcc

SEQ ID NO: 85808 - DNA, 38 bp, Artificial Sequence
  primer
gtaaaacgacggccagttttccctgccttgactcaaac

SEQ ID NO: 85809 - DNA, 21 bp, Artificial Sequence
  primer
ttcacactattggtgctgtgc

SEQ ID NO: 85810 - DNA, 40 bp, Artificial Sequence
  primer
gtaaaacgacggccagttcagttcctgtcctcaagtaacc

SEQ ID NO: 85811 - DNA, 35 bp, Artificial Sequence
  primer
gtaaaacgacggccagttctggtcctttcccgtcc

SEQ ID NO: 85812 - DNA, 38 bp, Artificial Sequence
  primer
gtaaaacgacggccagtattagcacattcaagatgccc

SEQ ID NO: 85813 - DNA, 38 bp, Artificial Sequence
  primer
gtaaaacgacggccagtaccgtgatttagcaagaagcg

SEQ ID NO: 85814 - DNA, 20 bp, Artificial Sequence
  primer
ctctcgatcctccttcaggg

SEQ ID NO: 85815 - DNA, 21 bp, Artificial Sequence
  primer
aagaaccggtgagctgaagac

SEQ ID NO: 85816 - DNA, 20 bp, Artificial Sequence
  primer
tacaggcatgagccaacaag

SEQ ID NO: 85817 - DNA, 21 bp, Artificial Sequence
  primer
tcgcttgaacttggtaagtgg

SEQ ID NO: 85818 - DNA, 21 bp, Artificial Sequence
  primer
aggtagagaagggcattgcag

SEQ ID NO: 85819 - DNA, 22 bp, Artificial Sequence
  primer
aattattccaccacactccacc

SEQ ID NO: 85820 - DNA, 38 bp, Artificial Sequence
  primer
gtaaaacgacggccagtggtgtgcattgttagaggtgc

SEQ ID NO: 85821 - DNA, 39 bp, Artificial Sequence
  primer
gtaaaacgacggccagtgggacatgtttgctaagtccag

SEQ ID NO: 85822 - DNA, 21 bp, Artificial Sequence
  primer
ctgtagatgagcagctcgtgg

SEQ ID NO: 85823 - DNA, 21 bp, Artificial Sequence
  primer
cagaacaacgttaggcacgag

SEQ ID NO: 85824 - DNA, 22 bp, Artificial Sequence
  primer
gatgatggagacatcagcttcc

SEQ ID NO: 85825 - DNA, 20 bp, Artificial Sequence
  primer
gaaacctgaggtctgagggc

SEQ ID NO: 85826 - DNA, 38 bp, Artificial Sequence
  primer
gtaaaacgacggccagtggagaaatgtctcttgggcag

SEQ ID NO: 85827 - DNA, 21 bp, Artificial Sequence
  primer
ggctggaatgggtagataagg

SEQ ID NO: 85828 - DNA, 20 bp, Artificial Sequence
  primer
gagaatggtgtgaacccagg

SEQ ID NO: 85829 - DNA, 36 bp, Artificial Sequence
  primer
gtaaaacgacggccagtaggaggtctgagtgccagg

SEQ ID NO: 85830 - DNA, 38 bp, Artificial Sequence
  primer
gtaaaacgacggccagtgttgtaggagaaagcaagccc

SEQ ID NO: 85831 - DNA, 38 bp, Artificial Sequence
  primer
gtaaaacgacggccagtccctgggagagagactgaaac

SEQ ID NO: 85832 - DNA, 21 bp, Artificial Sequence
  primer
aagcggcagagctgagtttag

SEQ ID NO: 85833 - DNA, 22 bp, Artificial Sequence
  primer
ttactgctagagggagacgctg

SEQ ID NO: 85834 - DNA, 23 bp, Artificial Sequence
  primer
gaggttagaaggaatgaaggcag

SEQ ID NO: 85835 - DNA, 37 bp, Artificial Sequence
  primer
gtaaaacgacggccagtgtggagggaggtttctgctc

SEQ ID NO: 85836 - DNA, 39 bp, Artificial Sequence
  primer
gtaaaacgacggccagttgctcctgctagaatagccaac

SEQ ID NO: 85837 - DNA, 37 bp, Artificial Sequence
  primer
gtaaaacgacggccagtcaaatgagacaggacgtggc

SEQ ID NO: 85838 - DNA, 38 bp, Artificial Sequence
  primer
gtaaaacgacggccagtcacaaactgtgggtgtgttcc

SEQ ID NO: 85839 - DNA, 21 bp, Artificial Sequence
  primer
gcaggcttagcactgtatccc

SEQ ID NO: 85840 - DNA, 37 bp, Artificial Sequence
  primer
gtaaaacgacggccagtgaaccttccagaaagcccac

SEQ ID NO: 85841 - DNA, 38 bp, Artificial Sequence
  primer
gtaaaacgacggccagtgatgcagctctgcagtctttg

SEQ ID NO: 85842 - DNA, 37 bp, Artificial Sequence
  primer
gtaaaacgacggccagtgtgtctttgagaaccgccag

SEQ ID NO: 85843 - DNA, 20 bp, Artificial Sequence
  primer
tccagatggcaaaggttcag

SEQ ID NO: 85844 - DNA, 21 bp, Artificial Sequence
  primer
caagatcatgccactgtccac

SEQ ID NO: 85845 - DNA, 39 bp, Artificial Sequence
  primer
gtaaaacgacggccagtcattgcgacctagaataatggg

SEQ ID NO: 85846 - DNA, 38 bp, Artificial Sequence
  primer
gtaaaacgacggccagttgggcggatgtttatgtatgg

SEQ ID NO: 85847 - DNA, 38 bp, Artificial Sequence
  primer
gtaaaacgacggccagtagaggatggcttgcatagagc

SEQ ID NO: 85848 - DNA, 40 bp, Artificial Sequence
  primer
gtaaaacgacggccagtaaactgacacactcttcccatgt

SEQ ID NO: 85849 - DNA, 38 bp, Artificial Sequence
  primer
gtaaaacgacggccagtgggtttgggacagattctcac

SEQ ID NO: 85850 - DNA, 21 bp, Artificial Sequence
  primer
agacacaaacccagatgaccc

SEQ ID NO: 85851 - DNA, 21 bp, Artificial Sequence
  primer
cagcctcagcaatagagcaag

SEQ ID NO: 85852 - DNA, 38 bp, Artificial Sequence
  primer
gtaaaacgacggccagtctgtcatcatggctcgattcc

SEQ ID NO: 85853 - DNA, 40 bp, Artificial Sequence
  primer
gtaaaacgacggccagtgctttcaggaattctttgtctgc

SEQ ID NO: 85854 - DNA, 38 bp, Artificial Sequence
  primer
gtaaaacgacggccagtagtatcacacattccctcggc

SEQ ID NO: 85855 - DNA, 20 bp, Artificial Sequence
  primer
cagcagggagtgcgagtaac

SEQ ID NO: 85856 - DNA, 21 bp, Artificial Sequence
  primer
taccttctcctcttgcttggc

SEQ ID NO: 85857 - DNA, 38 bp, Artificial Sequence
  primer
gtaaaacgacggccagtaaccaagaagtgtgatctcgg

SEQ ID NO: 85858 - DNA, 21 bp, Artificial Sequence
  primer
gtggcagatgcctgagttaag

SEQ ID NO: 85859 - DNA, 21 bp, Artificial Sequence
  primer
aggatcggctttgagaaagag

SEQ ID NO: 85860 - DNA, 39 bp, Artificial Sequence
  primer
gtaaaacgacggccagtgacccatgatggattctagagc

SEQ ID NO: 85861 - DNA, 21 bp, Artificial Sequence
  primer
gcaggagcagagggatgtaag

SEQ ID NO: 85862 - DNA, 20 bp, Artificial Sequence
  primer
agccagtgagagcaatggtg

SEQ ID NO: 85863 - DNA, 38 bp, Artificial Sequence
  primer
gtaaaacgacggccagtcacccagttactgtcacccag

SEQ ID NO: 85864 - DNA, 21 bp, Artificial Sequence
  primer
cacaagggtcccatcaaagtc

SEQ ID NO: 85865 - DNA, 38 bp, Artificial Sequence
  primer
gtaaaacgacggccagtagctttacatgcacatttggg

SEQ ID NO: 85866 - DNA, 21 bp, Artificial Sequence
  primer
tctccctccaaatcccataag

SEQ ID NO: 85867 - DNA, 21 bp, Artificial Sequence
  primer
ctgcttggccactaggatctc

SEQ ID NO: 85868 - DNA, 38 bp, Artificial Sequence
  primer
gtaaaacgacggccagtcagttagaaggcagcaaaggc

SEQ ID NO: 85869 - DNA, 21 bp, Artificial Sequence
  primer
ataggaaacaagggcccagtc

SEQ ID NO: 85870 - DNA, 21 bp, Artificial Sequence
  primer
aacaaacccttccatctgtcc

SEQ ID NO: 85871 - DNA, 37 bp, Artificial Sequence
  primer
gtaaaacgacggccagtaccagtccctgtgggagttc

SEQ ID NO: 85872 - DNA, 21 bp, Artificial Sequence
  primer
atccatgccacaaatagtccc

SEQ ID NO: 85873 - DNA, 20 bp, Artificial Sequence
  primer
agccttagcctcccaggaac

SEQ ID NO: 85874 - DNA, 21 bp, Artificial Sequence
  primer
gggtgagaaagtgggactgac

SEQ ID NO: 85875 - DNA, 21 bp, Artificial Sequence
  primer
aaggtgagagagctgagaccc

SEQ ID NO: 85876 - DNA, 21 bp, Artificial Sequence
  primer
tgccaggatggataacctctc

SEQ ID NO: 85877 - DNA, 36 bp, Artificial Sequence
  primer
gtaaaacgacggccagtgcaggaggccaagttcaag

SEQ ID NO: 85878 - DNA, 36 bp, Artificial Sequence
  primer
gtaaaacgacggccagtccgaacccagccacactac

SEQ ID NO: 85879 - DNA, 38 bp, Artificial Sequence
  primer
gtaaaacgacggccagttagctttctgagctctgtggc

SEQ ID NO: 85880 - DNA, 21 bp, Artificial Sequence
  primer
tgcctgtctgccctaaatagc

SEQ ID NO: 85881 - DNA, 38 bp, Artificial Sequence
  primer
gtaaaacgacggccagtctctggtttccacatcaaccc

SEQ ID NO: 85882 - DNA, 38 bp, Artificial Sequence
  primer
gtaaaacgacggccagtaaatgttccaccacgtgaacc

SEQ ID NO: 85883 - DNA, 21 bp, Artificial Sequence
  primer
gggttagggagggtagactgg

SEQ ID NO: 85884 - DNA, 21 bp, Artificial Sequence
  primer
ctaagcagagcgaagggtgtg

SEQ ID NO: 85885 - DNA, 21 bp, Artificial Sequence
  primer
gaggagcaaagcagacagagg

SEQ ID NO: 85886 - DNA, 21 bp, Artificial Sequence
  primer
aatgatcagtggcagacatgc

SEQ ID NO: 85887 - DNA, 21 bp, Artificial Sequence
  primer
cactctagaaggccatggagc

SEQ ID NO: 85888 - DNA, 21 bp, Artificial Sequence
  primer
attcagcaagtccaaagtgcc

SEQ ID NO: 85889 - DNA, 36 bp, Artificial Sequence
  primer
gtaaaacgacggccagtctggccttggaatctgctc

SEQ ID NO: 85890 - DNA, 21 bp, Artificial Sequence
  primer
ctcgaaccttcagacagaccc

SEQ ID NO: 85891 - DNA, 22 bp, Artificial Sequence
  primer
aaatgatcagtgcaagcagttg

SEQ ID NO: 85892 - DNA, 36 bp, Artificial Sequence
  primer
gtaaaacgacggccagtgtcacaggtgcagcagtcc

SEQ ID NO: 85893 - DNA, 38 bp, Artificial Sequence
  primer
gtaaaacgacggccagtctaatagccggaaggtcaggg

SEQ ID NO: 85894 - DNA, 21 bp, Artificial Sequence
  primer
ccgaaacgacatcatttcatc

SEQ ID NO: 85895 - DNA, 38 bp, Artificial Sequence
  primer
gtaaaacgacggccagtctccctcaatgagaaccttgg

SEQ ID NO: 85896 - DNA, 22 bp, Artificial Sequence
  primer
gggaggcaaatagaaatggatg

SEQ ID NO: 85897 - DNA, 21 bp, Artificial Sequence
  primer
ctgtttgatcagccactttgc

SEQ ID NO: 85898 - DNA, 21 bp, Artificial Sequence
  primer
tggttccttcctacctctccc

SEQ ID NO: 85899 - DNA, 21 bp, Artificial Sequence
  primer
gtaattgtcatttcctccggg

SEQ ID NO: 85900 - DNA, 21 bp, Artificial Sequence
  primer
cagcaacttcccaagacttcc

SEQ ID NO: 85901 - DNA, 21 bp, Artificial Sequence
  primer
tttgttggtgagcctttagcc

SEQ ID NO: 85902 - DNA, 39 bp, Artificial Sequence
  primer
gtaaaacgacggccagtgcacggcaagggtaaagaatac

SEQ ID NO: 85903 - DNA, 38 bp, Artificial Sequence
  primer
gtaaaacgacggccagtctgcaacttcgaagacaaggg

SEQ ID NO: 85904 - DNA, 38 bp, Artificial Sequence
  primer
gtaaaacgacggccagtggatccaattccactgtttcc

SEQ ID NO: 85905 - DNA, 21 bp, Artificial Sequence
  primer
tgacaatctgggcttgttgac

SEQ ID NO: 85906 - DNA, 21 bp, Artificial Sequence
  primer
cctcagggctgttgttcatag

SEQ ID NO: 85907 - DNA, 37 bp, Artificial Sequence
  primer
gtaaaacgacggccagtctgcaaggaactcccatctg

SEQ ID NO: 85908 - DNA, 21 bp, Artificial Sequence
  primer
atcatctttggcttatgtggc

SEQ ID NO: 85909 - DNA, 38 bp, Artificial Sequence
  primer
gtaaaacgacggccagtgactcccttcaccctttcctc

SEQ ID NO: 85910 - DNA, 20 bp, Artificial Sequence
  primer
acaactcattgttggccctg

SEQ ID NO: 85911 - DNA, 38 bp, Artificial Sequence
  primer
gtaaaacgacggccagtgctgccatactcacaggattg

SEQ ID NO: 85912 - DNA, 38 bp, Artificial Sequence
  primer
gtaaaacgacggccagtcaaagaagctgatggttcagg

SEQ ID NO: 85913 - DNA, 21 bp, Artificial Sequence
  primer
aaatcaacccacccatcactc

SEQ ID NO: 85914 - DNA, 38 bp, Artificial Sequence
  primer
gtaaaacgacggccagtcaaatccctccacagcctaag

SEQ ID NO: 85915 - DNA, 23 bp, Artificial Sequence
  primer
gggaaataaacaggcaatttgag

SEQ ID NO: 85916 - DNA, 38 bp, Artificial Sequence
  primer
gtaaaacgacggccagttacattcctggctctcaaccc

SEQ ID NO: 85917 - DNA, 38 bp, Artificial Sequence
  primer
gtaaaacgacggccagtccatggccacctatttctgag

SEQ ID NO: 85918 - DNA, 21 bp, Artificial Sequence
  primer
gctgggactacaggtacccac

SEQ ID NO: 85919 - DNA, 38 bp, Artificial Sequence
  primer
gtaaaacgacggccagttccttccatgcctagaaatcc

SEQ ID NO: 85920 - DNA, 36 bp, Artificial Sequence
  primer
gtaaaacgacggccagtaagtgatcagcctgcctgg

SEQ ID NO: 85921 - DNA, 38 bp, Artificial Sequence
  primer
gtaaaacgacggccagtagtctgaccaccctgaatgtg

SEQ ID NO: 85922 - DNA, 19 bp, Artificial Sequence
  primer
ctagcctgggcaacaggag

SEQ ID NO: 85923 - DNA, 21 bp, Artificial Sequence
  primer
ccaagatggaggaagaagagg

SEQ ID NO: 85924 - DNA, 21 bp, Artificial Sequence
  primer
aggcgctaggataagggagag

SEQ ID NO: 85925 - DNA, 21 bp, Artificial Sequence
  primer
actcctgactcaagcgagctg

SEQ ID NO: 85926 - DNA, 38 bp, Artificial Sequence
  primer
gtaaaacgacggccagtctcccttgtactgaaggcagc

SEQ ID NO: 85927 - DNA, 38 bp, Artificial Sequence
  primer
gtaaaacgacggccagtgtgacaaagtcctccatgctg

SEQ ID NO: 85928 - DNA, 38 bp, Artificial Sequence
  primer
gtaaaacgacggccagtttgaggagagcaccctcatag

SEQ ID NO: 85929 - DNA, 21 bp, Artificial Sequence
  primer
gagaacggaggcccagttaag

SEQ ID NO: 85930 - DNA, 41 bp, Artificial Sequence
  primer
gtaaaacgacggccagtgagaatgagattatttccacagcc

SEQ ID NO: 85931 - DNA, 22 bp, Artificial Sequence
  primer
aaagccaaggaatgataaatgg

SEQ ID NO: 85932 - DNA, 43 bp, Artificial Sequence
  primer
gtaaaacgacggccagttttggtaagtctgaagttatgtcaaa

SEQ ID NO: 85933 - DNA, 39 bp, Artificial Sequence
  primer
gtaaaacgacggccagttgactgcaattgggaaatacac

SEQ ID NO: 85934 - DNA, 20 bp, Artificial Sequence
  primer
ggcaatgcaggaaagatgtc

SEQ ID NO: 85935 - DNA, 22 bp, Artificial Sequence
  primer
ccactgtcatcaggtattggaa

SEQ ID NO: 85936 - DNA, 38 bp, Artificial Sequence
  primer
gtaaaacgacggccagtattctttgtaccacgcaaccc

SEQ ID NO: 85937 - DNA, 38 bp, Artificial Sequence
  primer
gtaaaacgacggccagtctgagaacatgtgcccttctc

SEQ ID NO: 85938 - DNA, 38 bp, Artificial Sequence
  primer
gtaaaacgacggccagttacttgacaagaagggccagg

SEQ ID NO: 85939 - DNA, 38 bp, Artificial Sequence
  primer
gtaaaacgacggccagttaacaggctcctcctctgtgg

SEQ ID NO: 85940 - DNA, 21 bp, Artificial Sequence
  primer
aagctaatgctggaaagctgg

SEQ ID NO: 85941 - DNA, 22 bp, Artificial Sequence
  primer
tgctatctgctttctagctggg

SEQ ID NO: 85942 - DNA, 20 bp, Artificial Sequence
  primer
ggtctccacaatccacctcc

SEQ ID NO: 85943 - DNA, 21 bp, Artificial Sequence
  primer
cccttatagcacccagtccac

SEQ ID NO: 85944 - DNA, 21 bp, Artificial Sequence
  primer
agctactgggctgtgggtatg

SEQ ID NO: 85945 - DNA, 37 bp, Artificial Sequence
  primer
gtaaaacgacggccagtcaccagactcctccttgctg

SEQ ID NO: 85946 - DNA, 21 bp, Artificial Sequence
  primer
gtagccgatcatctcctcgtg

SEQ ID NO: 85947 - DNA, 21 bp, Artificial Sequence
  primer
gtgtaggtctgcgacttgtgc

SEQ ID NO: 85948 - DNA, 21 bp, Artificial Sequence
  primer
ggtgtaggtctgcgacttgtg

SEQ ID NO: 85949 - DNA, 38 bp, Artificial Sequence
  primer
gtaaaacgacggccagtaaacacgtacacggcactgac

SEQ ID NO: 85950 - DNA, 37 bp, Artificial Sequence
  primer
gtaaaacgacggccagtagagcaggctgcagctaacc

SEQ ID NO: 85951 - DNA, 21 bp, Artificial Sequence
  primer
atcgctagctcggccttaaac

SEQ ID NO: 85952 - DNA, 21 bp, Artificial Sequence
  primer
tcctgggaagggatattgttc

SEQ ID NO: 85953 - DNA, 21 bp, Artificial Sequence
  primer
tggtcacctatacctccaccg

SEQ ID NO: 85954 - DNA, 21 bp, Artificial Sequence
  primer
cctgcaggtcactttctaggg

SEQ ID NO: 85955 - DNA, 20 bp, Artificial Sequence
  primer
catgggtgtcttcctgatgg

SEQ ID NO: 85956 - DNA, 19 bp, Artificial Sequence
  primer
caccggatcctcatccttc

SEQ ID NO: 85957 - DNA, 19 bp, Artificial Sequence
  primer
tgggccttctcactcatgc

SEQ ID NO: 85958 - DNA, 38 bp, Artificial Sequence
  primer
gtaaaacgacggccagttggctcttcattcagcacttc

SEQ ID NO: 85959 - DNA, 19 bp, Artificial Sequence
  primer
aagctcacctcgatcccac

SEQ ID NO: 85960 - DNA, 21 bp, Artificial Sequence
  primer
atgctgctgtttgtcatggtc

SEQ ID NO: 85961 - DNA, 21 bp, Artificial Sequence
  primer
tggtggaaagtggagggatag

SEQ ID NO: 85962 - DNA, 38 bp, Artificial Sequence
  primer
gtaaaacgacggccagtacttcagggtctaccgcagtc

SEQ ID NO: 85963 - DNA, 38 bp, Artificial Sequence
  primer
gtaaaacgacggccagtctgcactgcaatgtatttggg

SEQ ID NO: 85964 - DNA, 21 bp, Artificial Sequence
  primer
acagaggcagactgcaagatg

SEQ ID NO: 85965 - DNA, 21 bp, Artificial Sequence
  primer
actgactgtgcaggcaaactg

SEQ ID NO: 85966 - DNA, 21 bp, Artificial Sequence
  primer
ggttggtctcctatctgcctg

SEQ ID NO: 85967 - DNA, 38 bp, Artificial Sequence
  primer
gtaaaacgacggccagtgaagtctttgctgtgccattg

SEQ ID NO: 85968 - DNA, 21 bp, Artificial Sequence
  primer
ggttccaggtcccataatcac

SEQ ID NO: 85969 - DNA, 21 bp, Artificial Sequence
  primer
acacaagggcctccaactatg

SEQ ID NO: 85970 - DNA, 38 bp, Artificial Sequence
  primer
gtaaaacgacggccagttgcttggcatgaagatgaaac

SEQ ID NO: 85971 - DNA, 36 bp, Artificial Sequence
  primer
gtaaaacgacggccagtctgatggtgacgaagtcgc

SEQ ID NO: 85972 - DNA, 39 bp, Artificial Sequence
  primer
gtaaaacgacggccagtcctaaaggtgtcccttctttcc

SEQ ID NO: 85973 - DNA, 39 bp, Artificial Sequence
  primer
gtaaaacgacggccagtccctcaaacttgggtctctagg

SEQ ID NO: 85974 - DNA, 38 bp, Artificial Sequence
  primer
gtaaaacgacggccagtcttacctgcaaaggcatggag

SEQ ID NO: 85975 - DNA, 20 bp, Artificial Sequence
  primer
ctctgcgtttctgatccagc

SEQ ID NO: 85976 - DNA, 21 bp, Artificial Sequence
  primer
gctttggaggagcaggtttag

SEQ ID NO: 85977 - DNA, 21 bp, Artificial Sequence
  primer
aatgcacacacttcacttggc

SEQ ID NO: 85978 - DNA, 38 bp, Artificial Sequence
  primer
gtaaaacgacggccagtagtgacatatggcccttctcc

SEQ ID NO: 85979 - DNA, 38 bp, Artificial Sequence
  primer
gtaaaacgacggccagtaatgcacacacttcacttggc

SEQ ID NO: 85980 - DNA, 38 bp, Artificial Sequence; identical to SEQ ID NO: 85978
  primer

SEQ ID NO: 85981 - DNA, 21 bp, Artificial Sequence
  primer
gccaaagttctatgagcctgg

SEQ ID NO: 85982 - DNA, 21 bp, Artificial Sequence
  primer
gctttggaggagcaggtttag

SEQ ID NO: 85983 - DNA, 38 bp, Artificial Sequence; identical to SEQ ID NO: 85979
  primer

SEQ ID NO: 85984 - DNA, 38 bp, Artificial Sequence; identical to SEQ ID NO: 85978
  primer

SEQ ID NO: 85985 - DNA, 21 bp, Artificial Sequence
  primer
caggatgaatgttacccagcg

SEQ ID NO: 85986 - DNA, 37 bp, Artificial Sequence
  primer
gtaaaacgacggccagtcattcgatctccacactccc

SEQ ID NO: 85987 - DNA, 38 bp, Artificial Sequence
  primer
gtaaaacgacggccagtctgattgaaggccagttgttc

SEQ ID NO: 85988 - DNA, 38 bp, Artificial Sequence
  primer
gtaaaacgacggccagttcccacaaatgattctgatgc

SEQ ID NO: 85989 - DNA, 21 bp, Artificial Sequence
  primer
aacaagcttgctcatccaagg

SEQ ID NO: 85990 - DNA, 21 bp, Artificial Sequence
  primer
tctgaaatcctattggccagg

SEQ ID NO: 85991 - DNA, 22 bp, Artificial Sequence
  primer
ggctgtttcttggagtttatgg

SEQ ID NO: 85992 - DNA, 21 bp, Artificial Sequence
  primer
caagcctacacaccctgtacg

SEQ ID NO: 85993 - DNA, 21 bp, Artificial Sequence
  primer
gtgagtcccagaagatcatgg

SEQ ID NO: 85994 - DNA, 21 bp, Artificial Sequence
  primer
tgtcccgtcctgacacttaac

SEQ ID NO: 85995 - DNA, 21 bp, Artificial Sequence
  primer
agccagagcaagaagctcaac

SEQ ID NO: 85996 - DNA, 40 bp, Artificial Sequence
  primer
gtaaaacgacggccagttcacagaggtttgaagtttccac

SEQ ID NO: 85997 - DNA, 21 bp, Artificial Sequence
  primer
actgattgtgccactgcattc

SEQ ID NO: 85998 - DNA, 21 bp, Artificial Sequence
  primer
agagatcaacgtcgggatgac

SEQ ID NO: 85999 - DNA, 20 bp, Artificial Sequence
  primer
aaccaggaccctcaccactc

SEQ ID NO: 86000 - DNA, 18 bp, Artificial Sequence
  primer
ctgcactccagcctccag

SEQ ID NO: 86001 - DNA, 21 bp, Artificial Sequence
  primer
ttagctttgggacaacacctg

SEQ ID NO: 86002 - DNA, 21 bp, Artificial Sequence
  primer
aacacgatggccaagttcttc

SEQ ID NO: 86003 - DNA, 36 bp, Artificial Sequence
  primer
gtaaaacgacggccagtactaccatgccaggccaag

SEQ ID NO: 86004 - DNA, 41 bp, Artificial Sequence
  primer
gtaaaacgacggccagtgcaggttctttcagtattaccagc

SEQ ID NO: 86005 - DNA, 21 bp, Artificial Sequence
  primer
atgacgagttaatgggtgcag

SEQ ID NO: 86006 - DNA, 20 bp, Artificial Sequence
  primer
tcagtggctccaatacccag

SEQ ID NO: 86007 - DNA, 39 bp, Artificial Sequence
  primer
gtaaaacgacggccagtcccatgactctggagttctctg

SEQ ID NO: 86008 - DNA, 22 bp, Artificial Sequence
  primer
ccatttcatagcctagacaccc

SEQ ID NO: 86009 - DNA, 22 bp, Artificial Sequence
  primer
cccaaacttgtgttacaaacgg

SEQ ID NO: 86010 - DNA, 38 bp, Artificial Sequence
  primer
gtaaaacgacggccagtatgtggcggtatttcatcagc

SEQ ID NO: 86011 - DNA, 21 bp, Artificial Sequence
  primer
acagtttcaccttccgtcctg

SEQ ID NO: 86012 - DNA, 21 bp, Artificial Sequence
  primer
ctagcaacccatggctttagg

SEQ ID NO: 86013 - DNA, 38 bp, Artificial Sequence
  primer
gtaaaacgacggccagtgctactgatctgagcgtgtcc

SEQ ID NO: 86014 - DNA, 21 bp, Artificial Sequence
  primer
ctgcctgcagttatggttcac

SEQ ID NO: 86015 - DNA, 39 bp, Artificial Sequence
  primer
gtaaaacgacggccagtaggcctgatctgaaagacagtg

SEQ ID NO: 86016 - DNA, 38 bp, Artificial Sequence
  primer
gtaaaacgacggccagtaggagagctttgagatggctg

SEQ ID NO: 86017 - DNA, 42 bp, Artificial Sequence
  primer
gtaaaacgacggccagtaagcagaattattatcctcccattg

SEQ ID NO: 86018 - DNA, 25 bp, Artificial Sequence
  primer
agagtaggactgttgtaaggagcag

SEQ ID NO: 86019 - DNA, 24 bp, Artificial Sequence
  primer
ggtgacaaattattctgctagtgg

SEQ ID NO: 86020 - DNA, 22 bp, Artificial Sequence
  primer
ccaacttggatgacaaagcaag

SEQ ID NO: 86021 - DNA, 20 bp, Artificial Sequence
  primer
caacacagcagccaagtgag

SEQ ID NO: 86022 - DNA, 38 bp, Artificial Sequence
  primer
gtaaaacgacggccagtaccttgcatgtctcatggagc

SEQ ID NO: 86023 - DNA, 38 bp, Artificial Sequence
  primer
gtaaaacgacggccagtgaattcaatttccaggtgtgg

SEQ ID NO: 86024 - DNA, 38 bp, Artificial Sequence
  primer
gtaaaacgacggccagtgcagaggacctgaagcatttg

SEQ ID NO: 86025 - DNA, 21 bp, Artificial Sequence
  primer
gaagcagattgctgggatttc

SEQ ID NO: 86026 - DNA, 21 bp, Artificial Sequence
  primer
tgtttcagtgacaaagccagc

SEQ ID NO: 86027 - DNA, 26 bp, Artificial Sequence
  primer
tgacaagagggaagactacaacatag

SEQ ID NO: 86028 - DNA, 38 bp, Artificial Sequence
  primer
gtaaaacgacggccagtacttgaggccaagatttggag

SEQ ID NO: 86029 - DNA, 40 bp, Artificial Sequence
  primer
gtaaaacgacggccagttgctcatctgtggaaatgtagtg

SEQ ID NO: 86030 - DNA, 39 bp, Artificial Sequence
  primer
gtaaaacgacggccagttgtttccaactctctcctctgg

SEQ ID NO: 86031 - DNA, 39 bp, Artificial Sequence
  primer
gtaaaacgacggccagtttaatgcccaaaggatcaaatc

SEQ ID NO: 86032 - DNA, 41 bp, Artificial Sequence
  primer
gtaaaacgacggccagtggatttctaatgtgtggaatgctc

SEQ ID NO: 86033 - DNA, 38 bp, Artificial Sequence
  primer
gtaaaacgacggccagtgaccttgatgccagggaatac

SEQ ID NO: 86034 - DNA, 39 bp, Artificial Sequence
  primer
gtaaaacgacggccagtggtactgctatggcatgctttg

SEQ ID NO: 86035 - DNA, 21 bp, Artificial Sequence
  primer
tttgtaacaggcaaatggaaa

SEQ ID NO: 86036 - DNA, 23 bp, Artificial Sequence
  primer
cagtgacaagacatgttgtgagg

SEQ ID NO: 86037 - DNA, 40 bp, Artificial Sequence
  primer
gtaaaacgacggccagtcatgcattcaatttgtttctcaa

SEQ ID NO: 86038 - DNA, 22 bp, Artificial Sequence
  primer
tggctccatggttacaacatac

SEQ ID NO: 86039 - DNA, 22 bp, Artificial Sequence
  primer
cctctcctgccactgtaatttg

SEQ ID NO: 86040 - DNA, 40 bp, Artificial Sequence
  primer
gtaaaacgacggccagttgattacatggattggacttgaa

SEQ ID NO: 86041 - DNA, 39 bp, Artificial Sequence
  primer
gtaaaacgacggccagttgaacaaggaagacagggtctc

SEQ ID NO: 86042 - DNA, 38 bp, Artificial Sequence
  primer
gtaaaacgacggccagtaataacgaggagctgcgagac

SEQ ID NO: 86043 - DNA, 38 bp, Artificial Sequence
  primer
gtaaaacgacggccagtttaagccgatctgtgtcatgg

SEQ ID NO: 86044 - DNA, 21 bp, Artificial Sequence
  primer
cctgacctacttcccacttgc

SEQ ID NO: 86045 - DNA, 21 bp, Artificial Sequence
  primer
ctgagtaaatgggaggcaagg

SEQ ID NO: 86046 - DNA, 21 bp, Artificial Sequence
  primer
tgagctctaggcagaagggag

SEQ ID NO: 86047 - DNA, 21 bp, Artificial Sequence
  primer
cctacccacaacctcaaccag

SEQ ID NO: 86048 - DNA, 21 bp, Artificial Sequence
  primer
ttggcagactgttctctccag

SEQ ID NO: 86049 - DNA, 19 bp, Artificial Sequence
  primer
agtgcctccactcactccc

SEQ ID NO: 86050 - DNA, 38 bp, Artificial Sequence
  primer
gtaaaacgacggccagtagctaaccaaagcaaaggagg

SEQ ID NO: 86051 - DNA, 20 bp, Artificial Sequence
  primer
gcagtgagccaagactacgc

SEQ ID NO: 86052 - DNA, 18 bp, Artificial Sequence
  primer
atgcgccatcacatctgg

SEQ ID NO: 86053 - DNA, 21 bp, Artificial Sequence
  primer
caatggagaggttgagtgtgg

SEQ ID NO: 86054 - DNA, 37 bp, Artificial Sequence
  primer
gtaaaacgacggccagtttatggtgcaccctgacctc

SEQ ID NO: 86055 - DNA, 38 bp, Artificial Sequence
  primer
gtaaaacgacggccagtgaccctccagttgattgaatg

SEQ ID NO: 86056 - DNA, 22 bp, Artificial Sequence
  primer
agttcctgctcagttccaaatc

SEQ ID NO: 86057 - DNA, 21 bp, Artificial Sequence
  primer
tttccaattatccacccattt

SEQ ID NO: 86058 - DNA, 24 bp, Artificial Sequence
  primer
tgaagcaacattatgaaagcagag

SEQ ID NO: 86059 - DNA, 39 bp, Artificial Sequence
  primer
gtaaaacgacggccagtgcagatgttgccaggatcttac

SEQ ID NO: 86060 - DNA, 39 bp, Artificial Sequence
  primer
gtaaaacgacggccagtaagagatcatgagcactagcgg

SEQ ID NO: 86061 - DNA, 21 bp, Artificial Sequence
  primer
cactgtatcagctggagtccc

SEQ ID NO: 86062 - DNA, 20 bp, Artificial Sequence
  primer
ggctcactgtcatcccacac

SEQ ID NO: 86063 - DNA, 18 bp, Artificial Sequence
  primer
cacctgagtcacctgcgg

SEQ ID NO: 86064 - DNA, 35 bp, Artificial Sequence
  primer
gtaaaacgacggccagtctcctcctccctaggccc

SEQ ID NO: 86065 - DNA, 38 bp, Artificial Sequence
  primer
gtaaaacgacggccagtaacgtgtaacaggaagggctc

SEQ ID NO: 86066 - DNA, 21 bp, Artificial Sequence
  primer
gctaggcagaggtccttgaac

SEQ ID NO: 86067 - DNA, 20 bp, Artificial Sequence
  primer
ggttccctgggagacacagt

SEQ ID NO: 86068 - DNA, 38 bp, Artificial Sequence
  primer
gtaaaacgacggccagtatgttgagaggtatggcctgc

SEQ ID NO: 86069 - DNA, 38 bp, Artificial Sequence
  primer
gtaaaacgacggccagttggttcctctttaagcttcgc

SEQ ID NO: 86070 - DNA, 38 bp, Artificial Sequence
  primer
gtaaaacgacggccagtcaggaaaggaaccaacacctc

SEQ ID NO: 86071 - DNA, 21 bp, Artificial Sequence
  primer
tgcagagctgagagctgtttc

SEQ ID NO: 86072 - DNA, 21 bp, Artificial Sequence
  primer
tccttggaggagggtgttatc

SEQ ID NO: 86073 - DNA, 21 bp, Artificial Sequence
  primer
ttctgtgaaagaggcacgatg

SEQ ID NO: 86074 - DNA, 35 bp, Artificial Sequence
  primer
gtaaaacgacggccagtagggcctctgtgaggtcg

SEQ ID NO: 86075 - DNA, 39 bp, Artificial Sequence
  primer
gtaaaacgacggccagtgaaccagacaatatgggaaagg

SEQ ID NO: 86076 - DNA, 21 bp, Artificial Sequence
  primer
gcatccaggataatctacggc

SEQ ID NO: 86077 - DNA, 37 bp, Artificial Sequence
  primer
gtaaaacgacggccagtcccagaaggtgcaaagaaag

SEQ ID NO: 86078 - DNA, 21 bp, Artificial Sequence
  primer
gcagccaggctcacataagac

SEQ ID NO: 86079 - DNA, 37 bp, Artificial Sequence
  primer
gtaaaacgacggccagtagctcctgactgctctgctg

SEQ ID NO: 86080 - DNA, 37 bp, Artificial Sequence
  primer
gtaaaacgacggccagtctacctgttgacgctgctcc

SEQ ID NO: 86081 - DNA, 38 bp, Artificial Sequence
  primer
gtaaaacgacggccagtcttctataaacggcagagccc

SEQ ID NO: 86082 - DNA, 38 bp, Artificial Sequence
  primer
gtaaaacgacggccagtctgtggatgtactgtggcagg

SEQ ID NO: 86083 - DNA, 38 bp, Artificial Sequence
  primer
gtaaaacgacggccagttaggctgaagtgagagcctgg

SEQ ID NO: 86084 - DNA, 38 bp, Artificial Sequence
  primer
gtaaaacgacggccagtcagatcagaaccaacagccag

SEQ ID NO: 86085 - DNA, 21 bp, Artificial Sequence
  primer
ctcatcactcacagcaccacc

SEQ ID NO: 86086 - DNA, 21 bp, Artificial Sequence
  primer
gttgcgtacgtccctatccac

SEQ ID NO: 86087 - DNA, 21 bp, Artificial Sequence
  primer
gaagcgtaggaacacagaggg

SEQ ID NO: 86088 - DNA, 21 bp, Artificial Sequence
  primer
gccatagcgtctctaccatcc

SEQ ID NO: 86089 - DNA, 21 bp, Artificial Sequence
  primer
tggagttgaagtagtcgctgc

SEQ ID NO: 86090 - DNA, 17 bp, Artificial Sequence
  primer
atggaggccagctcctg

SEQ ID NO: 86091 - DNA, 38 bp, Artificial Sequence
  primer
gtaaaacgacggccagtagacacacagcttctgcatgg

SEQ ID NO: 86092 - DNA, 38 bp, Artificial Sequence
  primer
gtaaaacgacggccagtcgtctctttgacccactgctc

SEQ ID NO: 86093 - DNA, 39 bp, Artificial Sequence
  primer
gtaaaacgacggccagtcaaggctaggttaaggaaaccg

SEQ ID NO: 86094 - DNA, 39 bp, Artificial Sequence
  primer
gtaaaacgacggccagtgaagcaggatagttgtcaaggc

SEQ ID NO: 86095 - DNA, 20 bp, Artificial Sequence
  primer
aaagtgaggcacgtggactg

SEQ ID NO: 86096 - DNA, 21 bp, Artificial Sequence
  primer
agtgttctcccagctgtagcc

SEQ ID NO: 86097 - DNA, 22 bp, Artificial Sequence
  primer
gcccagggttagttattcaagc

SEQ ID NO: 86098 - DNA, 18 bp, Artificial Sequence
  primer
cttccctgggtccactgc

SEQ ID NO: 86099 - DNA, 21 bp, Artificial Sequence
  primer
caatatccacttccctgggtg

SEQ ID NO: 86100 - DNA, 21 bp, Artificial Sequence
  primer
cattgcaagaatgaggctctg

SEQ ID NO: 86101 - DNA, 38 bp, Artificial Sequence
  primer
gtaaaacgacggccagtcagaagatgggttctggaagg

SEQ ID NO: 86102 - DNA, 21 bp, Artificial Sequence
  primer
acccaccttggcctctcatag

SEQ ID NO: 86103 - DNA, 38 bp, Artificial Sequence
  primer
gtaaaacgacggccagtcggtgagagactccctactgc

SEQ ID NO: 86104 - DNA, 40 bp, Artificial Sequence
  primer
gtaaaacgacggccagttccagggtttctacatgtcattg

SEQ ID NO: 86105 - DNA, 20 bp, Artificial Sequence
  primer
ttcacctttcccatctgctg

SEQ ID NO: 86106 - DNA, 38 bp, Artificial Sequence
  primer
gtaaaacgacggccagtacaggagatcttggctccttg

SEQ ID NO: 86107 - DNA, 21 bp, Artificial Sequence
  primer
aatcccaacaatccactgagg

SEQ ID NO: 86108 - DNA, 21 bp, Artificial Sequence
  primer
tgtccttgtctggctggttag

SEQ ID NO: 86109 - DNA, 18 bp, Artificial Sequence
  primer
ttacaggcacctgccacc

SEQ ID NO: 86110 - DNA, 37 bp, Artificial Sequence
  primer
gtaaaacgacggccagtctgccgataggaatgtggag

SEQ ID NO: 86111 - DNA, 39 bp, Artificial Sequence
  primer
gtaaaacgacggccagtaagtcagcaagtccagcttcag

SEQ ID NO: 86112 - DNA, 20 bp, Artificial Sequence
  primer
gtcagggtggaaagagcagc

SEQ ID NO: 86113 - DNA, 38 bp, Artificial Sequence
  primer
gtaaaacgacggccagttacctctgtgacttccctccc

SEQ ID NO: 86114 - DNA, 21 bp, Artificial Sequence
  primer
ttgtgacgaatgaagtccacc

SEQ ID NO: 86115 - DNA, 38 bp, Artificial Sequence
  primer
gtaaaacgacggccagtcaggctcagagttgatgaccc

SEQ ID NO: 86116 - DNA, 21 bp, Artificial Sequence
  primer
tgagaacagtgagtgttgggc

SEQ ID NO: 86117 - DNA, 38 bp, Artificial Sequence
  primer
gtaaaacgacggccagttcttcagacctctgctctggg

SEQ ID NO: 86118 - DNA, 21 bp, Artificial Sequence
  primer
tgggcatcaccacttagagag

SEQ ID NO: 86119 - DNA, 38 bp, Artificial Sequence
  primer
gtaaaacgacggccagtcagatgcccacctgtactgag

SEQ ID NO: 86120 - DNA, 38 bp, Artificial Sequence
  primer
gtaaaacgacggccagtgacagggaagaacaggctgag

SEQ ID NO: 86121 - DNA, 38 bp, Artificial Sequence
  primer
gtaaaacgacggccagtcacacaagctcattgtcagcc

SEQ ID NO: 86122 - DNA, 21 bp, Artificial Sequence
  primer
accagttctcagagtcccagg

SEQ ID NO: 86123 - DNA, 21 bp, Artificial Sequence
  primer
cgtctgccttgagatttcctc

SEQ ID NO: 86124 - DNA, 37 bp, Artificial Sequence
  primer
gtaaaacgacggccagtgctgcagaaacaccaaggag

SEQ ID NO: 86125 - DNA, 21 bp, Artificial Sequence
  primer
gcttatctcagacaggccagg

SEQ ID NO: 86126 - DNA, 21 bp, Artificial Sequence
  primer
accatggtaagtgatccaggc

SEQ ID NO: 86127 - DNA, 38 bp, Artificial Sequence
  primer
gtaaaacgacggccagtgtacctgagacccagtttgcc

SEQ ID NO: 86128 - DNA, 21 bp, Artificial Sequence
  primer
accctgactcagcatcacctc

SEQ ID NO: 86129 - DNA, 21 bp, Artificial Sequence
  primer
caccaggacatggatctgaag

SEQ ID NO: 86130 - DNA, 21 bp, Artificial Sequence
  primer
aatgcacgaagtgcaagtgtc

SEQ ID NO: 86131 - DNA, 37 bp, Artificial Sequence
  primer
gtaaaacgacggccagtcgtctaagctgctccgagtg

SEQ ID NO: 86132 - DNA, 24 bp, Artificial Sequence
  primer
acaaccacacgaaatagactgttc

SEQ ID NO: 86133 - DNA, 25 bp, Artificial Sequence
  primer
catacttaattcacaatagccagcc

SEQ ID NO: 86134 - DNA, 37 bp, Artificial Sequence
  primer
gtaaaacgacggccagtaggaaatccacccacctcag

SEQ ID NO: 86135 - DNA, 22 bp, Artificial Sequence
  primer
aagatggatctcaatgccaaag

SEQ ID NO: 86136 - DNA, 39 bp, Artificial Sequence
  primer
gtaaaacgacggccagtgcacacttcttgtcagttgctg

SEQ ID NO: 86137 - DNA, 35 bp, Artificial Sequence
  primer
gtaaaacgacggccagtggtgatagcccgcctctg

SEQ ID NO: 86138 - DNA, 38 bp, Artificial Sequence
  primer
gtaaaacgacggccagtgagagctttcctccttcatcg

SEQ ID NO: 86139 - DNA, 22 bp, Artificial Sequence
  primer
tcatcagctcatctttctcagc

SEQ ID NO: 86140 - DNA, 21 bp, Artificial Sequence
  primer
catctgccgctgtagagagag

SEQ ID NO: 86141 - DNA, 35 bp, Artificial Sequence
  primer
gtaaaacgacggccagtctgagaccctgcctctgc

SEQ ID NO: 86142 - DNA, 21 bp, Artificial Sequence
  primer
cctgttcgtactccaggatgg

SEQ ID NO: 86143 - DNA, 18 bp, Artificial Sequence
  primer
cttaggcgaaccctgggc

SEQ ID NO: 86144 - DNA, 21 bp, Artificial Sequence
  primer
cctcctgacagtgaatgttgg

SEQ ID NO: 86145 - DNA, 21 bp, Artificial Sequence
  primer
aacagaagcttgaaacggacc

SEQ ID NO: 86146 - DNA, 38 bp, Artificial Sequence
  primer
gtaaaacgacggccagtagcctcttgggattgattcac

SEQ ID NO: 86147 - DNA, 21 bp, Artificial Sequence
  primer
gaaggatgacgagatgggttc

SEQ ID NO: 86148 - DNA, 37 bp, Artificial Sequence
  primer
gtaaaacgacggccagtctcctggcattagccctcag

SEQ ID NO: 86149 - DNA, 21 bp, Artificial Sequence
  primer
atgctgggtctatgggagttg

SEQ ID NO: 86150 - DNA, 37 bp, Artificial Sequence
  primer
gtaaaacgacggccagtcttcctgactccagcacctc

SEQ ID NO: 86151 - DNA, 20 bp, Artificial Sequence
  primer
cagattgtccgaacgctgag

SEQ ID NO: 86152 - DNA, 22 bp, Artificial Sequence
  primer
gcaagtaccagagacaggcaag

SEQ ID NO: 86153 - DNA, 21 bp, Artificial Sequence
  primer
agggaggcagaaccttctcag

SEQ ID NO: 86154 - DNA, 21 bp, Artificial Sequence
  primer
cctcatcctgactgtcactgg

SEQ ID NO: 86155 - DNA, 21 bp, Artificial Sequence
  primer
ggcctgtcagaaggatgtagg

SEQ ID NO: 86156 - DNA, 21 bp, Artificial Sequence
  primer
gagtcagtgcagagacccagg

SEQ ID NO: 86157 - DNA, 21 bp, Artificial Sequence
  primer
gcttaggttcacgacacaccc

SEQ ID NO: 86158 - DNA, 20 bp, Artificial Sequence
  primer
acagtatgtgttcccgacgc

SEQ ID NO: 86159 - DNA, 21 bp, Artificial Sequence
  primer
ttcactcacacacacccttgg

SEQ ID NO: 86160 - DNA, 20 bp, Artificial Sequence
  primer
aagacaggcagccctcactc

SEQ ID NO: 86161 - DNA, 24 bp, Artificial Sequence
  primer
tgtgaagaaactatgggaacaacc

SEQ ID NO: 86162 - DNA, 38 bp, Artificial Sequence
  primer
gtaaaacgacggccagtaaggacctcaagaagggaagg

SEQ ID NO: 86163 - DNA, 38 bp, Artificial Sequence
  primer
gtaaaacgacggccagtgttctcgaaatgcttcatccc

SEQ ID NO: 86164 - DNA, 21 bp, Artificial Sequence
  primer
cagtgaagacatcggtccttg

SEQ ID NO: 86165 - DNA, 38 bp, Artificial Sequence
  primer
gtaaaacgacggccagttgcctgtacgggaaacaaatc

SEQ ID NO: 86166 - DNA, 21 bp, Artificial Sequence
  primer
acagatgaatcacaccctccc

SEQ ID NO: 86167 - DNA, 38 bp, Artificial Sequence
  primer
gtaaaacgacggccagtgactgtgcgtgtggaaacaag

SEQ ID NO: 86168 - DNA, 22 bp, Artificial Sequence
  primer
cgccattccacttcagtaagac

SEQ ID NO: 86169 - DNA, 22 bp, Artificial Sequence
  primer
tgaccaggatgggtttattacc

SEQ ID NO: 86170 - DNA, 21 bp, Artificial Sequence
  primer
aagggcgctagatcttcttcc

SEQ ID NO: 86171 - DNA, 38 bp, Artificial Sequence
  primer
gtaaaacgacggccagtttgatgaccttcccagtcaag

SEQ ID NO: 86172 - DNA, 19 bp, Artificial Sequence
  primer
gggatccctaaggtcaggc

SEQ ID NO: 86173 - DNA, 38 bp, Artificial Sequence
  primer
gtaaaacgacggccagttgcaccttgaccagctttatg

SEQ ID NO: 86174 - DNA, 38 bp, Artificial Sequence
  primer
gtaaaacgacggccagtgtagcccaaaccagctgactc

SEQ ID NO: 86175 - DNA, 38 bp, Artificial Sequence
  primer
gtaaaacgacggccagtgctgacaaagctgcactcatc

SEQ ID NO: 86176 - DNA, 21 bp, Artificial Sequence
  primer
atcctgtgcccgtgttatttc

SEQ ID NO: 86177 - DNA, 19 bp, Artificial Sequence
  primer
atctgagtaggcagccggg

SEQ ID NO: 86178 - DNA, 20 bp, Artificial Sequence
  primer
gtactgctgcaggtccttcc

SEQ ID NO: 86179 - DNA, 21 bp, Artificial Sequence
  primer
cgcttacacaccgtttcgtag

SEQ ID NO: 86180 - DNA, 21 bp, Artificial Sequence
  primer
ggactcagcatcttcctgctc

SEQ ID NO: 86181 - DNA, 38 bp, Artificial Sequence
  primer
gtaaaacgacggccagtccagatagtgcttctccagcc

SEQ ID NO: 86182 - DNA, 38 bp, Artificial Sequence
  primer
gtaaaacgacggccagtagttcagcaggatcgatttgg

SEQ ID NO: 86183 - DNA, 38 bp, Artificial Sequence
  primer
gtaaaacgacggccagttaggactcttgggtgacaggg

SEQ ID NO: 86184 - DNA, 36 bp, Artificial Sequence
  primer
gtaaaacgacggccagtcagcgtctcagcatctccc

SEQ ID NO: 86185 - DNA, 21 bp, Artificial Sequence
  primer
atggagatgagagggatgctg

SEQ ID NO: 86186 - DNA, 22 bp, Artificial Sequence
  primer
tcagtttccctaatcccacttg

SEQ ID NO: 86187 - DNA, 38 bp, Artificial Sequence
  primer
gtaaaacgacggccagtacggattgagaccatctaggc

SEQ ID NO: 86188 - DNA, 21 bp, Artificial Sequence
  primer
tgctctatgatgagccaccag

SEQ ID NO: 86189 - DNA, 21 bp, Artificial Sequence
  primer
cgactcctctagctcccaatg

SEQ ID NO: 86190 - DNA, 38 bp, Artificial Sequence
  primer
gtaaaacgacggccagtacacacagtgaaatgatgccc

SEQ ID NO: 86191 - DNA, 21 bp, Artificial Sequence
  primer
ggaaagaaacagctcagtccc

SEQ ID NO: 86192 - DNA, 37 bp, Artificial Sequence
  primer
gtaaaacgacggccagtgaagttgagggctgcgtttc

SEQ ID NO: 86193 - DNA, 21 bp, Artificial Sequence
  primer
cgtaaattggacgcttactgc

SEQ ID NO: 86194 - DNA, 38 bp, Artificial Sequence
  primer
gtaaaacgacggccagtgaggaaacgtctccgtgtctg

SEQ ID NO: 86195 - DNA, 38 bp, Artificial Sequence
  primer
gtaaaacgacggccagtaagctctccattcccagagtg

SEQ ID NO: 86196 - DNA, 20 bp, Artificial Sequence
  primer
cttctcatggacatgcctgg

SEQ ID NO: 86197 - DNA, 22 bp, Artificial Sequence
  primer
tgatgaaatcaccttcctttgc

SEQ ID NO: 86198 - DNA, 38 bp, Artificial Sequence
  primer
gtaaaacgacggccagtagcagagaaactggccagaag

SEQ ID NO: 86199 - DNA, 26 bp, Artificial Sequence
  primer
gggagagaataatcttgagataccag

SEQ ID NO: 86200 - DNA, 40 bp, Artificial Sequence
  primer
gtaaaacgacggccagttgtgttcacagtgtccttaaacc

SEQ ID NO: 86201 - DNA, 38 bp, Artificial Sequence
  primer
gtaaaacgacggccagtcttcttgctagatgcgtgtgc

SEQ ID NO: 86202 - DNA, 37 bp, Artificial Sequence
  primer
gtaaaacgacggccagtctgcacggaacagagcattc

SEQ ID NO: 86203 - DNA, 38 bp, Artificial Sequence
  primer
gtaaaacgacggccagtttcacagaaacacatccaggg

SEQ ID NO: 86204 - DNA, 20 bp, Artificial Sequence
  primer
ggtagggtgtgagggtaggg

SEQ ID NO: 86205 - DNA, 21 bp, Artificial Sequence
  primer
cactggttcacgcacactagc

SEQ ID NO: 86206 - DNA, 39 bp, Artificial Sequence
  primer
gtaaaacgacggccagttgtgttcctccacataacaagg

SEQ ID NO: 86207 - DNA, 43 bp, Artificial Sequence
  primer
gtaaaacgacggccagtgaggagataaagatgctcaagagttc

SEQ ID NO: 86208 - DNA, 21 bp, Artificial Sequence
  primer
tccttcaagccattcgtcttc

SEQ ID NO: 86209 - DNA, 38 bp, Artificial Sequence
  primer
gtaaaacgacggccagtccctgggctagaaacccttag

SEQ ID NO: 86210 - DNA, 21 bp, Artificial Sequence
  primer
ttcaatatgacacaggcccac

SEQ ID NO: 86211 - DNA, 38 bp, Artificial Sequence
  primer
gtaaaacgacggccagtcataccatcatacgccacagg

SEQ ID NO: 86212 - DNA, 21 bp, Artificial Sequence
  primer
ctttccagcaacagcacagac

SEQ ID NO: 86213 - DNA, 37 bp, Artificial Sequence
  primer
gtaaaacgacggccagtgcaaggagcattcagcagac

SEQ ID NO: 86214 - DNA, 41 bp, Artificial Sequence
  primer
gtaaaacgacggccagtaaaccaaagcactggaatagtctg

SEQ ID NO: 86215 - DNA, 21 bp, Artificial Sequence
  primer
gtgctgtttgaaggagtgagc

SEQ ID NO: 86216 - DNA, 21 bp, Artificial Sequence
  primer
aacacagtgctgggtgttgac

SEQ ID NO: 86217 - DNA, 38 bp, Artificial Sequence
  primer
gtaaaacgacggccagttgagtgtctgttagggaaggg

SEQ ID NO: 86218 - DNA, 22 bp, Artificial Sequence
  primer
tgagggaggagatacagaccag

SEQ ID NO: 86219 - DNA, 37 bp, Artificial Sequence
  primer
gtaaaacgacggccagtagtaggcctaacacggaggg

SEQ ID NO: 86220 - DNA, 38 bp, Artificial Sequence
  primer
gtaaaacgacggccagtccctgaatgctcctatccctc

SEQ ID NO: 86221 - DNA, 38 bp, Artificial Sequence
  primer
gtaaaacgacggccagttccgctttgtaccttgaactg

SEQ ID NO: 86222 - DNA, 20 bp, Artificial Sequence
  primer
caggaaatgggattctgtgg

SEQ ID NO: 86223 - DNA, 38 bp, Artificial Sequence
  primer
gtaaaacgacggccagtgcaccagtccatgatcaagtc

SEQ ID NO: 86224 - DNA, 19 bp, Artificial Sequence
  primer
gagaggaggctgagggtgg

SEQ ID NO: 86225 - DNA, 36 bp, Artificial Sequence
  primer
gtaaaacgacggccagtagctgagtgaggccacagg

SEQ ID NO: 86226 - DNA, 38 bp, Artificial Sequence
  primer
gtaaaacgacggccagtaatcccagaagaggcttggag

SEQ ID NO: 86227 - DNA, 20 bp, Artificial Sequence
  primer
ccaagggaacttcaactggc

SEQ ID NO: 86228 - DNA, 38 bp, Artificial Sequence
  primer
gtaaaacgacggccagttaggtgaggacggtcttctgg

SEQ ID NO: 86229 - DNA, 22 bp, Artificial Sequence
  primer
ttaaagttcatcaccaccaggg

SEQ ID NO: 86230 - DNA, 38 bp, Artificial Sequence
  primer
gtaaaacgacggccagtttcacaaacaggttctcaggg

SEQ ID NO: 86231 - DNA, 21 bp, Artificial Sequence
  primer
gagagcatggttccttcatgg

SEQ ID NO: 86232 - DNA, 38 bp, Artificial Sequence
  primer
gtaaaacgacggccagtccctcagtctgacactgtccc

SEQ ID NO: 86233 - DNA, 38 bp, Artificial Sequence
  primer
gtaaaacgacggccagtctaggaggtcagagtgccagg

SEQ ID NO: 86234 - DNA, 22 bp, Artificial Sequence
  primer
tggtgatgatcttgtggaacac

SEQ ID NO: 86235 - DNA, 21 bp, Artificial Sequence
  primer
caagcttgcgttctttctgtg

SEQ ID NO: 86236 - DNA, 20 bp, Artificial Sequence
  primer
cagctatgagctccacaggg

SEQ ID NO: 86237 - DNA, 38 bp, Artificial Sequence
  primer
gtaaaacgacggccagtacataagccatgctctttgcc

SEQ ID NO: 86238 - DNA, 38 bp, Artificial Sequence
  primer
gtaaaacgacggccagtcaccggaaccagtaaacaagg

SEQ ID NO: 86239 - DNA, 38 bp, Artificial Sequence
  primer
gtaaaacgacggccagtttgccatcttcactgagcttc

SEQ ID NO: 86240 - DNA, 21 bp, Artificial Sequence
  primer
aagacccatgtttcccatcac

SEQ ID NO: 86241 - DNA, 22 bp, Artificial Sequence
  primer
ttgacatgaagtccaccatagg

SEQ ID NO: 86242 - DNA, 38 bp, Artificial Sequence
  primer
gtaaaacgacggccagtctctagggcatgacactcagg

SEQ ID NO: 86243 - DNA, 37 bp, Artificial Sequence
  primer
gtaaaacgacggccagtgagagaggtagggcagcgag

SEQ ID NO: 86244 - DNA, 38 bp, Artificial Sequence
  primer
gtaaaacgacggccagtgctaacagtctgcaaacgtcg

SEQ ID NO: 86245 - DNA, 38 bp, Artificial Sequence
  primer
gtaaaacgacggccagtagcgattccttcgtttgtctg

SEQ ID NO: 86246 - DNA, 38 bp, Artificial Sequence
  primer
gtaaaacgacggccagtgggagactctttgttcatggc

SEQ ID NO: 86247 - DNA, 38 bp, Artificial Sequence
  primer
gtaaaacgacggccagttctggagaacctgctgaattg

SEQ ID NO: 86248 - DNA, 21 bp, Artificial Sequence
  primer
atggtgctggtaggtagaggg

SEQ ID NO: 86249 - DNA, 38 bp, Artificial Sequence
  primer
gtaaaacgacggccagtccttcctcagccatagcaatc

SEQ ID NO: 86250 - DNA, 21 bp, Artificial Sequence
  primer
caactggtgtagggaaggctc

SEQ ID NO: 86251 - DNA, 38 bp, Artificial Sequence
  primer
gtaaaacgacggccagtatctgtccctgcactgaactg

SEQ ID NO: 86252 - DNA, 21 bp, Artificial Sequence
  primer
tacaacacccacatggcctac

SEQ ID NO: 86253 - DNA, 39 bp, Artificial Sequence
  primer
gtaaaacgacggccagttgagatgaaatgaagctccagg

SEQ ID NO: 86254 - DNA, 38 bp, Artificial Sequence
  primer
gtaaaacgacggccagtagagctagggcacaccaacac

SEQ ID NO: 86255 - DNA, 38 bp, Artificial Sequence
  primer
gtaaaacgacggccagttcacagctgtatgaaccaggg

SEQ ID NO: 86256 - DNA, 21 bp, Artificial Sequence
  primer
acaccctgtgccctcagttac

SEQ ID NO: 86257 - DNA, 38 bp, Artificial Sequence
  primer
gtaaaacgacggccagtagggtagggtgtgtgtgttcg

SEQ ID NO: 86258 - DNA, 22 bp, Artificial Sequence
  primer
actacagggagaagacaccgag

SEQ ID NO: 86259 - DNA, 21 bp, Artificial Sequence
  primer
ggcagaaagaaacagagcagg

SEQ ID NO: 86260 - DNA, 39 bp, Artificial Sequence
  primer
gtaaaacgacggccagttcccttaacacccttctcaatg

SEQ ID NO: 86261 - DNA, 38 bp, Artificial Sequence
  primer
gtaaaacgacggccagttggtcacattaacacagacgc

SEQ ID NO: 86262 - DNA, 21 bp, Artificial Sequence
  primer
ctaggcaccaaacctgctacc

SEQ ID NO: 86263 - DNA, 21 bp, Artificial Sequence
  primer
atcttacacacgcacagcagg

SEQ ID NO: 86264 - DNA, 20 bp, Artificial Sequence
  primer
agcccttccttcctggagac

SEQ ID NO: 86265 - DNA, 38 bp, Artificial Sequence
  primer
gtaaaacgacggccagtagagtcagtggagcccttctc

SEQ ID NO: 86266 - DNA, 21 bp, Artificial Sequence
  primer
tattgtctgggtggattggtg

SEQ ID NO: 86267 - DNA, 38 bp, Artificial Sequence
  primer
gtaaaacgacggccagtccctgggatttatggagtgac

SEQ ID NO: 86268 - DNA, 20 bp, Artificial Sequence
  primer
cacaatcattggttccaggg

SEQ ID NO: 86269 - DNA, 22 bp, Artificial Sequence
  primer
tcagtgaatgagatgggaactg

SEQ ID NO: 86270 - DNA, 38 bp, Artificial Sequence
  primer
gtaaaacgacggccagttgatgaccagagccttcaatg

SEQ ID NO: 86271 - DNA, 38 bp, Artificial Sequence
  primer
gtaaaacgacggccagtgctggaaagctctaatgctcc

SEQ ID NO: 86272 - DNA, 38 bp, Artificial Sequence
  primer
gtaaaacgacggccagtgttgactgagtcggtgactgc

SEQ ID NO: 86273 - DNA, 19 bp, Artificial Sequence
  primer
gaaaccagggaaggaaggc

SEQ ID NO: 86274 - DNA, 38 bp, Artificial Sequence
  primer
gtaaaacgacggccagtcagtgctatcgtgttgtgcag

SEQ ID NO: 86275 - DNA, 37 bp, Artificial Sequence
  primer
gtaaaacgacggccagttcacagagtgtggcgatctg

SEQ ID NO: 86276 - DNA, 20 bp, Artificial Sequence
  primer
ctgacccagcaggtgttctg

SEQ ID NO: 86277 - DNA, 22 bp, Artificial Sequence
  primer
tgtcagaactagaaagcgggag

SEQ ID NO: 86278 - DNA, 21 bp, Artificial Sequence
  primer
agtggaatgacaggatgatgc

SEQ ID NO: 86279 - DNA, 21 bp, Artificial Sequence
  primer
ccttctttgtacccaaagggc

SEQ ID NO: 86280 - DNA, 23 bp, Artificial Sequence
  primer
ttcaggctctaggtatttccagc

SEQ ID NO: 86281 - DNA, 21 bp, Artificial Sequence
  primer
gagatatagcgctgccaggac

SEQ ID NO: 86282 - DNA, 21 bp, Artificial Sequence
  primer
tcagaagccagtttagggcag

SEQ ID NO: 86283 - DNA, 21 bp, Artificial Sequence
  primer
ctctgactcccattctccacc

SEQ ID NO: 86284 - DNA, 21 bp, Artificial Sequence
  primer
agggctcttcttaatccagcc

SEQ ID NO: 86285 - DNA, 38 bp, Artificial Sequence
  primer
gtaaaacgacggccagtaggaagagcagggtgaatgac

SEQ ID NO: 86286 - DNA, 19 bp, Artificial Sequence
  primer
acccagacagaggcaggtc

SEQ ID NO: 86287 - DNA, 21 bp, Artificial Sequence
  primer
gcatgcacacagacacacact

SEQ ID NO: 86288 - DNA, 20 bp, Artificial Sequence
  primer
ctctgcctcctgaccctctc

SEQ ID NO: 86289 - DNA, 22 bp, Artificial Sequence
  primer
gcttactctagtccctgagccg

SEQ ID NO: 86290 - DNA, 37 bp, Artificial Sequence
  primer
gtaaaacgacggccagtctacttgggctcctccgttc

SEQ ID NO: 86291 - DNA, 38 bp, Artificial Sequence
  primer
gtaaaacgacggccagttgggtgtgttcatgattggtg

SEQ ID NO: 86292 - DNA, 38 bp, Artificial Sequence
  primer
gtaaaacgacggccagttcatcaggtgagaggtggaag

SEQ ID NO: 86293 - DNA, 38 bp, Artificial Sequence
  primer
gtaaaacgacggccagttatctgcttccctgcttgtcc

SEQ ID NO: 86294 - DNA, 20 bp, Artificial Sequence
  primer
cagtcaccaagtcctggtcc

SEQ ID NO: 86295 - DNA, 38 bp, Artificial Sequence
  primer
gtaaaacgacggccagttcagaaaggctgggaagtcag

SEQ ID NO: 86296 - DNA, 21 bp, Artificial Sequence
  primer
tgagctagaggcaggagatgg

SEQ ID NO: 86297 - DNA, 38 bp, Artificial Sequence
  primer
gtaaaacgacggccagtgctgttggtgtgagtgtttgg

SEQ ID NO: 86298 - DNA, 18 bp, Artificial Sequence
  primer
ctgctgggtgttgatggg

SEQ ID NO: 86299 - DNA, 20 bp, Artificial Sequence
  primer
agacacaggctgggaaggtc

SEQ ID NO: 86300 - DNA, 21 bp, Artificial Sequence
  primer
aggacacactgaaactgcctg

SEQ ID NO: 86301 - DNA, 38 bp, Artificial Sequence
  primer
gtaaaacgacggccagtaagggacaaggtctctggctc

SEQ ID NO: 86302 - DNA, 38 bp, Artificial Sequence
  primer
gtaaaacgacggccagtatgacaaccagctgtgacgag

SEQ ID NO: 86303 - DNA, 37 bp, Artificial Sequence
  primer
gtaaaacgacggccagttttgggtttgatgagccaag

SEQ ID NO: 86304 - DNA, 21 bp, Artificial Sequence
  primer
gtctgctcgtgaagaaacagg

SEQ ID NO: 86305 - DNA, 21 bp, Artificial Sequence
  primer
taggacatgagggacatgagg

SEQ ID NO: 86306 - DNA, 38 bp, Artificial Sequence
  primer
gtaaaacgacggccagttgtcttagccacttcccaacc

SEQ ID NO: 86307 - DNA, 38 bp, Artificial Sequence
  primer
gtaaaacgacggccagtcgatgcataaggcatttcttg

SEQ ID NO: 86308 - DNA, 38 bp, Artificial Sequence
  primer
gtaaaacgacggccagtcgactgcggtcagatagacat

SEQ ID NO: 86309 - DNA, 21 bp, Artificial Sequence
  primer
gaagcagccatctccagtttc

SEQ ID NO: 86310 - DNA, 21 bp, Artificial Sequence
  primer
gttaaccaaatccaattgcca

SEQ ID NO: 86311 - DNA, 36 bp, Artificial Sequence
  primer
gtaaaacgacggccagtggttgaagggatcattggc

SEQ ID NO: 86312 - DNA, 21 bp, Artificial Sequence
  primer
aaccactgactctgcagtccc

SEQ ID NO: 86313 - DNA, 37 bp, Artificial Sequence
  primer
gtaaaacgacggccagtggagggagatcctaggctgg

SEQ ID NO: 86314 - DNA, 20 bp, Artificial Sequence
  primer
ctcctctcagagacctgccc

SEQ ID NO: 86315 - DNA, 38 bp, Artificial Sequence
  primer
gtaaaacgacggccagtgaagaggtgcttggaggtctg

SEQ ID NO: 86316 - DNA, 38 bp, Artificial Sequence
  primer
gtaaaacgacggccagtcatcatgtgttccaaactggg

SEQ ID NO: 86317 - DNA, 38 bp, Artificial Sequence
  primer
gtaaaacgacggccagtggcctcactcactcttccttg

SEQ ID NO: 86318 - DNA, 39 bp, Artificial Sequence
  primer
gtaaaacgacggccagtccaacagcctttatgaggtcac

SEQ ID NO: 86319 - DNA, 37 bp, Artificial Sequence
  primer
gtaaaacgacggccagtacagacgaggacacagcagc

SEQ ID NO: 86320 - DNA, 21 bp, Artificial Sequence
  primer
tctgttcttggtccagtctcg

SEQ ID NO: 86321 - DNA, 21 bp, Artificial Sequence
  primer
gtcgtaattctttggatgggc

SEQ ID NO: 86322 - DNA, 38 bp, Artificial Sequence
  primer
gtaaaacgacggccagttactaagacctttgcggaggg

SEQ ID NO: 86323 - DNA, 38 bp, Artificial Sequence
  primer
gtaaaacgacggccagtaacttcaggattcagcaaggg

SEQ ID NO: 86324 - DNA, 38 bp, Artificial Sequence
  primer
gtaaaacgacggccagtcccaacttggaaactcctttg

SEQ ID NO: 86325 - DNA, 21 bp, Artificial Sequence
  primer
tgaagaggtggtctttcctgc

SEQ ID NO: 86326 - DNA, 38 bp, Artificial Sequence
  primer
gtaaaacgacggccagttgagcaagactgtgaagcagg

SEQ ID NO: 86327 - DNA, 21 bp, Artificial Sequence
  primer
agaagatctctccgacctggg

SEQ ID NO: 86328 - DNA, 38 bp, Artificial Sequence
  primer
gtaaaacgacggccagtgagagggtccgtgtctgtgac

SEQ ID NO: 86329 - DNA, 38 bp, Artificial Sequence
  primer
gtaaaacgacggccagtagttctgaggacgatggaacc

SEQ ID NO: 86330 - DNA, 39 bp, Artificial Sequence
  primer
gtaaaacgacggccagtggacaggaagagagactgaccc

SEQ ID NO: 86331 - DNA, 21 bp, Artificial Sequence
  primer
acgtactgatccaatgccctg

SEQ ID NO: 86332 - DNA, 22 bp, Artificial Sequence
  primer
tccatcagatgaaggtcaaagg

SEQ ID NO: 86333 - DNA, 21 bp, Artificial Sequence
  primer
aattcaggaaggcgaaaggag

SEQ ID NO: 86334 - DNA, 21 bp, Artificial Sequence
  primer
gacagcgggctctaggttatg

SEQ ID NO: 86335 - DNA, 37 bp, Artificial Sequence
  primer
gtaaaacgacggccagtagcggacagagtcaggtgtg

SEQ ID NO: 86336 - DNA, 20 bp, Artificial Sequence
  primer
cctgtggacattcaagggac

SEQ ID NO: 86337 - DNA, 21 bp, Artificial Sequence
  primer
ttggtggtgtctgagtgaacc

SEQ ID NO: 86338 - DNA, 38 bp, Artificial Sequence
  primer
gtaaaacgacggccagtcggtttgttgacaggtctgag

SEQ ID NO: 86339 - DNA, 21 bp, Artificial Sequence
  primer
aagatgaacagctcctgtccc

SEQ ID NO: 86340 - DNA, 21 bp, Artificial Sequence
  primer
atctcagaattggagcaaggg

SEQ ID NO: 86341 - DNA, 37 bp, Artificial Sequence
  primer
gtaaaacgacggccagtcttcgagtccatctccctcc

SEQ ID NO: 86342 - DNA, 38 bp, Artificial Sequence
  primer
gtaaaacgacggccagtcagctcacgacacccatgtag

SEQ ID NO: 86343 - DNA, 37 bp, Artificial Sequence
  primer
gtaaaacgacggccagttctgtggaccttgttcctgc

SEQ ID NO: 86344 - DNA, 21 bp, Artificial Sequence
  primer
gccggaataatacctgtcgtc

SEQ ID NO: 86345 - DNA, 23 bp, Artificial Sequence
  primer
gaaggaggacccattacatgaag

SEQ ID NO: 86346 - DNA, 20 bp, Artificial Sequence
  primer
ccttgctgttctcacccttg

SEQ ID NO: 86347 - DNA, 44 bp, Artificial Sequence
  primer
gtaaaacgacggccagtccaagtacaccagatagaatttgaatg

SEQ ID NO: 86348 - DNA, 20 bp, Artificial Sequence
  primer
cagaggtgccgatcctaaag

SEQ ID NO: 86349 - DNA, 21 bp, Artificial Sequence
  primer
ctcctcctttcattcccattg

SEQ ID NO: 86350 - DNA, 21 bp, Artificial Sequence
  primer
gaacccaggaggctctaggac

SEQ ID NO: 86351 - DNA, 38 bp, Artificial Sequence
  primer
gtaaaacgacggccagttagctctgggcagtcaggaac

SEQ ID NO: 86352 - DNA, 19 bp, Artificial Sequence
  primer
ggcaccaactgaagccaag

SEQ ID NO: 86353 - DNA, 21 bp, Artificial Sequence
  primer
ggtgacaagagcaagacttcg

SEQ ID NO: 86354 - DNA, 20 bp, Artificial Sequence
  primer
gccacagtagcatagggtgc

SEQ ID NO: 86355 - DNA, 38 bp, Artificial Sequence
  primer
gtaaaacgacggccagtgtgcacgatgctactcaggtc

SEQ ID NO: 86356 - DNA, 38 bp, Artificial Sequence
  primer
gtaaaacgacggccagtcattgatgagcagactgcgac

SEQ ID NO: 86357 - DNA, 35 bp, Artificial Sequence
  primer
gtaaaacgacggccagtctgctgtaggtgggccag

SEQ ID NO: 86358 - DNA, 21 bp, Artificial Sequence
  primer
ctattgggagtgggcagaatg

SEQ ID NO: 86359 - DNA, 21 bp, Artificial Sequence
  primer
gtttgcatcaagctgttctgg

SEQ ID NO: 86360 - DNA, 38 bp, Artificial Sequence
  primer
gtaaaacgacggccagtgatcccaccaaattccctttc

SEQ ID NO: 86361 - DNA, 21 bp, Artificial Sequence
  primer
gtcaagcagcagagtcttgcc

SEQ ID NO: 86362 - DNA, 21 bp, Artificial Sequence
  primer
tcttgggaaacacccagacac

SEQ ID NO: 86363 - DNA, 38 bp, Artificial Sequence
  primer
gtaaaacgacggccagtagaaggtggctggcaaatatc

SEQ ID NO: 86364 - DNA, 21 bp, Artificial Sequence
  primer
catgtggctctgtacctggag

SEQ ID NO: 86365 - DNA, 21 bp, Artificial Sequence
  primer
accaggtaggacctcaagctg

SEQ ID NO: 86366 - DNA, 38 bp, Artificial Sequence
  primer
gtaaaacgacggccagtgctctcaggaccttccaattc

SEQ ID NO: 86367 - DNA, 21 bp, Artificial Sequence
  primer
cgcgtgaatgagggaataaac

SEQ ID NO: 86368 - DNA, 37 bp, Artificial Sequence
  primer
gtaaaacgacggccagtcgctcactctctcacttgcc

SEQ ID NO: 86369 - DNA, 21 bp, Artificial Sequence
  primer
ttagcatcctatccacccacc

SEQ ID NO: 86370 - DNA, 21 bp, Artificial Sequence
  primer
ctttctctccctccactgacc

SEQ ID NO: 86371 - DNA, 21 bp, Artificial Sequence
  primer
tgtcctcctttcctacatggc

SEQ ID NO: 86372 - DNA, 20 bp, Artificial Sequence
  primer
agtgactgctccctgcaaac

SEQ ID NO: 86373 - DNA, 40 bp, Artificial Sequence
  primer
gtaaaacgacggccagttttctatataaccaccctgctgc

SEQ ID NO: 86374 - DNA, 38 bp, Artificial Sequence
  primer
gtaaaacgacggccagtcaagaatcctgctctccttgc

SEQ ID NO: 86375 - DNA, 21 bp, Artificial Sequence
  primer
agagaaatcgggtgtgtgtcc

SEQ ID NO: 86376 - DNA, 39 bp, Artificial Sequence
  primer
gtaaaacgacggccagtgccaacaacagatgaagtggtc

SEQ ID NO: 86377 - DNA, 21 bp, Artificial Sequence
  primer
aggagctacggtggagaaatg

SEQ ID NO: 86378 - DNA, 21 bp, Artificial Sequence
  primer
tcttagtgatgcaggcattgg

SEQ ID NO: 86379 - DNA, 37 bp, Artificial Sequence
  primer
gtaaaacgacggccagtaatgaggtgaacctgggagg

SEQ ID NO: 86380 - DNA, 21 bp, Artificial Sequence
  primer
actggcatgccctctttagac

SEQ ID NO: 86381 - DNA, 20 bp, Artificial Sequence
  primer
gccattgcactctggcttag

SEQ ID NO: 86382 - DNA, 39 bp, Artificial Sequence
  primer
gtaaaacgacggccagtttccctatagaaggaaggtggg

SEQ ID NO: 86383 - DNA, 38 bp, Artificial Sequence
  primer
gtaaaacgacggccagtctgcagcaaagttaagcaggg

SEQ ID NO: 86384 - DNA, 20 bp, Artificial Sequence
  primer
tcagaaccagggacatgtgg

SEQ ID NO: 86385 - DNA, 21 bp, Artificial Sequence
  primer
cactttccctgggatgaagac

SEQ ID NO: 86386 - DNA, 21 bp, Artificial Sequence
  primer
tgtctgcagtctttggctcac

SEQ ID NO: 86387 - DNA, 21 bp, Artificial Sequence
  primer
actggctcctaaaccctttgc

SEQ ID NO: 86388 - DNA, 21 bp, Artificial Sequence
  primer
tttagttcccacccaccattc

SEQ ID NO: 86389 - DNA, 38 bp, Artificial Sequence
  primer
gtaaaacgacggccagtagtagggagaggagccaggac

SEQ ID NO: 86390 - DNA, 22 bp, Artificial Sequence
  primer
gatagccatgattactgctgcc

SEQ ID NO: 86391 - DNA, 21 bp, Artificial Sequence
  primer
ctgtgctgtggctctttcctc

SEQ ID NO: 86392 - DNA, 38 bp, Artificial Sequence
  primer
gtaaaacgacggccagtcttacccagctcgtttgtcac

SEQ ID NO: 86393 - DNA, 38 bp, Artificial Sequence
  primer
gtaaaacgacggccagtcctgtggctctgtcttcaagg

SEQ ID NO: 86394 - DNA, 21 bp, Artificial Sequence
  primer
cagcagctcataccttcatgc

SEQ ID NO: 86395 - DNA, 38 bp, Artificial Sequence
  primer
gtaaaacgacggccagtaggaaggcggcctgatagtag

SEQ ID NO: 86396 - DNA, 38 bp, Artificial Sequence
  primer
gtaaaacgacggccagtgaggacactcacacccaggac

SEQ ID NO: 86397 - DNA, 20 bp, Artificial Sequence
  primer
agtccaggtcgagagcacag

SEQ ID NO: 86398 - DNA, 37 bp, Artificial Sequence
  primer
gtaaaacgacggccagtaggcaaacaccctcttgctc

SEQ ID NO: 86399 - DNA, 21 bp, Artificial Sequence
  primer
acaccttgatggaagccacag

SEQ ID NO: 86400 - DNA, 38 bp, Artificial Sequence
  primer
gtaaaacgacggccagtgaggagatcaattgaggccag

SEQ ID NO: 86401 - DNA, 20 bp, Artificial Sequence
  primer
tcatatcagagtcctccggg

SEQ ID NO: 86402 - DNA, 39 bp, Artificial Sequence
  primer
gtaaaacgacggccagttcttcctacaactcccttgcag

SEQ ID NO: 86403 - DNA, 20 bp, Artificial Sequence
  primer
cgaggaagaacactcatccg

SEQ ID NO: 86404 - DNA, 20 bp, Artificial Sequence
  primer
ttccctctaacccatgaggc

SEQ ID NO: 86405 - DNA, 38 bp, Artificial Sequence
  primer
gtaaaacgacggccagtgtggaagagagtgaaggccag

SEQ ID NO: 86406 - DNA, 38 bp, Artificial Sequence
  primer
gtaaaacgacggccagtgaagagctcaaggttgggaac

SEQ ID NO: 86407 - DNA, 21 bp, Artificial Sequence
  primer
ggaagactgagtggctatggg

SEQ ID NO: 86408 - DNA, 21 bp, Artificial Sequence
  primer
gctcagacctggcctctacac

SEQ ID NO: 86409 - DNA, 38 bp, Artificial Sequence
  primer
gtaaaacgacggccagtcccaggagtcatacagcatcc

SEQ ID NO: 86410 - DNA, 37 bp, Artificial Sequence
  primer
gtaaaacgacggccagtgagctgtagcccaagggttc

SEQ ID NO: 86411 - DNA, 21 bp, Artificial Sequence
  primer
agttgagtttctcggtctggc

SEQ ID NO: 86412 - DNA, 37 bp, Artificial Sequence
  primer
gtaaaacgacggccagtgctgggagaggagaagatgg

SEQ ID NO: 86413 - DNA, 21 bp, Artificial Sequence
  primer
gaaccagccaatgaggaaatc

SEQ ID NO: 86414 - DNA, 38 bp, Artificial Sequence
  primer
gtaaaacgacggccagtgtttatgtgtgaggcccagtg

SEQ ID NO: 86415 - DNA, 21 bp, Artificial Sequence
  primer
aaatggccacatgaaggtatg

SEQ ID NO: 86416 - DNA, 37 bp, Artificial Sequence
  primer
gtaaaacgacggccagttctgaccttgtgatctgccc

SEQ ID NO: 86417 - DNA, 21 bp, Artificial Sequence
  primer
agggatgggagtcatgttcag

SEQ ID NO: 86418 - DNA, 21 bp, Artificial Sequence
  primer
atattgcaggacggaaggatg

SEQ ID NO: 86419 - DNA, 39 bp, Artificial Sequence
  primer
gtaaaacgacggccagttgcacaaggcaggaagaataag

SEQ ID NO: 86420 - DNA, 42 bp, Artificial Sequence
  primer
gtaaaacgacggccagtttaaatataagcaagcattcaaccc

SEQ ID NO: 86421 - DNA, 42 bp, Artificial Sequence
  primer
gtaaaacgacggccagttctggattgagtttcaaatcatctt

SEQ ID NO: 86422 - DNA, 21 bp, Artificial Sequence
  primer
gagattcgagtaggtttgcgg

SEQ ID NO: 86423 - DNA, 38 bp, Artificial Sequence
  primer
gtaaaacgacggccagtgtcctgtgcactgtggtcttc

SEQ ID NO: 86424 - DNA, 38 bp, Artificial Sequence
  primer
gtaaaacgacggccagtaaggcaatttctccattcctg

SEQ ID NO: 86425 - DNA, 21 bp, Artificial Sequence
  primer
tagaggcgagtggatacatgg

SEQ ID NO: 86426 - DNA, 21 bp, Artificial Sequence
  primer
tatgggctaggaagtgggaag

SEQ ID NO: 86427 - DNA, 38 bp, Artificial Sequence
  primer
gtaaaacgacggccagttttcctgctacggagttctgg

SEQ ID NO: 86428 - DNA, 39 bp, Artificial Sequence
  primer
gtaaaacgacggccagtgtagatccagactaacgctggg

SEQ ID NO: 86429 - DNA, 38 bp, Artificial Sequence
  primer
gtaaaacgacggccagttttctccttatgccaagctgc

SEQ ID NO: 86430 - DNA, 20 bp, Artificial Sequence
  primer
gctggtctcgatcacctcag

SEQ ID NO: 86431 - DNA, 38 bp, Artificial Sequence
  primer
gtaaaacgacggccagtgtgaaattggcaagaatgtgc

SEQ ID NO: 86432 - DNA, 22 bp, Artificial Sequence
  primer
ttcacaggatacacataggccc

SEQ ID NO: 86433 - DNA, 21 bp, Artificial Sequence
  primer
tctcctgaccttgtgatctgc

SEQ ID NO: 86434 - DNA, 37 bp, Artificial Sequence
  primer
gtaaaacgacggccagtgaaggtgggaggttctggtg

SEQ ID NO: 86435 - DNA, 38 bp, Artificial Sequence
  primer
gtaaaacgacggccagtacccggaaatgttctgagttg

SEQ ID NO: 86436 - DNA, 20 bp, Artificial Sequence
  primer
gtcaactgaaagcactcccg

SEQ ID NO: 86437 - DNA, 23 bp, Artificial Sequence
  primer
tttgaccaaagttctaggcaatg

SEQ ID NO: 86438 - DNA, 38 bp, Artificial Sequence
  primer
gtaaaacgacggccagtttcccaggcttcctatctttg

SEQ ID NO: 86439 - DNA, 38 bp, Artificial Sequence
  primer
gtaaaacgacggccagtaagaccgtgtttgctcatttg

SEQ ID NO: 86440 - DNA, 20 bp, Artificial Sequence
  primer
ggaagacgctgcgaatactg

SEQ ID NO: 86441 - DNA, 21 bp, Artificial Sequence
  primer
aaacaacctccttcccatgtc

SEQ ID NO: 86442 - DNA, 20 bp, Artificial Sequence
  primer
gtcaactgaaagcactcccg

SEQ ID NO: 86443 - DNA, 38 bp, Artificial Sequence
  primer
gtaaaacgacggccagtgcctaatcacaaacccaggtc

SEQ ID NO: 86444 - DNA, 22 bp, Artificial Sequence
  primer
ccctaatctttccttctcaggg

SEQ ID NO: 86445 - DNA, 21 bp, Artificial Sequence
  primer
cttctggacatggcacttgag

SEQ ID NO: 86446 - DNA, 22 bp, Artificial Sequence
  primer
gattgtcatgttccctgaatcc

SEQ ID NO: 86447 - DNA, 38 bp, Artificial Sequence
  primer
gtaaaacgacggccagtgaggccaaggaggtatgtgtc

SEQ ID NO: 86448 - DNA, 37 bp, Artificial Sequence
  primer
gtaaaacgacggccagttgggaacctgcaatgtaacc

SEQ ID NO: 86449 - DNA, 38 bp, Artificial Sequence
  primer
gtaaaacgacggccagtagaaagaggcctacggtccac

SEQ ID NO: 86450 - DNA, 38 bp, Artificial Sequence
  primer
gtaaaacgacggccagttgatttccacctccttgtctg

SEQ ID NO: 86451 - DNA, 23 bp, Artificial Sequence
  primer
ccacacacaaatgtttgattctc

SEQ ID NO: 86452 - DNA, 21 bp, Artificial Sequence
  primer
cagaagcagtcagggagtcag

SEQ ID NO: 86453 - DNA, 21 bp, Artificial Sequence
  primer
atgaagtggaggtcgtatggg

SEQ ID NO: 86454 - DNA, 21 bp, Artificial Sequence
  primer
aaggttcacctcactgttgcc

SEQ ID NO: 86455 - DNA, 21 bp, Artificial Sequence
  primer
gaagacttcactgctgctccc

SEQ ID NO: 86456 - DNA, 21 bp, Artificial Sequence
  primer
tattatccattctccgggcag

SEQ ID NO: 86457 - DNA, 20 bp, Artificial Sequence
  primer
aaagccatttcctctcccac

SEQ ID NO: 86458 - DNA, 37 bp, Artificial Sequence
  primer
gtaaaacgacggccagtcaaaggagatgtttcggagg

SEQ ID NO: 86459 - DNA, 38 bp, Artificial Sequence
  primer
gtaaaacgacggccagtggcatgacgtactctgctttg

SEQ ID NO: 86460 - DNA, 38 bp, Artificial Sequence
  primer
gtaaaacgacggccagtacaagcaggttcccatcaatc

SEQ ID NO: 86461 - DNA, 38 bp, Artificial Sequence
  primer
gtaaaacgacggccagtacatgaaattgtgtcccagcc

SEQ ID NO: 86462 - DNA, 26 bp, Artificial Sequence
  primer
cattatcaaatgaccaatctatctgt

SEQ ID NO: 86463 - DNA, 38 bp, Artificial Sequence
  primer
gtaaaacgacggccagtttgaccaagcccactattgac

SEQ ID NO: 86464 - DNA, 20 bp, Artificial Sequence
  primer
aggcacgaccgttaccctac

SEQ ID NO: 86465 - DNA, 38 bp, Artificial Sequence
  primer
gtaaaacgacggccagtggcgtgtacgagtgaagacag

SEQ ID NO: 86466 - DNA, 25 bp, Artificial Sequence
  primer
tgccatatgttaataagggagacaa

SEQ ID NO: 86467 - DNA, 23 bp, Artificial Sequence
  primer
tgaagaagcccattaatttgtgt

SEQ ID NO: 86468 - DNA, 21 bp, Artificial Sequence
  primer
ggctcaagtggctttggacta

SEQ ID NO: 86469 - DNA, 21 bp, Artificial Sequence
  primer
tacagttgcaagcatggatgg

SEQ ID NO: 86470 - DNA, 21 bp, Artificial Sequence
  primer
ttgcatcatacttggcaccac

SEQ ID NO: 86471 - DNA, 38 bp, Artificial Sequence
  primer
gtaaaacgacggccagtggctggcagagtacgctttag

SEQ ID NO: 86472 - DNA, 39 bp, Artificial Sequence
  primer
gtaaaacgacggccagttcataggcattgggtaataggc

SEQ ID NO: 86473 - DNA, 38 bp, Artificial Sequence
  primer
gtaaaacgacggccagtctgaatggctctggatgactg

SEQ ID NO: 86474 - DNA, 21 bp, Artificial Sequence
  primer
aggtgccacatgtgttcaaag

SEQ ID NO: 86475 - DNA, 38 bp, Artificial Sequence
  primer
gtaaaacgacggccagtaccaaagcattgcaatacagc

SEQ ID NO: 86476 - DNA, 38 bp, Artificial Sequence
  primer
gtaaaacgacggccagtaagacacagcaccctgtcaac

SEQ ID NO: 86477 - DNA, 35 bp, Artificial Sequence
  primer
gtaaaacgacggccagtctgggacattctggctcg

SEQ ID NO: 86478 - DNA, 21 bp, Artificial Sequence
  primer
cacactgaatggcatgaaagc

SEQ ID NO: 86479 - DNA, 21 bp, Artificial Sequence
  primer
gggcactactgaatttctggg

SEQ ID NO: 86480 - DNA, 38 bp, Artificial Sequence
  primer
gtaaaacgacggccagttgtggcaagtaaataggcagc

SEQ ID NO: 86481 - DNA, 21 bp, Artificial Sequence
  primer
tgtgtactctccctgactccg

SEQ ID NO: 86482 - DNA, 21 bp, Artificial Sequence
  primer
atagtgggaggttcggtttcg

SEQ ID NO: 86483 - DNA, 18 bp, Artificial Sequence
  primer
ttgtgcttgcccacttcc

SEQ ID NO: 86484 - DNA, 38 bp, Artificial Sequence
  primer
gtaaaacgacggccagtccaaccagaacatcattgcac

SEQ ID NO: 86485 - DNA, 21 bp, Artificial Sequence
  primer
cacaagagctttgtcctctgc

SEQ ID NO: 86486 - DNA, 38 bp, Artificial Sequence
  primer
gtaaaacgacggccagtgtcttgcaaaggatcaggctc

SEQ ID NO: 86487 - DNA, 37 bp, Artificial Sequence
  primer
gtaaaacgacggccagtaccagatgcttgctccaaac

SEQ ID NO: 86488 - DNA, 40 bp, Artificial Sequence
  primer
gtaaaacgacggccagtcaattggaagctaacatggaatc

SEQ ID NO: 86489 - DNA, 26 bp, Artificial Sequence
  primer
ccctcagagaactagtatatttcggc

SEQ ID NO: 86490 - DNA, 20 bp, Artificial Sequence
  primer
cccttggtggaggtaaggac

SEQ ID NO: 86491 - DNA, 21 bp, Artificial Sequence
  primer
gctagcatgaacaggactccc

SEQ ID NO: 86492 - DNA, 22 bp, Artificial Sequence
  primer
caataagctcagcaaacccaag

SEQ ID NO: 86493 - DNA, 23 bp, Artificial Sequence
  primer
gcaattcaccaactaggagaaga

SEQ ID NO: 86494 - DNA, 38 bp, Artificial Sequence
  primer
gtaaaacgacggccagtctccctccaccaccatatctc

SEQ ID NO: 86495 - DNA, 21 bp, Artificial Sequence
  primer
tggatcacacaccagttccac

SEQ ID NO: 86496 - DNA, 18 bp, Artificial Sequence
  primer
actccgcgtggtcagaag

SEQ ID NO: 86497 - DNA, 23 bp, Artificial Sequence
  primer
ggtgcttcacagtatgacctctg

SEQ ID NO: 86498 - DNA, 21 bp, Artificial Sequence
  primer
ttgagagctcaccatgtttgg

SEQ ID NO: 86499 - DNA, 20 bp, Artificial Sequence
  primer
ccaagtcctgaaatgcatgg

SEQ ID NO: 86500 - DNA, 21 bp, Artificial Sequence
  primer
atgaggtaggcaggtttcagg

SEQ ID NO: 86501 - DNA, 38 bp, Artificial Sequence
  primer
gtaaaacgacggccagtagctagaactgctgcagaccc

SEQ ID NO: 86502 - DNA, 38 bp, Artificial Sequence
  primer
gtaaaacgacggccagttccagtcgcatccacatagac

SEQ ID NO: 86503 - DNA, 38 bp, Artificial Sequence
  primer
gtaaaacgacggccagttaattgtcaggcaagactggg

SEQ ID NO: 86504 - DNA, 24 bp, Artificial Sequence
  primer
aagtccacctacaagtgaaacagc

SEQ ID NO: 86505 - DNA, 20 bp, Artificial Sequence
  primer
acagaaggatcccttgaggc

SEQ ID NO: 86506 - DNA, 20 bp, Artificial Sequence
  primer
aggcctgtgaatgtggattg

SEQ ID NO: 86507 - DNA, 38 bp, Artificial Sequence
  primer
gtaaaacgacggccagtttctgccacctcctctctctg

SEQ ID NO: 86508 - DNA, 39 bp, Artificial Sequence
  primer
gtaaaacgacggccagttggtttaactccatcaactgcc

SEQ ID NO: 86509 - DNA, 40 bp, Artificial Sequence
  primer
gtaaaacgacggccagttgcagtcacttaaccaagcaaag

SEQ ID NO: 86510 - DNA, 21 bp, Artificial Sequence
  primer
gccatcagcagaaagtagcag

SEQ ID NO: 86511 - DNA, 38 bp, Artificial Sequence
  primer
gtaaaacgacggccagtcttggcaaactgggaaagaag

SEQ ID NO: 86512 - DNA, 23 bp, Artificial Sequence
  primer
ggacttaagcaatgaattgatcc

SEQ ID NO: 86513 - DNA, 21 bp, Artificial Sequence
  primer
tgctcctggttgggaattaac

SEQ ID NO: 86514 - DNA, 19 bp, Artificial Sequence
  primer
gctgcagtgagccatgttt

SEQ ID NO: 86515 - DNA, 21 bp, Artificial Sequence
  primer
tccgatgacctttaaccttgg

SEQ ID NO: 86516 - DNA, 20 bp, Artificial Sequence
  primer
gattgtcttgctgctccctg

SEQ ID NO: 86517 - DNA, 38 bp, Artificial Sequence
  primer
gtaaaacgacggccagtcactggaaacctcagaacagg

SEQ ID NO: 86518 - DNA, 38 bp, Artificial Sequence
  primer
gtaaaacgacggccagtcatgccagctatgccataaag

SEQ ID NO: 86519 - DNA, 38 bp, Artificial Sequence
  primer
gtaaaacgacggccagtcctacaaatgccacaaacagc

SEQ ID NO: 86520 - DNA, 22 bp, Artificial Sequence
  primer
tgccagatgtctctggtatgac

SEQ ID NO: 86521 - DNA, 44 bp, Artificial Sequence
  primer
gtaaaacgacggccagtaaattgatacagggttgctctttattt

SEQ ID NO: 86522 - DNA, 40 bp, Artificial Sequence
  primer
gtaaaacgacggccagtttcttgggaaagaataggcaaag

SEQ ID NO: 86523 - DNA, 38 bp, Artificial Sequence
  primer
gtaaaacgacggccagtaagtgactgcagccatgattc

SEQ ID NO: 86524 - DNA, 21 bp, Artificial Sequence
  primer
ctatctttgcagttgccctcc

SEQ ID NO: 86525 - DNA, 26 bp, Artificial Sequence
  primer
gaaacacaggaaatggagtacataac

SEQ ID NO: 86526 - DNA, 38 bp, Artificial Sequence
  primer
gtaaaacgacggccagtctagaacaggccagtcacagc

SEQ ID NO: 86527 - DNA, 39 bp, Artificial Sequence
  primer
gtaaaacgacggccagtaagtccagagtttcctgggttc

SEQ ID NO: 86528 - DNA, 22 bp, Artificial Sequence
  primer
tttgccattatcagtgatgtcc

SEQ ID NO: 86529 - DNA, 27 bp, Artificial Sequence
  primer
tcattatacactcatcacctaaaccag

SEQ ID NO: 86530 - DNA, 21 bp, Artificial Sequence
  primer
ttcaccacgtttcttaggctg

SEQ ID NO: 86531 - DNA, 26 bp, Artificial Sequence
  primer
gctgtgttaatttcttatggttgaaa

SEQ ID NO: 86532 - DNA, 43 bp, Artificial Sequence
  primer
gtaaaacgacggccagtaaacttggtgataagacaggtatgaa

SEQ ID NO: 86533 - DNA, 38 bp, Artificial Sequence
  primer
gtaaaacgacggccagtaatgggtcctgtttcaagctg

SEQ ID NO: 86534 - DNA, 23 bp, Artificial Sequence
  primer
tcagaaagctcaatatcccatgt

SEQ ID NO: 86535 - DNA, 38 bp, Artificial Sequence
  primer
gtaaaacgacggccagtcagggacacaaactggagagg

SEQ ID NO: 86536 - DNA, 38 bp, Artificial Sequence
  primer
gtaaaacgacggccagtagcctttggagagaggtggtt

SEQ ID NO: 86537 - DNA, 21 bp, Artificial Sequence
  primer
ggcttgcaaaccaagtagtga

SEQ ID NO: 86538 - DNA, 38 bp, Artificial Sequence
  primer
gtaaaacgacggccagtaagttgcgtggtcctgaaata

SEQ ID NO: 86539 - DNA, 24 bp, Artificial Sequence
  primer
ccgagaagcaataatgaatgaaag

SEQ ID NO: 86540 - DNA, 24 bp, Artificial Sequence
  primer
tcttaacacccttgctacttcagg

SEQ ID NO: 86541 - DNA, 39 bp, Artificial Sequence
  primer
gtaaaacgacggccagtgaggcacccaaactgactactt

SEQ ID NO: 86542 - DNA, 38 bp, Artificial Sequence
  primer
gtaaaacgacggccagttttctcccaaagtatgcatgg

SEQ ID NO: 86543 - DNA, 22 bp, Artificial Sequence
  primer
aaatggcaaacaggtgaatgtc

SEQ ID NO: 86544 - DNA, 38 bp, Artificial Sequence
  primer
gtaaaacgacggccagttgtccaaacgaagggaaagag

SEQ ID NO: 86545 - DNA, 21 bp, Artificial Sequence
  primer
caaatccttgggatatggcac

SEQ ID NO: 86546 - DNA, 21 bp, Artificial Sequence
  primer
taatctgcccagactgatgcc

SEQ ID NO: 86547 - DNA, 38 bp, Artificial Sequence
  primer
gtaaaacgacggccagttttgcagcaatgaacacactg

SEQ ID NO: 86548 - DNA, 38 bp, Artificial Sequence
  primer
gtaaaacgacggccagtcagaacgagtttgtttccgtg

SEQ ID NO: 86549 - DNA, 38 bp, Artificial Sequence
  primer
gtaaaacgacggccagtttgggttggacagcataactg

SEQ ID NO: 86550 - DNA, 38 bp, Artificial Sequence
  primer
gtaaaacgacggccagtagccagtctttgtagccaacc

SEQ ID NO: 86551 - DNA, 21 bp, Artificial Sequence
  primer
agtggcttggtggttatggag

SEQ ID NO: 86552 - DNA, 21 bp, Artificial Sequence
  primer
aaccaatttccagctccattc

SEQ ID NO: 86553 - DNA, 38 bp, Artificial Sequence
  primer
gtaaaacgacggccagtcttctccacccatcaatccag

SEQ ID NO: 86554 - DNA, 39 bp, Artificial Sequence
  primer
gtaaaacgacggccagtcagggcttattacactggcttg

SEQ ID NO: 86555 - DNA, 39 bp, Artificial Sequence
  primer
gtaaaacgacggccagttcaacaactagcagagtttggg

SEQ ID NO: 86556 - DNA, 38 bp, Artificial Sequence
  primer
gtaaaacgacggccagttgtgattgtgggttccatctg

SEQ ID NO: 86557 - DNA, 20 bp, Artificial Sequence
  primer
aatcgggttatttggccttg

SEQ ID NO: 86558 - DNA, 38 bp, Artificial Sequence
  primer
gtaaaacgacggccagtctcctgaaccaggaagtgagg

SEQ ID NO: 86559 - DNA, 38 bp, Artificial Sequence
  primer
gtaaaacgacggccagttgacaccttccattcacaagc

SEQ ID NO: 86560 - DNA, 21 bp, Artificial Sequence
  primer
gcccgagggtctcttactatg

SEQ ID NO: 86561 - DNA, 38 bp, Artificial Sequence
  primer
gtaaaacgacggccagtttattctcaaggctgctgctg

SEQ ID NO: 86562 - DNA, 21 bp, Artificial Sequence
  primer
ctgctgacctgcagcatttag

SEQ ID NO: 86563 - DNA, 38 bp, Artificial Sequence
  primer
gtaaaacgacggccagtcctgctaggccaaatatggtg

SEQ ID NO: 86564 - DNA, 36 bp, Artificial Sequence
  primer
gtaaaacgacggccagtgaagttgcggtctgggaac

SEQ ID NO: 86565 - DNA, 18 bp, Artificial Sequence
  primer
ccaaagcagcagaggcac

SEQ ID NO: 86566 - DNA, 21 bp, Artificial Sequence
  primer
aacacctagaccaaaggtggg

SEQ ID NO: 86567 - DNA, 38 bp, Artificial Sequence
  primer
gtaaaacgacggccagtcctgagagagaggagggtctg

SEQ ID NO: 86568 - DNA, 36 bp, Artificial Sequence
  primer
gtaaaacgacggccagttgaattcctggcctcaagc

SEQ ID NO: 86569 - DNA, 21 bp, Artificial Sequence
  primer
agtgattctgtgtcaccgtgg

SEQ ID NO: 86570 - DNA, 21 bp, Artificial Sequence
  primer
aggaggttcgctctccatctc

SEQ ID NO: 86571 - DNA, 22 bp, Artificial Sequence
  primer
aaatgtctgttaataaggcggc

SEQ ID NO: 86572 - DNA, 21 bp, Artificial Sequence
  primer
cctagcctgggagacagtgag

SEQ ID NO: 86573 - DNA, 21 bp, Artificial Sequence
  primer
gttggccttccctgttatctg

SEQ ID NO: 86574 - DNA, 38 bp, Artificial Sequence
  primer
gtaaaacgacggccagtgaggcagacactaatttgggc

SEQ ID NO: 86575 - DNA, 20 bp, Artificial Sequence
  primer
agcacaggttggttctggtg

SEQ ID NO: 86576 - DNA, 21 bp, Artificial Sequence
  primer
gcataggccaagttatcctgc

SEQ ID NO: 86577 - DNA, 20 bp, Artificial Sequence
  primer
gccattgcactccagatcac

SEQ ID NO: 86578 - DNA, 38 bp, Artificial Sequence
  primer
gtaaaacgacggccagtttgaaagacgatttcttggga

SEQ ID NO: 86579 - DNA, 40 bp, Artificial Sequence
  primer
gtaaaacgacggccagttgaaccattataccatcttgtgg

SEQ ID NO: 86580 - DNA, 21 bp, Artificial Sequence
  primer
atggtatgcaaatcaccctga

SEQ ID NO: 86581 - DNA, 38 bp, Artificial Sequence
  primer
gtaaaacgacggccagtcatgtgtaatgtggcatgctt

SEQ ID NO: 86582 - DNA, 42 bp, Artificial Sequence
  primer
gtaaaacgacggccagttttagtgtaaacagtgtgctccaag

SEQ ID NO: 86583 - DNA, 38 bp, Artificial Sequence
  primer
gtaaaacgacggccagtaatccttgaaccaaccacaaa

SEQ ID NO: 86584 - DNA, 22 bp, Artificial Sequence
  primer
tcacctttagcagtgaacttgg

SEQ ID NO: 86585 - DNA, 37 bp, Artificial Sequence
  primer
gtaaaacgacggccagtaaagatgaagcgaagcaagg

SEQ ID NO: 86586 - DNA, 38 bp, Artificial Sequence
  primer
gtaaaacgacggccagtactggttcttgaattctgccc

SEQ ID NO: 86587 - DNA, 38 bp, Artificial Sequence
  primer
gtaaaacgacggccagtttcccacacctctttcacttg

SEQ ID NO: 86588 - DNA, 20 bp, Artificial Sequence
  primer
tcaccacttcctgggttctg

SEQ ID NO: 86589 - DNA, 38 bp, Artificial Sequence
  primer
gtaaaacgacggccagttttgaacacattctggaaggc

SEQ ID NO: 86590 - DNA, 20 bp, Artificial Sequence
  primer
cagatccaacacatcctccg

SEQ ID NO: 86591 - DNA, 38 bp, Artificial Sequence
  primer
gtaaaacgacggccagtgagggtgtcatgcaatttgac

SEQ ID NO: 86592 - DNA, 40 bp, Artificial Sequence
  primer
gtaaaacgacggccagtttcaaccatttctctcattcacc

SEQ ID NO: 86593 - DNA, 38 bp, Artificial Sequence
  primer
gtaaaacgacggccagtaattcacaatgccaaaccaag

SEQ ID NO: 86594 - DNA, 38 bp, Artificial Sequence
  primer
gtaaaacgacggccagtactgcctgccattcttaccag

SEQ ID NO: 86595 - DNA, 20 bp, Artificial Sequence
  primer
atgttcttgacgggatctgg

SEQ ID NO: 86596 - DNA, 24 bp, Artificial Sequence
  primer
caaaggagctacttccatttgttg

SEQ ID NO: 86597 - DNA, 23 bp, Artificial Sequence
  primer
tgaggttaatgacactgacatgg

SEQ ID NO: 86598 - DNA, 40 bp, Artificial Sequence
  primer
gtaaaacgacggccagtttatacataccgtcatggcacac

SEQ ID NO: 86599 - DNA, 37 bp, Artificial Sequence
  primer
gtaaaacgacggccagtaagggagagctgatcatggc

SEQ ID NO: 86600 - DNA, 18 bp, Artificial Sequence
  primer
acgggacaggacaggagg

SEQ ID NO: 86601 - DNA, 21 bp, Artificial Sequence
  primer
gtaagtgccacgaagaccctc

SEQ ID NO: 86602 - DNA, 21 bp, Artificial Sequence
  primer
gcaacaaaggaagactggctc

SEQ ID NO: 86603 - DNA, 38 bp, Artificial Sequence
  primer
gtaaaacgacggccagtgtttgggaatcaacatgaggg

SEQ ID NO: 86604 - DNA, 18 bp, Artificial Sequence
  primer
gtgagccatgatggtgcc

SEQ ID NO: 86605 - DNA, 21 bp, Artificial Sequence
  primer
gaggaacctgtccctaacgtg

SEQ ID NO: 86606 - DNA, 23 bp, Artificial Sequence
  primer
tggtgcttgtaacacactccttc

SEQ ID NO: 86607 - DNA, 20 bp, Artificial Sequence
  primer
cacgttcagggcaaactttc

SEQ ID NO: 86608 - DNA, 37 bp, Artificial Sequence
  primer
gtaaaacgacggccagtctgggctcaagcaatctgtc

SEQ ID NO: 86609 - DNA, 38 bp, Artificial Sequence
  primer
gtaaaacgacggccagtctacctaccagcctgggtgac

SEQ ID NO: 86610 - DNA, 21 bp, Artificial Sequence
  primer
gagtgttattcacagctgccc

SEQ ID NO: 86611 - DNA, 21 bp, Artificial Sequence
  primer
aaacgtccctggctacaactg

SEQ ID NO: 86612 - DNA, 20 bp, Artificial Sequence
  primer
aacaatgtagcccacatccc

SEQ ID NO: 86613 - DNA, 39 bp, Artificial Sequence
  primer
gtaaaacgacggccagtgcaaatctcagcgaccttattc

SEQ ID NO: 86614 - DNA, 38 bp, Artificial Sequence
  primer
gtaaaacgacggccagtctaccagctctagggcctcac

SEQ ID NO: 86615 - DNA, 21 bp, Artificial Sequence
  primer
ttctgagtcagggaggcagac

SEQ ID NO: 86616 - DNA, 21 bp, Artificial Sequence
  primer
cagcagacaagcctgaaagac

SEQ ID NO: 86617 - DNA, 22 bp, Artificial Sequence
  primer
tgaaagtcgctagcagtaaggg

SEQ ID NO: 86618 - DNA, 38 bp, Artificial Sequence
  primer
gtaaaacgacggccagtaaatgctaacccagggtcctc

SEQ ID NO: 86619 - DNA, 21 bp, Artificial Sequence
  primer
gatccgctcactgacactctg

SEQ ID NO: 86620 - DNA, 21 bp, Artificial Sequence
  primer
ctcctgcctcaaactcaaagc

SEQ ID NO: 86621 - DNA, 22 bp, Artificial Sequence
  primer
gggcagagctagcctatacttg

SEQ ID NO: 86622 - DNA, 22 bp, Artificial Sequence
  primer
acacaagaaactggtgatgctg

SEQ ID NO: 86623 - DNA, 44 bp, Artificial Sequence
  primer
gtaaaacgacggccagttcctccattataaatctctccttacag

SEQ ID NO: 86624 - DNA, 22 bp, Artificial Sequence
  primer
caagattaggatgctgaggtcc

SEQ ID NO: 86625 - DNA, 38 bp, Artificial Sequence
  primer
gtaaaacgacggccagtccggcctatcctgtaattctt

SEQ ID NO: 86626 - DNA, 22 bp, Artificial Sequence
  primer
gatcttgccactcactatgcag

SEQ ID NO: 86627 - DNA, 21 bp, Artificial Sequence
  primer
acctgtgggtacagagggttg

SEQ ID NO: 86628 - DNA, 35 bp, Artificial Sequence
  primer
gtaaaacgacggccagtaaatcagccaggtgcggt

SEQ ID NO: 86629 - DNA, 38 bp, Artificial Sequence
  primer
gtaaaacgacggccagtggcactatcacacacaccaaa

SEQ ID NO: 86630 - DNA, 39 bp, Artificial Sequence
  primer
gtaaaacgacggccagtccggactgatctgtaagactcc

SEQ ID NO: 86631 - DNA, 38 bp, Artificial Sequence
  primer
gtaaaacgacggccagtatgccattcaagccagattgt

SEQ ID NO: 86632 - DNA, 21 bp, Artificial Sequence
  primer
cttcttcagtacccacctccg

SEQ ID NO: 86633 - DNA, 38 bp, Artificial Sequence
  primer
gtaaaacgacggccagtcagcagaatctgtcgtcactg

SEQ ID NO: 86634 - DNA, 38 bp, Artificial Sequence
  primer
gtaaaacgacggccagttctctgcatcagtgcacttcc

SEQ ID NO: 86635 - DNA, 38 bp, Artificial Sequence
  primer
gtaaaacgacggccagtcaccctacctctgcaggattc

SEQ ID NO: 86636 - DNA, 38 bp, Artificial Sequence
  primer
gtaaaacgacggccagtctagacagaacccacagtgcc

SEQ ID NO: 86637 - DNA, 20 bp, Artificial Sequence
  primer
ctggaccctctgttctctgc

SEQ ID NO: 86638 - DNA, 20 bp, Artificial Sequence
  primer
tacaggcatgagccacactg

SEQ ID NO: 86639 - DNA, 37 bp, Artificial Sequence
  primer
gtaaaacgacggccagtacgtagttcaccagcatggc

SEQ ID NO: 86640 - DNA, 20 bp, Artificial Sequence
  primer
aactcccaagccacctcttc

SEQ ID NO: 86641 - DNA, 39 bp, Artificial Sequence
  primer
gtaaaacgacggccagtcactgatgatgtggagattccc

SEQ ID NO: 86642 - DNA, 35 bp, Artificial Sequence
  primer
gtaaaacgacggccagtgagaagggaggcgagagg

SEQ ID NO: 86643 - DNA, 45 bp, Artificial Sequence
  primer
gtaaaacgacggccagtgaaatgataagctacatgaacattcaac

SEQ ID NO: 86644 - DNA, 44 bp, Artificial Sequence
  primer
gtaaaacgacggccagtacaacatttctaatagttggtgttgag

SEQ ID NO: 86645 - DNA, 38 bp, Artificial Sequence
  primer
gtaaaacgacggccagttacacgcgatttacaagctgc

SEQ ID NO: 86646 - DNA, 38 bp, Artificial Sequence
  primer
gtaaaacgacggccagtacaccaccaccactttgagtc

SEQ ID NO: 86647 - DNA, 21 bp, Artificial Sequence
  primer
tgtcaccacagtgacactccc

SEQ ID NO: 86648 - DNA, 39 bp, Artificial Sequence
  primer
gtaaaacgacggccagtttcaccatttacaggcttctcc

SEQ ID NO: 86649 - DNA, 41 bp, Artificial Sequence
  primer
gtaaaacgacggccagtaacctcgtgaatttacatgaaacc

SEQ ID NO: 86650 - DNA, 27 bp, Artificial Sequence
  primer
catctgaatcacgtatatcctctactg

SEQ ID NO: 86651 - DNA, 37 bp, Artificial Sequence
  primer
gtaaaacgacggccagtcccagtgctggtgacaaatg

SEQ ID NO: 86652 - DNA, 20 bp, Artificial Sequence
  primer
gagtgagggcccaaggttag

SEQ ID NO: 86653 - DNA, 21 bp, Artificial Sequence
  primer
accaaattatggagcaggtgg

SEQ ID NO: 86654 - DNA, 21 bp, Artificial Sequence
  primer
acacaggtaatgttgccctcc

SEQ ID NO: 86655 - DNA, 21 bp, Artificial Sequence
  primer
attgcagtgctggtgtaggac

SEQ ID NO: 86656 - DNA, 38 bp, Artificial Sequence
  primer
gtaaaacgacggccagtcctttgaaggcttggtgagac

SEQ ID NO: 86657 - DNA, 21 bp, Artificial Sequence
  primer
cttcccttggctcctttactg

SEQ ID NO: 86658 - DNA, 38 bp, Artificial Sequence
  primer
gtaaaacgacggccagttccaagtcatagtggctggtg

SEQ ID NO: 86659 - DNA, 21 bp, Artificial Sequence
  primer
aagtgctgaactcctgccatc

SEQ ID NO: 86660 - DNA, 20 bp, Artificial Sequence
  primer
caccaccagtcctgttctcc

SEQ ID NO: 86661 - DNA, 21 bp, Artificial Sequence
  primer
gtccatttctatggacacgcc

SEQ ID NO: 86662 - DNA, 21 bp, Artificial Sequence
  primer
taaggcctccctcacagacag

SEQ ID NO: 86663 - DNA, 19 bp, Artificial Sequence
  primer
gccaagaatgcagtgatcg

SEQ ID NO: 86664 - DNA, 21 bp, Artificial Sequence
  primer
atcccaagctccaatacttgc

SEQ ID NO: 86665 - DNA, 21 bp, Artificial Sequence
  primer
ttagtgggtggtagtgggtgg

SEQ ID NO: 86666 - DNA, 21 bp, Artificial Sequence
  primer
agaagaaattagcttggcccg

SEQ ID NO: 86667 - DNA, 21 bp, Artificial Sequence
  primer
agcggtagatttcgtcctcac

SEQ ID NO: 86668 - DNA, 38 bp, Artificial Sequence
  primer
gtaaaacgacggccagtacctcagtggtcagtgtggag

SEQ ID NO: 86669 - DNA, 38 bp, Artificial Sequence
  primer
gtaaaacgacggccagtaaggcagtcagtgtgacttgg

SEQ ID NO: 86670 - DNA, 21 bp, Artificial Sequence
  primer
agcaggaaggtgagctggtag

SEQ ID NO: 86671 - DNA, 21 bp, Artificial Sequence
  primer
agggaaattgacagatggagg

SEQ ID NO: 86672 - DNA, 21 bp, Artificial Sequence
  primer
aaacagaaagagaggcctggg

SEQ ID NO: 86673 - DNA, 21 bp, Artificial Sequence
  primer
ttgtgaccgtttactgccttg

SEQ ID NO: 86674 - DNA, 21 bp, Artificial Sequence
  primer
tggacctttctaccagcaagc

SEQ ID NO: 86675 - DNA, 21 bp, Artificial Sequence
  primer
ggagttgagccaccttctcac

SEQ ID NO: 86676 - DNA, 39 bp, Artificial Sequence
  primer
gtaaaacgacggccagttgcctcaacatgagtacaatcc

SEQ ID NO: 86677 - DNA, 36 bp, Artificial Sequence
  primer
gtaaaacgacggccagtaagccaccgctgagaaaga

SEQ ID NO: 86678 - DNA, 38 bp, Artificial Sequence
  primer
gtaaaacgacggccagttaaggttctctgggagcaagc

SEQ ID NO: 86679 - DNA, 38 bp, Artificial Sequence
  primer
gtaaaacgacggccagtctcccagaacattccagaagc

SEQ ID NO: 86680 - DNA, 21 bp, Artificial Sequence
  primer
agtaggaggtggagcaggttg

SEQ ID NO: 86681 - DNA, 21 bp, Artificial Sequence
  primer
tcatcctgacccacttcactc

SEQ ID NO: 86682 - DNA, 37 bp, Artificial Sequence
  primer
gtaaaacgacggccagtccatagagaacgctggagcc

SEQ ID NO: 86683 - DNA, 38 bp, Artificial Sequence
  primer
gtaaaacgacggccagtggactggaaggatcaggtgtc

SEQ ID NO: 86684 - DNA, 36 bp, Artificial Sequence
  primer
gtaaaacgacggccagtctgcgaagtcaaagggctg

SEQ ID NO: 86685 - DNA, 38 bp, Artificial Sequence
  primer
gtaaaacgacggccagtcatacacacacacgcaaacag

SEQ ID NO: 86686 - DNA, 38 bp, Artificial Sequence
  primer
gtaaaacgacggccagtcagcctgacattctgtgaacc

SEQ ID NO: 86687 - DNA, 38 bp, Artificial Sequence
  primer
gtaaaacgacggccagtggtaagaaacagcccttcagc

SEQ ID NO: 86688 - DNA, 40 bp, Artificial Sequence
  primer
gtaaaacgacggccagttcaattaatttgttccttggctg

SEQ ID NO: 86689 - DNA, 21 bp, Artificial Sequence
  primer
agcactggagaactttgggag

SEQ ID NO: 86690 - DNA, 23 bp, Artificial Sequence
  primer
aatgttcatcttgaggtgaaagg

SEQ ID NO: 86691 - DNA, 21 bp, Artificial Sequence
  primer
attggtcagaacaagaggcaa

SEQ ID NO: 86692 - DNA, 37 bp, Artificial Sequence
  primer
gtaaaacgacggccagtctacagccggtcagcctatc

SEQ ID NO: 86693 - DNA, 26 bp, Artificial Sequence
  primer
tcacaatatttgtactgtttgtgact

SEQ ID NO: 86694 - DNA, 25 bp, Artificial Sequence
  primer
agaacttgttgccaaagtaactcag

SEQ ID NO: 86695 - DNA, 20 bp, Artificial Sequence
  primer
actacaactcccagcaagcc

SEQ ID NO: 86696 - DNA, 18 bp, Artificial Sequence
  primer
ctccagggtgtccagcac

SEQ ID NO: 86697 - DNA, 35 bp, Artificial Sequence
  primer
gtaaaacgacggccagtagaaactcctcgcgggtc

SEQ ID NO: 86698 - DNA, 36 bp, Artificial Sequence
  primer
gtaaaacgacggccagtgttatggcagggcctcacc

SEQ ID NO: 86699 - DNA, 21 bp, Artificial Sequence
  primer
caggcggtaggtcttcatctc

SEQ ID NO: 86700 - DNA, 21 bp, Artificial Sequence
  primer
agggtcatccacaacttggac

SEQ ID NO: 86701 - DNA, 18 bp, Artificial Sequence
  primer
gggatttccaccagctcc

SEQ ID NO: 86702 - DNA, 20 bp, Artificial Sequence
  primer
gtacggctggtaggcatcag

SEQ ID NO: 86703 - DNA, 21 bp, Artificial Sequence
  primer
tcagatgactgggacttctgc

SEQ ID NO: 86704 - DNA, 38 bp, Artificial Sequence
  primer
gtaaaacgacggccagtagagttctcatctggcgttgg

SEQ ID NO: 86705 - DNA, 38 bp, Artificial Sequence
  primer
gtaaaacgacggccagttagacaggcagacaaaccagc

SEQ ID NO: 86706 - DNA, 21 bp, Artificial Sequence
  primer
aggcttgagtcctgcttgaac

SEQ ID NO: 86707 - DNA, 21 bp, Artificial Sequence
  primer
acctcacaaaccttcaccacg

SEQ ID NO: 86708 - DNA, 38 bp, Artificial Sequence
  primer
gtaaaacgacggccagttaggacccatttcctagggtg

SEQ ID NO: 86709 - DNA, 19 bp, Artificial Sequence
  primer
ggaagatgagcaacgggag

SEQ ID NO: 86710 - DNA, 20 bp, Artificial Sequence
  primer
cgcctgtgtctggctctatt

SEQ ID NO: 86711 - DNA, 38 bp, Artificial Sequence
  primer
gtaaaacgacggccagtgggccttcattaggagatcag

SEQ ID NO: 86712 - DNA, 21 bp, Artificial Sequence
  primer
ctgggcccaacatactaggtc

SEQ ID NO: 86713 - DNA, 21 bp, Artificial Sequence
  primer
tctgtatcctgccctgtttcc

SEQ ID NO: 86714 - DNA, 21 bp, Artificial Sequence
  primer
gtccatgtactggcagacagc

SEQ ID NO: 86715 - DNA, 20 bp, Artificial Sequence
  primer
gagtgtctgtgtccagcagc

SEQ ID NO: 86716 - DNA, 37 bp, Artificial Sequence
  primer
gtaaaacgacggccagtagcgtctgttgactgccaag

SEQ ID NO: 86717 - DNA, 18 bp, Artificial Sequence
  primer
agttcccggatggagtgg

SEQ ID NO: 86718 - DNA, 38 bp, Artificial Sequence
  primer
gtaaaacgacggccagtcgccgaagagtagtgagtgag

SEQ ID NO: 86719 - DNA, 21 bp, Artificial Sequence
  primer
ctgcatttattgttcccagcc

SEQ ID NO: 86720 - DNA, 39 bp, Artificial Sequence
  primer
gtaaaacgacggccagtgaagatgggttccttacttggg

SEQ ID NO: 86721 - DNA, 36 bp, Artificial Sequence
  primer
gtaaaacgacggccagtgtgtgcttctctcccgtcc

SEQ ID NO: 86722 - DNA, 38 bp, Artificial Sequence
  primer
gtaaaacgacggccagttaatgctgcctgcttcatctg

SEQ ID NO: 86723 - DNA, 20 bp, Artificial Sequence
  primer
gactcagaagtggacaggcg

SEQ ID NO: 86724 - DNA, 20 bp, Artificial Sequence
  primer
acgaacagcgacatcaccac

SEQ ID NO: 86725 - DNA, 38 bp, Artificial Sequence
  primer
gtaaaacgacggccagtcctgtgactcagaagccagtg

SEQ ID NO: 86726 - DNA, 38 bp, Artificial Sequence
  primer
gtaaaacgacggccagtagacagacacagacggtcagg

SEQ ID NO: 86727 - DNA, 18 bp, Artificial Sequence
  primer
gagcctctgccttggtcc

SEQ ID NO: 86728 - DNA, 19 bp, Artificial Sequence
  primer
aagagcatgggtgggtgag

SEQ ID NO: 86729 - DNA, 21 bp, Artificial Sequence
  primer
ataggttgaccttggtcctgg

SEQ ID NO: 86730 - DNA, 20 bp, Artificial Sequence
  primer
acctcctgctcctggatgtc

SEQ ID NO: 86731 - DNA, 21 bp, Artificial Sequence
  primer
cacagcagcttctgagaggag

SEQ ID NO: 86732 - DNA, 37 bp, Artificial Sequence
  primer
gtaaaacgacggccagtgggtggtgagtcagagggag

SEQ ID NO: 86733 - DNA, 22 bp, Artificial Sequence
  primer
aaacatgaaagactgcctggtc

SEQ ID NO: 86734 - DNA, 38 bp, Artificial Sequence
  primer
gtaaaacgacggccagtatgcagcagaagcagtcagtg

SEQ ID NO: 86735 - DNA, 38 bp, Artificial Sequence
  primer
gtaaaacgacggccagtacttgatgagtgacgtttgcc

SEQ ID NO: 86736 - DNA, 20 bp, Artificial Sequence
  primer
atggtcgcgatgaacttctg

SEQ ID NO: 86737 - DNA, 20 bp, Artificial Sequence
  primer
agagcatccgaggatggaac

SEQ ID NO: 86738 - DNA, 21 bp, Artificial Sequence
  primer
ttggccaccttatccaagaag

SEQ ID NO: 86739 - DNA, 21 bp, Artificial Sequence
  primer
agacccagaacactgctggac

SEQ ID NO: 86740 - DNA, 38 bp, Artificial Sequence
  primer
gtaaaacgacggccagtcaggaggctgtcaggagtcag

SEQ ID NO: 86741 - DNA, 21 bp, Artificial Sequence
  primer
agttgagaatgggacaccctc

SEQ ID NO: 86742 - DNA, 20 bp, Artificial Sequence
  primer
gagcttcagaatggcaatgg

SEQ ID NO: 86743 - DNA, 38 bp, Artificial Sequence
  primer
gtaaaacgacggccagtttacatgaggtgcaggtctcc

SEQ ID NO: 86744 - DNA, 21 bp, Artificial Sequence
  primer
cggagctcacagtgtaacagg

SEQ ID NO: 86745 - DNA, 19 bp, Artificial Sequence
  primer
accctctttctcgcttccc

SEQ ID NO: 86746 - DNA, 38 bp, Artificial Sequence
  primer
gtaaaacgacggccagtcattgattccggccttcttag

SEQ ID NO: 86747 - DNA, 18 bp, Artificial Sequence
  primer
aggtcccagtcacctcgc

SEQ ID NO: 86748 - DNA, 21 bp, Artificial Sequence
  primer
tacaccacccagtaggtgagc

SEQ ID NO: 86749 - DNA, 38 bp, Artificial Sequence
  primer
gtaaaacgacggccagttggtatcctccggactttctg

SEQ ID NO: 86750 - DNA, 38 bp, Artificial Sequence
  primer
gtaaaacgacggccagtaggcaaggtggagagagacag

SEQ ID NO: 86751 - DNA, 37 bp, Artificial Sequence
  primer
gtaaaacgacggccagtaggactgggactgggacttg

SEQ ID NO: 86752 - DNA, 21 bp, Artificial Sequence
  primer
gatgaggcgacttacctttgg

SEQ ID NO: 86753 - DNA, 38 bp, Artificial Sequence
  primer
gtaaaacgacggccagtagtcggaagagctgtggtgtc

SEQ ID NO: 86754 - DNA, 21 bp, Artificial Sequence
  primer
agaagagatggttctgggctg

SEQ ID NO: 86755 - DNA, 36 bp, Artificial Sequence
  primer
gtaaaacgacggccagtgtggacagcctctccttgg

SEQ ID NO: 86756 - DNA, 18 bp, Artificial Sequence
  primer
gtcccagctgccattgtg

SEQ ID NO: 86757 - DNA, 20 bp, Artificial Sequence
  primer
caagaccaggtcagctctgc

SEQ ID NO: 86758 - DNA, 38 bp, Artificial Sequence
  primer
gtaaaacgacggccagtacctcaagtgatcttcccacc

SEQ ID NO: 86759 - DNA, 36 bp, Artificial Sequence
  primer
gtaaaacgacggccagtctgctgctgttcccagagg

SEQ ID NO: 86760 - DNA, 37 bp, Artificial Sequence
  primer
gtaaaacgacggccagtcatagatggtacggaggccc

SEQ ID NO: 86761 - DNA, 38 bp, Artificial Sequence
  primer
gtaaaacgacggccagtgaaaggccaaatgaaacaagc

SEQ ID NO: 86762 - DNA, 19 bp, Artificial Sequence
  primer
accagcagcaagttctccg

SEQ ID NO: 86763 - DNA, 18 bp, Artificial Sequence
  primer
gtcagctgtgctgccagg

SEQ ID NO: 86764 - DNA, 36 bp, Artificial Sequence
  primer
gtaaaacgacggccagtcattgctctctctgctgcg

SEQ ID NO: 86765 - DNA, 18 bp, Artificial Sequence
  primer
ggcaggaggagaagccag

SEQ ID NO: 86766 - DNA, 20 bp, Artificial Sequence
  primer
aggagaaggtcaggctcagg

SEQ ID NO: 86767 - DNA, 38 bp, Artificial Sequence
  primer
gtaaaacgacggccagttgttcacatcactccagcctc

SEQ ID NO: 86768 - DNA, 18 bp, Artificial Sequence
  primer
ctcccaaccctccaaagc

SEQ ID NO: 86769 - DNA, 38 bp, Artificial Sequence
  primer
gtaaaacgacggccagtgtcatccaagagaagcccatc

SEQ ID NO: 86770 - DNA, 38 bp, Artificial Sequence
  primer
gtaaaacgacggccagtctctgcctccttcacataggc

SEQ ID NO: 86771 - DNA, 21 bp, Artificial Sequence
  primer
tgcacgtgaatgaagatttcc

SEQ ID NO: 86772 - DNA, 38 bp, Artificial Sequence
  primer
gtaaaacgacggccagtgagctaagagccaatgcatcc

SEQ ID NO: 86773 - DNA, 38 bp, Artificial Sequence
  primer
gtaaaacgacggccagtcccaggacttgagagatggag

SEQ ID NO: 86774 - DNA, 20 bp, Artificial Sequence
  primer
accagcacggagaggaagag

SEQ ID NO: 86775 - DNA, 21 bp, Artificial Sequence
  primer
aaatccaggaccagcaaacag

SEQ ID NO: 86776 - DNA, 38 bp, Artificial Sequence
  primer
gtaaaacgacggccagttgggaggagaggaaggatttg

SEQ ID NO: 86777 - DNA, 21 bp, Artificial Sequence
  primer
agggagagccctaatcggtag

SEQ ID NO: 86778 - DNA, 21 bp, Artificial Sequence
  primer
atcctgtcgatgtcaggaacc

SEQ ID NO: 86779 - DNA, 37 bp, Artificial Sequence
  primer
gtaaaacgacggccagtagcctcctgtgctgacagat

SEQ ID NO: 86780 - DNA, 38 bp, Artificial Sequence
  primer
gtaaaacgacggccagtttcttaggaaacccatccagg

SEQ ID NO: 86781 - DNA, 19 bp, Artificial Sequence
  primer
aagcctgcagcagaaggag

SEQ ID NO: 86782 - DNA, 21 bp, Artificial Sequence
  primer
gatctggtggtgtgagtaccg

SEQ ID NO: 86783 - DNA, 19 bp, Artificial Sequence
  primer
atctgcagcaggtccactg

SEQ ID NO: 86784 - DNA, 21 bp, Artificial Sequence
  primer
aggatgatgtagaaggcggtg

SEQ ID NO: 86785 - DNA, 23 bp, Artificial Sequence
  primer
ggtagagatagaagaacctgcgg

SEQ ID NO: 86786 - DNA, 18 bp, Artificial Sequence
  primer
cgcctgaagcagcatctc

SEQ ID NO: 86787 - DNA, 41 bp, Artificial Sequence
  primer
gtaaaacgacggccagttctgtttcttcttccacatgtttc

SEQ ID NO: 86788 - DNA, 38 bp, Artificial Sequence
  primer
gtaaaacgacggccagtatctatgtgtggctcactggc

SEQ ID NO: 86789 - DNA, 22 bp, Artificial Sequence
  primer
tcaactcgaattctgttctccc

SEQ ID NO: 86790 - DNA, 21 bp, Artificial Sequence
  primer
cacatttaaaccttgccctgc

SEQ ID NO: 86791 - DNA, 21 bp, Artificial Sequence
  primer
agcaattcccttctcttgagg

SEQ ID NO: 86792 - DNA, 20 bp, Artificial Sequence
  primer
gctcctccactcatgtagcc

SEQ ID NO: 86793 - DNA, 21 bp, Artificial Sequence
  primer
aaatggtgttctggcacaaag

SEQ ID NO: 86794 - DNA, 39 bp, Artificial Sequence
  primer
gtaaaacgacggccagtaaggaagagtccttgttgttgg

SEQ ID NO: 86795 - DNA, 42 bp, Artificial Sequence
  primer
gtaaaacgacggccagtttctatgtcagaaatgcagaagtcc

SEQ ID NO: 86796 - DNA, 21 bp, Artificial Sequence
  primer
tccagcatatttcaggcaaac

SEQ ID NO: 86797 - DNA, 21 bp, Artificial Sequence
  primer
gccttctactacctggttggg

SEQ ID NO: 86798 - DNA, 38 bp, Artificial Sequence
  primer
gtaaaacgacggccagttgtggttataccagtgccacc

SEQ ID NO: 86799 - DNA, 20 bp, Artificial Sequence
  primer
ggtttagctgctgcctcctc

SEQ ID NO: 86800 - DNA, 38 bp, Artificial Sequence
  primer
gtaaaacgacggccagtttctccagctttctgggtctg

SEQ ID NO: 86801 - DNA, 37 bp, Artificial Sequence
  primer
gtaaaacgacggccagtctgttctggtcattggtggc

SEQ ID NO: 86802 - DNA, 21 bp, Artificial Sequence
  primer
gctcacttgcatccatctttg

SEQ ID NO: 86803 - DNA, 38 bp, Artificial Sequence
  primer
gtaaaacgacggccagtacaagccaaactctctccagc

SEQ ID NO: 86804 - DNA, 38 bp, Artificial Sequence
  primer
gtaaaacgacggccagtatgaagagctgatgtccaggg

SEQ ID NO: 86805 - DNA, 38 bp, Artificial Sequence
  primer
gtaaaacgacggccagtcctggcagtagtctctggacc

SEQ ID NO: 86806 - DNA, 20 bp, Artificial Sequence
  primer
ctgggcaacagagcaatacc

SEQ ID NO: 86807 - DNA, 21 bp, Artificial Sequence
  primer
cacacacatatccatgcctcc

SEQ ID NO: 86808 - DNA, 40 bp, Artificial Sequence
  primer
gtaaaacgacggccagtaaactgaaagtagttctgctgcc

SEQ ID NO: 86809 - DNA, 20 bp, Artificial Sequence
  primer
ttcctgacctcaggtgatcc

SEQ ID NO: 86810 - DNA, 20 bp, Artificial Sequence
  primer
agaggaaagcgctctatggg

SEQ ID NO: 86811 - DNA, 20 bp, Artificial Sequence
  primer
tcctgaggtactggtggtgg

SEQ ID NO: 86812 - DNA, 38 bp, Artificial Sequence
  primer
gtaaaacgacggccagtatcgatggtactcaatggtgg

SEQ ID NO: 86813 - DNA, 39 bp, Artificial Sequence
  primer
gtaaaacgacggccagttggttcatatgtggatttgtgg

SEQ ID NO: 86814 - DNA, 21 bp, Artificial Sequence
  primer
tatgctctggaggacacttcc

SEQ ID NO: 86815 - DNA, 38 bp, Artificial Sequence
  primer
gtaaaacgacggccagttcctcaaatttgctcagatgg

SEQ ID NO: 86816 - DNA, 20 bp, Artificial Sequence
  primer
ttcctgacctcaggtgatcc

SEQ ID NO: 86817 - DNA, 21 bp, Artificial Sequence
  primer
tcttgctgtcttggcactcag

SEQ ID NO: 86818 - DNA, 21 bp, Artificial Sequence
  primer
agtggaacggagcatttcttc

SEQ ID NO: 86819 - DNA, 39 bp, Artificial Sequence
  primer
gtaaaacgacggccagtcagtgttcccatctggctttag

SEQ ID NO: 86820 - DNA, 38 bp, Artificial Sequence
  primer
gtaaaacgacggccagttatgcctattcatgttggccc

SEQ ID NO: 86821 - DNA, 21 bp, Artificial Sequence
  primer
tcctccgaagagaagtgatgg

SEQ ID NO: 86822 - DNA, 37 bp, Artificial Sequence
  primer
gtaaaacgacggccagtctctcgtcattggaaggtgc

SEQ ID NO: 86823 - DNA, 21 bp, Artificial Sequence
  primer
tccttagagactccacctcgc

SEQ ID NO: 86824 - DNA, 38 bp, Artificial Sequence
  primer
gtaaaacgacggccagtcttcagctcctcccagatgtc

SEQ ID NO: 86825 - DNA, 21 bp, Artificial Sequence
  primer
gtttactttctcgcgtttccc

SEQ ID NO: 86826 - DNA, 21 bp, Artificial Sequence
  primer
gccgtgctaggcagagtttac

SEQ ID NO: 86827 - DNA, 21 bp, Artificial Sequence
  primer
ccctaccgtccctagctctgt

SEQ ID NO: 86828 - DNA, 38 bp, Artificial Sequence
  primer
gtaaaacgacggccagtgactggaatggattctgctcc

SEQ ID NO: 86829 - DNA, 21 bp, Artificial Sequence
  primer
actaactcccacgggacaacc

SEQ ID NO: 86830 - DNA, 21 bp, Artificial Sequence
  primer
atggagaatccaatagggctg

SEQ ID NO: 86831 - DNA, 20 bp, Artificial Sequence
  primer
ccagtggtcaagagtgctca

SEQ ID NO: 86832 - DNA, 37 bp, Artificial Sequence
  primer
gtaaaacgacggccagtaggtcacactgcctttggtg

SEQ ID NO: 86833 - DNA, 37 bp, Artificial Sequence
  primer
gtaaaacgacggccagtcacctaccctgtgcctaccc

SEQ ID NO: 86834 - DNA, 38 bp, Artificial Sequence
  primer
gtaaaacgacggccagtacacagtggtaaaggctgtgc

SEQ ID NO: 86835 - DNA, 21 bp, Artificial Sequence
  primer
aggcatagagggtgggtaagg

SEQ ID NO: 86836 - DNA, 21 bp, Artificial Sequence
  primer
actggacagcacagctctagg

SEQ ID NO: 86837 - DNA, 37 bp, Artificial Sequence
  primer
gtaaaacgacggccagtaaaccggtgaatggaaggtg

SEQ ID NO: 86838 - DNA, 38 bp, Artificial Sequence
  primer
gtaaaacgacggccagtagcctgggccacagtagtaag

SEQ ID NO: 86839 - DNA, 21 bp, Artificial Sequence
  primer
aaagatggtctttggcccttc

SEQ ID NO: 86840 - DNA, 21 bp, Artificial Sequence
  primer
gaagattggtgagcaatgcag

SEQ ID NO: 86841 - DNA, 35 bp, Artificial Sequence
  primer
gtaaaacgacggccagtgatgatccacccgccttg

SEQ ID NO: 86842 - DNA, 20 bp, Artificial Sequence
  primer
caattattgccttgggttgc

SEQ ID NO: 86843 - DNA, 39 bp, Artificial Sequence
  primer
gtaaaacgacggccagttgacttgtccaaggccattagt

SEQ ID NO: 86844 - DNA, 23 bp, Artificial Sequence
  primer
tcaggtctcactgtatctcaccc

SEQ ID NO: 86845 - DNA, 39 bp, Artificial Sequence
  primer
gtaaaacgacggccagtggcctttaaccattccactttc

SEQ ID NO: 86846 - DNA, 22 bp, Artificial Sequence
  primer
gcacccagaatgagaaatcaac

SEQ ID NO: 86847 - DNA, 38 bp, Artificial Sequence
  primer
gtaaaacgacggccagtccagcctaagcaacagagtga

SEQ ID NO: 86848 - DNA, 24 bp, Artificial Sequence
  primer
caaaggcatcttacagtctcaacc

SEQ ID NO: 86849 - DNA, 37 bp, Artificial Sequence
  primer
gtaaaacgacggccagtgccttcatagggactgctcc

SEQ ID NO: 86850 - DNA, 36 bp, Artificial Sequence
  primer
gtaaaacgacggccagtaggatgggatgtgcctcag

SEQ ID NO: 86851 - DNA, 38 bp, Artificial Sequence
  primer
gtaaaacgacggccagtgtgatgctcaatgctttgctt

SEQ ID NO: 86852 - DNA, 25 bp, Artificial Sequence
  primer
ggattgcagaatgatagctaaagtg

SEQ ID NO: 86853 - DNA, 37 bp, Artificial Sequence
  primer
gtaaaacgacggccagtccctctcaacctcctgcttc

SEQ ID NO: 86854 - DNA, 38 bp, Artificial Sequence
  primer
gtaaaacgacggccagtacacacacttctcatcctgcc

SEQ ID NO: 86855 - DNA, 40 bp, Artificial Sequence
  primer
gtaaaacgacggccagtggagtacaaggaaactctgggtg

SEQ ID NO: 86856 - DNA, 21 bp, Artificial Sequence
  primer
gaagtggcagggagcttctac

SEQ ID NO: 86857 - DNA, 22 bp, Artificial Sequence
  primer
cccagagttcgaggttacagtg

SEQ ID NO: 86858 - DNA, 21 bp, Artificial Sequence
  primer
gacttaggaatccctggtccc

SEQ ID NO: 86859 - DNA, 38 bp, Artificial Sequence
  primer
gtaaaacgacggccagtaagaaagcaggagagccaaag

SEQ ID NO: 86860 - DNA, 40 bp, Artificial Sequence
  primer
gtaaaacgacggccagttctacaatatttgtggcccagtc

SEQ ID NO: 86861 - DNA, 37 bp, Artificial Sequence
  primer
gtaaaacgacggccagtagggtttaggcatgctctcc

SEQ ID NO: 86862 - DNA, 21 bp, Artificial Sequence
  primer
gaacgttctacgggcattagg

SEQ ID NO: 86863 - DNA, 22 bp, Artificial Sequence
  primer
aatgaagaagaaatgacgctgc

SEQ ID NO: 86864 - DNA, 37 bp, Artificial Sequence
  primer
gtaaaacgacggccagtcaaatgaagcttgcctcagc

SEQ ID NO: 86865 - DNA, 21 bp, Artificial Sequence
  primer
acctgctgagtcacattctgc

SEQ ID NO: 86866 - DNA, 37 bp, Artificial Sequence
  primer
gtaaaacgacggccagtctgttgatgctgtccttccc

SEQ ID NO: 86867 - DNA, 40 bp, Artificial Sequence
  primer
gtaaaacgacggccagttctgatatcccaaccaacctacc

SEQ ID NO: 86868 - DNA, 22 bp, Artificial Sequence
  primer
ccttcccaggacctataagttg

SEQ ID NO: 86869 - DNA, 25 bp, Artificial Sequence
  primer
ctaggaaatacctcatttgctttct

SEQ ID NO: 86870 - DNA, 21 bp, Artificial Sequence
  primer
caaggtttcaccactgcactc

SEQ ID NO: 86871 - DNA, 21 bp, Artificial Sequence
  primer
ttgaacccaggtccatctgac

SEQ ID NO: 86872 - DNA, 41 bp, Artificial Sequence
  primer
gtaaaacgacggccagtgaaagtatgattgagtctgtgggc

SEQ ID NO: 86873 - DNA, 38 bp, Artificial Sequence
  primer
gtaaaacgacggccagtatcccatatgaacccaagagg

SEQ ID NO: 86874 - DNA, 38 bp, Artificial Sequence
  primer
gtaaaacgacggccagtcgcatggcttattgaaggaag

SEQ ID NO: 86875 - DNA, 40 bp, Artificial Sequence
  primer
gtaaaacgacggccagtgagggagagatacgagaaactgg

SEQ ID NO: 86876 - DNA, 21 bp, Artificial Sequence
  primer
gcccacactcttaacctctgc

SEQ ID NO: 86877 - DNA, 21 bp, Artificial Sequence
  primer
taaaggctgagggatactgcc

SEQ ID NO: 86878 - DNA, 21 bp, Artificial Sequence
  primer
cattgtgaagctgccagagag

SEQ ID NO: 86879 - DNA, 22 bp, Artificial Sequence
  primer
tctgagtgttaccaatgggttg

SEQ ID NO: 86880 - DNA, 38 bp, Artificial Sequence
  primer
gtaaaacgacggccagtacatcacactgtgccctcatc

SEQ ID NO: 86881 - DNA, 39 bp, Artificial Sequence
  primer
gtaaaacgacggccagttgccagatgcattagtttctcc

SEQ ID NO: 86882 - DNA, 21 bp, Artificial Sequence
  primer
tccaggtgaaataggagccac

SEQ ID NO: 86883 - DNA, 22 bp, Artificial Sequence
  primer
ggtcagggagctactctccttc

SEQ ID NO: 86884 - DNA, 36 bp, Artificial Sequence
  primer
gtaaaacgacggccagtcccaggtccctcctacaac

SEQ ID NO: 86885 - DNA, 21 bp, Artificial Sequence
  primer
aactcaagcacatctttgggc

SEQ ID NO: 86886 - DNA, 38 bp, Artificial Sequence
  primer
gtaaaacgacggccagtaacagcattagagcccaggag

SEQ ID NO: 86887 - DNA, 35 bp, Artificial Sequence
  primer
gtaaaacgacggccagtcttctcgcctcgcctgtc

SEQ ID NO: 86888 - DNA, 21 bp, Artificial Sequence
  primer
cttccgaccgtagtcttcctg

SEQ ID NO: 86889 - DNA, 21 bp, Artificial Sequence
  primer
gcacctctaacaaggtgaacg

SEQ ID NO: 86890 - DNA, 42 bp, Artificial Sequence
  primer
gtaaaacgacggccagttcaactcttgtgtatcaatctccaa

SEQ ID NO: 86891 - DNA, 26 bp, Artificial Sequence
  primer
gacaaatttaatccagcagtagtgag

SEQ ID NO: 86892 - DNA, 40 bp, Artificial Sequence
  primer
gtaaaacgacggccagttccatcctgtatatcacaccacc

SEQ ID NO: 86893 - DNA, 44 bp, Artificial Sequence
  primer
gtaaaacgacggccagtttgtgcttacctcataaattagacatc

SEQ ID NO: 86894 - DNA, 21 bp, Artificial Sequence
  primer
agacaaggactccaccctcag

SEQ ID NO: 86895 - DNA, 25 bp, Artificial Sequence
  primer
tttccaataattccattaagcatgt

SEQ ID NO: 86896 - DNA, 42 bp, Artificial Sequence
  primer
gtaaaacgacggccagttgaagaaattgctaccctttatttg

SEQ ID NO: 86897 - DNA, 39 bp, Artificial Sequence
  primer
gtaaaacgacggccagtgctaaacttatttcccagcagc

SEQ ID NO: 86898 - DNA, 39 bp, Artificial Sequence
  primer
gtaaaacgacggccagtttgaaactaccatttcagtggg

SEQ ID NO: 86899 - DNA, 21 bp, Artificial Sequence
  primer
tgcccagggaagataaatcag

SEQ ID NO: 86900 - DNA, 41 bp, Artificial Sequence
  primer
gtaaaacgacggccagtctcaggtgactagatgaagactgg

SEQ ID NO: 86901 - DNA, 39 bp, Artificial Sequence
  primer
gtaaaacgacggccagtgggatgattcgttgaaactttg

SEQ ID NO: 86902 - DNA, 38 bp, Artificial Sequence
  primer
gtaaaacgacggccagtccctaggcaatgagtgagtcc

SEQ ID NO: 86903 - DNA, 41 bp, Artificial Sequence
  primer
gtaaaacgacggccagtaagaacctttaagacacacatcgg

SEQ ID NO: 86904 - DNA, 38 bp, Artificial Sequence
  primer
gtaaaacgacggccagtgtggctaagcagtcttggacc

SEQ ID NO: 86905 - DNA, 37 bp, Artificial Sequence
  primer
gtaaaacgacggccagtaatccctggtttgggagttg

SEQ ID NO: 86906 - DNA, 43 bp, Artificial Sequence
  primer
gtaaaacgacggccagtgcttcttgttactcaaatattgctgc

SEQ ID NO: 86907 - DNA, 38 bp, Artificial Sequence
  primer
gtaaaacgacggccagtttcttgaacagaccactgctg

SEQ ID NO: 86908 - DNA, 38 bp, Artificial Sequence
  primer
gtaaaacgacggccagtgaaaggagagaaatggatcgc

SEQ ID NO: 86909 - DNA, 21 bp, Artificial Sequence
  primer
gcatggttcctaccctgactc

SEQ ID NO: 86910 - DNA, 37 bp, Artificial Sequence
  primer
gtaaaacgacggccagtctcaagtccagctgtctgcc

SEQ ID NO: 86911 - DNA, 38 bp, Artificial Sequence
  primer
gtaaaacgacggccagtctgcatcctccagtctccttt

SEQ ID NO: 86912 - DNA, 18 bp, Artificial Sequence
  primer
gtgtggaagaaggacggc

SEQ ID NO: 86913 - DNA, 24 bp, Artificial Sequence
  primer
ttagcttatgtacttcctgctccc

SEQ ID NO: 86914 - DNA, 38 bp, Artificial Sequence
  primer
gtaaaacgacggccagtttggccatatggactgtttgt

SEQ ID NO: 86915 - DNA, 21 bp, Artificial Sequence
  primer
tgaaccctgtcacctcgattc

SEQ ID NO: 86916 - DNA, 21 bp, Artificial Sequence
  primer
tgatatttgccagtctcgctc

SEQ ID NO: 86917 - DNA, 21 bp, Artificial Sequence
  primer
cgttaaatcttgcagcgaaac

SEQ ID NO: 86918 - DNA, 21 bp, Artificial Sequence
  primer
aaccagagctggactacccac

SEQ ID NO: 86919 - DNA, 21 bp, Artificial Sequence
  primer
cacactggaaatgagagcgtg

SEQ ID NO: 86920 - DNA, 21 bp, Artificial Sequence
  primer
aggacctcaccttgttatggg

SEQ ID NO: 86921 - DNA, 38 bp, Artificial Sequence
  primer
gtaaaacgacggccagttctcagatcaggcccactctc

SEQ ID NO: 86922 - DNA, 37 bp, Artificial Sequence
  primer
gtaaaacgacggccagtcttcccttccttcctcctgg

SEQ ID NO: 86923 - DNA, 39 bp, Artificial Sequence
  primer
gtaaaacgacggccagtaattgatgggttccaatgtgtc

SEQ ID NO: 86924 - DNA, 21 bp, Artificial Sequence
  primer
gagagtggtgccacaatgaca

SEQ ID NO: 86925 - DNA, 38 bp, Artificial Sequence
  primer
gtaaaacgacggccagtagaatggcagcttactccagg

SEQ ID NO: 86926 - DNA, 25 bp, Artificial Sequence
  primer
ggtagcactgatcgttatgaaattg

SEQ ID NO: 86927 - DNA, 23 bp, Artificial Sequence
  primer
ggaaatgtgaataaaggcaatcc

SEQ ID NO: 86928 - DNA, 41 bp, Artificial Sequence
  primer
gtaaaacgacggccagtgcacacagcatatagtgtccttcc

SEQ ID NO: 86929 - DNA, 23 bp, Artificial Sequence
  primer
tcctgcagtctctttcagcatag

SEQ ID NO: 86930 - DNA, 38 bp, Artificial Sequence
  primer
gtaaaacgacggccagtcatacccaacccacacagatg

SEQ ID NO: 86931 - DNA, 18 bp, Artificial Sequence
  primer
gcctggcgacaaagtgag

SEQ ID NO: 86932 - DNA, 38 bp, Artificial Sequence
  primer
gtaaaacgacggccagtgatccttgaggtgaacttggg

SEQ ID NO: 86933 - DNA, 37 bp, Artificial Sequence
  primer
gtaaaacgacggccagtctaggcacccatacccgttc

SEQ ID NO: 86934 - DNA, 39 bp, Artificial Sequence
  primer
gtaaaacgacggccagtaagatgggatttagtgctgtgc

SEQ ID NO: 86935 - DNA, 26 bp, Artificial Sequence
  primer
tgaaataataccaatggccaaatatc

SEQ ID NO: 86936 - DNA, 21 bp, Artificial Sequence
  primer
ggcccacatagtggttacaag

SEQ ID NO: 86937 - DNA, 21 bp, Artificial Sequence
  primer
aattgtgtgtgtatgctccgc

SEQ ID NO: 86938 - DNA, 38 bp, Artificial Sequence
  primer
gtaaaacgacggccagtggtgagccctgagttatctgc

SEQ ID NO: 86939 - DNA, 24 bp, Artificial Sequence
  primer
ccaaattatgaggaattaaggctc

SEQ ID NO: 86940 - DNA, 40 bp, Artificial Sequence
  primer
gtaaaacgacggccagtttgaagggatgataaatgcaaag

SEQ ID NO: 86941 - DNA, 26 bp, Artificial Sequence
  primer
gggttgaaagttattatgaactcctg

SEQ ID NO: 86942 - DNA, 38 bp, Artificial Sequence
  primer
gtaaaacgacggccagtaggtcttcagttcaattcccg

SEQ ID NO: 86943 - DNA, 21 bp, Artificial Sequence
  primer
acttccacccacccacttatg

SEQ ID NO: 86944 - DNA, 38 bp, Artificial Sequence
  primer
gtaaaacgacggccagtacatccaagcccaattctctg

SEQ ID NO: 86945 - DNA, 26 bp, Artificial Sequence
  primer
tgattgacaatatttataccaaagcc

SEQ ID NO: 86946 - DNA, 38 bp, Artificial Sequence
  primer
gtaaaacgacggccagtggccaattctcatggctttag

SEQ ID NO: 86947 - DNA, 26 bp, Artificial Sequence
  primer
tcagtgttctgtgagtagcttctgta

SEQ ID NO: 86948 - DNA, 21 bp, Artificial Sequence
  primer
ttgaatctttcagcatttccc

SEQ ID NO: 86949 - DNA, 22 bp, Artificial Sequence
  primer
tcagacctatctccaaattgcc

SEQ ID NO: 86950 - DNA, 21 bp, Artificial Sequence
  primer
acatggtttctttgccagacc

SEQ ID NO: 86951 - DNA, 24 bp, Artificial Sequence
  primer
tttgctctgtgtaaactatccagg

SEQ ID NO: 86952 - DNA, 21 bp, Artificial Sequence
  primer
ctcccttacatctctgctggc

SEQ ID NO: 86953 - DNA, 37 bp, Artificial Sequence
  primer
gtaaaacgacggccagttaatcaatgccaaacccacc

SEQ ID NO: 86954 - DNA, 38 bp, Artificial Sequence
  primer
gtaaaacgacggccagttgtatcagtcaactccgaggg

SEQ ID NO: 86955 - DNA, 21 bp, Artificial Sequence
  primer
accctcttgacagcgagaaac

SEQ ID NO: 86956 - DNA, 21 bp, Artificial Sequence
  primer
ctaggccacatgctgtcattc

SEQ ID NO: 86957 - DNA, 21 bp, Artificial Sequence
  primer
agtagactttcccagaggccc

SEQ ID NO: 86958 - DNA, 20 bp, Artificial Sequence
  primer
ctgggaaggaagagtctggg

SEQ ID NO: 86959 - DNA, 38 bp, Artificial Sequence
  primer
gtaaaacgacggccagtcatgatgacacctccctagcc

SEQ ID NO: 86960 - DNA, 37 bp, Artificial Sequence
  primer
gtaaaacgacggccagtagtctggagccacatttccc

SEQ ID NO: 86961 - DNA, 38 bp, Artificial Sequence
  primer
gtaaaacgacggccagtgccaattcccacagagacatc

SEQ ID NO: 86962 - DNA, 39 bp, Artificial Sequence
  primer
gtaaaacgacggccagtaagttcactgcttctgaaaccc

SEQ ID NO: 86963 - DNA, 21 bp, Artificial Sequence
  primer
tgagatagcactgatgcccag

SEQ ID NO: 86964 - DNA, 22 bp, Artificial Sequence
  primer
gaccatttcctcccatcctatc

SEQ ID NO: 86965 - DNA, 38 bp, Artificial Sequence
  primer
gtaaaacgacggccagtggaaacatagctggcccatag

SEQ ID NO: 86966 - DNA, 39 bp, Artificial Sequence
  primer
gtaaaacgacggccagtctcaggccatataaagtcaccc

SEQ ID NO: 86967 - DNA, 37 bp, Artificial Sequence
  primer
gtaaaacgacggccagtcactagggcaagttgcttgg

SEQ ID NO: 86968 - DNA, 38 bp, Artificial Sequence
  primer
gtaaaacgacggccagtagttcagcttcggtctatggg

SEQ ID NO: 86969 - DNA, 38 bp, Artificial Sequence
  primer
gtaaaacgacggccagtcttagcttcccacaaattggc

SEQ ID NO: 86970 - DNA, 21 bp, Artificial Sequence
  primer
ggtgggtcctcactgaaactc

SEQ ID NO: 86971 - DNA, 39 bp, Artificial Sequence
  primer
gtaaaacgacggccagtcactgtttctgagattggatgg

SEQ ID NO: 86972 - DNA, 38 bp, Artificial Sequence
  primer
gtaaaacgacggccagttttcatcaaatgtgggaatgc

SEQ ID NO: 86973 - DNA, 40 bp, Artificial Sequence
  primer
gtaaaacgacggccagttcattcaatctccaaggatctga

SEQ ID NO: 86974 - DNA, 44 bp, Artificial Sequence
  primer
gtaaaacgacggccagttgtaccatgatgtaggtgttgttattc

SEQ ID NO: 86975 - DNA, 20 bp, Artificial Sequence
  primer
ggaggagtgggtgacatttg

SEQ ID NO: 86976 - DNA, 23 bp, Artificial Sequence
  primer
tgttcaatgagcacatatccatc

SEQ ID NO: 86977 - DNA, 40 bp, Artificial Sequence
  primer
gtaaaacgacggccagtgggagatttctagggaatttctg

SEQ ID NO: 86978 - DNA, 39 bp, Artificial Sequence
  primer
gtaaaacgacggccagttgaaactgatgtaacgcaggac

SEQ ID NO: 86979 - DNA, 20 bp, Artificial Sequence
  primer
ctgggatttctgccatcctc

SEQ ID NO: 86980 - DNA, 23 bp, Artificial Sequence
  primer
tcatagtgacctgccttcctatc

SEQ ID NO: 86981 - DNA, 23 bp, Artificial Sequence
  primer
cctggctacccagagagatattg

SEQ ID NO: 86982 - DNA, 21 bp, Artificial Sequence
  primer
cccagggaactggaatcatag

SEQ ID NO: 86983 - DNA, 38 bp, Artificial Sequence
  primer
gtaaaacgacggccagtcatgctcccagagagtatccc

SEQ ID NO: 86984 - DNA, 21 bp, Artificial Sequence
  primer
acacaaattacaggccttccc

SEQ ID NO: 86985 - DNA, 21 bp, Artificial Sequence
  primer
catgcaatttcctccaaattc

SEQ ID NO: 86986 - DNA, 26 bp, Artificial Sequence
  primer
tgcataatttcataaagtgattgaag

SEQ ID NO: 86987 - DNA, 22 bp, Artificial Sequence
  primer
ggcccatctatactgaatttcc

SEQ ID NO: 86988 - DNA, 39 bp, Artificial Sequence
  primer
gtaaaacgacggccagtcagctgggtaacatttaatggg

SEQ ID NO: 86989 - DNA, 21 bp, Artificial Sequence
  primer
cctgggtgatgaaataacgtg

SEQ ID NO: 86990 - DNA, 37 bp, Artificial Sequence
  primer
gtaaaacgacggccagttcccaagctttggcatagtg

SEQ ID NO: 86991 - DNA, 39 bp, Artificial Sequence
  primer
gtaaaacgacggccagtcaagaacatgggaagtttgacc

SEQ ID NO: 86992 - DNA, 36 bp, Artificial Sequence
  primer
gtaaaacgacggccagtcctttctatgcctggaggg

SEQ ID NO: 86993 - DNA, 21 bp, Artificial Sequence
  primer
accgtcctctctctttgatgc

SEQ ID NO: 86994 - DNA, 38 bp, Artificial Sequence
  primer
gtaaaacgacggccagtgcccttgtcacctcttctctc

SEQ ID NO: 86995 - DNA, 38 bp, Artificial Sequence
  primer
gtaaaacgacggccagttctcctagaagccctggattg

SEQ ID NO: 86996 - DNA, 38 bp, Artificial Sequence
  primer
gtaaaacgacggccagtctttggctgctagctcctctg

SEQ ID NO: 86997 - DNA, 38 bp, Artificial Sequence
  primer
gtaaaacgacggccagttttgtcctcttcctcctctgg

SEQ ID NO: 86998 - DNA, 21 bp, Artificial Sequence
  primer
ccacctccgtgtagaacttcc

SEQ ID NO: 86999 - DNA, 38 bp, Artificial Sequence
  primer
gtaaaacgacggccagttgtcctagccctgaggtcttc

SEQ ID NO: 87000 - DNA, 38 bp, Artificial Sequence
  primer
gtaaaacgacggccagtcgcttaaactcactgtctgcc

SEQ ID NO: 87001 - DNA, 38 bp, Artificial Sequence
  primer
gtaaaacgacggccagtaccaataaagggacaagccag

SEQ ID NO: 87002 - DNA, 37 bp, Artificial Sequence
  primer
gtaaaacgacggccagttcatgaattggaatcccagg

SEQ ID NO: 87003 - DNA, 21 bp, Artificial Sequence
  primer
gcagctgctcccaactttaac

SEQ ID NO: 87004 - DNA, 21 bp, Artificial Sequence
  primer
ctgggattacgggaatcagtc

SEQ ID NO: 87005 - DNA, 21 bp, Artificial Sequence
  primer
gaaggttcatcagcctatgcc

SEQ ID NO: 87006 - DNA, 21 bp, Artificial Sequence
  primer
gcagctgctcccaactttaac

SEQ ID NO: 87007 - DNA, 21 bp, Artificial Sequence
  primer
caaacttacccaacctccctg

SEQ ID NO: 87008 - DNA, 21 bp, Artificial Sequence
  primer
gcagctgctcccaactttaac

SEQ ID NO: 87009 - DNA, 20 bp, Artificial Sequence
  primer
tgtggctggtctgaactgag

SEQ ID NO: 87010 - DNA, 40 bp, Artificial Sequence
  primer
gtaaaacgacggccagttggtaggatgtgtcttgttggag

SEQ ID NO: 87011 - DNA, 21 bp, Artificial Sequence
  primer
ctgtcctagctggaggcagac

SEQ ID NO: 87012 - DNA, 19 bp, Artificial Sequence
  primer
gtcttgtcctgctggaggc

SEQ ID NO: 87013 - DNA, 20 bp, Artificial Sequence
  primer
cctcaggctagaggtttggg

SEQ ID NO: 87014 - DNA, 21 bp, Artificial Sequence
  primer
gcagatatgggttatgggtgg

SEQ ID NO: 87015 - DNA, 38 bp, Artificial Sequence
  primer
gtaaaacgacggccagttggcctgtctccatagacttg

SEQ ID NO: 87016 - DNA, 21 bp, Artificial Sequence
  primer
ctagacacagcctcccactcc

SEQ ID NO: 87017 - DNA, 38 bp, Artificial Sequence
  primer
gtaaaacgacggccagtaagagatgcagcagagttggg

SEQ ID NO: 87018 - DNA, 40 bp, Artificial Sequence
  primer
gtaaaacgacggccagtagaggcaaacaagataaatgtgc

SEQ ID NO: 87019 - DNA, 21 bp, Artificial Sequence
  primer
ggaggttcaaggtggtagagg

SEQ ID NO: 87020 - DNA, 38 bp, Artificial Sequence
  primer
gtaaaacgacggccagtgaaagaaagagagctgcctgg

SEQ ID NO: 87021 - DNA, 24 bp, Artificial Sequence
  primer
tcgtaacactacctcctgtctttg

SEQ ID NO: 87022 - DNA, 40 bp, Artificial Sequence
  primer
gtaaaacgacggccagtgccaagagtaaagctatgaaccc

SEQ ID NO: 87023 - DNA, 40 bp, Artificial Sequence
  primer
gtaaaacgacggccagtgaagtggcagttctgtgactgac

SEQ ID NO: 87024 - DNA, 40 bp, Artificial Sequence
  primer
gtaaaacgacggccagtccctcactatgtacgtcaaccct

SEQ ID NO: 87025 - DNA, 38 bp, Artificial Sequence
  primer
gtaaaacgacggccagtaactctgggagcatgagttcg

SEQ ID NO: 87026 - DNA, 38 bp, Artificial Sequence
  primer
gtaaaacgacggccagtagaaggtcacatcatcctggc

SEQ ID NO: 87027 - DNA, 39 bp, Artificial Sequence
  primer
gtaaaacgacggccagttcagtgcagcctcttcctagtc

SEQ ID NO: 87028 - DNA, 22 bp, Artificial Sequence
  primer
gcaacccttccattctagttcc

SEQ ID NO: 87029 - DNA, 19 bp, Artificial Sequence
  primer
gactttgccacttggcctg

SEQ ID NO: 87030 - DNA, 21 bp, Artificial Sequence
  primer
catgagaagagatgctctggg

SEQ ID NO: 87031 - DNA, 38 bp, Artificial Sequence
  primer
gtaaaacgacggccagtgagagactgcacatctcccag

SEQ ID NO: 87032 - DNA, 19 bp, Artificial Sequence
  primer
atgctgggatagtggtggc

SEQ ID NO: 87033 - DNA, 39 bp, Artificial Sequence
  primer
gtaaaacgacggccagttccaggtttgtatttctggacc

SEQ ID NO: 87034 - DNA, 20 bp, Artificial Sequence
  primer
atgtggacttgcagctggtg

SEQ ID NO: 87035 - DNA, 21 bp, Artificial Sequence
  primer
gagtactcctctgccacggac

SEQ ID NO: 87036 - DNA, 21 bp, Artificial Sequence
  primer
gaacagagggacagcacacac

SEQ ID NO: 87037 - DNA, 38 bp, Artificial Sequence
  primer
gtaaaacgacggccagtggagacggctaagttccacac

SEQ ID NO: 87038 - DNA, 21 bp, Artificial Sequence
  primer
ttgttccctcaggcaagtctc

SEQ ID NO: 87039 - DNA, 38 bp, Artificial Sequence
  primer
gtaaaacgacggccagttccacaaagatccctctctcc

SEQ ID NO: 87040 - DNA, 38 bp, Artificial Sequence
  primer
gtaaaacgacggccagtagggaagatcaaaggcaacag

SEQ ID NO: 87041 - DNA, 37 bp, Artificial Sequence
  primer
gtaaaacgacggccagtagtccagggttccaagttgc

SEQ ID NO: 87042 - DNA, 38 bp, Artificial Sequence
  primer
gtaaaacgacggccagtgtgagggaacctgagctatcg

SEQ ID NO: 87043 - DNA, 38 bp, Artificial Sequence
  primer
gtaaaacgacggccagtgaactcaccctttcttcctcc

SEQ ID NO: 87044 - DNA, 38 bp, Artificial Sequence
  primer
gtaaaacgacggccagtggtattgtagggtggagaggg

SEQ ID NO: 87045 - DNA, 38 bp, Artificial Sequence
  primer
gtaaaacgacggccagtctggacagggacacaagaaag

SEQ ID NO: 87046 - DNA, 21 bp, Artificial Sequence
  primer
aggtaggagggaaagggacac

SEQ ID NO: 87047 - DNA, 23 bp, Artificial Sequence
  primer
tcctaaataccgacttgatcgtt

SEQ ID NO: 87048 - DNA, 38 bp, Artificial Sequence
  primer
gtaaaacgacggccagtttgtgccagtgtgtaagttgc

SEQ ID NO: 87049 - DNA, 21 bp, Artificial Sequence
  primer
acatagtacttggtgtgcggc

SEQ ID NO: 87050 - DNA, 21 bp, Artificial Sequence
  primer
actctccacccaaaccttcac

SEQ ID NO: 87051 - DNA, 21 bp, Artificial Sequence
  primer
agcagcaacaaagaaagttcg

SEQ ID NO: 87052 - DNA, 20 bp, Artificial Sequence
  primer
gacaggagaggccactacgc

SEQ ID NO: 87053 - DNA, 41 bp, Artificial Sequence
  primer
gtaaaacgacggccagtcccaaggaagctgtttaaataatg

SEQ ID NO: 87054 - DNA, 39 bp, Artificial Sequence
  primer
gtaaaacgacggccagtaacagaagggaataaaggagca

SEQ ID NO: 87055 - DNA, 27 bp, Artificial Sequence
  primer
agatcagaacatctttaattctgaagg

SEQ ID NO: 87056 - DNA, 21 bp, Artificial Sequence
  primer
ccaagattgtcactgcactcc

SEQ ID NO: 87057 - DNA, 21 bp, Artificial Sequence
  primer
agcctcaagctggtgaagaac

SEQ ID NO: 87058 - DNA, 25 bp, Artificial Sequence
  primer
tgcaaagttggatttaacatagctc

SEQ ID NO: 87059 - DNA, 44 bp, Artificial Sequence
  primer
gtaaaacgacggccagtgaacctatgctttatagtatcccaaag

SEQ ID NO: 87060 - DNA, 42 bp, Artificial Sequence
  primer
gtaaaacgacggccagtttacaatgtcattcaggtaatggag

SEQ ID NO: 87061 - DNA, 45 bp, Artificial Sequence
  primer
gtaaaacgacggccagtaatacaattctgaactgcaactatgttt

SEQ ID NO: 87062 - DNA, 27 bp, Artificial Sequence
  primer
ccctaaatcagacttctcttaacacac

SEQ ID NO: 87063 - DNA, 44 bp, Artificial Sequence
  primer
gtaaaacgacggccagttgcatcattcaataattctatggacta

SEQ ID NO: 87064 - DNA, 39 bp, Artificial Sequence
  primer
gtaaaacgacggccagtaaacacaaggaacaaaggtttc

SEQ ID NO: 87065 - DNA, 18 bp, Artificial Sequence
  primer
accgcacctggcctactc

SEQ ID NO: 87066 - DNA, 37 bp, Artificial Sequence
  primer
gtaaaacgacggccagtggctgttgatacatgctccc

SEQ ID NO: 87067 - DNA, 40 bp, Artificial Sequence
  primer
gtaaaacgacggccagtggtgactttccaagatacttcca

SEQ ID NO: 87068 - DNA, 46 bp, Artificial Sequence
  primer
gtaaaacgacggccagtaattagagaagagactaagaaataaggca

SEQ ID NO: 87069 - DNA, 26 bp, Artificial Sequence
  primer
tggattacctatccttgttgtctagg

SEQ ID NO: 87070 - DNA, 26 bp, Artificial Sequence
  primer
tgtgactcattcttgttatcaaacta

SEQ ID NO: 87071 - DNA, 24 bp, Artificial Sequence
  primer
ggaatcttcctcagtttctgattg

SEQ ID NO: 87072 - DNA, 39 bp, Artificial Sequence
  primer
gtaaaacgacggccagttcccattagaaagcctgcttag

SEQ ID NO: 87073 - DNA, 18 bp, Artificial Sequence
  primer
gggcaggaaacccgactc

SEQ ID NO: 87074 - DNA, 22 bp, Artificial Sequence
  primer
tttgagcatgaaacgacttcag

SEQ ID NO: 87075 - DNA, 38 bp, Artificial Sequence
  primer
gtaaaacgacggccagttgtaggaaggagagggcacac

SEQ ID NO: 87076 - DNA, 39 bp, Artificial Sequence
  primer
gtaaaacgacggccagttcacagagaaacactgctccag

SEQ ID NO: 87077 - DNA, 38 bp, Artificial Sequence
  primer
gtaaaacgacggccagttggctcatctgtggctctttc

SEQ ID NO: 87078 - DNA, 21 bp, Artificial Sequence
  primer
gtgcccagtagtttcctgacc

SEQ ID NO: 87079 - DNA, 23 bp, Artificial Sequence
  primer
gggaagggaatatcaacaacaac

SEQ ID NO: 87080 - DNA, 21 bp, Artificial Sequence
  primer
tgatcacctcctcccaatttc

SEQ ID NO: 87081 - DNA, 38 bp, Artificial Sequence
  primer
gtaaaacgacggccagtggaagaaaggctggatgaatg

SEQ ID NO: 87082 - DNA, 21 bp, Artificial Sequence
  primer
aaagagacgcgacgtatttcc

SEQ ID NO: 87083 - DNA, 21 bp, Artificial Sequence
  primer
tggacttgggagagaaaggag

SEQ ID NO: 87084 - DNA, 38 bp, Artificial Sequence
  primer
gtaaaacgacggccagtcctccctggtctagtctgctg

SEQ ID NO: 87085 - DNA, 21 bp, Artificial Sequence
  primer
ctgtctgtctccctccctcac

SEQ ID NO: 87086 - DNA, 38 bp, Artificial Sequence
  primer
gtaaaacgacggccagtagtgatgggttctggctcttc

SEQ ID NO: 87087 - DNA, 38 bp, Artificial Sequence
  primer
gtaaaacgacggccagtctgcctacctctggaaatccc

SEQ ID NO: 87088 - DNA, 38 bp, Artificial Sequence
  primer
gtaaaacgacggccagtctgggaaactctcctgaccac

SEQ ID NO: 87089 - DNA, 38 bp, Artificial Sequence
  primer
gtaaaacgacggccagtatgccctgtatgcatttcctc

SEQ ID NO: 87090 - DNA, 20 bp, Artificial Sequence
  primer
tttcctaaacctgccttgcc

SEQ ID NO: 87091 - DNA, 20 bp, Artificial Sequence
  primer
ataagcggttgccaatttcc

SEQ ID NO: 87092 - DNA, 24 bp, Artificial Sequence
  primer
cattagaaatgagggcattaaacc

SEQ ID NO: 87093 - DNA, 41 bp, Artificial Sequence
  primer
gtaaaacgacggccagtgtaaaccacactgctgaacataca

SEQ ID NO: 87094 - DNA, 24 bp, Artificial Sequence
  primer
tggagaccttacagaaagaaacca

SEQ ID NO: 87095 - DNA, 25 bp, Artificial Sequence
  primer
cttattctctgataaagacatcggc

SEQ ID NO: 87096 - DNA, 23 bp, Artificial Sequence
  primer
gcgatggatacacagagactcac

SEQ ID NO: 87097 - DNA, 22 bp, Artificial Sequence
  primer
cataccttaggccaatgtcaaa

SEQ ID NO: 87098 - DNA, 27 bp, Artificial Sequence
  primer
aaattacaacagataccacgtaagatt

SEQ ID NO: 87099 - DNA, 22 bp, Artificial Sequence
  primer
tgtcttgtctgttgacgaaagg

SEQ ID NO: 87100 - DNA, 21 bp, Artificial Sequence
  primer
cacctcaggttcataggagga

SEQ ID NO: 87101 - DNA, 45 bp, Artificial Sequence
  primer
gtaaaacgacggccagtgaggatcagactcattagagaagattta

SEQ ID NO: 87102 - DNA, 24 bp, Artificial Sequence
  primer
cagaaatttcctatgtgtgaatgc

SEQ ID NO: 87103 - DNA, 20 bp, Artificial Sequence
  primer
atctgtgcgtacacccattg

SEQ ID NO: 87104 - DNA, 38 bp, Artificial Sequence
  primer
gtaaaacgacggccagtaaagctcccaaaccagctaag

SEQ ID NO: 87105 - DNA, 35 bp, Artificial Sequence
  primer
gtaaaacgacggccagttttcctggatcggctgag

SEQ ID NO: 87106 - DNA, 39 bp, Artificial Sequence
  primer
gtaaaacgacggccagtgccatgacagttgtctaatccc

SEQ ID NO: 87107 - DNA, 36 bp, Artificial Sequence
  primer
gtaaaacgacggccagttgcatgcaaagcagtcctc

SEQ ID NO: 87108 - DNA, 19 bp, Artificial Sequence
  primer
tttcacttgcctggccttc

SEQ ID NO: 87109 - DNA, 39 bp, Artificial Sequence
  primer
gtaaaacgacggccagtacatttaatgaaacctgggagc

SEQ ID NO: 87110 - DNA, 39 bp, Artificial Sequence
  primer
gtaaaacgacggccagttttcgtttccactcatgaacag

SEQ ID NO: 87111 - DNA, 37 bp, Artificial Sequence
  primer
gtaaaacgacggccagtcaacggagtgagaccctgtc

SEQ ID NO: 87112 - DNA, 21 bp, Artificial Sequence
  primer
ccactggtttcatgctctttg

SEQ ID NO: 87113 - DNA, 41 bp, Artificial Sequence
  primer
gtaaaacgacggccagttttatcattcatttcaagtgagca

SEQ ID NO: 87114 - DNA, 21 bp, Artificial Sequence
  primer
atggagacatgttcatggcaa

SEQ ID NO: 87115 - DNA, 23 bp, Artificial Sequence
  primer
ccatttccctccaataatgagtc

SEQ ID NO: 87116 - DNA, 21 bp, Artificial Sequence
  primer
caagtgggtatgcttactggc

SEQ ID NO: 87117 - DNA, 39 bp, Artificial Sequence
  primer
gtaaaacgacggccagtattcaatgacttacatgccagc

SEQ ID NO: 87118 - DNA, 38 bp, Artificial Sequence
  primer
gtaaaacgacggccagtttcaatgaagcgtatgcattt

SEQ ID NO: 87119 - DNA, 41 bp, Artificial Sequence
  primer
gtaaaacgacggccagtaatttatcttcacatcccaggaaa

SEQ ID NO: 87120 - DNA, 27 bp, Artificial Sequence
  primer
aattatcctttacctactgttgtctgc

SEQ ID NO: 87121 - DNA, 22 bp, Artificial Sequence
  primer
ttgaaacgtcaaattgcacatc

SEQ ID NO: 87122 - DNA, 38 bp, Artificial Sequence
  primer
gtaaaacgacggccagttcatgctataaagtgccacgg

SEQ ID NO: 87123 - DNA, 44 bp, Artificial Sequence
  primer
gtaaaacgacggccagttccactatgtttgagaactcctactct

SEQ ID NO: 87124 - DNA, 18 bp, Artificial Sequence
  primer
accaccaccaagtgctgc

SEQ ID NO: 87125 - DNA, 42 bp, Artificial Sequence
  primer
gtaaaacgacggccagtaatgagactgtcagtaataggcgat

SEQ ID NO: 87126 - DNA, 23 bp, Artificial Sequence
  primer
gggctaggtttgtctacttctcc

SEQ ID NO: 87127 - DNA, 21 bp, Artificial Sequence
  primer
ttcctcgtgtaatgccaacag

SEQ ID NO: 87128 - DNA, 25 bp, Artificial Sequence
  primer
cactcaagatatccaagcaattgag

SEQ ID NO: 87129 - DNA, 39 bp, Artificial Sequence
  primer
gtaaaacgacggccagtccttgggacatgattaacaacc

SEQ ID NO: 87130 - DNA, 37 bp, Artificial Sequence
  primer
gtaaaacgacggccagtagtgagaccctgtcacgcac

SEQ ID NO: 87131 - DNA, 41 bp, Artificial Sequence
  primer
gtaaaacgacggccagtttctaatttggctgcggtaataag

SEQ ID NO: 87132 - DNA, 44 bp, Artificial Sequence
  primer
gtaaaacgacggccagttcagaaatcagaaatgagaggtagatg

SEQ ID NO: 87133 - DNA, 40 bp, Artificial Sequence
  primer
gtaaaacgacggccagtaaccagccatttcatacagtctc

SEQ ID NO: 87134 - DNA, 43 bp, Artificial Sequence
  primer
gtaaaacgacggccagtaattatatggtacatttggactgcac

SEQ ID NO: 87135 - DNA, 18 bp, Artificial Sequence
  primer
gactgtgccactgcaccc

SEQ ID NO: 87136 - DNA, 24 bp, Artificial Sequence
  primer
ttcgaagtgtcaaacagaactagc

SEQ ID NO: 87137 - DNA, 39 bp, Artificial Sequence
  primer
gtaaaacgacggccagttctctagggcctggtactttcc

SEQ ID NO: 87138 - DNA, 22 bp, Artificial Sequence
  primer
aaacaaggcagcttgtgatttc

SEQ ID NO: 87139 - DNA, 38 bp, Artificial Sequence
  primer
gtaaaacgacggccagtggttctgtcccagtcgcttag

SEQ ID NO: 87140 - DNA, 39 bp, Artificial Sequence
  primer
gtaaaacgacggccagtgcttcatgtcagcctaccactc

SEQ ID NO: 87141 - DNA, 43 bp, Artificial Sequence
  primer
gtaaaacgacggccagtgggaacaagtattgatgttcactatg

SEQ ID NO: 87142 - DNA, 21 bp, Artificial Sequence
  primer
atgcgtctcacttgtcattgg

SEQ ID NO: 87143 - DNA, 22 bp, Artificial Sequence
  primer
ccatattgacataagggaaggg

SEQ ID NO: 87144 - DNA, 38 bp, Artificial Sequence
  primer
gtaaaacgacggccagtgcaacctgctaatgcacacag

SEQ ID NO: 87145 - DNA, 21 bp, Artificial Sequence
  primer
aagcccttccaatgggtttag

SEQ ID NO: 87146 - DNA, 20 bp, Artificial Sequence
  primer
cgcacacagctgtcaggtag

SEQ ID NO: 87147 - DNA, 38 bp, Artificial Sequence
  primer
gtaaaacgacggccagttagctggaaggatcccatttc

SEQ ID NO: 87148 - DNA, 36 bp, Artificial Sequence
  primer
gtaaaacgacggccagtgctgcccaagtttggtgac

SEQ ID NO: 87149 - DNA, 21 bp, Artificial Sequence
  primer
tcttccttgcctccgatctac

SEQ ID NO: 87150 - DNA, 22 bp, Artificial Sequence
  primer
aggtacgagtggtcgtatttgg

SEQ ID NO: 87151 - DNA, 38 bp, Artificial Sequence
  primer
gtaaaacgacggccagtttctccgagttgctgtggtag

SEQ ID NO: 87152 - DNA, 37 bp, Artificial Sequence
  primer
gtaaaacgacggccagtgcttccttccttcatctggc

SEQ ID NO: 87153 - DNA, 21 bp, Artificial Sequence
  primer
ttctgttaagggaggaggctg

SEQ ID NO: 87154 - DNA, 22 bp, Artificial Sequence
  primer
tgcaagagcacctgaaactagg

SEQ ID NO: 87155 - DNA, 38 bp, Artificial Sequence
  primer
gtaaaacgacggccagtcctggccaacagtcctatacc

SEQ ID NO: 87156 - DNA, 38 bp, Artificial Sequence
  primer
gtaaaacgacggccagtattgctcctgtgctttgactg

SEQ ID NO: 87157 - DNA, 21 bp, Artificial Sequence
  primer
gctgtcacatgggagtagtgg

SEQ ID NO: 87158 - DNA, 20 bp, Artificial Sequence
  primer
ctcagtgacaggcttccagg

SEQ ID NO: 87159 - DNA, 38 bp, Artificial Sequence
  primer
gtaaaacgacggccagtgctagaaagggatgagcttgc

SEQ ID NO: 87160 - DNA, 21 bp, Artificial Sequence
  primer
atggtcaccttgaattcagcc

SEQ ID NO: 87161 - DNA, 20 bp, Artificial Sequence
  primer
gtcagtgcccatcatgttcc

SEQ ID NO: 87162 - DNA, 19 bp, Artificial Sequence
  primer
cttggcgtaccaggtgagg

SEQ ID NO: 87163 - DNA, 37 bp, Artificial Sequence
  primer
gtaaaacgacggccagtactccagccttcgtcctcag

SEQ ID NO: 87164 - DNA, 18 bp, Artificial Sequence
  primer
gagcaatcgagcccagtg

SEQ ID NO: 87165 - DNA, 37 bp, Artificial Sequence
  primer
gtaaaacgacggccagtatgaagacagtacggcaggg

SEQ ID NO: 87166 - DNA, 20 bp, Artificial Sequence
  primer
ctctctacgcggtgatgctg

SEQ ID NO: 87167 - DNA, 20 bp, Artificial Sequence
  primer
gtaaagtagggcaggccacc

SEQ ID NO: 87168 - DNA, 21 bp, Artificial Sequence
  primer
agaccaatggcagtcagtcac

SEQ ID NO: 87169 - DNA, 37 bp, Artificial Sequence
  primer
gtaaaacgacggccagtcagagccacttccacaggag

SEQ ID NO: 87170 - DNA, 38 bp, Artificial Sequence
  primer
gtaaaacgacggccagtaactaggtcatccaggctccc

SEQ ID NO: 87171 - DNA, 20 bp, Artificial Sequence
  primer
ctcttgggtctcctcgtcag

SEQ ID NO: 87172 - DNA, 21 bp, Artificial Sequence
  primer
gaagaggccttctctcgtcag

SEQ ID NO: 87173 - DNA, 39 bp, Artificial Sequence
  primer
gtaaaacgacggccagtgcaaacacggttacaggaagac

SEQ ID NO: 87174 - DNA, 21 bp, Artificial Sequence
  primer
atctcctcctgtgctactggg

SEQ ID NO: 87175 - DNA, 38 bp, Artificial Sequence
  primer
gtaaaacgacggccagtggtcaccatccagtgagtagc

SEQ ID NO: 87176 - DNA, 37 bp, Artificial Sequence
  primer
gtaaaacgacggccagtcctagcagcctgggacctac

SEQ ID NO: 87177 - DNA, 38 bp, Artificial Sequence
  primer
gtaaaacgacggccagtctcaccaaacatcaaacctgc

SEQ ID NO: 87178 - DNA, 19 bp, Artificial Sequence
  primer
ctgcggttcacctcctttc

SEQ ID NO: 87179 - DNA, 38 bp, Artificial Sequence
  primer
gtaaaacgacggccagtcaccctgtccaaactggaatc

SEQ ID NO: 87180 - DNA, 38 bp, Artificial Sequence
  primer
gtaaaacgacggccagtcggattgctaacgtcttctcc

SEQ ID NO: 87181 - DNA, 21 bp, Artificial Sequence
  primer
ctctctgagtccagggcattg

SEQ ID NO: 87182 - DNA, 20 bp, Artificial Sequence
  primer
cactaggctcccatgtccag

SEQ ID NO: 87183 - DNA, 38 bp, Artificial Sequence
  primer
gtaaaacgacggccagtgggtgtcttccatcagagcag

SEQ ID NO: 87184 - DNA, 38 bp, Artificial Sequence
  primer
gtaaaacgacggccagtaaaggaagcagcaaggtaggg

SEQ ID NO: 87185 - DNA, 20 bp, Artificial Sequence
  primer
tcttcccgcttcttgaggac

SEQ ID NO: 87186 - DNA, 21 bp, Artificial Sequence
  primer
cagctaagaatgtggaggtcg

SEQ ID NO: 87187 - DNA, 38 bp, Artificial Sequence
  primer
gtaaaacgacggccagtatccatgaactctctgctgcc

SEQ ID NO: 87188 - DNA, 21 bp, Artificial Sequence
  primer
gagaatgagagaggcacaggg

SEQ ID NO: 87189 - DNA, 21 bp, Artificial Sequence
  primer
ttcagctcctgttccacttcc

SEQ ID NO: 87190 - DNA, 38 bp, Artificial Sequence
  primer
gtaaaacgacggccagttttgccttggtaaaccacttc

SEQ ID NO: 87191 - DNA, 22 bp, Artificial Sequence
  primer
catatatgccttctgcctgtgg

SEQ ID NO: 87192 - DNA, 22 bp, Artificial Sequence
  primer
gctttgtattcaaacctgggtc

SEQ ID NO: 87193 - DNA, 39 bp, Artificial Sequence
  primer
gtaaaacgacggccagtccggttgatttaggtacaaacc

SEQ ID NO: 87194 - DNA, 20 bp, Artificial Sequence
  primer
gtggccagtactgctgattg

SEQ ID NO: 87195 - DNA, 21 bp, Artificial Sequence
  primer
caaagtgcaattcgctttacg

SEQ ID NO: 87196 - DNA, 21 bp, Artificial Sequence
  primer
aaggagtcaaagcccggatag

SEQ ID NO: 87197 - DNA, 38 bp, Artificial Sequence
  primer
gtaaaacgacggccagttaactaaggctttgccagcag

SEQ ID NO: 87198 - DNA, 21 bp, Artificial Sequence
  primer
ctactagccagggatgtgcag

SEQ ID NO: 87199 - DNA, 38 bp, Artificial Sequence
  primer
gtaaaacgacggccagttggccaaagaccttaggaaag

SEQ ID NO: 87200 - DNA, 39 bp, Artificial Sequence
  primer
gtaaaacgacggccagttgctttatgaaggtcactgcac

SEQ ID NO: 87201 - DNA, 38 bp, Artificial Sequence
  primer
gtaaaacgacggccagtgatggatacagtctgggcctg

SEQ ID NO: 87202 - DNA, 21 bp, Artificial Sequence
  primer
gcaggacgccctctatacatc

SEQ ID NO: 87203 - DNA, 38 bp, Artificial Sequence
  primer
gtaaaacgacggccagtagggactaaatgaagtccggg

SEQ ID NO: 87204 - DNA, 38 bp, Artificial Sequence
  primer
gtaaaacgacggccagtctcaacaggacacctctgtgg

SEQ ID NO: 87205 - DNA, 21 bp, Artificial Sequence
  primer
tgttggacgtagtgctggaag

SEQ ID NO: 87206 - DNA, 38 bp, Artificial Sequence
  primer
gtaaaacgacggccagttagggagcttcggtgtctagg

SEQ ID NO: 87207 - DNA, 40 bp, Artificial Sequence
  primer
gtaaaacgacggccagtggaaattgtggaataggaggaac

SEQ ID NO: 87208 - DNA, 22 bp, Artificial Sequence
  primer
aagagcgtactggaaattgtgg

SEQ ID NO: 87209 - DNA, 37 bp, Artificial Sequence
  primer
gtaaaacgacggccagtgcaccgttaattctgccaag

SEQ ID NO: 87210 - DNA, 18 bp, Artificial Sequence
  primer
agaaattccctgggcctc

SEQ ID NO: 87211 - DNA, 41 bp, Artificial Sequence
  primer
gtaaaacgacggccagttcacttatctccacgtagagcctt

SEQ ID NO: 87212 - DNA, 40 bp, Artificial Sequence
  primer
gtaaaacgacggccagtcaaagggagaatatccttgatgc

SEQ ID NO: 87213 - DNA, 25 bp, Artificial Sequence
  primer
aagatttatttaaaggaccgctgag

SEQ ID NO: 87214 - DNA, 21 bp, Artificial Sequence
  primer
actgatgggctttgtgtcaat

SEQ ID NO: 87215 - DNA, 21 bp, Artificial Sequence
  primer
gcattctctgtatcccttgcc

SEQ ID NO: 87216 - DNA, 38 bp, Artificial Sequence
  primer
gtaaaacgacggccagtatcttggccactaggatcagc

SEQ ID NO: 87217 - DNA, 21 bp, Artificial Sequence
  primer
tcctggatcagaccctagacc

SEQ ID NO: 87218 - DNA, 38 bp, Artificial Sequence
  primer
gtaaaacgacggccagtatgcaattcctgctttccttc

SEQ ID NO: 87219 - DNA, 21 bp, Artificial Sequence
  primer
agggtctgctggtgtctcttc

SEQ ID NO: 87220 - DNA, 38 bp, Artificial Sequence
  primer
gtaaaacgacggccagtgataaccagtacacgggtggc

SEQ ID NO: 87221 - DNA, 38 bp, Artificial Sequence
  primer
gtaaaacgacggccagtcggacctgtcccttcactatg

SEQ ID NO: 87222 - DNA, 37 bp, Artificial Sequence
  primer
gtaaaacgacggccagtgacccaagtcctccttcctg

SEQ ID NO: 87223 - DNA, 21 bp, Artificial Sequence
  primer
atgaaatcccatcattcctcg

SEQ ID NO: 87224 - DNA, 21 bp, Artificial Sequence
  primer
acgaagatggttattcgctgc

SEQ ID NO: 87225 - DNA, 38 bp, Artificial Sequence
  primer
gtaaaacgacggccagtggtggtagtgaggtctgagcc

SEQ ID NO: 87226 - DNA, 38 bp, Artificial Sequence
  primer
gtaaaacgacggccagtggcaacaagagcaaacctctg

SEQ ID NO: 87227 - DNA, 19 bp, Artificial Sequence
  primer
gtctgggctcacatcaccc

SEQ ID NO: 87228 - DNA, 38 bp, Artificial Sequence
  primer
gtaaaacgacggccagtcaattctcaaggcaacagtgg

SEQ ID NO: 87229 - DNA, 21 bp, Artificial Sequence
  primer
agtggctcttccttcacctcc

SEQ ID NO: 87230 - DNA, 26 bp, Artificial Sequence
  primer
aaacaagaacttcagagaaatacacg

SEQ ID NO: 87231 - DNA, 39 bp, Artificial Sequence
  primer
gtaaaacgacggccagtgcagctatttgtggaaaccaag

SEQ ID NO: 87232 - DNA, 38 bp, Artificial Sequence
  primer
gtaaaacgacggccagtttcatggagtttctcccagtg

SEQ ID NO: 87233 - DNA, 38 bp, Artificial Sequence
  primer
gtaaaacgacggccagtaactggaggatggcttctctg

SEQ ID NO: 87234 - DNA, 38 bp, Artificial Sequence
  primer
gtaaaacgacggccagtcttccctcaacacaaatgcac

SEQ ID NO: 87235 - DNA, 18 bp, Artificial Sequence
  primer
ggatggacagcaggtccc

SEQ ID NO: 87236 - DNA, 24 bp, Artificial Sequence
  primer
catcaaattagtttgtcaattcgc

SEQ ID NO: 87237 - DNA, 23 bp, Artificial Sequence
  primer
tcacaatcacaagtcaccagttg

SEQ ID NO: 87238 - DNA, 21 bp, Artificial Sequence
  primer
gtatccagcaacctttgcctc

SEQ ID NO: 87239 - DNA, 21 bp, Artificial Sequence
  primer
aaggacttcattgtcgttggc

SEQ ID NO: 87240 - DNA, 22 bp, Artificial Sequence
  primer
gccatttcagaaacacacaaac

SEQ ID NO: 87241 - DNA, 38 bp, Artificial Sequence
  primer
gtaaaacgacggccagtgaggaactctcagcctcaacg

SEQ ID NO: 87242 - DNA, 36 bp, Artificial Sequence
  primer
gtaaaacgacggccagttttccaccgcaaagtctgg

SEQ ID NO: 87243 - DNA, 19 bp, Artificial Sequence
  primer
gtcaaagctgcagtgagcc

SEQ ID NO: 87244 - DNA, 38 bp, Artificial Sequence
  primer
gtaaaacgacggccagttttccatttccaatatgcgtg

SEQ ID NO: 87245 - DNA, 40 bp, Artificial Sequence
  primer
gtaaaacgacggccagtgctctttgtgcgtagtgtagagc

SEQ ID NO: 87246 - DNA, 39 bp, Artificial Sequence
  primer
gtaaaacgacggccagtcctaaagcttgaagcactctgg

SEQ ID NO: 87247 - DNA, 20 bp, Artificial Sequence
  primer
cccagctcagcacatgagtc

SEQ ID NO: 87248 - DNA, 21 bp, Artificial Sequence
  primer
ggcaagcttcaccataatctg

SEQ ID NO: 87249 - DNA, 43 bp, Artificial Sequence
  primer
gtaaaacgacggccagtatatcaacaggaatactggtcaagag

SEQ ID NO: 87250 - DNA, 38 bp, Artificial Sequence
  primer
gtaaaacgacggccagtggaaaccagcgagaattgaac

SEQ ID NO: 87251 - DNA, 38 bp, Artificial Sequence
  primer
gtaaaacgacggccagtagacagatgggacgggaagac

SEQ ID NO: 87252 - DNA, 21 bp, Artificial Sequence
  primer
atttaacagccaggttgccag

SEQ ID NO: 87253 - DNA, 40 bp, Artificial Sequence
  primer
gtaaaacgacggccagtcaaacagatgaaatttaaagccc

SEQ ID NO: 87254 - DNA, 43 bp, Artificial Sequence
  primer
gtaaaacgacggccagtggataatatcttcactggaatgtgag

SEQ ID NO: 87255 - DNA, 38 bp, Artificial Sequence
  primer
gtaaaacgacggccagtttaggcttctaacgggcaaag

SEQ ID NO: 87256 - DNA, 41 bp, Artificial Sequence
  primer
gtaaaacgacggccagtcatgaaagtttgagaaccactgtt

SEQ ID NO: 87257 - DNA, 21 bp, Artificial Sequence
  primer
tgtgtggagaagcacattcaa

SEQ ID NO: 87258 - DNA, 38 bp, Artificial Sequence
  primer
gtaaaacgacggccagtatgtgtgccaacctctaccac

SEQ ID NO: 87259 - DNA, 41 bp, Artificial Sequence
  primer
gtaaaacgacggccagtttaaggcctatatccaatgaaacc

SEQ ID NO: 87260 - DNA, 37 bp, Artificial Sequence
  primer
gtaaaacgacggccagtgtaccatagtcgggccttcc

SEQ ID NO: 87261 - DNA, 38 bp, Artificial Sequence
  primer
gtaaaacgacggccagtcccaccctgtctgtttctagc

SEQ ID NO: 87262 - DNA, 23 bp, Artificial Sequence
  primer
cacccatcattcctttataagcc

SEQ ID NO: 87263 - DNA, 21 bp, Artificial Sequence
  primer
aggttcaagaagccagcagag

SEQ ID NO: 87264 - DNA, 21 bp, Artificial Sequence
  primer
tggactatccctcctctctgc

SEQ ID NO: 87265 - DNA, 20 bp, Artificial Sequence
  primer
cactgattccctggaactgc

SEQ ID NO: 87266 - DNA, 21 bp, Artificial Sequence
  primer
tgggaaatcactgcctgtaag

SEQ ID NO: 87267 - DNA, 39 bp, Artificial Sequence
  primer
gtaaaacgacggccagtttacactttcagtcctccaggg

SEQ ID NO: 87268 - DNA, 21 bp, Artificial Sequence
  primer
attgggaagctccatgctaag

SEQ ID NO: 87269 - DNA, 21 bp, Artificial Sequence
  primer
ataagcctggttctctgggtg

SEQ ID NO: 87270 - DNA, 22 bp, Artificial Sequence
  primer
aaggaatagaaggtggtggtcc

SEQ ID NO: 87271 - DNA, 21 bp, Artificial Sequence
  primer
tggtaagagctcatctgctgc

SEQ ID NO: 87272 - DNA, 21 bp, Artificial Sequence
  primer
aaggttggcaggaagtagcag

SEQ ID NO: 87273 - DNA, 38 bp, Artificial Sequence
  primer
gtaaaacgacggccagtctattagacctggccctgtgg

SEQ ID NO: 87274 - DNA, 21 bp, Artificial Sequence
  primer
actaagccacgcactccacac

SEQ ID NO: 87275 - DNA, 21 bp, Artificial Sequence
  primer
aggagacagggagggcagtag

SEQ ID NO: 87276 - DNA, 21 bp, Artificial Sequence
  primer
ttgtcctatgactgcagcctc

SEQ ID NO: 87277 - DNA, 21 bp, Artificial Sequence
  primer
ctccctgactttgggatcaag

SEQ ID NO: 87278 - DNA, 21 bp, Artificial Sequence
  primer
aggaagcttcaacagtcccag

SEQ ID NO: 87279 - DNA, 21 bp, Artificial Sequence
  primer
atcctacgagggaggaaggac

SEQ ID NO: 87280 - DNA, 21 bp, Artificial Sequence
  primer
acttgctgacccatctgtttg

SEQ ID NO: 87281 - DNA, 21 bp, Artificial Sequence
  primer
ggactctgggttgaagaaagg

SEQ ID NO: 87282 - DNA, 23 bp, Artificial Sequence
  primer
cacccatcattcctttataagcc

SEQ ID NO: 87283 - DNA, 37 bp, Artificial Sequence
  primer
gtaaaacgacggccagtagttcaaatgctgctttggg

SEQ ID NO: 87284 - DNA, 38 bp, Artificial Sequence
  primer
gtaaaacgacggccagttcttcacattgtctgctgctg

SEQ ID NO: 87285 - DNA, 21 bp, Artificial Sequence
  primer
taatcggtttgtcccttccac

SEQ ID NO: 87286 - DNA, 22 bp, Artificial Sequence
  primer
gctctctgaacatgcactaccc

SEQ ID NO: 87287 - DNA, 39 bp, Artificial Sequence
  primer
gtaaaacgacggccagtcacacaatatggtgaccaaagg

SEQ ID NO: 87288 - DNA, 20 bp, Artificial Sequence
  primer
aaacacacaaacgcatgcac

SEQ ID NO: 87289 - DNA, 39 bp, Artificial Sequence
  primer
gtaaaacgacggccagtcaccaaagtccattcaaacagg

SEQ ID NO: 87290 - DNA, 37 bp, Artificial Sequence
  primer
gtaaaacgacggccagtctctcagggagcacagttcg

SEQ ID NO: 87291 - DNA, 21 bp, Artificial Sequence
  primer
gatggatcaacagcaacttgg

SEQ ID NO: 87292 - DNA, 47 bp, Artificial Sequence
  primer
gtaaaacgacggccagtatatagttcccagtaaacaaataacctgta

SEQ ID NO: 87293 - DNA, 25 bp, Artificial Sequence
  primer
tctttcaataacaccctttcaacag

SEQ ID NO: 87294 - DNA, 28 bp, Artificial Sequence
  primer
ttatcgttgttattacaaactgaccttt

SEQ ID NO: 87295 - DNA, 36 bp, Artificial Sequence
  primer
gtaaaacgacggccagtgcctaggcttccagcaatg

SEQ ID NO: 87296 - DNA, 21 bp, Artificial Sequence
  primer
agccagcagagagcatgtaag

SEQ ID NO: 87297 - DNA, 24 bp, Artificial Sequence
  primer
aagcttggaaagcaatacgaatac

SEQ ID NO: 87298 - DNA, 26 bp, Artificial Sequence
  primer
gaaacacctttattacgattgcattt

SEQ ID NO: 87299 - DNA, 46 bp, Artificial Sequence
  primer
gtaaaacgacggccagttgaataataaagattggtaagttcctctg

SEQ ID NO: 87300 - DNA, 22 bp, Artificial Sequence
  primer
agtggccacagaatgtctatcc

SEQ ID NO: 87301 - DNA, 38 bp, Artificial Sequence
  primer
gtaaaacgacggccagtcgcaggaagtagtaagggtgg

SEQ ID NO: 87302 - DNA, 21 bp, Artificial Sequence
  primer
ggtgatggtatatgtcctgcc

SEQ ID NO: 87303 - DNA, 21 bp, Artificial Sequence
  primer
cttcattgtcgggtacagtgg

SEQ ID NO: 87304 - DNA, 38 bp, Artificial Sequence
  primer
gtaaaacgacggccagtaggcactgatcagcattcaag

SEQ ID NO: 87305 - DNA, 25 bp, Artificial Sequence
  primer
tgtaactttccaaacatgacatcac

SEQ ID NO: 87306 - DNA, 40 bp, Artificial Sequence
  primer
gtaaaacgacggccagtcatgttcatgttaacaagcctgg

SEQ ID NO: 87307 - DNA, 21 bp, Artificial Sequence
  primer
cagagccaggttaggcatagg

SEQ ID NO: 87308 - DNA, 21 bp, Artificial Sequence
  primer
ggcttgacacagcacaaagac

SEQ ID NO: 87309 - DNA, 36 bp, Artificial Sequence
  primer
gtaaaacgacggccagtcatatggcctgtgggtcac

SEQ ID NO: 87310 - DNA, 21 bp, Artificial Sequence
  primer
gtcccgagactgctgtaacac

SEQ ID NO: 87311 - DNA, 40 bp, Artificial Sequence
  primer
gtaaaacgacggccagtcataatttctgaatgcctttccc

SEQ ID NO: 87312 - DNA, 21 bp, Artificial Sequence
  primer
cggaatatgggagacttgagc

SEQ ID NO: 87313 - DNA, 19 bp, Artificial Sequence
  primer
agagcagggaacggttcag

SEQ ID NO: 87314 - DNA, 20 bp, Artificial Sequence
  primer
ggtgtgtgtcagctcgaagg

SEQ ID NO: 87315 - DNA, 39 bp, Artificial Sequence
  primer
gtaaaacgacggccagtgggtggagattaaactggatgg

SEQ ID NO: 87316 - DNA, 37 bp, Artificial Sequence
  primer
gtaaaacgacggccagtaaggagcccaggttaggacc

SEQ ID NO: 87317 - DNA, 21 bp, Artificial Sequence
  primer
gaaggaaatcaagcccagagg

SEQ ID NO: 87318 - DNA, 38 bp, Artificial Sequence
  primer
gtaaaacgacggccagtacaaatttgaaggcaaatggc

SEQ ID NO: 87319 - DNA, 21 bp, Artificial Sequence
  primer
agactcagcacttcctctggc

SEQ ID NO: 87320 - DNA, 23 bp, Artificial Sequence
  primer
ggaatgaagattagtcctctggc

SEQ ID NO: 87321 - DNA, 38 bp, Artificial Sequence
  primer
gtaaaacgacggccagtccgagtcttagaggcaagcag

SEQ ID NO: 87322 - DNA, 18 bp, Artificial Sequence
  primer
tggtcgcagcacttggag

SEQ ID NO: 87323 - DNA, 37 bp, Artificial Sequence
  primer
gtaaaacgacggccagtacatgaaggtctcccaagcc

SEQ ID NO: 87324 - DNA, 21 bp, Artificial Sequence
  primer
gacgatcccagctatgaatgg

SEQ ID NO: 87325 - DNA, 21 bp, Artificial Sequence
  primer
ccactctctgatgctctggtg

SEQ ID NO: 87326 - DNA, 21 bp, Artificial Sequence
  primer
actgatctatgtcgggatcgg

SEQ ID NO: 87327 - DNA, 21 bp, Artificial Sequence
  primer
gaagggaccatggcatgttta

SEQ ID NO: 87328 - DNA, 24 bp, Artificial Sequence
  primer
aaagcagcaaaggacactataagc

SEQ ID NO: 87329 - DNA, 21 bp, Artificial Sequence
  primer
tgtgatggcacacacctgtag

SEQ ID NO: 87330 - DNA, 20 bp, Artificial Sequence
  primer
ctgctgatccgtcctgaaac

SEQ ID NO: 87331 - DNA, 19 bp, Artificial Sequence
  primer
gccacagcccaagactagc

SEQ ID NO: 87332 - DNA, 38 bp, Artificial Sequence
  primer
gtaaaacgacggccagtaaactggagaggattcatggg

SEQ ID NO: 87333 - DNA, 21 bp, Artificial Sequence
  primer
cttgaggaggagacgatggac

SEQ ID NO: 87334 - DNA, 38 bp, Artificial Sequence
  primer
gtaaaacgacggccagttcttagagcatgtgtcacggg

SEQ ID NO: 87335 - DNA, 38 bp, Artificial Sequence
  primer
gtaaaacgacggccagtggtaggcaactgtgacttggg

SEQ ID NO: 87336 - DNA, 38 bp, Artificial Sequence
  primer
gtaaaacgacggccagtctggcgtggtaggtgaagtag

SEQ ID NO: 87337 - DNA, 38 bp, Artificial Sequence
  primer
gtaaaacgacggccagtttcaccaagccctactgtgtg

SEQ ID NO: 87338 - DNA, 38 bp, Artificial Sequence
  primer
gtaaaacgacggccagttgatcatacgtgggtttagcc

SEQ ID NO: 87339 - DNA, 21 bp, Artificial Sequence
  primer
atccacacctgaactcaaggc

SEQ ID NO: 87340 - DNA, 20 bp, Artificial Sequence
  primer
aaacgctcctcctctaagcc

SEQ ID NO: 87341 - DNA, 21 bp, Artificial Sequence
  primer
gccactgacagcatgaaactc

SEQ ID NO: 87342 - DNA, 21 bp, Artificial Sequence
  primer
gtcggcaaggaaatccattag

SEQ ID NO: 87343 - DNA, 38 bp, Artificial Sequence
  primer
gtaaaacgacggccagtaaagacaaactgccttggagg

SEQ ID NO: 87344 - DNA, 38 bp, Artificial Sequence
  primer
gtaaaacgacggccagtaggtctcatacgcttgggaag

SEQ ID NO: 87345 - DNA, 40 bp, Artificial Sequence
  primer
gtaaaacgacggccagttgcttgtttaaagcagctaaacc

SEQ ID NO: 87346 - DNA, 27 bp, Artificial Sequence
  primer
tgctataaagactgatcgcactaaatc

SEQ ID NO: 87347 - DNA, 38 bp, Artificial Sequence
  primer
gtaaaacgacggccagtatcctcaaccttccatcacga

SEQ ID NO: 87348 - DNA, 19 bp, Artificial Sequence
  primer
gccagccaaggtttccata

SEQ ID NO: 87349 - DNA, 38 bp, Artificial Sequence
  primer
gtaaaacgacggccagtacaaagggatcattctcccag

SEQ ID NO: 87350 - DNA, 21 bp, Artificial Sequence
  primer
gcaatcactgcacaatacgtg

SEQ ID NO: 87351 - DNA, 39 bp, Artificial Sequence
  primer
gtaaaacgacggccagtgccttagcttccaaccataacc

SEQ ID NO: 87352 - DNA, 21 bp, Artificial Sequence
  primer
tcttcacacatgggagtggtc

SEQ ID NO: 87353 - DNA, 20 bp, Artificial Sequence
  primer
ctgtgttcaacttcctgggc

SEQ ID NO: 87354 - DNA, 38 bp, Artificial Sequence
  primer
gtaaaacgacggccagtagcagagccaggacttgacag

SEQ ID NO: 87355 - DNA, 21 bp, Artificial Sequence
  primer
catccagagcctttctccaaa

SEQ ID NO: 87356 - DNA, 22 bp, Artificial Sequence
  primer
tctgatttcttcaggcttggtc

SEQ ID NO: 87357 - DNA, 26 bp, Artificial Sequence
  primer
cattcaactaatcatgcctgtaattc

SEQ ID NO: 87358 - DNA, 39 bp, Artificial Sequence
  primer
gtaaaacgacggccagtgacttcctagacttgctgtcca

SEQ ID NO: 87359 - DNA, 42 bp, Artificial Sequence
  primer
gtaaaacgacggccagttctctactacgttgcaaatgacaaa

SEQ ID NO: 87360 - DNA, 40 bp, Artificial Sequence
  primer
gtaaaacgacggccagttgcgatatacttcaatcaccagc

SEQ ID NO: 87361 - DNA, 21 bp, Artificial Sequence
  primer
tgtgctttggaaagaacttgg

SEQ ID NO: 87362 - DNA, 20 bp, Artificial Sequence
  primer
ctgagaaggcaactcgcatc

SEQ ID NO: 87363 - DNA, 38 bp, Artificial Sequence
  primer
gtaaaacgacggccagtgtctccctggaagagctgaag

SEQ ID NO: 87364 - DNA, 38 bp, Artificial Sequence
  primer
gtaaaacgacggccagtaaaccaatcagtcatgagggc

SEQ ID NO: 87365 - DNA, 38 bp, Artificial Sequence
  primer
gtaaaacgacggccagtatagaggagccagacacaccg

SEQ ID NO: 87366 - DNA, 21 bp, Artificial Sequence
  primer
tagtcattgacagccagccac

SEQ ID NO: 87367 - DNA, 38 bp, Artificial Sequence
  primer
gtaaaacgacggccagtgaatggtctaggcaaggatgc

SEQ ID NO: 87368 - DNA, 38 bp, Artificial Sequence
  primer
gtaaaacgacggccagtcgtagttgttgcctaggttgg

SEQ ID NO: 87369 - DNA, 38 bp, Artificial Sequence
  primer
gtaaaacgacggccagtctccgatcaggtacccatttg

SEQ ID NO: 87370 - DNA, 35 bp, Artificial Sequence
  primer
gtaaaacgacggccagttgggagggcctagctgtg

SEQ ID NO: 87371 - DNA, 19 bp, Artificial Sequence
  primer
ttgggtccctggatgaaag

SEQ ID NO: 87372 - DNA, 21 bp, Artificial Sequence
  primer
aagaagtagatgccgcgtacc

SEQ ID NO: 87373 - DNA, 38 bp, Artificial Sequence
  primer
gtaaaacgacggccagtggagagaaaggaggctggttc

SEQ ID NO: 87374 - DNA, 21 bp, Artificial Sequence
  primer
atgaatcgagagtggcctttg

SEQ ID NO: 87375 - DNA, 18 bp, Artificial Sequence
  primer
gaaggtgggcagggactg

SEQ ID NO: 87376 - DNA, 20 bp, Artificial Sequence
  primer
cgtagtggtttccgaggttg

SEQ ID NO: 87377 - DNA, 19 bp, Artificial Sequence
  primer
cagagatcagcccacatgc

SEQ ID NO: 87378 - DNA, 36 bp, Artificial Sequence
  primer
gtaaaacgacggccagtactccggaactgccctctc

SEQ ID NO: 87379 - DNA, 38 bp, Artificial Sequence
  primer
gtaaaacgacggccagtcctgggatccttgattcactg

SEQ ID NO: 87380 - DNA, 21 bp, Artificial Sequence
  primer
atgagcacgtggtaagcgaag

SEQ ID NO: 87381 - DNA, 38 bp, Artificial Sequence
  primer
gtaaaacgacggccagttctcaggttgtgggatgagtg

SEQ ID NO: 87382 - DNA, 21 bp, Artificial Sequence
  primer
acccttgagcaccaagagttc

SEQ ID NO: 87383 - DNA, 21 bp, Artificial Sequence
  primer
tagagtaaggcgtgtcctccc

SEQ ID NO: 87384 - DNA, 38 bp, Artificial Sequence
  primer
gtaaaacgacggccagtgaggaactggtggtctggaag

SEQ ID NO: 87385 - DNA, 20 bp, Artificial Sequence
  primer
ccattgttgaagttgcagcc

SEQ ID NO: 87386 - DNA, 38 bp, Artificial Sequence
  primer
gtaaaacgacggccagtctcatagccaacccagcattc

SEQ ID NO: 87387 - DNA, 21 bp, Artificial Sequence
  primer
tgtgtgttgaagcacaagctg

SEQ ID NO: 87388 - DNA, 39 bp, Artificial Sequence
  primer
gtaaaacgacggccagttctacttgtggtgggtgtagcc

SEQ ID NO: 87389 - DNA, 38 bp, Artificial Sequence
  primer
gtaaaacgacggccagtgtaactgtctgccgcattctg

SEQ ID NO: 87390 - DNA, 38 bp, Artificial Sequence
  primer
gtaaaacgacggccagttgctgccacctctttgtactg

SEQ ID NO: 87391 - DNA, 40 bp, Artificial Sequence
  primer
gtaaaacgacggccagttgtttgctaagattccagtccag

SEQ ID NO: 87392 - DNA, 38 bp, Artificial Sequence
  primer
gtaaaacgacggccagtcagctttcttgccttcacatc

SEQ ID NO: 87393 - DNA, 38 bp, Artificial Sequence
  primer
gtaaaacgacggccagttaacgactccatcccttcctc

SEQ ID NO: 87394 - DNA, 21 bp, Artificial Sequence
  primer
accaggtagccactgaaggtg

SEQ ID NO: 87395 - DNA, 37 bp, Artificial Sequence
  primer
gtaaaacgacggccagttctcactgaatgccaaagcc

SEQ ID NO: 87396 - DNA, 38 bp, Artificial Sequence; identical to SEQ ID NO: 87393
  primer

SEQ ID NO: 87397 - DNA, 21 bp, Artificial Sequence
  primer
acagagcaagcctctgtctca

SEQ ID NO: 87398 - DNA, 20 bp, Artificial Sequence
  primer
tgtcaaacttgatgggcagc

SEQ ID NO: 87399 - DNA, 21 bp, Artificial Sequence
  primer
ccgtaaagaggctgtctgtcc

SEQ ID NO: 87400 - DNA, 21 bp, Artificial Sequence
  primer
gtccactgctgcatctttcag

SEQ ID NO: 87401 - DNA, 37 bp, Artificial Sequence
  primer
gtaaaacgacggccagtggctccgctctctcactttc

SEQ ID NO: 87402 - DNA, 38 bp, Artificial Sequence
  primer
gtaaaacgacggccagttattccagggtgccaagagtc

SEQ ID NO: 87403 - DNA, 21 bp, Artificial Sequence
  primer
ctcgaacatcctgattcctgg

SEQ ID NO: 87404 - DNA, 21 bp, Artificial Sequence
  primer
cgtccctccctctcttctttc

SEQ ID NO: 87405 - DNA, 38 bp, Artificial Sequence
  primer
gtaaaacgacggccagttacgcttccctgtcattaggc

SEQ ID NO: 87406 - DNA, 22 bp, Artificial Sequence
  primer
ttggtgtacctgtagcgtgaac

SEQ ID NO: 87407 - DNA, 38 bp, Artificial Sequence
  primer
gtaaaacgacggccagtcgtcggcgtagactaggtagc

SEQ ID NO: 87408 - DNA, 38 bp, Artificial Sequence
  primer
gtaaaacgacggccagtgtaaatcatggcctgcacctc

SEQ ID NO: 87409 - DNA, 21 bp, Artificial Sequence
  primer
gaaggtgatgtacttgccgtg

SEQ ID NO: 87410 - DNA, 38 bp, Artificial Sequence
  primer
gtaaaacgacggccagtctttattggcagagtccaggc

SEQ ID NO: 87411 - DNA, 19 bp, Artificial Sequence
  primer
cacgggtacctcctccacc

SEQ ID NO: 87412 - DNA, 21 bp, Artificial Sequence
  primer
aatggattcgccattcttcac

SEQ ID NO: 87413 - DNA, 38 bp, Artificial Sequence
  primer
gtaaaacgacggccagtactttgcagtgggcactaagc

SEQ ID NO: 87414 - DNA, 20 bp, Artificial Sequence
  primer
tggatgacctggttgtcagc

SEQ ID NO: 87415 - DNA, 20 bp, Artificial Sequence
  primer
cagaggcaggaggaaatgtg

SEQ ID NO: 87416 - DNA, 21 bp, Artificial Sequence
  primer
gaacagaccaggctcacattg

SEQ ID NO: 87417 - DNA, 38 bp, Artificial Sequence
  primer
gtaaaacgacggccagtcgaagtcgttgctgtagatgg

SEQ ID NO: 87418 - DNA, 37 bp, Artificial Sequence
  primer
gtaaaacgacggccagtacagcagtgcaaactgagcc

SEQ ID NO: 87419 - DNA, 37 bp, Artificial Sequence
  primer
gtaaaacgacggccagtgggtttaaggagcaattccc

SEQ ID NO: 87420 - DNA, 21 bp, Artificial Sequence
  primer
acagatgaacttccctgtggc

SEQ ID NO: 87421 - DNA, 38 bp, Artificial Sequence
  primer
gtaaaacgacggccagttgtttaccacagggatcttgg

SEQ ID NO: 87422 - DNA, 39 bp, Artificial Sequence
  primer
gtaaaacgacggccagtgagtctctttggatcccattcc

SEQ ID NO: 87423 - DNA, 19 bp, Artificial Sequence
  primer
cagacactggtgctcagcg

SEQ ID NO: 87424 - DNA, 19 bp, Artificial Sequence
  primer
gtccaggttcaccagctcc

SEQ ID NO: 87425 - DNA, 38 bp, Artificial Sequence
  primer
gtaaaacgacggccagtccgctgaaggtgatgtagagg

SEQ ID NO: 87426 - DNA, 38 bp, Artificial Sequence
  primer
gtaaaacgacggccagtgttcctgtctccctgaattgc

SEQ ID NO: 87427 - DNA, 38 bp, Artificial Sequence
  primer
gtaaaacgacggccagtgtgtgcatgccatacagatcc

SEQ ID NO: 87428 - DNA, 20 bp, Artificial Sequence
  primer
gacagagcccaggttgacag

SEQ ID NO: 87429 - DNA, 20 bp, Artificial Sequence
  primer
gatgcctccgtgtacagctc

SEQ ID NO: 87430 - DNA, 38 bp, Artificial Sequence
  primer
gtaaaacgacggccagtgatccaggaggaagttgggac

SEQ ID NO: 87431 - DNA, 38 bp, Artificial Sequence
  primer
gtaaaacgacggccagtttcagagccacttgtccttcc

SEQ ID NO: 87432 - DNA, 38 bp, Artificial Sequence
  primer
gtaaaacgacggccagtgtggattagctacgggcagac

SEQ ID NO: 87433 - DNA, 38 bp, Artificial Sequence
  primer
gtaaaacgacggccagtcgaacctagtgaattctgggc

SEQ ID NO: 87434 - DNA, 38 bp, Artificial Sequence
  primer
gtaaaacgacggccagtcacacacggtctttctgcatc

SEQ ID NO: 87435 - DNA, 21 bp, Artificial Sequence
  primer
ggaatatctgctgtgctgctg

SEQ ID NO: 87436 - DNA, 21 bp, Artificial Sequence
  primer
aattcatccctcctccagatg

SEQ ID NO: 87437 - DNA, 21 bp, Artificial Sequence
  primer
tcagctgtcactcaagcttcc

SEQ ID NO: 87438 - DNA, 21 bp, Artificial Sequence
  primer
ataggctcggagttgaagctg

SEQ ID NO: 87439 - DNA, 21 bp, Artificial Sequence
  primer
gattgccctgttcttcctcac

SEQ ID NO: 87440 - DNA, 38 bp, Artificial Sequence
  primer
gtaaaacgacggccagtgtagttagccagcccatctcc

SEQ ID NO: 87441 - DNA, 38 bp, Artificial Sequence
  primer
gtaaaacgacggccagtcagggtcaattcttgccattc

SEQ ID NO: 87442 - DNA, 38 bp, Artificial Sequence
  primer
gtaaaacgacggccagtgaataggatttccctgcctcc

SEQ ID NO: 87443 - DNA, 21 bp, Artificial Sequence
  primer
acagggtctccttatgttgcc

SEQ ID NO: 87444 - DNA, 38 bp, Artificial Sequence
  primer
gtaaaacgacggccagtctccctcccacatccttattc

SEQ ID NO: 87445 - DNA, 38 bp, Artificial Sequence
  primer
gtaaaacgacggccagtaagtgatttatggagcgaccc

SEQ ID NO: 87446 - DNA, 21 bp, Artificial Sequence
  primer
gtggacaaagccctttctgag

SEQ ID NO: 87447 - DNA, 21 bp, Artificial Sequence
  primer
acagtgagctgtgattgcacc

SEQ ID NO: 87448 - DNA, 21 bp, Artificial Sequence
  primer
tgtgcctggatcatctacctg

SEQ ID NO: 87449 - DNA, 38 bp, Artificial Sequence
  primer
gtaaaacgacggccagtaactggacaatttcagtccgc

SEQ ID NO: 87450 - DNA, 21 bp, Artificial Sequence
  primer
aaagcttccatgactggcttc

SEQ ID NO: 87451 - DNA, 21 bp, Artificial Sequence
  primer
tatctttggacgaagccaagg

SEQ ID NO: 87452 - DNA, 38 bp, Artificial Sequence
  primer
gtaaaacgacggccagtgttcagtcctttcccaagagg

SEQ ID NO: 87453 - DNA, 21 bp, Artificial Sequence
  primer
gctgtgggtttctccactttc

SEQ ID NO: 87454 - DNA, 38 bp, Artificial Sequence
  primer
gtaaaacgacggccagtttcgctcgtgtcttctttcag

SEQ ID NO: 87455 - DNA, 21 bp, Artificial Sequence
  primer
ttcacacatgggaattcaagc

SEQ ID NO: 87456 - DNA, 21 bp, Artificial Sequence
  primer
caggttaagtcccaccctgag

SEQ ID NO: 87457 - DNA, 36 bp, Artificial Sequence
  primer
gtaaaacgacggccagtgcttcctggatgcacattg

SEQ ID NO: 87458 - DNA, 21 bp, Artificial Sequence
  primer
agcatgtgggagaaggaagtg

SEQ ID NO: 87459 - DNA, 37 bp, Artificial Sequence
  primer
gtaaaacgacggccagtaggtccagcttctctgcctc

SEQ ID NO: 87460 - DNA, 21 bp, Artificial Sequence
  primer
agacttcttggaggaggtggg

SEQ ID NO: 87461 - DNA, 21 bp, Artificial Sequence
  primer
atccagaatttgtttgcaggc

SEQ ID NO: 87462 - DNA, 38 bp, Artificial Sequence
  primer
gtaaaacgacggccagtcagaattcagggcttctgacc

SEQ ID NO: 87463 - DNA, 20 bp, Artificial Sequence
  primer
cccaggctcttcaacatgag

SEQ ID NO: 87464 - DNA, 38 bp, Artificial Sequence
  primer
gtaaaacgacggccagttgagcttggagacatctgtgg

SEQ ID NO: 87465 - DNA, 20 bp, Artificial Sequence
  primer
ggaagcaatgagctgctgtc

SEQ ID NO: 87466 - DNA, 38 bp, Artificial Sequence
  primer
gtaaaacgacggccagtattaggctagaccagggctcc

SEQ ID NO: 87467 - DNA, 21 bp, Artificial Sequence
  primer
gagaagagcaagggtcacacc

SEQ ID NO: 87468 - DNA, 21 bp, Artificial Sequence
  primer
tttacccagaatccaggttcc

SEQ ID NO: 87469 - DNA, 21 bp, Artificial Sequence
  primer
ccagacctggagaaggaagag

SEQ ID NO: 87470 - DNA, 38 bp, Artificial Sequence
  primer
gtaaaacgacggccagtcagtgtcatctagggcagtgg

SEQ ID NO: 87471 - DNA, 21 bp, Artificial Sequence
  primer
cctccctagatccctcaaagg

SEQ ID NO: 87472 - DNA, 38 bp, Artificial Sequence
  primer
gtaaaacgacggccagtgatcacagggtctaagggtgg

SEQ ID NO: 87473 - DNA, 20 bp, Artificial Sequence
  primer
atttggctgagcatggtttg

SEQ ID NO: 87474 - DNA, 38 bp, Artificial Sequence
  primer
gtaaaacgacggccagtgaagcttcagctttcctggac

SEQ ID NO: 87475 - DNA, 20 bp, Artificial Sequence
  primer
cttcagcctcagctctccag

SEQ ID NO: 87476 - DNA, 37 bp, Artificial Sequence
  primer
gtaaaacgacggccagtcagatccactggtcggctac

SEQ ID NO: 87477 - DNA, 38 bp, Artificial Sequence
  primer
gtaaaacgacggccagtgccacacaccactcaagactc

SEQ ID NO: 87478 - DNA, 21 bp, Artificial Sequence
  primer
ctctaccgaaggcctctttcc

SEQ ID NO: 87479 - DNA, 37 bp, Artificial Sequence
  primer
gtaaaacgacggccagtcagagagaagacagcagcgg

SEQ ID NO: 87480 - DNA, 21 bp, Artificial Sequence
  primer
agcaaccaggtaaacccagac

SEQ ID NO: 87481 - DNA, 38 bp, Artificial Sequence
  primer
gtaaaacgacggccagttactagagggaggtgatgccc

SEQ ID NO: 87482 - DNA, 22 bp, Artificial Sequence
  primer
gaccttcaaagtgtgtccttgg

SEQ ID NO: 87483 - DNA, 21 bp, Artificial Sequence
  primer
aaatgcatgtaaagtgcccag

SEQ ID NO: 87484 - DNA, 37 bp, Artificial Sequence
  primer
gtaaaacgacggccagtcagggtttgaaagggcaaag

SEQ ID NO: 87485 - DNA, 38 bp, Artificial Sequence
  primer
gtaaaacgacggccagtgacagtgactgcagggtcctc

SEQ ID NO: 87486 - DNA, 38 bp, Artificial Sequence
  primer
gtaaaacgacggccagttgggtgtgtcactgctctctc

SEQ ID NO: 87487 - DNA, 18 bp, Artificial Sequence
  primer
gtatccgcgcgagtgtgt

SEQ ID NO: 87488 - DNA, 21 bp, Artificial Sequence
  primer
gttggagcccatatccctcag

SEQ ID NO: 87489 - DNA, 20 bp, Artificial Sequence
  primer
agctccctgctgaactggac

SEQ ID NO: 87490 - DNA, 35 bp, Artificial Sequence
  primer
gtaaaacgacggccagtaaagagggccgacatggt

SEQ ID NO: 87491 - DNA, 21 bp, Artificial Sequence
  primer
agaggtgtatggctctcaggg

SEQ ID NO: 87492 - DNA, 21 bp, Artificial Sequence
  primer
cttcgaagagccttgaggaag

SEQ ID NO: 87493 - DNA, 37 bp, Artificial Sequence
  primer
gtaaaacgacggccagtgtcccttggacatgttgtgg

SEQ ID NO: 87494 - DNA, 21 bp, Artificial Sequence
  primer
gaggaattctctctccaagcc

SEQ ID NO: 87495 - DNA, 38 bp, Artificial Sequence
  primer
gtaaaacgacggccagtcctggtaggtccctctctcat

SEQ ID NO: 87496 - DNA, 38 bp, Artificial Sequence
  primer
gtaaaacgacggccagtgtttaagcatggacacaagcc

SEQ ID NO: 87497 - DNA, 21 bp, Artificial Sequence
  primer
gttcattatacccaacggtgc

SEQ ID NO: 87498 - DNA, 21 bp, Artificial Sequence
  primer
gcaagctctcaaacatggaag

SEQ ID NO: 87499 - DNA, 38 bp, Artificial Sequence
  primer
gtaaaacgacggccagttctggctgtcaactaggagga

SEQ ID NO: 87500 - DNA, 21 bp, Artificial Sequence
  primer
gcagtggagtgagaccctgtc

SEQ ID NO: 87501 - DNA, 40 bp, Artificial Sequence
  primer
gtaaaacgacggccagtccatgagaacatagcaattagcc

SEQ ID NO: 87502 - DNA, 41 bp, Artificial Sequence
  primer
gtaaaacgacggccagtaaatgggtttgtgttaggtctcag

SEQ ID NO: 87503 - DNA, 22 bp, Artificial Sequence
  primer
ccctcacatgcattgaaataac

SEQ ID NO: 87504 - DNA, 37 bp, Artificial Sequence
  primer
gtaaaacgacggccagtcacacacttggcgttgtcac

SEQ ID NO: 87505 - DNA, 21 bp, Artificial Sequence
  primer
taagaatcttgcagtcgcagg

SEQ ID NO: 87506 - DNA, 40 bp, Artificial Sequence
  primer
gtaaaacgacggccagtggaagaatgtcgcactattagca

SEQ ID NO: 87507 - DNA, 42 bp, Artificial Sequence
  primer
gtaaaacgacggccagtcctcatctaatcattgggtcttagg

SEQ ID NO: 87508 - DNA, 21 bp, Artificial Sequence
  primer
gcgtcagaggagtcttccttc

SEQ ID NO: 87509 - DNA, 38 bp, Artificial Sequence
  primer
gtaaaacgacggccagttctttgacaagccttcattgg

SEQ ID NO: 87510 - DNA, 21 bp, Artificial Sequence
  primer
gccacaaggtctgccattaac

SEQ ID NO: 87511 - DNA, 21 bp, Artificial Sequence
  primer
agtgtgtccacacctctcacc

SEQ ID NO: 87512 - DNA, 20 bp, Artificial Sequence
  primer
ctggctccagctaagctctg

SEQ ID NO: 87513 - DNA, 38 bp, Artificial Sequence
  primer
gtaaaacgacggccagttccacaaagagacgcacaaac

SEQ ID NO: 87514 - DNA, 21 bp, Artificial Sequence
  primer
tatggtacttgcttccagggc

SEQ ID NO: 87515 - DNA, 21 bp, Artificial Sequence
  primer
cttctcccgactgtacccatc

SEQ ID NO: 87516 - DNA, 37 bp, Artificial Sequence
  primer
gtaaaacgacggccagtctgctccctatgctgtgagg

SEQ ID NO: 87517 - DNA, 21 bp, Artificial Sequence
  primer
atgtaccaactggtgaggcag

SEQ ID NO: 87518 - DNA, 21 bp, Artificial Sequence
  primer
ctctctccctcctttgggaag

SEQ ID NO: 87519 - DNA, 21 bp, Artificial Sequence
  primer
gatgcttgcagactggttgac

SEQ ID NO: 87520 - DNA, 21 bp, Artificial Sequence
  primer
caagtacactgctgccacagg

SEQ ID NO: 87521 - DNA, 21 bp, Artificial Sequence
  primer
tttctctaggcctcagcgttc

SEQ ID NO: 87522 - DNA, 38 bp, Artificial Sequence
  primer
gtaaaacgacggccagttgactctttgctatccagccc

SEQ ID NO: 87523 - DNA, 21 bp, Artificial Sequence
  primer
actgatgcttgtctcacctgc

SEQ ID NO: 87524 - DNA, 38 bp, Artificial Sequence
  primer
gtaaaacgacggccagttttctctcctaacacaggccc

SEQ ID NO: 87525 - DNA, 21 bp, Artificial Sequence
  primer
atggaggattcctgcttaggg

SEQ ID NO: 87526 - DNA, 21 bp, Artificial Sequence
  primer
gtcccagtgctggaatgaaac

SEQ ID NO: 87527 - DNA, 38 bp, Artificial Sequence
  primer
gtaaaacgacggccagtgtttaacaaagcaagagggcg

SEQ ID NO: 87528 - DNA, 21 bp, Artificial Sequence
  primer
tcacctgacagccacaaagtc

SEQ ID NO: 87529 - DNA, 21 bp, Artificial Sequence
  primer
ggaagttggactttggtggag

SEQ ID NO: 87530 - DNA, 38 bp, Artificial Sequence
  primer
gtaaaacgacggccagtcaaaggaattgggctgagaag

SEQ ID NO: 87531 - DNA, 21 bp, Artificial Sequence
  primer
cacagccaaccttctcacttg

SEQ ID NO: 87532 - DNA, 21 bp, Artificial Sequence
  primer
ggacaaagagactccagacgg

SEQ ID NO: 87533 - DNA, 37 bp, Artificial Sequence
  primer
gtaaaacgacggccagtggtgaagagagggatgaggc

SEQ ID NO: 87534 - DNA, 21 bp, Artificial Sequence
  primer
ccctgaggcttcataccctac

SEQ ID NO: 87535 - DNA, 36 bp, Artificial Sequence
  primer
gtaaaacgacggccagtaggcaacaagccctcagtc

SEQ ID NO: 87536 - DNA, 38 bp, Artificial Sequence
  primer
gtaaaacgacggccagtcttctaggttggaggtgccag

SEQ ID NO: 87537 - DNA, 20 bp, Artificial Sequence
  primer
cagcctctgctgaggacaag

SEQ ID NO: 87538 - DNA, 21 bp, Artificial Sequence
  primer
gggttggagggagagaaactc

SEQ ID NO: 87539 - DNA, 38 bp, Artificial Sequence
  primer
gtaaaacgacggccagtctttagggcaggtcctctctg

SEQ ID NO: 87540 - DNA, 21 bp, Artificial Sequence
  primer
ggcatgtcctccttgtaactg

SEQ ID NO: 87541 - DNA, 21 bp, Artificial Sequence
  primer
ctataactgcctggccacacc

SEQ ID NO: 87542 - DNA, 38 bp, Artificial Sequence
  primer
gtaaaacgacggccagtgattgttcagtgggaaggagg

SEQ ID NO: 87543 - DNA, 21 bp, Artificial Sequence
  primer
cacacggaaatgagatgcaag

SEQ ID NO: 87544 - DNA, 38 bp, Artificial Sequence
  primer
gtaaaacgacggccagtaccataggagctctcagccag

SEQ ID NO: 87545 - DNA, 22 bp, Artificial Sequence
  primer
gctggatgtgctcttcactttc

SEQ ID NO: 87546 - DNA, 21 bp, Artificial Sequence
  primer
gagtgctccaccacactgaag

SEQ ID NO: 87547 - DNA, 38 bp, Artificial Sequence
  primer
gtaaaacgacggccagttgagtctgacctcctcactgc

SEQ ID NO: 87548 - DNA, 38 bp, Artificial Sequence
  primer
gtaaaacgacggccagtagcacaatttcagctcactgc

SEQ ID NO: 87549 - DNA, 20 bp, Artificial Sequence
  primer
acctcgtctcgtctctgctg

SEQ ID NO: 87550 - DNA, 21 bp, Artificial Sequence
  primer
cacacggaaatgagatgcaag

SEQ ID NO: 87551 - DNA, 20 bp, Artificial Sequence
  primer
tcacagagacactggcttgg

SEQ ID NO: 87552 - DNA, 20 bp, Artificial Sequence
  primer
cctgggcaagagagtgtgac

SEQ ID NO: 87553 - DNA, 21 bp, Artificial Sequence
  primer
tgatccttcatgtcgtccatc

SEQ ID NO: 87554 - DNA, 21 bp, Artificial Sequence
  primer
tcgtactgcagcttcttgacc

SEQ ID NO: 87555 - DNA, 20 bp, Artificial Sequence
  primer
catggatgagcttggtgtcc

SEQ ID NO: 87556 - DNA, 21 bp, Artificial Sequence
  primer
acctgaaagtctgagccaagg

SEQ ID NO: 87557 - DNA, 37 bp, Artificial Sequence
  primer
gtaaaacgacggccagtaggatatcgaggctgcagtg

SEQ ID NO: 87558 - DNA, 20 bp, Artificial Sequence
  primer
cccaaacccatatcctcacc

SEQ ID NO: 87559 - DNA, 37 bp, Artificial Sequence
  primer
gtaaaacgacggccagtatcctcaaggcctctgcttc

SEQ ID NO: 87560 - DNA, 21 bp, Artificial Sequence
  primer
catgctgatggcaggtatgtg

SEQ ID NO: 87561 - DNA, 38 bp, Artificial Sequence
  primer
gtaaaacgacggccagtacttcaatgtccaggaatggg

SEQ ID NO: 87562 - DNA, 21 bp, Artificial Sequence
  primer
aggagcatggccttggtattc

SEQ ID NO: 87563 - DNA, 21 bp, Artificial Sequence
  primer
agatggtgtgccagacctcac

SEQ ID NO: 87564 - DNA, 38 bp, Artificial Sequence
  primer
gtaaaacgacggccagttgcaagggtgtgacctatgag

SEQ ID NO: 87565 - DNA, 38 bp, Artificial Sequence
  primer
gtaaaacgacggccagtttccagagaaaccatatcccg

SEQ ID NO: 87566 - DNA, 21 bp, Artificial Sequence
  primer
tgtcatgaaccacagggactc

SEQ ID NO: 87567 - DNA, 39 bp, Artificial Sequence
  primer
gtaaaacgacggccagtgacaagagaggtggacagttgg

SEQ ID NO: 87568 - DNA, 21 bp, Artificial Sequence
  primer
gaggaagggacagagacatcg

SEQ ID NO: 87569 - DNA, 37 bp, Artificial Sequence
  primer
gtaaaacgacggccagtagcaatttgccggaggtaac

SEQ ID NO: 87570 - DNA, 21 bp, Artificial Sequence
  primer
tcattgccatcatcagtgtcc

SEQ ID NO: 87571 - DNA, 20 bp, Artificial Sequence
  primer
ttaaatgcaggacaggcagg

SEQ ID NO: 87572 - DNA, 20 bp, Artificial Sequence
  primer
tggcttagcgtgaggttgag

SEQ ID NO: 87573 - DNA, 37 bp, Artificial Sequence
  primer
gtaaaacgacggccagtcacaggctgctgtgtgtcag

SEQ ID NO: 87574 - DNA, 38 bp, Artificial Sequence
  primer
gtaaaacgacggccagttggactgcttgatcctccttc

SEQ ID NO: 87575 - DNA, 18 bp, Artificial Sequence
  primer
aactgcaccaccgcactc

SEQ ID NO: 87576 - DNA, 38 bp, Artificial Sequence
  primer
gtaaaacgacggccagttgcagttcatgtgtaccaagc

SEQ ID NO: 87577 - DNA, 19 bp, Artificial Sequence
  primer
acttgaactgaggaggcgg

SEQ ID NO: 87578 - DNA, 24 bp, Artificial Sequence
  primer
cacatatggaaatcttgctttcag

SEQ ID NO: 87579 - DNA, 36 bp, Artificial Sequence
  primer
gtaaaacgacggccagtccatggaagaagtgcctgg

SEQ ID NO: 87580 - DNA, 20 bp, Artificial Sequence
  primer
attcacagggtggagcacac

SEQ ID NO: 87581 - DNA, 23 bp, Artificial Sequence
  primer
aagaaggagcttacaggaagagc

SEQ ID NO: 87582 - DNA, 38 bp, Artificial Sequence
  primer
gtaaaacgacggccagtatgcagtttcaggcaaagtcc

SEQ ID NO: 87583 - DNA, 43 bp, Artificial Sequence
  primer
gtaaaacgacggccagttctaattctatgaaattgcttgcctc

SEQ ID NO: 87584 - DNA, 39 bp, Artificial Sequence
  primer
gtaaaacgacggccagtgcagttctctgctatacctgcc

SEQ ID NO: 87585 - DNA, 21 bp, Artificial Sequence
  primer
tgattcaggaaactgatggga

SEQ ID NO: 87586 - DNA, 40 bp, Artificial Sequence
  primer
gtaaaacgacggccagtttcatctgaaggagacagaggtg

SEQ ID NO: 87587 - DNA, 21 bp, Artificial Sequence
  primer
gtgtgtagaccgcttctgctg

SEQ ID NO: 87588 - DNA, 38 bp, Artificial Sequence
  primer
gtaaaacgacggccagtacagcagttcaggaaccaagg

SEQ ID NO: 87589 - DNA, 18 bp, Artificial Sequence
  primer
tgatacgccagcctcagc

SEQ ID NO: 87590 - DNA, 21 bp, Artificial Sequence
  primer
aagggacttggaaaggaggac

SEQ ID NO: 87591 - DNA, 21 bp, Artificial Sequence
  primer
acccacagtaaatggacaggc

SEQ ID NO: 87592 - DNA, 38 bp, Artificial Sequence
  primer
gtaaaacgacggccagtccaaattagttgttccagggc

SEQ ID NO: 87593 - DNA, 38 bp, Artificial Sequence
  primer
gtaaaacgacggccagtcccttaaattctccttgtgcc

SEQ ID NO: 87594 - DNA, 21 bp, Artificial Sequence
  primer
tggctcagggttgtattaagg

SEQ ID NO: 87595 - DNA, 21 bp, Artificial Sequence
  primer
gggaagtaagtccctgaggtg

SEQ ID NO: 87596 - DNA, 37 bp, Artificial Sequence
  primer
gtaaaacgacggccagtaggtgctggtcctcattctg

SEQ ID NO: 87597 - DNA, 20 bp, Artificial Sequence
  primer
gacagctaagggaacccacc

SEQ ID NO: 87598 - DNA, 38 bp, Artificial Sequence
  primer
gtaaaacgacggccagtgtccgaaggaaaggatgagtg

SEQ ID NO: 87599 - DNA, 38 bp, Artificial Sequence
  primer
gtaaaacgacggccagtggttagggtctgacagttggc

SEQ ID NO: 87600 - DNA, 38 bp, Artificial Sequence
  primer
gtaaaacgacggccagtctattatggttgagggcaggg

SEQ ID NO: 87601 - DNA, 20 bp, Artificial Sequence
  primer
ctccactgtctccagggttg

SEQ ID NO: 87602 - DNA, 21 bp, Artificial Sequence
  primer
ctgaggagttggtttcaaggg

SEQ ID NO: 87603 - DNA, 21 bp, Artificial Sequence
  primer
tgttaccaccattgagatggc

SEQ ID NO: 87604 - DNA, 38 bp, Artificial Sequence
  primer
gtaaaacgacggccagtagcaagtccagagtctcggtg

SEQ ID NO: 87605 - DNA, 21 bp, Artificial Sequence
  primer
gcctcctccaagtgtgaaatg

SEQ ID NO: 87606 - DNA, 40 bp, Artificial Sequence
  primer
gtaaaacgacggccagtaaagagctaagcaacatgtggag

SEQ ID NO: 87607 - DNA, 38 bp, Artificial Sequence
  primer
gtaaaacgacggccagttattggtgggaaacactgctc

SEQ ID NO: 87608 - DNA, 24 bp, Artificial Sequence
  primer
caggagaatgatcaaattcaaacc

SEQ ID NO: 87609 - DNA, 38 bp, Artificial Sequence
  primer
gtaaaacgacggccagttaaccaacagcatcagccttc

SEQ ID NO: 87610 - DNA, 22 bp, Artificial Sequence
  primer
ggaagcagtgagaagacctcag

SEQ ID NO: 87611 - DNA, 27 bp, Artificial Sequence
  primer
ttctactgaattgtatcgtcctaaagc

SEQ ID NO: 87612 - DNA, 25 bp, Artificial Sequence
  primer
cgattgtaaagatgagaaacaaacc

SEQ ID NO: 87613 - DNA, 40 bp, Artificial Sequence
  primer
gtaaaacgacggccagtcgcaaatactgaagatctttccc

SEQ ID NO: 87614 - DNA, 39 bp, Artificial Sequence
  primer
gtaaaacgacggccagttgtcagtgtcttacagcttggg

SEQ ID NO: 87615 - DNA, 21 bp, Artificial Sequence
  primer
aataaagcatgctgaccctcc

SEQ ID NO: 87616 - DNA, 21 bp, Artificial Sequence
  primer
aagaccacaaagctactgccc

SEQ ID NO: 87617 - DNA, 38 bp, Artificial Sequence
  primer
gtaaaacgacggccagtcagtgcacgaggttgcaatag

SEQ ID NO: 87618 - DNA, 38 bp, Artificial Sequence
  primer
gtaaaacgacggccagtaaaggaacactctccactggg

SEQ ID NO: 87619 - DNA, 39 bp, Artificial Sequence
  primer
gtaaaacgacggccagtcatcttggctatccctgtgttc

SEQ ID NO: 87620 - DNA, 21 bp, Artificial Sequence
  primer
tatggatatttgcccaccctc

SEQ ID NO: 87621 - DNA, 21 bp, Artificial Sequence
  primer
cgatgtagcctaggaaggcag

SEQ ID NO: 87622 - DNA, 20 bp, Artificial Sequence
  primer
ctgggtcacaaagcaagacc

SEQ ID NO: 87623 - DNA, 21 bp, Artificial Sequence
  primer
ctgccctatcaacatcacagg

SEQ ID NO: 87624 - DNA, 18 bp, Artificial Sequence
  primer
ctgggcgacagagaccct

SEQ ID NO: 87625 - DNA, 21 bp, Artificial Sequence
  primer
gtgactcagttgggagggaac

SEQ ID NO: 87626 - DNA, 20 bp, Artificial Sequence
  primer
gatggtgagcgcctgtagtc

SEQ ID NO: 87627 - DNA, 21 bp, Artificial Sequence
  primer
gctctgctataaagccttccc

SEQ ID NO: 87628 - DNA, 38 bp, Artificial Sequence
  primer
gtaaaacgacggccagtgtagaggtggcttcatgctgg

SEQ ID NO: 87629 - DNA, 19 bp, Artificial Sequence
  primer
agacggtcggttccaagtg

SEQ ID NO: 87630 - DNA, 20 bp, Artificial Sequence
  primer
tttcctggacatcacgaacc

SEQ ID NO: 87631 - DNA, 25 bp, Artificial Sequence
  primer
tgagactggaattagggaagattag

SEQ ID NO: 87632 - DNA, 21 bp, Artificial Sequence
  primer
ggtggccatgagtatttctcc

SEQ ID NO: 87633 - DNA, 21 bp, Artificial Sequence
  primer
cgagtcaagattgtgccactg

SEQ ID NO: 87634 - DNA, 25 bp, Artificial Sequence
  primer
tttatttaccagacttggcttatgg

SEQ ID NO: 87635 - DNA, 21 bp, Artificial Sequence
  primer
gagtcagcatttgaacccaag

SEQ ID NO: 87636 - DNA, 21 bp, Artificial Sequence
  primer
taaagaggaggagaaatcggc

SEQ ID NO: 87637 - DNA, 20 bp, Artificial Sequence
  primer
aaggcctttccagaacatgg

SEQ ID NO: 87638 - DNA, 38 bp, Artificial Sequence
  primer
gtaaaacgacggccagtaggagacttctggttgttccc

SEQ ID NO: 87639 - DNA, 21 bp, Artificial Sequence
  primer
gagacttcaatagctgcaggg

SEQ ID NO: 87640 - DNA, 22 bp, Artificial Sequence
  primer
gcaaccatgtttcacaataccc

SEQ ID NO: 87641 - DNA, 37 bp, Artificial Sequence
  primer
gtaaaacgacggccagtatgcaggctttgagagggac

SEQ ID NO: 87642 - DNA, 39 bp, Artificial Sequence
  primer
gtaaaacgacggccagttgatacaagttggcaggatcac

SEQ ID NO: 87643 - DNA, 22 bp, Artificial Sequence
  primer
tttaccttcgctgtcaggaaac

SEQ ID NO: 87644 - DNA, 38 bp, Artificial Sequence
  primer
gtaaaacgacggccagtgttatcggagatggtggcttc

SEQ ID NO: 87645 - DNA, 20 bp, Artificial Sequence
  primer
tccatgtaaacaagcccaaa

SEQ ID NO: 87646 - DNA, 21 bp, Artificial Sequence
  primer
tggcagctactgatcaactgg

SEQ ID NO: 87647 - DNA, 21 bp, Artificial Sequence
  primer
gagacagatggacactcaggg

SEQ ID NO: 87648 - DNA, 39 bp, Artificial Sequence
  primer
gtaaaacgacggccagttgatggttgaattctaggcagg

SEQ ID NO: 87649 - DNA, 47 bp, Artificial Sequence
  primer
gtaaaacgacggccagtcagatagttcccttaatcctagattacaca

SEQ ID NO: 87650 - DNA, 38 bp, Artificial Sequence
  primer
gtaaaacgacggccagtcaagatggcaagcttctaggg

SEQ ID NO: 87651 - DNA, 20 bp, Artificial Sequence
  primer
cttccatgggacttgccttc

SEQ ID NO: 87652 - DNA, 35 bp, Artificial Sequence
  primer
gtaaaacgacggccagtgcacacacagcctgaccc

SEQ ID NO: 87653 - DNA, 25 bp, Artificial Sequence
  primer
tctctttattgaacgccagttattc

SEQ ID NO: 87654 - DNA, 21 bp, Artificial Sequence
  primer
aaagaaggccactgctctacc

SEQ ID NO: 87655 - DNA, 38 bp, Artificial Sequence
  primer
gtaaaacgacggccagtaagccaggaaacagtgtggag

SEQ ID NO: 87656 - DNA, 38 bp, Artificial Sequence
  primer
gtaaaacgacggccagtccagctccaaacacttgactc

SEQ ID NO: 87657 - DNA, 38 bp, Artificial Sequence
  primer
gtaaaacgacggccagtcatagtgtcgatctcgttgcc

SEQ ID NO: 87658 - DNA, 38 bp, Artificial Sequence
  primer
gtaaaacgacggccagtgacagcccatctcgtagaagc

SEQ ID NO: 87659 - DNA, 18 bp, Artificial Sequence
  primer
gcgtactcgaccaccacg

SEQ ID NO: 87660 - DNA, 20 bp, Artificial Sequence
  primer
aagtgctgaccacgtcatcc

SEQ ID NO: 87661 - DNA, 18 bp, Artificial Sequence
  primer
acggtaggagcgcagcag

SEQ ID NO: 87662 - DNA, 37 bp, Artificial Sequence
  primer
gtaaaacgacggccagtaggtgaaccaagaaggccag

SEQ ID NO: 87663 - DNA, 34 bp, Artificial Sequence
  primer
gtaaaacgacggccagtagcgacctccctcctcc

SEQ ID NO: 87664 - DNA, 20 bp, Artificial Sequence
  primer
gcccagagtcagaccctctc

SEQ ID NO: 87665 - DNA, 38 bp, Artificial Sequence
  primer
gtaaaacgacggccagttgactgggcttagggaagttg

SEQ ID NO: 87666 - DNA, 38 bp, Artificial Sequence
  primer
gtaaaacgacggccagtcccaaagactcagatccaggt

SEQ ID NO: 87667 - DNA, 21 bp, Artificial Sequence
  primer
ctagactcccagcatcccttc

SEQ ID NO: 87668 - DNA, 36 bp, Artificial Sequence
  primer
gtaaaacgacggccagtggctcctaggctgagcttt

SEQ ID NO: 87669 - DNA, 21 bp, Artificial Sequence
  primer
agctgttgctggaagtggaac

SEQ ID NO: 87670 - DNA, 38 bp, Artificial Sequence
  primer
gtaaaacgacggccagtgacctgagagaagcgaagtgg

SEQ ID NO: 87671 - DNA, 38 bp, Artificial Sequence
  primer
gtaaaacgacggccagtctgcagccgcctagtttacag

SEQ ID NO: 87672 - DNA, 20 bp, Artificial Sequence
  primer
attggaggtgatcatgggtg

SEQ ID NO: 87673 - DNA, 38 bp, Artificial Sequence
  primer
gtaaaacgacggccagtaccataggacggtggtagtgc

SEQ ID NO: 87674 - DNA, 37 bp, Artificial Sequence
  primer
gtaaaacgacggccagtcccaaactcattctccgagg

SEQ ID NO: 87675 - DNA, 36 bp, Artificial Sequence
  primer
gtaaaacgacggccagtgaggctgtgttgagggagg

SEQ ID NO: 87676 - DNA, 21 bp, Artificial Sequence
  primer
agattgggttgtgaggttccc

SEQ ID NO: 87677 - DNA, 36 bp, Artificial Sequence
  primer
gtaaaacgacggccagtctgagagtcctccatgggc

SEQ ID NO: 87678 - DNA, 19 bp, Artificial Sequence
  primer
agatgtcctgtgccctgct

SEQ ID NO: 87679 - DNA, 36 bp, Artificial Sequence
  primer
gtaaaacgacggccagtcttgggaggtgctcagagg

SEQ ID NO: 87680 - DNA, 19 bp, Artificial Sequence
  primer
aaagtgcagctgcctccag

SEQ ID NO: 87681 - DNA, 38 bp, Artificial Sequence
  primer
gtaaaacgacggccagtccctccacaccctacttgttc

SEQ ID NO: 87682 - DNA, 21 bp, Artificial Sequence
  primer
ggataatcagagggactgccc

SEQ ID NO: 87683 - DNA, 38 bp, Artificial Sequence
  primer
gtaaaacgacggccagtctctgcttctctggccttcag

SEQ ID NO: 87684 - DNA, 21 bp, Artificial Sequence
  primer
ctctgcttctctggccttcag

SEQ ID NO: 87685 - DNA, 37 bp, Artificial Sequence
  primer
gtaaaacgacggccagttgtctagggcacagtcctgc

SEQ ID NO: 87686 - DNA, 36 bp, Artificial Sequence
  primer
gtaaaacgacggccagtcagagtctgagccgactgg

SEQ ID NO: 87687 - DNA, 21 bp, Artificial Sequence
  primer
tccttaccatgggagtggaag

SEQ ID NO: 87688 - DNA, 38 bp, Artificial Sequence
  primer
gtaaaacgacggccagttccttaccatgggagtggaag

SEQ ID NO: 87689 - DNA, 38 bp, Artificial Sequence
  primer
gtaaaacgacggccagtgaaacaacttggtgggcagag

SEQ ID NO: 87690 - DNA, 35 bp, Artificial Sequence
  primer
gtaaaacgacggccagtaaagagcagcccgaggtc

SEQ ID NO: 87691 - DNA, 20 bp, Artificial Sequence
  primer
gtgtctgcaggtggaagagc

SEQ ID NO: 87692 - DNA, 20 bp, Artificial Sequence
  primer
ccatgccagctgtacctttg

SEQ ID NO: 87693 - DNA, 20 bp, Artificial Sequence
  primer
atcattctgaggctgccatt

SEQ ID NO: 87694 - DNA, 38 bp, Artificial Sequence
  primer
gtaaaacgacggccagtctgcacaggaaggactcactc

SEQ ID NO: 87695 - DNA, 19 bp, Artificial Sequence
  primer
gtgagcaggcagagagctg

SEQ ID NO: 87696 - DNA, 38 bp, Artificial Sequence
  primer
gtaaaacgacggccagtgtcttctcccagggttctgtg

SEQ ID NO: 87697 - DNA, 21 bp, Artificial Sequence
  primer
ctttgtgccatgctgtgactc

SEQ ID NO: 87698 - DNA, 38 bp, Artificial Sequence
  primer
gtaaaacgacggccagtttctgagcttaggccaggaag

SEQ ID NO: 87699 - DNA, 21 bp, Artificial Sequence
  primer
atacccagccagggtttcttc

SEQ ID NO: 87700 - DNA, 37 bp, Artificial Sequence
  primer
gtaaaacgacggccagtgacctgccacaccttctcag

SEQ ID NO: 87701 - DNA, 21 bp, Artificial Sequence
  primer
gagtactaggcaggactgggc

SEQ ID NO: 87702 - DNA, 21 bp, Artificial Sequence
  primer
ccaggcctaggacagacaaag

SEQ ID NO: 87703 - DNA, 38 bp, Artificial Sequence
  primer
gtaaaacgacggccagtctgaccatcaggtcacaggac

SEQ ID NO: 87704 - DNA, 38 bp, Artificial Sequence
  primer
gtaaaacgacggccagtgctctatgtgctgggaactgg

SEQ ID NO: 87705 - DNA, 38 bp, Artificial Sequence
  primer
gtaaaacgacggccagtgattgacctgtgtcctccacc

SEQ ID NO: 87706 - DNA, 37 bp, Artificial Sequence
  primer
gtaaaacgacggccagtgcccggcctattcttatcac

SEQ ID NO: 87707 - DNA, 38 bp, Artificial Sequence
  primer
gtaaaacgacggccagttttcacccttgtcagcaacag

SEQ ID NO: 87708 - DNA, 20 bp, Artificial Sequence
  primer
ctcccatggtggtcattcag

SEQ ID NO: 87709 - DNA, 38 bp, Artificial Sequence
  primer
gtaaaacgacggccagtaaagttaggaaacggaagcgt

SEQ ID NO: 87710 - DNA, 39 bp, Artificial Sequence
  primer
gtaaaacgacggccagtggctaaggctatgctatttcgg

SEQ ID NO: 87711 - DNA, 42 bp, Artificial Sequence
  primer
gtaaaacgacggccagtttgtctctcaagagaaatcctaagc

SEQ ID NO: 87712 - DNA, 21 bp, Artificial Sequence
  primer
ctagtctgggtttcacgtgcc

SEQ ID NO: 87713 - DNA, 38 bp, Artificial Sequence
  primer
gtaaaacgacggccagtcctgcccaacgctactctcta

SEQ ID NO: 87714 - DNA, 39 bp, Artificial Sequence
  primer
gtaaaacgacggccagtcagctttacccagtcagtgctc

SEQ ID NO: 87715 - DNA, 38 bp, Artificial Sequence
  primer
gtaaaacgacggccagttgcatattcccatgatcaacc

SEQ ID NO: 87716 - DNA, 21 bp, Artificial Sequence
  primer
gtggtccaccaaggtaagagg

SEQ ID NO: 87717 - DNA, 21 bp, Artificial Sequence
  primer
ggtcctctctgacctccaaac

SEQ ID NO: 87718 - DNA, 37 bp, Artificial Sequence
  primer
gtaaaacgacggccagtctggaagtgaaatcgcgaag

SEQ ID NO: 87719 - DNA, 20 bp, Artificial Sequence
  primer
acgtcaaaccgctctctctg

SEQ ID NO: 87720 - DNA, 20 bp, Artificial Sequence
  primer
ctcctctcccggtttctgtc

SEQ ID NO: 87721 - DNA, 21 bp, Artificial Sequence
  primer
gttcaacgcatcttacgaacg

SEQ ID NO: 87722 - DNA, 21 bp, Artificial Sequence
  primer
ggccactgagagtggagaaac

SEQ ID NO: 87723 - DNA, 21 bp, Artificial Sequence
  primer
ggctgatcagaacttggtgtc

SEQ ID NO: 87724 - DNA, 35 bp, Artificial Sequence
  primer
gtaaaacgacggccagtgtgcgtagggattcgcag

SEQ ID NO: 87725 - DNA, 21 bp, Artificial Sequence
  primer
ctgctttcccagagcctcttc

SEQ ID NO: 87726 - DNA, 34 bp, Artificial Sequence
  primer
gtaaaacgacggccagtcctccgctcccagctac

SEQ ID NO: 87727 - DNA, 38 bp, Artificial Sequence
  primer
gtaaaacgacggccagtgcagatcctaggaacctggtg

SEQ ID NO: 87728 - DNA, 38 bp, Artificial Sequence
  primer
gtaaaacgacggccagtagtcctgggacatcttccctc

SEQ ID NO: 87729 - DNA, 21 bp, Artificial Sequence
  primer
tgcttaggttatgtccagggc

SEQ ID NO: 87730 - DNA, 21 bp, Artificial Sequence
  primer
ctcatctgccctgtgaatctc

SEQ ID NO: 87731 - DNA, 21 bp, Artificial Sequence
  primer
agtgccagagcctcacgatag

SEQ ID NO: 87732 - DNA, 38 bp, Artificial Sequence
  primer
gtaaaacgacggccagtcaagggttagtccagcacctc

SEQ ID NO: 87733 - DNA, 38 bp, Artificial Sequence
  primer
gtaaaacgacggccagtagcctcccagctattctgttc

SEQ ID NO: 87734 - DNA, 35 bp, Artificial Sequence
  primer
gtaaaacgacggccagtctcagcctaggaccgcgt

SEQ ID NO: 87735 - DNA, 36 bp, Artificial Sequence
  primer
gtaaaacgacggccagtcaacttagcgccctggatg

SEQ ID NO: 87736 - DNA, 40 bp, Artificial Sequence
  primer
gtaaaacgacggccagtaaaccaggttaagaggaaggtcc

SEQ ID NO: 87737 - DNA, 38 bp, Artificial Sequence
  primer
gtaaaacgacggccagtagtgccagagcctcacgatag

SEQ ID NO: 87738 - DNA, 38 bp, Artificial Sequence
  primer
gtaaaacgacggccagtagaagtccacttggaggttgg

SEQ ID NO: 87739 - DNA, 22 bp, Artificial Sequence
  primer
aagaattgattctagggccagc

SEQ ID NO: 87740 - DNA, 38 bp, Artificial Sequence
  primer
gtaaaacgacggccagtatgcagatatcaggctgggag

SEQ ID NO: 87741 - DNA, 21 bp, Artificial Sequence
  primer
ttgtcagaatggctcaaccac

SEQ ID NO: 87742 - DNA, 21 bp, Artificial Sequence
  primer
tcccaaactttcaaagccaac

SEQ ID NO: 87743 - DNA, 20 bp, Artificial Sequence
  primer
aacattggtttcatggtgcc

SEQ ID NO: 87744 - DNA, 38 bp, Artificial Sequence
  primer
gtaaaacgacggccagtggtctgaaactgggaatgagc

SEQ ID NO: 87745 - DNA, 38 bp, Artificial Sequence
  primer
gtaaaacgacggccagttccaaatctaccaggagccag

SEQ ID NO: 87746 - DNA, 39 bp, Artificial Sequence
  primer
gtaaaacgacggccagtcactgcctcttatctgagctgg

SEQ ID NO: 87747 - DNA, 20 bp, Artificial Sequence
  primer
ggtggcatgtgcctgtagtc

SEQ ID NO: 87748 - DNA, 38 bp, Artificial Sequence
  primer
gtaaaacgacggccagtggagcagcttctgtaaatggg

SEQ ID NO: 87749 - DNA, 20 bp, Artificial Sequence
  primer
aggatggccttgatctcctg

SEQ ID NO: 87750 - DNA, 21 bp, Artificial Sequence
  primer
acagggttagaaagcctgacc

SEQ ID NO: 87751 - DNA, 21 bp, Artificial Sequence
  primer
cttcctctcactcacttcccg

SEQ ID NO: 87752 - DNA, 21 bp, Artificial Sequence
  primer
cctgcttcatcagcatttacc

SEQ ID NO: 87753 - DNA, 38 bp, Artificial Sequence
  primer
gtaaaacgacggccagtttaccctcttggaccataggc

SEQ ID NO: 87754 - DNA, 38 bp, Artificial Sequence
  primer
gtaaaacgacggccagtaaggcaacgagcagaaatcac

SEQ ID NO: 87755 - DNA, 20 bp, Artificial Sequence
  primer
ctgcttcatcttgggaaggg

SEQ ID NO: 87756 - DNA, 37 bp, Artificial Sequence
  primer
gtaaaacgacggccagtctgggaaagtcctgcaagtg

SEQ ID NO: 87757 - DNA, 38 bp, Artificial Sequence
  primer
gtaaaacgacggccagttaagacagccagttgtcctgg

SEQ ID NO: 87758 - DNA, 38 bp, Artificial Sequence
  primer
gtaaaacgacggccagttctctctgtctctctcgggct

SEQ ID NO: 87759 - DNA, 21 bp, Artificial Sequence
  primer
tgtagacaagacccatccacg

SEQ ID NO: 87760 - DNA, 38 bp, Artificial Sequence
  primer
gtaaaacgacggccagtgtgtgaactgctgtacgtgcc

SEQ ID NO: 87761 - DNA, 21 bp, Artificial Sequence
  primer
agagactcagccttcccattc

SEQ ID NO: 87762 - DNA, 36 bp, Artificial Sequence
  primer
gtaaaacgacggccagtaggccctgatccctgtttc

SEQ ID NO: 87763 - DNA, 37 bp, Artificial Sequence
  primer
gtaaaacgacggccagtcacgagggcctctaaccatc

SEQ ID NO: 87764 - DNA, 21 bp, Artificial Sequence
  primer
ctcacaccaggctcagagagg

SEQ ID NO: 87765 - DNA, 20 bp, Artificial Sequence
  primer
atctgactcgatccgaccct

SEQ ID NO: 87766 - DNA, 20 bp, Artificial Sequence
  primer
atgtcacacgtcactgcacc

SEQ ID NO: 87767 - DNA, 37 bp, Artificial Sequence
  primer
gtaaaacgacggccagtgtgggagtgagggacagatg

SEQ ID NO: 87768 - DNA, 38 bp, Artificial Sequence
  primer
gtaaaacgacggccagtgcagaggaagaaagtgcacag

SEQ ID NO: 87769 - DNA, 37 bp, Artificial Sequence
  primer
gtaaaacgacggccagtatctctggcaggagacctgg

SEQ ID NO: 87770 - DNA, 20 bp, Artificial Sequence
  primer
agaggtgaggccaggatgtc

SEQ ID NO: 87771 - DNA, 38 bp, Artificial Sequence
  primer
gtaaaacgacggccagtgacagtgggagaaacagacgg

SEQ ID NO: 87772 - DNA, 21 bp, Artificial Sequence
  primer
acagtttattccctgaggccc

SEQ ID NO: 87773 - DNA, 20 bp, Artificial Sequence
  primer
cccaagaagtcctcccactc

SEQ ID NO: 87774 - DNA, 21 bp, Artificial Sequence
  primer
ctcatttcaagggtttgcctc

SEQ ID NO: 87775 - DNA, 38 bp, Artificial Sequence
  primer
gtaaaacgacggccagtgaccacagctctctgcctttc

SEQ ID NO: 87776 - DNA, 21 bp, Artificial Sequence
  primer
tttggaagcgctctaacattg

SEQ ID NO: 87777 - DNA, 21 bp, Artificial Sequence
  primer
aagaagtctgacccggagagt

SEQ ID NO: 87778 - DNA, 39 bp, Artificial Sequence
  primer
gtaaaacgacggccagtgctcgaataggtaagtcaaggg

SEQ ID NO: 87779 - DNA, 21 bp, Artificial Sequence
  primer
ttcaagagcacatcaagggac

SEQ ID NO: 87780 - DNA, 20 bp, Artificial Sequence
  primer
gcaagctcaggacacagacc

SEQ ID NO: 87781 - DNA, 21 bp, Artificial Sequence
  primer
gagagtcgaaagcgatggaac

SEQ ID NO: 87782 - DNA, 38 bp, Artificial Sequence
  primer
gtaaaacgacggccagtcaatagcacgaaagcatgtgg

SEQ ID NO: 87783 - DNA, 21 bp, Artificial Sequence
  primer
tttgggagtcatttctcttgc

SEQ ID NO: 87784 - DNA, 38 bp, Artificial Sequence
  primer
gtaaaacgacggccagttagagggagggcaggctaaag

SEQ ID NO: 87785 - DNA, 21 bp, Artificial Sequence
  primer
aagactggtgggaagccatag

SEQ ID NO: 87786 - DNA, 38 bp, Artificial Sequence
  primer
gtaaaacgacggccagtacttggatagggtcctctggg

SEQ ID NO: 87787 - DNA, 36 bp, Artificial Sequence
  primer
gtaaaacgacggccagtagcagagggtgctgtgagc

SEQ ID NO: 87788 - DNA, 21 bp, Artificial Sequence
  primer
cagggtgacctttgagagagg

SEQ ID NO: 87789 - DNA, 20 bp, Artificial Sequence
  primer
ggcgtccaatgaggtatcag

SEQ ID NO: 87790 - DNA, 22 bp, Artificial Sequence
  primer
aaagaaagatgtctgctgcctg

SEQ ID NO: 87791 - DNA, 20 bp, Artificial Sequence
  primer
ccagtgtcacagctcccttc

SEQ ID NO: 87792 - DNA, 21 bp, Artificial Sequence
  primer
gtgtgagcacagcccttactg

SEQ ID NO: 87793 - DNA, 21 bp, Artificial Sequence
  primer
acaaattcaggtgctgggttg

SEQ ID NO: 87794 - DNA, 21 bp, Artificial Sequence
  primer
ccctacaacgctacagcaagc

SEQ ID NO: 87795 - DNA, 20 bp, Artificial Sequence
  primer
ggtatgtctcccaccctgag

SEQ ID NO: 87796 - DNA, 21 bp, Artificial Sequence
  primer
gaagccagaacgtgccattag

SEQ ID NO: 87797 - DNA, 38 bp, Artificial Sequence
  primer
gtaaaacgacggccagtcagctgagaatcacaacctgc

SEQ ID NO: 87798 - DNA, 39 bp, Artificial Sequence
  primer
gtaaaacgacggccagtcaaccttcactgcctattggac

SEQ ID NO: 87799 - DNA, 21 bp, Artificial Sequence
  primer
gggaggaaatagggtgaaagg

SEQ ID NO: 87800 - DNA, 19 bp, Artificial Sequence
  primer
cagggagacctgggagatg

SEQ ID NO: 87801 - DNA, 21 bp, Artificial Sequence
  primer
gtacagcctaatcctgcctgg

SEQ ID NO: 87802 - DNA, 21 bp, Artificial Sequence
  primer
taaaggaccctgagatcctgc

SEQ ID NO: 87803 - DNA, 38 bp, Artificial Sequence
  primer
gtaaaacgacggccagtgtcttaaggtgctcacccacc

SEQ ID NO: 87804 - DNA, 38 bp, Artificial Sequence
  primer
gtaaaacgacggccagtctgatcagggcctaggtcaac

SEQ ID NO: 87805 - DNA, 39 bp, Artificial Sequence
  primer
gtaaaacgacggccagtgctatcaggaaaggatgtcgtg

SEQ ID NO: 87806 - DNA, 21 bp, Artificial Sequence
  primer
ttcctgtgctggactatgtgg

SEQ ID NO: 87807 - DNA, 21 bp, Artificial Sequence
  primer
taacactgtctcctccctggc

SEQ ID NO: 87808 - DNA, 38 bp, Artificial Sequence
  primer
gtaaaacgacggccagtcctgatatttgcccactctgg

SEQ ID NO: 87809 - DNA, 21 bp, Artificial Sequence
  primer
aattggtgcctcagtttctgc

SEQ ID NO: 87810 - DNA, 21 bp, Artificial Sequence
  primer
gggcaagaaatggaggagtag

SEQ ID NO: 87811 - DNA, 38 bp, Artificial Sequence
  primer
gtaaaacgacggccagtagtagtgcttcagggccagag

SEQ ID NO: 87812 - DNA, 20 bp, Artificial Sequence
  primer
acccaacagatcactgccac

SEQ ID NO: 87813 - DNA, 21 bp, Artificial Sequence
  primer
ctcggactcaaggatctcacc

SEQ ID NO: 87814 - DNA, 20 bp, Artificial Sequence
  primer
cctcctccaagaagtcctcc

SEQ ID NO: 87815 - DNA, 37 bp, Artificial Sequence
  primer
gtaaaacgacggccagtcaaaccctgaagtgtgtggg

SEQ ID NO: 87816 - DNA, 38 bp, Artificial Sequence
  primer
gtaaaacgacggccagtatgcactggcagaagtttagg

SEQ ID NO: 87817 - DNA, 21 bp, Artificial Sequence
  primer
tgggtgacgtcatgttgtttg

SEQ ID NO: 87818 - DNA, 21 bp, Artificial Sequence
  primer
ccagaccctccaaatacatgc

SEQ ID NO: 87819 - DNA, 21 bp, Artificial Sequence
  primer
tcctcacttcaagggcctaag

SEQ ID NO: 87820 - DNA, 21 bp, Artificial Sequence
  primer
ggagggcctcactgatactcc

SEQ ID NO: 87821 - DNA, 21 bp, Artificial Sequence
  primer
ctcacttcacagcaaattccc

SEQ ID NO: 87822 - DNA, 38 bp, Artificial Sequence
  primer
gtaaaacgacggccagttgagcatcttcccttccaatc

SEQ ID NO: 87823 - DNA, 21 bp, Artificial Sequence
  primer
gatttgggttagagcctctgg

SEQ ID NO: 87824 - DNA, 21 bp, Artificial Sequence
  primer
ggcttgtgacagtggtaatgg

SEQ ID NO: 87825 - DNA, 21 bp, Artificial Sequence
  primer
tgagggctgatagtgttgacg

SEQ ID NO: 87826 - DNA, 21 bp, Artificial Sequence
  primer
gatttggaggctttcatcgac

SEQ ID NO: 87827 - DNA, 38 bp, Artificial Sequence
  primer
gtaaaacgacggccagtatgcttggaaggaagaggacc

SEQ ID NO: 87828 - DNA, 21 bp, Artificial Sequence
  primer
gaccatggaagggaatgtttg

SEQ ID NO: 87829 - DNA, 18 bp, Artificial Sequence
  primer
acctctctccgctcccac

SEQ ID NO: 87830 - DNA, 21 bp, Artificial Sequence
  primer
acaatgagccaagatcacacc

SEQ ID NO: 87831 - DNA, 20 bp, Artificial Sequence
  primer
gcctgggtaacacagtgagg

SEQ ID NO: 87832 - DNA, 23 bp, Artificial Sequence
  primer
tcacgtaaggtttaatcaaaggg

SEQ ID NO: 87833 - DNA, 38 bp, Artificial Sequence
  primer
gtaaaacgacggccagtactggtatcggagagactggc

SEQ ID NO: 87834 - DNA, 38 bp, Artificial Sequence
  primer
gtaaaacgacggccagtcccacacacaattcattacgg

SEQ ID NO: 87835 - DNA, 23 bp, Artificial Sequence
  primer
tgctcgataatacattcccagtg

SEQ ID NO: 87836 - DNA, 18 bp, Artificial Sequence
  primer
tccacctgcctcagcatc

SEQ ID NO: 87837 - DNA, 25 bp, Artificial Sequence
  primer
cagttagatttcccattcctgttag

SEQ ID NO: 87838 - DNA, 22 bp, Artificial Sequence
  primer
ggcacatgatggaggatgttac

SEQ ID NO: 87839 - DNA, 36 bp, Artificial Sequence
  primer
gtaaaacgacggccagtctgtcctggtgacagctcg

SEQ ID NO: 87840 - DNA, 21 bp, Artificial Sequence
  primer
gccagagtttaattcattgcg

SEQ ID NO: 87841 - DNA, 20 bp, Artificial Sequence
  primer
ctccagaagccctcaggttc

SEQ ID NO: 87842 - DNA, 21 bp, Artificial Sequence
  primer
ggcattgcattcatcactttg

SEQ ID NO: 87843 - DNA, 21 bp, Artificial Sequence
  primer
cctttggttcctcatctttgt

SEQ ID NO: 87844 - DNA, 21 bp, Artificial Sequence
  primer
gcaccatcgtttgtatggatt

SEQ ID NO: 87845 - DNA, 34 bp, Artificial Sequence
  primer
gtaaaacgacggccagtggacctcgcggtctcac

SEQ ID NO: 87846 - DNA, 35 bp, Artificial Sequence
  primer
gtaaaacgacggccagtcccagcagacatggaggg

SEQ ID NO: 87847 - DNA, 38 bp, Artificial Sequence
  primer
gtaaaacgacggccagtagaccacccaagcacaggtag

SEQ ID NO: 87848 - DNA, 38 bp, Artificial Sequence
  primer
gtaaaacgacggccagttccatcctgtgcctagatgac

SEQ ID NO: 87849 - DNA, 37 bp, Artificial Sequence
  primer
gtaaaacgacggccagtatggtatcactgtggcctgg

SEQ ID NO: 87850 - DNA, 36 bp, Artificial Sequence
  primer
gtaaaacgacggccagtcaaggctaggccaggagtg

SEQ ID NO: 87851 - DNA, 22 bp, Artificial Sequence
  primer
agttctcaatctgggtggtagc

SEQ ID NO: 87852 - DNA, 38 bp, Artificial Sequence
  primer
gtaaaacgacggccagtaaagacagcaccagctcagtc

SEQ ID NO: 87853 - DNA, 22 bp, Artificial Sequence
  primer
tcattgcagtgggtcagtacac

SEQ ID NO: 87854 - DNA, 21 bp, Artificial Sequence
  primer
agtgcgctgtgactgtaccac

SEQ ID NO: 87855 - DNA, 21 bp, Artificial Sequence
  primer
agctccatcagggtctttgtc

SEQ ID NO: 87856 - DNA, 21 bp, Artificial Sequence
  primer
ccactgcctatgtctgtcctg

SEQ ID NO: 87857 - DNA, 20 bp, Artificial Sequence
  primer
cagacctgtgtgtgtgaggc

SEQ ID NO: 87858 - DNA, 21 bp, Artificial Sequence
  primer
tcacctggctgcaggttatac

SEQ ID NO: 87859 - DNA, 36 bp, Artificial Sequence
  primer
gtaaaacgacggccagtgtccctagcaggctttccc

SEQ ID NO: 87860 - DNA, 36 bp, Artificial Sequence
  primer
gtaaaacgacggccagtgtgacgcagggaggatgag

SEQ ID NO: 87861 - DNA, 38 bp, Artificial Sequence
  primer
gtaaaacgacggccagtaatcactgtgactcttggccc

SEQ ID NO: 87862 - DNA, 21 bp, Artificial Sequence
  primer
tttcagctgcctttgggttag

SEQ ID NO: 87863 - DNA, 37 bp, Artificial Sequence
  primer
gtaaaacgacggccagtctctccagggcaatgtgaac

SEQ ID NO: 87864 - DNA, 38 bp, Artificial Sequence
  primer
gtaaaacgacggccagttaactgcactggaaaggaggg

SEQ ID NO: 87865 - DNA, 23 bp, Artificial Sequence
  primer
acattcagaaagaaattggcaag

SEQ ID NO: 87866 - DNA, 22 bp, Artificial Sequence
  primer
cagggacttgcatccattattc

SEQ ID NO: 87867 - DNA, 21 bp, Artificial Sequence
  primer
ccaaaccataatcacaggagg

SEQ ID NO: 87868 - DNA, 22 bp, Artificial Sequence
  primer
gcttaccttgccttacatttgg

SEQ ID NO: 87869 - DNA, 37 bp, Artificial Sequence
  primer
gtaaaacgacggccagtgatcagtcctcagctggtgc

SEQ ID NO: 87870 - DNA, 42 bp, Artificial Sequence
  primer
gtaaaacgacggccagtaccttgaagaaattacctcagtttg

SEQ ID NO: 87871 - DNA, 39 bp, Artificial Sequence
  primer
gtaaaacgacggccagttggatcatagcaggatcatagg

SEQ ID NO: 87872 - DNA, 38 bp, Artificial Sequence
  primer
gtaaaacgacggccagtaaacgagggactggctaactc

SEQ ID NO: 87873 - DNA, 21 bp, Artificial Sequence
  primer
aacgagggaggaggctaagtg

SEQ ID NO: 87874 - DNA, 21 bp, Artificial Sequence
  primer
atcaaaccagaactcccatcc

SEQ ID NO: 87875 - DNA, 21 bp, Artificial Sequence
  primer
aaagggctcaaggatttgttg

SEQ ID NO: 87876 - DNA, 21 bp, Artificial Sequence
  primer
aatgtagggtgggagaaaggg

SEQ ID NO: 87877 - DNA, 23 bp, Artificial Sequence
  primer
aattctaagatgcacatgttccc

SEQ ID NO: 87878 - DNA, 38 bp, Artificial Sequence
  primer
gtaaaacgacggccagtattggaaccagagtgaccacc

SEQ ID NO: 87879 - DNA, 21 bp, Artificial Sequence
  primer
acggtggctgatttgataagg

SEQ ID NO: 87880 - DNA, 38 bp, Artificial Sequence
  primer
gtaaaacgacggccagtcacagatggaatcagtccagg

SEQ ID NO: 87881 - DNA, 18 bp, Artificial Sequence
  primer
cctgctgttccctcagcc

SEQ ID NO: 87882 - DNA, 38 bp, Artificial Sequence
  primer
gtaaaacgacggccagttcctcttccacccactgtacc

SEQ ID NO: 87883 - DNA, 38 bp, Artificial Sequence
  primer
gtaaaacgacggccagttgaaccaggtccttctccaag

SEQ ID NO: 87884 - DNA, 21 bp, Artificial Sequence
  primer
gaattcaaaggtggcttggag

SEQ ID NO: 87885 - DNA, 21 bp, Artificial Sequence
  primer
acccttccttcccaatctcac

SEQ ID NO: 87886 - DNA, 21 bp, Artificial Sequence
  primer
tgtatgccacacccttccttc

SEQ ID NO: 87887 - DNA, 39 bp, Artificial Sequence
  primer
gtaaaacgacggccagtgcacgtgtattacttgttgccc

SEQ ID NO: 87888 - DNA, 21 bp, Artificial Sequence
  primer
gttgtttgaactgggaggtgg

SEQ ID NO: 87889 - DNA, 40 bp, Artificial Sequence
  primer
gtaaaacgacggccagtcctattagccattaatcttgccg

SEQ ID NO: 87890 - DNA, 22 bp, Artificial Sequence
  primer
tggtttaaagaagggcaagacc

SEQ ID NO: 87891 - DNA, 27 bp, Artificial Sequence
  primer
tgtttaaattgtgtagaacagaaatgg

SEQ ID NO: 87892 - DNA, 21 bp, Artificial Sequence
  primer
ctcctgtgttaatgaggcagc

SEQ ID NO: 87893 - DNA, 38 bp, Artificial Sequence
  primer
gtaaaacgacggccagttctgtcttcagcaggaggagg

SEQ ID NO: 87894 - DNA, 23 bp, Artificial Sequence
  primer
accctgctcacacagtgtaactc

SEQ ID NO: 87895 - DNA, 38 bp, Artificial Sequence
  primer
gtaaaacgacggccagtaacgatcaagttcctgtgctg

SEQ ID NO: 87896 - DNA, 38 bp, Artificial Sequence
  primer
gtaaaacgacggccagtagtttgctctgacacccttgg

SEQ ID NO: 87897 - DNA, 21 bp, Artificial Sequence
  primer
actgtagggctgcttctttgc

SEQ ID NO: 87898 - DNA, 21 bp, Artificial Sequence
  primer
tccaagaagaaatggttggtg

SEQ ID NO: 87899 - DNA, 21 bp, Artificial Sequence
  primer
gacccatgaatgaatggactg

SEQ ID NO: 87900 - DNA, 35 bp, Artificial Sequence; identical to SEQ ID NO: 11429
  primer

SEQ ID NO: 87901 - DNA, 35 bp, Artificial Sequence
  primer
gtaaaacgacggccagtcccaccagctcccttcac

SEQ ID NO: 87902 - DNA, 21 bp, Artificial Sequence
  primer
ataacagcgtgcagaatggac

SEQ ID NO: 87903 - DNA, 38 bp, Artificial Sequence
  primer
gtaaaacgacggccagtgcacatggtacattgaggacc

SEQ ID NO: 87904 - DNA, 25 bp, Artificial Sequence
  primer
cattggtagtttaaagagtcttggg

SEQ ID NO: 87905 - DNA, 22 bp, Artificial Sequence
  primer
aacctaaagccagtaacccagg

SEQ ID NO: 87906 - DNA, 37 bp, Artificial Sequence
  primer
gtaaaacgacggccagtccatcacttagcgaagagcg

SEQ ID NO: 87907 - DNA, 21 bp, Artificial Sequence
  primer
gcggtgtgcttactgctagtg

SEQ ID NO: 87908 - DNA, 21 bp, Artificial Sequence
  primer
aacttacagtccaggccatgc

SEQ ID NO: 87909 - DNA, 21 bp, Artificial Sequence
  primer
ggccaggtttggaaattactg

SEQ ID NO: 87910 - DNA, 38 bp, Artificial Sequence
  primer
gtaaaacgacggccagttctccgaacacaaacctcaac

SEQ ID NO: 87911 - DNA, 38 bp, Artificial Sequence
  primer
gtaaaacgacggccagttagcagggagttccttgttcc

SEQ ID NO: 87912 - DNA, 40 bp, Artificial Sequence
  primer
gtaaaacgacggccagtttctaactctacctccactgccc

SEQ ID NO: 87913 - DNA, 38 bp, Artificial Sequence
  primer
gtaaaacgacggccagtattgcaagtccttcaagtggg

SEQ ID NO: 87914 - DNA, 21 bp, Artificial Sequence
  primer
atggccattggaaattcagac

SEQ ID NO: 87915 - DNA, 38 bp, Artificial Sequence
  primer
gtaaaacgacggccagtctgctcctgtgaagacagcac

SEQ ID NO: 87916 - DNA, 38 bp, Artificial Sequence
  primer
gtaaaacgacggccagtacataggcagggtgtgtggag

SEQ ID NO: 87917 - DNA, 21 bp, Artificial Sequence
  primer
actggcttgtgaacacactgg

SEQ ID NO: 87918 - DNA, 21 bp, Artificial Sequence
  primer
gagggtttgcggacataattc

SEQ ID NO: 87919 - DNA, 39 bp, Artificial Sequence
  primer
gtaaaacgacggccagtgcatgacagatgaatgatttgg

SEQ ID NO: 87920 - DNA, 36 bp, Artificial Sequence
  primer
gtaaaacgacggccagtaaattcactgcccgcaatc

SEQ ID NO: 87921 - DNA, 19 bp, Artificial Sequence
  primer
gaggactggcctgactgct

SEQ ID NO: 87922 - DNA, 21 bp, Artificial Sequence
  primer
cgagagtcactaagggccatc

SEQ ID NO: 87923 - DNA, 21 bp, Artificial Sequence
  primer
gcatcacaacacatgtccctc

SEQ ID NO: 87924 - DNA, 38 bp, Artificial Sequence
  primer
gtaaaacgacggccagtagtctgcatttacatgctccg

SEQ ID NO: 87925 - DNA, 20 bp, Artificial Sequence
  primer
tgtcaaaccaggctgcagag

SEQ ID NO: 87926 - DNA, 21 bp, Artificial Sequence
  primer
cagaacctggcacaaacactg

SEQ ID NO: 87927 - DNA, 21 bp, Artificial Sequence
  primer
gaaatctcactgcctcccatc

SEQ ID NO: 87928 - DNA, 38 bp, Artificial Sequence
  primer
gtaaaacgacggccagtcagtgcaagctcacaaagagg

SEQ ID NO: 87929 - DNA, 38 bp, Artificial Sequence
  primer
gtaaaacgacggccagtttccctgaggaggacagaaac

SEQ ID NO: 87930 - DNA, 21 bp, Artificial Sequence
  primer
aggcacacagagaggaggaag

SEQ ID NO: 87931 - DNA, 21 bp, Artificial Sequence
  primer
ttcctcagacagcctcctttc

SEQ ID NO: 87932 - DNA, 38 bp, Artificial Sequence
  primer
gtaaaacgacggccagtacctccctcctactcatggtg

SEQ ID NO: 87933 - DNA, 38 bp, Artificial Sequence
  primer
gtaaaacgacggccagtagggttctatcccaaccagtc

SEQ ID NO: 87934 - DNA, 21 bp, Artificial Sequence
  primer
ctcccacaagcacacaaacac

SEQ ID NO: 87935 - DNA, 38 bp, Artificial Sequence
  primer
gtaaaacgacggccagtattctgtctgcgttgaccctc

SEQ ID NO: 87936 - DNA, 20 bp, Artificial Sequence
  primer
ccaggccaggctctattagc

SEQ ID NO: 87937 - DNA, 21 bp, Artificial Sequence
  primer
ctggtgaagtctggaactccc

SEQ ID NO: 87938 - DNA, 21 bp, Artificial Sequence
  primer
tcctcctatttctctgcgtcc

SEQ ID NO: 87939 - DNA, 21 bp, Artificial Sequence
  primer
ttggacaaactggtcgttgag

SEQ ID NO: 87940 - DNA, 21 bp, Artificial Sequence
  primer
tgtgtgtctaccctctgcctg

SEQ ID NO: 87941 - DNA, 21 bp, Artificial Sequence
  primer
cccaggttactgttactgccg

SEQ ID NO: 87942 - DNA, 21 bp, Artificial Sequence
  primer
taatcaccctcctttccttgg

SEQ ID NO: 87943 - DNA, 20 bp, Artificial Sequence
  primer
ccgcagctaagaaggatgtg

SEQ ID NO: 87944 - DNA, 21 bp, Artificial Sequence
  primer
agttccacacaacgatccaac

SEQ ID NO: 87945 - DNA, 38 bp, Artificial Sequence
  primer
gtaaaacgacggccagtggatacggaccaaatggaatc

SEQ ID NO: 87946 - DNA, 23 bp, Artificial Sequence
  primer
tggtccctagaagtaacaggctc

SEQ ID NO: 87947 - DNA, 21 bp, Artificial Sequence
  primer
cctctgatttctgtcgatccc

SEQ ID NO: 87948 - DNA, 39 bp, Artificial Sequence
  primer
gtaaaacgacggccagtctgcatttcaggatgaagaatg

SEQ ID NO: 87949 - DNA, 21 bp, Artificial Sequence
  primer
acttgaaccacgactgtgtcc

SEQ ID NO: 87950 - DNA, 37 bp, Artificial Sequence
  primer
gtaaaacgacggccagtctgcgattatggctgaaagg

SEQ ID NO: 87951 - DNA, 20 bp, Artificial Sequence
  primer
actgggacggacaaacacac

SEQ ID NO: 87952 - DNA, 22 bp, Artificial Sequence
  primer
gcagaattccttagtcctcagc

SEQ ID NO: 87953 - DNA, 38 bp, Artificial Sequence
  primer
gtaaaacgacggccagtgatttctccctgggacctagc

SEQ ID NO: 87954 - DNA, 21 bp, Artificial Sequence
  primer
gctaagtggatcctggaggtg

SEQ ID NO: 87955 - DNA, 21 bp, Artificial Sequence
  primer
cgcttcagaatcatgagatgc

SEQ ID NO: 87956 - DNA, 19 bp, Artificial Sequence
  primer
ggtcctggcatggtcagtc

SEQ ID NO: 87957 - DNA, 21 bp, Artificial Sequence
  primer
ttcagcactgccactctcatc

SEQ ID NO: 87958 - DNA, 38 bp, Artificial Sequence
  primer
gtaaaacgacggccagtcactcccaaggtcaccctaag

SEQ ID NO: 87959 - DNA, 38 bp, Artificial Sequence
  primer
gtaaaacgacggccagtgggagatggagcaagactctg

SEQ ID NO: 87960 - DNA, 21 bp, Artificial Sequence
  primer
tcttccatcctcaacctgtcc

SEQ ID NO: 87961 - DNA, 21 bp, Artificial Sequence
  primer
gtggaggatggagccttgtag

SEQ ID NO: 87962 - DNA, 21 bp, Artificial Sequence
  primer
ccaaggtcccttctagtgctg

SEQ ID NO: 87963 - DNA, 21 bp, Artificial Sequence
  primer
gaagtgggaccttctgtttgg

SEQ ID NO: 87964 - DNA, 21 bp, Artificial Sequence
  primer
agagtcacaattgcccgtagc

SEQ ID NO: 87965 - DNA, 21 bp, Artificial Sequence
  primer
tggatgcaaactggtaaggag

SEQ ID NO: 87966 - DNA, 21 bp, Artificial Sequence
  primer
cacagatgattctggcactgg

SEQ ID NO: 87967 - DNA, 36 bp, Artificial Sequence
  primer
gtaaaacgacggccagtaggacacccatgcctcaag

SEQ ID NO: 87968 - DNA, 38 bp, Artificial Sequence
  primer
gtaaaacgacggccagtggaggttatgaagttggcctc

SEQ ID NO: 87969 - DNA, 18 bp, Artificial Sequence
  primer
cccaacctcaggtgatgc

SEQ ID NO: 87970 - DNA, 21 bp, Artificial Sequence
  primer
tgcatgggcacattgttattc

SEQ ID NO: 87971 - DNA, 21 bp, Artificial Sequence
  primer
aggaaacgatgctagctctgc

SEQ ID NO: 87972 - DNA, 21 bp, Artificial Sequence
  primer
ttgcgattatccaagctttcc

SEQ ID NO: 87973 - DNA, 38 bp, Artificial Sequence
  primer
gtaaaacgacggccagttccaggtaacaattgaagccc

SEQ ID NO: 87974 - DNA, 38 bp, Artificial Sequence
  primer
gtaaaacgacggccagtttcagctcattggtgtatgcc

SEQ ID NO: 87975 - DNA, 21 bp, Artificial Sequence
  primer
ttcccagggctacaaagaaag

SEQ ID NO: 87976 - DNA, 21 bp, Artificial Sequence
  primer
aggcccattatacagctggtc

SEQ ID NO: 87977 - DNA, 21 bp, Artificial Sequence
  primer
catttccagggttcctctcag

SEQ ID NO: 87978 - DNA, 21 bp, Artificial Sequence
  primer
ggcaggccattagcagactac

SEQ ID NO: 87979 - DNA, 21 bp, Artificial Sequence
  primer
ggcacatagaatcatcccacc

SEQ ID NO: 87980 - DNA, 20 bp, Artificial Sequence
  primer
ctgtccctgcctctgtttcc

SEQ ID NO: 87981 - DNA, 20 bp, Artificial Sequence
  primer
gtttcagcatgggagtggtg

SEQ ID NO: 87982 - DNA, 21 bp, Artificial Sequence
  primer
agcacgaacttcacactcagc

SEQ ID NO: 87983 - DNA, 36 bp, Artificial Sequence
  primer
gtaaaacgacggccagtaacagcacacaggcagcac

SEQ ID NO: 87984 - DNA, 24 bp, Artificial Sequence
  primer
ggacagcctcaaatatcttcacag

SEQ ID NO: 87985 - DNA, 21 bp, Artificial Sequence
  primer
tgccctgaatagttcctgagc

SEQ ID NO: 87986 - DNA, 38 bp, Artificial Sequence
  primer
gtaaaacgacggccagtaagtacagtcccacccaggag

SEQ ID NO: 87987 - DNA, 21 bp, Artificial Sequence
  primer
gcctctgacaaacacatcctg

SEQ ID NO: 87988 - DNA, 38 bp, Artificial Sequence
  primer
gtaaaacgacggccagtaagactgcctttggtttctgc

SEQ ID NO: 87989 - DNA, 38 bp, Artificial Sequence
  primer
gtaaaacgacggccagtgcttccttgcttctcctcctc

SEQ ID NO: 87990 - DNA, 21 bp, Artificial Sequence
  primer
aatccatgggtaggaaatccc

SEQ ID NO: 87991 - DNA, 21 bp, Artificial Sequence
  primer
cttcggattagccttgtccac

SEQ ID NO: 87992 - DNA, 38 bp, Artificial Sequence
  primer
gtaaaacgacggccagtttcgctgatgaagttggtgag

SEQ ID NO: 87993 - DNA, 21 bp, Artificial Sequence
  primer
cactcccaaagagccttgttc

SEQ ID NO: 87994 - DNA, 38 bp, Artificial Sequence
  primer
gtaaaacgacggccagtcaggtttagttgctgctggac

SEQ ID NO: 87995 - DNA, 43 bp, Artificial Sequence
  primer
gtaaaacgacggccagtcaggaaatatcccaagactaggaaac

SEQ ID NO: 87996 - DNA, 21 bp, Artificial Sequence
  primer
ggaattctggctccatctttg

SEQ ID NO: 87997 - DNA, 21 bp, Artificial Sequence
  primer
tgctctccagggcattacaag

SEQ ID NO: 87998 - DNA, 38 bp, Artificial Sequence
  primer
gtaaaacgacggccagtagggcttaaacatgtgcttcc

SEQ ID NO: 87999 - DNA, 21 bp, Artificial Sequence
  primer
atttctcctttgtttggtggg

SEQ ID NO: 88000 - DNA, 22 bp, Artificial Sequence
  primer
cacaatccctaggcctaccaac

SEQ ID NO: 88001 - DNA, 37 bp, Artificial Sequence
  primer
gtaaaacgacggccagtggctaaacaggcgatcacac

SEQ ID NO: 88002 - DNA, 21 bp, Artificial Sequence
  primer
gcgtgtgtggattatgaggag

SEQ ID NO: 88003 - DNA, 21 bp, Artificial Sequence
  primer
agtcccttgtggagctaaccc

SEQ ID NO: 88004 - DNA, 21 bp, Artificial Sequence
  primer
cgactcaacccattgtttgtc

SEQ ID NO: 88005 - DNA, 18 bp, Artificial Sequence
  primer
acaggcatgtgccaccac

SEQ ID NO: 88006 - DNA, 38 bp, Artificial Sequence
  primer
gtaaaacgacggccagtctgcatggcaaatgtttattg

SEQ ID NO: 88007 - DNA, 21 bp, Artificial Sequence
  primer
gctggaattacaggtgtgagc

SEQ ID NO: 88008 - DNA, 36 bp, Artificial Sequence
  primer
gtaaaacgacggccagtagcagcccaaagtgtcagg

SEQ ID NO: 88009 - DNA, 40 bp, Artificial Sequence
  primer
gtaaaacgacggccagtccatatgcttgtggtttcttagg

SEQ ID NO: 88010 - DNA, 38 bp, Artificial Sequence
  primer
gtaaaacgacggccagtcagaatctacatgctgggcac

SEQ ID NO: 88011 - DNA, 19 bp, Artificial Sequence
  primer
gcagccaggtctggaactc

SEQ ID NO: 88012 - DNA, 38 bp, Artificial Sequence
  primer
gtaaaacgacggccagtgacagcctatgcctcacaaat

SEQ ID NO: 88013 - DNA, 21 bp, Artificial Sequence
  primer
tgtattagatggccatgtggg

SEQ ID NO: 88014 - DNA, 21 bp, Artificial Sequence
  primer
gcaagccacatgactgctaag

SEQ ID NO: 88015 - DNA, 37 bp, Artificial Sequence
  primer
gtaaaacgacggccagtgcacttccagcaaccaagag

SEQ ID NO: 88016 - DNA, 38 bp, Artificial Sequence
  primer
gtaaaacgacggccagttacagtccaggcccttctagg

SEQ ID NO: 88017 - DNA, 21 bp, Artificial Sequence
  primer
aatcaaggctggcttcttcag

SEQ ID NO: 88018 - DNA, 21 bp, Artificial Sequence
  primer
atccacccactccagtgaaac

SEQ ID NO: 88019 - DNA, 20 bp, Artificial Sequence
  primer
ctggccaggacagctttatg

SEQ ID NO: 88020 - DNA, 38 bp, Artificial Sequence
  primer
gtaaaacgacggccagtataacacaggcttccctcctg

SEQ ID NO: 88021 - DNA, 21 bp, Artificial Sequence
  primer
tcagtcctaagttggcaccac

SEQ ID NO: 88022 - DNA, 20 bp, Artificial Sequence
  primer
gagcctcaccttctgcattc

SEQ ID NO: 88023 - DNA, 38 bp, Artificial Sequence
  primer
gtaaaacgacggccagttgaattccatgaaagcaaagc

SEQ ID NO: 88024 - DNA, 21 bp, Artificial Sequence
  primer
caacacagcaagacccttgtc

SEQ ID NO: 88025 - DNA, 22 bp, Artificial Sequence
  primer
tgccatttcatataatcagccc

SEQ ID NO: 88026 - DNA, 39 bp, Artificial Sequence
  primer
gtaaaacgacggccagttcccatctccatacaggatgac

SEQ ID NO: 88027 - DNA, 38 bp, Artificial Sequence
  primer
gtaaaacgacggccagtagtaacaatggtccctgtggc

SEQ ID NO: 88028 - DNA, 38 bp, Artificial Sequence
  primer
gtaaaacgacggccagtaactccacctctcatgatccc

SEQ ID NO: 88029 - DNA, 21 bp, Artificial Sequence
  primer
aggtcagttcaggccactttc

SEQ ID NO: 88030 - DNA, 38 bp, Artificial Sequence; identical to SEQ ID NO: 88023
  primer

SEQ ID NO: 88031 - DNA, 36 bp, Artificial Sequence
  primer
gtaaaacgacggccagtgaggctacctcatggtggg

SEQ ID NO: 88032 - DNA, 39 bp, Artificial Sequence
  primer
gtaaaacgacggccagtgctcccacaacctatttgaaag

SEQ ID NO: 88033 - DNA, 38 bp, Artificial Sequence
  primer
gtaaaacgacggccagtaacacgcactcacttctacgg

SEQ ID NO: 88034 - DNA, 38 bp, Artificial Sequence
  primer
gtaaaacgacggccagtggttcagatgacccagctttc

SEQ ID NO: 88035 - DNA, 38 bp, Artificial Sequence
  primer
gtaaaacgacggccagtaacgtgctgcagtttcctatg

SEQ ID NO: 88036 - DNA, 22 bp, Artificial Sequence
  primer
ttatttagaggccctgcatctg

SEQ ID NO: 88037 - DNA, 40 bp, Artificial Sequence
  primer
gtaaaacgacggccagtcagcccatttctatcactacgtc

SEQ ID NO: 88038 - DNA, 38 bp, Artificial Sequence
  primer
gtaaaacgacggccagttaggcgggcgtagtacatctc

SEQ ID NO: 88039 - DNA, 22 bp, Artificial Sequence
  primer
gccagataaggtgggctagttc

SEQ ID NO: 88040 - DNA, 38 bp, Artificial Sequence
  primer
gtaaaacgacggccagtccagcacccagtacttcttcc

SEQ ID NO: 88041 - DNA, 20 bp, Artificial Sequence
  primer
catcctgtggacaaacggac

SEQ ID NO: 88042 - DNA, 23 bp, Artificial Sequence
  primer
gctcaatactcattcagacgcag

SEQ ID NO: 88043 - DNA, 21 bp, Artificial Sequence
  primer
aagaaggaggctgtgttcagg

SEQ ID NO: 88044 - DNA, 21 bp, Artificial Sequence
  primer
tggcaaagctggataataggc

SEQ ID NO: 88045 - DNA, 38 bp, Artificial Sequence
  primer
gtaaaacgacggccagtggtgaggtagtaggtgggcag

SEQ ID NO: 88046 - DNA, 38 bp, Artificial Sequence
  primer
gtaaaacgacggccagtcctagaaggatggaggtgagc

SEQ ID NO: 88047 - DNA, 37 bp, Artificial Sequence
  primer
gtaaaacgacggccagtggtaggcaactggcccatag

SEQ ID NO: 88048 - DNA, 38 bp, Artificial Sequence
  primer
gtaaaacgacggccagtcgtttggaattctgggttctg

SEQ ID NO: 88049 - DNA, 38 bp, Artificial Sequence
  primer
gtaaaacgacggccagtctaagcctccactcccaaatg

SEQ ID NO: 88050 - DNA, 20 bp, Artificial Sequence
  primer
ggcacttgcgttcatgattc

SEQ ID NO: 88051 - DNA, 20 bp, Artificial Sequence
  primer
ctgaggatgtccaggtccag

SEQ ID NO: 88052 - DNA, 36 bp, Artificial Sequence
  primer
gtaaaacgacggccagtacacgatatccgagctggc

SEQ ID NO: 88053 - DNA, 20 bp, Artificial Sequence
  primer
gagcctgccttagcccatac

SEQ ID NO: 88054 - DNA, 21 bp, Artificial Sequence
  primer
gggaccacttgcctctgtaag

SEQ ID NO: 88055 - DNA, 21 bp, Artificial Sequence
  primer
aggcagcaaagaggtctgaac

SEQ ID NO: 88056 - DNA, 21 bp, Artificial Sequence
  primer
gacgcctttctttcaccaatc

SEQ ID NO: 88057 - DNA, 21 bp, Artificial Sequence
  primer
ggatgaggaaggcagagacac

SEQ ID NO: 88058 - DNA, 21 bp, Artificial Sequence
  primer
aatctcttccctggtgtgtgg

SEQ ID NO: 88059 - DNA, 37 bp, Artificial Sequence
  primer
gtaaaacgacggccagtggtcctaggtctctgcagcc

SEQ ID NO: 88060 - DNA, 38 bp, Artificial Sequence
  primer
gtaaaacgacggccagtccagtacttagaacccagggc

SEQ ID NO: 88061 - DNA, 20 bp, Artificial Sequence
  primer
agctcgtcctcagcacacag

SEQ ID NO: 88062 - DNA, 20 bp, Artificial Sequence
  primer
cctctgtgtccacgaagctc

SEQ ID NO: 88063 - DNA, 19 bp, Artificial Sequence
  primer
gggcatgccatacacacac

SEQ ID NO: 88064 - DNA, 38 bp, Artificial Sequence
  primer
gtaaaacgacggccagtgtacctgcagagcacagcctc

SEQ ID NO: 88065 - DNA, 20 bp, Artificial Sequence
  primer
aggtcaaagccatcgtctcc

SEQ ID NO: 88066 - DNA, 21 bp, Artificial Sequence
  primer
agagtcccacttctctgagcc

SEQ ID NO: 88067 - DNA, 37 bp, Artificial Sequence
  primer
gtaaaacgacggccagtgaccctcagagtccaggagg

SEQ ID NO: 88068 - DNA, 38 bp, Artificial Sequence
  primer
gtaaaacgacggccagtaccctccaccacagtctaacc

SEQ ID NO: 88069 - DNA, 21 bp, Artificial Sequence
  primer
gacacaaccctgagttcctgg

SEQ ID NO: 88070 - DNA, 38 bp, Artificial Sequence
  primer
gtaaaacgacggccagtgagactgagagaggcggacag

SEQ ID NO: 88071 - DNA, 21 bp, Artificial Sequence
  primer
acacctgtgaagaggccagag

SEQ ID NO: 88072 - DNA, 37 bp, Artificial Sequence
  primer
gtaaaacgacggccagtctctgaagggaggcacaacc

SEQ ID NO: 88073 - DNA, 38 bp, Artificial Sequence
  primer
gtaaaacgacggccagtctctgagcctgtccaaacacc

SEQ ID NO: 88074 - DNA, 23 bp, Artificial Sequence
  primer
caatgctttgctatcttcaccag

SEQ ID NO: 88075 - DNA, 40 bp, Artificial Sequence
  primer
gtaaaacgacggccagttctgggagatttcacaatttcag

SEQ ID NO: 88076 - DNA, 24 bp, Artificial Sequence
  primer
aagcatttgaccattccataatac

SEQ ID NO: 88077 - DNA, 38 bp, Artificial Sequence
  primer
gtaaaacgacggccagttggaaacaaatctgccgtatc

SEQ ID NO: 88078 - DNA, 40 bp, Artificial Sequence
  primer
gtaaaacgacggccagttctgcttggacgtcttctagttc

SEQ ID NO: 88079 - DNA, 23 bp, Artificial Sequence
  primer
cacactcaattggattggacaac

SEQ ID NO: 88080 - DNA, 38 bp, Artificial Sequence
  primer
gtaaaacgacggccagttttaaccacgaatggcacaag

SEQ ID NO: 88081 - DNA, 22 bp, Artificial Sequence
  primer
ttccatgggatagagttaaccg

SEQ ID NO: 88082 - DNA, 19 bp, Artificial Sequence
  primer
gcttcaacctgtgaggcag

SEQ ID NO: 88083 - DNA, 38 bp, Artificial Sequence
  primer
gtaaaacgacggccagtgacagaatttggctttccctg

SEQ ID NO: 88084 - DNA, 36 bp, Artificial Sequence
  primer
gtaaaacgacggccagtaaacatttccggctccttc

SEQ ID NO: 88085 - DNA, 38 bp, Artificial Sequence
  primer
gtaaaacgacggccagttgggatgataacaaggcctac

SEQ ID NO: 88086 - DNA, 21 bp, Artificial Sequence
  primer
tatgccacaggacagacttgc

SEQ ID NO: 88087 - DNA, 27 bp, Artificial Sequence
  primer
tgtacaatttggagaaattatgtttgg

SEQ ID NO: 88088 - DNA, 37 bp, Artificial Sequence
  primer
gtaaaacgacggccagtcaagtgatcctcatgcctcg

SEQ ID NO: 88089 - DNA, 22 bp, Artificial Sequence
  primer
tgaaagatagctttgttcccaa

SEQ ID NO: 88090 - DNA, 38 bp, Artificial Sequence
  primer
gtaaaacgacggccagtgatgaagggaagcaagacagg

SEQ ID NO: 88091 - DNA, 38 bp, Artificial Sequence
  primer
gtaaaacgacggccagtttattacacaccaggccctcc

SEQ ID NO: 88092 - DNA, 21 bp, Artificial Sequence
  primer
actttcagagggttctcggtg

SEQ ID NO: 88093 - DNA, 38 bp, Artificial Sequence
  primer
gtaaaacgacggccagtgcccagggtagtttactttgc

SEQ ID NO: 88094 - DNA, 37 bp, Artificial Sequence
  primer
gtaaaacgacggccagtaccagctcctctgcaaacag

SEQ ID NO: 88095 - DNA, 20 bp, Artificial Sequence
  primer
gctgctcagggtacatttgg

SEQ ID NO: 88096 - DNA, 21 bp, Artificial Sequence
  primer
attcaccagagaggctccatc

SEQ ID NO: 88097 - DNA, 38 bp, Artificial Sequence
  primer
gtaaaacgacggccagtgcacagagaggagtgatgagg

SEQ ID NO: 88098 - DNA, 37 bp, Artificial Sequence
  primer
gtaaaacgacggccagtgtgcactggtgtgatcatgg

SEQ ID NO: 88099 - DNA, 21 bp, Artificial Sequence
  primer
gggataacctgcgtttcagag

SEQ ID NO: 88100 - DNA, 21 bp, Artificial Sequence
  primer
cttccatcacagcccttgttc

SEQ ID NO: 88101 - DNA, 21 bp, Artificial Sequence
  primer
tggacaggcagagtaggcttc

SEQ ID NO: 88102 - DNA, 21 bp, Artificial Sequence
  primer
aggctcagtctcacttgtccc

SEQ ID NO: 88103 - DNA, 20 bp, Artificial Sequence
  primer
cagtgctccctcatgtcctc

SEQ ID NO: 88104 - DNA, 38 bp, Artificial Sequence
  primer
gtaaaacgacggccagtctcaaagacatgcacaggcag

SEQ ID NO: 88105 - DNA, 21 bp, Artificial Sequence
  primer
caagcctgcctgacactacag

SEQ ID NO: 88106 - DNA, 38 bp, Artificial Sequence
  primer
gtaaaacgacggccagtagggtggatgtcagggactac

SEQ ID NO: 88107 - DNA, 21 bp, Artificial Sequence
  primer
ccttgtagtgcatttcctccc

SEQ ID NO: 88108 - DNA, 19 bp, Artificial Sequence
  primer
catatgtcagtggcagccg

SEQ ID NO: 88109 - DNA, 21 bp, Artificial Sequence
  primer
ctagccggaactagcggagag

SEQ ID NO: 88110 - DNA, 21 bp, Artificial Sequence
  primer
tcttccaggttctgccatttc

SEQ ID NO: 88111 - DNA, 42 bp, Artificial Sequence
  primer
gtaaaacgacggccagtatgttgcaagctaaactgattagga

SEQ ID NO: 88112 - DNA, 21 bp, Artificial Sequence
  primer
tggttgcctctgaatggtagg

SEQ ID NO: 88113 - DNA, 38 bp, Artificial Sequence
  primer
gtaaaacgacggccagtacctcaagagattcactcgcc

SEQ ID NO: 88114 - DNA, 21 bp, Artificial Sequence
  primer
ttcaccgatttctttcccaac

SEQ ID NO: 88115 - DNA, 38 bp, Artificial Sequence
  primer
gtaaaacgacggccagtaagggagagaaagagtgccat

SEQ ID NO: 88116 - DNA, 21 bp, Artificial Sequence
  primer
caatggatccctagtgctttg

SEQ ID NO: 88117 - DNA, 20 bp, Artificial Sequence
  primer
gcaacgtgaagggaatcaac

SEQ ID NO: 88118 - DNA, 38 bp, Artificial Sequence
  primer
gtaaaacgacggccagtacctctttcagctggtcttgc

SEQ ID NO: 88119 - DNA, 26 bp, Artificial Sequence
  primer
aaatagcttagagtgcttcttgcttc

SEQ ID NO: 88120 - DNA, 38 bp, Artificial Sequence
  primer
gtaaaacgacggccagtccctgggctttgagataacag

SEQ ID NO: 88121 - DNA, 21 bp, Artificial Sequence
  primer
cctctggtaatgcaggcatag

SEQ ID NO: 88122 - DNA, 21 bp, Artificial Sequence
  primer
gattgactctgtagccctgcc

SEQ ID NO: 88123 - DNA, 37 bp, Artificial Sequence
  primer
gtaaaacgacggccagtaactgaggcccaagttcacc

SEQ ID NO: 88124 - DNA, 21 bp, Artificial Sequence
  primer
cactttcaccactaggcctcc

SEQ ID NO: 88125 - DNA, 21 bp, Artificial Sequence
  primer
ctctaccctgctacccaccag

SEQ ID NO: 88126 - DNA, 38 bp, Artificial Sequence
  primer
gtaaaacgacggccagtgacagtgggtccttctgcttc

SEQ ID NO: 88127 - DNA, 20 bp, Artificial Sequence
  primer
gccagggctcaatctatgac

SEQ ID NO: 88128 - DNA, 21 bp, Artificial Sequence
  primer
ctaacctgaagtcacccagcg

SEQ ID NO: 88129 - DNA, 37 bp, Artificial Sequence
  primer
gtaaaacgacggccagtcccatcagctctacccttcg

SEQ ID NO: 88130 - DNA, 21 bp, Artificial Sequence
  primer
caggtgaagaaaccaaggctc

SEQ ID NO: 88131 - DNA, 37 bp, Artificial Sequence
  primer
gtaaaacgacggccagtagagtctggcttctgggagg

SEQ ID NO: 88132 - DNA, 21 bp, Artificial Sequence
  primer
tcctttgctaaattgccagtg

SEQ ID NO: 88133 - DNA, 21 bp, Artificial Sequence
  primer
ctggatggaccagacactcac

SEQ ID NO: 88134 - DNA, 21 bp, Artificial Sequence
  primer
aaagccatcttctcccagttc

SEQ ID NO: 88135 - DNA, 40 bp, Artificial Sequence
  primer
gtaaaacgacggccagtaggactaccatgaggatcaagtg

SEQ ID NO: 88136 - DNA, 38 bp, Artificial Sequence
  primer
gtaaaacgacggccagtacctacaggcacacctttgac

SEQ ID NO: 88137 - DNA, 35 bp, Artificial Sequence
  primer
gtaaaacgacggccagtctcaagtgatccaccggc

SEQ ID NO: 88138 - DNA, 21 bp, Artificial Sequence
  primer
actcagatccagtggcacctc

SEQ ID NO: 88139 - DNA, 21 bp, Artificial Sequence
  primer
gctaagtttaactcgagggcg

SEQ ID NO: 88140 - DNA, 21 bp, Artificial Sequence
  primer
gctaaaggcttggcaagaaag

SEQ ID NO: 88141 - DNA, 18 bp, Artificial Sequence
  primer
gggtgggaggaaggaagg

SEQ ID NO: 88142 - DNA, 21 bp, Artificial Sequence
  primer
tcagggttgaacttgtcttgg

SEQ ID NO: 88143 - DNA, 21 bp, Artificial Sequence
  primer
ctaaactctgaagcccaaccc

SEQ ID NO: 88144 - DNA, 23 bp, Artificial Sequence
  primer
tcttcagactccatcaggatttc

SEQ ID NO: 88145 - DNA, 21 bp, Artificial Sequence
  primer
acagctggtcttgctgaagtg

SEQ ID NO: 88146 - DNA, 38 bp, Artificial Sequence
  primer
gtaaaacgacggccagtttctgagtataggagccacgg

SEQ ID NO: 88147 - DNA, 21 bp, Artificial Sequence
  primer
ggcattacagacagggtaggc

SEQ ID NO: 88148 - DNA, 21 bp, Artificial Sequence
  primer
ccaattctatttgttggcgtg

SEQ ID NO: 88149 - DNA, 21 bp, Artificial Sequence
  primer
agagatccacctgcctttgtc

SEQ ID NO: 88150 - DNA, 40 bp, Artificial Sequence
  primer
gtaaaacgacggccagtgacagatggctacaaataccacc

SEQ ID NO: 88151 - DNA, 26 bp, Artificial Sequence
  primer
tgtcaaagtactgggtaactaccttc

SEQ ID NO: 88152 - DNA, 23 bp, Artificial Sequence
  primer
ggaagtaggtagcagagagggag

SEQ ID NO: 88153 - DNA, 38 bp, Artificial Sequence
  primer
gtaaaacgacggccagtttcgcgcattaattgcttagt

SEQ ID NO: 88154 - DNA, 23 bp, Artificial Sequence
  primer
caagttctttctcacaatggagg

SEQ ID NO: 88155 - DNA, 23 bp, Artificial Sequence
  primer
tttcattgccataaatcacatcc

SEQ ID NO: 88156 - DNA, 41 bp, Artificial Sequence
  primer
gtaaaacgacggccagttcaacatcatttgggcctataaac

SEQ ID NO: 88157 - DNA, 21 bp, Artificial Sequence
  primer
gacatgtgcctgtagtcccag

SEQ ID NO: 88158 - DNA, 38 bp, Artificial Sequence
  primer
gtaaaacgacggccagtgcatggcacacttcctcctac

SEQ ID NO: 88159 - DNA, 42 bp, Artificial Sequence
  primer
gtaaaacgacggccagttctaaatgtaccatttgtgtttcgg

SEQ ID NO: 88160 - DNA, 21 bp, Artificial Sequence
  primer
agcccaggtgcagagtatttc

SEQ ID NO: 88161 - DNA, 21 bp, Artificial Sequence
  primer
aagaccattgtgcttgctgtg

SEQ ID NO: 88162 - DNA, 38 bp, Artificial Sequence
  primer
gtaaaacgacggccagttgagagcccagtttcacattg

SEQ ID NO: 88163 - DNA, 40 bp, Artificial Sequence
  primer
gtaaaacgacggccagttgaatttaacacatgcatagccc

SEQ ID NO: 88164 - DNA, 21 bp, Artificial Sequence
  primer
tcttcctggcatcattcttcc

SEQ ID NO: 88165 - DNA, 20 bp, Artificial Sequence
  primer
caatccctctgtcatttggg

SEQ ID NO: 88166 - DNA, 27 bp, Artificial Sequence
  primer
gctgagaagaaccagtctaacttaatc

SEQ ID NO: 88167 - DNA, 21 bp, Artificial Sequence
  primer
gaagaagaacatgcccggtag

SEQ ID NO: 88168 - DNA, 21 bp, Artificial Sequence
  primer
tctcctgaccttgtgatctgc

SEQ ID NO: 88169 - DNA, 38 bp, Artificial Sequence
  primer
gtaaaacgacggccagttagagcaagcatggctaaagg

SEQ ID NO: 88170 - DNA, 38 bp, Artificial Sequence
  primer
gtaaaacgacggccagtaggtccaaatgtgtcacgatg

SEQ ID NO: 88171 - DNA, 38 bp, Artificial Sequence
  primer
gtaaaacgacggccagttcccaagaattcattcccaag

SEQ ID NO: 88172 - DNA, 21 bp, Artificial Sequence
  primer
ctgtcccaagaattcattccc

SEQ ID NO: 88173 - DNA, 19 bp, Artificial Sequence
  primer
gcgcaaatgtcaccagatg

SEQ ID NO: 88174 - DNA, 43 bp, Artificial Sequence
  primer
gtaaaacgacggccagtcagatgtcaaatccaataaattcttc

SEQ ID NO: 88175 - DNA, 38 bp, Artificial Sequence
  primer
gtaaaacgacggccagttcagtgtgcgttctacccttg

SEQ ID NO: 88176 - DNA, 44 bp, Artificial Sequence
  primer
gtaaaacgacggccagttcctataaagcatgcataattcagata

SEQ ID NO: 88177 - DNA, 22 bp, Artificial Sequence
  primer
cacagcttctcagacacaaacg

SEQ ID NO: 88178 - DNA, 39 bp, Artificial Sequence
  primer
gtaaaacgacggccagtaaggaactgagtgaacagctcg

SEQ ID NO: 88179 - DNA, 21 bp, Artificial Sequence
  primer
agctggttgtagctgaggtcc

SEQ ID NO: 88180 - DNA, 34 bp, Artificial Sequence
  primer
gtaaaacgacggccagtgaggaagaacgcagccc

SEQ ID NO: 88181 - DNA, 39 bp, Artificial Sequence
  primer
gtaaaacgacggccagtaagaaagtgactcctgtgtggc

SEQ ID NO: 88182 - DNA, 21 bp, Artificial Sequence
  primer
acccaagatatcacccaaagg

SEQ ID NO: 88183 - DNA, 39 bp, Artificial Sequence
  primer
gtaaaacgacggccagtcacctggatccctgagtatgac

SEQ ID NO: 88184 - DNA, 21 bp, Artificial Sequence
  primer
ggagttgctgtgacctgctac

SEQ ID NO: 88185 - DNA, 38 bp, Artificial Sequence
  primer
gtaaaacgacggccagtttgcagggatggtaatcacag

SEQ ID NO: 88186 - DNA, 39 bp, Artificial Sequence
  primer
gtaaaacgacggccagtggatctggtacccatgcactac

SEQ ID NO: 88187 - DNA, 18 bp, Artificial Sequence
  primer
ctgggcttggtggtgaag

SEQ ID NO: 88188 - DNA, 38 bp, Artificial Sequence
  primer
gtaaaacgacggccagttagaaaccctaggagcggatg

SEQ ID NO: 88189 - DNA, 21 bp, Artificial Sequence
  primer
aagcaaggctcaatgaagagg

SEQ ID NO: 88190 - DNA, 37 bp, Artificial Sequence
  primer
gtaaaacgacggccagtattcggcctccacaactctc

SEQ ID NO: 88191 - DNA, 37 bp, Artificial Sequence
  primer
gtaaaacgacggccagtaaatcgctggtggttcacag

SEQ ID NO: 88192 - DNA, 21 bp, Artificial Sequence
  primer
agaggtgccctctgatgattc

SEQ ID NO: 88193 - DNA, 21 bp, Artificial Sequence
  primer
ttgcaaatcccaagatggtag

SEQ ID NO: 88194 - DNA, 40 bp, Artificial Sequence
  primer
gtaaaacgacggccagttctgatggatgttcagaattcac

SEQ ID NO: 88195 - DNA, 21 bp, Artificial Sequence
  primer
cggaagaagggatagaaccag

SEQ ID NO: 88196 - DNA, 38 bp, Artificial Sequence
  primer
gtaaaacgacggccagtactcactttgaactttccggc

SEQ ID NO: 88197 - DNA, 21 bp, Artificial Sequence
  primer
ttactgcttcagaaccctccc

SEQ ID NO: 88198 - DNA, 21 bp, Artificial Sequence
  primer
tgagatggaaacaaatggtcc

SEQ ID NO: 88199 - DNA, 21 bp, Artificial Sequence
  primer
atactgtgtcccgttgtgcag

SEQ ID NO: 88200 - DNA, 37 bp, Artificial Sequence
  primer
gtaaaacgacggccagtaagagcacaagggtggactg

SEQ ID NO: 88201 - DNA, 38 bp, Artificial Sequence
  primer
gtaaaacgacggccagtgcctctaagagccacagaacg

SEQ ID NO: 88202 - DNA, 21 bp, Artificial Sequence
  primer
tacttcccttgagtggctgtg

SEQ ID NO: 88203 - DNA, 21 bp, Artificial Sequence
  primer
gcacaaggagctacccaactc

SEQ ID NO: 88204 - DNA, 21 bp, Artificial Sequence
  primer
aggcatagcagacaccctagc

SEQ ID NO: 88205 - DNA, 21 bp, Artificial Sequence
  primer
tcatgtccctaacattgaccc

SEQ ID NO: 88206 - DNA, 20 bp, Artificial Sequence
  primer
gcgggaaccttctggtttag

SEQ ID NO: 88207 - DNA, 21 bp, Artificial Sequence
  primer
catctggagccatcagtttcc

SEQ ID NO: 88208 - DNA, 38 bp, Artificial Sequence
  primer
gtaaaacgacggccagtaacatcccatgagcaagtacg

SEQ ID NO: 88209 - DNA, 38 bp, Artificial Sequence
  primer
gtaaaacgacggccagtgtttgccactcggaacatctc

SEQ ID NO: 88210 - DNA, 38 bp, Artificial Sequence
  primer
gtaaaacgacggccagtcgtgtgtttgagattgggaag

SEQ ID NO: 88211 - DNA, 38 bp, Artificial Sequence
  primer
gtaaaacgacggccagttttgagattgggaagtccctc

SEQ ID NO: 88212 - DNA, 39 bp, Artificial Sequence
  primer
gtaaaacgacggccagttctcttccctgctctgaaactg

SEQ ID NO: 88213 - DNA, 21 bp, Artificial Sequence
  primer
gtggctgacaagacacaggtc

SEQ ID NO: 88214 - DNA, 35 bp, Artificial Sequence
  primer
gtaaaacgacggccagttttcctgcctccctgctc

SEQ ID NO: 88215 - DNA, 40 bp, Artificial Sequence
  primer
gtaaaacgacggccagtaaagcagaaagttaggaacctcg

SEQ ID NO: 88216 - DNA, 22 bp, Artificial Sequence
  primer
tgcatatgtgtctgtcattggg

SEQ ID NO: 88217 - DNA, 40 bp, Artificial Sequence
  primer
gtaaaacgacggccagtaaacataattgccatctctacgg

SEQ ID NO: 88218 - DNA, 21 bp, Artificial Sequence
  primer
aaggtgggaggaaagaaatcg

SEQ ID NO: 88219 - DNA, 22 bp, Artificial Sequence
  primer
aacaggtagggcttcttgttcc

SEQ ID NO: 88220 - DNA, 38 bp, Artificial Sequence
  primer
gtaaaacgacggccagtgggagtttgtgcttcagttcc

SEQ ID NO: 88221 - DNA, 21 bp, Artificial Sequence
  primer
aagagaaactctcccgtggtg

SEQ ID NO: 88222 - DNA, 21 bp, Artificial Sequence
  primer
aaatcccggcatctatattcg

SEQ ID NO: 88223 - DNA, 21 bp, Artificial Sequence
  primer
agcaattcgaaacaggattgg

SEQ ID NO: 88224 - DNA, 21 bp, Artificial Sequence
  primer
aaatgaggttctgaggcttgc

SEQ ID NO: 88225 - DNA, 21 bp, Artificial Sequence
  primer
caaggtcaaaggaacctggat

SEQ ID NO: 88226 - DNA, 38 bp, Artificial Sequence
  primer
gtaaaacgacggccagtaatgagtcaagtctggcaccc

SEQ ID NO: 88227 - DNA, 35 bp, Artificial Sequence
  primer
gtaaaacgacggccagtagggagggagggagggac

SEQ ID NO: 88228 - DNA, 20 bp, Artificial Sequence
  primer
tgccaagaagagagccaatg

SEQ ID NO: 88229 - DNA, 37 bp, Artificial Sequence
  primer
gtaaaacgacggccagtatctcaccgaggtcatccag

SEQ ID NO: 88230 - DNA, 21 bp, Artificial Sequence
  primer
ttcctgtggaggaagaagagg

SEQ ID NO: 88231 - DNA, 38 bp, Artificial Sequence
  primer
gtaaaacgacggccagtggctgaataggtgatgtttgg

SEQ ID NO: 88232 - DNA, 38 bp, Artificial Sequence
  primer
gtaaaacgacggccagtgtacagggttctgccatccac

SEQ ID NO: 88233 - DNA, 38 bp, Artificial Sequence
  primer
gtaaaacgacggccagtatccggtcctggaagtaaatg

SEQ ID NO: 88234 - DNA, 21 bp, Artificial Sequence
  primer
tgcttgactgtgcaagactcc

SEQ ID NO: 88235 - DNA, 21 bp, Artificial Sequence
  primer
atccaggacccacatcttagg

SEQ ID NO: 88236 - DNA, 38 bp, Artificial Sequence
  primer
gtaaaacgacggccagtttgagctccagatttgacctg

SEQ ID NO: 88237 - DNA, 21 bp, Artificial Sequence
  primer
catgcctctctaggcttctgg

SEQ ID NO: 88238 - DNA, 20 bp, Artificial Sequence
  primer
atcagtttgcggaagtctgg

SEQ ID NO: 88239 - DNA, 38 bp, Artificial Sequence
  primer
gtaaaacgacggccagtttgaggacgactgtcctatcc

SEQ ID NO: 88240 - DNA, 38 bp, Artificial Sequence
  primer
gtaaaacgacggccagtgcttgtgaaccaccatcagtg

SEQ ID NO: 88241 - DNA, 21 bp, Artificial Sequence
  primer
gtgggctctgtctgtagaggg

SEQ ID NO: 88242 - DNA, 21 bp, Artificial Sequence
  primer
cccataggtgcttgctttgag

SEQ ID NO: 88243 - DNA, 21 bp, Artificial Sequence
  primer
ctctacactccgaaagccagg

SEQ ID NO: 88244 - DNA, 38 bp, Artificial Sequence
  primer
gtaaaacgacggccagtcaagaaccttctccaacaggg

SEQ ID NO: 88245 - DNA, 21 bp, Artificial Sequence
  primer
tgtgctggcctgtattgacac

SEQ ID NO: 88246 - DNA, 38 bp, Artificial Sequence
  primer
gtaaaacgacggccagtagaaggcaaggtctcaaaggg

SEQ ID NO: 88247 - DNA, 38 bp, Artificial Sequence
  primer
gtaaaacgacggccagttagacatcaggtgcttggtgg

SEQ ID NO: 88248 - DNA, 37 bp, Artificial Sequence
  primer
gtaaaacgacggccagtacacaaatgaccttcgcacc

SEQ ID NO: 88249 - DNA, 38 bp, Artificial Sequence
  primer
gtaaaacgacggccagtaggcactttgaactctccagg

SEQ ID NO: 88250 - DNA, 18 bp, Artificial Sequence
  primer
acttccatggccagaggc

SEQ ID NO: 88251 - DNA, 37 bp, Artificial Sequence
  primer
gtaaaacgacggccagtaaacaattgccctctcctcc

SEQ ID NO: 88252 - DNA, 40 bp, Artificial Sequence
  primer
gtaaaacgacggccagtccaataaataaatgttgcctggg

SEQ ID NO: 88253 - DNA, 25 bp, Artificial Sequence
  primer
tgggaaaacaataaaactgagtatg

SEQ ID NO: 88254 - DNA, 40 bp, Artificial Sequence
  primer
gtaaaacgacggccagtttcaaatgcctaagctgaagttg

SEQ ID NO: 88255 - DNA, 39 bp, Artificial Sequence
  primer
gtaaaacgacggccagtcgcatccatgattaattcacac

SEQ ID NO: 88256 - DNA, 21 bp, Artificial Sequence
  primer
cctacaaagggtagaggagcc

SEQ ID NO: 88257 - DNA, 21 bp, Artificial Sequence
  primer
cttgctagccatgtcaccatc

SEQ ID NO: 88258 - DNA, 38 bp, Artificial Sequence
  primer
gtaaaacgacggccagtatgatcgatgtttcctgttgc

SEQ ID NO: 88259 - DNA, 19 bp, Artificial Sequence
  primer
attacaggtgcgagctgcc

SEQ ID NO: 88260 - DNA, 21 bp, Artificial Sequence
  primer
tgactgtacctcatgttgccg

SEQ ID NO: 88261 - DNA, 38 bp, Artificial Sequence
  primer
gtaaaacgacggccagtagatgcaaggcacataagcag

SEQ ID NO: 88262 - DNA, 37 bp, Artificial Sequence
  primer
gtaaaacgacggccagtgtgagccaagatgacaccac

SEQ ID NO: 88263 - DNA, 38 bp, Artificial Sequence
  primer
gtaaaacgacggccagtacaatatctgctgaggcccac

SEQ ID NO: 88264 - DNA, 38 bp, Artificial Sequence
  primer
gtaaaacgacggccagtaattcacttcgtttgaaccgc

SEQ ID NO: 88265 - DNA, 19 bp, Artificial Sequence
  primer
ggagggagggcaaactttc

SEQ ID NO: 88266 - DNA, 21 bp, Artificial Sequence
  primer
gtacacggctctggtgttgac

SEQ ID NO: 88267 - DNA, 38 bp, Artificial Sequence
  primer
gtaaaacgacggccagtacctgacagggtcacctgaag

SEQ ID NO: 88268 - DNA, 26 bp, Artificial Sequence
  primer
gaaattacagccagtaagagtaaggc

SEQ ID NO: 88269 - DNA, 38 bp, Artificial Sequence
  primer
gtaaaacgacggccagtagctgatacagggtcaggagg

SEQ ID NO: 88270 - DNA, 21 bp, Artificial Sequence
  primer
ggctgggtatctgaatgcaag

SEQ ID NO: 88271 - DNA, 41 bp, Artificial Sequence
  primer
gtaaaacgacggccagttgctcttatgaaatgcactatccc

SEQ ID NO: 88272 - DNA, 38 bp, Artificial Sequence
  primer
gtaaaacgacggccagtcagaaatcctgcatgtcctgg

SEQ ID NO: 88273 - DNA, 34 bp, Artificial Sequence
  primer
gtaaaacgacggccagtagacccagcccacaggg

SEQ ID NO: 88274 - DNA, 38 bp, Artificial Sequence
  primer
gtaaaacgacggccagttagggatgttgacgggaactg

SEQ ID NO: 88275 - DNA, 36 bp, Artificial Sequence
  primer
gtaaaacgacggccagtggacaggagccatcaggag

SEQ ID NO: 88276 - DNA, 38 bp, Artificial Sequence
  primer
gtaaaacgacggccagttcaagaggagacacagaagcc

SEQ ID NO: 88277 - DNA, 38 bp, Artificial Sequence
  primer
gtaaaacgacggccagttgtccctcacttcccagagac

SEQ ID NO: 88278 - DNA, 38 bp, Artificial Sequence
  primer
gtaaaacgacggccagtacattccacagaccaggacag

SEQ ID NO: 88279 - DNA, 38 bp, Artificial Sequence
  primer
gtaaaacgacggccagtcaggactggtgtagacaggca

SEQ ID NO: 88280 - DNA, 21 bp, Artificial Sequence
  primer
cctcagcccacataagctctg

SEQ ID NO: 88281 - DNA, 38 bp, Artificial Sequence
  primer
gtaaaacgacggccagtgagacctgacctggtccacac

SEQ ID NO: 88282 - DNA, 38 bp, Artificial Sequence
  primer
gtaaaacgacggccagtcctctgactcacaccatgctc

SEQ ID NO: 88283 - DNA, 37 bp, Artificial Sequence
  primer
gtaaaacgacggccagtccaccgcagactgtcctaac

SEQ ID NO: 88284 - DNA, 20 bp, Artificial Sequence
  primer
caaacccaaggctttatccc

SEQ ID NO: 88285 - DNA, 21 bp, Artificial Sequence
  primer
gatgccaccagagaatccaag

SEQ ID NO: 88286 - DNA, 21 bp, Artificial Sequence
  primer
atatcagggcaggaggagaaa

SEQ ID NO: 88287 - DNA, 37 bp, Artificial Sequence
  primer
gtaaaacgacggccagtcctttcgaccaaacattccc

SEQ ID NO: 88288 - DNA, 21 bp, Artificial Sequence
  primer
tgaaacagcatctcctcttgg

SEQ ID NO: 88289 - DNA, 21 bp, Artificial Sequence
  primer
agaatttcctaacactcggcg

SEQ ID NO: 88290 - DNA, 18 bp, Artificial Sequence
  primer
attactggcatgcgccac

SEQ ID NO: 88291 - DNA, 21 bp, Artificial Sequence
  primer
gggctaacttcttcaaagggc

SEQ ID NO: 88292 - DNA, 20 bp, Artificial Sequence
  primer
gacttcagcttggaagccag

SEQ ID NO: 88293 - DNA, 19 bp, Artificial Sequence
  primer
aaacccagcaagacaagcg

SEQ ID NO: 88294 - DNA, 21 bp, Artificial Sequence
  primer
gaaagtggcatttgtgactcg

SEQ ID NO: 88295 - DNA, 19 bp, Artificial Sequence
  primer
acgcgttggtactgggaac

SEQ ID NO: 88296 - DNA, 18 bp, Artificial Sequence
  primer
acggctgaaggatgcctg

SEQ ID NO: 88297 - DNA, 20 bp, Artificial Sequence
  primer
tcccagttagcacgtccaag

SEQ ID NO: 88298 - DNA, 36 bp, Artificial Sequence
  primer
gtaaaacgacggccagtagctgagccctgagttccc

SEQ ID NO: 88299 - DNA, 21 bp, Artificial Sequence
  primer
aagcctgaggtcattcagagg

SEQ ID NO: 88300 - DNA, 21 bp, Artificial Sequence
  primer
caagcagactgcctcaaagtc

SEQ ID NO: 88301 - DNA, 38 bp, Artificial Sequence
  primer
gtaaaacgacggccagtagacagtgaggaacggtccag

SEQ ID NO: 88302 - DNA, 21 bp, Artificial Sequence
  primer
tgcagagcagcactaggtttg

SEQ ID NO: 88303 - DNA, 37 bp, Artificial Sequence
  primer
gtaaaacgacggccagtgtgaggatgagcctaacggg

SEQ ID NO: 88304 - DNA, 19 bp, Artificial Sequence
  primer
agcaaggctctgggaggag

SEQ ID NO: 88305 - DNA, 22 bp, Artificial Sequence
  primer
gactcagaggtggatggatgtc

SEQ ID NO: 88306 - DNA, 39 bp, Artificial Sequence
  primer
gtaaaacgacggccagtaagtcaccagtgacatcgtgtg

SEQ ID NO: 88307 - DNA, 18 bp, Artificial Sequence
  primer
agaggagcgggagctgac

SEQ ID NO: 88308 - DNA, 35 bp, Artificial Sequence
  primer
gtaaaacgacggccagtactccagactgggcgctg

SEQ ID NO: 88309 - DNA, 21 bp, Artificial Sequence
  primer
ttacttctggaacagcccgag

SEQ ID NO: 88310 - DNA, 38 bp, Artificial Sequence
  primer
gtaaaacgacggccagtactgaccacattggacagcag

SEQ ID NO: 88311 - DNA, 18 bp, Artificial Sequence
  primer
cacccaccaagacagccc

SEQ ID NO: 88312 - DNA, 20 bp, Artificial Sequence
  primer
actcccagctggatggaaag

SEQ ID NO: 88313 - DNA, 42 bp, Artificial Sequence
  primer
gtaaaacgacggccagtgcatgatgtaaatgagtttctcacc

SEQ ID NO: 88314 - DNA, 23 bp, Artificial Sequence
  primer
ccaaggttagtgtgaaatcaagc

SEQ ID NO: 88315 - DNA, 20 bp, Artificial Sequence
  primer
agttcccaggcttacatggc

SEQ ID NO: 88316 - DNA, 22 bp, Artificial Sequence
  primer
aagtgataactgcccaatggag

SEQ ID NO: 88317 - DNA, 21 bp, Artificial Sequence
  primer
gaagacgattgggtgaagcag

SEQ ID NO: 88318 - DNA, 37 bp, Artificial Sequence
  primer
gtaaaacgacggccagtagcctcggcaacatagtgag

SEQ ID NO: 88319 - DNA, 38 bp, Artificial Sequence
  primer
gtaaaacgacggccagtagactcccgatttggtgaaac

SEQ ID NO: 88320 - DNA, 37 bp, Artificial Sequence
  primer
gtaaaacgacggccagtctcagttcaaaggaaccggc

SEQ ID NO: 88321 - DNA, 39 bp, Artificial Sequence
  primer
gtaaaacgacggccagtgaaagcactgcacattaacagg

SEQ ID NO: 88322 - DNA, 21 bp, Artificial Sequence
  primer
tgggcagtgtaacatgacaaa

SEQ ID NO: 88323 - DNA, 21 bp, Artificial Sequence
  primer
accagggctatcctactgcac

SEQ ID NO: 88324 - DNA, 23 bp, Artificial Sequence
  primer
ccaatccatgggatttatatgtg

SEQ ID NO: 88325 - DNA, 22 bp, Artificial Sequence
  primer
ccatttggcaatgtgtactgag

SEQ ID NO: 88326 - DNA, 21 bp, Artificial Sequence
  primer
tcacatgcaatctttgctcac

SEQ ID NO: 88327 - DNA, 38 bp, Artificial Sequence
  primer
gtaaaacgacggccagtttcctcctgtatagccattcg

SEQ ID NO: 88328 - DNA, 18 bp, Artificial Sequence
  primer
cacatgctcgcccacttc

SEQ ID NO: 88329 - DNA, 19 bp, Artificial Sequence
  primer
acccaactgacagcgaagc

SEQ ID NO: 88330 - DNA, 38 bp, Artificial Sequence
  primer
gtaaaacgacggccagtctcttaaagtccctgggcagc

SEQ ID NO: 88331 - DNA, 21 bp, Artificial Sequence
  primer
aggtgaccacaaccactcaag

SEQ ID NO: 88332 - DNA, 21 bp, Artificial Sequence
  primer
tagttctgacaattccgtgcc

SEQ ID NO: 88333 - DNA, 22 bp, Artificial Sequence
  primer
tcctgcaatcaacacagatgac

SEQ ID NO: 88334 - DNA, 21 bp, Artificial Sequence
  primer
aagctcatctgatcctcccac

SEQ ID NO: 88335 - DNA, 39 bp, Artificial Sequence
  primer
gtaaaacgacggccagtccatgatcacattgcatacctg

SEQ ID NO: 88336 - DNA, 21 bp, Artificial Sequence
  primer
agaatgtgaaggatggcttgc

SEQ ID NO: 88337 - DNA, 38 bp, Artificial Sequence
  primer
gtaaaacgacggccagttccataaatgggttaccaggg

SEQ ID NO: 88338 - DNA, 21 bp, Artificial Sequence
  primer
gtgggtaacactggaggacag

SEQ ID NO: 88339 - DNA, 38 bp, Artificial Sequence
  primer
gtaaaacgacggccagtctgttgcacacacagccctac

SEQ ID NO: 88340 - DNA, 21 bp, Artificial Sequence
  primer
tctccatctcctgaccttgtg

SEQ ID NO: 88341 - DNA, 38 bp, Artificial Sequence
  primer
gtaaaacgacggccagttttgcagcttcagtgacaacc

SEQ ID NO: 88342 - DNA, 21 bp, Artificial Sequence
  primer
atgagtggctgagctgtcctc

SEQ ID NO: 88343 - DNA, 37 bp, Artificial Sequence
  primer
gtaaaacgacggccagtgcagcagacctcaactgacc

SEQ ID NO: 88344 - DNA, 38 bp, Artificial Sequence
  primer
gtaaaacgacggccagtaacaaataccctgcagttccc

SEQ ID NO: 88345 - DNA, 40 bp, Artificial Sequence
  primer
gtaaaacgacggccagttctcaccatgttgtatttccctg

SEQ ID NO: 88346 - DNA, 20 bp, Artificial Sequence
  primer
cctgctgcatctctgctttc

SEQ ID NO: 88347 - DNA, 22 bp, Artificial Sequence
  primer
catggcaaagattatgtgaacc

SEQ ID NO: 88348 - DNA, 38 bp, Artificial Sequence
  primer
gtaaaacgacggccagtgacctaacttcagctttgccc

SEQ ID NO: 88349 - DNA, 40 bp, Artificial Sequence
  primer
gtaaaacgacggccagtaagactttctactcccaggaagg

SEQ ID NO: 88350 - DNA, 38 bp, Artificial Sequence
  primer
gtaaaacgacggccagtttcttcctgctggaatcattg

SEQ ID NO: 88351 - DNA, 38 bp, Artificial Sequence
  primer
gtaaaacgacggccagttgattcccaaagagggacttc

SEQ ID NO: 88352 - DNA, 39 bp, Artificial Sequence
  primer
gtaaaacgacggccagtaaacagtcactggagctcttgg

SEQ ID NO: 88353 - DNA, 20 bp, Artificial Sequence
  primer
cccagcaatacggttctgag

SEQ ID NO: 88354 - DNA, 21 bp, Artificial Sequence
  primer
atgtcagttggctaagggcac

SEQ ID NO: 88355 - DNA, 20 bp, Artificial Sequence
  primer
ttcaactgcacgctcctctc

SEQ ID NO: 88356 - DNA, 21 bp, Artificial Sequence
  primer
cagctatcactgctgaggtcc

SEQ ID NO: 88357 - DNA, 21 bp, Artificial Sequence
  primer
gcacagcagttctcttcgttg

SEQ ID NO: 88358 - DNA, 18 bp, Artificial Sequence
  primer
gagctccaagtccgcctc

SEQ ID NO: 88359 - DNA, 38 bp, Artificial Sequence
  primer
gtaaaacgacggccagttagtaggagcgcaggaagctc

SEQ ID NO: 88360 - DNA, 38 bp, Artificial Sequence
  primer
gtaaaacgacggccagttgttccaagacaatcagcacc

SEQ ID NO: 88361 - DNA, 21 bp, Artificial Sequence
  primer
cgtaacgcacctgacagagag

SEQ ID NO: 88362 - DNA, 41 bp, Artificial Sequence
  primer
gtaaaacgacggccagttggatcagaacatttagttgcttg

SEQ ID NO: 88363 - DNA, 21 bp, Artificial Sequence
  primer
atttgcatcacctccatacgc

SEQ ID NO: 88364 - DNA, 21 bp, Artificial Sequence
  primer
ttgggtttcattgagcacatc

SEQ ID NO: 88365 - DNA, 39 bp, Artificial Sequence
  primer
gtaaaacgacggccagtccaatgtcacctttgattccac

SEQ ID NO: 88366 - DNA, 38 bp, Artificial Sequence
  primer
gtaaaacgacggccagtctatccttccctcccaaacac

SEQ ID NO: 88367 - DNA, 24 bp, Artificial Sequence
  primer
accttgggaagaaattatgacaac

SEQ ID NO: 88368 - DNA, 38 bp, Artificial Sequence
  primer
gtaaaacgacggccagttgttgggagacaatcagcttc

SEQ ID NO: 88369 - DNA, 24 bp, Artificial Sequence
  primer
gcaaagctaacctcagattctgtc

SEQ ID NO: 88370 - DNA, 26 bp, Artificial Sequence
  primer
ccagcctaccttaagtactttctttc

SEQ ID NO: 88371 - DNA, 20 bp, Artificial Sequence
  primer
ctgatggacgagctcacctg

SEQ ID NO: 88372 - DNA, 21 bp, Artificial Sequence
  primer
aagggtcaaggtcaaggactg

SEQ ID NO: 88373 - DNA, 38 bp, Artificial Sequence
  primer
gtaaaacgacggccagtcagggacgtcctgttatttgg

SEQ ID NO: 88374 - DNA, 38 bp, Artificial Sequence
  primer
gtaaaacgacggccagtagtctttgtggcgtagacagc

SEQ ID NO: 88375 - DNA, 20 bp, Artificial Sequence
  primer
gacgccagccctggatatag

SEQ ID NO: 88376 - DNA, 22 bp, Artificial Sequence
  primer
agctaaccatgtgctaccaacc

SEQ ID NO: 88377 - DNA, 39 bp, Artificial Sequence
  primer
gtaaaacgacggccagtttggaatagctggtcctttcac

SEQ ID NO: 88378 - DNA, 20 bp, Artificial Sequence
  primer
aaacccagatggtggtttcc

SEQ ID NO: 88379 - DNA, 21 bp, Artificial Sequence
  primer
gaggctgcagtaagcgaagac

SEQ ID NO: 88380 - DNA, 39 bp, Artificial Sequence
  primer
gtaaaacgacggccagtgcactatcctgccttctttctt

SEQ ID NO: 88381 - DNA, 21 bp, Artificial Sequence
  primer
gccttcttccagaagtccagc

SEQ ID NO: 88382 - DNA, 21 bp, Artificial Sequence
  primer
ttgttcattgattggtcaccc

SEQ ID NO: 88383 - DNA, 37 bp, Artificial Sequence
  primer
gtaaaacgacggccagtcacatgggagagcacctttc

SEQ ID NO: 88384 - DNA, 21 bp, Artificial Sequence
  primer
ctctcgttgagttggagtccc

SEQ ID NO: 88385 - DNA, 22 bp, Artificial Sequence
  primer
tttgcttaaggatccattctgg

SEQ ID NO: 88386 - DNA, 21 bp, Artificial Sequence
  primer
tgggctctgacaatttctttc

SEQ ID NO: 88387 - DNA, 23 bp, Artificial Sequence
  primer
ttgatcaaggttatttgggtttc

SEQ ID NO: 88388 - DNA, 42 bp, Artificial Sequence
  primer
gtaaaacgacggccagtcaatggcacaattcttaaattcttg

SEQ ID NO: 88389 - DNA, 21 bp, Artificial Sequence
  primer
gtgtgactggatggagaaacg

SEQ ID NO: 88390 - DNA, 19 bp, Artificial Sequence
  primer
gcagcttcctctcgtccac

SEQ ID NO: 88391 - DNA, 17 bp, Artificial Sequence
  primer
ggccttctctggcctcg

SEQ ID NO: 88392 - DNA, 21 bp, Artificial Sequence
  primer
tcacaccctgcttacaggttc

SEQ ID NO: 88393 - DNA, 21 bp, Artificial Sequence
  primer
tcacttgaaccaggaagggag

SEQ ID NO: 88394 - DNA, 21 bp, Artificial Sequence
  primer
tcacaccctgcttacaggttc

SEQ ID NO: 88395 - DNA, 21 bp, Artificial Sequence
  primer
aggtctgaggtccagttcctg

SEQ ID NO: 88396 - DNA, 39 bp, Artificial Sequence
  primer
gtaaaacgacggccagtcgttatttattcgtgtgcgacc

SEQ ID NO: 88397 - DNA, 38 bp, Artificial Sequence
  primer
gtaaaacgacggccagtcctggaaagtgtgatcctgtg

SEQ ID NO: 88398 - DNA, 21 bp, Artificial Sequence
  primer
gtctcgaagagtccctccaac

SEQ ID NO: 88399 - DNA, 38 bp, Artificial Sequence
  primer
gtaaaacgacggccagtaaagcgttgaggacaatctcg

SEQ ID NO: 88400 - DNA, 21 bp, Artificial Sequence
  primer
ccctgagagtctggaaaggtc

SEQ ID NO: 88401 - DNA, 38 bp, Artificial Sequence
  primer
gtaaaacgacggccagtccagccttcctctgtgatgag

SEQ ID NO: 88402 - DNA, 38 bp, Artificial Sequence
  primer
gtaaaacgacggccagtcctcttgtttccttccctgtg

SEQ ID NO: 88403 - DNA, 21 bp, Artificial Sequence
  primer
ggtctaagcatcctcccagag

SEQ ID NO: 88404 - DNA, 20 bp, Artificial Sequence
  primer
cctgctcccttccatagtcc

SEQ ID NO: 88405 - DNA, 22 bp, Artificial Sequence
  primer
caaacctgaaagctgtgtaggg

SEQ ID NO: 88406 - DNA, 21 bp, Artificial Sequence
  primer
ctccggttaaccctagtgtcc

SEQ ID NO: 88407 - DNA, 21 bp, Artificial Sequence
  primer
cctgggctagagcaagaatcc

SEQ ID NO: 88408 - DNA, 18 bp, Artificial Sequence
  primer
tagctcggcatggtggtg

SEQ ID NO: 88409 - DNA, 22 bp, Artificial Sequence
  primer
caaacctgaaagctgtgtaggg

SEQ ID NO: 88410 - DNA, 38 bp, Artificial Sequence
  primer
gtaaaacgacggccagttttgttggtgtgcaggaagag

SEQ ID NO: 88411 - DNA, 21 bp, Artificial Sequence
  primer
cgacagacctgcagacagaag

SEQ ID NO: 88412 - DNA, 20 bp, Artificial Sequence
  primer
gagggcagtaagtggccttt

SEQ ID NO: 88413 - DNA, 37 bp, Artificial Sequence
  primer
gtaaaacgacggccagtgttcccaaagggttgcactg

SEQ ID NO: 88414 - DNA, 41 bp, Artificial Sequence
  primer
gtaaaacgacggccagtaaacatcgcctgattaaagagaag

SEQ ID NO: 88415 - DNA, 37 bp, Artificial Sequence
  primer
gtaaaacgacggccagtacccactctgtggcattcag

SEQ ID NO: 88416 - DNA, 39 bp, Artificial Sequence
  primer
gtaaaacgacggccagtggcagcacatgactgtatcttg

SEQ ID NO: 88417 - DNA, 23 bp, Artificial Sequence
  primer
cagttctgctttcaatcatgaca

SEQ ID NO: 88418 - DNA, 38 bp, Artificial Sequence
  primer
gtaaaacgacggccagtcagggaaagcttcaggtcttg

SEQ ID NO: 88419 - DNA, 38 bp, Artificial Sequence
  primer
gtaaaacgacggccagtatctcacggccttatttccag

SEQ ID NO: 88420 - DNA, 21 bp, Artificial Sequence
  primer
agcacgcctcaactttaatcc

SEQ ID NO: 88421 - DNA, 20 bp, Artificial Sequence
  primer
tgggcaacaaatcctttgag

SEQ ID NO: 88422 - DNA, 21 bp, Artificial Sequence
  primer
taggatggagcccaatgtgtc

SEQ ID NO: 88423 - DNA, 26 bp, Artificial Sequence
  primer
gatcacaagatcgtgattgtgttaag

SEQ ID NO: 88424 - DNA, 21 bp, Artificial Sequence
  primer
aaacagcttcaggaggagcag

SEQ ID NO: 88425 - DNA, 38 bp, Artificial Sequence
  primer
gtaaaacgacggccagttcaaacacacctcctgacagc

SEQ ID NO: 88426 - DNA, 22 bp, Artificial Sequence
  primer
aactcaggcctctgtgtttctg

SEQ ID NO: 88427 - DNA, 21 bp, Artificial Sequence
  primer
caggtgaaccagaactggagg

SEQ ID NO: 88428 - DNA, 18 bp, Artificial Sequence
  primer
gcgtccagagaatacggg

SEQ ID NO: 88429 - DNA, 38 bp, Artificial Sequence
  primer
gtaaaacgacggccagtcttgacaaccacagggtccac

SEQ ID NO: 88430 - DNA, 38 bp, Artificial Sequence
  primer
gtaaaacgacggccagtttgggaaacttctggttctcc

SEQ ID NO: 88431 - DNA, 21 bp, Artificial Sequence
  primer
tctggcctaagtgatggaatg

SEQ ID NO: 88432 - DNA, 20 bp, Artificial Sequence
  primer
cctacgtgtctctgtgtgcg

SEQ ID NO: 88433 - DNA, 38 bp, Artificial Sequence
  primer
gtaaaacgacggccagtgccagtgaatcttctttgctg

SEQ ID NO: 88434 - DNA, 23 bp, Artificial Sequence
  primer
agaatgttctacacaaggccatc

SEQ ID NO: 88435 - DNA, 22 bp, Artificial Sequence
  primer
tctacctgacacaacagcaagg

SEQ ID NO: 88436 - DNA, 21 bp, Artificial Sequence
  primer
cttaccggtttgttctctggc

SEQ ID NO: 88437 - DNA, 24 bp, Artificial Sequence
  primer
gaagtgtctggttctaatgcagag

SEQ ID NO: 88438 - DNA, 43 bp, Artificial Sequence
  primer
gtaaaacgacggccagtcaatctatcaattatagcctatgccc

SEQ ID NO: 88439 - DNA, 38 bp, Artificial Sequence
  primer
gtaaaacgacggccagtgcccaccctaaagtggtcttc

SEQ ID NO: 88440 - DNA, 21 bp, Artificial Sequence
  primer
tatttcaggctttaatggccc

SEQ ID NO: 88441 - DNA, 21 bp, Artificial Sequence
  primer
ttaagggaacaatctcgccac

SEQ ID NO: 88442 - DNA, 24 bp, Artificial Sequence
  primer
tggaactcagaaatcactttctcc

SEQ ID NO: 88443 - DNA, 39 bp, Artificial Sequence
  primer
gtaaaacgacggccagttgcaagtccagtaatcaaaggg

SEQ ID NO: 88444 - DNA, 21 bp, Artificial Sequence
  primer
ctgagggttggtccttaccag

SEQ ID NO: 88445 - DNA, 25 bp, Artificial Sequence
  primer
aatctgaattcctttcattctgaag

SEQ ID NO: 88446 - DNA, 37 bp, Artificial Sequence
  primer
gtaaaacgacggccagtcaggaggctaagatgggagg

SEQ ID NO: 88447 - DNA, 38 bp, Artificial Sequence
  primer
gtaaaacgacggccagttctgcattctgaggcttcact

SEQ ID NO: 88448 - DNA, 21 bp, Artificial Sequence
  primer
cccttgactttgagttgggag

SEQ ID NO: 88449 - DNA, 37 bp, Artificial Sequence
  primer
gtaaaacgacggccagtctttgagcgtggaatcgttg

SEQ ID NO: 88450 - DNA, 39 bp, Artificial Sequence
  primer
gtaaaacgacggccagtgagatctggaatgaggcagatg

SEQ ID NO: 88451 - DNA, 38 bp, Artificial Sequence
  primer
gtaaaacgacggccagtccaaggtccatttctctctgc

SEQ ID NO: 88452 - DNA, 37 bp, Artificial Sequence
  primer
gtaaaacgacggccagtgtgttcaagaccaacctggg

SEQ ID NO: 88453 - DNA, 38 bp, Artificial Sequence
  primer
gtaaaacgacggccagttaggaagcactcagcagatgg

SEQ ID NO: 88454 - DNA, 38 bp, Artificial Sequence
  primer
gtaaaacgacggccagtagatccctgcagaatgaggtg

SEQ ID NO: 88455 - DNA, 21 bp, Artificial Sequence
  primer
cacattctgggtccaagtcag

SEQ ID NO: 88456 - DNA, 38 bp, Artificial Sequence
  primer
gtaaaacgacggccagtcatcctcacactcagcctgtc

SEQ ID NO: 88457 - DNA, 38 bp, Artificial Sequence
  primer
gtaaaacgacggccagtaagctagaagctggcaagcag

SEQ ID NO: 88458 - DNA, 38 bp, Artificial Sequence
  primer
gtaaaacgacggccagtcaagaaggtcgcgtctgtagc

SEQ ID NO: 88459 - DNA, 21 bp, Artificial Sequence
  primer
aggttagctggaaagctgctg

SEQ ID NO: 88460 - DNA, 21 bp, Artificial Sequence
  primer
gcctctgaagtgtcttgggtg

SEQ ID NO: 88461 - DNA, 37 bp, Artificial Sequence
  primer
gtaaaacgacggccagtggctcccactcatatccctc

SEQ ID NO: 88462 - DNA, 21 bp, Artificial Sequence
  primer
gagggcacataggagctgaac

SEQ ID NO: 88463 - DNA, 21 bp, Artificial Sequence
  primer
acagagccatttattgagccc

SEQ ID NO: 88464 - DNA, 21 bp, Artificial Sequence
  primer
agagcctgaggtggtctgaag

SEQ ID NO: 88465 - DNA, 18 bp, Artificial Sequence
  primer
agctgagggtccgtttgg

SEQ ID NO: 88466 - DNA, 38 bp, Artificial Sequence
  primer
gtaaaacgacggccagtctgtttactgcaagctccacc

SEQ ID NO: 88467 - DNA, 37 bp, Artificial Sequence
  primer
gtaaaacgacggccagtgaaagaagccagggatgagg

SEQ ID NO: 88468 - DNA, 19 bp, Artificial Sequence
  primer
agccgagagtgtgccattg

SEQ ID NO: 88469 - DNA, 21 bp, Artificial Sequence
  primer
ctcaccctcgtgtttcctagc

SEQ ID NO: 88470 - DNA, 21 bp, Artificial Sequence
  primer
ctccaggagagaaagcaccac

SEQ ID NO: 88471 - DNA, 38 bp, Artificial Sequence
  primer
gtaaaacgacggccagttacagtcagggctctgtgctc

SEQ ID NO: 88472 - DNA, 19 bp, Artificial Sequence
  primer
tcctgccagagaaaggtgg

SEQ ID NO: 88473 - DNA, 21 bp, Artificial Sequence
  primer
aagagcaagtgaactctcccg

SEQ ID NO: 88474 - DNA, 20 bp, Artificial Sequence
  primer
tggctgattcaggtaggtcc

SEQ ID NO: 88475 - DNA, 21 bp, Artificial Sequence
  primer
agagggtgaggacagtgatgg

SEQ ID NO: 88476 - DNA, 38 bp, Artificial Sequence
  primer
gtaaaacgacggccagtccctgtgataacaccaagtcc

SEQ ID NO: 88477 - DNA, 22 bp, Artificial Sequence
  primer
gaaccaggaagggatttgaaac

SEQ ID NO: 88478 - DNA, 21 bp, Artificial Sequence
  primer
gcaccttcatttccagaaacc

SEQ ID NO: 88479 - DNA, 21 bp, Artificial Sequence
  primer
acttgggagtcaaactgtggg

SEQ ID NO: 88480 - DNA, 22 bp, Artificial Sequence
  primer
cccaaatctatgattccacagc

SEQ ID NO: 88481 - DNA, 21 bp, Artificial Sequence
  primer
gatgaagcaagattctgtcgc

SEQ ID NO: 88482 - DNA, 26 bp, Artificial Sequence
  primer
gaccacaactttcttcaaacttcttc

SEQ ID NO: 88483 - DNA, 21 bp, Artificial Sequence
  primer
catctgttcagttccagccag

SEQ ID NO: 88484 - DNA, 21 bp, Artificial Sequence
  primer
cagtgaatgcctcctctccac

SEQ ID NO: 88485 - DNA, 21 bp, Artificial Sequence
  primer
ggaggctgatgtgagagatcc

SEQ ID NO: 88486 - DNA, 40 bp, Artificial Sequence
  primer
gtaaaacgacggccagtttcttatcttgcagaaggcagaa

SEQ ID NO: 88487 - DNA, 39 bp, Artificial Sequence
  primer
gtaaaacgacggccagtttgaccagtccaaataattgct

SEQ ID NO: 88488 - DNA, 44 bp, Artificial Sequence
  primer
gtaaaacgacggccagttgtaaacacatgctacttacacattgc

SEQ ID NO: 88489 - DNA, 38 bp, Artificial Sequence
  primer
gtaaaacgacggccagtaggcataacgaacgaggaagt

SEQ ID NO: 88490 - DNA, 19 bp, Artificial Sequence
  primer
gctgacaagggtcgcaatc

SEQ ID NO: 88491 - DNA, 21 bp, Artificial Sequence
  primer
aggaccaggtagaagcttggc

SEQ ID NO: 88492 - DNA, 38 bp, Artificial Sequence
  primer
gtaaaacgacggccagttacctgggtgtctagcccttg

SEQ ID NO: 88493 - DNA, 21 bp, Artificial Sequence
  primer
gtgagctccataaaccaaggc

SEQ ID NO: 88494 - DNA, 38 bp, Artificial Sequence
  primer
gtaaaacgacggccagtagattgaatgggtgggaactg

SEQ ID NO: 88495 - DNA, 37 bp, Artificial Sequence
  primer
gtaaaacgacggccagtgaggctgcagttccacattc

SEQ ID NO: 88496 - DNA, 21 bp, Artificial Sequence
  primer
atctgctctgtacctggctcc

SEQ ID NO: 88497 - DNA, 38 bp, Artificial Sequence
  primer
gtaaaacgacggccagtggtatatgtgcgtggagttgg

SEQ ID NO: 88498 - DNA, 37 bp, Artificial Sequence
  primer
gtaaaacgacggccagtcagcagccaaggtcactctg

SEQ ID NO: 88499 - DNA, 21 bp, Artificial Sequence
  primer
cactcctcactggacacttgg

SEQ ID NO: 88500 - DNA, 36 bp, Artificial Sequence
  primer
gtaaaacgacggccagtagctcagacctgggaaggg

SEQ ID NO: 88501 - DNA, 21 bp, Artificial Sequence
  primer
attgcacatttgtgtcttggg

SEQ ID NO: 88502 - DNA, 38 bp, Artificial Sequence
  primer
gtaaaacgacggccagttcaacctcagagagcggctac

SEQ ID NO: 88503 - DNA, 21 bp, Artificial Sequence
  primer
ggatataagacggcatgggac

SEQ ID NO: 88504 - DNA, 38 bp, Artificial Sequence
  primer
gtaaaacgacggccagttaggtcaccgtctcagcacag

SEQ ID NO: 88505 - DNA, 38 bp, Artificial Sequence
  primer
gtaaaacgacggccagttacatgctctttccatcaccc

SEQ ID NO: 88506 - DNA, 21 bp, Artificial Sequence
  primer
ctgcctcgctcggatactaag

SEQ ID NO: 88507 - DNA, 21 bp, Artificial Sequence
  primer
gtcaagccctgactggacatc

SEQ ID NO: 88508 - DNA, 21 bp, Artificial Sequence
  primer
gtcacctggtcaagtggaagc

SEQ ID NO: 88509 - DNA, 38 bp, Artificial Sequence
  primer
gtaaaacgacggccagtaagatcaagatcaggaagggc

SEQ ID NO: 88510 - DNA, 21 bp, Artificial Sequence
  primer
atgtggtgagctgagatcgtg

SEQ ID NO: 88511 - DNA, 21 bp, Artificial Sequence
  primer
attagctggatgtggaggtgg

SEQ ID NO: 88512 - DNA, 19 bp, Artificial Sequence
  primer
tttgctgccttatcctggg

SEQ ID NO: 88513 - DNA, 21 bp, Artificial Sequence
  primer
cccaaagggtgacatgacttc

SEQ ID NO: 88514 - DNA, 39 bp, Artificial Sequence
  primer
gtaaaacgacggccagtgagcaggtactgcttccaactg

SEQ ID NO: 88515 - DNA, 38 bp, Artificial Sequence
  primer
gtaaaacgacggccagtttcctgtctactccagggtgc

SEQ ID NO: 88516 - DNA, 39 bp, Artificial Sequence
  primer
gtaaaacgacggccagtgcatcagtcatagcaatctccc

SEQ ID NO: 88517 - DNA, 21 bp, Artificial Sequence
  primer
gaaatgggaatcctttgttgg

SEQ ID NO: 88518 - DNA, 37 bp, Artificial Sequence
  primer
gtaaaacgacggccagtctctccagagccagagggag

SEQ ID NO: 88519 - DNA, 21 bp, Artificial Sequence
  primer
tggtctttcctatcctctggg

SEQ ID NO: 88520 - DNA, 20 bp, Artificial Sequence
  primer
cagcctcccaaagtacaagg

SEQ ID NO: 88521 - DNA, 21 bp, Artificial Sequence
  primer
cactccgtaaagccaggaatc

SEQ ID NO: 88522 - DNA, 37 bp, Artificial Sequence
  primer
gtaaaacgacggccagtctcttccagtgaggtggcag

SEQ ID NO: 88523 - DNA, 21 bp, Artificial Sequence
  primer
gtccttgctgaacaggctctc

SEQ ID NO: 88524 - DNA, 38 bp, Artificial Sequence
  primer
gtaaaacgacggccagtaaattctgcaaatcctggcac

SEQ ID NO: 88525 - DNA, 38 bp, Artificial Sequence
  primer
gtaaaacgacggccagtcaggaaggaagaagcaagctc

SEQ ID NO: 88526 - DNA, 37 bp, Artificial Sequence
  primer
gtaaaacgacggccagtgccaggaaccacagacaaag

SEQ ID NO: 88527 - DNA, 37 bp, Artificial Sequence
  primer
gtaaaacgacggccagttcctttcaggtcagtgacgg

SEQ ID NO: 88528 - DNA, 21 bp, Artificial Sequence
  primer
gatgaggtcttgtggcttgtg

SEQ ID NO: 88529 - DNA, 35 bp, Artificial Sequence
  primer
gtaaaacgacggccagtctgcttgcgtccctctcc

SEQ ID NO: 88530 - DNA, 21 bp, Artificial Sequence
  primer
tgactgctccatccaattctg

SEQ ID NO: 88531 - DNA, 38 bp, Artificial Sequence
  primer
gtaaaacgacggccagtcagtgagctagagcctgaccc

SEQ ID NO: 88532 - DNA, 20 bp, Artificial Sequence
  primer
gggctaggctgctgagtatg

SEQ ID NO: 88533 - DNA, 38 bp, Artificial Sequence
  primer
gtaaaacgacggccagtctgtctaaggccatgctttcc

SEQ ID NO: 88534 - DNA, 20 bp, Artificial Sequence
  primer
ctttgtgccacttccttccc

SEQ ID NO: 88535 - DNA, 21 bp, Artificial Sequence
  primer
gaagagaagagggcctgactg

SEQ ID NO: 88536 - DNA, 18 bp, Artificial Sequence
  primer
ctccgtagggaagcccat

SEQ ID NO: 88537 - DNA, 38 bp, Artificial Sequence
  primer
gtaaaacgacggccagtccactgtggccctctttagac

SEQ ID NO: 88538 - DNA, 38 bp, Artificial Sequence
  primer
gtaaaacgacggccagtgcctagcctagcctaacccac

SEQ ID NO: 88539 - DNA, 21 bp, Artificial Sequence
  primer
gtcaatttgggacagaaaccc

SEQ ID NO: 88540 - DNA, 38 bp, Artificial Sequence
  primer
gtaaaacgacggccagtcagacatggtctgtgtccagc

SEQ ID NO: 88541 - DNA, 21 bp, Artificial Sequence
  primer
gagtctgggatcagctcttgc

SEQ ID NO: 88542 - DNA, 20 bp, Artificial Sequence
  primer
gttgtgagcaccagacaccc

SEQ ID NO: 88543 - DNA, 20 bp, Artificial Sequence
  primer
caccaaagctctccctagcc

SEQ ID NO: 88544 - DNA, 37 bp, Artificial Sequence
  primer
gtaaaacgacggccagtcacctgtaggatgctgggag

SEQ ID NO: 88545 - DNA, 21 bp, Artificial Sequence
  primer
tggtccaataaataaaggcgg

SEQ ID NO: 88546 - DNA, 21 bp, Artificial Sequence
  primer
tcgcccttgcaggtactaaag

SEQ ID NO: 88547 - DNA, 21 bp, Artificial Sequence
  primer
ctgaacacaagttaggcctgc

SEQ ID NO: 88548 - DNA, 21 bp, Artificial Sequence
  primer
tcttgtccttcaagtccaggg

SEQ ID NO: 88549 - DNA, 36 bp, Artificial Sequence
  primer
gtaaaacgacggccagtaagccactcaactgcagcc

SEQ ID NO: 88550 - DNA, 19 bp, Artificial Sequence
  primer
gtggtgagccaagatggtg

SEQ ID NO: 88551 - DNA, 38 bp, Artificial Sequence
  primer
gtaaaacgacggccagtttagtctcttggtgtggcagg

SEQ ID NO: 88552 - DNA, 21 bp, Artificial Sequence
  primer
gtgagaggtcagggtctctgc

SEQ ID NO: 88553 - DNA, 22 bp, Artificial Sequence
  primer
catacattcctcttcgtttggg

SEQ ID NO: 88554 - DNA, 20 bp, Artificial Sequence
  primer
agacccagagaccacgacac

SEQ ID NO: 88555 - DNA, 20 bp, Artificial Sequence
  primer
aagcccacatgtacaccgag

SEQ ID NO: 88556 - DNA, 21 bp, Artificial Sequence
  primer
caggtcaccatgtagtccagc

SEQ ID NO: 88557 - DNA, 21 bp, Artificial Sequence
  primer
agaagcaagcaggaggacttg

SEQ ID NO: 88558 - DNA, 20 bp, Artificial Sequence
  primer
cctttctgcaaggctaaggc

SEQ ID NO: 88559 - DNA, 21 bp, Artificial Sequence
  primer
atgacgttaagaggaccaggg

SEQ ID NO: 88560 - DNA, 21 bp, Artificial Sequence
  primer
ggatgacaacacctatgtccc

SEQ ID NO: 88561 - DNA, 38 bp, Artificial Sequence
  primer
gtaaaacgacggccagtgcacccactctctaagtgctg

SEQ ID NO: 88562 - DNA, 21 bp, Artificial Sequence
  primer
gggtggctcacaagtaccaag

SEQ ID NO: 88563 - DNA, 21 bp, Artificial Sequence
  primer
gaagaggcacttcagtttggg

SEQ ID NO: 88564 - DNA, 38 bp, Artificial Sequence
  primer
gtaaaacgacggccagtagacaggagtgaggaaggacg

SEQ ID NO: 88565 - DNA, 21 bp, Artificial Sequence
  primer
gcatggataagcctttcaacc

SEQ ID NO: 88566 - DNA, 21 bp, Artificial Sequence
  primer
gtgcttccttggagatgtttg

SEQ ID NO: 88567 - DNA, 22 bp, Artificial Sequence
  primer
tgcagctccataaatacacacg

SEQ ID NO: 88568 - DNA, 21 bp, Artificial Sequence
  primer
tttctgagggcaaagtgatcc

SEQ ID NO: 88569 - DNA, 39 bp, Artificial Sequence
  primer
gtaaaacgacggccagtggctagatcactttcccttgtg

SEQ ID NO: 88570 - DNA, 22 bp, Artificial Sequence
  primer
gatcacagcttccctaagaccc

SEQ ID NO: 88571 - DNA, 21 bp, Artificial Sequence
  primer
tcagactttgctattggtgcc

SEQ ID NO: 88572 - DNA, 40 bp, Artificial Sequence
  primer
gtaaaacgacggccagttgtgtgccttattctgggtacag

SEQ ID NO: 88573 - DNA, 21 bp, Artificial Sequence
  primer
ttgaagatgacaagcactggg

SEQ ID NO: 88574 - DNA, 38 bp, Artificial Sequence
  primer
gtaaaacgacggccagttttgtctctgcacattgcctc

SEQ ID NO: 88575 - DNA, 21 bp, Artificial Sequence
  primer
agttgtggatgcctcgttatg

SEQ ID NO: 88576 - DNA, 38 bp, Artificial Sequence
  primer
gtaaaacgacggccagttaaaccagcatttctgatggc

SEQ ID NO: 88577 - DNA, 38 bp, Artificial Sequence
  primer
gtaaaacgacggccagtaaagaggagtgacttggctgc

SEQ ID NO: 88578 - DNA, 43 bp, Artificial Sequence
  primer
gtaaaacgacggccagtctgtttctctgatcttacaggaaatg

SEQ ID NO: 88579 - DNA, 22 bp, Artificial Sequence
  primer
cagcgagtttctgattctttgg

SEQ ID NO: 88580 - DNA, 41 bp, Artificial Sequence
  primer
gtaaaacgacggccagtttctgtgatcctgactacagcttg

SEQ ID NO: 88581 - DNA, 25 bp, Artificial Sequence
  primer
tcattcatgacagaattgtaacctc

SEQ ID NO: 88582 - DNA, 22 bp, Artificial Sequence
  primer
ttgtctttcacgggataatctg

SEQ ID NO: 88583 - DNA, 22 bp, Artificial Sequence
  primer
caattcaccagaagtggtctcc

SEQ ID NO: 88584 - DNA, 21 bp, Artificial Sequence
  primer
tttctttgtgttcaagcaggg

SEQ ID NO: 88585 - DNA, 21 bp, Artificial Sequence
  primer
agctaatggagccaggatttg

SEQ ID NO: 88586 - DNA, 38 bp, Artificial Sequence
  primer
gtaaaacgacggccagtaaagcctcggtcctactggtc

SEQ ID NO: 88587 - DNA, 21 bp, Artificial Sequence
  primer
ttgcaaagggatgacagtagg

SEQ ID NO: 88588 - DNA, 38 bp, Artificial Sequence
  primer
gtaaaacgacggccagtaaaccaatgacgccatgtatc

SEQ ID NO: 88589 - DNA, 39 bp, Artificial Sequence
  primer
gtaaaacgacggccagtgaagcgaagcattattgtttga

SEQ ID NO: 88590 - DNA, 21 bp, Artificial Sequence
  primer
tccttgcttcaatccaggttc

SEQ ID NO: 88591 - DNA, 21 bp, Artificial Sequence
  primer
aaacgctttaccatttggcac

SEQ ID NO: 88592 - DNA, 20 bp, Artificial Sequence
  primer
ccctgccttattgctagctg

SEQ ID NO: 88593 - DNA, 40 bp, Artificial Sequence
  primer
gtaaaacgacggccagttgtcctttcagccatagaacttg

SEQ ID NO: 88594 - DNA, 21 bp, Artificial Sequence
  primer
ctgggtaacagagtaaggccc

SEQ ID NO: 88595 - DNA, 21 bp, Artificial Sequence
  primer
atgtgctgcagagcctaacag

SEQ ID NO: 88596 - DNA, 23 bp, Artificial Sequence
  primer
agcacatttcccttataggttgg

SEQ ID NO: 88597 - DNA, 38 bp, Artificial Sequence
  primer
gtaaaacgacggccagtttagaggaaaggctgggtctg

SEQ ID NO: 88598 - DNA, 36 bp, Artificial Sequence
  primer
gtaaaacgacggccagtaggactagggccggtcttc

SEQ ID NO: 88599 - DNA, 37 bp, Artificial Sequence
  primer
gtaaaacgacggccagtaaataggcacctctgcttgg

SEQ ID NO: 88600 - DNA, 37 bp, Artificial Sequence
  primer
gtaaaacgacggccagtcgaaggatttgtgatggctg

SEQ ID NO: 88601 - DNA, 41 bp, Artificial Sequence
  primer
gtaaaacgacggccagtctgttggattactgccatattctc

SEQ ID NO: 88602 - DNA, 42 bp, Artificial Sequence
  primer
gtaaaacgacggccagtggctaggctatacacttacacaacc

SEQ ID NO: 88603 - DNA, 21 bp, Artificial Sequence
  primer
ggtcgccatagttagccactt

SEQ ID NO: 88604 - DNA, 38 bp, Artificial Sequence
  primer
gtaaaacgacggccagtcctaacctttaggccagtggg

SEQ ID NO: 88605 - DNA, 38 bp, Artificial Sequence
  primer
gtaaaacgacggccagtcaagctgctgtcagtttctcc

SEQ ID NO: 88606 - DNA, 24 bp, Artificial Sequence
  primer
tcaattatcatttaggccagtttg

SEQ ID NO: 88607 - DNA, 21 bp, Artificial Sequence
  primer
ctgaaggctgacgtttcaatg

SEQ ID NO: 88608 - DNA, 38 bp, Artificial Sequence
  primer
gtaaaacgacggccagtggcatttgaaatcaacaaacg

SEQ ID NO: 88609 - DNA, 22 bp, Artificial Sequence
  primer
catataccactgaacccaaggc

SEQ ID NO: 88610 - DNA, 21 bp, Artificial Sequence
  primer
tttcaccctaaagcaactgcc

SEQ ID NO: 88611 - DNA, 21 bp, Artificial Sequence
  primer
tcactctttgaggcagtgacc

SEQ ID NO: 88612 - DNA, 21 bp, Artificial Sequence
  primer
ggtacctgaagatctggctgc

SEQ ID NO: 88613 - DNA, 39 bp, Artificial Sequence
  primer
gtaaaacgacggccagttgagttccggagtaatcccttc

SEQ ID NO: 88614 - DNA, 21 bp, Artificial Sequence
  primer
gtcctaacccaggtgtcatcc

SEQ ID NO: 88615 - DNA, 21 bp, Artificial Sequence
  primer
cttgaagctgtgtccttgcag

SEQ ID NO: 88616 - DNA, 21 bp, Artificial Sequence
  primer
ttcacatcttgcaaacatggc

SEQ ID NO: 88617 - DNA, 21 bp, Artificial Sequence
  primer
ggaattggtcctggtgctaac

SEQ ID NO: 88618 - DNA, 38 bp, Artificial Sequence
  primer
gtaaaacgacggccagtagcctgaagcccttgtttatg

SEQ ID NO: 88619 - DNA, 21 bp, Artificial Sequence
  primer
cggagctttgattatgaaggg

SEQ ID NO: 88620 - DNA, 38 bp, Artificial Sequence
  primer
gtaaaacgacggccagtcgggaaagacttgatgagacc

SEQ ID NO: 88621 - DNA, 21 bp, Artificial Sequence
  primer
ggaaggttccatcagttcagc

SEQ ID NO: 88622 - DNA, 21 bp, Artificial Sequence
  primer
cttgagggagtgttgggactc

SEQ ID NO: 88623 - DNA, 22 bp, Artificial Sequence
  primer
tgatggcaattaagtcctgaac

SEQ ID NO: 88624 - DNA, 21 bp, Artificial Sequence
  primer
tgaattcatagtgcccaggtg

SEQ ID NO: 88625 - DNA, 38 bp, Artificial Sequence
  primer
gtaaaacgacggccagtgggttgggaaggtttcttagg

SEQ ID NO: 88626 - DNA, 38 bp, Artificial Sequence
  primer
gtaaaacgacggccagtctcctgcttaatggttgagcc

SEQ ID NO: 88627 - DNA, 38 bp, Artificial Sequence
  primer
gtaaaacgacggccagttctttaagatgtcggtgccag

SEQ ID NO: 88628 - DNA, 38 bp, Artificial Sequence
  primer
gtaaaacgacggccagtatttctctgagacggactgcg

SEQ ID NO: 88629 - DNA, 21 bp, Artificial Sequence
  primer
gatggctcctctccaagagac

SEQ ID NO: 88630 - DNA, 38 bp, Artificial Sequence
  primer
gtaaaacgacggccagtagtagcttcaggcctccacac

SEQ ID NO: 88631 - DNA, 38 bp, Artificial Sequence
  primer
gtaaaacgacggccagtcggtagagagaaatggaagcc

SEQ ID NO: 88632 - DNA, 35 bp, Artificial Sequence
  primer
gtaaaacgacggccagtgggaatggtgctctcgac

SEQ ID NO: 88633 - DNA, 38 bp, Artificial Sequence
  primer
gtaaaacgacggccagtcaccatcttaaccactgcacc

SEQ ID NO: 88634 - DNA, 38 bp, Artificial Sequence
  primer
gtaaaacgacggccagtacgcaaacacctacacaggag

SEQ ID NO: 88635 - DNA, 38 bp, Artificial Sequence
  primer
gtaaaacgacggccagtcttctttcagggtctccaagc

SEQ ID NO: 88636 - DNA, 21 bp, Artificial Sequence
  primer
ctcttcttgccacatccactg

SEQ ID NO: 88637 - DNA, 21 bp, Artificial Sequence
  primer
atctcaattccagggcatctc

SEQ ID NO: 88638 - DNA, 21 bp, Artificial Sequence
  primer
ggatgaacacgacatgtgagg

SEQ ID NO: 88639 - DNA, 21 bp, Artificial Sequence
  primer
ggccaagccttaggtgttaag

SEQ ID NO: 88640 - DNA, 38 bp, Artificial Sequence
  primer
gtaaaacgacggccagtgaacaggtgggagaatggaag

SEQ ID NO: 88641 - DNA, 38 bp, Artificial Sequence
  primer
gtaaaacgacggccagtgtggtaggcaaaggaggaaac

SEQ ID NO: 88642 - DNA, 36 bp, Artificial Sequence
  primer
gtaaaacgacggccagtggagcaagtgggaaagcag

SEQ ID NO: 88643 - DNA, 38 bp, Artificial Sequence
  primer
gtaaaacgacggccagttcttctgggagcaggagacac

SEQ ID NO: 88644 - DNA, 38 bp, Artificial Sequence
  primer
gtaaaacgacggccagtgaatggtgggatgaagtggag

SEQ ID NO: 88645 - DNA, 21 bp, Artificial Sequence
  primer
ttgtatgagtctgtgctgggc

SEQ ID NO: 88646 - DNA, 19 bp, Artificial Sequence
  primer
acaagtgaaccctggcacc

SEQ ID NO: 88647 - DNA, 20 bp, Artificial Sequence
  primer
gaagccaaggatctgcagtg

SEQ ID NO: 88648 - DNA, 38 bp, Artificial Sequence
  primer
gtaaaacgacggccagtagtctcagggagaaggagcac

SEQ ID NO: 88649 - DNA, 37 bp, Artificial Sequence
  primer
gtaaaacgacggccagtaggtctgccactgcactcag

SEQ ID NO: 88650 - DNA, 21 bp, Artificial Sequence
  primer
atgacttcatcggcaaaggtc

SEQ ID NO: 88651 - DNA, 21 bp, Artificial Sequence
  primer
tttatgcgacaactgccaatc

SEQ ID NO: 88652 - DNA, 24 bp, Artificial Sequence
  primer
gggtgatcaataatatttgccaag

SEQ ID NO: 88653 - DNA, 40 bp, Artificial Sequence
  primer
gtaaaacgacggccagtaagacagccagtttctttatcgg

SEQ ID NO: 88654 - DNA, 38 bp, Artificial Sequence
  primer
gtaaaacgacggccagtcatacaaagacatgcccaacc

SEQ ID NO: 88655 - DNA, 21 bp, Artificial Sequence
  primer
gggcaaattatcccatcactc

SEQ ID NO: 88656 - DNA, 22 bp, Artificial Sequence
  primer
gctttgagcctggtagtgattc

SEQ ID NO: 88657 - DNA, 41 bp, Artificial Sequence
  primer
gtaaaacgacggccagtggagagccattcatagcatatttc

SEQ ID NO: 88658 - DNA, 21 bp, Artificial Sequence
  primer
tttccacacttccctgtcttc

SEQ ID NO: 88659 - DNA, 35 bp, Artificial Sequence
  primer
gtaaaacgacggccagtgccctacttcgagccgag

SEQ ID NO: 88660 - DNA, 21 bp, Artificial Sequence
  primer
atgtaaggagtggcctgcttc

SEQ ID NO: 88661 - DNA, 38 bp, Artificial Sequence
  primer
gtaaaacgacggccagtagcctgcttcacaatgcatac

SEQ ID NO: 88662 - DNA, 21 bp, Artificial Sequence
  primer
gggcaacaagagtgaaactcc

SEQ ID NO: 88663 - DNA, 39 bp, Artificial Sequence
  primer
gtaaaacgacggccagtccagggaccatgttacttcaac

SEQ ID NO: 88664 - DNA, 24 bp, Artificial Sequence
  primer
ggaagttccatggagataggaatc

SEQ ID NO: 88665 - DNA, 38 bp, Artificial Sequence
  primer
gtaaaacgacggccagtacgaagtgaggaaggaggagg

SEQ ID NO: 88666 - DNA, 39 bp, Artificial Sequence
  primer
gtaaaacgacggccagttctcacctcaacgctctaggtc

SEQ ID NO: 88667 - DNA, 21 bp, Artificial Sequence
  primer
ctgaggtgaggtttgaggctg

SEQ ID NO: 88668 - DNA, 39 bp, Artificial Sequence
  primer
gtaaaacgacggccagttctcctgcaataagatcatccc

SEQ ID NO: 88669 - DNA, 21 bp, Artificial Sequence
  primer
accactgattggtccttagcc

SEQ ID NO: 88670 - DNA, 20 bp, Artificial Sequence
  primer
gcatgatctgatggacaccc

SEQ ID NO: 88671 - DNA, 20 bp, Artificial Sequence
  primer
aacattctgtggatccggtg

SEQ ID NO: 88672 - DNA, 21 bp, Artificial Sequence
  primer
tacgcccattcctatactccg

SEQ ID NO: 88673 - DNA, 21 bp, Artificial Sequence
  primer
aagagacagtgtagccacggg

SEQ ID NO: 88674 - DNA, 18 bp, Artificial Sequence
  primer
cggtgagccgagattgtg

SEQ ID NO: 88675 - DNA, 38 bp, Artificial Sequence
  primer
gtaaaacgacggccagtctgcagaggaaccagaagtgg

SEQ ID NO: 88676 - DNA, 21 bp, Artificial Sequence
  primer
cactaacacaaaggcaggagg

SEQ ID NO: 88677 - DNA, 21 bp, Artificial Sequence
  primer
accttcccaaaggtgatgaag

SEQ ID NO: 88678 - DNA, 20 bp, Artificial Sequence
  primer
ctgcccatctattcccaacc

SEQ ID NO: 88679 - DNA, 21 bp, Artificial Sequence
  primer
ggagacattagcgagagacgg

SEQ ID NO: 88680 - DNA, 21 bp, Artificial Sequence
  primer
aatcaagctttgctcctccag

SEQ ID NO: 88681 - DNA, 39 bp, Artificial Sequence
  primer
gtaaaacgacggccagtgcagacaggatctgaatcaagc

SEQ ID NO: 88682 - DNA, 21 bp, Artificial Sequence
  primer
atttcacaccacttgcttccc

SEQ ID NO: 88683 - DNA, 23 bp, Artificial Sequence
  primer
ttaggcagagctgtgattcattt

SEQ ID NO: 88684 - DNA, 22 bp, Artificial Sequence
  primer
cactttgtagaggacaatgcca

SEQ ID NO: 88685 - DNA, 21 bp, Artificial Sequence
  primer
atcatttccagccagatacgg

SEQ ID NO: 88686 - DNA, 22 bp, Artificial Sequence
  primer
tgaataaagggtggaaatgaca

SEQ ID NO: 88687 - DNA, 43 bp, Artificial Sequence
  primer
gtaaaacgacggccagtttgagaattcaactgactcacagtag

SEQ ID NO: 88688 - DNA, 38 bp, Artificial Sequence
  primer
gtaaaacgacggccagtaatcccaaatcacttgccaat

SEQ ID NO: 88689 - DNA, 18 bp, Artificial Sequence
  primer
acggcccttcacagaacc

SEQ ID NO: 88690 - DNA, 20 bp, Artificial Sequence
  primer
gacacacgctcctcttcagc

SEQ ID NO: 88691 - DNA, 18 bp, Artificial Sequence
  primer
tccaggctgtcccacttg

SEQ ID NO: 88692 - DNA, 38 bp, Artificial Sequence
  primer
gtaaaacgacggccagtaccaggttcttgatctcctcg

SEQ ID NO: 88693 - DNA, 21 bp, Artificial Sequence
  primer
gtggcctttaacaggtcgttc

SEQ ID NO: 88694 - DNA, 39 bp, Artificial Sequence
  primer
gtaaaacgacggccagtttgtccttctggtctcacttcc

SEQ ID NO: 88695 - DNA, 36 bp, Artificial Sequence
  primer
gtaaaacgacggccagtacgaaatcagaaccgcagg

SEQ ID NO: 88696 - DNA, 21 bp, Artificial Sequence
  primer
cccgtatgtacctggagtgtg

SEQ ID NO: 88697 - DNA, 39 bp, Artificial Sequence
  primer
gtaaaacgacggccagtcagcatcatccctctttgattc

SEQ ID NO: 88698 - DNA, 21 bp, Artificial Sequence
  primer
ggacagttgacatgttgtggc

SEQ ID NO: 88699 - DNA, 21 bp, Artificial Sequence
  primer
aggcgcttaagcaactttgtc

SEQ ID NO: 88700 - DNA, 38 bp, Artificial Sequence
  primer
gtaaaacgacggccagttggtcttgtggctctcctttc

SEQ ID NO: 88701 - DNA, 38 bp, Artificial Sequence
  primer
gtaaaacgacggccagtggcgaaagatgcctttctagg

SEQ ID NO: 88702 - DNA, 38 bp, Artificial Sequence
  primer
gtaaaacgacggccagtatctcccagagcaggtagagc

SEQ ID NO: 88703 - DNA, 38 bp, Artificial Sequence
  primer
gtaaaacgacggccagttttccctttcaggtgagttcc

SEQ ID NO: 88704 - DNA, 23 bp, Artificial Sequence
  primer
gccaagacttccatttaagatcc

SEQ ID NO: 88705 - DNA, 38 bp, Artificial Sequence
  primer
gtaaaacgacggccagtgacatgcaacaaacaacttgg

SEQ ID NO: 88706 - DNA, 20 bp, Artificial Sequence
  primer
gcagccgagtgagactctgt

SEQ ID NO: 88707 - DNA, 42 bp, Artificial Sequence
  primer
gtaaaacgacggccagttcttacgccaataatatcaagacaa

SEQ ID NO: 88708 - DNA, 20 bp, Artificial Sequence
  primer
cacacacaagacgcaccaac

SEQ ID NO: 88709 - DNA, 38 bp, Artificial Sequence
  primer
gtaaaacgacggccagtgcattaaaccaagcaatccac

SEQ ID NO: 88710 - DNA, 38 bp, Artificial Sequence
  primer
gtaaaacgacggccagtcccagagaaggatccagagac

SEQ ID NO: 88711 - DNA, 37 bp, Artificial Sequence
  primer
gtaaaacgacggccagtggtttgaatcctagccctgc

SEQ ID NO: 88712 - DNA, 24 bp, Artificial Sequence
  primer
ggtcacaatatcatggaccaaatc

SEQ ID NO: 88713 - DNA, 21 bp, Artificial Sequence
  primer
aggtgctgccaataccttgac

SEQ ID NO: 88714 - DNA, 22 bp, Artificial Sequence
  primer
tttggaccatggtttcactacc

SEQ ID NO: 88715 - DNA, 26 bp, Artificial Sequence
  primer
ttgaatatccaacattaagagaatgc

SEQ ID NO: 88716 - DNA, 37 bp, Artificial Sequence
  primer
gtaaaacgacggccagttggtgggtaaagggtttgtg

SEQ ID NO: 88717 - DNA, 27 bp, Artificial Sequence
  primer
tcaggtatagttaatgacatcatgtgg

SEQ ID NO: 88718 - DNA, 38 bp, Artificial Sequence
  primer
gtaaaacgacggccagtcttattaagggcaatcccagc

SEQ ID NO: 88719 - DNA, 21 bp, Artificial Sequence
  primer
tttcagctccgactctaaggg

SEQ ID NO: 88720 - DNA, 21 bp, Artificial Sequence
  primer
agtttggtagccaaccacctg

SEQ ID NO: 88721 - DNA, 23 bp, Artificial Sequence
  primer
tcatctcagtgcagtctgagaaa

SEQ ID NO: 88722 - DNA, 18 bp, Artificial Sequence
  primer
atggcgtgaacctgggag

SEQ ID NO: 88723 - DNA, 18 bp, Artificial Sequence
  primer
tgtgctacagcggcagag

SEQ ID NO: 88724 - DNA, 18 bp, Artificial Sequence
  primer
atgagccactgtgcctgg

SEQ ID NO: 88725 - DNA, 21 bp, Artificial Sequence
  primer
gccatcccaaaggtaaccata

SEQ ID NO: 88726 - DNA, 21 bp, Artificial Sequence
  primer
ggcaccagcttcttctcaaac

SEQ ID NO: 88727 - DNA, 21 bp, Artificial Sequence
  primer
gtctgcagagaaggtcttggg

SEQ ID NO: 88728 - DNA, 18 bp, Artificial Sequence
  primer
caagatcgtgccactgcc

SEQ ID NO: 88729 - DNA, 26 bp, Artificial Sequence
  primer
aaaccaacccatcaggtactatattc

SEQ ID NO: 88730 - DNA, 38 bp, Artificial Sequence
  primer
gtaaaacgacggccagtggccaacatattcccaaggta

SEQ ID NO: 88731 - DNA, 20 bp, Artificial Sequence
  primer
cttgtgatcctcctgccttg

SEQ ID NO: 88732 - DNA, 22 bp, Artificial Sequence
  primer
gaaccactgctaagcacgtaag

SEQ ID NO: 88733 - DNA, 38 bp, Artificial Sequence
  primer
gtaaaacgacggccagttcacaggagatgctctgaacc

SEQ ID NO: 88734 - DNA, 38 bp, Artificial Sequence
  primer
gtaaaacgacggccagtaagagggttagctgggacaaa

SEQ ID NO: 88735 - DNA, 36 bp, Artificial Sequence
  primer
gtaaaacgacggccagttttcagtgctgctgatgcc

SEQ ID NO: 88736 - DNA, 22 bp, Artificial Sequence
  primer
tttggttaatgccaaatgttcc

SEQ ID NO: 88737 - DNA, 20 bp, Artificial Sequence
  primer
tgactccagggactgtgctc

SEQ ID NO: 88738 - DNA, 37 bp, Artificial Sequence
  primer
gtaaaacgacggccagtaatcccactcaagtggaccc

SEQ ID NO: 88739 - DNA, 21 bp, Artificial Sequence
  primer
agattatgccacggcactctg

SEQ ID NO: 88740 - DNA, 21 bp, Artificial Sequence
  primer
agaagaggtccaatggctgag

SEQ ID NO: 88741 - DNA, 38 bp, Artificial Sequence
  primer
gtaaaacgacggccagtgagtgacctcttcctccaacc

SEQ ID NO: 88742 - DNA, 21 bp, Artificial Sequence
  primer
ccacagtaattggctcccaac

SEQ ID NO: 88743 - DNA, 38 bp, Artificial Sequence
  primer
gtaaaacgacggccagtgtgtggcatgccttgtttaag

SEQ ID NO: 88744 - DNA, 38 bp, Artificial Sequence
  primer
gtaaaacgacggccagtagtagaaagaatgttgccgcc

SEQ ID NO: 88745 - DNA, 21 bp, Artificial Sequence
  primer
ctgtggtggtggttatatggg

SEQ ID NO: 88746 - DNA, 43 bp, Artificial Sequence
  primer
gtaaaacgacggccagtgatatgataaagcctctttgctcttc

SEQ ID NO: 88747 - DNA, 38 bp, Artificial Sequence
  primer
gtaaaacgacggccagtggaaaggaccagttcaccatc

SEQ ID NO: 88748 - DNA, 24 bp, Artificial Sequence
  primer
ggatagcatacgtcaattacctgg

SEQ ID NO: 88749 - DNA, 25 bp, Artificial Sequence
  primer
ttgcatcttagaaagaggctagaag

SEQ ID NO: 88750 - DNA, 20 bp, Artificial Sequence
  primer
ctacgacatgcaacatgccc

SEQ ID NO: 88751 - DNA, 21 bp, Artificial Sequence
  primer
ctgatggctgtactggtttgc

SEQ ID NO: 88752 - DNA, 38 bp, Artificial Sequence
  primer
gtaaaacgacggccagttggcatacaatgcagagacag

SEQ ID NO: 88753 - DNA, 19 bp, Artificial Sequence
  primer
actctccctctcgcccaac

SEQ ID NO: 88754 - DNA, 21 bp, Artificial Sequence
  primer
acacgcctgtagtcccaactg

SEQ ID NO: 88755 - DNA, 39 bp, Artificial Sequence
  primer
gtaaaacgacggccagttcaaatccctcatgaaattgag

SEQ ID NO: 88756 - DNA, 21 bp, Artificial Sequence
  primer
cactacaatctgcacactggc

SEQ ID NO: 88757 - DNA, 24 bp, Artificial Sequence
  primer
tcagccttcataggcaaactattc

SEQ ID NO: 88758 - DNA, 38 bp, Artificial Sequence
  primer
gtaaaacgacggccagtagtcgcctttggaaatgtacc

SEQ ID NO: 88759 - DNA, 26 bp, Artificial Sequence
  primer
aaattatgatgacggaaattcctact

SEQ ID NO: 88760 - DNA, 44 bp, Artificial Sequence
  primer
gtaaaacgacggccagtgcaatggaactccaaattatattaaag

SEQ ID NO: 88761 - DNA, 38 bp, Artificial Sequence
  primer
gtaaaacgacggccagtcaaaccaggaccagtatcgtg

SEQ ID NO: 88762 - DNA, 21 bp, Artificial Sequence
  primer
tggaccaccacccacttattc

SEQ ID NO: 88763 - DNA, 21 bp, Artificial Sequence
  primer
agagcttcctttctgtgctgc

SEQ ID NO: 88764 - DNA, 38 bp, Artificial Sequence
  primer
gtaaaacgacggccagtaagcaatcctctcacctcagc

SEQ ID NO: 88765 - DNA, 20 bp, Artificial Sequence
  primer
gccctctaactgaagcaccc

SEQ ID NO: 88766 - DNA, 38 bp, Artificial Sequence
  primer
gtaaaacgacggccagttctacctggctccacttgtcc

SEQ ID NO: 88767 - DNA, 39 bp, Artificial Sequence
  primer
gtaaaacgacggccagtccaaatgcaccctgaattctac

SEQ ID NO: 88768 - DNA, 20 bp, Artificial Sequence
  primer
gaagggcagggcttagaaag

SEQ ID NO: 88769 - DNA, 22 bp, Artificial Sequence
  primer
tgacggtgaagatccgatagag

SEQ ID NO: 88770 - DNA, 21 bp, Artificial Sequence
  primer
tccggtgtgtctttctctgtc

SEQ ID NO: 88771 - DNA, 21 bp, Artificial Sequence
  primer
gtaggctcggatcttccactg

SEQ ID NO: 88772 - DNA, 21 bp, Artificial Sequence
  primer
actatgacctcgaaactgggc

SEQ ID NO: 88773 - DNA, 35 bp, Artificial Sequence
  primer
gtaaaacgacggccagtcccacctggtcccatctc

SEQ ID NO: 88774 - DNA, 19 bp, Artificial Sequence
  primer
aagggagaggagggctcag

SEQ ID NO: 88775 - DNA, 38 bp, Artificial Sequence
  primer
gtaaaacgacggccagttctgagcctccctccttagac

SEQ ID NO: 88776 - DNA, 38 bp, Artificial Sequence
  primer
gtaaaacgacggccagttctccctgggttagagactgc

SEQ ID NO: 88777 - DNA, 22 bp, Artificial Sequence
  primer
gcgcaggagagaacctctctat

SEQ ID NO: 88778 - DNA, 19 bp, Artificial Sequence
  primer
agggtgagtggcagggaac

SEQ ID NO: 88779 - DNA, 23 bp, Artificial Sequence
  primer
agacagttgagagacagagaggg

SEQ ID NO: 88780 - DNA, 38 bp, Artificial Sequence
  primer
gtaaaacgacggccagtagcttcaaccatccctgtgtc

SEQ ID NO: 88781 - DNA, 39 bp, Artificial Sequence
  primer
gtaaaacgacggccagtggagggatttactaggtggtgg

SEQ ID NO: 88782 - DNA, 19 bp, Artificial Sequence
  primer
agggagatgaaacgggtcc

SEQ ID NO: 88783 - DNA, 36 bp, Artificial Sequence
  primer
gtaaaacgacggccagtagacagggcatcctccctc

SEQ ID NO: 88784 - DNA, 23 bp, Artificial Sequence
  primer
gagaagaccagagatagcaggtg

SEQ ID NO: 88785 - DNA, 22 bp, Artificial Sequence
  primer
cctggtaacaacacctctgtgg

SEQ ID NO: 88786 - DNA, 21 bp, Artificial Sequence
  primer
tggagtagttccaccctcacc

SEQ ID NO: 88787 - DNA, 38 bp, Artificial Sequence
  primer
gtaaaacgacggccagtctcagagcctggatctccaac

SEQ ID NO: 88788 - DNA, 21 bp, Artificial Sequence
  primer
gacttggtcactgaggtctgc

SEQ ID NO: 88789 - DNA, 39 bp, Artificial Sequence
  primer
gtaaaacgacggccagtaaacacctccagaatgagatgg

SEQ ID NO: 88790 - DNA, 21 bp, Artificial Sequence
  primer
gtggtcttgagatgaggtggg

SEQ ID NO: 88791 - DNA, 36 bp, Artificial Sequence
  primer
gtaaaacgacggccagtcaaggctggcctaagggac

SEQ ID NO: 88792 - DNA, 21 bp, Artificial Sequence
  primer
tggctcatatatctgcctgcc

SEQ ID NO: 88793 - DNA, 38 bp, Artificial Sequence
  primer
gtaaaacgacggccagtggcaacctctcactctccaag

SEQ ID NO: 88794 - DNA, 21 bp, Artificial Sequence
  primer
gcatcccagctcagtatctcc

SEQ ID NO: 88795 - DNA, 21 bp, Artificial Sequence
  primer
gtgggaatgaagaactgcctc

SEQ ID NO: 88796 - DNA, 38 bp, Artificial Sequence
  primer
gtaaaacgacggccagtcttgcttcccagtaaaccctg

SEQ ID NO: 88797 - DNA, 38 bp, Artificial Sequence
  primer
gtaaaacgacggccagtatgtcagcccacaggactagg

SEQ ID NO: 88798 - DNA, 21 bp, Artificial Sequence
  primer
cctgtgtgttgattcaggagc

SEQ ID NO: 88799 - DNA, 38 bp, Artificial Sequence
  primer
gtaaaacgacggccagtatgcaaagcaaggactgtctg

SEQ ID NO: 88800 - DNA, 21 bp, Artificial Sequence
  primer
ttcctatcggagaaggctttg

SEQ ID NO: 88801 - DNA, 38 bp, Artificial Sequence
  primer
gtaaaacgacggccagtgaggaggcaaatggtcagaag

SEQ ID NO: 88802 - DNA, 21 bp, Artificial Sequence
  primer
cccgtgggaccttcatactac

SEQ ID NO: 88803 - DNA, 21 bp, Artificial Sequence
  primer
tccctgaccatgggatagatg

SEQ ID NO: 88804 - DNA, 20 bp, Artificial Sequence
  primer
caaccacacctaccacccac

SEQ ID NO: 88805 - DNA, 38 bp, Artificial Sequence
  primer
gtaaaacgacggccagtggagagggaagaagctgagtc

SEQ ID NO: 88806 - DNA, 21 bp, Artificial Sequence
  primer
gaagaatggcaggtcaggaag

SEQ ID NO: 88807 - DNA, 38 bp, Artificial Sequence
  primer
gtaaaacgacggccagtcctcttggcaaagaactccag

SEQ ID NO: 88808 - DNA, 21 bp, Artificial Sequence
  primer
cattgcgatgattctgacacc

SEQ ID NO: 88809 - DNA, 21 bp, Artificial Sequence
  primer
agggagtgaatctgcagaagg

SEQ ID NO: 88810 - DNA, 38 bp, Artificial Sequence
  primer
gtaaaacgacggccagtgatcgtcatctgtgaattggc

SEQ ID NO: 88811 - DNA, 38 bp, Artificial Sequence
  primer
gtaaaacgacggccagtattcggaagacaatgaagctg

SEQ ID NO: 88812 - DNA, 21 bp, Artificial Sequence
  primer
tccagaattccctgaatggac

SEQ ID NO: 88813 - DNA, 21 bp, Artificial Sequence
  primer
cgctgctcaccatatcacttc

SEQ ID NO: 88814 - DNA, 38 bp, Artificial Sequence
  primer
gtaaaacgacggccagtcctcagtagctgttggtgtgc

SEQ ID NO: 88815 - DNA, 21 bp, Artificial Sequence
  primer
aggtatggcaagggtaaccac

SEQ ID NO: 88816 - DNA, 40 bp, Artificial Sequence
  primer
gtaaaacgacggccagtaagtcatactgctaagtgctggg

SEQ ID NO: 88817 - DNA, 21 bp, Artificial Sequence
  primer
cactgaggatgtggcctgtag

SEQ ID NO: 88818 - DNA, 38 bp, Artificial Sequence
  primer
gtaaaacgacggccagttctgaaagggagattgcacag

SEQ ID NO: 88819 - DNA, 38 bp, Artificial Sequence
  primer
gtaaaacgacggccagtgtctctatgccagggtcatgc

SEQ ID NO: 88820 - DNA, 38 bp, Artificial Sequence
  primer
gtaaaacgacggccagtctgtagggatccttgcctgtc

SEQ ID NO: 88821 - DNA, 38 bp, Artificial Sequence
  primer
gtaaaacgacggccagtctcagttagggctcttgccac

SEQ ID NO: 88822 - DNA, 38 bp, Artificial Sequence
  primer
gtaaaacgacggccagtccagatgggaaagacgcatag

SEQ ID NO: 88823 - DNA, 37 bp, Artificial Sequence
  primer
gtaaaacgacggccagtgctctcttgaatgagcctgg

SEQ ID NO: 88824 - DNA, 37 bp, Artificial Sequence
  primer
gtaaaacgacggccagtctggagtgtcctttgcaacc

SEQ ID NO: 88825 - DNA, 38 bp, Artificial Sequence
  primer
gtaaaacgacggccagttcattgcccatactgtgttcc

SEQ ID NO: 88826 - DNA, 38 bp, Artificial Sequence
  primer
gtaaaacgacggccagtccttggtgtcctaaggctgac

SEQ ID NO: 88827 - DNA, 21 bp, Artificial Sequence
  primer
tctctcaaacaacatgcaggc

SEQ ID NO: 88828 - DNA, 25 bp, Artificial Sequence
  primer
agcctactatatcaatccctgttcc

SEQ ID NO: 88829 - DNA, 22 bp, Artificial Sequence
  primer
ggaagccaaccaaagaattcag

SEQ ID NO: 88830 - DNA, 21 bp, Artificial Sequence
  primer
caaagctactgccaatgcaag

SEQ ID NO: 88831 - DNA, 23 bp, Artificial Sequence
  primer
ctcttctttgaattgagtggcag

SEQ ID NO: 88832 - DNA, 20 bp, Artificial Sequence
  primer
ctgtctgttggcattcatcg

SEQ ID NO: 88833 - DNA, 21 bp, Artificial Sequence
  primer
agaaggtgggacctgaaggag

SEQ ID NO: 88834 - DNA, 24 bp, Artificial Sequence
  primer
cctaagactgtttctgctttcagg

SEQ ID NO: 88835 - DNA, 38 bp, Artificial Sequence
  primer
gtaaaacgacggccagtcttcttcccacataccacacc

SEQ ID NO: 88836 - DNA, 20 bp, Artificial Sequence
  primer
gtggagcctagaaagggtgg

SEQ ID NO: 88837 - DNA, 23 bp, Artificial Sequence
  primer
gggtgaccttacaattccttctg

SEQ ID NO: 88838 - DNA, 24 bp, Artificial Sequence
  primer
aaagctcaaacaggcatatcttct

SEQ ID NO: 88839 - DNA, 43 bp, Artificial Sequence
  primer
gtaaaacgacggccagtttcctaaagttcctgcaataacctac

SEQ ID NO: 88840 - DNA, 38 bp, Artificial Sequence
  primer
gtaaaacgacggccagtcagtccagagggtcgtgtttc

SEQ ID NO: 88841 - DNA, 21 bp, Artificial Sequence
  primer
ttggcaaggtaatttctgtgg

SEQ ID NO: 88842 - DNA, 24 bp, Artificial Sequence
  primer
ggcctaggtataacaccacaactg

SEQ ID NO: 88843 - DNA, 21 bp, Artificial Sequence
  primer
agtctggcacgttgtatgcac

SEQ ID NO: 88844 - DNA, 40 bp, Artificial Sequence
  primer
gtaaaacgacggccagtccctccatatacttgatgctttg

SEQ ID NO: 88845 - DNA, 40 bp, Artificial Sequence
  primer
gtaaaacgacggccagtcaacactgtaaaccacaattgcc

SEQ ID NO: 88846 - DNA, 38 bp, Artificial Sequence
  primer
gtaaaacgacggccagtacatttgggagaatgctttgc

SEQ ID NO: 88847 - DNA, 21 bp, Artificial Sequence
  primer
acctatgtgattcccaggacc

SEQ ID NO: 88848 - DNA, 21 bp, Artificial Sequence
  primer
tgaatttggtccttgctgaac

SEQ ID NO: 88849 - DNA, 20 bp, Artificial Sequence
  primer
tttgacccactggacattgc

SEQ ID NO: 88850 - DNA, 39 bp, Artificial Sequence
  primer
gtaaaacgacggccagtgagcttgggaaactaacactgc

SEQ ID NO: 88851 - DNA, 21 bp, Artificial Sequence
  primer
attcactccaaggaaccaagc

SEQ ID NO: 88852 - DNA, 21 bp, Artificial Sequence
  primer
gctgacagagtgatgggattg

SEQ ID NO: 88853 - DNA, 27 bp, Artificial Sequence
  primer
catacagtaggaactcaatgcataaac

SEQ ID NO: 88854 - DNA, 22 bp, Artificial Sequence
  primer
ttggtggtgaaattgtaagctc

SEQ ID NO: 88855 - DNA, 38 bp, Artificial Sequence
  primer
gtaaaacgacggccagtgcagcatgaagagaacctgac

SEQ ID NO: 88856 - DNA, 21 bp, Artificial Sequence
  primer
cagcacaaagctgaacaatgc

SEQ ID NO: 88857 - DNA, 36 bp, Artificial Sequence
  primer
gtaaaacgacggccagtagtctctggcaatggctgc

SEQ ID NO: 88858 - DNA, 38 bp, Artificial Sequence
  primer
gtaaaacgacggccagtaatgtcacaccagtcactccc

SEQ ID NO: 88859 - DNA, 36 bp, Artificial Sequence; identical to SEQ ID NO: 88857
  primer

SEQ ID NO: 88860 - DNA, 38 bp, Artificial Sequence
  primer
gtaaaacgacggccagttacctgcaccttccataaccc

SEQ ID NO: 88861 - DNA, 22 bp, Artificial Sequence
  primer
ttgaaattccaagcaaggtttc

SEQ ID NO: 88862 - DNA, 41 bp, Artificial Sequence
  primer
gtaaaacgacggccagtgcaagcaaataactaggaagcaac

SEQ ID NO: 88863 - DNA, 23 bp, Artificial Sequence
  primer
tgcctctattcattcagaagcac

SEQ ID NO: 88864 - DNA, 40 bp, Artificial Sequence
  primer
gtaaaacgacggccagttttgagtacatcccaatttagcc

SEQ ID NO: 88865 - DNA, 38 bp, Artificial Sequence
  primer
gtaaaacgacggccagttttatttgcatcaccgtccac

SEQ ID NO: 88866 - DNA, 37 bp, Artificial Sequence
  primer
gtaaaacgacggccagtagctcctctgtgagtccagg

SEQ ID NO: 88867 - DNA, 38 bp, Artificial Sequence
  primer
gtaaaacgacggccagtaggccctacaagctacaccag

SEQ ID NO: 88868 - DNA, 44 bp, Artificial Sequence
  primer
gtaaaacgacggccagtaatagcaatatagtaagtggcagtgtg

SEQ ID NO: 88869 - DNA, 38 bp, Artificial Sequence; identical to SEQ ID NO: 88858
  primer

SEQ ID NO: 88870 - DNA, 25 bp, Artificial Sequence
  primer
caataacaacaaccagattgtcttc

SEQ ID NO: 88871 - DNA, 21 bp, Artificial Sequence
  primer
ctgtgtgtgagatccttgtgc

SEQ ID NO: 88872 - DNA, 21 bp, Artificial Sequence
  primer
aaagctgcatgagaaaggagg

SEQ ID NO: 88873 - DNA, 21 bp, Artificial Sequence
  primer
tgggtctggagaacagctagg

SEQ ID NO: 88874 - DNA, 37 bp, Artificial Sequence
  primer
gtaaaacgacggccagtctctgtgcagccatggaaag

SEQ ID NO: 88875 - DNA, 38 bp, Artificial Sequence
  primer
gtaaaacgacggccagtatggctcgataacaacccaac

SEQ ID NO: 88876 - DNA, 21 bp, Artificial Sequence
  primer
atccaccagtcaggttgttcc

SEQ ID NO: 88877 - DNA, 39 bp, Artificial Sequence
  primer
gtaaaacgacggccagtgattaccagaccctctgtcagg

SEQ ID NO: 88878 - DNA, 22 bp, Artificial Sequence
  primer
aaagtaccacatttgggaccag

SEQ ID NO: 88879 - DNA, 21 bp, Artificial Sequence
  primer
cacattgccagccctattagc

SEQ ID NO: 88880 - DNA, 19 bp, Artificial Sequence
  primer
cacacaaggcagcacgaag

SEQ ID NO: 88881 - DNA, 44 bp, Artificial Sequence
  primer
gtaaaacgacggccagtaattcagttcctaaagttatttctccc

SEQ ID NO: 88882 - DNA, 38 bp, Artificial Sequence
  primer
gtaaaacgacggccagtgccttacccgacatagactcc

SEQ ID NO: 88883 - DNA, 38 bp, Artificial Sequence
  primer
gtaaaacgacggccagtctacagcagacccacagttgc

SEQ ID NO: 88884 - DNA, 21 bp, Artificial Sequence
  primer
actctccacaggaattgcacc

SEQ ID NO: 88885 - DNA, 38 bp, Artificial Sequence
  primer
gtaaaacgacggccagtgggtagacggaaacctatccc

SEQ ID NO: 88886 - DNA, 21 bp, Artificial Sequence
  primer
ggtggcatgtctcacacactt

SEQ ID NO: 88887 - DNA, 38 bp, Artificial Sequence
  primer
gtaaaacgacggccagtcccaaggaaacatttaggctg

SEQ ID NO: 88888 - DNA, 21 bp, Artificial Sequence
  primer
tggcttcttctttaaccaggg

SEQ ID NO: 88889 - DNA, 38 bp, Artificial Sequence
  primer
gtaaaacgacggccagtagggcaggcttcctgtcttac

SEQ ID NO: 88890 - DNA, 21 bp, Artificial Sequence
  primer
ggccctgagatatgaaacagc

SEQ ID NO: 88891 - DNA, 21 bp, Artificial Sequence
  primer
ctgctatgcctacttccctgg

SEQ ID NO: 88892 - DNA, 20 bp, Artificial Sequence
  primer
tgggttcactatcctgtgcc

SEQ ID NO: 88893 - DNA, 18 bp, Artificial Sequence
  primer
gcaggtgctcagccagtc

SEQ ID NO: 88894 - DNA, 20 bp, Artificial Sequence
  primer
agtcttcctgctctctgggc

SEQ ID NO: 88895 - DNA, 38 bp, Artificial Sequence
  primer
gtaaaacgacggccagtacagcccaagtctcctttctg

SEQ ID NO: 88896 - DNA, 21 bp, Artificial Sequence
  primer
tcagactaatgggtctgggct

SEQ ID NO: 88897 - DNA, 38 bp, Artificial Sequence
  primer
gtaaaacgacggccagtatagaagcttggaggacaggg

SEQ ID NO: 88898 - DNA, 20 bp, Artificial Sequence
  primer
tgaacatcatcagcaggtgg

SEQ ID NO: 88899 - DNA, 38 bp, Artificial Sequence
  primer
gtaaaacgacggccagtagatcctacccgctagttccc

SEQ ID NO: 88900 - DNA, 38 bp, Artificial Sequence
  primer
gtaaaacgacggccagtagtgttggaaccagggaaatg

SEQ ID NO: 88901 - DNA, 21 bp, Artificial Sequence
  primer
acgccactaaatcccaatctg

SEQ ID NO: 88902 - DNA, 38 bp, Artificial Sequence
  primer
gtaaaacgacggccagttctctagcgggtcagacactg

SEQ ID NO: 88903 - DNA, 38 bp, Artificial Sequence
  primer
gtaaaacgacggccagtctggttcctccaactaggctc

SEQ ID NO: 88904 - DNA, 38 bp, Artificial Sequence
  primer
gtaaaacgacggccagttgtgtaagaccttggcctctg

SEQ ID NO: 88905 - DNA, 38 bp, Artificial Sequence
  primer
gtaaaacgacggccagtccctatccagcctaacccaag

SEQ ID NO: 88906 - DNA, 38 bp, Artificial Sequence
  primer
gtaaaacgacggccagtgctgacagtttgcactccttg

SEQ ID NO: 88907 - DNA, 37 bp, Artificial Sequence
  primer
gtaaaacgacggccagtagtttggaggagaggccaag

SEQ ID NO: 88908 - DNA, 21 bp, Artificial Sequence
  primer
ggtggttgtagaggcgaagac

SEQ ID NO: 88909 - DNA, 38 bp, Artificial Sequence
  primer
gtaaaacgacggccagtttacagtggcttgaatggctg

SEQ ID NO: 88910 - DNA, 37 bp, Artificial Sequence
  primer
gtaaaacgacggccagtccaggtactccagcctccag

SEQ ID NO: 88911 - DNA, 38 bp, Artificial Sequence
  primer
gtaaaacgacggccagtagagtcccagttgtctcaggc

SEQ ID NO: 88912 - DNA, 38 bp, Artificial Sequence
  primer
gtaaaacgacggccagtgacactcctcttgtgtctggg

SEQ ID NO: 88913 - DNA, 39 bp, Artificial Sequence
  primer
gtaaaacgacggccagtggtaggattctgaggaaccgag

SEQ ID NO: 88914 - DNA, 41 bp, Artificial Sequence
  primer
gtaaaacgacggccagtcatgggagggtatgatataggaac

SEQ ID NO: 88915 - DNA, 21 bp, Artificial Sequence
  primer
agttggaactcagaggcattg

SEQ ID NO: 88916 - DNA, 38 bp, Artificial Sequence
  primer
gtaaaacgacggccagtacaagggtcaatccctgattt

SEQ ID NO: 88917 - DNA, 21 bp, Artificial Sequence
  primer
acggaaatggtacaggtttgg

SEQ ID NO: 88918 - DNA, 21 bp, Artificial Sequence
  primer
tttctctggactgcttcccac

SEQ ID NO: 88919 - DNA, 35 bp, Artificial Sequence; identical to SEQ ID NO: 5167
  primer

SEQ ID NO: 88920 - DNA, 38 bp, Artificial Sequence
  primer
gtaaaacgacggccagtgaagaagccaatccactcacc

SEQ ID NO: 88921 - DNA, 21 bp, Artificial Sequence
  primer
gctacatactaacgccagccc

SEQ ID NO: 88922 - DNA, 38 bp, Artificial Sequence
  primer
gtaaaacgacggccagtcagggcgccagtgtaactaag

SEQ ID NO: 88923 - DNA, 21 bp, Artificial Sequence
  primer
aaacaatcagggaggaaaggg

SEQ ID NO: 88924 - DNA, 21 bp, Artificial Sequence
  primer
ctttctgagaggacagagggc

SEQ ID NO: 88925 - DNA, 37 bp, Artificial Sequence
  primer
gtaaaacgacggccagtccagcctctgggattctagg

SEQ ID NO: 88926 - DNA, 21 bp, Artificial Sequence
  primer
taaccagacccagtgacaacg

SEQ ID NO: 88927 - DNA, 21 bp, Artificial Sequence
  primer
acagggtcaccagacacagac

SEQ ID NO: 88928 - DNA, 38 bp, Artificial Sequence
  primer
gtaaaacgacggccagtgggcttgtatcctctccacag

SEQ ID NO: 88929 - DNA, 36 bp, Artificial Sequence
  primer
gtaaaacgacggccagtgtggtcagcctcttgcctc

SEQ ID NO: 88930 - DNA, 21 bp, Artificial Sequence
  primer
gtcagcgtgttaccttctccc

SEQ ID NO: 88931 - DNA, 37 bp, Artificial Sequence
  primer
gtaaaacgacggccagtaggagcacggagctatcctc

SEQ ID NO: 88932 - DNA, 20 bp, Artificial Sequence
  primer
caggcatggctttgattctc

SEQ ID NO: 88933 - DNA, 38 bp, Artificial Sequence
  primer
gtaaaacgacggccagtactttctggctttgctggttg

SEQ ID NO: 88934 - DNA, 21 bp, Artificial Sequence
  primer
tgtcccaggaggatacaggag

SEQ ID NO: 88935 - DNA, 21 bp, Artificial Sequence
  primer
agggagaaggcttcagtttcg

SEQ ID NO: 88936 - DNA, 21 bp, Artificial Sequence
  primer
ggcttgaagacaggtggaaag

SEQ ID NO: 88937 - DNA, 19 bp, Artificial Sequence
  primer
aatcatgcctgaggatggg

SEQ ID NO: 88938 - DNA, 38 bp, Artificial Sequence
  primer
gtaaaacgacggccagtatgaagctaatgccaagaccc

SEQ ID NO: 88939 - DNA, 38 bp, Artificial Sequence
  primer
gtaaaacgacggccagtcacggtcaaagtgcctgtaag

SEQ ID NO: 88940 - DNA, 21 bp, Artificial Sequence
  primer
cctctgccaatacctcctcac

SEQ ID NO: 88941 - DNA, 21 bp, Artificial Sequence
  primer
caactccagaaagcagcagtg

SEQ ID NO: 88942 - DNA, 21 bp, Artificial Sequence
  primer
ggtgacaaacaggatggacag

SEQ ID NO: 88943 - DNA, 38 bp, Artificial Sequence
  primer
gtaaaacgacggccagtgactgtgggaagaagggtcag

SEQ ID NO: 88944 - DNA, 41 bp, Artificial Sequence
  primer
gtaaaacgacggccagttgattatggaaatataaaccacgc

SEQ ID NO: 88945 - DNA, 23 bp, Artificial Sequence
  primer
tttctcatggacaatggagagtt

SEQ ID NO: 88946 - DNA, 27 bp, Artificial Sequence
  primer
acaagacacctatgcataatcactatc

SEQ ID NO: 88947 - DNA, 23 bp, Artificial Sequence
  primer
caagctgaaatctgatcctgttg

SEQ ID NO: 88948 - DNA, 43 bp, Artificial Sequence
  primer
gtaaaacgacggccagtcattggactaacactttgatcatttg

SEQ ID NO: 88949 - DNA, 38 bp, Artificial Sequence
  primer
gtaaaacgacggccagtcagtgtcacacatccagtccc

SEQ ID NO: 88950 - DNA, 38 bp, Artificial Sequence
  primer
gtaaaacgacggccagtcagcttcttccagaaccagtc

SEQ ID NO: 88951 - DNA, 23 bp, Artificial Sequence
  primer
aaactttagaccaccaatcaccc

SEQ ID NO: 88952 - DNA, 38 bp, Artificial Sequence
  primer
gtaaaacgacggccagtgctgggtcatacaggccatag

SEQ ID NO: 88953 - DNA, 39 bp, Artificial Sequence
  primer
gtaaaacgacggccagtagcgatttacactttcagagcc

SEQ ID NO: 88954 - DNA, 38 bp, Artificial Sequence
  primer
gtaaaacgacggccagtgcacacaccaaaccaaatagg

SEQ ID NO: 88955 - DNA, 38 bp, Artificial Sequence
  primer
gtaaaacgacggccagttaggctaggatggaaacaccc

SEQ ID NO: 88956 - DNA, 20 bp, Artificial Sequence
  primer
caagcaatcttcccgtcttg

SEQ ID NO: 88957 - DNA, 43 bp, Artificial Sequence
  primer
gtaaaacgacggccagttgacttggtttcctactctctaaagc

SEQ ID NO: 88958 - DNA, 38 bp, Artificial Sequence
  primer
gtaaaacgacggccagtaggccacatcctgaaagaaag

SEQ ID NO: 88959 - DNA, 21 bp, Artificial Sequence
  primer
acctcctcccaaagcaaacac

SEQ ID NO: 88960 - DNA, 35 bp, Artificial Sequence
  primer
gtaaaacgacggccagttgggcaatcattacgtcg

SEQ ID NO: 88961 - DNA, 38 bp, Artificial Sequence
  primer
gtaaaacgacggccagttggccctgtcaacttcaaatc

SEQ ID NO: 88962 - DNA, 38 bp, Artificial Sequence
  primer
gtaaaacgacggccagtgcccagtgtacacagaccttg

SEQ ID NO: 88963 - DNA, 22 bp, Artificial Sequence
  primer
ggcatcgcttaaagtaaaccac

SEQ ID NO: 88964 - DNA, 21 bp, Artificial Sequence
  primer
tgagtgcaaggctgcattaac

SEQ ID NO: 88965 - DNA, 20 bp, Artificial Sequence
  primer
accaagagagggagtcaggg

SEQ ID NO: 88966 - DNA, 36 bp, Artificial Sequence
  primer
gtaaaacgacggccagtaagacccaagctcaagccc

SEQ ID NO: 88967 - DNA, 19 bp, Artificial Sequence
  primer
caccgacagtgactcctgc

SEQ ID NO: 88968 - DNA, 21 bp, Artificial Sequence
  primer
aggaagccaaggtttcatctg

SEQ ID NO: 88969 - DNA, 38 bp, Artificial Sequence
  primer
gtaaaacgacggccagtgtcttcacaaatgcccactcc

SEQ ID NO: 88970 - DNA, 39 bp, Artificial Sequence
  primer
gtaaaacgacggccagtttgctcatcagttgtcatttgg

SEQ ID NO: 88971 - DNA, 38 bp, Artificial Sequence
  primer
gtaaaacgacggccagtacaagtaactgcagagcagcc

SEQ ID NO: 88972 - DNA, 42 bp, Artificial Sequence
  primer
gtaaaacgacggccagtattcaatgtacataccagtgtttgc

SEQ ID NO: 88973 - DNA, 37 bp, Artificial Sequence
  primer
gtaaaacgacggccagtaaattgtggaagcatgaggg

SEQ ID NO: 88974 - DNA, 21 bp, Artificial Sequence
  primer
gaatcaggcatatctcccacc

SEQ ID NO: 88975 - DNA, 21 bp, Artificial Sequence
  primer
tctgttcctctcttcgtgtcc

SEQ ID NO: 88976 - DNA, 38 bp, Artificial Sequence
  primer
gtaaaacgacggccagtacaggttcccttcatgctctg

SEQ ID NO: 88977 - DNA, 37 bp, Artificial Sequence
  primer
gtaaaacgacggccagtgaaccaagccaatttgaccc

SEQ ID NO: 88978 - DNA, 21 bp, Artificial Sequence
  primer
gccagactgtagaatcgggag

SEQ ID NO: 88979 - DNA, 21 bp, Artificial Sequence
  primer
caatacagccacactgaaggc

SEQ ID NO: 88980 - DNA, 21 bp, Artificial Sequence
  primer
cagctgagaatcttcaatggg

SEQ ID NO: 88981 - DNA, 38 bp, Artificial Sequence
  primer
gtaaaacgacggccagttatcagggttgaagggcaaac

SEQ ID NO: 88982 - DNA, 21 bp, Artificial Sequence
  primer
ttgctgagatccacagaatcg

SEQ ID NO: 88983 - DNA, 21 bp, Artificial Sequence
  primer
acgaacaagccaccaggtaag

SEQ ID NO: 88984 - DNA, 38 bp, Artificial Sequence
  primer
gtaaaacgacggccagtgggcagcagagatgtaaacag

SEQ ID NO: 88985 - DNA, 37 bp, Artificial Sequence
  primer
gtaaaacgacggccagtctctgcctcccttgcttagg

SEQ ID NO: 88986 - DNA, 37 bp, Artificial Sequence
  primer
gtaaaacgacggccagtcaaggctgtgtcgtagggtc

SEQ ID NO: 88987 - DNA, 21 bp, Artificial Sequence
  primer
cacggctccacctctatcttg

SEQ ID NO: 88988 - DNA, 38 bp, Artificial Sequence
  primer
gtaaaacgacggccagtcaggttaaggaaacgctttgg

SEQ ID NO: 88989 - DNA, 38 bp, Artificial Sequence
  primer
gtaaaacgacggccagtgaaatttccaggtggagaagc

SEQ ID NO: 88990 - DNA, 21 bp, Artificial Sequence
  primer
gtgggaacaggaagtgatgag

SEQ ID NO: 88991 - DNA, 21 bp, Artificial Sequence
  primer
ttggtcagtgtcagggcatag

SEQ ID NO: 88992 - DNA, 21 bp, Artificial Sequence
  primer
tcagagctccaggtcacacag

SEQ ID NO: 88993 - DNA, 22 bp, Artificial Sequence
  primer
aacaacaggtacccagagatgg

SEQ ID NO: 88994 - DNA, 38 bp, Artificial Sequence
  primer
gtaaaacgacggccagtaatgagcttgcctttgagatg

SEQ ID NO: 88995 - DNA, 19 bp, Artificial Sequence
  primer
gtcacgcagccaggaagtc

SEQ ID NO: 88996 - DNA, 20 bp, Artificial Sequence
  primer
aaccctgaggtgtctgcctc

SEQ ID NO: 88997 - DNA, 22 bp, Artificial Sequence
  primer
tgggtctctgctagaagctcag

SEQ ID NO: 88998 - DNA, 24 bp, Artificial Sequence
  primer
aattgacaaactgtcttcttggtg

SEQ ID NO: 88999 - DNA, 21 bp, Artificial Sequence
  primer
gggaaggaatgtggtgtatgg

SEQ ID NO: 89000 - DNA, 21 bp, Artificial Sequence
  primer
cctgtaaagatgcacagggac

SEQ ID NO: 89001 - DNA, 23 bp, Artificial Sequence
  primer
aaatgattgcatcagagcgatag

SEQ ID NO: 89002 - DNA, 25 bp, Artificial Sequence
  primer
tgcatgcaagtatacccgtattaac

SEQ ID NO: 89003 - DNA, 23 bp, Artificial Sequence
  primer
cccttctggcactaacagtttac

SEQ ID NO: 89004 - DNA, 21 bp, Artificial Sequence
  primer
gaaagttggacccattccaag

SEQ ID NO: 89005 - DNA, 38 bp, Artificial Sequence
  primer
gtaaaacgacggccagttgcctctgacagggaagaaac

SEQ ID NO: 89006 - DNA, 23 bp, Artificial Sequence
  primer
tcagatttcaccattgttgagtg

SEQ ID NO: 89007 - DNA, 22 bp, Artificial Sequence
  primer
tgagccacacagaggatgatta

SEQ ID NO: 89008 - DNA, 39 bp, Artificial Sequence
  primer
gtaaaacgacggccagtcagagcattaggccaatttgag

SEQ ID NO: 89009 - DNA, 38 bp, Artificial Sequence
  primer
gtaaaacgacggccagtttccaagagaagctcctccac

SEQ ID NO: 89010 - DNA, 21 bp, Artificial Sequence
  primer
tccacttgtttcatggctgtc

SEQ ID NO: 89011 - DNA, 38 bp, Artificial Sequence
  primer
gtaaaacgacggccagtgatgaccaggtggacacagac

SEQ ID NO: 89012 - DNA, 21 bp, Artificial Sequence
  primer
tgagtcccttctacagccagg

SEQ ID NO: 89013 - DNA, 39 bp, Artificial Sequence
  primer
gtaaaacgacggccagttgaaaccaatttcagaaccaag

SEQ ID NO: 89014 - DNA, 23 bp, Artificial Sequence
  primer
cacacagagtatccttctgcacc

SEQ ID NO: 89015 - DNA, 22 bp, Artificial Sequence
  primer
ccaacatttactttgaggagcc

SEQ ID NO: 89016 - DNA, 37 bp, Artificial Sequence
  primer
gtaaaacgacggccagtctctgtcgctcctcctcctc

SEQ ID NO: 89017 - DNA, 21 bp, Artificial Sequence
  primer
caccagctccaggtactgctc

SEQ ID NO: 89018 - DNA, 36 bp, Artificial Sequence
  primer
gtaaaacgacggccagtcacagtcctcccacagtcg

SEQ ID NO: 89019 - DNA, 21 bp, Artificial Sequence
  primer
aactcttccactccatagccg

SEQ ID NO: 89020 - DNA, 37 bp, Artificial Sequence
  primer
gtaaaacgacggccagtagggaggatgtactcggtgc

SEQ ID NO: 89021 - DNA, 21 bp, Artificial Sequence
  primer
agcctcggacagctgtatttc

SEQ ID NO: 89022 - DNA, 38 bp, Artificial Sequence
  primer
gtaaaacgacggccagttgggcagcaggcaatataaac

SEQ ID NO: 89023 - DNA, 22 bp, Artificial Sequence
  primer
tcgtgttcatacatctgcttcc

SEQ ID NO: 89024 - DNA, 40 bp, Artificial Sequence
  primer
gtaaaacgacggccagtggctttcttaacagagctatggg

SEQ ID NO: 89025 - DNA, 18 bp, Artificial Sequence
  primer
gaattacaggcatgcgcc

SEQ ID NO: 89026 - DNA, 21 bp, Artificial Sequence
  primer
agcagggctcagtctcagaaa

SEQ ID NO: 89027 - DNA, 22 bp, Artificial Sequence
  primer
tttaagagcttcatccaatgcc

SEQ ID NO: 89028 - DNA, 41 bp, Artificial Sequence
  primer
gtaaaacgacggccagtcaattgacatttattacgtcgctg

SEQ ID NO: 89029 - DNA, 21 bp, Artificial Sequence
  primer
gttaatgctgctgtgctttgc

SEQ ID NO: 89030 - DNA, 21 bp, Artificial Sequence
  primer
agcacaaatgtatgcgagctg

SEQ ID NO: 89031 - DNA, 39 bp, Artificial Sequence
  primer
gtaaaacgacggccagtgccctccattaacgtatggaac

SEQ ID NO: 89032 - DNA, 25 bp, Artificial Sequence
  primer
tggtattccttggatttatctgttg

SEQ ID NO: 89033 - DNA, 25 bp, Artificial Sequence
  primer
gctcaaactctctctagtatttcgc

SEQ ID NO: 89034 - DNA, 23 bp, Artificial Sequence
  primer
aatttctgtgcacactcatcaaa

SEQ ID NO: 89035 - DNA, 41 bp, Artificial Sequence
  primer
gtaaaacgacggccagtcaaattaaatgttccattgacctc

SEQ ID NO: 89036 - DNA, 21 bp, Artificial Sequence
  primer
gtgagtgtagcagggctctcg

SEQ ID NO: 89037 - DNA, 40 bp, Artificial Sequence
  primer
gtaaaacgacggccagtggtccagatctttccctctttac

SEQ ID NO: 89038 - DNA, 18 bp, Artificial Sequence
  primer
aggagaatggcgtgaccc

SEQ ID NO: 89039 - DNA, 21 bp, Artificial Sequence
  primer
gcaagcaaatgataaagcctg

SEQ ID NO: 89040 - DNA, 22 bp, Artificial Sequence
  primer
tttggcagcatatgatttctga

SEQ ID NO: 89041 - DNA, 42 bp, Artificial Sequence
  primer
gtaaaacgacggccagtgagtcccaactaagatttgtcagag

SEQ ID NO: 89042 - DNA, 38 bp, Artificial Sequence
  primer
gtaaaacgacggccagtggtgaatgatgctctacaccg

SEQ ID NO: 89043 - DNA, 40 bp, Artificial Sequence
  primer
gtaaaacgacggccagtcctaggaaattgacctatctggg

SEQ ID NO: 89044 - DNA, 44 bp, Artificial Sequence
  primer
gtaaaacgacggccagttttccatttaaataaagaccaaggtag

SEQ ID NO: 89045 - DNA, 27 bp, Artificial Sequence
  primer
aggctaagcacaatcacttatacattc

SEQ ID NO: 89046 - DNA, 39 bp, Artificial Sequence
  primer
gtaaaacgacggccagtcaattcccatacctctccagtg

SEQ ID NO: 89047 - DNA, 42 bp, Artificial Sequence
  primer
gtaaaacgacggccagttcacagtgaggaaacttgatgtaaa

SEQ ID NO: 89048 - DNA, 39 bp, Artificial Sequence
  primer
gtaaaacgacggccagtccaggtgtgtatttgtcaaagc

SEQ ID NO: 89049 - DNA, 21 bp, Artificial Sequence
  primer
atgccttggatttcaggctaa

SEQ ID NO: 89050 - DNA, 21 bp, Artificial Sequence
  primer
ccctgatactgaaacattgcg

SEQ ID NO: 89051 - DNA, 27 bp, Artificial Sequence
  primer
accagataagaaagacatagtttctgc

SEQ ID NO: 89052 - DNA, 21 bp, Artificial Sequence
  primer
atgatcaggcactttgccttt

SEQ ID NO: 89053 - DNA, 40 bp, Artificial Sequence
  primer
gtaaaacgacggccagtggaccacttgattcctcaatacc

SEQ ID NO: 89054 - DNA, 37 bp, Artificial Sequence
  primer
gtaaaacgacggccagtctgagcaccttccgactcac

SEQ ID NO: 89055 - DNA, 27 bp, Artificial Sequence
  primer
ttctttaatccaagaattgagagagag

SEQ ID NO: 89056 - DNA, 38 bp, Artificial Sequence
  primer
gtaaaacgacggccagtcccttgtgtatgtggttcctg

SEQ ID NO: 89057 - DNA, 38 bp, Artificial Sequence
  primer
gtaaaacgacggccagttgaatctctccacagtttggg

SEQ ID NO: 89058 - DNA, 40 bp, Artificial Sequence
  primer
gtaaaacgacggccagttgaaattatggattccaatctgc

SEQ ID NO: 89059 - DNA, 38 bp, Artificial Sequence
  primer
gtaaaacgacggccagtttgcagctcaggacaaagcta

SEQ ID NO: 89060 - DNA, 38 bp, Artificial Sequence
  primer
gtaaaacgacggccagtgatggagtaggatgacagccc

SEQ ID NO: 89061 - DNA, 27 bp, Artificial Sequence
  primer
aggcagttacaaagatgagttacaaag

SEQ ID NO: 89062 - DNA, 35 bp, Artificial Sequence
  primer
gtaaaacgacggccagttttccactgcatggtccc

SEQ ID NO: 89063 - DNA, 25 bp, Artificial Sequence
  primer
aaatcattatggctaaatctttggg

SEQ ID NO: 89064 - DNA, 21 bp, Artificial Sequence
  primer
ctcagaacaaagttgtgggca

SEQ ID NO: 89065 - DNA, 38 bp, Artificial Sequence
  primer
gtaaaacgacggccagttgctctagtgagccattgtgg

SEQ ID NO: 89066 - DNA, 38 bp, Artificial Sequence
  primer
gtaaaacgacggccagttcgaccaccttagcctttgac

SEQ ID NO: 89067 - DNA, 38 bp, Artificial Sequence
  primer
gtaaaacgacggccagtccaggcatcgctcagaaatac

SEQ ID NO: 89068 - DNA, 35 bp, Artificial Sequence; identical to SEQ ID NO: 65766
  primer

SEQ ID NO: 89069 - DNA, 21 bp, Artificial Sequence
  primer
agaagtgccatggaaagacag

SEQ ID NO: 89070 - DNA, 21 bp, Artificial Sequence
  primer
aatcgaaggagtctcacgcac

SEQ ID NO: 89071 - DNA, 36 bp, Artificial Sequence
  primer
gtaaaacgacggccagtgctcaacgaggaaaccgac

SEQ ID NO: 89072 - DNA, 38 bp, Artificial Sequence
  primer
gtaaaacgacggccagtgccagataaggcacaggattc

SEQ ID NO: 89073 - DNA, 42 bp, Artificial Sequence
  primer
gtaaaacgacggccagtgagcagaaggtctaacaatgaacag

SEQ ID NO: 89074 - DNA, 21 bp, Artificial Sequence
  primer
agcccgggaaacagagactac

SEQ ID NO: 89075 - DNA, 38 bp, Artificial Sequence
  primer
gtaaaacgacggccagtacaggtagaagagccgtccag

SEQ ID NO: 89076 - DNA, 35 bp, Artificial Sequence
  primer
gtaaaacgacggccagtctcttcagcccatcctgc

SEQ ID NO: 89077 - DNA, 27 bp, Artificial Sequence
  primer
cccagataaagaactttagagaaactg

SEQ ID NO: 89078 - DNA, 19 bp, Artificial Sequence
  primer
ctgggagggagacgaacac

SEQ ID NO: 89079 - DNA, 22 bp, Artificial Sequence
  primer
cacaacttcacacaattctggc

SEQ ID NO: 89080 - DNA, 21 bp, Artificial Sequence
  primer
atgctgacaccatcattccac

SEQ ID NO: 89081 - DNA, 38 bp, Artificial Sequence
  primer
gtaaaacgacggccagtgaagcacagggtacagccaag

SEQ ID NO: 89082 - DNA, 21 bp, Artificial Sequence
  primer
acagccacactcatgttccac

SEQ ID NO: 89083 - DNA, 20 bp, Artificial Sequence
  primer
ggtggcaggttgtgtgtttc

SEQ ID NO: 89084 - DNA, 38 bp, Artificial Sequence
  primer
gtaaaacgacggccagtcacatcagaaagcacgagtgg

SEQ ID NO: 89085 - DNA, 21 bp, Artificial Sequence
  primer
agcatcaaatgactgactgcc

SEQ ID NO: 89086 - DNA, 21 bp, Artificial Sequence
  primer
tccaaactcgaggctacaacc

SEQ ID NO: 89087 - DNA, 21 bp, Artificial Sequence
  primer
ccacgttcagttcaaacaggg

SEQ ID NO: 89088 - DNA, 20 bp, Artificial Sequence
  primer
gttgggactacaggtgcgtg

SEQ ID NO: 89089 - DNA, 41 bp, Artificial Sequence
  primer
gtaaaacgacggccagtaatgcttccatgactttctcattc

SEQ ID NO: 89090 - DNA, 25 bp, Artificial Sequence
  primer
cccacagtggatgtaaatgattaaa

SEQ ID NO: 89091 - DNA, 21 bp, Artificial Sequence
  primer
cgatctccactcaatttcagg

SEQ ID NO: 89092 - DNA, 40 bp, Artificial Sequence
  primer
gtaaaacgacggccagttgtgaggacagggttatgaaatg

SEQ ID NO: 89093 - DNA, 39 bp, Artificial Sequence
  primer
gtaaaacgacggccagtctttgttaacattaggtggccc

SEQ ID NO: 89094 - DNA, 19 bp, Artificial Sequence
  primer
agtgagctgagatcgtgcc

SEQ ID NO: 89095 - DNA, 22 bp, Artificial Sequence
  primer
aatcacagatctcactttgggc

SEQ ID NO: 89096 - DNA, 35 bp, Artificial Sequence
  primer
gtaaaacgacggccagtaagggaagccaatggagg

SEQ ID NO: 89097 - DNA, 20 bp, Artificial Sequence
  primer
aatagggacccaatggcttg

SEQ ID NO: 89098 - DNA, 38 bp, Artificial Sequence
  primer
gtaaaacgacggccagtattcttaccctgtttgccacc

SEQ ID NO: 89099 - DNA, 37 bp, Artificial Sequence
  primer
gtaaaacgacggccagtaatctgccgcatctgttctg

SEQ ID NO: 89100 - DNA, 27 bp, Artificial Sequence
  primer
agaaactgatgttcaagttagatgatg

SEQ ID NO: 89101 - DNA, 38 bp, Artificial Sequence
  primer
gtaaaacgacggccagtaagagacacagtttggcctgg

SEQ ID NO: 89102 - DNA, 21 bp, Artificial Sequence
  primer
gcaggcctagtcttcccttag

SEQ ID NO: 89103 - DNA, 21 bp, Artificial Sequence
  primer
agctagttggagagagccagg

SEQ ID NO: 89104 - DNA, 40 bp, Artificial Sequence
  primer
gtaaaacgacggccagtgattaaggctatggcaaatgaac

SEQ ID NO: 89105 - DNA, 20 bp, Artificial Sequence
  primer
ctgtacctcttcggatgccc

SEQ ID NO: 89106 - DNA, 38 bp, Artificial Sequence
  primer
gtaaaacgacggccagtatgcaagctattgggaaatgg

SEQ ID NO: 89107 - DNA, 39 bp, Artificial Sequence
  primer
gtaaaacgacggccagtttgctaccatttaagtcctggg

SEQ ID NO: 89108 - DNA, 27 bp, Artificial Sequence
  primer
catccctacacatatagtacaatgctc

SEQ ID NO: 89109 - DNA, 38 bp, Artificial Sequence
  primer
gtaaaacgacggccagttccatccagtttccttaatgc

SEQ ID NO: 89110 - DNA, 24 bp, Artificial Sequence
  primer
tggccagaagtggatactactgat

SEQ ID NO: 89111 - DNA, 21 bp, Artificial Sequence
  primer
tgtgtgtgctactgaacacgg

SEQ ID NO: 89112 - DNA, 20 bp, Artificial Sequence
  primer
tgcctctcattcaggcattt

SEQ ID NO: 89113 - DNA, 21 bp, Artificial Sequence
  primer
gaggagtgaaggatgacgagg

SEQ ID NO: 89114 - DNA, 23 bp, Artificial Sequence
  primer
cttcatcctcccataatcagatg

SEQ ID NO: 89115 - DNA, 25 bp, Artificial Sequence
  primer
ttgttctgaaatctttcaattctgg

SEQ ID NO: 89116 - DNA, 21 bp, Artificial Sequence
  primer
acccacttcccagactagcag

SEQ ID NO: 89117 - DNA, 21 bp, Artificial Sequence
  primer
atgctcatttggtggacaaag

SEQ ID NO: 89118 - DNA, 21 bp, Artificial Sequence
  primer
tcagtgcccaggatatagcag

SEQ ID NO: 89119 - DNA, 38 bp, Artificial Sequence
  primer
gtaaaacgacggccagtggttacccaagcccagatttc

SEQ ID NO: 89120 - DNA, 23 bp, Artificial Sequence
  primer
acttggatgtcaacctgctaaag

SEQ ID NO: 89121 - DNA, 26 bp, Artificial Sequence
  primer
cacatttctatccctctgaaagagaa

SEQ ID NO: 89122 - DNA, 21 bp, Artificial Sequence
  primer
aagactgcatcacactccagc

SEQ ID NO: 89123 - DNA, 38 bp, Artificial Sequence
  primer
gtaaaacgacggccagtacaaaggaaatcactggaggg

SEQ ID NO: 89124 - DNA, 39 bp, Artificial Sequence
  primer
gtaaaacgacggccagttggtccctaagagaggcaatac

SEQ ID NO: 89125 - DNA, 21 bp, Artificial Sequence
  primer
caaccctctcgatggtgtttc

SEQ ID NO: 89126 - DNA, 21 bp, Artificial Sequence
  primer
attgtgggaaagtatcctggc

SEQ ID NO: 89127 - DNA, 24 bp, Artificial Sequence
  primer
ggcaagagctctgtcttatttgag

SEQ ID NO: 89128 - DNA, 39 bp, Artificial Sequence
  primer
gtaaaacgacggccagtcagggccataagaaacacgtag

SEQ ID NO: 89129 - DNA, 21 bp, Artificial Sequence
  primer
cctccaaggccatgttatttc

SEQ ID NO: 89130 - DNA, 21 bp, Artificial Sequence
  primer
tgttgctcccacaatcttgac

SEQ ID NO: 89131 - DNA, 21 bp, Artificial Sequence
  primer
tttaaacaccagcagaaagcg

SEQ ID NO: 89132 - DNA, 21 bp, Artificial Sequence
  primer
taaagaaactggccaccactg

SEQ ID NO: 89133 - DNA, 38 bp, Artificial Sequence
  primer
gtaaaacgacggccagtggtcttctgggccatagtgtc

SEQ ID NO: 89134 - DNA, 38 bp, Artificial Sequence
  primer
gtaaaacgacggccagtaagacaggcaacatggaggag

SEQ ID NO: 89135 - DNA, 38 bp, Artificial Sequence
  primer
gtaaaacgacggccagtagaacaatgaagggttgaggc

SEQ ID NO: 89136 - DNA, 23 bp, Artificial Sequence
  primer
agcagcctataatgggtattcaa

SEQ ID NO: 89137 - DNA, 38 bp, Artificial Sequence
  primer
gtaaaacgacggccagttaaagcaaggctcagagtccc

SEQ ID NO: 89138 - DNA, 20 bp, Artificial Sequence
  primer
cactgtccctcctggctacc

SEQ ID NO: 89139 - DNA, 37 bp, Artificial Sequence
  primer
gtaaaacgacggccagtgtcagggaagtgtgctccag

SEQ ID NO: 89140 - DNA, 39 bp, Artificial Sequence
  primer
gtaaaacgacggccagtcagccattaaatgctatctcgc

SEQ ID NO: 89141 - DNA, 22 bp, Artificial Sequence
  primer
cactattcactcttgccttgcc

SEQ ID NO: 89142 - DNA, 42 bp, Artificial Sequence
  primer
gtaaaacgacggccagttcaaagtcagtcttgaatccttcac

SEQ ID NO: 89143 - DNA, 39 bp, Artificial Sequence
  primer
gtaaaacgacggccagttttcaagtcaacacgtcactgg

SEQ ID NO: 89144 - DNA, 21 bp, Artificial Sequence
  primer
ccttcagacaccataccctcc

SEQ ID NO: 89145 - DNA, 21 bp, Artificial Sequence
  primer
ggtgtcatcagactcgtcgtc

SEQ ID NO: 89146 - DNA, 38 bp, Artificial Sequence
  primer
gtaaaacgacggccagtttggttgacagagtgaaaccc

SEQ ID NO: 89147 - DNA, 38 bp, Artificial Sequence
  primer
gtaaaacgacggccagttaatttccaaagcaccaaggc

SEQ ID NO: 89148 - DNA, 38 bp, Artificial Sequence
  primer
gtaaaacgacggccagttgcatcactaggcttcctgag

SEQ ID NO: 89149 - DNA, 21 bp, Artificial Sequence
  primer
ctgcactgtcccttctccttc

SEQ ID NO: 89150 - DNA, 38 bp, Artificial Sequence
  primer
gtaaaacgacggccagtgagaggattgtgctggaggag

SEQ ID NO: 89151 - DNA, 20 bp, Artificial Sequence
  primer
cccagtccaggaggaaagag

SEQ ID NO: 89152 - DNA, 21 bp, Artificial Sequence
  primer
ctgtccctgagtcctccattc

SEQ ID NO: 89153 - DNA, 38 bp, Artificial Sequence
  primer
gtaaaacgacggccagtgggtcaacaatgagagaccag

SEQ ID NO: 89154 - DNA, 38 bp, Artificial Sequence
  primer
gtaaaacgacggccagttgttgcttcctgttcaagctg

SEQ ID NO: 89155 - DNA, 21 bp, Artificial Sequence
  primer
cctgaatatgctgcttgtccc

SEQ ID NO: 89156 - DNA, 21 bp, Artificial Sequence
  primer
tatgtccaacctcatccctcc

SEQ ID NO: 89157 - DNA, 41 bp, Artificial Sequence
  primer
gtaaaacgacggccagttgcacaacattcaagcatttattc

SEQ ID NO: 89158 - DNA, 21 bp, Artificial Sequence
  primer
aggaagcctgttatttgagcc

SEQ ID NO: 89159 - DNA, 21 bp, Artificial Sequence
  primer
gacactgcccactgcattaag

SEQ ID NO: 89160 - DNA, 20 bp, Artificial Sequence
  primer
aagcttcggagaagtccacc

SEQ ID NO: 89161 - DNA, 38 bp, Artificial Sequence
  primer
gtaaaacgacggccagtctgtaataggacccagtgccc

SEQ ID NO: 89162 - DNA, 38 bp, Artificial Sequence
  primer
gtaaaacgacggccagtgaaattgtcaggaatgggagg

SEQ ID NO: 89163 - DNA, 37 bp, Artificial Sequence
  primer
gtaaaacgacggccagtagggagggccagtctgtatg

SEQ ID NO: 89164 - DNA, 21 bp, Artificial Sequence
  primer
agtacagggtggatgcaaagg

SEQ ID NO: 89165 - DNA, 38 bp, Artificial Sequence
  primer
gtaaaacgacggccagttagactcagggcagggtcatc

SEQ ID NO: 89166 - DNA, 21 bp, Artificial Sequence
  primer
agtggctgtggaaagaaggag

SEQ ID NO: 89167 - DNA, 38 bp, Artificial Sequence
  primer
gtaaaacgacggccagtggcctgagacacctaggctac

SEQ ID NO: 89168 - DNA, 41 bp, Artificial Sequence
  primer
gtaaaacgacggccagtttggtatttatgccaaatttcttt

SEQ ID NO: 89169 - DNA, 27 bp, Artificial Sequence
  primer
aattataaagcctttgagtaaacatgg

SEQ ID NO: 89170 - DNA, 38 bp, Artificial Sequence
  primer
gtaaaacgacggccagtcgatgccctgagtatcagatg

SEQ ID NO: 89171 - DNA, 21 bp, Artificial Sequence
  primer
agtccacatggctgttcaaag

SEQ ID NO: 89172 - DNA, 21 bp, Artificial Sequence
  primer
agtagagctctcacccatccc

SEQ ID NO: 89173 - DNA, 21 bp, Artificial Sequence
  primer
tatttcgaaggcatctcaagc

SEQ ID NO: 89174 - DNA, 21 bp, Artificial Sequence
  primer
caatgcctagtcaggtgcaag

SEQ ID NO: 89175 - DNA, 38 bp, Artificial Sequence
  primer
gtaaaacgacggccagtaggcaagtagatgcagaaccc

SEQ ID NO: 89176 - DNA, 22 bp, Artificial Sequence
  primer
caaggttgaaattacggacagc

SEQ ID NO: 89177 - DNA, 21 bp, Artificial Sequence
  primer
aatatgtggatgggtgtgacg

SEQ ID NO: 89178 - DNA, 37 bp, Artificial Sequence
  primer
gtaaaacgacggccagttgtggagtgaaagggaatgg

SEQ ID NO: 89179 - DNA, 38 bp, Artificial Sequence
  primer
gtaaaacgacggccagtccagtaccctgcagcttcaac

SEQ ID NO: 89180 - DNA, 38 bp, Artificial Sequence
  primer
gtaaaacgacggccagtcatttctgcaggagtagccag

SEQ ID NO: 89181 - DNA, 21 bp, Artificial Sequence
  primer
cgaaggaggcaaattgttagg

SEQ ID NO: 89182 - DNA, 21 bp, Artificial Sequence
  primer
gccacaaaggagttatctggg

SEQ ID NO: 89183 - DNA, 38 bp, Artificial Sequence
  primer
gtaaaacgacggccagtattaccatgtgtcagccaccc

SEQ ID NO: 89184 - DNA, 21 bp, Artificial Sequence
  primer
gactagtgggtggacagctcc

SEQ ID NO: 89185 - DNA, 37 bp, Artificial Sequence
  primer
gtaaaacgacggccagtttcaagtcctcatcccttgg

SEQ ID NO: 89186 - DNA, 21 bp, Artificial Sequence
  primer
tggtcttgactggccactagc

SEQ ID NO: 89187 - DNA, 20 bp, Artificial Sequence
  primer
tggcctcagtttccttgttg

SEQ ID NO: 89188 - DNA, 21 bp, Artificial Sequence
  primer
gttctaggctgggcaactgtc

SEQ ID NO: 89189 - DNA, 41 bp, Artificial Sequence
  primer
gtaaaacgacggccagttcctatgacaagatcatacaaccc

SEQ ID NO: 89190 - DNA, 39 bp, Artificial Sequence
  primer
gtaaaacgacggccagtcaatctcctgaccttgtgatcc

SEQ ID NO: 89191 - DNA, 23 bp, Artificial Sequence
  primer
tccacttatgtctgtggcaagtc

SEQ ID NO: 89192 - DNA, 39 bp, Artificial Sequence
  primer
gtaaaacgacggccagttgtttctgaatgctggagtgag

SEQ ID NO: 89193 - DNA, 23 bp, Artificial Sequence
  primer
gtaatgcaatgggtttcttcttc

SEQ ID NO: 89194 - DNA, 23 bp, Artificial Sequence
  primer
tctccaagaaagatgagatcctg

SEQ ID NO: 89195 - DNA, 43 bp, Artificial Sequence
  primer
gtaaaacgacggccagtctgaactataacttctggcatcaaag

SEQ ID NO: 89196 - DNA, 27 bp, Artificial Sequence
  primer
cctttatgcctaccattataacaagaa

SEQ ID NO: 89197 - DNA, 21 bp, Artificial Sequence
  primer
tggatcccaaattcaggaaag

SEQ ID NO: 89198 - DNA, 41 bp, Artificial Sequence
  primer
gtaaaacgacggccagtaaagggctgtagtcttatcattgc

SEQ ID NO: 89199 - DNA, 21 bp, Artificial Sequence
  primer
cccaggctggaagactaaatc

SEQ ID NO: 89200 - DNA, 38 bp, Artificial Sequence
  primer
gtaaaacgacggccagtatcactgttcctccgggtatc

SEQ ID NO: 89201 - DNA, 20 bp, Artificial Sequence
  primer
tttgtcaaacagtgcccaag

SEQ ID NO: 89202 - DNA, 38 bp, Artificial Sequence
  primer
gtaaaacgacggccagtttctgaatctgcaaagatggg

SEQ ID NO: 89203 - DNA, 38 bp, Artificial Sequence
  primer
gtaaaacgacggccagtacagccctgaagaatgtaggc

SEQ ID NO: 89204 - DNA, 40 bp, Artificial Sequence
  primer
gtaaaacgacggccagtaaatgcttacacaagtgtctggg

SEQ ID NO: 89205 - DNA, 23 bp, Artificial Sequence
  primer
cagagaatcaaacatgccttgtc

SEQ ID NO: 89206 - DNA, 41 bp, Artificial Sequence
  primer
gtaaaacgacggccagttcatttaacatcaaatttcttggc

SEQ ID NO: 89207 - DNA, 38 bp, Artificial Sequence
  primer
gtaaaacgacggccagttgcacaatttctaatcccacg

SEQ ID NO: 89208 - DNA, 38 bp, Artificial Sequence
  primer
gtaaaacgacggccagtaccagccaagtacacacgatg

SEQ ID NO: 89209 - DNA, 38 bp, Artificial Sequence
  primer
gtaaaacgacggccagttcccattgcttagtgttgcac

SEQ ID NO: 89210 - DNA, 38 bp, Artificial Sequence
  primer
gtaaaacgacggccagttgttaagcctgtcagggaatc

SEQ ID NO: 89211 - DNA, 21 bp, Artificial Sequence
  primer
aacattcccattccactctgc

SEQ ID NO: 89212 - DNA, 21 bp, Artificial Sequence
  primer
ccacatacctcctgaacatgg

SEQ ID NO: 89213 - DNA, 39 bp, Artificial Sequence
  primer
gtaaaacgacggccagttgataacactggcctcattgtg

SEQ ID NO: 89214 - DNA, 24 bp, Artificial Sequence
  primer
cccttcttattgcatgattactgg

SEQ ID NO: 89215 - DNA, 28 bp, Artificial Sequence
  primer
ggaaataaagcaggatctaaataaagtc

SEQ ID NO: 89216 - DNA, 23 bp, Artificial Sequence
  primer
cagggttctgaggaagagaaatg

SEQ ID NO: 89217 - DNA, 22 bp, Artificial Sequence
  primer
aattgtgtgatgtgcaatttgg

SEQ ID NO: 89218 - DNA, 21 bp, Artificial Sequence
  primer
ctctgagcctgtacaaggtgg

SEQ ID NO: 89219 - DNA, 24 bp, Artificial Sequence
  primer
ggctcattaatattctgtgttggc

SEQ ID NO: 89220 - DNA, 39 bp, Artificial Sequence
  primer
gtaaaacgacggccagttggaagagtggcaaagtgtttc

SEQ ID NO: 89221 - DNA, 40 bp, Artificial Sequence
  primer
gtaaaacgacggccagtagcaggaacactgaaatatggag

SEQ ID NO: 89222 - DNA, 37 bp, Artificial Sequence
  primer
gtaaaacgacggccagttgcatagttccggtttgacc

SEQ ID NO: 89223 - DNA, 39 bp, Artificial Sequence
  primer
gtaaaacgacggccagtcagcagagcacaggaatatcag

SEQ ID NO: 89224 - DNA, 45 bp, Artificial Sequence
  primer
gtaaaacgacggccagtacagtagttatttctacttgtgggtgat

SEQ ID NO: 89225 - DNA, 41 bp, Artificial Sequence
  primer
gtaaaacgacggccagttgtttgtgcaagaattctcatttg

SEQ ID NO: 89226 - DNA, 38 bp, Artificial Sequence
  primer
gtaaaacgacggccagtagtgagtaacctgaggctggg

SEQ ID NO: 89227 - DNA, 38 bp, Artificial Sequence
  primer
gtaaaacgacggccagtttcagtgtggacgagtatggc

SEQ ID NO: 89228 - DNA, 38 bp, Artificial Sequence
  primer
gtaaaacgacggccagtaagcaaaggtgtctaccagcc

SEQ ID NO: 89229 - DNA, 38 bp, Artificial Sequence
  primer
gtaaaacgacggccagtatagcactggaatcacctccg

SEQ ID NO: 89230 - DNA, 38 bp, Artificial Sequence
  primer
gtaaaacgacggccagtagcaggcaaggaagataaagc

SEQ ID NO: 89231 - DNA, 38 bp, Artificial Sequence
  primer
gtaaaacgacggccagttcagactgaatcttggcatcc

SEQ ID NO: 89232 - DNA, 21 bp, Artificial Sequence
  primer
cagaattatgcaggcctaccc

SEQ ID NO: 89233 - DNA, 39 bp, Artificial Sequence
  primer
gtaaaacgacggccagtatgctcaaatggagatgagttg

SEQ ID NO: 89234 - DNA, 38 bp, Artificial Sequence
  primer
gtaaaacgacggccagttatgttgtggcaggaagaagc

SEQ ID NO: 89235 - DNA, 21 bp, Artificial Sequence
  primer
cctcatagcgtgatggtgaac

SEQ ID NO: 89236 - DNA, 38 bp, Artificial Sequence
  primer
gtaaaacgacggccagttttctcccagccagatcattc

SEQ ID NO: 89237 - DNA, 38 bp, Artificial Sequence
  primer
gtaaaacgacggccagtataagcctttgggaagaaggg

SEQ ID NO: 89238 - DNA, 20 bp, Artificial Sequence
  primer
cagcgaagaagtctgggaag

SEQ ID NO: 89239 - DNA, 22 bp, Artificial Sequence
  primer
cctttcctccatctttatgtgc

SEQ ID NO: 89240 - DNA, 23 bp, Artificial Sequence
  primer
gctgttgaatctcaagatttcgg

SEQ ID NO: 89241 - DNA, 21 bp, Artificial Sequence
  primer
tcttaacacttcgtgcatggc

SEQ ID NO: 89242 - DNA, 38 bp, Artificial Sequence
  primer
gtaaaacgacggccagtaaatcccaacatggaaaccag

SEQ ID NO: 89243 - DNA, 38 bp, Artificial Sequence
  primer
gtaaaacgacggccagtcttgatccttgagtccttggg

SEQ ID NO: 89244 - DNA, 21 bp, Artificial Sequence
  primer
gtacagccgccactctctctg

SEQ ID NO: 89245 - DNA, 38 bp, Artificial Sequence
  primer
gtaaaacgacggccagtcttcagaactggaaagctgcc

SEQ ID NO: 89246 - DNA, 38 bp, Artificial Sequence
  primer
gtaaaacgacggccagtgaaggcagaggaaactggaag

SEQ ID NO: 89247 - DNA, 21 bp, Artificial Sequence
  primer
agggcaagcagggtaataagg

SEQ ID NO: 89248 - DNA, 40 bp, Artificial Sequence
  primer
gtaaaacgacggccagtttggtatgtgttaccttggaagc

SEQ ID NO: 89249 - DNA, 37 bp, Artificial Sequence; identical to SEQ ID NO: 20043
  primer

SEQ ID NO: 89250 - DNA, 24 bp, Artificial Sequence
  primer
ctctgttgtgatagattagctggg

SEQ ID NO: 89251 - DNA, 21 bp, Artificial Sequence
  primer
aattggccttagaagcacagg

SEQ ID NO: 89252 - DNA, 38 bp, Artificial Sequence
  primer
gtaaaacgacggccagtctccctcttctttacctgggc

SEQ ID NO: 89253 - DNA, 38 bp, Artificial Sequence
  primer
gtaaaacgacggccagtgacctcttgttcctttggcac

SEQ ID NO: 89254 - DNA, 38 bp, Artificial Sequence
  primer
gtaaaacgacggccagttccttcctgtatttgccttcg

SEQ ID NO: 89255 - DNA, 38 bp, Artificial Sequence
  primer
gtaaaacgacggccagtcaatggctgggatatggtttg

SEQ ID NO: 89256 - DNA, 36 bp, Artificial Sequence
  primer
gtaaaacgacggccagtgctcctcggtcagtgtgtg

SEQ ID NO: 89257 - DNA, 22 bp, Artificial Sequence
  primer
tccacaagaaatggtgctaatg

SEQ ID NO: 89258 - DNA, 21 bp, Artificial Sequence
  primer
tgccatcatcattacatgtcc

SEQ ID NO: 89259 - DNA, 42 bp, Artificial Sequence
  primer
gtaaaacgacggccagtggccaaagttatgacacaataagac

SEQ ID NO: 89260 - DNA, 21 bp, Artificial Sequence
  primer
cccaagaaatgagtttcaggc

SEQ ID NO: 89261 - DNA, 21 bp, Artificial Sequence
  primer
aggtcattgttggccctaaac

SEQ ID NO: 89262 - DNA, 26 bp, Artificial Sequence
  primer
gaaatggatagtgccaatggttatac

SEQ ID NO: 89263 - DNA, 20 bp, Artificial Sequence
  primer
ccctctgaaggcatacccag

SEQ ID NO: 89264 - DNA, 42 bp, Artificial Sequence
  primer
gtaaaacgacggccagttgtttccactacttagaacattccc

SEQ ID NO: 89265 - DNA, 40 bp, Artificial Sequence
  primer
gtaaaacgacggccagttcataacattagggccaacaaag

SEQ ID NO: 89266 - DNA, 22 bp, Artificial Sequence
  primer
aaccttccaagaactggtcaac

SEQ ID NO: 89267 - DNA, 20 bp, Artificial Sequence
  primer
ccatgtggctcaggaaagac

SEQ ID NO: 89268 - DNA, 39 bp, Artificial Sequence
  primer
gtaaaacgacggccagtcaaagaaattgagccttcatcc

SEQ ID NO: 89269 - DNA, 38 bp, Artificial Sequence
  primer
gtaaaacgacggccagttgggcagattaggaaggacag

SEQ ID NO: 89270 - DNA, 36 bp, Artificial Sequence
  primer
gtaaaacgacggccagtcttcatggccatttggagg

SEQ ID NO: 89271 - DNA, 38 bp, Artificial Sequence
  primer
gtaaaacgacggccagtccttgccatccttaacctcag

SEQ ID NO: 89272 - DNA, 21 bp, Artificial Sequence
  primer
tggacccacatccctgagtag

SEQ ID NO: 89273 - DNA, 21 bp, Artificial Sequence
  primer
ccactgtgtctcttgacagcc

SEQ ID NO: 89274 - DNA, 41 bp, Artificial Sequence
  primer
gtaaaacgacggccagtgagccacaggaataggttaaacag

SEQ ID NO: 89275 - DNA, 21 bp, Artificial Sequence
  primer
aatctgctgtgctacggactg

SEQ ID NO: 89276 - DNA, 22 bp, Artificial Sequence
  primer
ggagtagactggagatggaggc

SEQ ID NO: 89277 - DNA, 21 bp, Artificial Sequence
  primer
tgtggcttcaggaatatgcag

SEQ ID NO: 89278 - DNA, 38 bp, Artificial Sequence
  primer
gtaaaacgacggccagtctccatgggaatcaaagtcac

SEQ ID NO: 89279 - DNA, 22 bp, Artificial Sequence
  primer
ccaaagatgatatgtgtggcag

SEQ ID NO: 89280 - DNA, 21 bp, Artificial Sequence
  primer
taaagacactgggcaatgtgg

SEQ ID NO: 89281 - DNA, 38 bp, Artificial Sequence
  primer
gtaaaacgacggccagttgctgggaattgagacatttg

SEQ ID NO: 89282 - DNA, 37 bp, Artificial Sequence
  primer
gtaaaacgacggccagtttctgtgcttgggaggtttc

SEQ ID NO: 89283 - DNA, 21 bp, Artificial Sequence
  primer
agcatcattgcttctgtttgc

SEQ ID NO: 89284 - DNA, 21 bp, Artificial Sequence
  primer
ggcatgtgcagtcaacctttc

SEQ ID NO: 89285 - DNA, 37 bp, Artificial Sequence
  primer
gtaaaacgacggccagttcaagtgtcccttcccttcc

SEQ ID NO: 89286 - DNA, 22 bp, Artificial Sequence
  primer
aagctcgcagttacacaatcac

SEQ ID NO: 89287 - DNA, 38 bp, Artificial Sequence
  primer
gtaaaacgacggccagtggattctaggtttgccatgaa

SEQ ID NO: 89288 - DNA, 21 bp, Artificial Sequence
  primer
tgattcagcattcacacatgc

SEQ ID NO: 89289 - DNA, 38 bp, Artificial Sequence
  primer
gtaaaacgacggccagtttgacaggctctgtgagcaac

SEQ ID NO: 89290 - DNA, 19 bp, Artificial Sequence
  primer
ctgtccgggctcgagttag

SEQ ID NO: 89291 - DNA, 38 bp, Artificial Sequence
  primer
gtaaaacgacggccagtaagtctcagggctgtggtagc

SEQ ID NO: 89292 - DNA, 21 bp, Artificial Sequence
  primer
gggacataaggagacacccac

SEQ ID NO: 89293 - DNA, 21 bp, Artificial Sequence
  primer
cagagcaagaccctatcccag

SEQ ID NO: 89294 - DNA, 36 bp, Artificial Sequence
  primer
gtaaaacgacggccagtctctgggttcccaggaatg

SEQ ID NO: 89295 - DNA, 38 bp, Artificial Sequence
  primer
gtaaaacgacggccagtaagggaataccaaatccaggc

SEQ ID NO: 89296 - DNA, 41 bp, Artificial Sequence
  primer
gtaaaacgacggccagtcccagaagtaaatgacaaatttcc

SEQ ID NO: 89297 - DNA, 38 bp, Artificial Sequence
  primer
gtaaaacgacggccagttgtgattaagggaagccaacc

SEQ ID NO: 89298 - DNA, 21 bp, Artificial Sequence
  primer
ggaacctgcaagtttccagac

SEQ ID NO: 89299 - DNA, 21 bp, Artificial Sequence
  primer
atccctggagtcaaagaggtc

SEQ ID NO: 89300 - DNA, 40 bp, Artificial Sequence
  primer
gtaaaacgacggccagtttgtttatactgttccagctgcc

SEQ ID NO: 89301 - DNA, 21 bp, Artificial Sequence
  primer
ggacaaggaactggaaagcag

SEQ ID NO: 89302 - DNA, 21 bp, Artificial Sequence
  primer
agatcctttgggctgtgaaac

SEQ ID NO: 89303 - DNA, 38 bp, Artificial Sequence
  primer
gtaaaacgacggccagtcaaagtccaaggagatctggg

SEQ ID NO: 89304 - DNA, 38 bp, Artificial Sequence
  primer
gtaaaacgacggccagttcatgttcagtctttgaccgc

SEQ ID NO: 89305 - DNA, 38 bp, Artificial Sequence
  primer
gtaaaacgacggccagttaagcagagccacttcagcac

SEQ ID NO: 89306 - DNA, 21 bp, Artificial Sequence
  primer
ttcctccaagaccttctcagg

SEQ ID NO: 89307 - DNA, 38 bp, Artificial Sequence
  primer
gtaaaacgacggccagtaacatcttgtgcatggtggag

SEQ ID NO: 89308 - DNA, 43 bp, Artificial Sequence
  primer
gtaaaacgacggccagtcctggactatatggtacttcccaatc

SEQ ID NO: 89309 - DNA, 21 bp, Artificial Sequence
  primer
taaacccaaacccacaagtcc

SEQ ID NO: 89310 - DNA, 41 bp, Artificial Sequence
  primer
gtaaaacgacggccagttcaggaccagaactgagacctatc

SEQ ID NO: 89311 - DNA, 21 bp, Artificial Sequence
  primer
gcactagtagagtggctgccc

SEQ ID NO: 89312 - DNA, 38 bp, Artificial Sequence
  primer
gtaaaacgacggccagtgtgtcactgcttccttgcttg

SEQ ID NO: 89313 - DNA, 38 bp, Artificial Sequence
  primer
gtaaaacgacggccagtcagctgatggtttgtcctgag

SEQ ID NO: 89314 - DNA, 21 bp, Artificial Sequence
  primer
tatgtcctcagcaaccattcg

SEQ ID NO: 89315 - DNA, 21 bp, Artificial Sequence
  primer
gtgatcacggagtctttgtgc

SEQ ID NO: 89316 - DNA, 18 bp, Artificial Sequence
  primer
gtttccttctcgggctgg

SEQ ID NO: 89317 - DNA, 21 bp, Artificial Sequence
  primer
tgggagtcccttctaggtgtg

SEQ ID NO: 89318 - DNA, 21 bp, Artificial Sequence
  primer
tccctcctcatagtcccacac

SEQ ID NO: 89319 - DNA, 21 bp, Artificial Sequence
  primer
cttgaagtgaagtgtggcagg

SEQ ID NO: 89320 - DNA, 39 bp, Artificial Sequence
  primer
gtaaaacgacggccagtactttagtgtgcacgaagaccc

SEQ ID NO: 89321 - DNA, 23 bp, Artificial Sequence
  primer
tccgtttgatttctacatggttc

SEQ ID NO: 89322 - DNA, 21 bp, Artificial Sequence
  primer
tcagtgacaggtgcagtgatg

SEQ ID NO: 89323 - DNA, 39 bp, Artificial Sequence
  primer
gtaaaacgacggccagttcatctgtttatggcttcccag

SEQ ID NO: 89324 - DNA, 21 bp, Artificial Sequence
  primer
tcctgtctcactccaccattg

SEQ ID NO: 89325 - DNA, 20 bp, Artificial Sequence
  primer
gcctactcctcccattccag

SEQ ID NO: 89326 - DNA, 21 bp, Artificial Sequence
  primer
agggctctttgtgagatggac

SEQ ID NO: 89327 - DNA, 38 bp, Artificial Sequence
  primer
gtaaaacgacggccagtctggaaggaagatggaaggtg

SEQ ID NO: 89328 - DNA, 21 bp, Artificial Sequence
  primer
tacgcagctacagctcagtgg

SEQ ID NO: 89329 - DNA, 21 bp, Artificial Sequence
  primer
gtctcttcctcccagtatcgc

SEQ ID NO: 89330 - DNA, 38 bp, Artificial Sequence
  primer
gtaaaacgacggccagtttagcagacagccttggattg

SEQ ID NO: 89331 - DNA, 21 bp, Artificial Sequence
  primer
ggagtggcagaagaaccacag

SEQ ID NO: 89332 - DNA, 21 bp, Artificial Sequence
  primer
tgaaagcaagggttaggatgg

SEQ ID NO: 89333 - DNA, 22 bp, Artificial Sequence
  primer
tgcagtaacgccttcttctagc

SEQ ID NO: 89334 - DNA, 38 bp, Artificial Sequence
  primer
gtaaaacgacggccagttaggtgcttaccctcacaccc

SEQ ID NO: 89335 - DNA, 38 bp, Artificial Sequence
  primer
gtaaaacgacggccagtctcagaatggagaaacctggg

SEQ ID NO: 89336 - DNA, 21 bp, Artificial Sequence
  primer
ctctgtattccctctgctggg

SEQ ID NO: 89337 - DNA, 38 bp, Artificial Sequence
  primer
gtaaaacgacggccagtacatgggaaagatgggaactc

SEQ ID NO: 89338 - DNA, 38 bp, Artificial Sequence
  primer
gtaaaacgacggccagtcctatacttgcaaggcccatc

SEQ ID NO: 89339 - DNA, 38 bp, Artificial Sequence
  primer
gtaaaacgacggccagtcccagttcctggatgtctctg

SEQ ID NO: 89340 - DNA, 21 bp, Artificial Sequence
  primer
aaggaggaacctcaccctctc

SEQ ID NO: 89341 - DNA, 36 bp, Artificial Sequence
  primer
gtaaaacgacggccagtgagtcagggaactggcagc

SEQ ID NO: 89342 - DNA, 21 bp, Artificial Sequence
  primer
caggcacagagtgagaagtgg

SEQ ID NO: 89343 - DNA, 21 bp, Artificial Sequence
  primer
ttccagggaacactcatttcc

SEQ ID NO: 89344 - DNA, 21 bp, Artificial Sequence
  primer
caaagggaagtccatttcctg

SEQ ID NO: 89345 - DNA, 21 bp, Artificial Sequence
  primer
tgagtgccacaaagctagcag

SEQ ID NO: 89346 - DNA, 42 bp, Artificial Sequence
  primer
gtaaaacgacggccagtttgataactgagacagaatgtgctt

SEQ ID NO: 89347 - DNA, 24 bp, Artificial Sequence
  primer
tgtcaattcctaacacatcagaga

SEQ ID NO: 89348 - DNA, 21 bp, Artificial Sequence
  primer
tagccagctctctggaatgaa

SEQ ID NO: 89349 - DNA, 19 bp, Artificial Sequence
  primer
caatcctcctgccttggtc

SEQ ID NO: 89350 - DNA, 41 bp, Artificial Sequence
  primer
gtaaaacgacggccagtaggtgaaataaactgaacacctgg

SEQ ID NO: 89351 - DNA, 24 bp, Artificial Sequence
  primer
tttctcactgtgaatgcgttagtc

SEQ ID NO: 89352 - DNA, 37 bp, Artificial Sequence
  primer
gtaaaacgacggccagtgccactgcaataaatggctc

SEQ ID NO: 89353 - DNA, 22 bp, Artificial Sequence
  primer
ccactactagaacttcccgacc

SEQ ID NO: 89354 - DNA, 42 bp, Artificial Sequence
  primer
gtaaaacgacggccagtgagaatagcttctactcctgctacg

SEQ ID NO: 89355 - DNA, 21 bp, Artificial Sequence
  primer
atcctgttcacgttccctttc

SEQ ID NO: 89356 - DNA, 22 bp, Artificial Sequence
  primer
ggacttagacttgtgtttgcgg

SEQ ID NO: 89357 - DNA, 42 bp, Artificial Sequence
  primer
gtaaaacgacggccagtgagagagagaaaggacactttcaac

SEQ ID NO: 89358 - DNA, 22 bp, Artificial Sequence
  primer
acttccattccacactgtaggg

SEQ ID NO: 89359 - DNA, 23 bp, Artificial Sequence
  primer
tttccatatcttcactgtgctcc

SEQ ID NO: 89360 - DNA, 39 bp, Artificial Sequence
  primer
gtaaaacgacggccagttccagatgctactgggttagtg

SEQ ID NO: 89361 - DNA, 41 bp, Artificial Sequence
  primer
gtaaaacgacggccagttcgctgaccaaatacaatattcag

SEQ ID NO: 89362 - DNA, 28 bp, Artificial Sequence
  primer
tgagatattgtatgtgaagtgattaccc

SEQ ID NO: 89363 - DNA, 26 bp, Artificial Sequence
  primer
tggctcacattatatttctcttagca

SEQ ID NO: 89364 - DNA, 26 bp, Artificial Sequence
  primer
atttagcagtgtattatgtactcggg

SEQ ID NO: 89365 - DNA, 21 bp, Artificial Sequence
  primer
ggaagtgacagttgcctctga

SEQ ID NO: 89366 - DNA, 18 bp, Artificial Sequence
  primer
agcgagccaagattgcac

SEQ ID NO: 89367 - DNA, 21 bp, Artificial Sequence
  primer
gagtgagaccctgtctccaaa

SEQ ID NO: 89368 - DNA, 45 bp, Artificial Sequence
  primer
gtaaaacgacggccagtaatttaccaaacaatgaagtatgatagg

SEQ ID NO: 89369 - DNA, 38 bp, Artificial Sequence
  primer
gtaaaacgacggccagtaatgtccacattggaggttgg

SEQ ID NO: 89370 - DNA, 44 bp, Artificial Sequence
  primer
gtaaaacgacggccagtctaagacactactgcaaagacctacag

SEQ ID NO: 89371 - DNA, 21 bp, Artificial Sequence
  primer
gcaatcagcctatgtgtggag

SEQ ID NO: 89372 - DNA, 20 bp, Artificial Sequence
  primer
cggccctgggtagtagtttc

SEQ ID NO: 89373 - DNA, 38 bp, Artificial Sequence
  primer
gtaaaacgacggccagttccaggtctttgtgtgaggtc

SEQ ID NO: 89374 - DNA, 40 bp, Artificial Sequence
  primer
gtaaaacgacggccagtgcttaatcagctcagctctcttc

SEQ ID NO: 89375 - DNA, 38 bp, Artificial Sequence
  primer
gtaaaacgacggccagttcagtcttcagaagcccatcc

SEQ ID NO: 89376 - DNA, 21 bp, Artificial Sequence
  primer
ggccagtgctgtaagatcgtc

SEQ ID NO: 89377 - DNA, 22 bp, Artificial Sequence
  primer
ggaacatcctgtacctgtctgc

SEQ ID NO: 89378 - DNA, 37 bp, Artificial Sequence
  primer
gtaaaacgacggccagtaccgagagctatgccctgag

SEQ ID NO: 89379 - DNA, 21 bp, Artificial Sequence
  primer
agtctctgggagtgatggtcc

SEQ ID NO: 89380 - DNA, 21 bp, Artificial Sequence
  primer
gttatgtcgcttgtttgggag

SEQ ID NO: 89381 - DNA, 38 bp, Artificial Sequence
  primer
gtaaaacgacggccagtcttgtcacagcggtttcagac

SEQ ID NO: 89382 - DNA, 21 bp, Artificial Sequence
  primer
tgggtgatgtgggtgaatatg

SEQ ID NO: 89383 - DNA, 40 bp, Artificial Sequence
  primer
gtaaaacgacggccagttcacattacttcatgtgtttgcc

SEQ ID NO: 89384 - DNA, 24 bp, Artificial Sequence
  primer
gcttattacacaggacaagcagtc

SEQ ID NO: 89385 - DNA, 38 bp, Artificial Sequence
  primer
gtaaaacgacggccagttgcatctgcaaatatccatgc

SEQ ID NO: 89386 - DNA, 21 bp, Artificial Sequence
  primer
accttcatctcgaactcgctc

SEQ ID NO: 89387 - DNA, 38 bp, Artificial Sequence
  primer
gtaaaacgacggccagtagcaaggttcacagcaaactg

SEQ ID NO: 89388 - DNA, 39 bp, Artificial Sequence
  primer
gtaaaacgacggccagttcctcttgtgaatggactttgg

SEQ ID NO: 89389 - DNA, 21 bp, Artificial Sequence
  primer
atagcctcggattctctgcac

SEQ ID NO: 89390 - DNA, 21 bp, Artificial Sequence
  primer
tcgctatcagtagctccctgg

SEQ ID NO: 89391 - DNA, 20 bp, Artificial Sequence
  primer
ctaccaggcacctctgttgg

SEQ ID NO: 89392 - DNA, 38 bp, Artificial Sequence
  primer
gtaaaacgacggccagtttcagaatttcctctgggctg

SEQ ID NO: 89393 - DNA, 38 bp, Artificial Sequence
  primer
gtaaaacgacggccagtttcccaaaccgtaaggtcaag

SEQ ID NO: 89394 - DNA, 21 bp, Artificial Sequence
  primer
acaatgtagatgaccaggccc

SEQ ID NO: 89395 - DNA, 20 bp, Artificial Sequence
  primer
acctcaggcgatccacctac

SEQ ID NO: 89396 - DNA, 38 bp, Artificial Sequence
  primer
gtaaaacgacggccagtccagtctcagcctctcaagtg

SEQ ID NO: 89397 - DNA, 36 bp, Artificial Sequence
  primer
gtaaaacgacggccagtcctcggcacctctctcttg

SEQ ID NO: 89398 - DNA, 22 bp, Artificial Sequence
  primer
tcctcctatctatagcccagcc

SEQ ID NO: 89399 - DNA, 38 bp, Artificial Sequence
  primer
gtaaaacgacggccagtctctgcctcaggcctactttg

SEQ ID NO: 89400 - DNA, 37 bp, Artificial Sequence
  primer
gtaaaacgacggccagtctggttccctcccaaagaac

SEQ ID NO: 89401 - DNA, 21 bp, Artificial Sequence
  primer
ttgaacactaggttgggaggg

SEQ ID NO: 89402 - DNA, 22 bp, Artificial Sequence
  primer
gaaagtaatggatgatccctgc

SEQ ID NO: 89403 - DNA, 41 bp, Artificial Sequence
  primer
gtaaaacgacggccagtcgtctaaactagaggccattcttg

SEQ ID NO: 89404 - DNA, 22 bp, Artificial Sequence
  primer
ccatcactggactggagttgtc

SEQ ID NO: 89405 - DNA, 21 bp, Artificial Sequence
  primer
agacaactggttcactggtgg

SEQ ID NO: 89406 - DNA, 39 bp, Artificial Sequence
  primer
gtaaaacgacggccagttctcatgaaactttcctctgcc

SEQ ID NO: 89407 - DNA, 22 bp, Artificial Sequence
  primer
ggtgaaaggtcacagatccaag

SEQ ID NO: 89408 - DNA, 21 bp, Artificial Sequence
  primer
ataggagcggaaagattctgg

SEQ ID NO: 89409 - DNA, 36 bp, Artificial Sequence
  primer
gtaaaacgacggccagttttccagccctgtaggacg

SEQ ID NO: 89410 - DNA, 21 bp, Artificial Sequence
  primer
ttatgagcctcacgatcatcc

SEQ ID NO: 89411 - DNA, 37 bp, Artificial Sequence
  primer
gtaaaacgacggccagtaacaggaagccagaagcctg

SEQ ID NO: 89412 - DNA, 23 bp, Artificial Sequence
  primer
aagagaaagaaagagcctggttg

SEQ ID NO: 89413 - DNA, 21 bp, Artificial Sequence
  primer
tcaatacaggctttaccagcg

SEQ ID NO: 89414 - DNA, 38 bp, Artificial Sequence
  primer
gtaaaacgacggccagttggagacttgggttgctttag

SEQ ID NO: 89415 - DNA, 21 bp, Artificial Sequence
  primer
ccagcccaagaaatctgagtc

SEQ ID NO: 89416 - DNA, 38 bp, Artificial Sequence
  primer
gtaaaacgacggccagtctctgatggattcaaattgcc

SEQ ID NO: 89417 - DNA, 21 bp, Artificial Sequence
  primer
tgctgggattacagcactttg

SEQ ID NO: 89418 - DNA, 39 bp, Artificial Sequence
  primer
gtaaaacgacggccagtaaactggcttctaaggaatggg

SEQ ID NO: 89419 - DNA, 19 bp, Artificial Sequence
  primer
tggagaattgctggaagcc

SEQ ID NO: 89420 - DNA, 21 bp, Artificial Sequence
  primer
tgcagggagaaaggttaatgc

SEQ ID NO: 89421 - DNA, 22 bp, Artificial Sequence
  primer
cagcagctttacacagcatgag

SEQ ID NO: 89422 - DNA, 21 bp, Artificial Sequence
  primer
gtgacacagagcaagccagag

SEQ ID NO: 89423 - DNA, 21 bp, Artificial Sequence
  primer
catggtacatgaggctgttgc

SEQ ID NO: 89424 - DNA, 21 bp, Artificial Sequence
  primer
tcagtgctagtaggcaggtgg

SEQ ID NO: 89425 - DNA, 36 bp, Artificial Sequence; identical to SEQ ID NO: 41824
  primer

SEQ ID NO: 89426 - DNA, 38 bp, Artificial Sequence
  primer
gtaaaacgacggccagttcaactcagtggcattgaagc

SEQ ID NO: 89427 - DNA, 37 bp, Artificial Sequence
  primer
gtaaaacgacggccagttctgctgaaggcaaataccg

SEQ ID NO: 89428 - DNA, 40 bp, Artificial Sequence
  primer
gtaaaacgacggccagtcattccacaagtgtctatttggc

SEQ ID NO: 89429 - DNA, 24 bp, Artificial Sequence
  primer
ttcaactttagaggtgccaagttc

SEQ ID NO: 89430 - DNA, 38 bp, Artificial Sequence
  primer
gtaaaacgacggccagtctgaagtgtgggtgctttgag

SEQ ID NO: 89431 - DNA, 39 bp, Artificial Sequence
  primer
gtaaaacgacggccagtcttgcgttattgcagtatttgc

SEQ ID NO: 89432 - DNA, 21 bp, Artificial Sequence
  primer
aatcctgcagaagccttagcc

SEQ ID NO: 89433 - DNA, 38 bp, Artificial Sequence
  primer
gtaaaacgacggccagttcgagtccctaaccacctctc

SEQ ID NO: 89434 - DNA, 21 bp, Artificial Sequence
  primer
aagtgctcctcagtcctcgtg

SEQ ID NO: 89435 - DNA, 38 bp, Artificial Sequence
  primer
gtaaaacgacggccagtaggttaattgcaggttggagc

SEQ ID NO: 89436 - DNA, 21 bp, Artificial Sequence
  primer
ttgccctcatttgtgtaatgg

SEQ ID NO: 89437 - DNA, 24 bp, Artificial Sequence
  primer
agcaaacaataggatgtcaaactg

SEQ ID NO: 89438 - DNA, 23 bp, Artificial Sequence
  primer
gaagcatttcaggatgtgatgag

SEQ ID NO: 89439 - DNA, 38 bp, Artificial Sequence
  primer
gtaaaacgacggccagtcttaaacaggatggcctttgc

SEQ ID NO: 89440 - DNA, 25 bp, Artificial Sequence
  primer
cctaggctcatattcagtctctagc

SEQ ID NO: 89441 - DNA, 39 bp, Artificial Sequence
  primer
gtaaaacgacggccagtagagctggaagaattgaaacca

SEQ ID NO: 89442 - DNA, 22 bp, Artificial Sequence
  primer
tgtgtcagaacccaacaatgtc

SEQ ID NO: 89443 - DNA, 38 bp, Artificial Sequence
  primer
gtaaaacgacggccagtggaccttgacttgcagtttgg

SEQ ID NO: 89444 - DNA, 23 bp, Artificial Sequence
  primer
tctgcaatcatatcatcctaccc

SEQ ID NO: 89445 - DNA, 24 bp, Artificial Sequence
  primer
ttctaatggcatctttcatctgac

SEQ ID NO: 89446 - DNA, 21 bp, Artificial Sequence
  primer
agcaacatcttggtctccaaa

SEQ ID NO: 89447 - DNA, 40 bp, Artificial Sequence
  primer
gtaaaacgacggccagtttcctaacacatgtttcctccac

SEQ ID NO: 89448 - DNA, 24 bp, Artificial Sequence
  primer
tccttgtgactgacagagtgaaac

SEQ ID NO: 89449 - DNA, 20 bp, Artificial Sequence
  primer
gcactgcagctcataaaggg

SEQ ID NO: 89450 - DNA, 38 bp, Artificial Sequence
  primer
gtaaaacgacggccagtaagtcgcaatctcggttgaag

SEQ ID NO: 89451 - DNA, 21 bp, Artificial Sequence
  primer
agagcaagcaagtcaaccctc

SEQ ID NO: 89452 - DNA, 38 bp, Artificial Sequence
  primer
gtaaaacgacggccagtcagagacagccaactgtgagg

SEQ ID NO: 89453 - DNA, 38 bp, Artificial Sequence
  primer
gtaaaacgacggccagtgcacccacttccttccataag

SEQ ID NO: 89454 - DNA, 21 bp, Artificial Sequence
  primer
ctcagcttgctggagactctg

SEQ ID NO: 89455 - DNA, 38 bp, Artificial Sequence
  primer
gtaaaacgacggccagtcagcaagggcatcactacaag

SEQ ID NO: 89456 - DNA, 25 bp, Artificial Sequence
  primer
ccaaacattcatccttaccttgtta

SEQ ID NO: 89457 - DNA, 21 bp, Artificial Sequence
  primer
tacttccctttcggcaatgac

SEQ ID NO: 89458 - DNA, 23 bp, Artificial Sequence
  primer
caattccataattgaaagatccc

SEQ ID NO: 89459 - DNA, 38 bp, Artificial Sequence
  primer
gtaaaacgacggccagttcttctggttgttcatggtcc

SEQ ID NO: 89460 - DNA, 21 bp, Artificial Sequence
  primer
tggagcaggtaatgtttcacc

SEQ ID NO: 89461 - DNA, 21 bp, Artificial Sequence
  primer
cagggtccactgtcactttcc

SEQ ID NO: 89462 - DNA, 38 bp, Artificial Sequence
  primer
gtaaaacgacggccagttatatttgccagcattgctcc

SEQ ID NO: 89463 - DNA, 38 bp, Artificial Sequence
  primer
gtaaaacgacggccagtatgggtgagcagcacttatcc

SEQ ID NO: 89464 - DNA, 42 bp, Artificial Sequence
  primer
gtaaaacgacggccagttctactccatatcacatcaagcaac

SEQ ID NO: 89465 - DNA, 21 bp, Artificial Sequence
  primer
tgtgactgatgaaggtgggag

SEQ ID NO: 89466 - DNA, 21 bp, Artificial Sequence
  primer
cagccacacaagggattcttc

SEQ ID NO: 89467 - DNA, 21 bp, Artificial Sequence
  primer
gatcacgagcgagaatctgtc

SEQ ID NO: 89468 - DNA, 21 bp, Artificial Sequence
  primer
atccaagatgccacacaacac

SEQ ID NO: 89469 - DNA, 22 bp, Artificial Sequence
  primer
gagacttccctcagacacatgc

SEQ ID NO: 89470 - DNA, 37 bp, Artificial Sequence
  primer
gtaaaacgacggccagtacacctgtaggcaggagcac

SEQ ID NO: 89471 - DNA, 38 bp, Artificial Sequence
  primer
gtaaaacgacggccagtagcacggctgtctaatcaagg

SEQ ID NO: 89472 - DNA, 21 bp, Artificial Sequence
  primer
ctgaacgaactccagctctcc

SEQ ID NO: 89473 - DNA, 21 bp, Artificial Sequence
  primer
aaagcaaccagtggtctccag

SEQ ID NO: 89474 - DNA, 21 bp, Artificial Sequence
  primer
tgagcttcagaggaacccttg

SEQ ID NO: 89475 - DNA, 38 bp, Artificial Sequence
  primer
gtaaaacgacggccagtgaaccctgtggatgagagacc

SEQ ID NO: 89476 - DNA, 38 bp, Artificial Sequence
  primer
gtaaaacgacggccagttccctctatcgtgctctagcc

SEQ ID NO: 89477 - DNA, 21 bp, Artificial Sequence
  primer
gggatagtgctggaaacatgc

SEQ ID NO: 89478 - DNA, 19 bp, Artificial Sequence
  primer
aggtcttggcttcgtggag

SEQ ID NO: 89479 - DNA, 38 bp, Artificial Sequence
  primer
gtaaaacgacggccagttagtagctcccggtgttcagc

SEQ ID NO: 89480 - DNA, 38 bp, Artificial Sequence
  primer
gtaaaacgacggccagttacttccgaagggaagtgagg

SEQ ID NO: 89481 - DNA, 39 bp, Artificial Sequence
  primer
gtaaaacgacggccagttgagaatgggagtgtacattgg

SEQ ID NO: 89482 - DNA, 38 bp, Artificial Sequence
  primer
gtaaaacgacggccagtcattggttggctgttgatctt

SEQ ID NO: 89483 - DNA, 38 bp, Artificial Sequence
  primer
gtaaaacgacggccagttcaggtctgaggtgtggagtc

SEQ ID NO: 89484 - DNA, 35 bp, Artificial Sequence
  primer
gtaaaacgacggccagtggtgtgagccacagcgtc

SEQ ID NO: 89485 - DNA, 20 bp, Artificial Sequence
  primer
agtgcggatctcccttcttc

SEQ ID NO: 89486 - DNA, 21 bp, Artificial Sequence
  primer
taggcaagtaccaaccaaccc

SEQ ID NO: 89487 - DNA, 41 bp, Artificial Sequence
  primer
gtaaaacgacggccagtcactgcctattaatacaagcctgg

SEQ ID NO: 89488 - DNA, 38 bp, Artificial Sequence
  primer
gtaaaacgacggccagtacgaagcaaattagcccaatg

SEQ ID NO: 89489 - DNA, 38 bp, Artificial Sequence
  primer
gtaaaacgacggccagtaactcaaagtggcccaagaat

SEQ ID NO: 89490 - DNA, 41 bp, Artificial Sequence
  primer
gtaaaacgacggccagttggaacagatacaaatcaggtgtg

SEQ ID NO: 89491 - DNA, 21 bp, Artificial Sequence
  primer
tctggtacaataaccctgggc

SEQ ID NO: 89492 - DNA, 44 bp, Artificial Sequence
  primer
gtaaaacgacggccagtaagaatcatcgtcaattgtttactctc

SEQ ID NO: 89493 - DNA, 24 bp, Artificial Sequence
  primer
catggtttgaagcatatttactgg

SEQ ID NO: 89494 - DNA, 21 bp, Artificial Sequence
  primer
taaatcagcccacttccatgt

SEQ ID NO: 89495 - DNA, 21 bp, Artificial Sequence
  primer
ttgccaaatcatctcgttcag

SEQ ID NO: 89496 - DNA, 21 bp, Artificial Sequence
  primer
tccaagcaaataccaaactgc

SEQ ID NO: 89497 - DNA, 44 bp, Artificial Sequence
  primer
gtaaaacgacggccagtacttcagttacatcatttctattggtg

SEQ ID NO: 89498 - DNA, 40 bp, Artificial Sequence
  primer
gtaaaacgacggccagttcccttccatttcagaattattg

SEQ ID NO: 89499 - DNA, 39 bp, Artificial Sequence
  primer
gtaaaacgacggccagtcacgatacctctttcccttcaa

SEQ ID NO: 89500 - DNA, 41 bp, Artificial Sequence
  primer
gtaaaacgacggccagtgctggaagatattagaagacgctc

SEQ ID NO: 89501 - DNA, 21 bp, Artificial Sequence
  primer
aagccacagaatttgggtcac

SEQ ID NO: 89502 - DNA, 40 bp, Artificial Sequence
  primer
gtaaaacgacggccagttttactgctggtttatcgtctgc

SEQ ID NO: 89503 - DNA, 38 bp, Artificial Sequence
  primer
gtaaaacgacggccagtttgccatagcactggatgaag

SEQ ID NO: 89504 - DNA, 22 bp, Artificial Sequence
  primer
tgcctcttagagaacttggcag

SEQ ID NO: 89505 - DNA, 21 bp, Artificial Sequence
  primer
actccagtgttggtcaaaggc

SEQ ID NO: 89506 - DNA, 20 bp, Artificial Sequence
  primer
tgggactacaggcacacacc

SEQ ID NO: 89507 - DNA, 38 bp, Artificial Sequence
  primer
gtaaaacgacggccagtgcccaactctctaacctgtgc

SEQ ID NO: 89508 - DNA, 38 bp, Artificial Sequence
  primer
gtaaaacgacggccagtcaaagatgagatgggtgaacg

SEQ ID NO: 89509 - DNA, 21 bp, Artificial Sequence
  primer
ataaaggtgacaatgcctgcc

SEQ ID NO: 89510 - DNA, 20 bp, Artificial Sequence
  primer
gagattcaagggcagctgtg

SEQ ID NO: 89511 - DNA, 21 bp, Artificial Sequence
  primer
agtgtggaggaacaggaggtg

SEQ ID NO: 89512 - DNA, 37 bp, Artificial Sequence
  primer
gtaaaacgacggccagtatgttctcgcccacatcatc

SEQ ID NO: 89513 - DNA, 21 bp, Artificial Sequence
  primer
tcttccctctcccagtgtacg

SEQ ID NO: 89514 - DNA, 39 bp, Artificial Sequence
  primer
gtaaaacgacggccagtggatgaacacagttaaggcagg

SEQ ID NO: 89515 - DNA, 21 bp, Artificial Sequence
  primer
gggcagagaagtgttcagacc

SEQ ID NO: 89516 - DNA, 21 bp, Artificial Sequence
  primer
gtcacagcttccagagcttcc

SEQ ID NO: 89517 - DNA, 21 bp, Artificial Sequence
  primer
aaaggctctctccacgacttc

SEQ ID NO: 89518 - DNA, 42 bp, Artificial Sequence
  primer
gtaaaacgacggccagtttctctttaaggatgaacaagatgg

SEQ ID NO: 89519 - DNA, 23 bp, Artificial Sequence
  primer
gaaagcttcactttgagtgatcg

SEQ ID NO: 89520 - DNA, 21 bp, Artificial Sequence
  primer
gaccctagagcttctcaaccc

SEQ ID NO: 89521 - DNA, 21 bp, Artificial Sequence
  primer
agctggctctcactttaaggc

SEQ ID NO: 89522 - DNA, 23 bp, Artificial Sequence
  primer
acagcagtctatgtaacaagccc

SEQ ID NO: 89523 - DNA, 27 bp, Artificial Sequence
  primer
tggtatattggatggtatgttacttgg

SEQ ID NO: 89524 - DNA, 20 bp, Artificial Sequence
  primer
agtgcttgtgtgatggatgc

SEQ ID NO: 89525 - DNA, 38 bp, Artificial Sequence
  primer
gtaaaacgacggccagtcgtgcccagcctgatattaac

SEQ ID NO: 89526 - DNA, 39 bp, Artificial Sequence
  primer
gtaaaacgacggccagtgaagcttcaagtagggaaatgg

SEQ ID NO: 89527 - DNA, 21 bp, Artificial Sequence
  primer
tagggaattccacgggctatc

SEQ ID NO: 89528 - DNA, 21 bp, Artificial Sequence
  primer
tcaatgcaatgctcttatccc

SEQ ID NO: 89529 - DNA, 19 bp, Artificial Sequence
  primer
agaggagacgtgagcccag

SEQ ID NO: 89530 - DNA, 37 bp, Artificial Sequence
  primer
gtaaaacgacggccagtctcgcatgtctctctcaggc

SEQ ID NO: 89531 - DNA, 22 bp, Artificial Sequence
  primer
gagagagagagactgcaggacc

SEQ ID NO: 89532 - DNA, 44 bp, Artificial Sequence
  primer
gtaaaacgacggccagttttagattccaacattcaattctagtg

SEQ ID NO: 89533 - DNA, 38 bp, Artificial Sequence
  primer
gtaaaacgacggccagtttacaatcgtccttccacctg

SEQ ID NO: 89534 - DNA, 39 bp, Artificial Sequence
  primer
gtaaaacgacggccagttggttgcaactgctatcttctc

SEQ ID NO: 89535 - DNA, 20 bp, Artificial Sequence
  primer
cccttaagctgggtggtagg

SEQ ID NO: 89536 - DNA, 22 bp, Artificial Sequence
  primer
cctggtttcctgtaattcctcc

SEQ ID NO: 89537 - DNA, 39 bp, Artificial Sequence
  primer
gtaaaacgacggccagtaatagtaccctgcacaaggctg

SEQ ID NO: 89538 - DNA, 43 bp, Artificial Sequence
  primer
gtaaaacgacggccagtaaatttgtccaattatctcgttatgc

SEQ ID NO: 89539 - DNA, 42 bp, Artificial Sequence
  primer
gtaaaacgacggccagtggaagaatggtctatgtctctccag

SEQ ID NO: 89540 - DNA, 21 bp, Artificial Sequence
  primer
acactcacaaaggccaatggt

SEQ ID NO: 89541 - DNA, 44 bp, Artificial Sequence
  primer
gtaaaacgacggccagtaagggaacttcaatctttaacacttct

SEQ ID NO: 89542 - DNA, 38 bp, Artificial Sequence
  primer
gtaaaacgacggccagtaagaatgccagtggtgtgttg

SEQ ID NO: 89543 - DNA, 22 bp, Artificial Sequence
  primer
gacctggttctacctgatgtgg

SEQ ID NO: 89544 - DNA, 24 bp, Artificial Sequence
  primer
gcacactattacggcaaagtaacc

SEQ ID NO: 89545 - DNA, 39 bp, Artificial Sequence
  primer
gtaaaacgacggccagtcccggccctcattagtacttta

SEQ ID NO: 89546 - DNA, 24 bp, Artificial Sequence
  primer
tggatcatctttgtagatcctttg

SEQ ID NO: 89547 - DNA, 24 bp, Artificial Sequence
  primer
acaacctgtaaagaccctcatctg

SEQ ID NO: 89548 - DNA, 21 bp, Artificial Sequence
  primer
gtggctgccctactactttgc

SEQ ID NO: 89549 - DNA, 21 bp, Artificial Sequence
  primer
tgggaatccagtggtaactcc

SEQ ID NO: 89550 - DNA, 40 bp, Artificial Sequence
  primer
gtaaaacgacggccagtccgcaccagtgtatagaaagtga

SEQ ID NO: 89551 - DNA, 21 bp, Artificial Sequence
  primer
tgctgcctatttcctccatac

SEQ ID NO: 89552 - DNA, 21 bp, Artificial Sequence
  primer
taagagtggttgccactgacg

SEQ ID NO: 89553 - DNA, 39 bp, Artificial Sequence
  primer
gtaaaacgacggccagttgaacaccaaagtttaatgggc

SEQ ID NO: 89554 - DNA, 20 bp, Artificial Sequence
  primer
ccagcacaattcctctggtc

SEQ ID NO: 89555 - DNA, 20 bp, Artificial Sequence
  primer
atcatggacccatgtgcaac

SEQ ID NO: 89556 - DNA, 21 bp, Artificial Sequence
  primer
tcaacactgagggaagctgag

SEQ ID NO: 89557 - DNA, 39 bp, Artificial Sequence
  primer
gtaaaacgacggccagtgcaagaatttcaactcaggcag

SEQ ID NO: 89558 - DNA, 24 bp, Artificial Sequence
  primer
gataaaccaagctgttcccaatag

SEQ ID NO: 89559 - DNA, 43 bp, Artificial Sequence
  primer
gtaaaacgacggccagtaaattcttacagattaaacgacatgc

SEQ ID NO: 89560 - DNA, 44 bp, Artificial Sequence
  primer
gtaaaacgacggccagtgctctattggtggttattattgcctta

SEQ ID NO: 89561 - DNA, 21 bp, Artificial Sequence
  primer
tagcagggccaggactacata

SEQ ID NO: 89562 - DNA, 24 bp, Artificial Sequence
  primer
ccttcaaagcatgaaagttatttg

SEQ ID NO: 89563 - DNA, 21 bp, Artificial Sequence
  primer
ggataccaaatgctgtttccc

SEQ ID NO: 89564 - DNA, 45 bp, Artificial Sequence
  primer
gtaaaacgacggccagttgttgaaactattacctaccaacgtaca

SEQ ID NO: 89565 - DNA, 39 bp, Artificial Sequence
  primer
gtaaaacgacggccagtcaagcaatagctggtctcaaac

SEQ ID NO: 89566 - DNA, 21 bp, Artificial Sequence
  primer
ctggccagaacagcttgtagg

SEQ ID NO: 89567 - DNA, 40 bp, Artificial Sequence
  primer
gtaaaacgacggccagttttgtttcatctttctggctgac

SEQ ID NO: 89568 - DNA, 44 bp, Artificial Sequence
  primer
gtaaaacgacggccagttgtagtagagatcagtcctcatttgtg

SEQ ID NO: 89569 - DNA, 43 bp, Artificial Sequence
  primer
gtaaaacgacggccagtttctgcttgtattcatacccaattac

SEQ ID NO: 89570 - DNA, 42 bp, Artificial Sequence
  primer
gtaaaacgacggccagtcctccagaactttataatagcaggc

SEQ ID NO: 89571 - DNA, 24 bp, Artificial Sequence
  primer
tgtatggagggtagtgatttagcc

SEQ ID NO: 89572 - DNA, 23 bp, Artificial Sequence
  primer
gttcaataaatgtgccacacaag

SEQ ID NO: 89573 - DNA, 39 bp, Artificial Sequence
  primer
gtaaaacgacggccagtgccaatatgtttgaaatgccac

SEQ ID NO: 89574 - DNA, 39 bp, Artificial Sequence
  primer
gtaaaacgacggccagttctgagctgctagctggagttt

SEQ ID NO: 89575 - DNA, 21 bp, Artificial Sequence
  primer
tttgctgatgagccatgctac

SEQ ID NO: 89576 - DNA, 24 bp, Artificial Sequence
  primer
ccaaggatcctattacacagttgc

SEQ ID NO: 89577 - DNA, 38 bp, Artificial Sequence
  primer
gtaaaacgacggccagttagggaaaggtaattgcaggg

SEQ ID NO: 89578 - DNA, 21 bp, Artificial Sequence
  primer
ctggcatccactgtgtgagac

SEQ ID NO: 89579 - DNA, 38 bp, Artificial Sequence
  primer
gtaaaacgacggccagtaaacggtggaaagaggatctg

SEQ ID NO: 89580 - DNA, 38 bp, Artificial Sequence
  primer
gtaaaacgacggccagtgggactgcaatctacacatgg

SEQ ID NO: 89581 - DNA, 21 bp, Artificial Sequence
  primer
acacccaagacgaaagcattg

SEQ ID NO: 89582 - DNA, 20 bp, Artificial Sequence
  primer
cagctcggatggattgctac

SEQ ID NO: 89583 - DNA, 39 bp, Artificial Sequence
  primer
gtaaaacgacggccagttgaatcttaagaaggcaggaaa

SEQ ID NO: 89584 - DNA, 21 bp, Artificial Sequence
  primer
ttagcctcaagggaaacaacc

SEQ ID NO: 89585 - DNA, 42 bp, Artificial Sequence
  primer
gtaaaacgacggccagtttaaagtgagccaaggtagtaccag

SEQ ID NO: 89586 - DNA, 26 bp, Artificial Sequence
  primer
ttccctagaaagaaagtatgactcca

SEQ ID NO: 89587 - DNA, 38 bp, Artificial Sequence
  primer
gtaaaacgacggccagtacgaatccagaaagatggagc

SEQ ID NO: 89588 - DNA, 38 bp, Artificial Sequence
  primer
gtaaaacgacggccagtccttcccaatcaggtaagtcc

SEQ ID NO: 89589 - DNA, 46 bp, Artificial Sequence
  primer
gtaaaacgacggccagttgattagaactcttagcacacagtattca

SEQ ID NO: 89590 - DNA, 22 bp, Artificial Sequence
  primer
aaaggcgaattgcttcattatc

SEQ ID NO: 89591 - DNA, 25 bp, Artificial Sequence
  primer
tgccctagtatgaatcaaagaactg

SEQ ID NO: 89592 - DNA, 21 bp, Artificial Sequence
  primer
taccgtagaaaggaacatgcc

SEQ ID NO: 89593 - DNA, 38 bp, Artificial Sequence
  primer
gtaaaacgacggccagttggcttacttcaggaccaatg

SEQ ID NO: 89594 - DNA, 25 bp, Artificial Sequence
  primer
tctatgttctttccctctgcatatc

SEQ ID NO: 89595 - DNA, 22 bp, Artificial Sequence
  primer
ccataatcctggttactccagc

SEQ ID NO: 89596 - DNA, 24 bp, Artificial Sequence
  primer
ccaaattaagatgcattatgtccc

SEQ ID NO: 89597 - DNA, 25 bp, Artificial Sequence
  primer
tttctggaaacacgataatatcaca

SEQ ID NO: 89598 - DNA, 25 bp, Artificial Sequence
  primer
cagccacagacactaatatcaactc

SEQ ID NO: 89599 - DNA, 39 bp, Artificial Sequence
  primer
gtaaaacgacggccagtaaaccgtattggaatttcatgg

SEQ ID NO: 89600 - DNA, 41 bp, Artificial Sequence
  primer
gtaaaacgacggccagttctgctggttgtaactgaatatgg

SEQ ID NO: 89601 - DNA, 38 bp, Artificial Sequence
  primer
gtaaaacgacggccagttcaaatcagcccttaaatgcc

SEQ ID NO: 89602 - DNA, 21 bp, Artificial Sequence
  primer
cagacaaaggccatggtacac

SEQ ID NO: 89603 - DNA, 38 bp, Artificial Sequence
  primer
gtaaaacgacggccagtttagggtgactttgagttggc

SEQ ID NO: 89604 - DNA, 27 bp, Artificial Sequence
  primer
tgcatgactgtaccaagttagtaagaa

SEQ ID NO: 89605 - DNA, 40 bp, Artificial Sequence
  primer
gtaaaacgacggccagttcagcaaacttctggatttagca

SEQ ID NO: 89606 - DNA, 25 bp, Artificial Sequence
  primer
tgatatctggaatgtatatggcacc

SEQ ID NO: 89607 - DNA, 23 bp, Artificial Sequence
  primer
tttccgaatgataaactctgcat

SEQ ID NO: 89608 - DNA, 26 bp, Artificial Sequence
  primer
tgtcaaggtatatcatcaaagaatca

SEQ ID NO: 89609 - DNA, 21 bp, Artificial Sequence
  primer
agcagaagtcagaagcctgga

SEQ ID NO: 89610 - DNA, 21 bp, Artificial Sequence
  primer
tctcctttccaaattcactgg

SEQ ID NO: 89611 - DNA, 39 bp, Artificial Sequence
  primer
gtaaaacgacggccagtaagagctataaattggctcggg

SEQ ID NO: 89612 - DNA, 20 bp, Artificial Sequence
  primer
tcagggagaggtgatgaacc

SEQ ID NO: 89613 - DNA, 46 bp, Artificial Sequence
  primer
gtaaaacgacggccagttcacttatagccaatatttaataatccca

SEQ ID NO: 89614 - DNA, 21 bp, Artificial Sequence
  primer
cttgttaccctgctgttgctg

SEQ ID NO: 89615 - DNA, 36 bp, Artificial Sequence
  primer
gtaaaacgacggccagtggactctagctcccgaggc

SEQ ID NO: 89616 - DNA, 21 bp, Artificial Sequence
  primer
tccttcttgagatggaactgg

SEQ ID NO: 89617 - DNA, 38 bp, Artificial Sequence
  primer
gtaaaacgacggccagtgttagcagcctctgatccctg

SEQ ID NO: 89618 - DNA, 38 bp, Artificial Sequence
  primer
gtaaaacgacggccagtacgaaactgtgtccctaaggc

SEQ ID NO: 89619 - DNA, 26 bp, Artificial Sequence
  primer
aacagtcatattagtccttgggattc

SEQ ID NO: 89620 - DNA, 44 bp, Artificial Sequence
  primer
gtaaaacgacggccagttgcataagtttatctggccattatatc

SEQ ID NO: 89621 - DNA, 21 bp, Artificial Sequence
  primer
gttctccacctccagttcgac

SEQ ID NO: 89622 - DNA, 19 bp, Artificial Sequence
  primer
gtagcgctgcatgttggac

SEQ ID NO: 89623 - DNA, 38 bp, Artificial Sequence
  primer
gtaaaacgacggccagtgtccatgagtccgaacaggtc

SEQ ID NO: 89624 - DNA, 38 bp, Artificial Sequence
  primer
gtaaaacgacggccagtcgcaataggcagaactgtacc

SEQ ID NO: 89625 - DNA, 38 bp, Artificial Sequence
  primer
gtaaaacgacggccagttgcagaaggacagtgtggaag

SEQ ID NO: 89626 - DNA, 39 bp, Artificial Sequence
  primer
gtaaaacgacggccagtttgggcttcttattgaatttgg

SEQ ID NO: 89627 - DNA, 25 bp, Artificial Sequence
  primer
gatatgtgtccagctggttgtatta

SEQ ID NO: 89628 - DNA, 43 bp, Artificial Sequence
  primer
gtaaaacgacggccagttgagtacatcggcttagactaggttt

SEQ ID NO: 89629 - DNA, 21 bp, Artificial Sequence
  primer
taacattatgccacctttgcc

SEQ ID NO: 89630 - DNA, 26 bp, Artificial Sequence
  primer
catactgtgacagaacgcattaactt

SEQ ID NO: 89631 - DNA, 27 bp, Artificial Sequence
  primer
ctgactgagaatttcattattgtaacg

SEQ ID NO: 89632 - DNA, 39 bp, Artificial Sequence
  primer
gtaaaacgacggccagtcatcatccattacttgacacgc

SEQ ID NO: 89633 - DNA, 37 bp, Artificial Sequence
  primer
gtaaaacgacggccagtcacagaacagcttgcactgg

SEQ ID NO: 89634 - DNA, 21 bp, Artificial Sequence
  primer
attgcctgaaaccaggagttc

SEQ ID NO: 89635 - DNA, 39 bp, Artificial Sequence
  primer
gtaaaacgacggccagtgcctaagggattaccatccatc

SEQ ID NO: 89636 - DNA, 38 bp, Artificial Sequence
  primer
gtaaaacgacggccagtttatttggaacccaccaggtc

SEQ ID NO: 89637 - DNA, 38 bp, Artificial Sequence
  primer
gtaaaacgacggccagtaaagttccattgagcagagcc

SEQ ID NO: 89638 - DNA, 21 bp, Artificial Sequence
  primer
tctgacaggacacagacagcc

SEQ ID NO: 89639 - DNA, 21 bp, Artificial Sequence
  primer
agaatgagcatgccactcaac

SEQ ID NO: 89640 - DNA, 38 bp, Artificial Sequence
  primer
gtaaaacgacggccagttgctggtgatacgttaggagg

SEQ ID NO: 89641 - DNA, 21 bp, Artificial Sequence
  primer
tgtgatcgcctttcctttacc

SEQ ID NO: 89642 - DNA, 25 bp, Artificial Sequence
  primer
aaatagttgctttccattcgttctt

SEQ ID NO: 89643 - DNA, 21 bp, Artificial Sequence
  primer
ttccttgctactgcacagctc

SEQ ID NO: 89644 - DNA, 21 bp, Artificial Sequence
  primer
gaaatggattcgttgagtccc

SEQ ID NO: 89645 - DNA, 40 bp, Artificial Sequence
  primer
gtaaaacgacggccagttgaggaatctaactctcacaggc

SEQ ID NO: 89646 - DNA, 21 bp, Artificial Sequence
  primer
ctctaggtcataggccgttgg

SEQ ID NO: 89647 - DNA, 38 bp, Artificial Sequence
  primer
gtaaaacgacggccagtccaacacgtcctcttcaatgg

SEQ ID NO: 89648 - DNA, 21 bp, Artificial Sequence
  primer
agccttaccttgggagacttg

SEQ ID NO: 89649 - DNA, 39 bp, Artificial Sequence
  primer
gtaaaacgacggccagtcattgcaaatatggcatgaaag

SEQ ID NO: 89650 - DNA, 21 bp, Artificial Sequence
  primer
tctgtccattgcacctttgtc

SEQ ID NO: 89651 - DNA, 38 bp, Artificial Sequence
  primer
gtaaaacgacggccagtggttgttctttcctttgcagc

SEQ ID NO: 89652 - DNA, 21 bp, Artificial Sequence
  primer
tgaaacaagttgcccactgac

SEQ ID NO: 89653 - DNA, 21 bp, Artificial Sequence
  primer
aaggcaggaggatcattcaag

SEQ ID NO: 89654 - DNA, 21 bp, Artificial Sequence
  primer
atagatgactgcgagacaggc

SEQ ID NO: 89655 - DNA, 40 bp, Artificial Sequence
  primer
gtaaaacgacggccagtggatgaagacctttcatcttcag

SEQ ID NO: 89656 - DNA, 21 bp, Artificial Sequence
  primer
aaagaggcaaccagtggagtc

SEQ ID NO: 89657 - DNA, 21 bp, Artificial Sequence
  primer
tttccaatctctcggaaacag

SEQ ID NO: 89658 - DNA, 24 bp, Artificial Sequence
  primer
ggctggagttctatacaccatctg

SEQ ID NO: 89659 - DNA, 39 bp, Artificial Sequence
  primer
gtaaaacgacggccagtagagaactgtcaacactggcac

SEQ ID NO: 89660 - DNA, 38 bp, Artificial Sequence
  primer
gtaaaacgacggccagtctcctgccattagtcacatgc

SEQ ID NO: 89661 - DNA, 38 bp, Artificial Sequence
  primer
gtaaaacgacggccagtcttgctgctagtcaaactcgg

SEQ ID NO: 89662 - DNA, 24 bp, Artificial Sequence
  primer
ttgctagctctaaaggttggaaag

SEQ ID NO: 89663 - DNA, 38 bp, Artificial Sequence
  primer
gtaaaacgacggccagtctaccttcttctcccagccac

SEQ ID NO: 89664 - DNA, 22 bp, Artificial Sequence
  primer
actgaaacctctccatcagtcc

SEQ ID NO: 89665 - DNA, 21 bp, Artificial Sequence
  primer
tgttgtcccactgctagcttc

SEQ ID NO: 89666 - DNA, 38 bp, Artificial Sequence
  primer
gtaaaacgacggccagtgaggcataaaccaagccagac

SEQ ID NO: 89667 - DNA, 18 bp, Artificial Sequence
  primer
gccaagatcgcaccattg

SEQ ID NO: 89668 - DNA, 37 bp, Artificial Sequence
  primer
gtaaaacgacggccagtaacaagcccatggctaatcc

SEQ ID NO: 89669 - DNA, 22 bp, Artificial Sequence
  primer
gcctcagagtgcttagaaatcc

SEQ ID NO: 89670 - DNA, 39 bp, Artificial Sequence
  primer
gtaaaacgacggccagtcgttgacacttccaagacactg

SEQ ID NO: 89671 - DNA, 39 bp, Artificial Sequence
  primer
gtaaaacgacggccagtttcgtcagaatctagctgaggg

SEQ ID NO: 89672 - DNA, 19 bp, Artificial Sequence
  primer
acatttggctgctccatcc

SEQ ID NO: 89673 - DNA, 21 bp, Artificial Sequence
  primer
cttacgcagtcgtacagcctc

SEQ ID NO: 89674 - DNA, 22 bp, Artificial Sequence
  primer
ttcctgctgtgcaacaagtaag

SEQ ID NO: 89675 - DNA, 38 bp, Artificial Sequence
  primer
gtaaaacgacggccagttggtacagggagagacgtcag

SEQ ID NO: 89676 - DNA, 38 bp, Artificial Sequence
  primer
gtaaaacgacggccagtgacagggacgacatcttcagg

SEQ ID NO: 89677 - DNA, 20 bp, Artificial Sequence
  primer
ttgcgatgagcatatgtgtg

SEQ ID NO: 89678 - DNA, 21 bp, Artificial Sequence
  primer
tggtgagtatatgggcattca

SEQ ID NO: 89679 - DNA, 21 bp, Artificial Sequence
  primer
ttcatctggaatgctttgacc

SEQ ID NO: 89680 - DNA, 38 bp, Artificial Sequence
  primer
gtaaaacgacggccagttactgcaagatggaccacagc

SEQ ID NO: 89681 - DNA, 38 bp, Artificial Sequence
  primer
gtaaaacgacggccagtggatggagctttaggagcaag

SEQ ID NO: 89682 - DNA, 42 bp, Artificial Sequence
  primer
gtaaaacgacggccagtatttcctccaaactcaataaagatg

SEQ ID NO: 89683 - DNA, 21 bp, Artificial Sequence
  primer
ttctgggaaacagtctttggg

SEQ ID NO: 89684 - DNA, 44 bp, Artificial Sequence
  primer
gtaaaacgacggccagtcagattgttcaaagataaatggtgttc

SEQ ID NO: 89685 - DNA, 21 bp, Artificial Sequence
  primer
actaggtcatccaggctggtc

SEQ ID NO: 89686 - DNA, 38 bp, Artificial Sequence
  primer
gtaaaacgacggccagtgtggaagcagatagggacgtg

SEQ ID NO: 89687 - DNA, 21 bp, Artificial Sequence
  primer
tctggtctggaagcagcaata

SEQ ID NO: 89688 - DNA, 21 bp, Artificial Sequence
  primer
tgtcaacaaggatgcctcttc

SEQ ID NO: 89689 - DNA, 20 bp, Artificial Sequence
  primer
ctctagcagcttggtggtgg

SEQ ID NO: 89690 - DNA, 38 bp, Artificial Sequence
  primer
gtaaaacgacggccagtaacccttaactccacctgctg

SEQ ID NO: 89691 - DNA, 21 bp, Artificial Sequence
  primer
gaaagcaagaggtcaggcaag

SEQ ID NO: 89692 - DNA, 38 bp, Artificial Sequence
  primer
gtaaaacgacggccagtatcctcaagctcctcttcctg

SEQ ID NO: 89693 - DNA, 38 bp, Artificial Sequence
  primer
gtaaaacgacggccagtgggccaagtgatttgtaatgc

SEQ ID NO: 89694 - DNA, 38 bp, Artificial Sequence
  primer
gtaaaacgacggccagtgaaagaagaggagccagaggg

SEQ ID NO: 89695 - DNA, 21 bp, Artificial Sequence
  primer
gcagattccacaaacgctaag

SEQ ID NO: 89696 - DNA, 20 bp, Artificial Sequence
  primer
caccctggccacagttatcc

SEQ ID NO: 89697 - DNA, 21 bp, Artificial Sequence
  primer
gtccttacggaaggctgaatg

SEQ ID NO: 89698 - DNA, 38 bp, Artificial Sequence
  primer
gtaaaacgacggccagttaacatccactggagggaagc

SEQ ID NO: 89699 - DNA, 39 bp, Artificial Sequence
  primer
gtaaaacgacggccagtttctgcctattaacttgcaggg

SEQ ID NO: 89700 - DNA, 38 bp, Artificial Sequence
  primer
gtaaaacgacggccagtaaaggattgggattgaggagg

SEQ ID NO: 89701 - DNA, 21 bp, Artificial Sequence
  primer
gttggacactctttgccacac

SEQ ID NO: 89702 - DNA, 37 bp, Artificial Sequence
  primer
gtaaaacgacggccagtcagacagcagagggcttctc

SEQ ID NO: 89703 - DNA, 21 bp, Artificial Sequence
  primer
atggaagagaagcagagctgg

SEQ ID NO: 89704 - DNA, 22 bp, Artificial Sequence
  primer
cactggacactgtgctgaactc

SEQ ID NO: 89705 - DNA, 38 bp, Artificial Sequence
  primer
gtaaaacgacggccagtattggaggtcgttctggactc

SEQ ID NO: 89706 - DNA, 38 bp, Artificial Sequence
  primer
gtaaaacgacggccagtgagaccagggtgatgaggaag

SEQ ID NO: 89707 - DNA, 38 bp, Artificial Sequence
  primer
gtaaaacgacggccagtagcagcttcctctgcattgac

SEQ ID NO: 89708 - DNA, 38 bp, Artificial Sequence
  primer
gtaaaacgacggccagttgggatgaatgaaaggaaacc

SEQ ID NO: 89709 - DNA, 19 bp, Artificial Sequence
  primer
cctttcaattgctgcgacc

SEQ ID NO: 89710 - DNA, 21 bp, Artificial Sequence
  primer
ccagcctgttgccataatttc

SEQ ID NO: 89711 - DNA, 21 bp, Artificial Sequence
  primer
cacaccctcccaggtgataag

SEQ ID NO: 89712 - DNA, 38 bp, Artificial Sequence
  primer
gtaaaacgacggccagtccttggttccagtctcagagg

SEQ ID NO: 89713 - DNA, 21 bp, Artificial Sequence
  primer
gataggacagaacaggcaggc

SEQ ID NO: 89714 - DNA, 20 bp, Artificial Sequence
  primer
caccagtagggctaggctgg

SEQ ID NO: 89715 - DNA, 36 bp, Artificial Sequence
  primer
gtaaaacgacggccagtgtccacccgtgtgtctgtg

SEQ ID NO: 89716 - DNA, 38 bp, Artificial Sequence
  primer
gtaaaacgacggccagtcaacactaaggagccctccac

SEQ ID NO: 89717 - DNA, 22 bp, Artificial Sequence
  primer
caatatgtatcggactgccaag

SEQ ID NO: 89718 - DNA, 38 bp, Artificial Sequence
  primer
gtaaaacgacggccagtggttctccactcatcggagtc

SEQ ID NO: 89719 - DNA, 38 bp, Artificial Sequence
  primer
gtaaaacgacggccagttggctagcttgattgttgtgt

SEQ ID NO: 89720 - DNA, 24 bp, Artificial Sequence
  primer
gttccttggagatttagagagtgg

SEQ ID NO: 89721 - DNA, 18 bp, Artificial Sequence
  primer
tgacctcgtgatccaccc

SEQ ID NO: 89722 - DNA, 24 bp, Artificial Sequence
  primer
tgaaattgcacaaatacagctaaa

SEQ ID NO: 89723 - DNA, 21 bp, Artificial Sequence
  primer
aacaccatgagggtaactgcc

SEQ ID NO: 89724 - DNA, 23 bp, Artificial Sequence
  primer
gagagctcaatctctccaagagg

SEQ ID NO: 89725 - DNA, 39 bp, Artificial Sequence
  primer
gtaaaacgacggccagtactaatggcattcagcaacaaa

SEQ ID NO: 89726 - DNA, 38 bp, Artificial Sequence
  primer
gtaaaacgacggccagtgtgcaacaggatgtcagaatg

SEQ ID NO: 89727 - DNA, 22 bp, Artificial Sequence
  primer
cccatttaagaaccactgctct

SEQ ID NO: 89728 - DNA, 24 bp, Artificial Sequence
  primer
tgggacccatttaagaaactactg

SEQ ID NO: 89729 - DNA, 22 bp, Artificial Sequence
  primer
tgcaaatcctttcatcaacaag

SEQ ID NO: 89730 - DNA, 23 bp, Artificial Sequence
  primer
ccgatttcttccctttacaacag

SEQ ID NO: 89731 - DNA, 22 bp, Artificial Sequence
  primer
gttgtcttatagccatgctccc

SEQ ID NO: 89732 - DNA, 21 bp, Artificial Sequence
  primer
ttcttgagtcagatgccttcg

SEQ ID NO: 89733 - DNA, 21 bp, Artificial Sequence
  primer
ttgcagataactgggatcctg

SEQ ID NO: 89734 - DNA, 35 bp, Artificial Sequence
  primer
gtaaaacgacggccagtttatccaggcatggtggc

SEQ ID NO: 89735 - DNA, 38 bp, Artificial Sequence
  primer
gtaaaacgacggccagtaacttagagccgtgttcctcg

SEQ ID NO: 89736 - DNA, 21 bp, Artificial Sequence
  primer
cgagacagcaggtcacacttc

SEQ ID NO: 89737 - DNA, 38 bp, Artificial Sequence
  primer
gtaaaacgacggccagtggttgtcgaggaatcttccag

SEQ ID NO: 89738 - DNA, 20 bp, Artificial Sequence
  primer
gagctagaatgcgtatgccc

SEQ ID NO: 89739 - DNA, 21 bp, Artificial Sequence
  primer
ggtgatttccactgacctctg

SEQ ID NO: 89740 - DNA, 39 bp, Artificial Sequence
  primer
gtaaaacgacggccagttgccatcattatgttcatcaca

SEQ ID NO: 89741 - DNA, 21 bp, Artificial Sequence
  primer
aagcgtatggccatgaatttg

SEQ ID NO: 89742 - DNA, 23 bp, Artificial Sequence
  primer
ggactgacagatttgaaccacac

SEQ ID NO: 89743 - DNA, 23 bp, Artificial Sequence
  primer
ttacgtgaatatgcctaaggctc

SEQ ID NO: 89744 - DNA, 39 bp, Artificial Sequence
  primer
gtaaaacgacggccagtcaggaaatgtccttcagctctc

SEQ ID NO: 89745 - DNA, 19 bp, Artificial Sequence
  primer
gaaagcgctcccaatcaac

SEQ ID NO: 89746 - DNA, 38 bp, Artificial Sequence
  primer
gtaaaacgacggccagtccctgtcctgatccttacgag

SEQ ID NO: 89747 - DNA, 41 bp, Artificial Sequence
  primer
gtaaaacgacggccagtaaacaaataaatacttggcccatc

SEQ ID NO: 89748 - DNA, 38 bp, Artificial Sequence
  primer
gtaaaacgacggccagtcaagcttccactggtgcttat

SEQ ID NO: 89749 - DNA, 26 bp, Artificial Sequence
  primer
tgacagaagctaggaagtcagataac

SEQ ID NO: 89750 - DNA, 22 bp, Artificial Sequence
  primer
tcagaggacaacaagaagtcgg

SEQ ID NO: 89751 - DNA, 22 bp, Artificial Sequence
  primer
tgaacctcagtagccagttcag

SEQ ID NO: 89752 - DNA, 24 bp, Artificial Sequence
  primer
tgttcttatggtacagagtggtgc

SEQ ID NO: 89753 - DNA, 37 bp, Artificial Sequence
  primer
gtaaaacgacggccagtcgactcaattcacgtgctcc

SEQ ID NO: 89754 - DNA, 21 bp, Artificial Sequence
  primer
ctgccatagtggtccagattg

SEQ ID NO: 89755 - DNA, 21 bp, Artificial Sequence
  primer
aatacaagccctcctcccttc

SEQ ID NO: 89756 - DNA, 22 bp, Artificial Sequence
  primer
caaactctcttccttcagcgtt

SEQ ID NO: 89757 - DNA, 43 bp, Artificial Sequence
  primer
gtaaaacgacggccagtttcacagatatactgttcacaaccac

SEQ ID NO: 89758 - DNA, 23 bp, Artificial Sequence
  primer
gaaagctttgagtttgactcagg

SEQ ID NO: 89759 - DNA, 20 bp, Artificial Sequence
  primer
aaggaaagcctgatgccttg

SEQ ID NO: 89760 - DNA, 38 bp, Artificial Sequence
  primer
gtaaaacgacggccagtatcctggatcttcccacacac

SEQ ID NO: 89761 - DNA, 35 bp, Artificial Sequence
  primer
gtaaaacgacggccagtcaaggccctcttccctcc

SEQ ID NO: 89762 - DNA, 21 bp, Artificial Sequence
  primer
cacctttgacctctcccattc

SEQ ID NO: 89763 - DNA, 21 bp, Artificial Sequence
  primer
atggagagaaggtgaccaacg

SEQ ID NO: 89764 - DNA, 21 bp, Artificial Sequence
  primer
agggctagatggtccagatcc

SEQ ID NO: 89765 - DNA, 38 bp, Artificial Sequence
  primer
gtaaaacgacggccagttcttccaggtgaggaaccaag

SEQ ID NO: 89766 - DNA, 21 bp, Artificial Sequence
  primer
gtctccacagtcttccttggg

SEQ ID NO: 89767 - DNA, 38 bp, Artificial Sequence; identical to SEQ ID NO: 89765
  primer

SEQ ID NO: 89768 - DNA, 21 bp, Artificial Sequence
  primer
gtggtcactgagtgtgaaccc

SEQ ID NO: 89769 - DNA, 21 bp, Artificial Sequence
  primer
ttaacacttggtggcatcctg

SEQ ID NO: 89770 - DNA, 21 bp, Artificial Sequence
  primer
ctttcctttgaatcctgggtg

SEQ ID NO: 89771 - DNA, 38 bp, Artificial Sequence
  primer
gtaaaacgacggccagttcctggaggagaaacagatgg

SEQ ID NO: 89772 - DNA, 22 bp, Artificial Sequence
  primer
cattgactcactacctggagcc

SEQ ID NO: 89773 - DNA, 20 bp, Artificial Sequence
  primer
agccctcaaggagtagaggc

SEQ ID NO: 89774 - DNA, 22 bp, Artificial Sequence
  primer
ggagacatgatcaagaaggcac

SEQ ID NO: 89775 - DNA, 21 bp, Artificial Sequence
  primer
agaatgtgacacagtggctgg

SEQ ID NO: 89776 - DNA, 37 bp, Artificial Sequence
  primer
gtaaaacgacggccagtaaaggcatacgggcctacag

SEQ ID NO: 89777 - DNA, 21 bp, Artificial Sequence
  primer
agccagagacacagtgaaggg

SEQ ID NO: 89778 - DNA, 19 bp, Artificial Sequence
  primer
ccaccacgcccagtctatc

SEQ ID NO: 89779 - DNA, 21 bp, Artificial Sequence
  primer
ggatctaggtgctgaaggtgg

SEQ ID NO: 89780 - DNA, 38 bp, Artificial Sequence
  primer
gtaaaacgacggccagttctcccaccatataccaaggc

SEQ ID NO: 89781 - DNA, 22 bp, Artificial Sequence
  primer
cgtgactggaagaacaacacag

SEQ ID NO: 89782 - DNA, 21 bp, Artificial Sequence
  primer
gcgagtgtgacctagaggacc

SEQ ID NO: 89783 - DNA, 37 bp, Artificial Sequence
  primer
gtaaaacgacggccagtaaaggcagtcagagcccttc

SEQ ID NO: 89784 - DNA, 20 bp, Artificial Sequence
  primer
catcaggagggagttctggg

SEQ ID NO: 89785 - DNA, 21 bp, Artificial Sequence
  primer
cagagaagggttcttcaggga

SEQ ID NO: 89786 - DNA, 38 bp, Artificial Sequence
  primer
gtaaaacgacggccagttataggcgtcgctaaagctcc

SEQ ID NO: 89787 - DNA, 38 bp, Artificial Sequence
  primer
gtaaaacgacggccagtggaagagaatgacagggtgtg

SEQ ID NO: 89788 - DNA, 21 bp, Artificial Sequence
  primer
aatagtgctggagacccatcc

SEQ ID NO: 89789 - DNA, 39 bp, Artificial Sequence
  primer
gtaaaacgacggccagttctccttagttcctctccctgg

SEQ ID NO: 89790 - DNA, 37 bp, Artificial Sequence
  primer
gtaaaacgacggccagtcagctgggtgagttctctcg

SEQ ID NO: 89791 - DNA, 38 bp, Artificial Sequence
  primer
gtaaaacgacggccagtcacagatgagtcattggaggg

SEQ ID NO: 89792 - DNA, 21 bp, Artificial Sequence
  primer
gtcagattcagggaggctgag

SEQ ID NO: 89793 - DNA, 37 bp, Artificial Sequence
  primer
gtaaaacgacggccagtacacacctgggtgcagagag

SEQ ID NO: 89794 - DNA, 39 bp, Artificial Sequence
  primer
gtaaaacgacggccagttggtgatgatctacccaactcc

SEQ ID NO: 89795 - DNA, 21 bp, Artificial Sequence
  primer
ctgactgcaaggccacataac

SEQ ID NO: 89796 - DNA, 21 bp, Artificial Sequence
  primer
aaggcaaggacacaagaggag

SEQ ID NO: 89797 - DNA, 21 bp, Artificial Sequence
  primer
tgtccaaagcctgtgtttcag

SEQ ID NO: 89798 - DNA, 20 bp, Artificial Sequence
  primer
cgcaggaagatgagcatcag

SEQ ID NO: 89799 - DNA, 23 bp, Artificial Sequence
  primer
tgtgctatattcctcccttctcc

SEQ ID NO: 89800 - DNA, 20 bp, Artificial Sequence
  primer
gcacctcttccagtgacacc

SEQ ID NO: 89801 - DNA, 38 bp, Artificial Sequence
  primer
gtaaaacgacggccagttctgcacaatgaggaatgtgg

SEQ ID NO: 89802 - DNA, 21 bp, Artificial Sequence
  primer
tgcagagggtgttatgcagtc

SEQ ID NO: 89803 - DNA, 38 bp, Artificial Sequence
  primer
gtaaaacgacggccagtaccagaacaaagggttgcttg

SEQ ID NO: 89804 - DNA, 21 bp, Artificial Sequence
  primer
aaggtcagagttaccaaggcg

SEQ ID NO: 89805 - DNA, 21 bp, Artificial Sequence
  primer
cacgtttcaagatggcaagag

SEQ ID NO: 89806 - DNA, 22 bp, Artificial Sequence
  primer
tgggcagccagtaatagttgag

SEQ ID NO: 89807 - DNA, 37 bp, Artificial Sequence
  primer
gtaaaacgacggccagtctggaagacatgacccgttg

SEQ ID NO: 89808 - DNA, 21 bp, Artificial Sequence
  primer
cttccttcttccctaaacgcc

SEQ ID NO: 89809 - DNA, 21 bp, Artificial Sequence
  primer
gacctgtaaggcgaagtgagg

SEQ ID NO: 89810 - DNA, 38 bp, Artificial Sequence
  primer
gtaaaacgacggccagttagaaccacagctgaggaggg

SEQ ID NO: 89811 - DNA, 21 bp, Artificial Sequence
  primer
agtctcctgcaggtaagggtc

SEQ ID NO: 89812 - DNA, 38 bp, Artificial Sequence
  primer
gtaaaacgacggccagtcctgcccttgttcctctatcc

SEQ ID NO: 89813 - DNA, 38 bp, Artificial Sequence
  primer
gtaaaacgacggccagtacgcctcagcctttctctaag

SEQ ID NO: 89814 - DNA, 21 bp, Artificial Sequence
  primer
cgatgtatccaagtctgacgg

SEQ ID NO: 89815 - DNA, 21 bp, Artificial Sequence
  primer
atgcacacagaccctcttcac

SEQ ID NO: 89816 - DNA, 21 bp, Artificial Sequence
  primer
tgggacttatgtcaggcttcc

SEQ ID NO: 89817 - DNA, 22 bp, Artificial Sequence
  primer
tttaggagggtggtagaggaca

SEQ ID NO: 89818 - DNA, 20 bp, Artificial Sequence
  primer
gaccacaggcacacactacc

SEQ ID NO: 89819 - DNA, 38 bp, Artificial Sequence
  primer
gtaaaacgacggccagttggataggaagttctccacgc

SEQ ID NO: 89820 - DNA, 20 bp, Artificial Sequence
  primer
gctgtttgccttgttcttgg

SEQ ID NO: 89821 - DNA, 19 bp, Artificial Sequence
  primer
gtgggttgagagtgggtgg

SEQ ID NO: 89822 - DNA, 21 bp, Artificial Sequence
  primer
tttccagactttctcattggc

SEQ ID NO: 89823 - DNA, 21 bp, Artificial Sequence
  primer
atgagagggcagctgtctttg

SEQ ID NO: 89824 - DNA, 38 bp, Artificial Sequence
  primer
gtaaaacgacggccagtcatgcaccagctttgagtagc

SEQ ID NO: 89825 - DNA, 21 bp, Artificial Sequence
  primer
gcaataggtaaggtgggcaag

SEQ ID NO: 89826 - DNA, 21 bp, Artificial Sequence
  primer
ctcttgaccagctgctttgtg

SEQ ID NO: 89827 - DNA, 38 bp, Artificial Sequence
  primer
gtaaaacgacggccagttggcttaggacacctctctcc

SEQ ID NO: 89828 - DNA, 38 bp, Artificial Sequence
  primer
gtaaaacgacggccagtagggaagtcagcaggttgaag

SEQ ID NO: 89829 - DNA, 38 bp, Artificial Sequence
  primer
gtaaaacgacggccagtcactgccatattggtaaacgc

SEQ ID NO: 89830 - DNA, 21 bp, Artificial Sequence
  primer
agcgctaaccaggaagaagag

SEQ ID NO: 89831 - DNA, 19 bp, Artificial Sequence
  primer
ggcagccaggaagaagaag

SEQ ID NO: 89832 - DNA, 38 bp, Artificial Sequence
  primer
gtaaaacgacggccagttcctttggctttcaaacactg

SEQ ID NO: 89833 - DNA, 20 bp, Artificial Sequence
  primer
ctctcagagcgggatgtgtg

SEQ ID NO: 89834 - DNA, 42 bp, Artificial Sequence
  primer
gtaaaacgacggccagttcatgttgtgaataggaaatgtacc

SEQ ID NO: 89835 - DNA, 23 bp, Artificial Sequence
  primer
cacgtactctgtcatcatctccc

SEQ ID NO: 89836 - DNA, 38 bp, Artificial Sequence
  primer
gtaaaacgacggccagttgggagaaatcagtcccagtc

SEQ ID NO: 89837 - DNA, 21 bp, Artificial Sequence
  primer
actggttcagctattgggagg

SEQ ID NO: 89838 - DNA, 21 bp, Artificial Sequence
  primer
tgcaagtttcagggttgagtg

SEQ ID NO: 89839 - DNA, 38 bp, Artificial Sequence
  primer
gtaaaacgacggccagtggagtctgctgaggcattagg

SEQ ID NO: 89840 - DNA, 38 bp, Artificial Sequence
  primer
gtaaaacgacggccagtatagttccatggagcatgtgg

SEQ ID NO: 89841 - DNA, 21 bp, Artificial Sequence
  primer
gcctagtgacacgaagcattg

SEQ ID NO: 89842 - DNA, 21 bp, Artificial Sequence
  primer
tgacttgctcactaacgtggg

SEQ ID NO: 89843 - DNA, 21 bp, Artificial Sequence
  primer
gtagtgggcacctgtagtccc

SEQ ID NO: 89844 - DNA, 22 bp, Artificial Sequence
  primer
ggtcactcaaacagcatacagg

SEQ ID NO: 89845 - DNA, 38 bp, Artificial Sequence
  primer
gtaaaacgacggccagtgacttaggtgggtatgccagg

SEQ ID NO: 89846 - DNA, 38 bp, Artificial Sequence
  primer
gtaaaacgacggccagtaagaatgggacttccctggac

SEQ ID NO: 89847 - DNA, 19 bp, Artificial Sequence
  primer
ggcagggacctgtaatccc

SEQ ID NO: 89848 - DNA, 21 bp, Artificial Sequence
  primer
agctctgcacaacaggtttcc

SEQ ID NO: 89849 - DNA, 21 bp, Artificial Sequence
  primer
tgcaagtttcagggttgagtg

SEQ ID NO: 89850 - DNA, 38 bp, Artificial Sequence; identical to SEQ ID NO: 89839
  primer

SEQ ID NO: 89851 - DNA, 21 bp, Artificial Sequence
  primer
atagttccatggagcatgtgg

SEQ ID NO: 89852 - DNA, 21 bp, Artificial Sequence
  primer
gcctagtgacacgaagcattg

SEQ ID NO: 89853 - DNA, 21 bp, Artificial Sequence
  primer
ttctcacgcctaccaggtttc

SEQ ID NO: 89854 - DNA, 37 bp, Artificial Sequence
  primer
gtaaaacgacggccagtcctcaccttccctctccaac

SEQ ID NO: 89855 - DNA, 38 bp, Artificial Sequence
  primer
gtaaaacgacggccagttgcttacaatttgggtcatgc

SEQ ID NO: 89856 - DNA, 38 bp, Artificial Sequence
  primer
gtaaaacgacggccagtgggtcatcatcactcccttcc

SEQ ID NO: 89857 - DNA, 21 bp, Artificial Sequence
  primer
caggtgggttcaaagatcctc

SEQ ID NO: 89858 - DNA, 21 bp, Artificial Sequence
  primer
agtcaaactacctccgggttg

SEQ ID NO: 89859 - DNA, 21 bp, Artificial Sequence
  primer
gccatagctgggcattaaatc

SEQ ID NO: 89860 - DNA, 20 bp, Artificial Sequence
  primer
aatcccagaagctagcccag

SEQ ID NO: 89861 - DNA, 21 bp, Artificial Sequence
  primer
aggctggttcctacttctccc

SEQ ID NO: 89862 - DNA, 18 bp, Artificial Sequence
  primer
gagagtcctcgccagggt

SEQ ID NO: 89863 - DNA, 21 bp, Artificial Sequence
  primer
cactccaaacttgtcacctcg

SEQ ID NO: 89864 - DNA, 21 bp, Artificial Sequence
  primer
aacttcccggtacttcccatc

SEQ ID NO: 89865 - DNA, 21 bp, Artificial Sequence
  primer
cattcaaacaggcaagcaaag

SEQ ID NO: 89866 - DNA, 39 bp, Artificial Sequence
  primer
gtaaaacgacggccagtcacaggtccctagagtgtctgc

SEQ ID NO: 89867 - DNA, 20 bp, Artificial Sequence
  primer
caagtaacctgcctgccttg

SEQ ID NO: 89868 - DNA, 24 bp, Artificial Sequence
  primer
ggactatcctggcatcaatgtatc

SEQ ID NO: 89869 - DNA, 43 bp, Artificial Sequence
  primer
gtaaaacgacggccagtaaagactgaaagctacacagcaatta

SEQ ID NO: 89870 - DNA, 21 bp, Artificial Sequence
  primer
caggccactgtaacaatccac

SEQ ID NO: 89871 - DNA, 38 bp, Artificial Sequence
  primer
gtaaaacgacggccagtattcagtctggacccggtaac

SEQ ID NO: 89872 - DNA, 38 bp, Artificial Sequence
  primer
gtaaaacgacggccagtagaacctcagggaggtgtgtg

SEQ ID NO: 89873 - DNA, 38 bp, Artificial Sequence
  primer
gtaaaacgacggccagtattgttgccaagggaaagaac

SEQ ID NO: 89874 - DNA, 23 bp, Artificial Sequence
  primer
cagcaggttagaaagtgttccag

SEQ ID NO: 89875 - DNA, 41 bp, Artificial Sequence
  primer
gtaaaacgacggccagtttctgacagacattctgctgtaaa

SEQ ID NO: 89876 - DNA, 38 bp, Artificial Sequence
  primer
gtaaaacgacggccagtctttcattgattctgggcctg

SEQ ID NO: 89877 - DNA, 38 bp, Artificial Sequence
  primer
gtaaaacgacggccagtgggttcaaatggaattcaagg

SEQ ID NO: 89878 - DNA, 24 bp, Artificial Sequence
  primer
tttaaagtcaaacaatcctggctc

SEQ ID NO: 89879 - DNA, 27 bp, Artificial Sequence
  primer
cacacagatttcattgtcatattcaac

SEQ ID NO: 89880 - DNA, 20 bp, Artificial Sequence
  primer
ctctagtcccacccgagacc

SEQ ID NO: 89881 - DNA, 27 bp, Artificial Sequence
  primer
aatctacatgtatcgatggtcaatatg

SEQ ID NO: 89882 - DNA, 23 bp, Artificial Sequence
  primer
tccctttcctaatttacagcagc

SEQ ID NO: 89883 - DNA, 42 bp, Artificial Sequence
  primer
gtaaaacgacggccagtgggtatatacagagtccaatttccc

SEQ ID NO: 89884 - DNA, 38 bp, Artificial Sequence
  primer
gtaaaacgacggccagttaaaggccataaggtacacgg

SEQ ID NO: 89885 - DNA, 22 bp, Artificial Sequence
  primer
tgctgtattgaggcagtaggtg

SEQ ID NO: 89886 - DNA, 26 bp, Artificial Sequence
  primer
catcctcactataatctccaatggtt

SEQ ID NO: 89887 - DNA, 38 bp, Artificial Sequence
  primer
gtaaaacgacggccagtatggatacccacagggaaatc

SEQ ID NO: 89888 - DNA, 41 bp, Artificial Sequence
  primer
gtaaaacgacggccagttgaaattactgattgtcaagttcg

SEQ ID NO: 89889 - DNA, 20 bp, Artificial Sequence
  primer
aattcatgttgccagcgttc

SEQ ID NO: 89890 - DNA, 21 bp, Artificial Sequence
  primer
ttgtttagggactccacctcc

SEQ ID NO: 89891 - DNA, 20 bp, Artificial Sequence
  primer
ggcctgtaggctttctgctg

SEQ ID NO: 89892 - DNA, 21 bp, Artificial Sequence
  primer
ccagactgctctccagcctac

SEQ ID NO: 89893 - DNA, 18 bp, Artificial Sequence
  primer
ttgagccactgcactccc

SEQ ID NO: 89894 - DNA, 24 bp, Artificial Sequence
  primer
gggagtagcaagaaatactccaaa

SEQ ID NO: 89895 - DNA, 35 bp, Artificial Sequence
  primer
gtaaaacgacggccagtacgcgccaccttaagagc

SEQ ID NO: 89896 - DNA, 41 bp, Artificial Sequence
  primer
gtaaaacgacggccagtccacaacagcaccttagtttaatg

SEQ ID NO: 89897 - DNA, 42 bp, Artificial Sequence
  primer
gtaaaacgacggccagttttaaatagctctaggtcaaatggc

SEQ ID NO: 89898 - DNA, 26 bp, Artificial Sequence
  primer
ccaatttctctgtctctaatcacagg

SEQ ID NO: 89899 - DNA, 22 bp, Artificial Sequence
  primer
ttcttctcggtattcagactgc

SEQ ID NO: 89900 - DNA, 19 bp, Artificial Sequence
  primer
agccatgattgtgctgctg

SEQ ID NO: 89901 - DNA, 38 bp, Artificial Sequence
  primer
gtaaaacgacggccagttgtcctgcctattcatgtggt

SEQ ID NO: 89902 - DNA, 38 bp, Artificial Sequence
  primer
gtaaaacgacggccagtgcgagaccctgtctcaaataa

SEQ ID NO: 89903 - DNA, 39 bp, Artificial Sequence
  primer
gtaaaacgacggccagttggctttgttaaagttgtctcc

SEQ ID NO: 89904 - DNA, 41 bp, Artificial Sequence
  primer
gtaaaacgacggccagttgcaattaccatctgtaacacagc

SEQ ID NO: 89905 - DNA, 41 bp, Artificial Sequence
  primer
gtaaaacgacggccagtgaaagacgtacaattcccttaccc

SEQ ID NO: 89906 - DNA, 24 bp, Artificial Sequence
  primer
gggagctttatctaactatgctgc

SEQ ID NO: 89907 - DNA, 22 bp, Artificial Sequence
  primer
tgatttctgcaatgtaagaagg

SEQ ID NO: 89908 - DNA, 41 bp, Artificial Sequence
  primer
gtaaaacgacggccagttcattcacagtgtttgacatagga

SEQ ID NO: 89909 - DNA, 21 bp, Artificial Sequence
  primer
gcaactgctcaattcacagaa

SEQ ID NO: 89910 - DNA, 27 bp, Artificial Sequence
  primer
cctgaagagactggtcactatcataac

SEQ ID NO: 89911 - DNA, 38 bp, Artificial Sequence
  primer
gtaaaacgacggccagtccaaacgctttcttctcttgc

SEQ ID NO: 89912 - DNA, 20 bp, Artificial Sequence
  primer
tgagctcaagcaatatgccc

SEQ ID NO: 89913 - DNA, 20 bp, Artificial Sequence
  primer
ttctttcacacagtccgtgc

SEQ ID NO: 89914 - DNA, 38 bp, Artificial Sequence
  primer
gtaaaacgacggccagtactggtaacagtgctgacacg

SEQ ID NO: 89915 - DNA, 22 bp, Artificial Sequence
  primer
cctgaaatcaaatccatagcca

SEQ ID NO: 89916 - DNA, 18 bp, Artificial Sequence
  primer
ggcaacacagggagaccc

SEQ ID NO: 89917 - DNA, 42 bp, Artificial Sequence
  primer
gtaaaacgacggccagttgacagctaatttgcaatactttcc

SEQ ID NO: 89918 - DNA, 36 bp, Artificial Sequence
  primer
gtaaaacgacggccagtacacctggccaccttatgc

SEQ ID NO: 89919 - DNA, 38 bp, Artificial Sequence
  primer
gtaaaacgacggccagtgctgtgagtggccatgtattc

SEQ ID NO: 89920 - DNA, 27 bp, Artificial Sequence
  primer
ttcccatatttaatgagagctttagac

SEQ ID NO: 89921 - DNA, 20 bp, Artificial Sequence
  primer
acagtctcaatgtcaccggc

SEQ ID NO: 89922 - DNA, 21 bp, Artificial Sequence
  primer
aaactttgccaaggcgtgtag

SEQ ID NO: 89923 - DNA, 38 bp, Artificial Sequence
  primer
gtaaaacgacggccagtgccctcacaatgagagcatta

SEQ ID NO: 89924 - DNA, 20 bp, Artificial Sequence
  primer
aggcagcttctccaaggaac

SEQ ID NO: 89925 - DNA, 37 bp, Artificial Sequence
  primer
gtaaaacgacggccagtgctgtgatttgcagagaggc

SEQ ID NO: 89926 - DNA, 24 bp, Artificial Sequence
  primer
gagtaacagaaattgccatgaaac

SEQ ID NO: 89927 - DNA, 23 bp, Artificial Sequence
  primer
aaagaatcaggctttatggtgtg

SEQ ID NO: 89928 - DNA, 43 bp, Artificial Sequence
  primer
gtaaaacgacggccagttgaaataactgaggtaaaggatccag

SEQ ID NO: 89929 - DNA, 38 bp, Artificial Sequence
  primer
gtaaaacgacggccagtcagggtttcataggtgctttg

SEQ ID NO: 89930 - DNA, 37 bp, Artificial Sequence
  primer
gtaaaacgacggccagtaaacattcatgccttctggg

SEQ ID NO: 89931 - DNA, 39 bp, Artificial Sequence
  primer
gtaaaacgacggccagtgcgcccaacctatacaatactt

SEQ ID NO: 89932 - DNA, 21 bp, Artificial Sequence
  primer
acaactggaaaccagagaccc

SEQ ID NO: 89933 - DNA, 18 bp, Artificial Sequence
  primer
cggtaagccgagatcgtg

SEQ ID NO: 89934 - DNA, 38 bp, Artificial Sequence
  primer
gtaaaacgacggccagtgggatttgtcatccaggtgag

SEQ ID NO: 89935 - DNA, 20 bp, Artificial Sequence
  primer
ttctgtggctgctttgaacc

SEQ ID NO: 89936 - DNA, 37 bp, Artificial Sequence
  primer
gtaaaacgacggccagtagacaaatcacgagggaggg

SEQ ID NO: 89937 - DNA, 35 bp, Artificial Sequence
  primer
gtaaaacgacggccagtacggagaaaccgagcctg

SEQ ID NO: 89938 - DNA, 38 bp, Artificial Sequence
  primer
gtaaaacgacggccagtaggaaccaatggtcagaaagg

SEQ ID NO: 89939 - DNA, 38 bp, Artificial Sequence
  primer
gtaaaacgacggccagtctgcataatagcccagggttc

SEQ ID NO: 89940 - DNA, 24 bp, Artificial Sequence
  primer
cattatccatgaagcaactgtttg

SEQ ID NO: 89941 - DNA, 21 bp, Artificial Sequence
  primer
aaatgtctttctcctcctgcc

SEQ ID NO: 89942 - DNA, 37 bp, Artificial Sequence
  primer
gtaaaacgacggccagtacccagtcatcactctggtg

SEQ ID NO: 89943 - DNA, 22 bp, Artificial Sequence
  primer
tcttcaagcaactctgaaagcc

SEQ ID NO: 89944 - DNA, 38 bp, Artificial Sequence
  primer
gtaaaacgacggccagttgctcaagtcagtccaggttc

SEQ ID NO: 89945 - DNA, 21 bp, Artificial Sequence
  primer
aggccttccacagttcttagc

SEQ ID NO: 89946 - DNA, 40 bp, Artificial Sequence
  primer
gtaaaacgacggccagtggagctagattggtaacactggg

SEQ ID NO: 89947 - DNA, 21 bp, Artificial Sequence
  primer
attggtggctgaagctgagac

SEQ ID NO: 89948 - DNA, 43 bp, Artificial Sequence
  primer
gtaaaacgacggccagtttctgatggaggatactgtaactcag

SEQ ID NO: 89949 - DNA, 21 bp, Artificial Sequence
  primer
gactcagcaagcaaactgcac

SEQ ID NO: 89950 - DNA, 38 bp, Artificial Sequence
  primer
gtaaaacgacggccagttccatgttcagtctccaccag

SEQ ID NO: 89951 - DNA, 21 bp, Artificial Sequence
  primer
ctcctggagcagtaacagtgg

SEQ ID NO: 89952 - DNA, 24 bp, Artificial Sequence
  primer
ggaagtgaggactagaactgcatc

SEQ ID NO: 89953 - DNA, 21 bp, Artificial Sequence
  primer
cccaatctcactcctacaggc

SEQ ID NO: 89954 - DNA, 37 bp, Artificial Sequence
  primer
gtaaaacgacggccagtaactccaccctgtctttggg

SEQ ID NO: 89955 - DNA, 38 bp, Artificial Sequence
  primer
gtaaaacgacggccagtcataagccctgccattgactc

SEQ ID NO: 89956 - DNA, 39 bp, Artificial Sequence
  primer
gtaaaacgacggccagttcactcagcatttgggtaagac

SEQ ID NO: 89957 - DNA, 38 bp, Artificial Sequence
  primer
gtaaaacgacggccagtcgcttacaacaaagccaggac

SEQ ID NO: 89958 - DNA, 38 bp, Artificial Sequence
  primer
gtaaaacgacggccagttttccaaatgtccctgaattg

SEQ ID NO: 89959 - DNA, 20 bp, Artificial Sequence
  primer
aaagagcagccaagagaccc

SEQ ID NO: 89960 - DNA, 21 bp, Artificial Sequence
  primer
cagcttattcgggttacacca

SEQ ID NO: 89961 - DNA, 38 bp, Artificial Sequence
  primer
gtaaaacgacggccagttgggtgacagagcaagactgt

SEQ ID NO: 89962 - DNA, 21 bp, Artificial Sequence
  primer
ccggccgagaataaggtaaac

SEQ ID NO: 89963 - DNA, 21 bp, Artificial Sequence
  primer
gctatgcagatcacctccacc

SEQ ID NO: 89964 - DNA, 40 bp, Artificial Sequence
  primer
gtaaaacgacggccagtccactgcctcttgaaacagatac

SEQ ID NO: 89965 - DNA, 21 bp, Artificial Sequence
  primer
aaactgagccttcacactgcc

SEQ ID NO: 89966 - DNA, 22 bp, Artificial Sequence
  primer
gtccgaatgtagaaatggaacc

SEQ ID NO: 89967 - DNA, 22 bp, Artificial Sequence
  primer
accttgtaagcctggagtcaac

SEQ ID NO: 89968 - DNA, 24 bp, Artificial Sequence
  primer
gcacttcatttaagaatctctggg

SEQ ID NO: 89969 - DNA, 38 bp, Artificial Sequence
  primer
gtaaaacgacggccagttgttggccactatccaaacac

SEQ ID NO: 89970 - DNA, 38 bp, Artificial Sequence
  primer
gtaaaacgacggccagtcctgtgcaattcaaacttgtg

SEQ ID NO: 89971 - DNA, 19 bp, Artificial Sequence
  primer
gtgcccactcctcacacag

SEQ ID NO: 89972 - DNA, 40 bp, Artificial Sequence
  primer
gtaaaacgacggccagtcatgaaaggtgctgtaatcaagg

SEQ ID NO: 89973 - DNA, 39 bp, Artificial Sequence
  primer
gtaaaacgacggccagtccactctaggcattaccagacc

SEQ ID NO: 89974 - DNA, 19 bp, Artificial Sequence
  primer
cacgggcaagaagagaagc

SEQ ID NO: 89975 - DNA, 35 bp, Artificial Sequence
  primer
gtaaaacgacggccagtgcaggaaacgagtgcagg

SEQ ID NO: 89976 - DNA, 35 bp, Artificial Sequence
  primer
gtaaaacgacggccagtgaccttcgacccacgctc

SEQ ID NO: 89977 - DNA, 18 bp, Artificial Sequence
  primer
accaagactgcgccactg

SEQ ID NO: 89978 - DNA, 39 bp, Artificial Sequence
  primer
gtaaaacgacggccagtggcaacatagtgatcccatctc

SEQ ID NO: 89979 - DNA, 37 bp, Artificial Sequence
  primer
gtaaaacgacggccagtagcagtgaccagagtggtgg

SEQ ID NO: 89980 - DNA, 38 bp, Artificial Sequence
  primer
gtaaaacgacggccagtgcataatgggtgcctcaactg

SEQ ID NO: 89981 - DNA, 21 bp, Artificial Sequence
  primer
ctttatgcctgtgggctcttt

SEQ ID NO: 89982 - DNA, 21 bp, Artificial Sequence
  primer
gtgaatacgctagcaaccacg

SEQ ID NO: 89983 - DNA, 20 bp, Artificial Sequence
  primer
caaagaggaagagtgacggc

SEQ ID NO: 89984 - DNA, 21 bp, Artificial Sequence
  primer
gcgtcacatttcctgatgaag

SEQ ID NO: 89985 - DNA, 37 bp, Artificial Sequence
  primer
gtaaaacgacggccagtgagctagcatctctggcagg

SEQ ID NO: 89986 - DNA, 21 bp, Artificial Sequence
  primer
tatagtctggccattccaggg

SEQ ID NO: 89987 - DNA, 38 bp, Artificial Sequence
  primer
gtaaaacgacggccagtcacacccaaacaaacttctgg

SEQ ID NO: 89988 - DNA, 19 bp, Artificial Sequence
  primer
gagtctgggcctcagcaag

SEQ ID NO: 89989 - DNA, 21 bp, Artificial Sequence
  primer
gtgcatttagtgcagaggcag

SEQ ID NO: 89990 - DNA, 20 bp, Artificial Sequence
  primer
aaggccaccaacagacattc

SEQ ID NO: 89991 - DNA, 38 bp, Artificial Sequence
  primer
gtaaaacgacggccagtagaaagcagcactcttctgcc

SEQ ID NO: 89992 - DNA, 21 bp, Artificial Sequence
  primer
caccatcagcacctcactgtc

SEQ ID NO: 89993 - DNA, 21 bp, Artificial Sequence
  primer
tccatctcaaagttctcaccg

SEQ ID NO: 89994 - DNA, 21 bp, Artificial Sequence
  primer
ccttacacgcaagccctagac

SEQ ID NO: 89995 - DNA, 21 bp, Artificial Sequence
  primer
acccaaagacgggatttattg

SEQ ID NO: 89996 - DNA, 37 bp, Artificial Sequence
  primer
gtaaaacgacggccagtgccctcctaaatcaaccagc

SEQ ID NO: 89997 - DNA, 44 bp, Artificial Sequence
  primer
gtaaaacgacggccagtggtctaacagggatttagtaaaggaca

SEQ ID NO: 89998 - DNA, 40 bp, Artificial Sequence
  primer
gtaaaacgacggccagtaatgaatgtaaatcctgtggctg

SEQ ID NO: 89999 - DNA, 44 bp, Artificial Sequence
  primer
gtaaaacgacggccagtcatacataacaggcaattattcgtaaa

SEQ ID NO: 90000 - DNA, 38 bp, Artificial Sequence
  primer
gtaaaacgacggccagtgacgaaatgctagggcttcac

SEQ ID NO: 90001 - DNA, 20 bp, Artificial Sequence
  primer
gggaatcttgaacccaggag

SEQ ID NO: 90002 - DNA, 38 bp, Artificial Sequence
  primer
gtaaaacgacggccagttcacgtcagttgttcctggag

SEQ ID NO: 90003 - DNA, 21 bp, Artificial Sequence
  primer
acgagcagcatgcacagtatc

SEQ ID NO: 90004 - DNA, 38 bp, Artificial Sequence
  primer
gtaaaacgacggccagtgcaactagtgggaagtgtggg

SEQ ID NO: 90005 - DNA, 21 bp, Artificial Sequence
  primer
gtcacaggagaattgcacagc

SEQ ID NO: 90006 - DNA, 21 bp, Artificial Sequence
  primer
cccgtgtcactcttcacacac

SEQ ID NO: 90007 - DNA, 21 bp, Artificial Sequence
  primer
ggagtcttatgcagccctttc

SEQ ID NO: 90008 - DNA, 38 bp, Artificial Sequence
  primer
gtaaaacgacggccagtacaaacagggaagcaccagtc

SEQ ID NO: 90009 - DNA, 38 bp, Artificial Sequence
  primer
gtaaaacgacggccagtcagctatgaaccacgaagctg

SEQ ID NO: 90010 - DNA, 38 bp, Artificial Sequence
  primer
gtaaaacgacggccagtctggtctgtaaacctgtgccc

SEQ ID NO: 90011 - DNA, 36 bp, Artificial Sequence
  primer
gtaaaacgacggccagtcttggctgaggcagctttc

SEQ ID NO: 90012 - DNA, 21 bp, Artificial Sequence
  primer
tgggatagagggtggtagcag

SEQ ID NO: 90013 - DNA, 38 bp, Artificial Sequence
  primer
gtaaaacgacggccagtcaaaggccaatttattcacgg

SEQ ID NO: 90014 - DNA, 38 bp, Artificial Sequence
  primer
gtaaaacgacggccagtgggagcttgcctctcattagg

SEQ ID NO: 90015 - DNA, 37 bp, Artificial Sequence
  primer
gtaaaacgacggccagtgtcttggcaaggcaggaaac

SEQ ID NO: 90016 - DNA, 38 bp, Artificial Sequence
  primer
gtaaaacgacggccagttgcaactcctaggctcaagtg

SEQ ID NO: 90017 - DNA, 38 bp, Artificial Sequence
  primer
gtaaaacgacggccagtccctctaagccaatatgcagg

SEQ ID NO: 90018 - DNA, 23 bp, Artificial Sequence
  primer
tttgtgaaggcagtatgtgattc

SEQ ID NO: 90019 - DNA, 21 bp, Artificial Sequence
  primer
cagctcacagctggttcacac

SEQ ID NO: 90020 - DNA, 39 bp, Artificial Sequence
  primer
gtaaaacgacggccagttagccaaggtattaccggaagc

SEQ ID NO: 90021 - DNA, 20 bp, Artificial Sequence
  primer
tgggcaacgtgctaagactc

SEQ ID NO: 90022 - DNA, 21 bp, Artificial Sequence
  primer
atacggacaccatttcttgcc

SEQ ID NO: 90023 - DNA, 23 bp, Artificial Sequence
  primer
tcatcccttcctaataatccctg

SEQ ID NO: 90024 - DNA, 41 bp, Artificial Sequence
  primer
gtaaaacgacggccagttcttccaactgtaacgttctatgg

SEQ ID NO: 90025 - DNA, 21 bp, Artificial Sequence
  primer
cttcaacctgggctaaagctg

SEQ ID NO: 90026 - DNA, 25 bp, Artificial Sequence
  primer
aacaatgagctatacatgacccaag

SEQ ID NO: 90027 - DNA, 21 bp, Artificial Sequence
  primer
ggattactacaggcgtgaggc

SEQ ID NO: 90028 - DNA, 25 bp, Artificial Sequence
  primer
ctttctttggtaagacattgagagg

SEQ ID NO: 90029 - DNA, 43 bp, Artificial Sequence
  primer
gtaaaacgacggccagtctccactcttcgttcctgttataagt

SEQ ID NO: 90030 - DNA, 21 bp, Artificial Sequence
  primer
tttacaagatggttggcaggg

SEQ ID NO: 90031 - DNA, 21 bp, Artificial Sequence
  primer
cagatttggtttgtgggtcac

SEQ ID NO: 90032 - DNA, 38 bp, Artificial Sequence
  primer
gtaaaacgacggccagttctcttacgttggcggtaagg

SEQ ID NO: 90033 - DNA, 21 bp, Artificial Sequence
  primer
tgacctctgaccacctcaagt

SEQ ID NO: 90034 - DNA, 38 bp, Artificial Sequence
  primer
gtaaaacgacggccagtatgcctgcacctttaaagacc

SEQ ID NO: 90035 - DNA, 44 bp, Artificial Sequence
  primer
gtaaaacgacggccagtactgataagtatcatgtaatgcagagc

SEQ ID NO: 90036 - DNA, 21 bp, Artificial Sequence
  primer
tgcacacctgtagtcccactt

SEQ ID NO: 90037 - DNA, 39 bp, Artificial Sequence
  primer
gtaaaacgacggccagtggaatgctaaggctttgttgag

SEQ ID NO: 90038 - DNA, 39 bp, Artificial Sequence
  primer
gtaaaacgacggccagtcccatggatactgatggatagc

SEQ ID NO: 90039 - DNA, 22 bp, Artificial Sequence
  primer
aatgggtaagagttctccctgc

SEQ ID NO: 90040 - DNA, 39 bp, Artificial Sequence
  primer
gtaaaacgacggccagtggaccattaggcttccaaactc

SEQ ID NO: 90041 - DNA, 27 bp, Artificial Sequence
  primer
agtaatgataacaaagtcagcctcttt

SEQ ID NO: 90042 - DNA, 21 bp, Artificial Sequence
  primer
catctcaagccacccttcttg

SEQ ID NO: 90043 - DNA, 21 bp, Artificial Sequence
  primer
gagaagcagagtggcacaacc

SEQ ID NO: 90044 - DNA, 21 bp, Artificial Sequence
  primer
tctggatctcttgacctcgtg

SEQ ID NO: 90045 - DNA, 39 bp, Artificial Sequence
  primer
gtaaaacgacggccagtcaaattgagtttaagggccaag

SEQ ID NO: 90046 - DNA, 20 bp, Artificial Sequence
  primer
cccaaactcaaccacagcac

SEQ ID NO: 90047 - DNA, 19 bp, Artificial Sequence
  primer
accctcctgctgagtgcag

SEQ ID NO: 90048 - DNA, 27 bp, Artificial Sequence
  primer
cagcgtgagaatagactaatacagtca

SEQ ID NO: 90049 - DNA, 22 bp, Artificial Sequence
  primer
cccattgttccttgaaattgac

SEQ ID NO: 90050 - DNA, 21 bp, Artificial Sequence
  primer
cactggtaaacatggtggcag

SEQ ID NO: 90051 - DNA, 37 bp, Artificial Sequence
  primer
gtaaaacgacggccagtcgtgtcccgataaagctgtc

SEQ ID NO: 90052 - DNA, 18 bp, Artificial Sequence
  primer
aaattagcacggccctcg

SEQ ID NO: 90053 - DNA, 24 bp, Artificial Sequence
  primer
gctgaacgtttatctaaggctgac

SEQ ID NO: 90054 - DNA, 38 bp, Artificial Sequence
  primer
gtaaaacgacggccagttccaattcctgattcccagac

SEQ ID NO: 90055 - DNA, 24 bp, Artificial Sequence
  primer
ggagggatacacagattcaaagtg

SEQ ID NO: 90056 - DNA, 46 bp, Artificial Sequence
  primer
gtaaaacgacggccagtgcctatatacatttctagctccaagataa

SEQ ID NO: 90057 - DNA, 27 bp, Artificial Sequence
  primer
aacaaatatataacgagcaagttcacc

SEQ ID NO: 90058 - DNA, 21 bp, Artificial Sequence
  primer
ctgtctcaggatgtggcaaag

SEQ ID NO: 90059 - DNA, 44 bp, Artificial Sequence
  primer
gtaaaacgacggccagtcacacattaggccataagtaaattctc

SEQ ID NO: 90060 - DNA, 27 bp, Artificial Sequence
  primer
agatattgcattgactcttaaaggaag

SEQ ID NO: 90061 - DNA, 25 bp, Artificial Sequence
  primer
tgatttagctcaaggtactatgcaa

SEQ ID NO: 90062 - DNA, 23 bp, Artificial Sequence
  primer
acctacataacttcacgcgtacc

SEQ ID NO: 90063 - DNA, 43 bp, Artificial Sequence
  primer
gtaaaacgacggccagttgtttaaccatcttgatttaaccacc

SEQ ID NO: 90064 - DNA, 39 bp, Artificial Sequence
  primer
gtaaaacgacggccagtagaagcatctcaaggagcagag

SEQ ID NO: 90065 - DNA, 21 bp, Artificial Sequence
  primer
tgctaagggacaaagcagtcc

SEQ ID NO: 90066 - DNA, 21 bp, Artificial Sequence
  primer
agaattcacatcaccttgggc

SEQ ID NO: 90067 - DNA, 21 bp, Artificial Sequence
  primer
ttacaggaaaggaaggccaac

SEQ ID NO: 90068 - DNA, 38 bp, Artificial Sequence
  primer
gtaaaacgacggccagttacagtaccatgaaggtcgcc

SEQ ID NO: 90069 - DNA, 38 bp, Artificial Sequence
  primer
gtaaaacgacggccagtcaaataacaggcagcagatgg

SEQ ID NO: 90070 - DNA, 22 bp, Artificial Sequence
  primer
aagtatcttcttcggcccactg

SEQ ID NO: 90071 - DNA, 39 bp, Artificial Sequence
  primer
gtaaaacgacggccagttgaggaggaaggtagacactgg

SEQ ID NO: 90072 - DNA, 38 bp, Artificial Sequence
  primer
gtaaaacgacggccagtgtcagcagagacttcagaccc

SEQ ID NO: 90073 - DNA, 27 bp, Artificial Sequence
  primer
tctcatagaatgatgatattacagcaa

SEQ ID NO: 90074 - DNA, 21 bp, Artificial Sequence
  primer
aactggcttgagccttagcac

SEQ ID NO: 90075 - DNA, 41 bp, Artificial Sequence
  primer
gtaaaacgacggccagtaacaagccacaatgatatcaacag

SEQ ID NO: 90076 - DNA, 39 bp, Artificial Sequence
  primer
gtaaaacgacggccagttttgctctgatattccaaaccc

SEQ ID NO: 90077 - DNA, 21 bp, Artificial Sequence
  primer
aagttcagcaacctaaacggc

SEQ ID NO: 90078 - DNA, 39 bp, Artificial Sequence
  primer
gtaaaacgacggccagtttcactttccctggtttctttc

SEQ ID NO: 90079 - DNA, 42 bp, Artificial Sequence
  primer
gtaaaacgacggccagtacatgtgaccatagaatttgatctg

SEQ ID NO: 90080 - DNA, 25 bp, Artificial Sequence
  primer
caacagaaccttgttatagccagac

SEQ ID NO: 90081 - DNA, 38 bp, Artificial Sequence
  primer
gtaaaacgacggccagttaagttggttgtgacctgggc

SEQ ID NO: 90082 - DNA, 22 bp, Artificial Sequence
  primer
caaccaaattcaagtcatggtg

SEQ ID NO: 90083 - DNA, 38 bp, Artificial Sequence
  primer
gtaaaacgacggccagtatgcttatggacaggcacttc

SEQ ID NO: 90084 - DNA, 40 bp, Artificial Sequence
  primer
gtaaaacgacggccagtccctgaaacctgtgatgtaaatg

SEQ ID NO: 90085 - DNA, 41 bp, Artificial Sequence
  primer
gtaaaacgacggccagtcacaatgccatagtctcagcatac

SEQ ID NO: 90086 - DNA, 37 bp, Artificial Sequence
  primer
gtaaaacgacggccagtcagagccattctggagatgc

SEQ ID NO: 90087 - DNA, 21 bp, Artificial Sequence
  primer
ctctaagcctcagttcgctca

SEQ ID NO: 90088 - DNA, 42 bp, Artificial Sequence
  primer
gtaaaacgacggccagtcagagctaaatgttgcaagttatcc

SEQ ID NO: 90089 - DNA, 22 bp, Artificial Sequence
  primer
tttcggccaaatttcttctaat

SEQ ID NO: 90090 - DNA, 37 bp, Artificial Sequence
  primer
gtaaaacgacggccagtgcaaaccaaatggctgagac

SEQ ID NO: 90091 - DNA, 19 bp, Artificial Sequence
  primer
cagagcttgcctcctcacc

SEQ ID NO: 90092 - DNA, 37 bp, Artificial Sequence
  primer
gtaaaacgacggccagtgggacctccagatggtaagg

SEQ ID NO: 90093 - DNA, 21 bp, Artificial Sequence
  primer
ttgatggcatacatctcctgg

SEQ ID NO: 90094 - DNA, 38 bp, Artificial Sequence
  primer
gtaaaacgacggccagtggtggatgcttcctactggtc

SEQ ID NO: 90095 - DNA, 20 bp, Artificial Sequence
  primer
agctggaccttgagcttgtg

SEQ ID NO: 90096 - DNA, 38 bp, Artificial Sequence
  primer
gtaaaacgacggccagttgtctgcatctgacaaatccc

SEQ ID NO: 90097 - DNA, 18 bp, Artificial Sequence
  primer
caggcagaggaagcgaag

SEQ ID NO: 90098 - DNA, 38 bp, Artificial Sequence
  primer
gtaaaacgacggccagtctgcttacttcaatcaccggc

SEQ ID NO: 90099 - DNA, 23 bp, Artificial Sequence
  primer
aagctattgtaatgtgctgggtg

SEQ ID NO: 90100 - DNA, 24 bp, Artificial Sequence
  primer
tggaggaagtcacaaattatgaag

SEQ ID NO: 90101 - DNA, 41 bp, Artificial Sequence
  primer
gtaaaacgacggccagttctcatggacatgcaaagtaattc

SEQ ID NO: 90102 - DNA, 22 bp, Artificial Sequence
  primer
aatgtctccacggaatttgaag

SEQ ID NO: 90103 - DNA, 40 bp, Artificial Sequence
  primer
gtaaaacgacggccagttccgtctgtctcactctacaacc

SEQ ID NO: 90104 - DNA, 44 bp, Artificial Sequence
  primer
gtaaaacgacggccagttctaaatgctagctcacaatatcaaag

SEQ ID NO: 90105 - DNA, 22 bp, Artificial Sequence
  primer
aataaccctctcttcaccaggg

SEQ ID NO: 90106 - DNA, 23 bp, Artificial Sequence
  primer
gcaacatctttgaacctgtgaac

SEQ ID NO: 90107 - DNA, 38 bp, Artificial Sequence
  primer
gtaaaacgacggccagttagctgagggagctgccatac

SEQ ID NO: 90108 - DNA, 20 bp, Artificial Sequence
  primer
aaggccctgtcaatccaaag

SEQ ID NO: 90109 - DNA, 38 bp, Artificial Sequence
  primer
gtaaaacgacggccagtaagccgctttaagtgcttgag

SEQ ID NO: 90110 - DNA, 39 bp, Artificial Sequence
  primer
gtaaaacgacggccagttcactgcaaatgaaccattcag

SEQ ID NO: 90111 - DNA, 38 bp, Artificial Sequence
  primer
gtaaaacgacggccagtcccgttgtttggagaaagaat

SEQ ID NO: 90112 - DNA, 25 bp, Artificial Sequence
  primer
acaaatttgggaaactaaatagctg

SEQ ID NO: 90113 - DNA, 39 bp, Artificial Sequence
  primer
gtaaaacgacggccagtgcttctacatgggacaggaatg

SEQ ID NO: 90114 - DNA, 19 bp, Artificial Sequence
  primer
agtcagaggccgagggaac

SEQ ID NO: 90115 - DNA, 37 bp, Artificial Sequence
  primer
gtaaaacgacggccagtatcagtggaggtgggaggtc

SEQ ID NO: 90116 - DNA, 38 bp, Artificial Sequence
  primer
gtaaaacgacggccagtcctacgaatcacagcaggtcc

SEQ ID NO: 90117 - DNA, 21 bp, Artificial Sequence
  primer
tgaccctgatgtattggaacg

SEQ ID NO: 90118 - DNA, 21 bp, Artificial Sequence
  primer
ctcagtttatcctgcagctcg

SEQ ID NO: 90119 - DNA, 21 bp, Artificial Sequence
  primer
cacacacccacacagctatcc

SEQ ID NO: 90120 - DNA, 38 bp, Artificial Sequence
  primer
gtaaaacgacggccagtaaccacttccacgtgaaggac

SEQ ID NO: 90121 - DNA, 21 bp, Artificial Sequence
  primer
ttattgtgggtcaatctcggg

SEQ ID NO: 90122 - DNA, 21 bp, Artificial Sequence
  primer
gtgcagcttgacctctgtgtc

SEQ ID NO: 90123 - DNA, 38 bp, Artificial Sequence
  primer
gtaaaacgacggccagtccctgtctttagcattgctcc

SEQ ID NO: 90124 - DNA, 21 bp, Artificial Sequence
  primer
tgggtcttaggtgtctctggg

SEQ ID NO: 90125 - DNA, 37 bp, Artificial Sequence
  primer
gtaaaacgacggccagtactgaggagcagggtgaagc

SEQ ID NO: 90126 - DNA, 35 bp, Artificial Sequence
  primer
gtaaaacgacggccagtaagaggcaggccggagag

SEQ ID NO: 90127 - DNA, 21 bp, Artificial Sequence
  primer
cttgagagggaagtgggattg

SEQ ID NO: 90128 - DNA, 26 bp, Artificial Sequence
  primer
cgaagttgtctgacttgtaccatttc

SEQ ID NO: 90129 - DNA, 23 bp, Artificial Sequence
  primer
gggttacaactttgggatttagg

SEQ ID NO: 90130 - DNA, 21 bp, Artificial Sequence
  primer
cccttgcaagagggaattaac

SEQ ID NO: 90131 - DNA, 38 bp, Artificial Sequence
  primer
gtaaaacgacggccagtaagaagaactgcattcctggc

SEQ ID NO: 90132 - DNA, 23 bp, Artificial Sequence
  primer
gcaaactcacattatcatgcctt

SEQ ID NO: 90133 - DNA, 18 bp, Artificial Sequence
  primer
gccttccaaagtggtggc

SEQ ID NO: 90134 - DNA, 38 bp, Artificial Sequence
  primer
gtaaaacgacggccagtccagatccctgttctcaagtg

SEQ ID NO: 90135 - DNA, 21 bp, Artificial Sequence
  primer
ccaagtatgaccaccatttgc

SEQ ID NO: 90136 - DNA, 21 bp, Artificial Sequence
  primer
cttggttgaagctcttcaggg

SEQ ID NO: 90137 - DNA, 38 bp, Artificial Sequence
  primer
gtaaaacgacggccagtttgtccttcataaaggcctcc

SEQ ID NO: 90138 - DNA, 38 bp, Artificial Sequence
  primer
gtaaaacgacggccagtctcagtaagtgctctgggctg

SEQ ID NO: 90139 - DNA, 38 bp, Artificial Sequence
  primer
gtaaaacgacggccagttttcccaccagtttagatggg

SEQ ID NO: 90140 - DNA, 20 bp, Artificial Sequence
  primer
ctgagcaacactgcaggacc

SEQ ID NO: 90141 - DNA, 20 bp, Artificial Sequence
  primer
gacatgatttcgccatgttg

SEQ ID NO: 90142 - DNA, 37 bp, Artificial Sequence
  primer
gtaaaacgacggccagtagccaaagcattcactggac

SEQ ID NO: 90143 - DNA, 21 bp, Artificial Sequence
  primer
gttgatctcctctaccagcgg

SEQ ID NO: 90144 - DNA, 38 bp, Artificial Sequence
  primer
gtaaaacgacggccagtaacagtgtctgtccaggagcc

SEQ ID NO: 90145 - DNA, 22 bp, Artificial Sequence
  primer
gcctctctcacagactaccagc

SEQ ID NO: 90146 - DNA, 21 bp, Artificial Sequence
  primer
atctgcatgtcaaagaatgcg

SEQ ID NO: 90147 - DNA, 37 bp, Artificial Sequence
  primer
gtaaaacgacggccagtattggcagtttctgcccttc

SEQ ID NO: 90148 - DNA, 38 bp, Artificial Sequence
  primer
gtaaaacgacggccagttctagtgaggacacagggtcg

SEQ ID NO: 90149 - DNA, 38 bp, Artificial Sequence
  primer
gtaaaacgacggccagtcactcagattcagcaaggtgc

SEQ ID NO: 90150 - DNA, 21 bp, Artificial Sequence
  primer
aggccatgtcctcagagagtc

SEQ ID NO: 90151 - DNA, 20 bp, Artificial Sequence
  primer
gatctcgcagagctttggtc

SEQ ID NO: 90152 - DNA, 38 bp, Artificial Sequence
  primer
gtaaaacgacggccagtcctgggtgtgattaaagtggg

SEQ ID NO: 90153 - DNA, 21 bp, Artificial Sequence
  primer
acatcagccaaggttgtggtc

SEQ ID NO: 90154 - DNA, 22 bp, Artificial Sequence
  primer
cccagagaagaaacagagaggg

SEQ ID NO: 90155 - DNA, 20 bp, Artificial Sequence
  primer
ctgcatcgtgaagctctctg

SEQ ID NO: 90156 - DNA, 21 bp, Artificial Sequence
  primer
agcacagggaacagctctagg

SEQ ID NO: 90157 - DNA, 21 bp, Artificial Sequence
  primer
tttctagagccagcaagaggc

SEQ ID NO: 90158 - DNA, 18 bp, Artificial Sequence
  primer
gtcccacacccagcacag

SEQ ID NO: 90159 - DNA, 19 bp, Artificial Sequence
  primer
gcaggctgctgtaggaagc

SEQ ID NO: 90160 - DNA, 18 bp, Artificial Sequence
  primer
cacgtggtcgctgctctc

SEQ ID NO: 90161 - DNA, 38 bp, Artificial Sequence
  primer
gtaaaacgacggccagtcttgcttctctcctggtcctg

SEQ ID NO: 90162 - DNA, 22 bp, Artificial Sequence
  primer
tgggctaaatgtcctacaaagg

SEQ ID NO: 90163 - DNA, 39 bp, Artificial Sequence
  primer
gtaaaacgacggccagttgaacatgctacagcatcagaa

SEQ ID NO: 90164 - DNA, 21 bp, Artificial Sequence
  primer
tacaggtgtgagccactgttc

SEQ ID NO: 90165 - DNA, 38 bp, Artificial Sequence
  primer
gtaaaacgacggccagtacctgtttcaaaggcctcatt

SEQ ID NO: 90166 - DNA, 37 bp, Artificial Sequence
  primer
gtaaaacgacggccagtgaaggttccagagcacaagc

SEQ ID NO: 90167 - DNA, 38 bp, Artificial Sequence
  primer
gtaaaacgacggccagtgctgcaagttcctgtttgaca

SEQ ID NO: 90168 - DNA, 20 bp, Artificial Sequence
  primer
atgacagtcacttgagcccg

SEQ ID NO: 90169 - DNA, 36 bp, Artificial Sequence
  primer
gtaaaacgacggccagtaggtttgcacatgcactcg

SEQ ID NO: 90170 - DNA, 21 bp, Artificial Sequence
  primer
tatgatcatgccactgcactc

SEQ ID NO: 90171 - DNA, 39 bp, Artificial Sequence
  primer
gtaaaacgacggccagtccgagtcgaaatgtgattcttc

SEQ ID NO: 90172 - DNA, 21 bp, Artificial Sequence
  primer
gggctttattccatcgaccta

SEQ ID NO: 90173 - DNA, 22 bp, Artificial Sequence
  primer
tgggctaaatgtcctacaaagg

SEQ ID NO: 90174 - DNA, 21 bp, Artificial Sequence
  primer
ttgaacatgctacagcaccag

SEQ ID NO: 90175 - DNA, 21 bp, Artificial Sequence
  primer
tacaggtgtgagccactgttc

SEQ ID NO: 90176 - DNA, 38 bp, Artificial Sequence
  primer
gtaaaacgacggccagttctttaaacaaccctggagcc

SEQ ID NO: 90177 - DNA, 38 bp, Artificial Sequence
  primer
gtaaaacgacggccagttgacaacctgtcatcaatcca

SEQ ID NO: 90178 - DNA, 39 bp, Artificial Sequence
  primer
gtaaaacgacggccagttcagaaacgatcagaaacaccc

SEQ ID NO: 90179 - DNA, 35 bp, Artificial Sequence
  primer
gtaaaacgacggccagtcggagatcttgccactgc

SEQ ID NO: 90180 - DNA, 36 bp, Artificial Sequence; identical to SEQ ID NO: 90169
  primer

SEQ ID NO: 90181 - DNA, 21 bp, Artificial Sequence
  primer
tatgatcatgccactgcactc

SEQ ID NO: 90182 - DNA, 38 bp, Artificial Sequence
  primer
gtaaaacgacggccagtttgctttacccttgtcctgaa

SEQ ID NO: 90183 - DNA, 21 bp, Artificial Sequence
  primer
ttgcttccagtggtcaatgtc

SEQ ID NO: 90184 - DNA, 38 bp, Artificial Sequence
  primer
gtaaaacgacggccagttcgcttcttctcccagtaagc

SEQ ID NO: 90185 - DNA, 38 bp, Artificial Sequence
  primer
gtaaaacgacggccagtgaagaggagatgctcaatggc

SEQ ID NO: 90186 - DNA, 21 bp, Artificial Sequence
  primer
ctttgaagtcccttccagctc

SEQ ID NO: 90187 - DNA, 39 bp, Artificial Sequence
  primer
gtaaaacgacggccagtaccctctaagtgttgctccttg

SEQ ID NO: 90188 - DNA, 40 bp, Artificial Sequence
  primer
gtaaaacgacggccagtgggtactttggtttggttaggtg

SEQ ID NO: 90189 - DNA, 38 bp, Artificial Sequence
  primer
gtaaaacgacggccagtggagacggactttaggagctg

SEQ ID NO: 90190 - DNA, 19 bp, Artificial Sequence
  primer
acctgaacctgggaggcag

SEQ ID NO: 90191 - DNA, 39 bp, Artificial Sequence
  primer
gtaaaacgacggccagtgcaaacaaaggactcacaatgg

SEQ ID NO: 90192 - DNA, 21 bp, Artificial Sequence
  primer
ttggtttctggcattgtctct

SEQ ID NO: 90193 - DNA, 22 bp, Artificial Sequence
  primer
cagtgagctgtgatggcactac

SEQ ID NO: 90194 - DNA, 39 bp, Artificial Sequence
  primer
gtaaaacgacggccagttgacttgagtcctttgtgctcc

SEQ ID NO: 90195 - DNA, 20 bp, Artificial Sequence
  primer
ctgacctcaagcaatctgcc

SEQ ID NO: 90196 - DNA, 21 bp, Artificial Sequence
  primer
ccaaccctacctcccagctac

SEQ ID NO: 90197 - DNA, 23 bp, Artificial Sequence
  primer
ttcaaaccagttcaaatcagctc

SEQ ID NO: 90198 - DNA, 22 bp, Artificial Sequence
  primer
ttgttgggtaacaagatgggag

SEQ ID NO: 90199 - DNA, 38 bp, Artificial Sequence
  primer
gtaaaacgacggccagtttaagctccagcaggttggtc

SEQ ID NO: 90200 - DNA, 38 bp, Artificial Sequence
  primer
gtaaaacgacggccagtcagaatccagcaatacgaagg

SEQ ID NO: 90201 - DNA, 21 bp, Artificial Sequence
  primer
aatgtcgttaagcccagttcc

SEQ ID NO: 90202 - DNA, 21 bp, Artificial Sequence
  primer
aatgcaacaatccctccaatc

SEQ ID NO: 90203 - DNA, 21 bp, Artificial Sequence
  primer
cctgtctgctggtgttcaaag

SEQ ID NO: 90204 - DNA, 21 bp, Artificial Sequence
  primer
gtcaggtctcaccctagcctc

SEQ ID NO: 90205 - DNA, 21 bp, Artificial Sequence
  primer
acagtgatggtgatcagaggc

SEQ ID NO: 90206 - DNA, 38 bp, Artificial Sequence
  primer
gtaaaacgacggccagtggcccataaaggaatgaagac

SEQ ID NO: 90207 - DNA, 38 bp, Artificial Sequence
  primer
gtaaaacgacggccagtaagtccgtgattcaccaatcc

SEQ ID NO: 90208 - DNA, 21 bp, Artificial Sequence
  primer
ctctggacccagcttcttcac

SEQ ID NO: 90209 - DNA, 38 bp, Artificial Sequence
  primer
gtaaaacgacggccagtgatctgcgacacgctttagtg

SEQ ID NO: 90210 - DNA, 22 bp, Artificial Sequence
  primer
tctatcccactatggctcttgc

SEQ ID NO: 90211 - DNA, 38 bp, Artificial Sequence
  primer
gtaaaacgacggccagtcagttgaggtgtttgatgcag

SEQ ID NO: 90212 - DNA, 21 bp, Artificial Sequence
  primer
acattgtcagaggaaggctga

SEQ ID NO: 90213 - DNA, 20 bp, Artificial Sequence
  primer
ttggctgttgttgttctccc

SEQ ID NO: 90214 - DNA, 23 bp, Artificial Sequence
  primer
cacctctatataactgcccatgc

SEQ ID NO: 90215 - DNA, 39 bp, Artificial Sequence
  primer
gtaaaacgacggccagttccttgtgtctttgcctctctc

SEQ ID NO: 90216 - DNA, 38 bp, Artificial Sequence
  primer
gtaaaacgacggccagtattgccgttgatgatccatag

SEQ ID NO: 90217 - DNA, 21 bp, Artificial Sequence
  primer
ttctaacacagcctctgctgc

SEQ ID NO: 90218 - DNA, 21 bp, Artificial Sequence
  primer
cggaaacaagtttcaccatcc

SEQ ID NO: 90219 - DNA, 21 bp, Artificial Sequence
  primer
acctagagaatggcaacctcg

SEQ ID NO: 90220 - DNA, 38 bp, Artificial Sequence
  primer
gtaaaacgacggccagtgcagtgtcacataggcaggac

SEQ ID NO: 90221 - DNA, 36 bp, Artificial Sequence
  primer
gtaaaacgacggccagtccacaaataggcctctgcc

SEQ ID NO: 90222 - DNA, 38 bp, Artificial Sequence
  primer
gtaaaacgacggccagtccactgatcagacatttccaa

SEQ ID NO: 90223 - DNA, 38 bp, Artificial Sequence
  primer
gtaaaacgacggccagttcacccatggctcatagtcag

SEQ ID NO: 90224 - DNA, 21 bp, Artificial Sequence
  primer
tagcttccatgtcccagtgtg

SEQ ID NO: 90225 - DNA, 21 bp, Artificial Sequence
  primer
cacaagcaaggccactagttc

SEQ ID NO: 90226 - DNA, 38 bp, Artificial Sequence
  primer
gtaaaacgacggccagtagggtggctcctaggtattgg

SEQ ID NO: 90227 - DNA, 21 bp, Artificial Sequence
  primer
agtcttaggcctggaagctgg

SEQ ID NO: 90228 - DNA, 21 bp, Artificial Sequence
  primer
gagatggtcagcatcatgtgg

SEQ ID NO: 90229 - DNA, 38 bp, Artificial Sequence
  primer
gtaaaacgacggccagtaagcacagaaggaaaggatgc

SEQ ID NO: 90230 - DNA, 21 bp, Artificial Sequence
  primer
tgaccctgatcttgagcactg

SEQ ID NO: 90231 - DNA, 22 bp, Artificial Sequence
  primer
agagagcaaccggaagtgttac

SEQ ID NO: 90232 - DNA, 21 bp, Artificial Sequence
  primer
accacaatgtctggaggaagg

SEQ ID NO: 90233 - DNA, 38 bp, Artificial Sequence
  primer
gtaaaacgacggccagtcaccatgtgatgccttctacc

SEQ ID NO: 90234 - DNA, 21 bp, Artificial Sequence
  primer
gtgaaggtgtagccaggaagg

SEQ ID NO: 90235 - DNA, 21 bp, Artificial Sequence
  primer
ggtgttgtaatcaccagaggc

SEQ ID NO: 90236 - DNA, 21 bp, Artificial Sequence
  primer
caagtgagagggagtcaaggg

SEQ ID NO: 90237 - DNA, 21 bp, Artificial Sequence
  primer
taaacagaagcaggcaaatgg

SEQ ID NO: 90238 - DNA, 21 bp, Artificial Sequence
  primer
accagctccttgctcttcttc

SEQ ID NO: 90239 - DNA, 21 bp, Artificial Sequence
  primer
ggaaactggtgtagggctgag

SEQ ID NO: 90240 - DNA, 21 bp, Artificial Sequence
  primer
ccgcaacaacttctacctgtc

SEQ ID NO: 90241 - DNA, 38 bp, Artificial Sequence
  primer
gtaaaacgacggccagtgaatcctagtccaggccacag

SEQ ID NO: 90242 - DNA, 38 bp, Artificial Sequence
  primer
gtaaaacgacggccagtgagccacagtagccatgtcag

SEQ ID NO: 90243 - DNA, 21 bp, Artificial Sequence
  primer
aggatcaggatgggagaaagg

SEQ ID NO: 90244 - DNA, 36 bp, Artificial Sequence
  primer
gtaaaacgacggccagtgtccaggacgtggaactgg

SEQ ID NO: 90245 - DNA, 20 bp, Artificial Sequence
  primer
ctcagcactggagctgtgtg

SEQ ID NO: 90246 - DNA, 22 bp, Artificial Sequence
  primer
tggacagaagagtcagagaggg

SEQ ID NO: 90247 - DNA, 42 bp, Artificial Sequence
  primer
gtaaaacgacggccagttttagcatatcaaaccacctaagaa

SEQ ID NO: 90248 - DNA, 21 bp, Artificial Sequence
  primer
caacttgaccacagagcacct

SEQ ID NO: 90249 - DNA, 41 bp, Artificial Sequence
  primer
gtaaaacgacggccagttttggcttgatttactgctacttg

SEQ ID NO: 90250 - DNA, 40 bp, Artificial Sequence
  primer
gtaaaacgacggccagtccaatctgcaataatcccttagc

SEQ ID NO: 90251 - DNA, 38 bp, Artificial Sequence
  primer
gtaaaacgacggccagtcttcaatttccagatgggcag

SEQ ID NO: 90252 - DNA, 37 bp, Artificial Sequence
  primer
gtaaaacgacggccagtcactggatccactttgccac

SEQ ID NO: 90253 - DNA, 38 bp, Artificial Sequence
  primer
gtaaaacgacggccagtacccttacatgtgattggctg

SEQ ID NO: 90254 - DNA, 21 bp, Artificial Sequence
  primer
agctatcccatctcctcctcc

SEQ ID NO: 90255 - DNA, 39 bp, Artificial Sequence
  primer
gtaaaacgacggccagtagtgacacctttgaaacactgc

SEQ ID NO: 90256 - DNA, 37 bp, Artificial Sequence
  primer
gtaaaacgacggccagttcatcgatgctctgaaagcc

SEQ ID NO: 90257 - DNA, 39 bp, Artificial Sequence
  primer
gtaaaacgacggccagtcacgggaagattacagatgtgc

SEQ ID NO: 90258 - DNA, 21 bp, Artificial Sequence
  primer
ccactggagtaacttggcctc

SEQ ID NO: 90259 - DNA, 22 bp, Artificial Sequence
  primer
caagaggctgaatctcctgaag

SEQ ID NO: 90260 - DNA, 41 bp, Artificial Sequence
  primer
gtaaaacgacggccagtttcattaaacacctattccatccc

SEQ ID NO: 90261 - DNA, 18 bp, Artificial Sequence
  primer
tcaggcaattctcgtgcc

SEQ ID NO: 90262 - DNA, 38 bp, Artificial Sequence
  primer
gtaaaacgacggccagtgctcagaaagttcctcctccc

SEQ ID NO: 90263 - DNA, 20 bp, Artificial Sequence
  primer
aacagggcccattctctctc

SEQ ID NO: 90264 - DNA, 21 bp, Artificial Sequence
  primer
cacgaaggccatcttgatctc

SEQ ID NO: 90265 - DNA, 38 bp, Artificial Sequence
  primer
gtaaaacgacggccagtcagcatcctaaatcccaggtc

SEQ ID NO: 90266 - DNA, 21 bp, Artificial Sequence
  primer
aaggtctgactccagctccac

SEQ ID NO: 90267 - DNA, 20 bp, Artificial Sequence
  primer
aggtgaagctgaaagcctgc

SEQ ID NO: 90268 - DNA, 38 bp, Artificial Sequence
  primer
gtaaaacgacggccagtccctagctgtccacgtctgag

SEQ ID NO: 90269 - DNA, 21 bp, Artificial Sequence
  primer
taaccatcagcaggagtcagg

SEQ ID NO: 90270 - DNA, 38 bp, Artificial Sequence
  primer
gtaaaacgacggccagtgcagctcttgagtgtggtgtg

SEQ ID NO: 90271 - DNA, 21 bp, Artificial Sequence
  primer
accgcataggagtcagtggtc

SEQ ID NO: 90272 - DNA, 21 bp, Artificial Sequence
  primer
aagctgggtatcgctttcttg

SEQ ID NO: 90273 - DNA, 37 bp, Artificial Sequence
  primer
gtaaaacgacggccagtcggtggttctgtgtattggg

SEQ ID NO: 90274 - DNA, 41 bp, Artificial Sequence
  primer
gtaaaacgacggccagtcattgtcaccaatagttctctccc

SEQ ID NO: 90275 - DNA, 38 bp, Artificial Sequence
  primer
gtaaaacgacggccagtaggtggattctgccacttcag

SEQ ID NO: 90276 - DNA, 21 bp, Artificial Sequence
  primer
taggcaaggctcactgctctc

SEQ ID NO: 90277 - DNA, 38 bp, Artificial Sequence
  primer
gtaaaacgacggccagtaagagtcctggaatagctggg

SEQ ID NO: 90278 - DNA, 21 bp, Artificial Sequence
  primer
acagacagtggaaggattccg

SEQ ID NO: 90279 - DNA, 35 bp, Artificial Sequence
  primer
gtaaaacgacggccagtccttaactccgcggaccc

SEQ ID NO: 90280 - DNA, 38 bp, Artificial Sequence
  primer
gtaaaacgacggccagtactccatactctgccagcacc

SEQ ID NO: 90281 - DNA, 20 bp, Artificial Sequence
  primer
ctgggccttcttcctttcac

SEQ ID NO: 90282 - DNA, 38 bp, Artificial Sequence
  primer
gtaaaacgacggccagtgctacaaatccttggaccagc

SEQ ID NO: 90283 - DNA, 40 bp, Artificial Sequence
  primer
gtaaaacgacggccagtgagaagcttgtaaggtagcagca

SEQ ID NO: 90284 - DNA, 19 bp, Artificial Sequence
  primer
caactacccgcacctccac

SEQ ID NO: 90285 - DNA, 21 bp, Artificial Sequence
  primer
ccacaatgcctccagttacac

SEQ ID NO: 90286 - DNA, 18 bp, Artificial Sequence
  primer
gctttgtcccgggttctg

SEQ ID NO: 90287 - DNA, 21 bp, Artificial Sequence
  primer
tggtcctaaaggctgagcttc

SEQ ID NO: 90288 - DNA, 21 bp, Artificial Sequence
  primer
caatgttgcctgaagttgctg

SEQ ID NO: 90289 - DNA, 21 bp, Artificial Sequence
  primer
tgcgttggtcctcttcattag

SEQ ID NO: 90290 - DNA, 38 bp, Artificial Sequence
  primer
gtaaaacgacggccagtcaaacgaacttcaaccacctg

SEQ ID NO: 90291 - DNA, 22 bp, Artificial Sequence
  primer
cacagaaacatccttctcatgg

SEQ ID NO: 90292 - DNA, 21 bp, Artificial Sequence
  primer
tgttggaagtttggtgtctgg

SEQ ID NO: 90293 - DNA, 21 bp, Artificial Sequence
  primer
gtttcagaaaggcagacaggg

SEQ ID NO: 90294 - DNA, 21 bp, Artificial Sequence
  primer
caagcactatttccatctcgc

SEQ ID NO: 90295 - DNA, 40 bp, Artificial Sequence
  primer
gtaaaacgacggccagtccaagtgcctgtagaaattatgg

SEQ ID NO: 90296 - DNA, 39 bp, Artificial Sequence
  primer
gtaaaacgacggccagttcctcaaatctgtgaaggaagc

SEQ ID NO: 90297 - DNA, 38 bp, Artificial Sequence
  primer
gtaaaacgacggccagtgcatgacgcatacttgtgttg

SEQ ID NO: 90298 - DNA, 21 bp, Artificial Sequence
  primer
cagagaagtgagctggcagtg

SEQ ID NO: 90299 - DNA, 21 bp, Artificial Sequence
  primer
cacctgcaattccctttaagc

SEQ ID NO: 90300 - DNA, 22 bp, Artificial Sequence
  primer
ttacccagtgcagtacagaagc

SEQ ID NO: 90301 - DNA, 19 bp, Artificial Sequence
  primer
gagagacagccggcatagg

SEQ ID NO: 90302 - DNA, 35 bp, Artificial Sequence
  primer
gtaaaacgacggccagtactgagagagggtgcccg

SEQ ID NO: 90303 - DNA, 21 bp, Artificial Sequence
  primer
gaggattcaaagtccagggag

SEQ ID NO: 90304 - DNA, 38 bp, Artificial Sequence
  primer
gtaaaacgacggccagtgggagaaccagaggagctagg

SEQ ID NO: 90305 - DNA, 20 bp, Artificial Sequence
  primer
agctccagggagaaccagag

SEQ ID NO: 90306 - DNA, 36 bp, Artificial Sequence
  primer
gtaaaacgacggccagtatcagggcctggctagagg

SEQ ID NO: 90307 - DNA, 38 bp, Artificial Sequence
  primer
gtaaaacgacggccagtcagaaagacagtcaggttggc

SEQ ID NO: 90308 - DNA, 21 bp, Artificial Sequence
  primer
tgctccaaacaggaatcaatc

SEQ ID NO: 90309 - DNA, 21 bp, Artificial Sequence
  primer
tggcatgacaatctcagcatc

SEQ ID NO: 90310 - DNA, 37 bp, Artificial Sequence
  primer
gtaaaacgacggccagtttcctggcaatgtggagaag

SEQ ID NO: 90311 - DNA, 21 bp, Artificial Sequence
  primer
atgcacacctgacacacttcg

SEQ ID NO: 90312 - DNA, 20 bp, Artificial Sequence
  primer
gtacctgtctaaccgcacgc

SEQ ID NO: 90313 - DNA, 38 bp, Artificial Sequence
  primer
gtaaaacgacggccagtatgggtgcgtcctgtctttac

SEQ ID NO: 90314 - DNA, 20 bp, Artificial Sequence
  primer
ttctcgaactccagctccac

SEQ ID NO: 90315 - DNA, 21 bp, Artificial Sequence
  primer
ttcccacaactgctcattctc

SEQ ID NO: 90316 - DNA, 37 bp, Artificial Sequence
  primer
gtaaaacgacggccagtggagacggagagagaccctg

SEQ ID NO: 90317 - DNA, 38 bp, Artificial Sequence
  primer
gtaaaacgacggccagtgctcccattgagagagaactg

SEQ ID NO: 90318 - DNA, 21 bp, Artificial Sequence
  primer
agaccttgcctgcctgtagac

SEQ ID NO: 90319 - DNA, 21 bp, Artificial Sequence
  primer
aaagcagtgtggacaccattc

SEQ ID NO: 90320 - DNA, 39 bp, Artificial Sequence
  primer
gtaaaacgacggccagtcagctctttgtttgactgaagg

SEQ ID NO: 90321 - DNA, 21 bp, Artificial Sequence
  primer
ttcccagacacctccatactg

SEQ ID NO: 90322 - DNA, 38 bp, Artificial Sequence
  primer
gtaaaacgacggccagtaatgaatgggatgactccagg

SEQ ID NO: 90323 - DNA, 38 bp, Artificial Sequence
  primer
gtaaaacgacggccagtccaagctgagaagaagcatgg

SEQ ID NO: 90324 - DNA, 37 bp, Artificial Sequence
  primer
gtaaaacgacggccagttttgctttcaaggcacttcc

SEQ ID NO: 90325 - DNA, 37 bp, Artificial Sequence
  primer
gtaaaacgacggccagtggactgctgctctagcccac

SEQ ID NO: 90326 - DNA, 36 bp, Artificial Sequence
  primer
gtaaaacgacggccagtcttcaggaacctgtggcag

SEQ ID NO: 90327 - DNA, 37 bp, Artificial Sequence
  primer
gtaaaacgacggccagtctgagatgcaaacctccacc

SEQ ID NO: 90328 - DNA, 21 bp, Artificial Sequence
  primer
tctggtgaccaagcaagactc

SEQ ID NO: 90329 - DNA, 38 bp, Artificial Sequence
  primer
gtaaaacgacggccagttagtaggatccacgtgccctc

SEQ ID NO: 90330 - DNA, 38 bp, Artificial Sequence
  primer
gtaaaacgacggccagtaatgcatgtgaaatcgacgac

SEQ ID NO: 90331 - DNA, 38 bp, Artificial Sequence
  primer
gtaaaacgacggccagtttggtctgtgacctatgcctc

SEQ ID NO: 90332 - DNA, 38 bp, Artificial Sequence
  primer
gtaaaacgacggccagtaactaggagtgcctgcgtagc

SEQ ID NO: 90333 - DNA, 20 bp, Artificial Sequence
  primer
tcagagccatggacacacac

SEQ ID NO: 90334 - DNA, 22 bp, Artificial Sequence
  primer
gcatgctgccctccttattatc

SEQ ID NO: 90335 - DNA, 39 bp, Artificial Sequence
  primer
gtaaaacgacggccagtttctttcctgggatcttctgtg

SEQ ID NO: 90336 - DNA, 38 bp, Artificial Sequence
  primer
gtaaaacgacggccagtgttctcaccactcacagcgtc

SEQ ID NO: 90337 - DNA, 21 bp, Artificial Sequence
  primer
attgaagtggcatttgtggtg

SEQ ID NO: 90338 - DNA, 38 bp, Artificial Sequence
  primer
gtaaaacgacggccagttcctccaggaaagaactgcac

SEQ ID NO: 90339 - DNA, 38 bp, Artificial Sequence
  primer
gtaaaacgacggccagtttctcgcagctagtggacatc

SEQ ID NO: 90340 - DNA, 38 bp, Artificial Sequence
  primer
gtaaaacgacggccagtctctttgagccaatcccacag

SEQ ID NO: 90341 - DNA, 21 bp, Artificial Sequence
  primer
ggtcacactgcaagcaacttc

SEQ ID NO: 90342 - DNA, 22 bp, Artificial Sequence
  primer
tccgtatctctggttcttccag

SEQ ID NO: 90343 - DNA, 38 bp, Artificial Sequence
  primer
gtaaaacgacggccagttaatacacctcccgtggcttc

SEQ ID NO: 90344 - DNA, 21 bp, Artificial Sequence
  primer
gaacaagcttcctgtcttggc

SEQ ID NO: 90345 - DNA, 37 bp, Artificial Sequence
  primer
gtaaaacgacggccagtccctacacacatcccacacc

SEQ ID NO: 90346 - DNA, 20 bp, Artificial Sequence
  primer
ccacaaaccagcaagagagg

SEQ ID NO: 90347 - DNA, 21 bp, Artificial Sequence
  primer
aaccatttcacccaggaacac

SEQ ID NO: 90348 - DNA, 21 bp, Artificial Sequence
  primer
acgttaaagctgagcctggtc

SEQ ID NO: 90349 - DNA, 37 bp, Artificial Sequence
  primer
gtaaaacgacggccagtactgtgcctggccacattac

SEQ ID NO: 90350 - DNA, 40 bp, Artificial Sequence
  primer
gtaaaacgacggccagttgctaaatgtacctgagggaagg

SEQ ID NO: 90351 - DNA, 35 bp, Artificial Sequence
  primer
gtaaaacgacggccagtaactggccgggtggatag

SEQ ID NO: 90352 - DNA, 21 bp, Artificial Sequence
  primer
taagatggctcactttgtggg

SEQ ID NO: 90353 - DNA, 26 bp, Artificial Sequence
  primer
tgtaactaaatcagaccaagctctcc

SEQ ID NO: 90354 - DNA, 39 bp, Artificial Sequence
  primer
gtaaaacgacggccagtaagggttcatgtcatttcaagg

SEQ ID NO: 90355 - DNA, 38 bp, Artificial Sequence
  primer
gtaaaacgacggccagtggttggaaagcaccaattgac

SEQ ID NO: 90356 - DNA, 22 bp, Artificial Sequence
  primer
catgcatgggacatgttcttag

SEQ ID NO: 90357 - DNA, 22 bp, Artificial Sequence
  primer
gggctctgtatattgccatgtg

SEQ ID NO: 90358 - DNA, 36 bp, Artificial Sequence
  primer
gtaaaacgacggccagtggctccctgcctcataatc

SEQ ID NO: 90359 - DNA, 22 bp, Artificial Sequence
  primer
tggaaatccaagtgtccagaag

SEQ ID NO: 90360 - DNA, 21 bp, Artificial Sequence
  primer
tcgcacaaatgcttctaccag

SEQ ID NO: 90361 - DNA, 21 bp, Artificial Sequence
  primer
tccaaactacatcgcctcttc

SEQ ID NO: 90362 - DNA, 42 bp, Artificial Sequence
  primer
gtaaaacgacggccagtttgagaatttgatccatgtttcttt

SEQ ID NO: 90363 - DNA, 21 bp, Artificial Sequence
  primer
aaccattgaaacaggttggtg

SEQ ID NO: 90364 - DNA, 20 bp, Artificial Sequence
  primer
ctcattgcaagagggcagtg

SEQ ID NO: 90365 - DNA, 23 bp, Artificial Sequence
  primer
tgaatgttcacgtctctttcaga

SEQ ID NO: 90366 - DNA, 46 bp, Artificial Sequence
  primer
gtaaaacgacggccagtttcactattcactcaatctttatcttctg

SEQ ID NO: 90367 - DNA, 21 bp, Artificial Sequence
  primer
gtgggataaagcagttctggc

SEQ ID NO: 90368 - DNA, 21 bp, Artificial Sequence
  primer
tgacccagtcggtgtagaagc

SEQ ID NO: 90369 - DNA, 19 bp, Artificial Sequence
  primer
caggaaccagacctttggc

SEQ ID NO: 90370 - DNA, 37 bp, Artificial Sequence
  primer
gtaaaacgacggccagtgaacagggacagctggagac

SEQ ID NO: 90371 - DNA, 37 bp, Artificial Sequence
  primer
gtaaaacgacggccagtatgctaaggaagagcccacg

SEQ ID NO: 90372 - DNA, 21 bp, Artificial Sequence
  primer
tgcagatcctgaaattatggg

SEQ ID NO: 90373 - DNA, 21 bp, Artificial Sequence
  primer
agagctctcagacccatccag

SEQ ID NO: 90374 - DNA, 37 bp, Artificial Sequence
  primer
gtaaaacgacggccagtagtctgcccaggaagtttgg

SEQ ID NO: 90375 - DNA, 38 bp, Artificial Sequence
  primer
gtaaaacgacggccagtcatcacccacctgcaataaac

SEQ ID NO: 90376 - DNA, 21 bp, Artificial Sequence
  primer
ctctgaactcttcctttcccg

SEQ ID NO: 90377 - DNA, 27 bp, Artificial Sequence
  primer
tgttcatctttcattcaatgtttagaa

SEQ ID NO: 90378 - DNA, 20 bp, Artificial Sequence
  primer
tttacacagaggcactcggg

SEQ ID NO: 90379 - DNA, 42 bp, Artificial Sequence
  primer
gtaaaacgacggccagtcctttctagaactcatctgacacca

SEQ ID NO: 90380 - DNA, 21 bp, Artificial Sequence
  primer
agcaattctgcctgttgaaag

SEQ ID NO: 90381 - DNA, 38 bp, Artificial Sequence
  primer
gtaaaacgacggccagtgtgacactcagtaccaggccc

SEQ ID NO: 90382 - DNA, 21 bp, Artificial Sequence
  primer
ccaagaccaacagtgacaagg

SEQ ID NO: 90383 - DNA, 38 bp, Artificial Sequence
  primer
gtaaaacgacggccagtgacagtagaggaaggaaggcg

SEQ ID NO: 90384 - DNA, 21 bp, Artificial Sequence
  primer
tagcctgggtgacagtgagac

SEQ ID NO: 90385 - DNA, 21 bp, Artificial Sequence
  primer
ccctcacagctcttctgtctg

SEQ ID NO: 90386 - DNA, 38 bp, Artificial Sequence
  primer
gtaaaacgacggccagtgcaggctctctttctctccag

SEQ ID NO: 90387 - DNA, 38 bp, Artificial Sequence
  primer
gtaaaacgacggccagtgaagagaaggctaacgccaag

SEQ ID NO: 90388 - DNA, 38 bp, Artificial Sequence
  primer
gtaaaacgacggccagtgagaacaagggcatgctaagg

SEQ ID NO: 90389 - DNA, 21 bp, Artificial Sequence
  primer
gccttcagtaagctgtgctcc

SEQ ID NO: 90390 - DNA, 21 bp, Artificial Sequence
  primer
tagaagcaatttggctcaggg

SEQ ID NO: 90391 - DNA, 38 bp, Artificial Sequence
  primer
gtaaaacgacggccagtaaggcagagcagtagggacac

SEQ ID NO: 90392 - DNA, 38 bp, Artificial Sequence
  primer
gtaaaacgacggccagtctgcatatttcctgcttgtgg

SEQ ID NO: 90393 - DNA, 21 bp, Artificial Sequence
  primer
ttatttgtgcctcaatgcagc

SEQ ID NO: 90394 - DNA, 22 bp, Artificial Sequence
  primer
tgactacagttcccaaatggtg

SEQ ID NO: 90395 - DNA, 42 bp, Artificial Sequence
  primer
gtaaaacgacggccagttcaattcagggattagccttctaac

SEQ ID NO: 90396 - DNA, 27 bp, Artificial Sequence
  primer
tgttggtagaatctttaaatgacaagg

SEQ ID NO: 90397 - DNA, 21 bp, Artificial Sequence
  primer
tcagagaacgggatgtcacag

SEQ ID NO: 90398 - DNA, 25 bp, Artificial Sequence
  primer
tcaccaagtaagcttatcacagaag

SEQ ID NO: 90399 - DNA, 38 bp, Artificial Sequence
  primer
gtaaaacgacggccagtaatcagtgtggaatccagtgc

SEQ ID NO: 90400 - DNA, 20 bp, Artificial Sequence
  primer
gggccatgttcagacagttg

SEQ ID NO: 90401 - DNA, 21 bp, Artificial Sequence
  primer
tggctggttgaaatcattgtg

SEQ ID NO: 90402 - DNA, 38 bp, Artificial Sequence
  primer
gtaaaacgacggccagtgaatctagtatgggcaaggcg

SEQ ID NO: 90403 - DNA, 21 bp, Artificial Sequence
  primer
caagatggctctacctggctg

SEQ ID NO: 90404 - DNA, 39 bp, Artificial Sequence
  primer
gtaaaacgacggccagttgcatcctctcttacatgggac

SEQ ID NO: 90405 - DNA, 36 bp, Artificial Sequence
  primer
gtaaaacgacggccagtcccacctttcctttgcacc

SEQ ID NO: 90406 - DNA, 20 bp, Artificial Sequence
  primer
agatcgtcagccatgtccag

SEQ ID NO: 90407 - DNA, 38 bp, Artificial Sequence
  primer
gtaaaacgacggccagtcttctacaccgactgggtcag

SEQ ID NO: 90408 - DNA, 40 bp, Artificial Sequence
  primer
gtaaaacgacggccagtgcataggtgagtggcataacttg

SEQ ID NO: 90409 - DNA, 38 bp, Artificial Sequence
  primer
gtaaaacgacggccagtgaagcagaagctgaggaatgg

SEQ ID NO: 90410 - DNA, 24 bp, Artificial Sequence
  primer
cacaaaggattagaggcagagatt

SEQ ID NO: 90411 - DNA, 38 bp, Artificial Sequence
  primer
gtaaaacgacggccagtgggtatgaacaggcaggtcac

SEQ ID NO: 90412 - DNA, 38 bp, Artificial Sequence
  primer
gtaaaacgacggccagttaagctggatcccagtcacag

SEQ ID NO: 90413 - DNA, 40 bp, Artificial Sequence
  primer
gtaaaacgacggccagttttaagcatgctatggctttatg

SEQ ID NO: 90414 - DNA, 24 bp, Artificial Sequence
  primer
ttgaagtttgctattacatgtggc

SEQ ID NO: 90415 - DNA, 38 bp, Artificial Sequence
  primer
gtaaaacgacggccagtggctggagtacaatgacatgc

SEQ ID NO: 90416 - DNA, 21 bp, Artificial Sequence
  primer
ccatccgaatagggtaaatgg

SEQ ID NO: 90417 - DNA, 43 bp, Artificial Sequence
  primer
gtaaaacgacggccagtcaaactcatgacattaacagaagaca

SEQ ID NO: 90418 - DNA, 20 bp, Artificial Sequence
  primer
acaggcgcgtctaacaagtg

SEQ ID NO: 90419 - DNA, 20 bp, Artificial Sequence
  primer
acgggccatcagattctagc

SEQ ID NO: 90420 - DNA, 21 bp, Artificial Sequence
  primer
gagaggacagcacacaccaag

SEQ ID NO: 90421 - DNA, 21 bp, Artificial Sequence
  primer
actagccttgagcagaccagg

SEQ ID NO: 90422 - DNA, 38 bp, Artificial Sequence
  primer
gtaaaacgacggccagtgaaagatctggtgaaggagcc

SEQ ID NO: 90423 - DNA, 22 bp, Artificial Sequence
  primer
tttacagcccgagaagacagac

SEQ ID NO: 90424 - DNA, 38 bp, Artificial Sequence
  primer
gtaaaacgacggccagttggcctttaaccactaccagc

SEQ ID NO: 90425 - DNA, 38 bp, Artificial Sequence
  primer
gtaaaacgacggccagtcactcaaatcccaaaccagtg

SEQ ID NO: 90426 - DNA, 21 bp, Artificial Sequence
  primer
atgaccagcaactgggaagac

SEQ ID NO: 90427 - DNA, 21 bp, Artificial Sequence
  primer
ctagagccagaggacaggcac

SEQ ID NO: 90428 - DNA, 38 bp, Artificial Sequence
  primer
gtaaaacgacggccagtgtggagggtatctctgcaacc

SEQ ID NO: 90429 - DNA, 21 bp, Artificial Sequence
  primer
actgtcctccacacctggaac

SEQ ID NO: 90430 - DNA, 21 bp, Artificial Sequence
  primer
aaggtggacacagctctcagg

SEQ ID NO: 90431 - DNA, 20 bp, Artificial Sequence
  primer
agcagggaagagggtgagag

SEQ ID NO: 90432 - DNA, 20 bp, Artificial Sequence
  primer
gaaatccagccttccatgtg

SEQ ID NO: 90433 - DNA, 20 bp, Artificial Sequence
  primer
tttgctcccaagtaactggc

SEQ ID NO: 90434 - DNA, 21 bp, Artificial Sequence
  primer
ctacggctctgggactaggtg

SEQ ID NO: 90435 - DNA, 36 bp, Artificial Sequence
  primer
gtaaaacgacggccagtcctcgaagacagagggcag

SEQ ID NO: 90436 - DNA, 20 bp, Artificial Sequence
  primer
acagtgtgctggacgaggag

SEQ ID NO: 90437 - DNA, 21 bp, Artificial Sequence
  primer
ccctggaggtcaatacagcac

SEQ ID NO: 90438 - DNA, 21 bp, Artificial Sequence
  primer
cacgttcacaagcacaggaag

SEQ ID NO: 90439 - DNA, 19 bp, Artificial Sequence
  primer
acccagcacctcctagcac

SEQ ID NO: 90440 - DNA, 20 bp, Artificial Sequence
  primer
gtgctcctttgcctcacaag

SEQ ID NO: 90441 - DNA, 21 bp, Artificial Sequence
  primer
gcgaaataaggaatccacagg

SEQ ID NO: 90442 - DNA, 38 bp, Artificial Sequence
  primer
gtaaaacgacggccagtccatacgtctgcatccttcag

SEQ ID NO: 90443 - DNA, 20 bp, Artificial Sequence
  primer
acaaacagggccatatgctg

SEQ ID NO: 90444 - DNA, 18 bp, Artificial Sequence
  primer
acctgctggcctcagagc

SEQ ID NO: 90445 - DNA, 20 bp, Artificial Sequence
  primer
ccagatgtcaaacaccgtgc

SEQ ID NO: 90446 - DNA, 21 bp, Artificial Sequence
  primer
agtcctgagcaatccttgtcc

SEQ ID NO: 90447 - DNA, 21 bp, Artificial Sequence
  primer
gagttgaggtgaatgaagggc

SEQ ID NO: 90448 - DNA, 21 bp, Artificial Sequence
  primer
catgttccaggtgaggaccag

SEQ ID NO: 90449 - DNA, 21 bp, Artificial Sequence
  primer
agaggcccagagaaccctaac

SEQ ID NO: 90450 - DNA, 19 bp, Artificial Sequence
  primer
ccctcttcatctcctgggc

SEQ ID NO: 90451 - DNA, 38 bp, Artificial Sequence
  primer
gtaaaacgacggccagtcaatgcctgtcttgttgaagg

SEQ ID NO: 90452 - DNA, 21 bp, Artificial Sequence
  primer
gtctgtatcagcacagcctcc

SEQ ID NO: 90453 - DNA, 38 bp, Artificial Sequence
  primer
gtaaaacgacggccagtaggactggcagtgatgatgtc

SEQ ID NO: 90454 - DNA, 36 bp, Artificial Sequence
  primer
gtaaaacgacggccagtcacaggcctccctctctcc

SEQ ID NO: 90455 - DNA, 37 bp, Artificial Sequence
  primer
gtaaaacgacggccagtcagcgaaagagggaagaagg

SEQ ID NO: 90456 - DNA, 38 bp, Artificial Sequence
  primer
gtaaaacgacggccagtggatcacgaccaagtctaggg

SEQ ID NO: 90457 - DNA, 37 bp, Artificial Sequence
  primer
gtaaaacgacggccagtcagtctccctcctggtttcc

SEQ ID NO: 90458 - DNA, 38 bp, Artificial Sequence
  primer
gtaaaacgacggccagtcagggctgcagtaagcatctc

SEQ ID NO: 90459 - DNA, 36 bp, Artificial Sequence
  primer
gtaaaacgacggccagtgaaagggctccggattcag

SEQ ID NO: 90460 - DNA, 21 bp, Artificial Sequence
  primer
acagttcccactcattgggtc

SEQ ID NO: 90461 - DNA, 38 bp, Artificial Sequence
  primer
gtaaaacgacggccagtccatcaggacaagatgtttgg

SEQ ID NO: 90462 - DNA, 38 bp, Artificial Sequence
  primer
gtaaaacgacggccagtacagggaatatttcaggcagg

SEQ ID NO: 90463 - DNA, 38 bp, Artificial Sequence
  primer
gtaaaacgacggccagtctgtagatcctggtgcttggg

SEQ ID NO: 90464 - DNA, 21 bp, Artificial Sequence
  primer
agacacaggtcttgctctccc

SEQ ID NO: 90465 - DNA, 21 bp, Artificial Sequence
  primer
tttgcatcagtgagggatttc

SEQ ID NO: 90466 - DNA, 21 bp, Artificial Sequence
  primer
tcctgcgatgataccactttg

SEQ ID NO: 90467 - DNA, 21 bp, Artificial Sequence
  primer
ggtctgatatttgggtcaggc

SEQ ID NO: 90468 - DNA, 36 bp, Artificial Sequence
  primer
gtaaaacgacggccagttctgtgcagcttcacccac

SEQ ID NO: 90469 - DNA, 21 bp, Artificial Sequence
  primer
agaggaccacctccagacaag

SEQ ID NO: 90470 - DNA, 37 bp, Artificial Sequence
  primer
gtaaaacgacggccagtagtaagtgagggtggagccc

SEQ ID NO: 90471 - DNA, 22 bp, Artificial Sequence
  primer
tttctgtagctaggaccttggg

SEQ ID NO: 90472 - DNA, 21 bp, Artificial Sequence
  primer
ccatcctaccctctcccaaag

SEQ ID NO: 90473 - DNA, 21 bp, Artificial Sequence
  primer
tcctagagggagtttccagcc

SEQ ID NO: 90474 - DNA, 19 bp, Artificial Sequence
  primer
gagggtcacagagccttcg

SEQ ID NO: 90475 - DNA, 38 bp, Artificial Sequence
  primer
gtaaaacgacggccagtaaacagttggcaacacgattg

SEQ ID NO: 90476 - DNA, 37 bp, Artificial Sequence
  primer
gtaaaacgacggccagtcataacaaggcctcccaacc

SEQ ID NO: 90477 - DNA, 20 bp, Artificial Sequence
  primer
gggaggaggaaggtactggg

SEQ ID NO: 90478 - DNA, 21 bp, Artificial Sequence
  primer
caggaatgatggacacaccac

SEQ ID NO: 90479 - DNA, 20 bp, Artificial Sequence
  primer
aagttccaaagatcaccggg

SEQ ID NO: 90480 - DNA, 20 bp, Artificial Sequence
  primer
agaagaatggtgtgaacccg

SEQ ID NO: 90481 - DNA, 38 bp, Artificial Sequence
  primer
gtaaaacgacggccagtacttcagtgggaactggaacc

SEQ ID NO: 90482 - DNA, 21 bp, Artificial Sequence
  primer
aactgtgtgtgtccatgcctc

SEQ ID NO: 90483 - DNA, 38 bp, Artificial Sequence
  primer
gtaaaacgacggccagttgaagacagaacagggccttc

SEQ ID NO: 90484 - DNA, 38 bp, Artificial Sequence
  primer
gtaaaacgacggccagtccaaggtgatgactgaaccag

SEQ ID NO: 90485 - DNA, 18 bp, Artificial Sequence
  primer
caggaggctgtgctgacc

SEQ ID NO: 90486 - DNA, 38 bp, Artificial Sequence
  primer
gtaaaacgacggccagtaacaagtgaccctgttcctcc

SEQ ID NO: 90487 - DNA, 21 bp, Artificial Sequence
  primer
gggagaaacttcagccacttc

SEQ ID NO: 90488 - DNA, 38 bp, Artificial Sequence
  primer
gtaaaacgacggccagtaggaagttatgtcactccgcc

SEQ ID NO: 90489 - DNA, 38 bp, Artificial Sequence
  primer
gtaaaacgacggccagtattcacaaccaaaggtcaccc

SEQ ID NO: 90490 - DNA, 19 bp, Artificial Sequence
  primer
ggcgtcataaagagctccc

SEQ ID NO: 90491 - DNA, 36 bp, Artificial Sequence
  primer
gtaaaacgacggccagtcttggaaggtcgaggcaag

SEQ ID NO: 90492 - DNA, 18 bp, Artificial Sequence
  primer
acgtggctgctccgtttc

SEQ ID NO: 90493 - DNA, 38 bp, Artificial Sequence
  primer
gtaaaacgacggccagtttaaattccatgcctgctgtg

SEQ ID NO: 90494 - DNA, 21 bp, Artificial Sequence
  primer
ccataatcatcctcagtgccc

SEQ ID NO: 90495 - DNA, 38 bp, Artificial Sequence
  primer
gtaaaacgacggccagtagaagagcattacaggccagc

SEQ ID NO: 90496 - DNA, 21 bp, Artificial Sequence
  primer
gggatgaaagttgtaccggag

SEQ ID NO: 90497 - DNA, 38 bp, Artificial Sequence
  primer
gtaaaacgacggccagtgtgaaatacctgcaggcaacc

SEQ ID NO: 90498 - DNA, 20 bp, Artificial Sequence
  primer
ttatgcagtacggcacaggt

SEQ ID NO: 90499 - DNA, 39 bp, Artificial Sequence
  primer
gtaaaacgacggccagtcagatgcacaactcacatttgg

SEQ ID NO: 90500 - DNA, 40 bp, Artificial Sequence
  primer
gtaaaacgacggccagtgaaacttaccacacatcagccag

SEQ ID NO: 90501 - DNA, 22 bp, Artificial Sequence
  primer
aagcaccaagatttacctttgc

SEQ ID NO: 90502 - DNA, 38 bp, Artificial Sequence
  primer
gtaaaacgacggccagttgtcttgatcaatctggtccg

SEQ ID NO: 90503 - DNA, 38 bp, Artificial Sequence
  primer
gtaaaacgacggccagtcctttggcattgtgacatctg

SEQ ID NO: 90504 - DNA, 21 bp, Artificial Sequence
  primer
tccactgatgggctttgaaat

SEQ ID NO: 90505 - DNA, 21 bp, Artificial Sequence
  primer
aataccattacaggatccgcc

SEQ ID NO: 90506 - DNA, 42 bp, Artificial Sequence
  primer
gtaaaacgacggccagtcagcataatttaatcagcaatttcc

SEQ ID NO: 90507 - DNA, 39 bp, Artificial Sequence
  primer
gtaaaacgacggccagttgaataatcagcgttccaacag

SEQ ID NO: 90508 - DNA, 21 bp, Artificial Sequence
  primer
cccaaacagctatttcacagc

SEQ ID NO: 90509 - DNA, 21 bp, Artificial Sequence
  primer
aaaggctgagatggtctgtgg

SEQ ID NO: 90510 - DNA, 23 bp, Artificial Sequence
  primer
tgtttctggtctgtccctaaatc

SEQ ID NO: 90511 - DNA, 21 bp, Artificial Sequence
  primer
tcctgactagcatgcacaacc

SEQ ID NO: 90512 - DNA, 37 bp, Artificial Sequence
  primer
gtaaaacgacggccagtacacgcgatcattatgggag

SEQ ID NO: 90513 - DNA, 37 bp, Artificial Sequence
  primer
gtaaaacgacggccagtttcctgcctgggacacatac

SEQ ID NO: 90514 - DNA, 24 bp, Artificial Sequence
  primer
aaacgataggtactcaaatgtgcc

SEQ ID NO: 90515 - DNA, 43 bp, Artificial Sequence
  primer
gtaaaacgacggccagtcaccactatgtgtcttatcacgttag

SEQ ID NO: 90516 - DNA, 21 bp, Artificial Sequence
  primer
ccctaattgtcaggatgggtg

SEQ ID NO: 90517 - DNA, 21 bp, Artificial Sequence
  primer
tcagaacccaagaaccctcac

SEQ ID NO: 90518 - DNA, 37 bp, Artificial Sequence
  primer
gtaaaacgacggccagtcacaaactcgcagtcacctg

SEQ ID NO: 90519 - DNA, 21 bp, Artificial Sequence
  primer
atggaagagaacagacggcag

SEQ ID NO: 90520 - DNA, 38 bp, Artificial Sequence
  primer
gtaaaacgacggccagtggcccatgatttgagtaaagg

SEQ ID NO: 90521 - DNA, 37 bp, Artificial Sequence
  primer
gtaaaacgacggccagtacttggacctgggatgaagg

SEQ ID NO: 90522 - DNA, 21 bp, Artificial Sequence
  primer
ctagttggtgtccaggttggg

SEQ ID NO: 90523 - DNA, 37 bp, Artificial Sequence
  primer
gtaaaacgacggccagtaacccagtctcctcctcctg

SEQ ID NO: 90524 - DNA, 21 bp, Artificial Sequence
  primer
ttgtattccttggcccacttg

SEQ ID NO: 90525 - DNA, 38 bp, Artificial Sequence
  primer
gtaaaacgacggccagttggcatcatctggtctttgac

SEQ ID NO: 90526 - DNA, 20 bp, Artificial Sequence
  primer
tcctgacctttgatccaccc

SEQ ID NO: 90527 - DNA, 21 bp, Artificial Sequence
  primer
aacgtagcaagtggacgaacc

SEQ ID NO: 90528 - DNA, 38 bp, Artificial Sequence
  primer
gtaaaacgacggccagtcccaccctttacttcagcaag

SEQ ID NO: 90529 - DNA, 38 bp, Artificial Sequence
  primer
gtaaaacgacggccagttctggcccgtaggaagtagtc

SEQ ID NO: 90530 - DNA, 38 bp, Artificial Sequence
  primer
gtaaaacgacggccagttaggtgatgggagctttggag

SEQ ID NO: 90531 - DNA, 38 bp, Artificial Sequence
  primer
gtaaaacgacggccagtccttgggagtaaagctgatgg

SEQ ID NO: 90532 - DNA, 21 bp, Artificial Sequence
  primer
tcaagtgctctggaagtggtg

SEQ ID NO: 90533 - DNA, 18 bp, Artificial Sequence
  primer
gcttcctctccaggaccg

SEQ ID NO: 90534 - DNA, 20 bp, Artificial Sequence
  primer
gtcccttgtgggaaatgcac

SEQ ID NO: 90535 - DNA, 21 bp, Artificial Sequence
  primer
agagctgactgtacttccgcc

SEQ ID NO: 90536 - DNA, 20 bp, Artificial Sequence
  primer
aatcgacagccactgtgtcc

SEQ ID NO: 90537 - DNA, 21 bp, Artificial Sequence
  primer
cttcagcatgaggatggtctg

SEQ ID NO: 90538 - DNA, 38 bp, Artificial Sequence
  primer
gtaaaacgacggccagtcttaatgagcgccgacttctc

SEQ ID NO: 90539 - DNA, 19 bp, Artificial Sequence
  primer
gtctccagccagagagggt

SEQ ID NO: 90540 - DNA, 35 bp, Artificial Sequence
  primer
gtaaaacgacggccagtcccattctcagatcgccc

SEQ ID NO: 90541 - DNA, 23 bp, Artificial Sequence
  primer
gcaacagcaataccattaagcag

SEQ ID NO: 90542 - DNA, 35 bp, Artificial Sequence
  primer
gtaaaacgacggccagtagcagagctgccctgagc

SEQ ID NO: 90543 - DNA, 21 bp, Artificial Sequence
  primer
tttaagccagattccactgcc

SEQ ID NO: 90544 - DNA, 38 bp, Artificial Sequence
  primer
gtaaaacgacggccagtagctagagacctcgttgtggc

SEQ ID NO: 90545 - DNA, 38 bp, Artificial Sequence
  primer
gtaaaacgacggccagtcaagtgtgtcactgtgcgttc

SEQ ID NO: 90546 - DNA, 38 bp, Artificial Sequence
  primer
gtaaaacgacggccagtccatgggagagagtgagcttg

SEQ ID NO: 90547 - DNA, 21 bp, Artificial Sequence
  primer
tgatcctcccacctaaacctc

SEQ ID NO: 90548 - DNA, 37 bp, Artificial Sequence
  primer
gtaaaacgacggccagtacgtcagttccagatcgtgc

SEQ ID NO: 90549 - DNA, 21 bp, Artificial Sequence
  primer
agactccaaggttgccttcaa

SEQ ID NO: 90550 - DNA, 38 bp, Artificial Sequence
  primer
gtaaaacgacggccagtcaatgtctggtggttctcagg

SEQ ID NO: 90551 - DNA, 22 bp, Artificial Sequence
  primer
ttcctcttagtgctatggtggg

SEQ ID NO: 90552 - DNA, 22 bp, Artificial Sequence
  primer
catgaggagtaaaccgcacttc

SEQ ID NO: 90553 - DNA, 39 bp, Artificial Sequence
  primer
gtaaaacgacggccagtcctgccttcacaaataccaaac

SEQ ID NO: 90554 - DNA, 39 bp, Artificial Sequence
  primer
gtaaaacgacggccagttgcttctcgacacaacattagc

SEQ ID NO: 90555 - DNA, 37 bp, Artificial Sequence
  primer
gtaaaacgacggccagtaatgggtgggctctttgttc

SEQ ID NO: 90556 - DNA, 20 bp, Artificial Sequence
  primer
ccagcccttgagaaggtgtc

SEQ ID NO: 90557 - DNA, 21 bp, Artificial Sequence
  primer
cggactcttgagttctggacc

SEQ ID NO: 90558 - DNA, 38 bp, Artificial Sequence
  primer
gtaaaacgacggccagtactcgggcaagtttgtgaaag

SEQ ID NO: 90559 - DNA, 19 bp, Artificial Sequence
  primer
aacaaggtgggcaccagac

SEQ ID NO: 90560 - DNA, 37 bp, Artificial Sequence
  primer
gtaaaacgacggccagtcctgctcagttcctcttccc

SEQ ID NO: 90561 - DNA, 21 bp, Artificial Sequence
  primer
atgtacagatttgccagccac

SEQ ID NO: 90562 - DNA, 38 bp, Artificial Sequence
  primer
gtaaaacgacggccagtcaggttaaatgatgcccactg

SEQ ID NO: 90563 - DNA, 18 bp, Artificial Sequence
  primer
ggtcgggaagcccaactt

SEQ ID NO: 90564 - DNA, 18 bp, Artificial Sequence
  primer
aggtgtgagccatcgtgc

SEQ ID NO: 90565 - DNA, 21 bp, Artificial Sequence
  primer
gaactgaagtcagcctgggag

SEQ ID NO: 90566 - DNA, 21 bp, Artificial Sequence
  primer
tggtctgtggtcaaggtcaag

SEQ ID NO: 90567 - DNA, 21 bp, Artificial Sequence
  primer
ccaggttgtggtggttctagg

SEQ ID NO: 90568 - DNA, 39 bp, Artificial Sequence
  primer
gtaaaacgacggccagtggttaagtgcataaagatgcgg

SEQ ID NO: 90569 - DNA, 38 bp, Artificial Sequence
  primer
gtaaaacgacggccagttcatcctacacgaagccagag

SEQ ID NO: 90570 - DNA, 21 bp, Artificial Sequence
  primer
ccacaggtcagataggctttg

SEQ ID NO: 90571 - DNA, 21 bp, Artificial Sequence
  primer
agaaattcatcaacggaagcc

SEQ ID NO: 90572 - DNA, 38 bp, Artificial Sequence
  primer
gtaaaacgacggccagtttccgtcctaagaagcaggag

SEQ ID NO: 90573 - DNA, 21 bp, Artificial Sequence
  primer
gtacgtttaccaccaggcagc

SEQ ID NO: 90574 - DNA, 41 bp, Artificial Sequence
  primer
gtaaaacgacggccagtgccaacttagcctacatttagtgg

SEQ ID NO: 90575 - DNA, 18 bp, Artificial Sequence
  primer
atcattcgaacccgggag

SEQ ID NO: 90576 - DNA, 18 bp, Artificial Sequence
  primer
gggcacctgtagtcccag

SEQ ID NO: 90577 - DNA, 21 bp, Artificial Sequence
  primer
acgaggatattacacccaggc

SEQ ID NO: 90578 - DNA, 21 bp, Artificial Sequence
  primer
aggaaacgtagcttggtgagc

SEQ ID NO: 90579 - DNA, 38 bp, Artificial Sequence
  primer
gtaaaacgacggccagtgttgagcagtcacaacgcttc

SEQ ID NO: 90580 - DNA, 38 bp, Artificial Sequence
  primer
gtaaaacgacggccagtaaacatacattgccaggcatc

SEQ ID NO: 90581 - DNA, 38 bp, Artificial Sequence
  primer
gtaaaacgacggccagtggatagaggtcacgatccagg

SEQ ID NO: 90582 - DNA, 21 bp, Artificial Sequence
  primer
tcactgtagtttgggaggtgg

SEQ ID NO: 90583 - DNA, 38 bp, Artificial Sequence
  primer
gtaaaacgacggccagtagccaggacggatagattcag

SEQ ID NO: 90584 - DNA, 21 bp, Artificial Sequence
  primer
tgttagttcaggccttggagc

SEQ ID NO: 90585 - DNA, 38 bp, Artificial Sequence; identical to SEQ ID NO: 90583
  primer

SEQ ID NO: 90586 - DNA, 21 bp, Artificial Sequence
  primer
aaccttacagtcggttgctcc

SEQ ID NO: 90587 - DNA, 21 bp, Artificial Sequence
  primer
tcatcccgtctaccagacatc

SEQ ID NO: 90588 - DNA, 21 bp, Artificial Sequence
  primer
cagatcctgctgggtaaggac

SEQ ID NO: 90589 - DNA, 21 bp, Artificial Sequence
  primer
tcatccagcatattctcccac

SEQ ID NO: 90590 - DNA, 21 bp, Artificial Sequence
  primer
tgcagagaactgtaactgccc

SEQ ID NO: 90591 - DNA, 21 bp, Artificial Sequence
  primer
caccttggatcctgttaaggc

SEQ ID NO: 90592 - DNA, 21 bp, Artificial Sequence
  primer
tcacccttggagagattctgg

SEQ ID NO: 90593 - DNA, 38 bp, Artificial Sequence
  primer
gtaaaacgacggccagtcatgcacttgaggccagtaac

SEQ ID NO: 90594 - DNA, 21 bp, Artificial Sequence
  primer
actgttatacgaggttggcgg

SEQ ID NO: 90595 - DNA, 21 bp, Artificial Sequence
  primer
atctcagctattcctgcctgg

SEQ ID NO: 90596 - DNA, 21 bp, Artificial Sequence
  primer
aaggaaccttggagtgaggaa

SEQ ID NO: 90597 - DNA, 22 bp, Artificial Sequence
  primer
tgggcagaagtttctggtacac

SEQ ID NO: 90598 - DNA, 38 bp, Artificial Sequence
  primer
gtaaaacgacggccagtcacacagcatgacctgtttgc

SEQ ID NO: 90599 - DNA, 38 bp, Artificial Sequence
  primer
gtaaaacgacggccagtgagcttgggttggagataacc

SEQ ID NO: 90600 - DNA, 21 bp, Artificial Sequence
  primer
acatgccactttcctcccttc

SEQ ID NO: 90601 - DNA, 39 bp, Artificial Sequence
  primer
gtaaaacgacggccagttgctaagcactcttcatttccc

SEQ ID NO: 90602 - DNA, 38 bp, Artificial Sequence
  primer
gtaaaacgacggccagtaatgattgacacccacattgc

SEQ ID NO: 90603 - DNA, 43 bp, Artificial Sequence
  primer
gtaaaacgacggccagtttcttcatatattatgggtaccaacc

SEQ ID NO: 90604 - DNA, 39 bp, Artificial Sequence
  primer
gtaaaacgacggccagtttcagcagacactaagtggtgg

SEQ ID NO: 90605 - DNA, 18 bp, Artificial Sequence
  primer
cagcttctcccgcctctc

SEQ ID NO: 90606 - DNA, 21 bp, Artificial Sequence
  primer
ccagaaggtcttggacacagg

SEQ ID NO: 90607 - DNA, 38 bp, Artificial Sequence
  primer
gtaaaacgacggccagtaatgaaacacagtgctggctg

SEQ ID NO: 90608 - DNA, 21 bp, Artificial Sequence
  primer
ttcatgggcatgtagtaaggc

SEQ ID NO: 90609 - DNA, 21 bp, Artificial Sequence
  primer
tgcatggaaatctcttggacc

SEQ ID NO: 90610 - DNA, 39 bp, Artificial Sequence; identical to SEQ ID NO: 90604
  primer

SEQ ID NO: 90611 - DNA, 38 bp, Artificial Sequence
  primer
gtaaaacgacggccagtggtaaggcagacagatcccac

SEQ ID NO: 90612 - DNA, 38 bp, Artificial Sequence
  primer
gtaaaacgacggccagtggagttcctgtcactgggttg

SEQ ID NO: 90613 - DNA, 21 bp, Artificial Sequence
  primer
aagagaacggaacacctccac

SEQ ID NO: 90614 - DNA, 37 bp, Artificial Sequence
  primer
gtaaaacgacggccagtcagtgaggccagctgaagac

SEQ ID NO: 90615 - DNA, 21 bp, Artificial Sequence
  primer
tagtaattgggacctccagcg

SEQ ID NO: 90616 - DNA, 21 bp, Artificial Sequence
  primer
attacaggtgtgagcctttgc

SEQ ID NO: 90617 - DNA, 21 bp, Artificial Sequence
  primer
atcatcgcaaagtggaaactg

SEQ ID NO: 90618 - DNA, 22 bp, Artificial Sequence
  primer
gatgagaaggtccttgcatttg

SEQ ID NO: 90619 - DNA, 38 bp, Artificial Sequence
  primer
gtaaaacgacggccagtgtctaactgctccctccaacg

SEQ ID NO: 90620 - DNA, 38 bp, Artificial Sequence
  primer
gtaaaacgacggccagtagccggtctcatgtttgaaag

SEQ ID NO: 90621 - DNA, 38 bp, Artificial Sequence
  primer
gtaaaacgacggccagtcaggctcctaagtgtccctcc

SEQ ID NO: 90622 - DNA, 21 bp, Artificial Sequence
  primer
gactcacattcccagtgcttg

SEQ ID NO: 90623 - DNA, 22 bp, Artificial Sequence
  primer
cagagctcaaggaaagcaagac

SEQ ID NO: 90624 - DNA, 22 bp, Artificial Sequence
  primer
ttcagcctttgttcattcagtc

SEQ ID NO: 90625 - DNA, 38 bp, Artificial Sequence
  primer
gtaaaacgacggccagtagcaaccctttctttgtgtcc

SEQ ID NO: 90626 - DNA, 38 bp, Artificial Sequence
  primer
gtaaaacgacggccagtggctgatgatcctgtactccc

SEQ ID NO: 90627 - DNA, 21 bp, Artificial Sequence
  primer
ttccacgtataccacggtcac

SEQ ID NO: 90628 - DNA, 18 bp, Artificial Sequence
  primer
ctcgcgacctggtcttcc

SEQ ID NO: 90629 - DNA, 25 bp, Artificial Sequence
  primer
ttagccttatcgaccaatatttctg

SEQ ID NO: 90630 - DNA, 21 bp, Artificial Sequence
  primer
atagtttgggactgcaatggg

SEQ ID NO: 90631 - DNA, 38 bp, Artificial Sequence
  primer
gtaaaacgacggccagtttaggcaagatcccaccagtc

SEQ ID NO: 90632 - DNA, 37 bp, Artificial Sequence
  primer
gtaaaacgacggccagtgagccgactattgatgctgc

SEQ ID NO: 90633 - DNA, 22 bp, Artificial Sequence
  primer
gccaacaatcctgcagtgttac

SEQ ID NO: 90634 - DNA, 38 bp, Artificial Sequence
  primer
gtaaaacgacggccagtctggtcctgacaccttatggg

SEQ ID NO: 90635 - DNA, 21 bp, Artificial Sequence
  primer
tttagtggtgcctcgacactc

SEQ ID NO: 90636 - DNA, 37 bp, Artificial Sequence
  primer
gtaaaacgacggccagtctgaaaggcagggttctgtg

SEQ ID NO: 90637 - DNA, 38 bp, Artificial Sequence
  primer
gtaaaacgacggccagtctccctttaacagaggacggg

SEQ ID NO: 90638 - DNA, 21 bp, Artificial Sequence
  primer
gctcgtccaatcctgtagacc

SEQ ID NO: 90639 - DNA, 28 bp, Artificial Sequence
  primer
tgattcagctctaattaccataaagaaa

SEQ ID NO: 90640 - DNA, 44 bp, Artificial Sequence
  primer
gtaaaacgacggccagtgcacacttcttatactccaataaatgc

SEQ ID NO: 90641 - DNA, 22 bp, Artificial Sequence
  primer
gcagagaagtaaatgctgccat

SEQ ID NO: 90642 - DNA, 41 bp, Artificial Sequence
  primer
gtaaaacgacggccagtcaggcaattaaattcaggaaagaa

SEQ ID NO: 90643 - DNA, 45 bp, Artificial Sequence
  primer
gtaaaacgacggccagtaagccattaagacacctatataatgcta

SEQ ID NO: 90644 - DNA, 25 bp, Artificial Sequence
  primer
agagccacactaattaacacaatcc

SEQ ID NO: 90645 - DNA, 44 bp, Artificial Sequence
  primer
gtaaaacgacggccagtgtgagttatcaatgaataaagtgttgg

SEQ ID NO: 90646 - DNA, 39 bp, Artificial Sequence
  primer
gtaaaacgacggccagtggtttacatttacaagccctcg

SEQ ID NO: 90647 - DNA, 39 bp, Artificial Sequence
  primer
gtaaaacgacggccagtccagatctcactttcatggtgg

SEQ ID NO: 90648 - DNA, 39 bp, Artificial Sequence
  primer
gtaaaacgacggccagtttcaatctccatttgctagtgc

SEQ ID NO: 90649 - DNA, 39 bp, Artificial Sequence
  primer
gtaaaacgacggccagtgcaaggatataatccgttctcg

SEQ ID NO: 90650 - DNA, 22 bp, Artificial Sequence
  primer
cactagtaaacagtgcctggga

SEQ ID NO: 90651 - DNA, 40 bp, Artificial Sequence
  primer
gtaaaacgacggccagtaccagataagaatctaccaggct

SEQ ID NO: 90652 - DNA, 38 bp, Artificial Sequence
  primer
gtaaaacgacggccagtttagcagtttcttggagcacg

SEQ ID NO: 90653 - DNA, 45 bp, Artificial Sequence
  primer
gtaaaacgacggccagtttaggattaaatgtttgtggtaagagag

SEQ ID NO: 90654 - DNA, 25 bp, Artificial Sequence
  primer
tctgaagtgtttaagtagcttgtgg

SEQ ID NO: 90655 - DNA, 38 bp, Artificial Sequence
  primer
gtaaaacgacggccagtcccaaatcatctcaagtaggc

SEQ ID NO: 90656 - DNA, 40 bp, Artificial Sequence
  primer
gtaaaacgacggccagttgatgtgtatctttcattggcac

SEQ ID NO: 90657 - DNA, 41 bp, Artificial Sequence
  primer
gtaaaacgacggccagtaagtcccaaagtacaaatagaggg

SEQ ID NO: 90658 - DNA, 41 bp, Artificial Sequence
  primer
gtaaaacgacggccagtaaatgcgtagcatagtagactggg

SEQ ID NO: 90659 - DNA, 21 bp, Artificial Sequence
  primer
gacaggtagcgcaggtcgtag

SEQ ID NO: 90660 - DNA, 36 bp, Artificial Sequence
  primer
gtaaaacgacggccagtctctttgggcctttcctcc

SEQ ID NO: 90661 - DNA, 38 bp, Artificial Sequence
  primer
gtaaaacgacggccagtcgaaacttcataaccctgctg

SEQ ID NO: 90662 - DNA, 21 bp, Artificial Sequence
  primer
agccaaccctttcatttaagc

SEQ ID NO: 90663 - DNA, 39 bp, Artificial Sequence
  primer
gtaaaacgacggccagtaatgatccagagtgcttatcgc

SEQ ID NO: 90664 - DNA, 24 bp, Artificial Sequence
  primer
aaagaagcttgttctttcttccaa

SEQ ID NO: 90665 - DNA, 20 bp, Artificial Sequence
  primer
gtctccagaccgtggtcctc

SEQ ID NO: 90666 - DNA, 39 bp, Artificial Sequence
  primer
gtaaaacgacggccagtcctcaggcgtcttaacctacac

SEQ ID NO: 90667 - DNA, 40 bp, Artificial Sequence
  primer
gtaaaacgacggccagtttcttcatttctcaggtttggaa

SEQ ID NO: 90668 - DNA, 35 bp, Artificial Sequence
  primer
gtaaaacgacggccagtggtggtgcgaggtgactc

SEQ ID NO: 90669 - DNA, 38 bp, Artificial Sequence
  primer
gtaaaacgacggccagtgtagagcaaatagcctgtgcc

SEQ ID NO: 90670 - DNA, 39 bp, Artificial Sequence
  primer
gtaaaacgacggccagtcaatgaagcgagactgtgaaac

SEQ ID NO: 90671 - DNA, 20 bp, Artificial Sequence
  primer
tggaatgcccagtcactttc

SEQ ID NO: 90672 - DNA, 43 bp, Artificial Sequence
  primer
gtaaaacgacggccagttctaaattgacactgacatatgcctt

SEQ ID NO: 90673 - DNA, 38 bp, Artificial Sequence
  primer
gtaaaacgacggccagtcaccaggatgcagtctaaagg

SEQ ID NO: 90674 - DNA, 27 bp, Artificial Sequence
  primer
agagaattcaaatagtcactaacagcc

SEQ ID NO: 90675 - DNA, 39 bp, Artificial Sequence
  primer
gtaaaacgacggccagttgatttgaggttgtgtcctgtc

SEQ ID NO: 90676 - DNA, 21 bp, Artificial Sequence
  primer
gaatagggcttggaggcaatc

SEQ ID NO: 90677 - DNA, 39 bp, Artificial Sequence
  primer
gtaaaacgacggccagtgacacaggagagtcggtggtag

SEQ ID NO: 90678 - DNA, 38 bp, Artificial Sequence
  primer
gtaaaacgacggccagtgacaaagttcagtgtttgccc

SEQ ID NO: 90679 - DNA, 38 bp, Artificial Sequence
  primer
gtaaaacgacggccagttggagaaagggagccacatac

SEQ ID NO: 90680 - DNA, 21 bp, Artificial Sequence
  primer
gtttcccactgcctattcacc

SEQ ID NO: 90681 - DNA, 38 bp, Artificial Sequence
  primer
gtaaaacgacggccagtgaagggcccaatattagatgg

SEQ ID NO: 90682 - DNA, 37 bp, Artificial Sequence
  primer
gtaaaacgacggccagtgctacttgcaatgagctggc

SEQ ID NO: 90683 - DNA, 20 bp, Artificial Sequence
  primer
ggtggaggagacctgaaagg

SEQ ID NO: 90684 - DNA, 38 bp, Artificial Sequence
  primer
gtaaaacgacggccagtactgtttagacccatcccagc

SEQ ID NO: 90685 - DNA, 20 bp, Artificial Sequence
  primer
agagtggaaaggcagaaggg

SEQ ID NO: 90686 - DNA, 38 bp, Artificial Sequence
  primer
gtaaaacgacggccagtactccctggtaaggaccaagc

SEQ ID NO: 90687 - DNA, 38 bp, Artificial Sequence
  primer
gtaaaacgacggccagtgaaacccacatcaggaggaac

SEQ ID NO: 90688 - DNA, 22 bp, Artificial Sequence
  primer
aactctgagtgcctgacaaagg

SEQ ID NO: 90689 - DNA, 21 bp, Artificial Sequence
  primer
aactgtccagtcaacccacag

SEQ ID NO: 90690 - DNA, 38 bp, Artificial Sequence
  primer
gtaaaacgacggccagttgtgccttcagggaggtaaac

SEQ ID NO: 90691 - DNA, 20 bp, Artificial Sequence
  primer
ctcaggataccagccatccc

SEQ ID NO: 90692 - DNA, 38 bp, Artificial Sequence
  primer
gtaaaacgacggccagtgatgaaaggcctgagtccaag

SEQ ID NO: 90693 - DNA, 21 bp, Artificial Sequence
  primer
gttcctggaagtacgattgcc

SEQ ID NO: 90694 - DNA, 38 bp, Artificial Sequence
  primer
gtaaaacgacggccagtgtacggctggagtacatgtgg

SEQ ID NO: 90695 - DNA, 22 bp, Artificial Sequence
  primer
tggaccaaagtcttattctggc

SEQ ID NO: 90696 - DNA, 38 bp, Artificial Sequence
  primer
gtaaaacgacggccagtgtcaaaggttcctaaggcagg

SEQ ID NO: 90697 - DNA, 22 bp, Artificial Sequence
  primer
tggtaatgcacacagagagagg

SEQ ID NO: 90698 - DNA, 21 bp, Artificial Sequence
  primer
ccgagcgagtcagagactaaa

SEQ ID NO: 90699 - DNA, 20 bp, Artificial Sequence
  primer
gttggaaaggtgggtccttc

SEQ ID NO: 90700 - DNA, 36 bp, Artificial Sequence
  primer
gtaaaacgacggccagtttcccaggctaacgaccac

SEQ ID NO: 90701 - DNA, 22 bp, Artificial Sequence
  primer
tgtgtgtgtgagtgggagagac

SEQ ID NO: 90702 - DNA, 38 bp, Artificial Sequence
  primer
gtaaaacgacggccagtcttgtgaaggactccctctgg

SEQ ID NO: 90703 - DNA, 38 bp, Artificial Sequence
  primer
gtaaaacgacggccagtgcactgtctgcactttcttgc

SEQ ID NO: 90704 - DNA, 38 bp, Artificial Sequence
  primer
gtaaaacgacggccagtgtaagagtggaacagaggcgg

SEQ ID NO: 90705 - DNA, 38 bp, Artificial Sequence
  primer
gtaaaacgacggccagttcttcgctattctccagggtg

SEQ ID NO: 90706 - DNA, 21 bp, Artificial Sequence
  primer
tgctcttctgtggtttatggg

SEQ ID NO: 90707 - DNA, 21 bp, Artificial Sequence
  primer
gtgaaaccatcttcctctggg

SEQ ID NO: 90708 - DNA, 38 bp, Artificial Sequence
  primer
gtaaaacgacggccagtctcttgatcaccagatggcac

SEQ ID NO: 90709 - DNA, 38 bp, Artificial Sequence
  primer
gtaaaacgacggccagtacaaaccaaactcctgccaac

SEQ ID NO: 90710 - DNA, 38 bp, Artificial Sequence
  primer
gtaaaacgacggccagtagtaagctggagtggagggtg

SEQ ID NO: 90711 - DNA, 20 bp, Artificial Sequence
  primer
gtggcaagaggaggtgtgag

SEQ ID NO: 90712 - DNA, 21 bp, Artificial Sequence
  primer
ggagaagctgggacctatctg

SEQ ID NO: 90713 - DNA, 21 bp, Artificial Sequence
  primer
gcctccaggatgaagtagacc

SEQ ID NO: 90714 - DNA, 37 bp, Artificial Sequence
  primer
gtaaaacgacggccagtgaggaacagctgcaggattg

SEQ ID NO: 90715 - DNA, 23 bp, Artificial Sequence
  primer
tcactttcattcacacagtcagc

SEQ ID NO: 90716 - DNA, 40 bp, Artificial Sequence
  primer
gtaaaacgacggccagtttcaaagctgtttcatcatagca

SEQ ID NO: 90717 - DNA, 20 bp, Artificial Sequence
  primer
tttgtgatgctggtgtcctg

SEQ ID NO: 90718 - DNA, 24 bp, Artificial Sequence
  primer
tgcaagacggtaaatgtatctcaa

SEQ ID NO: 90719 - DNA, 42 bp, Artificial Sequence
  primer
gtaaaacgacggccagtaacccatcttatccttgtgtaaacc

SEQ ID NO: 90720 - DNA, 21 bp, Artificial Sequence
  primer
tcctagacagcctttgctgag

SEQ ID NO: 90721 - DNA, 40 bp, Artificial Sequence
  primer
gtaaaacgacggccagttgtatttactcccaagggtttcg

SEQ ID NO: 90722 - DNA, 21 bp, Artificial Sequence
  primer
tatcaaagctctggcaaaccc

SEQ ID NO: 90723 - DNA, 39 bp, Artificial Sequence
  primer
gtaaaacgacggccagttttatcaaagcaacaagcaacc

SEQ ID NO: 90724 - DNA, 38 bp, Artificial Sequence
  primer
gtaaaacgacggccagttccatgaatgaaatcccactg

SEQ ID NO: 90725 - DNA, 38 bp, Artificial Sequence
  primer
gtaaaacgacggccagtccaagggagtgacacctgaag

SEQ ID NO: 90726 - DNA, 20 bp, Artificial Sequence
  primer
gcaattgcaaatgaaaccag

SEQ ID NO: 90727 - DNA, 39 bp, Artificial Sequence
  primer
gtaaaacgacggccagtgcactgaatgttatcaggatgc

SEQ ID NO: 90728 - DNA, 27 bp, Artificial Sequence
  primer
aatcatatttctgttcctaatgtggac

SEQ ID NO: 90729 - DNA, 21 bp, Artificial Sequence
  primer
aagttgctctggaactctggg

SEQ ID NO: 90730 - DNA, 38 bp, Artificial Sequence
  primer
gtaaaacgacggccagtcctgacaagtctggatgaagc

SEQ ID NO: 90731 - DNA, 38 bp, Artificial Sequence
  primer
gtaaaacgacggccagtcgcagcaagttctctcttgtc

SEQ ID NO: 90732 - DNA, 35 bp, Artificial Sequence
  primer
gtaaaacgacggccagtgaaggcgcccaagaagtc

SEQ ID NO: 90733 - DNA, 35 bp, Artificial Sequence
  primer
gtaaaacgacggccagtgggacacaagggaccacc

SEQ ID NO: 90734 - DNA, 22 bp, Artificial Sequence
  primer
gtaagactatcctggaggtgcg

SEQ ID NO: 90735 - DNA, 21 bp, Artificial Sequence
  primer
tacattcatgggcgaaagagg

SEQ ID NO: 90736 - DNA, 38 bp, Artificial Sequence
  primer
gtaaaacgacggccagttcactgatctcttggcctttg

SEQ ID NO: 90737 - DNA, 19 bp, Artificial Sequence
  primer
ggaggtctgtaggcaaggg

SEQ ID NO: 90738 - DNA, 36 bp, Artificial Sequence
  primer
gtaaaacgacggccagtagccactccaccaaacagg

SEQ ID NO: 90739 - DNA, 21 bp, Artificial Sequence
  primer
gtgacacctactggcaggtcc

SEQ ID NO: 90740 - DNA, 21 bp, Artificial Sequence
  primer
ctagccgggctcactcttctc

SEQ ID NO: 90741 - DNA, 21 bp, Artificial Sequence
  primer
atagccattgccgtactctcc

SEQ ID NO: 90742 - DNA, 38 bp, Artificial Sequence
  primer
gtaaaacgacggccagttgtcaaacgcaatgcactatg

SEQ ID NO: 90743 - DNA, 44 bp, Artificial Sequence
  primer
gtaaaacgacggccagtaaattagcttatcaatattcagatggg

SEQ ID NO: 90744 - DNA, 21 bp, Artificial Sequence
  primer
tggccaatttcaaacacagag

SEQ ID NO: 90745 - DNA, 39 bp, Artificial Sequence
  primer
gtaaaacgacggccagtccagagggtgagtatgataggg

SEQ ID NO: 90746 - DNA, 40 bp, Artificial Sequence
  primer
gtaaaacgacggccagtgcagtagaggaggaacaaagctc

SEQ ID NO: 90747 - DNA, 46 bp, Artificial Sequence
  primer
gtaaaacgacggccagttcaaacttaatttaggagaactgtgaaga

SEQ ID NO: 90748 - DNA, 38 bp, Artificial Sequence
  primer
gtaaaacgacggccagtgttcaaatgcagtggagaagg

SEQ ID NO: 90749 - DNA, 37 bp, Artificial Sequence
  primer
gtaaaacgacggccagtagacatgttgcattgccctc

SEQ ID NO: 90750 - DNA, 38 bp, Artificial Sequence
  primer
gtaaaacgacggccagttcaaactcctgggttcaactg

SEQ ID NO: 90751 - DNA, 20 bp, Artificial Sequence
  primer
aacaacacgagtgagccctg

SEQ ID NO: 90752 - DNA, 41 bp, Artificial Sequence
  primer
gtaaaacgacggccagtttgttgaataagtaggtcacagcg

SEQ ID NO: 90753 - DNA, 27 bp, Artificial Sequence
  primer
ggtatcatactactgagcaaacagtcc

SEQ ID NO: 90754 - DNA, 21 bp, Artificial Sequence
  primer
aagcaatcctcccacctaagc

SEQ ID NO: 90755 - DNA, 23 bp, Artificial Sequence
  primer
aatttagatatgctccctgctgc

SEQ ID NO: 90756 - DNA, 21 bp, Artificial Sequence
  primer
aagctctttgtccttgggatg

SEQ ID NO: 90757 - DNA, 38 bp, Artificial Sequence
  primer
gtaaaacgacggccagttttgcatcactttctcacagc

SEQ ID NO: 90758 - DNA, 39 bp, Artificial Sequence
  primer
gtaaaacgacggccagtaagccatgagcataaatcaacc

SEQ ID NO: 90759 - DNA, 28 bp, Artificial Sequence
  primer
tgtagaccaacagtaaatctctcagatg

SEQ ID NO: 90760 - DNA, 21 bp, Artificial Sequence
  primer
caaacccagtccaaagaggag

SEQ ID NO: 90761 - DNA, 38 bp, Artificial Sequence
  primer
gtaaaacgacggccagtccttggctctgagacaggaag

SEQ ID NO: 90762 - DNA, 38 bp, Artificial Sequence
  primer
gtaaaacgacggccagtgtgggtggaggagtgagagag

SEQ ID NO: 90763 - DNA, 38 bp, Artificial Sequence
  primer
gtaaaacgacggccagtcagaaatggctggaaatcacc

SEQ ID NO: 90764 - DNA, 39 bp, Artificial Sequence
  primer
gtaaaacgacggccagtgcagtctcagaggacaggagac

SEQ ID NO: 90765 - DNA, 21 bp, Artificial Sequence
  primer
ttctcgcaacttctcctcacc

SEQ ID NO: 90766 - DNA, 38 bp, Artificial Sequence
  primer
gtaaaacgacggccagtgagcatccaaattctcccatc

SEQ ID NO: 90767 - DNA, 21 bp, Artificial Sequence
  primer
tatcagacctgccagtatggg

SEQ ID NO: 90768 - DNA, 37 bp, Artificial Sequence
  primer
gtaaaacgacggccagtgccacatacatgccacacag

SEQ ID NO: 90769 - DNA, 21 bp, Artificial Sequence
  primer
gaacggagtaggaggaacgtg

SEQ ID NO: 90770 - DNA, 38 bp, Artificial Sequence
  primer
gtaaaacgacggccagtccgcttggaactgagctagag

SEQ ID NO: 90771 - DNA, 38 bp, Artificial Sequence
  primer
gtaaaacgacggccagtgtgccagtgctagggacagag

SEQ ID NO: 90772 - DNA, 20 bp, Artificial Sequence
  primer
agaggtaacggcggaacaag

SEQ ID NO: 90773 - DNA, 19 bp, Artificial Sequence
  primer
ctcccactgcttcctctgg

SEQ ID NO: 90774 - DNA, 19 bp, Artificial Sequence
  primer
cccaggaaccgttcttctc

SEQ ID NO: 90775 - DNA, 38 bp, Artificial Sequence
  primer
gtaaaacgacggccagtatattgctccacctcaaaccc

SEQ ID NO: 90776 - DNA, 39 bp, Artificial Sequence
  primer
gtaaaacgacggccagtccaaagtcagaaacattaaggc

SEQ ID NO: 90777 - DNA, 43 bp, Artificial Sequence
  primer
gtaaaacgacggccagttgttgttgtttacaaagttgctgttt

SEQ ID NO: 90778 - DNA, 38 bp, Artificial Sequence
  primer
gtaaaacgacggccagtgatacctgccctggttgagag

SEQ ID NO: 90779 - DNA, 21 bp, Artificial Sequence
  primer
caatcgctgagccttcttgag

SEQ ID NO: 90780 - DNA, 44 bp, Artificial Sequence
  primer
gtaaaacgacggccagttcataaagctaggttacaaatacatgg

SEQ ID NO: 90781 - DNA, 38 bp, Artificial Sequence
  primer
gtaaaacgacggccagtgcccagaatcggtaacacata

SEQ ID NO: 90782 - DNA, 38 bp, Artificial Sequence
  primer
gtaaaacgacggccagtggtcctttccatcatcaggag

SEQ ID NO: 90783 - DNA, 26 bp, Artificial Sequence
  primer
aaattataacacctagtggcatttcc

SEQ ID NO: 90784 - DNA, 38 bp, Artificial Sequence
  primer
gtaaaacgacggccagttcttcaaatggttgttgtggg

SEQ ID NO: 90785 - DNA, 24 bp, Artificial Sequence
  primer
gcacactttaaagcaacttacacc

SEQ ID NO: 90786 - DNA, 37 bp, Artificial Sequence
  primer
gtaaaacgacggccagttagctcgattgagccattcc

SEQ ID NO: 90787 - DNA, 38 bp, Artificial Sequence
  primer
gtaaaacgacggccagtacatgattgacccacagttca

SEQ ID NO: 90788 - DNA, 39 bp, Artificial Sequence
  primer
gtaaaacgacggccagtggagccagaccttacatttgtg

SEQ ID NO: 90789 - DNA, 39 bp, Artificial Sequence
  primer
gtaaaacgacggccagtaagtcccttctggctctttagc

SEQ ID NO: 90790 - DNA, 21 bp, Artificial Sequence
  primer
ctgtgctcaggattccaagtg

SEQ ID NO: 90791 - DNA, 39 bp, Artificial Sequence
  primer
gtaaaacgacggccagtcaacatcttccctctgaaccac

SEQ ID NO: 90792 - DNA, 19 bp, Artificial Sequence
  primer
gagccatgtggcgaagaac

SEQ ID NO: 90793 - DNA, 38 bp, Artificial Sequence
  primer
gtaaaacgacggccagttaggcagacgcaacagctacc

SEQ ID NO: 90794 - DNA, 37 bp, Artificial Sequence
  primer
gtaaaacgacggccagtggcaagagaatcgctcaaag

SEQ ID NO: 90795 - DNA, 37 bp, Artificial Sequence
  primer
gtaaaacgacggccagtagattgcttgagcccaggag

SEQ ID NO: 90796 - DNA, 40 bp, Artificial Sequence
  primer
gtaaaacgacggccagtgaatcctgttaaatgccattctg

SEQ ID NO: 90797 - DNA, 21 bp, Artificial Sequence
  primer
gaaggcagacctggagcatac

SEQ ID NO: 90798 - DNA, 44 bp, Artificial Sequence
  primer
gtaaaacgacggccagttgcctatatgagtcaggttgtctttag

SEQ ID NO: 90799 - DNA, 24 bp, Artificial Sequence
  primer
aaataactgaagctagatgatggg

SEQ ID NO: 90800 - DNA, 21 bp, Artificial Sequence
  primer
ccattccaggactgcttatcc

SEQ ID NO: 90801 - DNA, 38 bp, Artificial Sequence
  primer
gtaaaacgacggccagtctgctaccacacctggctaag

SEQ ID NO: 90802 - DNA, 40 bp, Artificial Sequence
  primer
gtaaaacgacggccagttgcaatgagtatgtgtttcttcg

SEQ ID NO: 90803 - DNA, 39 bp, Artificial Sequence
  primer
gtaaaacgacggccagtaaagacaacagccgttcatttc

SEQ ID NO: 90804 - DNA, 25 bp, Artificial Sequence
  primer
caattccgtattcaccagttcttac

SEQ ID NO: 90805 - DNA, 19 bp, Artificial Sequence
  primer
ggaggagacaaagaggcgg

SEQ ID NO: 90806 - DNA, 38 bp, Artificial Sequence
  primer
gtaaaacgacggccagtaagagggtagatctggaggcg

SEQ ID NO: 90807 - DNA, 38 bp, Artificial Sequence
  primer
gtaaaacgacggccagtaggaagaagggcattctggac

SEQ ID NO: 90808 - DNA, 21 bp, Artificial Sequence
  primer
aacatattcaccagccttccg

SEQ ID NO: 90809 - DNA, 21 bp, Artificial Sequence
  primer
agtaccttgtccagcaggtcg

SEQ ID NO: 90810 - DNA, 38 bp, Artificial Sequence
  primer
gtaaaacgacggccagtacagtgtgtcaagaagggcag

SEQ ID NO: 90811 - DNA, 38 bp, Artificial Sequence
  primer
gtaaaacgacggccagttcatggtatctccaccttccc

SEQ ID NO: 90812 - DNA, 21 bp, Artificial Sequence
  primer
aggatgatcatgtcgttggtg

SEQ ID NO: 90813 - DNA, 38 bp, Artificial Sequence
  primer
gtaaaacgacggccagttgagtctaacctagcgggtgg

SEQ ID NO: 90814 - DNA, 37 bp, Artificial Sequence
  primer
gtaaaacgacggccagtcatcagcacagtgagatccg

SEQ ID NO: 90815 - DNA, 21 bp, Artificial Sequence
  primer
caccctcacacattcatctcc

SEQ ID NO: 90816 - DNA, 37 bp, Artificial Sequence
  primer
gtaaaacgacggccagtatcatcatcaccacccttgc

SEQ ID NO: 90817 - DNA, 21 bp, Artificial Sequence
  primer
tcggacaggtccatgttgtag

SEQ ID NO: 90818 - DNA, 38 bp, Artificial Sequence
  primer
gtaaaacgacggccagtcgtgacaacacccacctctac

SEQ ID NO: 90819 - DNA, 19 bp, Artificial Sequence
  primer
aagtgatccgcccatcttg

SEQ ID NO: 90820 - DNA, 21 bp, Artificial Sequence
  primer
agatcccagctcagtctccag

SEQ ID NO: 90821 - DNA, 37 bp, Artificial Sequence
  primer
gtaaaacgacggccagtgtgcagaaggacacaggctc

SEQ ID NO: 90822 - DNA, 37 bp, Artificial Sequence
  primer
gtaaaacgacggccagtaaagggagctgggacagatg

SEQ ID NO: 90823 - DNA, 20 bp, Artificial Sequence
  primer
tctgagactctcgctcaggg

SEQ ID NO: 90824 - DNA, 21 bp, Artificial Sequence
  primer
catctgtgatgttccacaggg

SEQ ID NO: 90825 - DNA, 36 bp, Artificial Sequence
  primer
gtaaaacgacggccagtcttctccaggaagcatggg

SEQ ID NO: 90826 - DNA, 22 bp, Artificial Sequence
  primer
cctaggctaagagcagttgtgc

SEQ ID NO: 90827 - DNA, 21 bp, Artificial Sequence
  primer
gtgcggctacgtatcaatgag

SEQ ID NO: 90828 - DNA, 21 bp, Artificial Sequence
  primer
aaagtggagggttctgctctg

SEQ ID NO: 90829 - DNA, 21 bp, Artificial Sequence
  primer
tcagccattcctaacctccag

SEQ ID NO: 90830 - DNA, 21 bp, Artificial Sequence
  primer
aaggaagctgcaaggactcag

SEQ ID NO: 90831 - DNA, 26 bp, Artificial Sequence
  primer
ttctatctttaggatgggtttaatgc

SEQ ID NO: 90832 - DNA, 38 bp, Artificial Sequence
  primer
gtaaaacgacggccagtgttgcctgatgctgaatgttg

SEQ ID NO: 90833 - DNA, 39 bp, Artificial Sequence
  primer
gtaaaacgacggccagtcagcagcttaattgtttgaggg

SEQ ID NO: 90834 - DNA, 21 bp, Artificial Sequence
  primer
cagccttcattacaaaggcac

SEQ ID NO: 90835 - DNA, 21 bp, Artificial Sequence
  primer
tgggctaacgttcctcaagtc

SEQ ID NO: 90836 - DNA, 20 bp, Artificial Sequence
  primer
gtctccctgctgttctctgg

SEQ ID NO: 90837 - DNA, 37 bp, Artificial Sequence
  primer
gtaaaacgacggccagtagataagccaccttgcccag

SEQ ID NO: 90838 - DNA, 36 bp, Artificial Sequence
  primer
gtaaaacgacggccagtactgcagggtcctgagctg

SEQ ID NO: 90839 - DNA, 20 bp, Artificial Sequence
  primer
agcggagaagccactttagc

SEQ ID NO: 90840 - DNA, 21 bp, Artificial Sequence
  primer
cgacctgtgcatttactcctg

SEQ ID NO: 90841 - DNA, 44 bp, Artificial Sequence
  primer
gtaaaacgacggccagttttgttagtttcttccacaaggaatac

SEQ ID NO: 90842 - DNA, 24 bp, Artificial Sequence
  primer
tccacatttcacagtgtaaacaaa

SEQ ID NO: 90843 - DNA, 22 bp, Artificial Sequence
  primer
gggcaatcaatttcctataacc

SEQ ID NO: 90844 - DNA, 21 bp, Artificial Sequence
  primer
tgtttcttcctcctctgctgc

SEQ ID NO: 90845 - DNA, 26 bp, Artificial Sequence
  primer
ggtaagaaatagctagaacaatgcct

SEQ ID NO: 90846 - DNA, 37 bp, Artificial Sequence
  primer
gtaaaacgacggccagtaccatgaccagcatgtcctc

SEQ ID NO: 90847 - DNA, 21 bp, Artificial Sequence
  primer
gttaacccaagaatggatcgc

SEQ ID NO: 90848 - DNA, 21 bp, Artificial Sequence
  primer
tctcaggtctgatgatgctcc

SEQ ID NO: 90849 - DNA, 41 bp, Artificial Sequence
  primer
gtaaaacgacggccagtcaaagaagcaaaggactatcatgg

SEQ ID NO: 90850 - DNA, 37 bp, Artificial Sequence
  primer
gtaaaacgacggccagtgaccctagaagccaccgaac

SEQ ID NO: 90851 - DNA, 21 bp, Artificial Sequence
  primer
tgatttcggcttagaaggtgg

SEQ ID NO: 90852 - DNA, 37 bp, Artificial Sequence
  primer
gtaaaacgacggccagtcagtatcgggaggccagttc

SEQ ID NO: 90853 - DNA, 21 bp, Artificial Sequence
  primer
gccttcttcgagaatggtgtc

SEQ ID NO: 90854 - DNA, 37 bp, Artificial Sequence
  primer
gtaaaacgacggccagtatgatgggcatattgcttgc

SEQ ID NO: 90855 - DNA, 38 bp, Artificial Sequence
  primer
gtaaaacgacggccagtagcagattcatgagcacctcc

SEQ ID NO: 90856 - DNA, 35 bp, Artificial Sequence
  primer
gtaaaacgacggccagtctgagggctgtgcaggtc

SEQ ID NO: 90857 - DNA, 38 bp, Artificial Sequence
  primer
gtaaaacgacggccagtgcttcaccaggcagagatgag

SEQ ID NO: 90858 - DNA, 36 bp, Artificial Sequence
  primer
gtaaaacgacggccagtgccaaacacgcttgtctcc

SEQ ID NO: 90859 - DNA, 39 bp, Artificial Sequence
  primer
gtaaaacgacggccagttgatgtgtttgtggtaagtggg

SEQ ID NO: 90860 - DNA, 21 bp, Artificial Sequence
  primer
cattgtgctgaagtgctttcg

SEQ ID NO: 90861 - DNA, 18 bp, Artificial Sequence
  primer
agatgtgagccaccgtgc

SEQ ID NO: 90862 - DNA, 21 bp, Artificial Sequence
  primer
atttggtaccttgagttgggc

SEQ ID NO: 90863 - DNA, 38 bp, Artificial Sequence
  primer
gtaaaacgacggccagtctgcttccagctacatcatgc

SEQ ID NO: 90864 - DNA, 38 bp, Artificial Sequence
  primer
gtaaaacgacggccagtaaccttcctttcttccaccct

SEQ ID NO: 90865 - DNA, 25 bp, Artificial Sequence
  primer
aattaggctcacagttctgaacatc

SEQ ID NO: 90866 - DNA, 22 bp, Artificial Sequence
  primer
cagcaattccacctaagcagac

SEQ ID NO: 90867 - DNA, 21 bp, Artificial Sequence
  primer
tgaaatgacccagctttaccc

SEQ ID NO: 90868 - DNA, 21 bp, Artificial Sequence
  primer
ccgctaccattcaatctcagg

SEQ ID NO: 90869 - DNA, 21 bp, Artificial Sequence
  primer
tcaggtctcctccaagtctcc

SEQ ID NO: 90870 - DNA, 35 bp, Artificial Sequence
  primer
gtaaaacgacggccagtaatgttcccagaagcgcc

SEQ ID NO: 90871 - DNA, 20 bp, Artificial Sequence
  primer
cagaaactcacatgcccgag

SEQ ID NO: 90872 - DNA, 38 bp, Artificial Sequence
  primer
gtaaaacgacggccagtaactgaatacactgcccaccc

SEQ ID NO: 90873 - DNA, 21 bp, Artificial Sequence
  primer
agttactgggacctctgcctc

SEQ ID NO: 90874 - DNA, 38 bp, Artificial Sequence
  primer
gtaaaacgacggccagtgcagaggactccaggtgtagg

SEQ ID NO: 90875 - DNA, 21 bp, Artificial Sequence
  primer
atgggacatgtaagtcgctcc

SEQ ID NO: 90876 - DNA, 40 bp, Artificial Sequence
  primer
gtaaaacgacggccagtccctcgtttgcctttattatcag

SEQ ID NO: 90877 - DNA, 21 bp, Artificial Sequence
  primer
tccatttagagtgtggttggc

SEQ ID NO: 90878 - DNA, 39 bp, Artificial Sequence
  primer
gtaaaacgacggccagtgcatccatattcttcctttccg

SEQ ID NO: 90879 - DNA, 39 bp, Artificial Sequence
  primer
gtaaaacgacggccagtgctaccatttcgtaccttccac

SEQ ID NO: 90880 - DNA, 38 bp, Artificial Sequence
  primer
gtaaaacgacggccagtaaggccttgacaaatgtagcc

SEQ ID NO: 90881 - DNA, 44 bp, Artificial Sequence
  primer
gtaaaacgacggccagttgctaaagtggctaatactgtatgtga

SEQ ID NO: 90882 - DNA, 20 bp, Artificial Sequence
  primer
ggccatgatttcttgtctgg

SEQ ID NO: 90883 - DNA, 40 bp, Artificial Sequence
  primer
gtaaaacgacggccagttttgatgagattacattgcctcc

SEQ ID NO: 90884 - DNA, 39 bp, Artificial Sequence
  primer
gtaaaacgacggccagttctctgggcatgtcaatatgag

SEQ ID NO: 90885 - DNA, 40 bp, Artificial Sequence
  primer
gtaaaacgacggccagtgggtaaacacaattgtatggaaa

SEQ ID NO: 90886 - DNA, 21 bp, Artificial Sequence
  primer
ttgacatgccctcacagactc

SEQ ID NO: 90887 - DNA, 21 bp, Artificial Sequence
  primer
ttccgaagagatttaaagggc

SEQ ID NO: 90888 - DNA, 38 bp, Artificial Sequence
  primer
gtaaaacgacggccagtactgcaattgctgagagcaga

SEQ ID NO: 90889 - DNA, 20 bp, Artificial Sequence
  primer
ggccatgatttcttgtctgg

SEQ ID NO: 90890 - DNA, 38 bp, Artificial Sequence
  primer
gtaaaacgacggccagtagactctcctaggcgggtagc

SEQ ID NO: 90891 - DNA, 20 bp, Artificial Sequence
  primer
cccagccgtgtagactcttg

SEQ ID NO: 90892 - DNA, 38 bp, Artificial Sequence
  primer
gtaaaacgacggccagtgagaaccggattcagagaagg

SEQ ID NO: 90893 - DNA, 20 bp, Artificial Sequence
  primer
cagctacccatcccttcctc

SEQ ID NO: 90894 - DNA, 37 bp, Artificial Sequence
  primer
gtaaaacgacggccagtgctcacgtgcttgagaaagg

SEQ ID NO: 90895 - DNA, 38 bp, Artificial Sequence
  primer
gtaaaacgacggccagttagggtagtttggctgcttgg

SEQ ID NO: 90896 - DNA, 38 bp, Artificial Sequence
  primer
gtaaaacgacggccagtctgactgaagtgctggtcctg

SEQ ID NO: 90897 - DNA, 38 bp, Artificial Sequence
  primer
gtaaaacgacggccagttgtagaaaccatcctttgccc

SEQ ID NO: 90898 - DNA, 19 bp, Artificial Sequence
  primer
aggtgcacatgcagacgtg

SEQ ID NO: 90899 - DNA, 21 bp, Artificial Sequence
  primer
agtagtccctggctactgccc

SEQ ID NO: 90900 - DNA, 38 bp, Artificial Sequence
  primer
gtaaaacgacggccagtaggctgatattccattccctg

SEQ ID NO: 90901 - DNA, 21 bp, Artificial Sequence
  primer
ttgactgtcttgtgggaatgg

SEQ ID NO: 90902 - DNA, 24 bp, Artificial Sequence
  primer
tctctatacttcgatcggcatttc

SEQ ID NO: 90903 - DNA, 22 bp, Artificial Sequence
  primer
gaatggctatctgaactgctgg

SEQ ID NO: 90904 - DNA, 20 bp, Artificial Sequence
  primer
tttggtttgctggccattag

SEQ ID NO: 90905 - DNA, 21 bp, Artificial Sequence
  primer
ttgacatttctgcaacccttc

SEQ ID NO: 90906 - DNA, 38 bp, Artificial Sequence
  primer
gtaaaacgacggccagtaacctatgatcatgccactgc

SEQ ID NO: 90907 - DNA, 37 bp, Artificial Sequence
  primer
gtaaaacgacggccagtggaactggcaccatatccag

SEQ ID NO: 90908 - DNA, 21 bp, Artificial Sequence
  primer
caccatggacttccagctaag

SEQ ID NO: 90909 - DNA, 22 bp, Artificial Sequence
  primer
cctcaaacatttcagccttctg

SEQ ID NO: 90910 - DNA, 24 bp, Artificial Sequence
  primer
cctgtacatttatgaaggcaactg

SEQ ID NO: 90911 - DNA, 24 bp, Artificial Sequence
  primer
cctgtacatttatgaaggcaactg

SEQ ID NO: 90912 - DNA, 21 bp, Artificial Sequence
  primer
ctgacaaggaggaacctaccc

SEQ ID NO: 90913 - DNA, 38 bp, Artificial Sequence
  primer
gtaaaacgacggccagtgttaacaatgtcagcgaagcg

SEQ ID NO: 90914 - DNA, 38 bp, Artificial Sequence
  primer
gtaaaacgacggccagtggcagtggaaggtgtacagtg

SEQ ID NO: 90915 - DNA, 39 bp, Artificial Sequence
  primer
gtaaaacgacggccagtcacctgtcttcatctgaaaggg

SEQ ID NO: 90916 - DNA, 38 bp, Artificial Sequence
  primer
gtaaaacgacggccagtctcaagctaacctcagcctcc

SEQ ID NO: 90917 - DNA, 37 bp, Artificial Sequence
  primer
gtaaaacgacggccagtgggccaactttgacatcttc

SEQ ID NO: 90918 - DNA, 35 bp, Artificial Sequence
  primer
gtaaaacgacggccagttgacctcgtgatccaccc

SEQ ID NO: 90919 - DNA, 38 bp, Artificial Sequence
  primer
gtaaaacgacggccagtgggacacgttagaacatgagg

SEQ ID NO: 90920 - DNA, 21 bp, Artificial Sequence
  primer
aggcacatagtcatggtccag

SEQ ID NO: 90921 - DNA, 18 bp, Artificial Sequence
  primer
acaggcaggagccaccac

SEQ ID NO: 90922 - DNA, 38 bp, Artificial Sequence
  primer
gtaaaacgacggccagtgcaaatgacttcctcagggac

SEQ ID NO: 90923 - DNA, 20 bp, Artificial Sequence
  primer
agatcaccaccaggccgtag

SEQ ID NO: 90924 - DNA, 21 bp, Artificial Sequence
  primer
cactcagggttgagtgtggtc

SEQ ID NO: 90925 - DNA, 38 bp, Artificial Sequence
  primer
gtaaaacgacggccagtgcagcacctggttgtgtagag

SEQ ID NO: 90926 - DNA, 21 bp, Artificial Sequence
  primer
ctccagcaatagaggtcccag

SEQ ID NO: 90927 - DNA, 38 bp, Artificial Sequence
  primer
gtaaaacgacggccagtggactcgctattgagagaggg

SEQ ID NO: 90928 - DNA, 22 bp, Artificial Sequence
  primer
tcaggttcacctggaagagaag

SEQ ID NO: 90929 - DNA, 21 bp, Artificial Sequence
  primer
actttggtcgcttcttcaagg

SEQ ID NO: 90930 - DNA, 36 bp, Artificial Sequence
  primer
gtaaaacgacggccagtacaggactgctcctggtgg

SEQ ID NO: 90931 - DNA, 38 bp, Artificial Sequence
  primer
gtaaaacgacggccagtgtccctgggtgtggaacttac

SEQ ID NO: 90932 - DNA, 21 bp, Artificial Sequence
  primer
taaaggtggattgtgggaagg

SEQ ID NO: 90933 - DNA, 38 bp, Artificial Sequence
  primer
gtaaaacgacggccagtcttgggtacagattcaacccg

SEQ ID NO: 90934 - DNA, 19 bp, Artificial Sequence
  primer
cctgcccttgtgtccagtc

SEQ ID NO: 90935 - DNA, 21 bp, Artificial Sequence
  primer
tggatcctgagcaacacagac

SEQ ID NO: 90936 - DNA, 38 bp, Artificial Sequence
  primer
gtaaaacgacggccagttaccagacacactctgggagg

SEQ ID NO: 90937 - DNA, 38 bp, Artificial Sequence
  primer
gtaaaacgacggccagttttgtctcctatttccctggc

SEQ ID NO: 90938 - DNA, 38 bp, Artificial Sequence
  primer
gtaaaacgacggccagttcagccatgcagtccataaac

SEQ ID NO: 90939 - DNA, 38 bp, Artificial Sequence
  primer
gtaaaacgacggccagtaggccagagctctcatctctc

SEQ ID NO: 90940 - DNA, 38 bp, Artificial Sequence
  primer
gtaaaacgacggccagtctccgtgaacgtcatgaacac

SEQ ID NO: 90941 - DNA, 38 bp, Artificial Sequence
  primer
gtaaaacgacggccagtgttcctgacctcaagcagtcc

SEQ ID NO: 90942 - DNA, 35 bp, Artificial Sequence
  primer
gtaaaacgacggccagtccgagattgcaccattgc

SEQ ID NO: 90943 - DNA, 38 bp, Artificial Sequence
  primer
gtaaaacgacggccagtctggtccttcaaatcctctgg

SEQ ID NO: 90944 - DNA, 21 bp, Artificial Sequence
  primer
gcttccacagctctcatcatc

SEQ ID NO: 90945 - DNA, 18 bp, Artificial Sequence
  primer
ccatccctctggaagccc

SEQ ID NO: 90946 - DNA, 18 bp, Artificial Sequence
  primer
ccaagatcacgccaccac

SEQ ID NO: 90947 - DNA, 41 bp, Artificial Sequence
  primer
gtaaaacgacggccagtaaatactcttcaacaacaacccaa

SEQ ID NO: 90948 - DNA, 44 bp, Artificial Sequence
  primer
gtaaaacgacggccagtaaggaccaatcattacaagtagacaaa

SEQ ID NO: 90949 - DNA, 24 bp, Artificial Sequence
  primer
tgaccaaataaattgctctcttcc

SEQ ID NO: 90950 - DNA, 38 bp, Artificial Sequence
  primer
gtaaaacgacggccagtagccacaggtaatttagggct

SEQ ID NO: 90951 - DNA, 26 bp, Artificial Sequence
  primer
tttgtgtttagacttgggtcttatcc

SEQ ID NO: 90952 - DNA, 44 bp, Artificial Sequence
  primer
gtaaaacgacggccagtcatatcaaatataagctttccaattcc

SEQ ID NO: 90953 - DNA, 24 bp, Artificial Sequence
  primer
cactcctttgtggttcaaattagg

SEQ ID NO: 90954 - DNA, 22 bp, Artificial Sequence
  primer
aggaaatactgccctaatgtgg

SEQ ID NO: 90955 - DNA, 18 bp, Artificial Sequence
  primer
agaatcgcatgtgcccag

SEQ ID NO: 90956 - DNA, 39 bp, Artificial Sequence
  primer
gtaaaacgacggccagtccaaggctgagaaccactattt

SEQ ID NO: 90957 - DNA, 22 bp, Artificial Sequence
  primer
ccaccgcactaggcctattatt

SEQ ID NO: 90958 - DNA, 24 bp, Artificial Sequence
  primer
aatattacttgtttcttgggtgcc

SEQ ID NO: 90959 - DNA, 42 bp, Artificial Sequence
  primer
gtaaaacgacggccagtaaaggatatcccacatttctactcg

SEQ ID NO: 90960 - DNA, 35 bp, Artificial Sequence
  primer
gtaaaacgacggccagtattctggcagagccaggg

SEQ ID NO: 90961 - DNA, 21 bp, Artificial Sequence
  primer
ccaagactaactctgggctgc

SEQ ID NO: 90962 - DNA, 41 bp, Artificial Sequence
  primer
gtaaaacgacggccagtcacacaagatgaaattctacaggg

SEQ ID NO: 90963 - DNA, 37 bp, Artificial Sequence
  primer
gtaaaacgacggccagtcgcctagcaaggatcatctc

SEQ ID NO: 90964 - DNA, 35 bp, Artificial Sequence
  primer
gtaaaacgacggccagttgatccaccctccttggc

SEQ ID NO: 90965 - DNA, 37 bp, Artificial Sequence; identical to SEQ ID NO: 90963
  primer

SEQ ID NO: 90966 - DNA, 20 bp, Artificial Sequence
  primer
ggaatgcatctcccaggaac

SEQ ID NO: 90967 - DNA, 21 bp, Artificial Sequence
  primer
aaagaaaggaagcctctctgc

SEQ ID NO: 90968 - DNA, 21 bp, Artificial Sequence
  primer
agtccaacgtgatgtctgtcg

SEQ ID NO: 90969 - DNA, 21 bp, Artificial Sequence
  primer
ttatctgctgcacaaagaggg

SEQ ID NO: 90970 - DNA, 20 bp, Artificial Sequence
  primer
gagacccaggcttcagtgag

SEQ ID NO: 90971 - DNA, 21 bp, Artificial Sequence
  primer
agacccgttgctacacaggag

SEQ ID NO: 90972 - DNA, 21 bp, Artificial Sequence
  primer
caaacctgagtcctcctccac

SEQ ID NO: 90973 - DNA, 35 bp, Artificial Sequence
  primer
gtaaaacgacggccagtgctccgaaatccaggacc

SEQ ID NO: 90974 - DNA, 20 bp, Artificial Sequence
  primer
gctctgtcctcagccaacag

SEQ ID NO: 90975 - DNA, 21 bp, Artificial Sequence
  primer
aggacctttgtggacaagcag

SEQ ID NO: 90976 - DNA, 21 bp, Artificial Sequence
  primer
gacatgagatgcctcttccag

SEQ ID NO: 90977 - DNA, 38 bp, Artificial Sequence
  primer
gtaaaacgacggccagtcaggaccacactgcaaacatc

SEQ ID NO: 90978 - DNA, 21 bp, Artificial Sequence
  primer
tcctccttgtccttgctcttc

SEQ ID NO: 90979 - DNA, 20 bp, Artificial Sequence
  primer
gcaaaggcgatggtacagag

SEQ ID NO: 90980 - DNA, 21 bp, Artificial Sequence
  primer
tatgatcattccgctgcactc

SEQ ID NO: 90981 - DNA, 38 bp, Artificial Sequence
  primer
gtaaaacgacggccagtaggccatcacagtaacaatgg

SEQ ID NO: 90982 - DNA, 37 bp, Artificial Sequence
  primer
gtaaaacgacggccagtgggcctaagtttccgagttg

SEQ ID NO: 90983 - DNA, 38 bp, Artificial Sequence
  primer
gtaaaacgacggccagtactgaacatcttccaggaggc

SEQ ID NO: 90984 - DNA, 39 bp, Artificial Sequence
  primer
gtaaaacgacggccagtcagccactaggtgtcaccattc

SEQ ID NO: 90985 - DNA, 38 bp, Artificial Sequence
  primer
gtaaaacgacggccagtatgtcatctccttccaaaccg

SEQ ID NO: 90986 - DNA, 21 bp, Artificial Sequence
  primer
gtacaccatgtggtacacggc

SEQ ID NO: 90987 - DNA, 39 bp, Artificial Sequence
  primer
gtaaaacgacggccagtcaatgagcaagtcattgctgtg

SEQ ID NO: 90988 - DNA, 21 bp, Artificial Sequence
  primer
ttccctctttcctcaaactgc

SEQ ID NO: 90989 - DNA, 38 bp, Artificial Sequence
  primer
gtaaaacgacggccagtatgttccaagcagaggaggag

SEQ ID NO: 90990 - DNA, 36 bp, Artificial Sequence
  primer
gtaaaacgacggccagtagggacagcaatcctggtg

SEQ ID NO: 90991 - DNA, 21 bp, Artificial Sequence
  primer
ggcaaagtcctcgaagatcag

SEQ ID NO: 90992 - DNA, 21 bp, Artificial Sequence
  primer
cacagagacgcaaggctaagg

SEQ ID NO: 90993 - DNA, 20 bp, Artificial Sequence
  primer
gatctcagtgacaccgtccg

SEQ ID NO: 90994 - DNA, 38 bp, Artificial Sequence
  primer
gtaaaacgacggccagtggacccactggcctagaactc

SEQ ID NO: 90995 - DNA, 39 bp, Artificial Sequence
  primer
gtaaaacgacggccagtccaataaagtgactcaggtggg

SEQ ID NO: 90996 - DNA, 35 bp, Artificial Sequence
  primer
gtaaaacgacggccagtgacgggccaaggtcactc

SEQ ID NO: 90997 - DNA, 21 bp, Artificial Sequence
  primer
tcaggcagccttagtagccag

SEQ ID NO: 90998 - DNA, 38 bp, Artificial Sequence
  primer
gtaaaacgacggccagtgggagaaagtgggagacagag

SEQ ID NO: 90999 - DNA, 37 bp, Artificial Sequence
  primer
gtaaaacgacggccagtcctatggaaacacccacacg

SEQ ID NO: 91000 - DNA, 20 bp, Artificial Sequence
  primer
ctaattctggcgcaaacgtc

SEQ ID NO: 91001 - DNA, 21 bp, Artificial Sequence
  primer
gcaacaggaaagaagcaggac

SEQ ID NO: 91002 - DNA, 21 bp, Artificial Sequence
  primer
acttgtgtttagtggccctgg

SEQ ID NO: 91003 - DNA, 21 bp, Artificial Sequence
  primer
agggataaatcccaggaaacc

SEQ ID NO: 91004 - DNA, 21 bp, Artificial Sequence
  primer
tcttgacctcaggcagctctc

SEQ ID NO: 91005 - DNA, 21 bp, Artificial Sequence
  primer
catctgacctctgacccttgg

SEQ ID NO: 91006 - DNA, 20 bp, Artificial Sequence
  primer
gtgttgctctgcaggtagcg

SEQ ID NO: 91007 - DNA, 37 bp, Artificial Sequence
  primer
gtaaaacgacggccagtgtctaaggccaaggccaatc

SEQ ID NO: 91008 - DNA, 38 bp, Artificial Sequence
  primer
gtaaaacgacggccagtacttctgtgccctgtgagtcc

SEQ ID NO: 91009 - DNA, 39 bp, Artificial Sequence
  primer
gtaaaacgacggccagtccctacgacagctggtacagac

SEQ ID NO: 91010 - DNA, 21 bp, Artificial Sequence
  primer
caagacacggtgctgaatttg

SEQ ID NO: 91011 - DNA, 21 bp, Artificial Sequence
  primer
cagggaaattctttgagggag

SEQ ID NO: 91012 - DNA, 21 bp, Artificial Sequence
  primer
gttccaggccactggttactg

SEQ ID NO: 91013 - DNA, 21 bp, Artificial Sequence
  primer
caaccactgattgctcgtagg

SEQ ID NO: 91014 - DNA, 38 bp, Artificial Sequence
  primer
gtaaaacgacggccagtctgagagaagcatgtcttggg

SEQ ID NO: 91015 - DNA, 21 bp, Artificial Sequence
  primer
ccagatgcttctctcctcacc

SEQ ID NO: 91016 - DNA, 21 bp, Artificial Sequence
  primer
aggcttcattcatgctccttc

SEQ ID NO: 91017 - DNA, 45 bp, Artificial Sequence
  primer
gtaaaacgacggccagtgcccaagaatggtatagttataaaggtt

SEQ ID NO: 91018 - DNA, 38 bp, Artificial Sequence
  primer
gtaaaacgacggccagttacacacaacagcgaggagtg

SEQ ID NO: 91019 - DNA, 18 bp, Artificial Sequence
  primer
attagcgaccgcaaaccg

SEQ ID NO: 91020 - DNA, 21 bp, Artificial Sequence
  primer
tccctttgagcgagtcagtta

SEQ ID NO: 91021 - DNA, 22 bp, Artificial Sequence
  primer
caatcttaaatcacggaatggg

SEQ ID NO: 91022 - DNA, 21 bp, Artificial Sequence
  primer
tcaatgcacaccttcgttctc

SEQ ID NO: 91023 - DNA, 21 bp, Artificial Sequence
  primer
tcaatttcttgggctacttgg

SEQ ID NO: 91024 - DNA, 21 bp, Artificial Sequence
  primer
atctcatggaatgtggtgagg

SEQ ID NO: 91025 - DNA, 38 bp, Artificial Sequence
  primer
gtaaaacgacggccagtctaggccaactgactgctgtg

SEQ ID NO: 91026 - DNA, 22 bp, Artificial Sequence
  primer
aagctgtcagttcaacattccc

SEQ ID NO: 91027 - DNA, 21 bp, Artificial Sequence
  primer
cctaaggctggacatttcatc

SEQ ID NO: 91028 - DNA, 42 bp, Artificial Sequence
  primer
gtaaaacgacggccagtgaatgacacaagagtaatggagtga

SEQ ID NO: 91029 - DNA, 40 bp, Artificial Sequence
  primer
gtaaaacgacggccagttgaaataagatgaatgtcagccc

SEQ ID NO: 91030 - DNA, 21 bp, Artificial Sequence
  primer
acacacccatacacacacacg

SEQ ID NO: 91031 - DNA, 38 bp, Artificial Sequence
  primer
gtaaaacgacggccagtgcacactaacatgcctatgcc

SEQ ID NO: 91032 - DNA, 22 bp, Artificial Sequence
  primer
ggaaatttatgcttgtcttggg

SEQ ID NO: 91033 - DNA, 24 bp, Artificial Sequence
  primer
ggtggatacattcaccaagaaatg

SEQ ID NO: 91034 - DNA, 38 bp, Artificial Sequence; identical to SEQ ID NO: 32910
  primer

SEQ ID NO: 91035 - DNA, 21 bp, Artificial Sequence
  primer
ccaacatcagcaattagaggc

SEQ ID NO: 91036 - DNA, 19 bp, Artificial Sequence
  primer
gatgcatgtgaatgcaggc

SEQ ID NO: 91037 - DNA, 38 bp, Artificial Sequence
  primer
gtaaaacgacggccagtaacccggagcatgaaagtaag

SEQ ID NO: 91038 - DNA, 20 bp, Artificial Sequence
  primer
tgcaattacaccagtttggg

SEQ ID NO: 91039 - DNA, 38 bp, Artificial Sequence
  primer
gtaaaacgacggccagttgaggctttcattctctccag

SEQ ID NO: 91040 - DNA, 24 bp, Artificial Sequence
  primer
tgtcacttgattgatcatttaccc

SEQ ID NO: 91041 - DNA, 38 bp, Artificial Sequence
  primer
gtaaaacgacggccagtactgccacttctgctgaaaca

SEQ ID NO: 91042 - DNA, 38 bp, Artificial Sequence
  primer
gtaaaacgacggccagtctccatccacacagaaacacc

SEQ ID NO: 91043 - DNA, 38 bp, Artificial Sequence
  primer
gtaaaacgacggccagtgtaacaccattgcactgagcc

SEQ ID NO: 91044 - DNA, 22 bp, Artificial Sequence
  primer
ttacaggtgtaagcctccaagc

SEQ ID NO: 91045 - DNA, 43 bp, Artificial Sequence
  primer
gtaaaacgacggccagtttcatatggaatagtcaggaaatagc

SEQ ID NO: 91046 - DNA, 38 bp, Artificial Sequence
  primer
gtaaaacgacggccagtcgcattgctcaataatgttgc

SEQ ID NO: 91047 - DNA, 38 bp, Artificial Sequence
  primer
gtaaaacgacggccagtagaagcccagagtgttcttgc

SEQ ID NO: 91048 - DNA, 38 bp, Artificial Sequence
  primer
gtaaaacgacggccagtcaaagcaaagaatggatgagc

SEQ ID NO: 91049 - DNA, 18 bp, Artificial Sequence
  primer
ccctggagagggagcaac

SEQ ID NO: 91050 - DNA, 38 bp, Artificial Sequence
  primer
gtaaaacgacggccagtcttctccaacatgggaagagc

SEQ ID NO: 91051 - DNA, 21 bp, Artificial Sequence
  primer
ggtgctgatgctctatccctc

SEQ ID NO: 91052 - DNA, 21 bp, Artificial Sequence
  primer
ccagtgagtgttaggtcaggg

SEQ ID NO: 91053 - DNA, 37 bp, Artificial Sequence
  primer
gtaaaacgacggccagtctgttactttgccctgcacc

SEQ ID NO: 91054 - DNA, 38 bp, Artificial Sequence
  primer
gtaaaacgacggccagttaaggtcccatcctatcctgg

SEQ ID NO: 91055 - DNA, 21 bp, Artificial Sequence
  primer
tgtttgatgttgcctcactcc

SEQ ID NO: 91056 - DNA, 21 bp, Artificial Sequence
  primer
ccactgctgtcattatcctgc

SEQ ID NO: 91057 - DNA, 38 bp, Artificial Sequence
  primer
gtaaaacgacggccagtggcgttacaaagccaactagc

SEQ ID NO: 91058 - DNA, 38 bp, Artificial Sequence
  primer
gtaaaacgacggccagtactgttcctacccactggtcg

SEQ ID NO: 91059 - DNA, 38 bp, Artificial Sequence
  primer
gtaaaacgacggccagtataaagcactggcgaggagag

SEQ ID NO: 91060 - DNA, 20 bp, Artificial Sequence
  primer
caccttggcctagaagatgg

SEQ ID NO: 91061 - DNA, 38 bp, Artificial Sequence
  primer
gtaaaacgacggccagtctgtccaacccacctataccc

SEQ ID NO: 91062 - DNA, 21 bp, Artificial Sequence
  primer
tttagggacaggacatggagg

SEQ ID NO: 91063 - DNA, 38 bp, Artificial Sequence
  primer
gtaaaacgacggccagttcaaactgctgctccttgatg

SEQ ID NO: 91064 - DNA, 21 bp, Artificial Sequence
  primer
cctggcagatgtaactgatgg

SEQ ID NO: 91065 - DNA, 37 bp, Artificial Sequence
  primer
gtaaaacgacggccagtcaccttccatgtgctccttc

SEQ ID NO: 91066 - DNA, 21 bp, Artificial Sequence
  primer
gatgggataataggcaggcag

SEQ ID NO: 91067 - DNA, 21 bp, Artificial Sequence
  primer
tttgcctgggatggaattaac

SEQ ID NO: 91068 - DNA, 22 bp, Artificial Sequence
  primer
ttggtctttctcactttagcca

SEQ ID NO: 91069 - DNA, 20 bp, Artificial Sequence
  primer
tgagcacagcatttgcaatc

SEQ ID NO: 91070 - DNA, 20 bp, Artificial Sequence
  primer
ggtgacagagcaagaccctg

SEQ ID NO: 91071 - DNA, 38 bp, Artificial Sequence
  primer
gtaaaacgacggccagtcccacagctgctttagagagg

SEQ ID NO: 91072 - DNA, 37 bp, Artificial Sequence
  primer
gtaaaacgacggccagtactgggaggagatccatgtg

SEQ ID NO: 91073 - DNA, 20 bp, Artificial Sequence
  primer
agcggacagctccacgtaag

SEQ ID NO: 91074 - DNA, 21 bp, Artificial Sequence
  primer
gactcctgggctagggttctc

SEQ ID NO: 91075 - DNA, 38 bp, Artificial Sequence
  primer
gtaaaacgacggccagtagtcttgccatgctttctctg

SEQ ID NO: 91076 - DNA, 21 bp, Artificial Sequence
  primer
gaatcgtacatcccgagttgg

SEQ ID NO: 91077 - DNA, 38 bp, Artificial Sequence
  primer
gtaaaacgacggccagtagggttcctggagaggaagag

SEQ ID NO: 91078 - DNA, 21 bp, Artificial Sequence
  primer
tgctacaaattcacggaggtg

SEQ ID NO: 91079 - DNA, 21 bp, Artificial Sequence
  primer
ggaacaaaccaagcaatggtc

SEQ ID NO: 91080 - DNA, 38 bp, Artificial Sequence
  primer
gtaaaacgacggccagttctggtcatctctggtcttgg

SEQ ID NO: 91081 - DNA, 37 bp, Artificial Sequence
  primer
gtaaaacgacggccagtcctcttccttgctgggtctc

SEQ ID NO: 91082 - DNA, 38 bp, Artificial Sequence
  primer
gtaaaacgacggccagtaatggtagacgggctgtcatc

SEQ ID NO: 91083 - DNA, 38 bp, Artificial Sequence
  primer
gtaaaacgacggccagtaaagtggtagaaggcacagcg

SEQ ID NO: 91084 - DNA, 23 bp, Artificial Sequence
  primer
ttcctgcaaagatggactaacag

SEQ ID NO: 91085 - DNA, 37 bp, Artificial Sequence
  primer
gtaaaacgacggccagtgaatgttcagagagccgcac

SEQ ID NO: 91086 - DNA, 38 bp, Artificial Sequence
  primer
gtaaaacgacggccagtcgtgaaggcttgtgtaacctg

SEQ ID NO: 91087 - DNA, 38 bp, Artificial Sequence
  primer
gtaaaacgacggccagtatggcattggtcagtcagttg

SEQ ID NO: 91088 - DNA, 21 bp, Artificial Sequence
  primer
tatccagcaggctttattggc

SEQ ID NO: 91089 - DNA, 19 bp, Artificial Sequence
  primer
tttgtagtcagccatgccc

SEQ ID NO: 91090 - DNA, 24 bp, Artificial Sequence
  primer
ttagaatgggtgtcatatttctcg

SEQ ID NO: 91091 - DNA, 21 bp, Artificial Sequence
  primer
ctggaatacccattcctttgg

SEQ ID NO: 91092 - DNA, 21 bp, Artificial Sequence
  primer
tctcacctccacctgaaactc

SEQ ID NO: 91093 - DNA, 40 bp, Artificial Sequence
  primer
gtaaaacgacggccagtggcagtattgaagtagcaccttg

SEQ ID NO: 91094 - DNA, 40 bp, Artificial Sequence
  primer
gtaaaacgacggccagttgaacttctcacaaagctgactg

SEQ ID NO: 91095 - DNA, 21 bp, Artificial Sequence
  primer
gattgatttgaaggcatgctg

SEQ ID NO: 91096 - DNA, 37 bp, Artificial Sequence
  primer
gtaaaacgacggccagtaactcaaagggtctcgccac

SEQ ID NO: 91097 - DNA, 20 bp, Artificial Sequence
  primer
agcttcggcccttaatcatc

SEQ ID NO: 91098 - DNA, 21 bp, Artificial Sequence
  primer
aggtgggaggacaaactcatc

SEQ ID NO: 91099 - DNA, 21 bp, Artificial Sequence
  primer
tcccatcttggacacaaacag

SEQ ID NO: 91100 - DNA, 39 bp, Artificial Sequence
  primer
gtaaaacgacggccagttccaacagagaccgtaaattgg

SEQ ID NO: 91101 - DNA, 21 bp, Artificial Sequence
  primer
gatcatcagttctggcttccc

SEQ ID NO: 91102 - DNA, 39 bp, Artificial Sequence
  primer
gtaaaacgacggccagtactgtgaggcgataagtttgtg

SEQ ID NO: 91103 - DNA, 38 bp, Artificial Sequence
  primer
gtaaaacgacggccagtccaggcctttaagaacaggtc

SEQ ID NO: 91104 - DNA, 38 bp, Artificial Sequence
  primer
gtaaaacgacggccagtccaatcccaagaatgaatgag

SEQ ID NO: 91105 - DNA, 37 bp, Artificial Sequence
  primer
gtaaaacgacggccagtgagagcagcctgaatccctc

SEQ ID NO: 91106 - DNA, 21 bp, Artificial Sequence
  primer
tttccttccactcactcccac

SEQ ID NO: 91107 - DNA, 20 bp, Artificial Sequence
  primer
gctctcctacctcagcaccc

SEQ ID NO: 91108 - DNA, 38 bp, Artificial Sequence
  primer
gtaaaacgacggccagtacactaagagggtgaggtggg

SEQ ID NO: 91109 - DNA, 21 bp, Artificial Sequence
  primer
aagtccaagccctcaaccttc

SEQ ID NO: 91110 - DNA, 21 bp, Artificial Sequence
  primer
atcatctgcgggaatatcagg

SEQ ID NO: 91111 - DNA, 38 bp, Artificial Sequence
  primer
gtaaaacgacggccagtgtctatgaggagagggagggc

SEQ ID NO: 91112 - DNA, 21 bp, Artificial Sequence
  primer
ggatgggactgaatcacactg

SEQ ID NO: 91113 - DNA, 38 bp, Artificial Sequence
  primer
gtaaaacgacggccagtgcgcctagaatcagaccactg

SEQ ID NO: 91114 - DNA, 38 bp, Artificial Sequence
  primer
gtaaaacgacggccagtatcattgaagagccttcagcc

SEQ ID NO: 91115 - DNA, 21 bp, Artificial Sequence
  primer
gcaacccaagttgaagtgttc

SEQ ID NO: 91116 - DNA, 19 bp, Artificial Sequence
  primer
aacacctccctgccagatg

SEQ ID NO: 91117 - DNA, 21 bp, Artificial Sequence
  primer
gctacaggctagtggagtggc

SEQ ID NO: 91118 - DNA, 21 bp, Artificial Sequence
  primer
ttgacacggagtcgatacagg

SEQ ID NO: 91119 - DNA, 21 bp, Artificial Sequence
  primer
aacctggtgaacacagacagc

SEQ ID NO: 91120 - DNA, 38 bp, Artificial Sequence
  primer
gtaaaacgacggccagtttgaagagctgccaatgaaac

SEQ ID NO: 91121 - DNA, 21 bp, Artificial Sequence
  primer
tctcagccaacttcttgaggg

SEQ ID NO: 91122 - DNA, 38 bp, Artificial Sequence
  primer
gtaaaacgacggccagtacagagaagcagagaggacgg

SEQ ID NO: 91123 - DNA, 38 bp, Artificial Sequence
  primer
gtaaaacgacggccagttagggtaagtggtggtccagg

SEQ ID NO: 91124 - DNA, 38 bp, Artificial Sequence
  primer
gtaaaacgacggccagtgtgtcgcaagtgtccagagag

SEQ ID NO: 91125 - DNA, 21 bp, Artificial Sequence
  primer
aagtttctcaatgtgcgagcc

SEQ ID NO: 91126 - DNA, 20 bp, Artificial Sequence
  primer
ctcttgaacttaggaggcgg

SEQ ID NO: 91127 - DNA, 38 bp, Artificial Sequence
  primer
gtaaaacgacggccagttttaacgcttaggagggcaac

SEQ ID NO: 91128 - DNA, 24 bp, Artificial Sequence
  primer
caagatggttgaatgtctacttcg

SEQ ID NO: 91129 - DNA, 38 bp, Artificial Sequence
  primer
gtaaaacgacggccagttgttgcaaacttcaaagcagg

SEQ ID NO: 91130 - DNA, 21 bp, Artificial Sequence
  primer
gaaattaagggcagggttgaa

SEQ ID NO: 91131 - DNA, 42 bp, Artificial Sequence
  primer
gtaaaacgacggccagttttctttgtgacactgaagctcata

SEQ ID NO: 91132 - DNA, 37 bp, Artificial Sequence
  primer
gtaaaacgacggccagtcctttcacacctctcctccc

SEQ ID NO: 91133 - DNA, 38 bp, Artificial Sequence
  primer
gtaaaacgacggccagtgaagggaggagctagggtgag

SEQ ID NO: 91134 - DNA, 21 bp, Artificial Sequence
  primer
cttacgcatgctcaggaacac

SEQ ID NO: 91135 - DNA, 37 bp, Artificial Sequence
  primer
gtaaaacgacggccagtcggcaggcactaagtctgtc

SEQ ID NO: 91136 - DNA, 38 bp, Artificial Sequence
  primer
gtaaaacgacggccagtggaggccagcaacagaaatag

SEQ ID NO: 91137 - DNA, 38 bp, Artificial Sequence
  primer
gtaaaacgacggccagtgtaattgcttcatcccaaggc

SEQ ID NO: 91138 - DNA, 38 bp, Artificial Sequence
  primer
gtaaaacgacggccagtgaagcgtgggagaggtgttac

SEQ ID NO: 91139 - DNA, 37 bp, Artificial Sequence
  primer
gtaaaacgacggccagttcccattggctccctagttc

SEQ ID NO: 91140 - DNA, 38 bp, Artificial Sequence
  primer
gtaaaacgacggccagtgccaaccaagattcctacacc

SEQ ID NO: 91141 - DNA, 21 bp, Artificial Sequence
  primer
agactccgtctcccacctacc

SEQ ID NO: 91142 - DNA, 21 bp, Artificial Sequence
  primer
ctgggtccattcctctctagg

SEQ ID NO: 91143 - DNA, 36 bp, Artificial Sequence
  primer
gtaaaacgacggccagtggtaaacagcatgtgcggg

SEQ ID NO: 91144 - DNA, 20 bp, Artificial Sequence
  primer
cctggctccttccattaagc

SEQ ID NO: 91145 - DNA, 36 bp, Artificial Sequence
  primer
gtaaaacgacggccagtagaagtggttcactgggcg

SEQ ID NO: 91146 - DNA, 21 bp, Artificial Sequence
  primer
aaacatttcagggacaaaggc

SEQ ID NO: 91147 - DNA, 21 bp, Artificial Sequence
  primer
aactgctcatccaaacaccac

SEQ ID NO: 91148 - DNA, 20 bp, Artificial Sequence
  primer
ttgctaggcaccatcaaagg

SEQ ID NO: 91149 - DNA, 38 bp, Artificial Sequence
  primer
gtaaaacgacggccagtagacacaaagcaaccagggtc

SEQ ID NO: 91150 - DNA, 20 bp, Artificial Sequence
  primer
aaagaagcagcagcatttgg

SEQ ID NO: 91151 - DNA, 39 bp, Artificial Sequence
  primer
gtaaaacgacggccagtaagataaagtgctccctctccc

SEQ ID NO: 91152 - DNA, 21 bp, Artificial Sequence
  primer
gatgatgctttgttgctgtgg

SEQ ID NO: 91153 - DNA, 25 bp, Artificial Sequence
  primer
tgaggaaatgaaactcaaactatgc

SEQ ID NO: 91154 - DNA, 26 bp, Artificial Sequence
  primer
tgagaaagtgattatctgacaggatg

SEQ ID NO: 91155 - DNA, 21 bp, Artificial Sequence
  primer
tggccatagagctgttcagtg

SEQ ID NO: 91156 - DNA, 39 bp, Artificial Sequence
  primer
gtaaaacgacggccagtttggagtaaggagcaccagaag

SEQ ID NO: 91157 - DNA, 21 bp, Artificial Sequence
  primer
tatcagggactcccaactcgt

SEQ ID NO: 91158 - DNA, 38 bp, Artificial Sequence
  primer
gtaaaacgacggccagtactgatatctgcctgggaagc

SEQ ID NO: 91159 - DNA, 36 bp, Artificial Sequence
  primer
gtaaaacgacggccagtttcagccacctcacagcac

SEQ ID NO: 91160 - DNA, 21 bp, Artificial Sequence
  primer
cctatgaagggcctggactac

SEQ ID NO: 91161 - DNA, 38 bp, Artificial Sequence
  primer
gtaaaacgacggccagtgagtcccaggtctctgaatcc

SEQ ID NO: 91162 - DNA, 21 bp, Artificial Sequence
  primer
tctgccatcgtagtgctcatc

SEQ ID NO: 91163 - DNA, 38 bp, Artificial Sequence
  primer
gtaaaacgacggccagtaacggacttcagttacctggg

SEQ ID NO: 91164 - DNA, 19 bp, Artificial Sequence
  primer
aaggctaaggaccggaagc

SEQ ID NO: 91165 - DNA, 22 bp, Artificial Sequence
  primer
tcctctctcctctcgaaagacc

SEQ ID NO: 91166 - DNA, 38 bp, Artificial Sequence
  primer
gtaaaacgacggccagtcacaaggaaagcagcaccttc

SEQ ID NO: 91167 - DNA, 21 bp, Artificial Sequence
  primer
ggagaggtgtgactaaacggg

SEQ ID NO: 91168 - DNA, 19 bp, Artificial Sequence
  primer
caatgagccgagactgtgc

SEQ ID NO: 91169 - DNA, 20 bp, Artificial Sequence
  primer
tgcaatgacacgatctcagc

SEQ ID NO: 91170 - DNA, 20 bp, Artificial Sequence
  primer
caggacatgcttgctgtgat

SEQ ID NO: 91171 - DNA, 21 bp, Artificial Sequence
  primer
ctccatcccagcgttatgttc

SEQ ID NO: 91172 - DNA, 21 bp, Artificial Sequence
  primer
ctcttgcacacttgctccctc

SEQ ID NO: 91173 - DNA, 23 bp, Artificial Sequence
  primer
catggagagagtttgatgtgtcc

SEQ ID NO: 91174 - DNA, 21 bp, Artificial Sequence
  primer
ccctgggttattactttgggc

SEQ ID NO: 91175 - DNA, 41 bp, Artificial Sequence
  primer
gtaaaacgacggccagttgtatggatcccaacattcttaaa

SEQ ID NO: 91176 - DNA, 21 bp, Artificial Sequence
  primer
agtgccttggtaatgtctccg

SEQ ID NO: 91177 - DNA, 21 bp, Artificial Sequence
  primer
cccaaattcatgtccaaactg

SEQ ID NO: 91178 - DNA, 23 bp, Artificial Sequence
  primer
ttcctcaaagactgatgaagcac

SEQ ID NO: 91179 - DNA, 20 bp, Artificial Sequence
  primer
gcagtgagccaacatcacac

SEQ ID NO: 91180 - DNA, 21 bp, Artificial Sequence
  primer
gtgtctctgtgcaagccattc

SEQ ID NO: 91181 - DNA, 37 bp, Artificial Sequence
  primer
gtaaaacgacggccagtacttagtagggcatggtggc

SEQ ID NO: 91182 - DNA, 21 bp, Artificial Sequence
  primer
gcacagtgatcttccatcgag

SEQ ID NO: 91183 - DNA, 21 bp, Artificial Sequence
  primer
caagtaacctggcacagggag

SEQ ID NO: 91184 - DNA, 20 bp, Artificial Sequence
  primer
tgacgttcgttgagatgctg

SEQ ID NO: 91185 - DNA, 21 bp, Artificial Sequence
  primer
atcaccagaagagatgggtcc

SEQ ID NO: 91186 - DNA, 21 bp, Artificial Sequence
  primer
acttcctgtccaggatgatcg

SEQ ID NO: 91187 - DNA, 36 bp, Artificial Sequence
  primer
gtaaaacgacggccagtgaaaccagctgggcaagag

SEQ ID NO: 91188 - DNA, 21 bp, Artificial Sequence
  primer
gactgcccaacacaaggttag

SEQ ID NO: 91189 - DNA, 38 bp, Artificial Sequence
  primer
gtaaaacgacggccagtggacagggtcagatggaagac

SEQ ID NO: 91190 - DNA, 21 bp, Artificial Sequence
  primer
accatgtagagcgcatctgtc

SEQ ID NO: 91191 - DNA, 21 bp, Artificial Sequence
  primer
cagaatgaaggactggaaggg

SEQ ID NO: 91192 - DNA, 21 bp, Artificial Sequence
  primer
gttggagagtcacactgcctg

SEQ ID NO: 91193 - DNA, 21 bp, Artificial Sequence
  primer
gaggaagcctcagatggtttg

SEQ ID NO: 91194 - DNA, 38 bp, Artificial Sequence
  primer
gtaaaacgacggccagtagtgggaaagtggcagagacc

SEQ ID NO: 91195 - DNA, 41 bp, Artificial Sequence
  primer
gtaaaacgacggccagtcagaacaaccgactgataatcttc

SEQ ID NO: 91196 - DNA, 39 bp, Artificial Sequence
  primer
gtaaaacgacggccagtcctaggcttccattgcattaag

SEQ ID NO: 91197 - DNA, 21 bp, Artificial Sequence
  primer
ttctccaaagaccctgaatgc

SEQ ID NO: 91198 - DNA, 38 bp, Artificial Sequence
  primer
gtaaaacgacggccagtccataaccacaaggacagcag

SEQ ID NO: 91199 - DNA, 40 bp, Artificial Sequence
  primer
gtaaaacgacggccagttggaactagtggcaaagtgtctc

SEQ ID NO: 91200 - DNA, 38 bp, Artificial Sequence
  primer
gtaaaacgacggccagtggattctgtccatccttgacc

SEQ ID NO: 91201 - DNA, 40 bp, Artificial Sequence
  primer
gtaaaacgacggccagtacgctaggtttaagtagctgtgc

SEQ ID NO: 91202 - DNA, 38 bp, Artificial Sequence
  primer
gtaaaacgacggccagtacctcctggaacctggatttg

SEQ ID NO: 91203 - DNA, 37 bp, Artificial Sequence
  primer
gtaaaacgacggccagtgtatgggacctctggaaggg

SEQ ID NO: 91204 - DNA, 21 bp, Artificial Sequence
  primer
agtgttcagggacggctgtag

SEQ ID NO: 91205 - DNA, 20 bp, Artificial Sequence
  primer
atctctagcccaggaggcag

SEQ ID NO: 91206 - DNA, 20 bp, Artificial Sequence
  primer
ctcgtcaactctggcaaagg

SEQ ID NO: 91207 - DNA, 38 bp, Artificial Sequence
  primer
gtaaaacgacggccagttgaatgagtttgtcagccagg

SEQ ID NO: 91208 - DNA, 38 bp, Artificial Sequence
  primer
gtaaaacgacggccagtattatcaagatgagcgctggc

SEQ ID NO: 91209 - DNA, 21 bp, Artificial Sequence
  primer
agcccagccttgatttctttc

SEQ ID NO: 91210 - DNA, 21 bp, Artificial Sequence
  primer
accaatgacagacactggcac

SEQ ID NO: 91211 - DNA, 22 bp, Artificial Sequence
  primer
ggcaacagagtgagaccctatc

SEQ ID NO: 91212 - DNA, 21 bp, Artificial Sequence
  primer
ctaggctccagtctcggctac

SEQ ID NO: 91213 - DNA, 38 bp, Artificial Sequence
  primer
gtaaaacgacggccagtagcaggacaggacagttaccg

SEQ ID NO: 91214 - DNA, 24 bp, Artificial Sequence
  primer
caaattgggacttactgattcctc

SEQ ID NO: 91215 - DNA, 38 bp, Artificial Sequence
  primer
gtaaaacgacggccagtcctgcctttgctctgctaatc

SEQ ID NO: 91216 - DNA, 22 bp, Artificial Sequence
  primer
tttcaaggagggaaatgtgttc

SEQ ID NO: 91217 - DNA, 38 bp, Artificial Sequence
  primer
gtaaaacgacggccagtgatttaggagggcaatgaagg

SEQ ID NO: 91218 - DNA, 39 bp, Artificial Sequence
  primer
gtaaaacgacggccagtttcaaagggcagtatgtcaatc

SEQ ID NO: 91219 - DNA, 38 bp, Artificial Sequence
  primer
gtaaaacgacggccagtccaaaggtctatgacccatcc

SEQ ID NO: 91220 - DNA, 38 bp, Artificial Sequence
  primer
gtaaaacgacggccagttccaaacagtaacccgtttcc

SEQ ID NO: 91221 - DNA, 38 bp, Artificial Sequence
  primer
gtaaaacgacggccagtgctacgatctccaacctggac

SEQ ID NO: 91222 - DNA, 23 bp, Artificial Sequence
  primer
ccgttatctttgctacctagctg

SEQ ID NO: 91223 - DNA, 37 bp, Artificial Sequence
  primer
gtaaaacgacggccagtacagatctggagggctgacc

SEQ ID NO: 91224 - DNA, 21 bp, Artificial Sequence
  primer
acatggttggctacactgagg

SEQ ID NO: 91225 - DNA, 21 bp, Artificial Sequence
  primer
tggttgaatgcgactgatttc

SEQ ID NO: 91226 - DNA, 18 bp, Artificial Sequence
  primer
caagatgcctggcctcag

SEQ ID NO: 91227 - DNA, 21 bp, Artificial Sequence
  primer
gtaaagagcagggagtttgcc

SEQ ID NO: 91228 - DNA, 21 bp, Artificial Sequence
  primer
tccaaagtcttcccaagaatg

SEQ ID NO: 91229 - DNA, 21 bp, Artificial Sequence
  primer
gcaaagccaggataggaacac

SEQ ID NO: 91230 - DNA, 21 bp, Artificial Sequence
  primer
caggattctggcatcatgaac

SEQ ID NO: 91231 - DNA, 21 bp, Artificial Sequence
  primer
actcatacacgacacacacgg

SEQ ID NO: 91232 - DNA, 38 bp, Artificial Sequence
  primer
gtaaaacgacggccagtcacagagagctgcttgtcacc

SEQ ID NO: 91233 - DNA, 37 bp, Artificial Sequence
  primer
gtaaaacgacggccagtcagcccagatggagtctcag

SEQ ID NO: 91234 - DNA, 19 bp, Artificial Sequence
  primer
ctccaggtggtggttctgg

SEQ ID NO: 91235 - DNA, 38 bp, Artificial Sequence
  primer
gtaaaacgacggccagtaaggaccgtgggacacattag

SEQ ID NO: 91236 - DNA, 20 bp, Artificial Sequence
  primer
aagaaccttcgctgaaagcc

SEQ ID NO: 91237 - DNA, 38 bp, Artificial Sequence
  primer
gtaaaacgacggccagtgcacactccaccaagagaagg

SEQ ID NO: 91238 - DNA, 21 bp, Artificial Sequence
  primer
caatccaaactcagctcctgg

SEQ ID NO: 91239 - DNA, 37 bp, Artificial Sequence
  primer
gtaaaacgacggccagtctgacactcccagagcacag

SEQ ID NO: 91240 - DNA, 20 bp, Artificial Sequence
  primer
atcttgcccactgagctttg

SEQ ID NO: 91241 - DNA, 21 bp, Artificial Sequence
  primer
cgctcctcgaagtattccaac

SEQ ID NO: 91242 - DNA, 21 bp, Artificial Sequence
  primer
agaagacaccacatatggccc

SEQ ID NO: 91243 - DNA, 21 bp, Artificial Sequence
  primer
tctcgctggtagtcacactcc

SEQ ID NO: 91244 - DNA, 18 bp, Artificial Sequence
  primer
aggcaggatatggcctcg

SEQ ID NO: 91245 - DNA, 38 bp, Artificial Sequence
  primer
gtaaaacgacggccagtcactggtgctacttcactgcc

SEQ ID NO: 91246 - DNA, 19 bp, Artificial Sequence
  primer
agccctgagctctctgctg

SEQ ID NO: 91247 - DNA, 38 bp, Artificial Sequence
  primer
gtaaaacgacggccagtagcctaactgcctgctgtcac

SEQ ID NO: 91248 - DNA, 20 bp, Artificial Sequence
  primer
ccctgtgctttcatccattc

SEQ ID NO: 91249 - DNA, 19 bp, Artificial Sequence
  primer
accacgacctcgctactgg

SEQ ID NO: 91250 - DNA, 38 bp, Artificial Sequence
  primer
gtaaaacgacggccagtttcctgggaggaaggctactc

SEQ ID NO: 91251 - DNA, 21 bp, Artificial Sequence
  primer
gctgagctggccttcacatac

SEQ ID NO: 91252 - DNA, 39 bp, Artificial Sequence
  primer
gtaaaacgacggccagtaaatgggagagcagaggtaagg

SEQ ID NO: 91253 - DNA, 20 bp, Artificial Sequence
  primer
cacaagaccgcaacctcatc

SEQ ID NO: 91254 - DNA, 38 bp, Artificial Sequence
  primer
gtaaaacgacggccagtaacattgccattctccctgac

SEQ ID NO: 91255 - DNA, 21 bp, Artificial Sequence
  primer
aaggcagtccaaggtcagttc

SEQ ID NO: 91256 - DNA, 38 bp, Artificial Sequence
  primer
gtaaaacgacggccagtaagcctcaaggtctctccctc

SEQ ID NO: 91257 - DNA, 36 bp, Artificial Sequence
  primer
gtaaaacgacggccagtccagcagtctcattcctgc

SEQ ID NO: 91258 - DNA, 39 bp, Artificial Sequence
  primer
gtaaaacgacggccagttgcacagatgttatgggaacac

SEQ ID NO: 91259 - DNA, 38 bp, Artificial Sequence
  primer
gtaaaacgacggccagttaatccaggcagactcttggc

SEQ ID NO: 91260 - DNA, 22 bp, Artificial Sequence
  primer
ccacaagtagatgcagccaaac

SEQ ID NO: 91261 - DNA, 36 bp, Artificial Sequence
  primer
gtaaaacgacggccagtatttccctgggaccctgac

SEQ ID NO: 91262 - DNA, 21 bp, Artificial Sequence
  primer
acacacacaccctcaacatgg

SEQ ID NO: 91263 - DNA, 20 bp, Artificial Sequence
  primer
cccagaggtgtaggttgcag

SEQ ID NO: 91264 - DNA, 38 bp, Artificial Sequence
  primer
gtaaaacgacggccagtgaactaccgcagaacctccag

SEQ ID NO: 91265 - DNA, 25 bp, Artificial Sequence
  primer
tgaactactgaagaagcaggatgtc

SEQ ID NO: 91266 - DNA, 21 bp, Artificial Sequence
  primer
aacgtctggataaggtccagg

SEQ ID NO: 91267 - DNA, 21 bp, Artificial Sequence
  primer
agtcaaagacacacagtgggc

SEQ ID NO: 91268 - DNA, 21 bp, Artificial Sequence
  primer
ggactgccaagatgactgttg

SEQ ID NO: 91269 - DNA, 38 bp, Artificial Sequence
  primer
gtaaaacgacggccagtatatacagcagtggcagagcg

SEQ ID NO: 91270 - DNA, 21 bp, Artificial Sequence
  primer
ctttgcaatggacagggaaac

SEQ ID NO: 91271 - DNA, 21 bp, Artificial Sequence
  primer
tgagacagagcttcgttgacc

SEQ ID NO: 91272 - DNA, 21 bp, Artificial Sequence
  primer
gacggtcactggaaccttgag

SEQ ID NO: 91273 - DNA, 21 bp, Artificial Sequence
  primer
cattgcagtaaacgagccatc

SEQ ID NO: 91274 - DNA, 21 bp, Artificial Sequence
  primer
tcggaagcacaagaatcactg

SEQ ID NO: 91275 - DNA, 38 bp, Artificial Sequence
  primer
gtaaaacgacggccagtggagtaagtgacttgcccagc

SEQ ID NO: 91276 - DNA, 38 bp, Artificial Sequence
  primer
gtaaaacgacggccagtgtcttagctctgcccaccaac

SEQ ID NO: 91277 - DNA, 37 bp, Artificial Sequence
  primer
gtaaaacgacggccagtgtcaattcatgcgccttcag

SEQ ID NO: 91278 - DNA, 20 bp, Artificial Sequence
  primer
agcagtggagaggcttcctg

SEQ ID NO: 91279 - DNA, 38 bp, Artificial Sequence
  primer
gtaaaacgacggccagttatgcaaatagagggatcggg

SEQ ID NO: 91280 - DNA, 21 bp, Artificial Sequence
  primer
tttggtctgcactgtctcctg

SEQ ID NO: 91281 - DNA, 21 bp, Artificial Sequence
  primer
gtcataggccacacccttctg

SEQ ID NO: 91282 - DNA, 21 bp, Artificial Sequence
  primer
ttgcagaaagtgaacagcagg

SEQ ID NO: 91283 - DNA, 38 bp, Artificial Sequence
  primer
gtaaaacgacggccagtgagtggatctgcttctcagcc

SEQ ID NO: 91284 - DNA, 21 bp, Artificial Sequence
  primer
gcttgcctcccttacccatac

SEQ ID NO: 91285 - DNA, 19 bp, Artificial Sequence
  primer
actcttcagcctgggcctc

SEQ ID NO: 91286 - DNA, 37 bp, Artificial Sequence
  primer
gtaaaacgacggccagttatgccatcctcacccacac

SEQ ID NO: 91287 - DNA, 38 bp, Artificial Sequence
  primer
gtaaaacgacggccagtgtacagggaggatgccatgag

SEQ ID NO: 91288 - DNA, 21 bp, Artificial Sequence
  primer
atgacctcatgccattcacac

SEQ ID NO: 91289 - DNA, 21 bp, Artificial Sequence
  primer
gatgtcccatagtccctggag

SEQ ID NO: 91290 - DNA, 38 bp, Artificial Sequence
  primer
gtaaaacgacggccagtaggttccatgagatcctgctc

SEQ ID NO: 91291 - DNA, 38 bp, Artificial Sequence
  primer
gtaaaacgacggccagttcaaagcaaggcaacttcttg

SEQ ID NO: 91292 - DNA, 38 bp, Artificial Sequence
  primer
gtaaaacgacggccagtactcctgccatgctgctactc

SEQ ID NO: 91293 - DNA, 21 bp, Artificial Sequence
  primer
atcacagggagactcaatccc

SEQ ID NO: 91294 - DNA, 21 bp, Artificial Sequence
  primer
caggcagagcagtctttgaac

SEQ ID NO: 91295 - DNA, 21 bp, Artificial Sequence
  primer
ctcaatcactggaaccacagg

SEQ ID NO: 91296 - DNA, 20 bp, Artificial Sequence
  primer
ggatcagaatccttccaggc

SEQ ID NO: 91297 - DNA, 21 bp, Artificial Sequence
  primer
cacccaagactccttggaaag

SEQ ID NO: 91298 - DNA, 18 bp, Artificial Sequence
  primer
ccgtccagggagatgttg

SEQ ID NO: 91299 - DNA, 37 bp, Artificial Sequence
  primer
gtaaaacgacggccagtctttgtcctggcctctgtcc

SEQ ID NO: 91300 - DNA, 21 bp, Artificial Sequence
  primer
aaggcaaaggacacaggtcac

SEQ ID NO: 91301 - DNA, 38 bp, Artificial Sequence
  primer
gtaaaacgacggccagtgagtggagggaagattgcttg

SEQ ID NO: 91302 - DNA, 21 bp, Artificial Sequence
  primer
atcgacagcgtgaacagaaac

SEQ ID NO: 91303 - DNA, 21 bp, Artificial Sequence
  primer
ttacgtggagtgaagcacagc

SEQ ID NO: 91304 - DNA, 38 bp, Artificial Sequence
  primer
gtaaaacgacggccagtcggagggctacagattgaaag

SEQ ID NO: 91305 - DNA, 35 bp, Artificial Sequence
  primer
gtaaaacgacggccagtactgtctgtgctgctgcg

SEQ ID NO: 91306 - DNA, 21 bp, Artificial Sequence
  primer
tgagagacccagtggtgtgtg

SEQ ID NO: 91307 - DNA, 21 bp, Artificial Sequence
  primer
cttccctcttccacatttccc

SEQ ID NO: 91308 - DNA, 38 bp, Artificial Sequence
  primer
gtaaaacgacggccagtttccaaggaaatggcaaagag

SEQ ID NO: 91309 - DNA, 21 bp, Artificial Sequence
  primer
ctaagccttgtgcaaattccc

SEQ ID NO: 91310 - DNA, 20 bp, Artificial Sequence
  primer
cttcccatcaacctcccttc

SEQ ID NO: 91311 - DNA, 38 bp, Artificial Sequence
  primer
gtaaaacgacggccagtgagctggtaagaggtggatgc

SEQ ID NO: 91312 - DNA, 21 bp, Artificial Sequence
  primer
ctccttctccagtgtcattgc

SEQ ID NO: 91313 - DNA, 20 bp, Artificial Sequence
  primer
aaattagggcggattgatgg

SEQ ID NO: 91314 - DNA, 20 bp, Artificial Sequence
  primer
cagtacatcctgggctctcg

SEQ ID NO: 91315 - DNA, 38 bp, Artificial Sequence
  primer
gtaaaacgacggccagtccagcactttgtagccatgag

SEQ ID NO: 91316 - DNA, 19 bp, Artificial Sequence
  primer
cagaggctgtggcttccag

SEQ ID NO: 91317 - DNA, 21 bp, Artificial Sequence
  primer
ctagctccaggagaggcaaag

SEQ ID NO: 91318 - DNA, 21 bp, Artificial Sequence
  primer
ttcctcctggaaacactgagg

SEQ ID NO: 91319 - DNA, 21 bp, Artificial Sequence
  primer
tcacctgtgtacctggactgc

SEQ ID NO: 91320 - DNA, 21 bp, Artificial Sequence
  primer
cactgacagtcattcacacgc

SEQ ID NO: 91321 - DNA, 21 bp, Artificial Sequence
  primer
cagtggtgactcttgctgtgc

SEQ ID NO: 91322 - DNA, 21 bp, Artificial Sequence
  primer
tattggagaagtggtggtggg

SEQ ID NO: 91323 - DNA, 38 bp, Artificial Sequence
  primer
gtaaaacgacggccagtccacctaaccttcccgaagac

SEQ ID NO: 91324 - DNA, 21 bp, Artificial Sequence
  primer
ctggtgtgaattctggctctg

SEQ ID NO: 91325 - DNA, 21 bp, Artificial Sequence
  primer
tcacggtcagtgtcaaactcc

SEQ ID NO: 91326 - DNA, 21 bp, Artificial Sequence
  primer
cagagaggcaggagcttgaac

SEQ ID NO: 91327 - DNA, 21 bp, Artificial Sequence
  primer
caaggctgagacctgagtgag

SEQ ID NO: 91328 - DNA, 38 bp, Artificial Sequence
  primer
gtaaaacgacggccagtagcatcatcacaaactctgcg

SEQ ID NO: 91329 - DNA, 38 bp, Artificial Sequence
  primer
gtaaaacgacggccagtaggaggaggtaaggatgaggg

SEQ ID NO: 91330 - DNA, 38 bp, Artificial Sequence
  primer
gtaaaacgacggccagtctgctctatccacctgttccc

SEQ ID NO: 91331 - DNA, 38 bp, Artificial Sequence
  primer
gtaaaacgacggccagtaaatgcacaaagggactgagg

SEQ ID NO: 91332 - DNA, 36 bp, Artificial Sequence
  primer
gtaaaacgacggccagtatgctgccttcctgagtcg

SEQ ID NO: 91333 - DNA, 21 bp, Artificial Sequence
  primer
ttgatccattgcaggtgtttg

SEQ ID NO: 91334 - DNA, 20 bp, Artificial Sequence
  primer
acccgcttccattctcaaac

SEQ ID NO: 91335 - DNA, 38 bp, Artificial Sequence
  primer
gtaaaacgacggccagtcctccctctctgctttaaggg

SEQ ID NO: 91336 - DNA, 20 bp, Artificial Sequence
  primer
ggactttgagggtgggagtc

SEQ ID NO: 91337 - DNA, 21 bp, Artificial Sequence
  primer
cacaagcctgaagtggtcatc

SEQ ID NO: 91338 - DNA, 20 bp, Artificial Sequence
  primer
gcttaggacaggcaaggagg

SEQ ID NO: 91339 - DNA, 21 bp, Artificial Sequence
  primer
tacccaggccctgaagtacac

SEQ ID NO: 91340 - DNA, 39 bp, Artificial Sequence
  primer
gtaaaacgacggccagtccctgaaggaatcaatacagga

SEQ ID NO: 91341 - DNA, 39 bp, Artificial Sequence
  primer
gtaaaacgacggccagtaaataatttgtgggcaccattc

SEQ ID NO: 91342 - DNA, 21 bp, Artificial Sequence
  primer
gaaagaccaccaactgcttcc

SEQ ID NO: 91343 - DNA, 38 bp, Artificial Sequence
  primer
gtaaaacgacggccagttccttcagtcacaggcacatc

SEQ ID NO: 91344 - DNA, 38 bp, Artificial Sequence
  primer
gtaaaacgacggccagtcttctgcatccaggagttgtg

SEQ ID NO: 91345 - DNA, 38 bp, Artificial Sequence
  primer
gtaaaacgacggccagtcccttctggttcaatttctgg

SEQ ID NO: 91346 - DNA, 37 bp, Artificial Sequence
  primer
gtaaaacgacggccagtccgacagagatggctacctg

SEQ ID NO: 91347 - DNA, 24 bp, Artificial Sequence
  primer
ccttgataacaacaggcatactgg

SEQ ID NO: 91348 - DNA, 21 bp, Artificial Sequence
  primer
tttctcatctgcaggaacagc

SEQ ID NO: 91349 - DNA, 21 bp, Artificial Sequence
  primer
cccagcaataccgtaacttcc

SEQ ID NO: 91350 - DNA, 38 bp, Artificial Sequence
  primer
gtaaaacgacggccagttccttggcatgagtcattgtg

SEQ ID NO: 91351 - DNA, 22 bp, Artificial Sequence
  primer
tctcaaatgcagaatcaagtgg

SEQ ID NO: 91352 - DNA, 21 bp, Artificial Sequence
  primer
taccttcctcgccttcctacc

SEQ ID NO: 91353 - DNA, 38 bp, Artificial Sequence
  primer
gtaaaacgacggccagtctgcctgaataagctcaggtg

SEQ ID NO: 91354 - DNA, 38 bp, Artificial Sequence
  primer
gtaaaacgacggccagtaacagtggaaacatctgctgc

SEQ ID NO: 91355 - DNA, 23 bp, Artificial Sequence
  primer
attggtgaataacaaatcttggg

SEQ ID NO: 91356 - DNA, 38 bp, Artificial Sequence
  primer
gtaaaacgacggccagtagtgtcaccaggactgaatgg

SEQ ID NO: 91357 - DNA, 24 bp, Artificial Sequence
  primer
tgactatcccaagaactggatctc

SEQ ID NO: 91358 - DNA, 37 bp, Artificial Sequence
  primer
gtaaaacgacggccagttcccatactcacctccaggc

SEQ ID NO: 91359 - DNA, 20 bp, Artificial Sequence
  primer
cggtgggaggagattctagg

SEQ ID NO: 91360 - DNA, 21 bp, Artificial Sequence
  primer
cgtgggaatagagacccagag

SEQ ID NO: 91361 - DNA, 38 bp, Artificial Sequence
  primer
gtaaaacgacggccagttgccgattggtaagcagtaac

SEQ ID NO: 91362 - DNA, 39 bp, Artificial Sequence
  primer
gtaaaacgacggccagtgaagcagtagaaccaccaccac

SEQ ID NO: 91363 - DNA, 38 bp, Artificial Sequence
  primer
gtaaaacgacggccagtgtcacacattggacgatggag

SEQ ID NO: 91364 - DNA, 36 bp, Artificial Sequence
  primer
gtaaaacgacggccagtctttgcaaacagctggctc

SEQ ID NO: 91365 - DNA, 39 bp, Artificial Sequence
  primer
gtaaaacgacggccagtaaggatctgagtcttgctggtg

SEQ ID NO: 91366 - DNA, 38 bp, Artificial Sequence
  primer
gtaaaacgacggccagtgacagatgtcagggctaaggg

SEQ ID NO: 91367 - DNA, 18 bp, Artificial Sequence
  primer
gggtctctctcccagcct

SEQ ID NO: 91368 - DNA, 21 bp, Artificial Sequence
  primer
atgactgaaccactgcactcc

SEQ ID NO: 91369 - DNA, 36 bp, Artificial Sequence
  primer
gtaaaacgacggccagtggtgttggcagaaaggagg

SEQ ID NO: 91370 - DNA, 21 bp, Artificial Sequence
  primer
aagagactgccctcacacagg

SEQ ID NO: 91371 - DNA, 38 bp, Artificial Sequence
  primer
gtaaaacgacggccagtagtgctctctgaaggagacgg

SEQ ID NO: 91372 - DNA, 21 bp, Artificial Sequence
  primer
agccttggagtctcactggtc

SEQ ID NO: 91373 - DNA, 21 bp, Artificial Sequence
  primer
gcagtacacaacctctgcacc

SEQ ID NO: 91374 - DNA, 38 bp, Artificial Sequence
  primer
gtaaaacgacggccagtccagcttagccttctccaaac

SEQ ID NO: 91375 - DNA, 21 bp, Artificial Sequence
  primer
ctccaagaggaacgtctaccc

SEQ ID NO: 91376 - DNA, 37 bp, Artificial Sequence
  primer
gtaaaacgacggccagtggaaagggtggagctgagac

SEQ ID NO: 91377 - DNA, 21 bp, Artificial Sequence
  primer
gaaagggcagattcaatgagg

SEQ ID NO: 91378 - DNA, 21 bp, Artificial Sequence
  primer
ttccttctgcatccatctgag

SEQ ID NO: 91379 - DNA, 21 bp, Artificial Sequence
  primer
ggagagagacgaccaggtttc

SEQ ID NO: 91380 - DNA, 21 bp, Artificial Sequence
  primer
cgaacgtctccatcatctctg

SEQ ID NO: 91381 - DNA, 21 bp, Artificial Sequence
  primer
gaaggaggagttcagggaagc

SEQ ID NO: 91382 - DNA, 21 bp, Artificial Sequence
  primer
ctgggtctctcagtaccctcc

SEQ ID NO: 91383 - DNA, 21 bp, Artificial Sequence
  primer
gggacagtctgtttctgggag

SEQ ID NO: 91384 - DNA, 21 bp, Artificial Sequence
  primer
agtgaaagtgggtggaaggac

SEQ ID NO: 91385 - DNA, 35 bp, Artificial Sequence
  primer
gtaaaacgacggccagttagcgggcctgtttcctg

SEQ ID NO: 91386 - DNA, 35 bp, Artificial Sequence
  primer
gtaaaacgacggccagtcgatgacgtcgatgctcc

SEQ ID NO: 91387 - DNA, 20 bp, Artificial Sequence
  primer
atgttaccgtcattctgcgg

SEQ ID NO: 91388 - DNA, 38 bp, Artificial Sequence
  primer
gtaaaacgacggccagtagagcagagggtctcaccttg

SEQ ID NO: 91389 - DNA, 38 bp, Artificial Sequence
  primer
gtaaaacgacggccagttcacagtccagggtcactcag

SEQ ID NO: 91390 - DNA, 21 bp, Artificial Sequence
  primer
ctctatctggcctgacttccg

SEQ ID NO: 91391 - DNA, 21 bp, Artificial Sequence
  primer
catcccaccctacctatgagc

SEQ ID NO: 91392 - DNA, 20 bp, Artificial Sequence
  primer
ggcctcaacctcctgatctc

SEQ ID NO: 91393 - DNA, 21 bp, Artificial Sequence
  primer
atgctgatatctcccacgtcc

SEQ ID NO: 91394 - DNA, 21 bp, Artificial Sequence
  primer
ccatacacgatggctaggatg

SEQ ID NO: 91395 - DNA, 37 bp, Artificial Sequence
  primer
gtaaaacgacggccagtaatgcctctagccacttccc

SEQ ID NO: 91396 - DNA, 38 bp, Artificial Sequence
  primer
gtaaaacgacggccagttattgctaagctctcaggccc

SEQ ID NO: 91397 - DNA, 21 bp, Artificial Sequence
  primer
gacaatgcttctgttccctcc

SEQ ID NO: 91398 - DNA, 38 bp, Artificial Sequence
  primer
gtaaaacgacggccagtggtgatccagagtgtggtctg

SEQ ID NO: 91399 - DNA, 21 bp, Artificial Sequence
  primer
aggatactgaagccacccttg

SEQ ID NO: 91400 - DNA, 21 bp, Artificial Sequence
  primer
cccagttctccctctctggtc

SEQ ID NO: 91401 - DNA, 21 bp, Artificial Sequence
  primer
accagggacaggaagtttgac

SEQ ID NO: 91402 - DNA, 38 bp, Artificial Sequence
  primer
gtaaaacgacggccagtaaacacctgtggaattggagg

SEQ ID NO: 91403 - DNA, 21 bp, Artificial Sequence
  primer
ggagggtacatcctctatggg

SEQ ID NO: 91404 - DNA, 38 bp, Artificial Sequence
  primer
gtaaaacgacggccagtcattccacagaaacccactcc

SEQ ID NO: 91405 - DNA, 38 bp, Artificial Sequence
  primer
gtaaaacgacggccagtctgactgaacctgtgagaccc

SEQ ID NO: 91406 - DNA, 21 bp, Artificial Sequence
  primer
acatgactgcattctgttggc

SEQ ID NO: 91407 - DNA, 21 bp, Artificial Sequence
  primer
aagagtgaatgaagatccggg

SEQ ID NO: 91408 - DNA, 20 bp, Artificial Sequence
  primer
cctgtgtataccagcccagg

SEQ ID NO: 91409 - DNA, 38 bp, Artificial Sequence
  primer
gtaaaacgacggccagtatattccagttggttcccgtg

SEQ ID NO: 91410 - DNA, 38 bp, Artificial Sequence
  primer
gtaaaacgacggccagtacctgagagttaggctggctg

SEQ ID NO: 91411 - DNA, 20 bp, Artificial Sequence
  primer
acctccagatccctggtgtc

SEQ ID NO: 91412 - DNA, 38 bp, Artificial Sequence
  primer
gtaaaacgacggccagtctgaaggagtccctacccagg

SEQ ID NO: 91413 - DNA, 21 bp, Artificial Sequence
  primer
gacaccacacacaaggattgg

SEQ ID NO: 91414 - DNA, 21 bp, Artificial Sequence
  primer
cttccttagtgtctcctccgc

SEQ ID NO: 91415 - DNA, 37 bp, Artificial Sequence
  primer
gtaaaacgacggccagttagagtggctgttggatggg

SEQ ID NO: 91416 - DNA, 35 bp, Artificial Sequence
  primer
gtaaaacgacggccagtctgggtacctccgagggc

SEQ ID NO: 91417 - DNA, 19 bp, Artificial Sequence
  primer
catcggcctcgtcgtagtc

SEQ ID NO: 91418 - DNA, 38 bp, Artificial Sequence
  primer
gtaaaacgacggccagtgcaccaatcatcgtcactctc

SEQ ID NO: 91419 - DNA, 20 bp, Artificial Sequence
  primer
tgtgtggtttgtctgctccc

SEQ ID NO: 91420 - DNA, 21 bp, Artificial Sequence
  primer
agctgttctcaggcacagacc

SEQ ID NO: 91421 - DNA, 21 bp, Artificial Sequence
  primer
tcacattcgttcatctccagc

SEQ ID NO: 91422 - DNA, 21 bp, Artificial Sequence
  primer
ctttcatggagggtgtgacag

SEQ ID NO: 91423 - DNA, 21 bp, Artificial Sequence
  primer
cctagaacagtgcccatctcc

SEQ ID NO: 91424 - DNA, 20 bp, Artificial Sequence
  primer
aggctctgaggtcagaaggg

SEQ ID NO: 91425 - DNA, 21 bp, Artificial Sequence
  primer
ggctaccagaacccagaacac

SEQ ID NO: 91426 - DNA, 38 bp, Artificial Sequence
  primer
gtaaaacgacggccagtaaatcccttcaggctctaccc

SEQ ID NO: 91427 - DNA, 21 bp, Artificial Sequence
  primer
acaccatggccctagtctgtg

SEQ ID NO: 91428 - DNA, 38 bp, Artificial Sequence
  primer
gtaaaacgacggccagtgcaaactgtctgaaaggagcc

SEQ ID NO: 91429 - DNA, 20 bp, Artificial Sequence
  primer
atggaccagggtttccagac

SEQ ID NO: 91430 - DNA, 21 bp, Artificial Sequence
  primer
agcctttctgacccatgtagg

SEQ ID NO: 91431 - DNA, 38 bp, Artificial Sequence
  primer
gtaaaacgacggccagtcttctgggtgctgtgaactcc

SEQ ID NO: 91432 - DNA, 20 bp, Artificial Sequence
  primer
aaacaggaaggcttgggaag

SEQ ID NO: 91433 - DNA, 21 bp, Artificial Sequence
  primer
atgacaggagagtccgccttc

SEQ ID NO: 91434 - DNA, 38 bp, Artificial Sequence
  primer
gtaaaacgacggccagttgagaatgcacctctcacgtc

SEQ ID NO: 91435 - DNA, 21 bp, Artificial Sequence
  primer
tgagtgacagaccagcctctg

SEQ ID NO: 91436 - DNA, 37 bp, Artificial Sequence
  primer
gtaaaacgacggccagtgctctcatcccagttccgag

SEQ ID NO: 91437 - DNA, 18 bp, Artificial Sequence
  primer
gtcttgtccttgtcgcgg

SEQ ID NO: 91438 - DNA, 18 bp, Artificial Sequence
  primer
cttgctcggatcctggtg

SEQ ID NO: 91439 - DNA, 37 bp, Artificial Sequence
  primer
gtaaaacgacggccagtccttgtcggcttccactatc

SEQ ID NO: 91440 - DNA, 36 bp, Artificial Sequence
  primer
gtaaaacgacggccagtgtgaacggcatgcagagac

SEQ ID NO: 91441 - DNA, 38 bp, Artificial Sequence
  primer
gtaaaacgacggccagtaattcacagaggtaggctggg

SEQ ID NO: 91442 - DNA, 20 bp, Artificial Sequence
  primer
cacgctggctactgagatcc

SEQ ID NO: 91443 - DNA, 38 bp, Artificial Sequence
  primer
gtaaaacgacggccagttgtgagacgacaggacctcag

SEQ ID NO: 91444 - DNA, 21 bp, Artificial Sequence
  primer
acacacccagtacgcacacac

SEQ ID NO: 91445 - DNA, 39 bp, Artificial Sequence
  primer
gtaaaacgacggccagttcttccttattccctcaccctc

SEQ ID NO: 91446 - DNA, 21 bp, Artificial Sequence
  primer
gcactgcatgcatacacacac

SEQ ID NO: 91447 - DNA, 21 bp, Artificial Sequence
  primer
tctagcccttctcaagcaagc

SEQ ID NO: 91448 - DNA, 22 bp, Artificial Sequence
  primer
aagaactcaagacctgcaccac

SEQ ID NO: 91449 - DNA, 21 bp, Artificial Sequence
  primer
tgtgagtgatttgtgtgcagg

SEQ ID NO: 91450 - DNA, 21 bp, Artificial Sequence
  primer
agggaggaagaaggctgactc

SEQ ID NO: 91451 - DNA, 21 bp, Artificial Sequence
  primer
tactcggagaattcccagctc

SEQ ID NO: 91452 - DNA, 38 bp, Artificial Sequence
  primer
gtaaaacgacggccagtggaacccaggaagaggctaac

SEQ ID NO: 91453 - DNA, 21 bp, Artificial Sequence
  primer
tgcatacaaccacgaaacctg

SEQ ID NO: 91454 - DNA, 38 bp, Artificial Sequence
  primer
gtaaaacgacggccagtaaagcaggatctggctcacag

SEQ ID NO: 91455 - DNA, 38 bp, Artificial Sequence
  primer
gtaaaacgacggccagtgggaattagaagtgggtggtc

SEQ ID NO: 91456 - DNA, 21 bp, Artificial Sequence
  primer
agagtcagggatcagcaggag

SEQ ID NO: 91457 - DNA, 38 bp, Artificial Sequence
  primer
gtaaaacgacggccagtacacgaaacaggacagatccc

SEQ ID NO: 91458 - DNA, 20 bp, Artificial Sequence
  primer
caccctgaaagggagaggag

SEQ ID NO: 91459 - DNA, 37 bp, Artificial Sequence
  primer
gtaaaacgacggccagtatgtgcagacggttaccagg

SEQ ID NO: 91460 - DNA, 21 bp, Artificial Sequence
  primer
ctctcttggttggagctgagg

SEQ ID NO: 91461 - DNA, 21 bp, Artificial Sequence
  primer
tccaagaatggtgtgcatctc

SEQ ID NO: 91462 - DNA, 21 bp, Artificial Sequence
  primer
ctctctgtccttggagggttg

SEQ ID NO: 91463 - DNA, 21 bp, Artificial Sequence
  primer
caaagagctccacacatggac

SEQ ID NO: 91464 - DNA, 19 bp, Artificial Sequence
  primer
cccacaaaggaagagggtc

SEQ ID NO: 91465 - DNA, 18 bp, Artificial Sequence
  primer
agaggcaggagcctgtgg

SEQ ID NO: 91466 - DNA, 38 bp, Artificial Sequence
  primer
gtaaaacgacggccagtggtaagggtcagagccaattc

SEQ ID NO: 91467 - DNA, 21 bp, Artificial Sequence
  primer
actcatccactggaacacacg

SEQ ID NO: 91468 - DNA, 21 bp, Artificial Sequence
  primer
cacaggaaacacatgctctgg

SEQ ID NO: 91469 - DNA, 21 bp, Artificial Sequence
  primer
agtgatgcagatgcagtaggc

SEQ ID NO: 91470 - DNA, 38 bp, Artificial Sequence
  primer
gtaaaacgacggccagtcacgtctcacttctctcccac

SEQ ID NO: 91471 - DNA, 38 bp, Artificial Sequence
  primer
gtaaaacgacggccagttgacaacgaccctgtcttcag

SEQ ID NO: 91472 - DNA, 38 bp, Artificial Sequence
  primer
gtaaaacgacggccagttatggaatcaggtccctttgc

SEQ ID NO: 91473 - DNA, 21 bp, Artificial Sequence
  primer
tggtcatgttggtgtagccag

SEQ ID NO: 91474 - DNA, 38 bp, Artificial Sequence
  primer
gtaaaacgacggccagtaggaggagaaagggaggtgtc

SEQ ID NO: 91475 - DNA, 21 bp, Artificial Sequence
  primer
cccttatcccaggttcatcag

SEQ ID NO: 91476 - DNA, 38 bp, Artificial Sequence
  primer
gtaaaacgacggccagtcggtcaaagttctgtgctgac

SEQ ID NO: 91477 - DNA, 21 bp, Artificial Sequence
  primer
ttcccacctgaggtttgtttc

SEQ ID NO: 91478 - DNA, 38 bp, Artificial Sequence
  primer
gtaaaacgacggccagttcaacaaatatcaaccgctgg

SEQ ID NO: 91479 - DNA, 38 bp, Artificial Sequence
  primer
gtaaaacgacggccagtaccttctgcctgtggttatgc

SEQ ID NO: 91480 - DNA, 21 bp, Artificial Sequence
  primer
caccctttgaggaagaacagc

SEQ ID NO: 91481 - DNA, 21 bp, Artificial Sequence
  primer
ctccagggctgatctaggatg

SEQ ID NO: 91482 - DNA, 20 bp, Artificial Sequence
  primer
tctaggctgggtggtgtgag

SEQ ID NO: 91483 - DNA, 21 bp, Artificial Sequence
  primer
agtcaagcctctctctgccac

SEQ ID NO: 91484 - DNA, 38 bp, Artificial Sequence
  primer
gtaaaacgacggccagtgctttctttccactgggtgtc

SEQ ID NO: 91485 - DNA, 21 bp, Artificial Sequence
  primer
ccagatgctgactgatgatgc

SEQ ID NO: 91486 - DNA, 21 bp, Artificial Sequence
  primer
gtctccatccagaggttcagg

SEQ ID NO: 91487 - DNA, 39 bp, Artificial Sequence
  primer
gtaaaacgacggccagtgatgtcagcaacagaagctgtg

SEQ ID NO: 91488 - DNA, 38 bp, Artificial Sequence
  primer
gtaaaacgacggccagtgaaggagcatgtgtgttagcg

SEQ ID NO: 91489 - DNA, 20 bp, Artificial Sequence
  primer
ggtctggttgtcctctctgg

SEQ ID NO: 91490 - DNA, 38 bp, Artificial Sequence
  primer
gtaaaacgacggccagtgaccatcatctccttccaacc

SEQ ID NO: 91491 - DNA, 38 bp, Artificial Sequence
  primer
gtaaaacgacggccagtaggtgaagtggagagggtgag

SEQ ID NO: 91492 - DNA, 21 bp, Artificial Sequence
  primer
caggtgccactgcagtcttag

SEQ ID NO: 91493 - DNA, 38 bp, Artificial Sequence
  primer
gtaaaacgacggccagtagtcggtttcagcagtgacag

SEQ ID NO: 91494 - DNA, 21 bp, Artificial Sequence
  primer
acgatctcagtatctgcacgg

SEQ ID NO: 91495 - DNA, 38 bp, Artificial Sequence
  primer
gtaaaacgacggccagtgctccgttacactttccatcc

SEQ ID NO: 91496 - DNA, 21 bp, Artificial Sequence
  primer
ttctgccttcaatacctgcac

SEQ ID NO: 91497 - DNA, 37 bp, Artificial Sequence
  primer
gtaaaacgacggccagtaatgaaggaaacaaaccggg

SEQ ID NO: 91498 - DNA, 21 bp, Artificial Sequence
  primer
aaacaccaccactgcacaaac

SEQ ID NO: 91499 - DNA, 37 bp, Artificial Sequence
  primer
gtaaaacgacggccagtcacacagaggaaggagcagg

SEQ ID NO: 91500 - DNA, 21 bp, Artificial Sequence
  primer
gaaagttccaattcctgtggc

SEQ ID NO: 91501 - DNA, 21 bp, Artificial Sequence
  primer
cctttcattctaccaccaggc

SEQ ID NO: 91502 - DNA, 21 bp, Artificial Sequence
  primer
ccaagccagctcctctgatag

SEQ ID NO: 91503 - DNA, 21 bp, Artificial Sequence
  primer
aattgatccacccagtgttgg

SEQ ID NO: 91504 - DNA, 38 bp, Artificial Sequence
  primer
gtaaaacgacggccagtaggatcacaagaaatgggcac

SEQ ID NO: 91505 - DNA, 22 bp, Artificial Sequence
  primer
gagcaaagaagtcatgagcagg

SEQ ID NO: 91506 - DNA, 21 bp, Artificial Sequence
  primer
tgcctcccttctaaccaacag

SEQ ID NO: 91507 - DNA, 38 bp, Artificial Sequence
  primer
gtaaaacgacggccagtagccatctttggaaaggtctg

SEQ ID NO: 91508 - DNA, 38 bp, Artificial Sequence
  primer
gtaaaacgacggccagtaggaagagcctggaagtagcc

SEQ ID NO: 91509 - DNA, 38 bp, Artificial Sequence
  primer
gtaaaacgacggccagtactgtctcctgagggttgcag

SEQ ID NO: 91510 - DNA, 37 bp, Artificial Sequence
  primer
gtaaaacgacggccagtaagcttgagggacaagtggc

SEQ ID NO: 91511 - DNA, 38 bp, Artificial Sequence
  primer
gtaaaacgacggccagtcagaggagggatctcagggac

SEQ ID NO: 91512 - DNA, 21 bp, Artificial Sequence
  primer
tggcctgtgacagtttacacc

SEQ ID NO: 91513 - DNA, 38 bp, Artificial Sequence
  primer
gtaaaacgacggccagtccctacagggatggctcttag

SEQ ID NO: 91514 - DNA, 36 bp, Artificial Sequence
  primer
gtaaaacgacggccagtccaggtgctcccttctcag

SEQ ID NO: 91515 - DNA, 21 bp, Artificial Sequence
  primer
cagtgaggcacttctgaaacg

SEQ ID NO: 91516 - DNA, 38 bp, Artificial Sequence
  primer
gtaaaacgacggccagttgtgtagacgacaccgagctg

SEQ ID NO: 91517 - DNA, 39 bp, Artificial Sequence
  primer
gtaaaacgacggccagttgtcacttcagaaagcaaatcc

SEQ ID NO: 91518 - DNA, 38 bp, Artificial Sequence
  primer
gtaaaacgacggccagtcaaagctccaagaaacacgac

SEQ ID NO: 91519 - DNA, 21 bp, Artificial Sequence
  primer
actcctgagaggttctggtgc

SEQ ID NO: 91520 - DNA, 21 bp, Artificial Sequence
  primer
ccagtgattctgaaacccacc

SEQ ID NO: 91521 - DNA, 39 bp, Artificial Sequence
  primer
gtaaaacgacggccagtcaaaccatgaaagttgctttgg

SEQ ID NO: 91522 - DNA, 21 bp, Artificial Sequence
  primer
cctctccagtggctctagctc

SEQ ID NO: 91523 - DNA, 21 bp, Artificial Sequence
  primer
tcagagtccaaacacatgcag

SEQ ID NO: 91524 - DNA, 38 bp, Artificial Sequence
  primer
gtaaaacgacggccagttgttctctccgtgatgtgtgc

SEQ ID NO: 91525 - DNA, 36 bp, Artificial Sequence
  primer
gtaaaacgacggccagtcggtcttcctcaccacctg

SEQ ID NO: 91526 - DNA, 20 bp, Artificial Sequence
  primer
ttaatgcaatggtgccttcc

SEQ ID NO: 91527 - DNA, 21 bp, Artificial Sequence
  primer
ctttggcacctaagatctccc

SEQ ID NO: 91528 - DNA, 20 bp, Artificial Sequence
  primer
cttcatcatgcagcgatcag

SEQ ID NO: 91529 - DNA, 20 bp, Artificial Sequence
  primer
agagcagaacatcacctgcc

SEQ ID NO: 91530 - DNA, 21 bp, Artificial Sequence
  primer
accaggctatgattagggcag

SEQ ID NO: 91531 - DNA, 38 bp, Artificial Sequence
  primer
gtaaaacgacggccagttaaaggcatttacctccctgc

SEQ ID NO: 91532 - DNA, 38 bp, Artificial Sequence
  primer
gtaaaacgacggccagtggtcaaccatgatccacaaag

SEQ ID NO: 91533 - DNA, 38 bp, Artificial Sequence
  primer
gtaaaacgacggccagttgggaagccagggtctatatg

SEQ ID NO: 91534 - DNA, 19 bp, Artificial Sequence
  primer
actcggcaggtggtcacag

SEQ ID NO: 91535 - DNA, 38 bp, Artificial Sequence
  primer
gtaaaacgacggccagtgaaagggctgtgaaccacttc

SEQ ID NO: 91536 - DNA, 21 bp, Artificial Sequence
  primer
tctagctgtcaccttgagggc

SEQ ID NO: 91537 - DNA, 21 bp, Artificial Sequence
  primer
tctgcgtaacctagcatctgg

SEQ ID NO: 91538 - DNA, 21 bp, Artificial Sequence
  primer
aaatgatgcccagcctttatc

SEQ ID NO: 91539 - DNA, 21 bp, Artificial Sequence
  primer
tggctgaattggttagaaagg

SEQ ID NO: 91540 - DNA, 20 bp, Artificial Sequence
  primer
gacgctcacctgcattcttc

SEQ ID NO: 91541 - DNA, 21 bp, Artificial Sequence
  primer
ctacccacaagctgagcacac

SEQ ID NO: 91542 - DNA, 21 bp, Artificial Sequence
  primer
cacctacacagaaagaggccc

SEQ ID NO: 91543 - DNA, 38 bp, Artificial Sequence
  primer
gtaaaacgacggccagtgtatgtgggtgcccttctctg

SEQ ID NO: 91544 - DNA, 20 bp, Artificial Sequence
  primer
cattccaccctcagcatttg

SEQ ID NO: 91545 - DNA, 21 bp, Artificial Sequence
  primer
acaagactaacaggaagcggg

SEQ ID NO: 91546 - DNA, 20 bp, Artificial Sequence
  primer
acttgtccaggtgatgccac

SEQ ID NO: 91547 - DNA, 38 bp, Artificial Sequence
  primer
gtaaaacgacggccagtaatgcaaaccactgcagacac

SEQ ID NO: 91548 - DNA, 20 bp, Artificial Sequence
  primer
agcctgggtcctctaggatg

SEQ ID NO: 91549 - DNA, 38 bp, Artificial Sequence
  primer
gtaaaacgacggccagttcagggtacatcttgccacag

SEQ ID NO: 91550 - DNA, 38 bp, Artificial Sequence
  primer
gtaaaacgacggccagtaataacctgtgtcctccgtcc

SEQ ID NO: 91551 - DNA, 20 bp, Artificial Sequence
  primer
acatcaattgtcctcaggcg

SEQ ID NO: 91552 - DNA, 21 bp, Artificial Sequence
  primer
cgaactttcagtccactccac

SEQ ID NO: 91553 - DNA, 38 bp, Artificial Sequence
  primer
gtaaaacgacggccagtccctagcaactgacagaaggc

SEQ ID NO: 91554 - DNA, 21 bp, Artificial Sequence
  primer
cagatgaggaaggcaagatgg

SEQ ID NO: 91555 - DNA, 22 bp, Artificial Sequence
  primer
gccaaagggctttctttatcag

SEQ ID NO: 91556 - DNA, 21 bp, Artificial Sequence
  primer
tccttgtggtactgctcaacc

SEQ ID NO: 91557 - DNA, 21 bp, Artificial Sequence
  primer
cctagaagaggtgctgatgcc

SEQ ID NO: 91558 - DNA, 21 bp, Artificial Sequence
  primer
cttgctccttgggactagacg

SEQ ID NO: 91559 - DNA, 21 bp, Artificial Sequence
  primer
atggatctgaaggtgcctttg

SEQ ID NO: 91560 - DNA, 38 bp, Artificial Sequence
  primer
gtaaaacgacggccagtctgaaagaatagccctcaccc

SEQ ID NO: 91561 - DNA, 21 bp, Artificial Sequence
  primer
ggactaaggatcctgacctgg

SEQ ID NO: 91562 - DNA, 38 bp, Artificial Sequence
  primer
gtaaaacgacggccagtgagaagggagtgacctgatgg

SEQ ID NO: 91563 - DNA, 38 bp, Artificial Sequence
  primer
gtaaaacgacggccagtcactgcccttcctgctgttac

SEQ ID NO: 91564 - DNA, 26 bp, Artificial Sequence
  primer
cctaaactttcctaactatgaggcac

SEQ ID NO: 91565 - DNA, 36 bp, Artificial Sequence
  primer
gtaaaacgacggccagtcaaattggcaccaggaagg

SEQ ID NO: 91566 - DNA, 39 bp, Artificial Sequence
  primer
gtaaaacgacggccagtgggaatgggagagtgataaagc

SEQ ID NO: 91567 - DNA, 21 bp, Artificial Sequence
  primer
cagattgctgtctttccaccc

SEQ ID NO: 91568 - DNA, 38 bp, Artificial Sequence
  primer
gtaaaacgacggccagttcccaaattcccttagacctg

SEQ ID NO: 91569 - DNA, 21 bp, Artificial Sequence
  primer
tccaagtgccctgaaattacc

SEQ ID NO: 91570 - DNA, 37 bp, Artificial Sequence
  primer
gtaaaacgacggccagtactagccaggccaaacaacc

SEQ ID NO: 91571 - DNA, 21 bp, Artificial Sequence
  primer
aatctgccatgagtcaggagg

SEQ ID NO: 91572 - DNA, 38 bp, Artificial Sequence
  primer
gtaaaacgacggccagtcttgtcttgtctaggctgccc

SEQ ID NO: 91573 - DNA, 21 bp, Artificial Sequence
  primer
ctggaacaaagcaactcttgg

SEQ ID NO: 91574 - DNA, 38 bp, Artificial Sequence
  primer
gtaaaacgacggccagtaccctttggattctttccctc

SEQ ID NO: 91575 - DNA, 21 bp, Artificial Sequence
  primer
tgcgttcacacacacatcaag

SEQ ID NO: 91576 - DNA, 38 bp, Artificial Sequence
  primer
gtaaaacgacggccagttgctgagtaaggagcaagctg

SEQ ID NO: 91577 - DNA, 21 bp, Artificial Sequence
  primer
gagggcagaaacctattgctc

SEQ ID NO: 91578 - DNA, 20 bp, Artificial Sequence
  primer
agcaccaaagagatgggtcc

SEQ ID NO: 91579 - DNA, 38 bp, Artificial Sequence
  primer
gtaaaacgacggccagttcatccttgtcttgcagtgtg

SEQ ID NO: 91580 - DNA, 21 bp, Artificial Sequence
  primer
aagctctagcaccaccaccac

SEQ ID NO: 91581 - DNA, 21 bp, Artificial Sequence
  primer
tttgggagagagttccaaagg

SEQ ID NO: 91582 - DNA, 21 bp, Artificial Sequence
  primer
tccaccataggaccctgtttc

SEQ ID NO: 91583 - DNA, 21 bp, Artificial Sequence
  primer
cagtgccactttgtctatggc

SEQ ID NO: 91584 - DNA, 21 bp, Artificial Sequence
  primer
ctcctcctcgaacttctccag

SEQ ID NO: 91585 - DNA, 21 bp, Artificial Sequence
  primer
ctctcttcttggatcgttggc

SEQ ID NO: 91586 - DNA, 38 bp, Artificial Sequence
  primer
gtaaaacgacggccagtgaaactggagctcagaaaggc

SEQ ID NO: 91587 - DNA, 38 bp, Artificial Sequence
  primer
gtaaaacgacggccagtgctttccatgtggctttattg

SEQ ID NO: 91588 - DNA, 21 bp, Artificial Sequence
  primer
aggcttaagaagatggctggg

SEQ ID NO: 91589 - DNA, 21 bp, Artificial Sequence
  primer
aatggttcatacttcgccctg

SEQ ID NO: 91590 - DNA, 38 bp, Artificial Sequence
  primer
gtaaaacgacggccagtgtacaaacacatccacgcagc

SEQ ID NO: 91591 - DNA, 21 bp, Artificial Sequence
  primer
agggcttcaaatcaactggag

SEQ ID NO: 91592 - DNA, 38 bp, Artificial Sequence
  primer
gtaaaacgacggccagtcaagaaggcttggtgactcct

SEQ ID NO: 91593 - DNA, 21 bp, Artificial Sequence
  primer
aacaaattctccaaaggcagg

SEQ ID NO: 91594 - DNA, 39 bp, Artificial Sequence
  primer
gtaaaacgacggccagtctgaaagaagagcagagatggg

SEQ ID NO: 91595 - DNA, 38 bp, Artificial Sequence
  primer
gtaaaacgacggccagtaaagcgtgagccttgttcatc

SEQ ID NO: 91596 - DNA, 20 bp, Artificial Sequence
  primer
tcttacattgctggcccaag

SEQ ID NO: 91597 - DNA, 21 bp, Artificial Sequence
  primer
aggtaaagcagtgatgggctg

SEQ ID NO: 91598 - DNA, 39 bp, Artificial Sequence
  primer
gtaaaacgacggccagtggaatagcagtaaccacctccc

SEQ ID NO: 91599 - DNA, 38 bp, Artificial Sequence
  primer
gtaaaacgacggccagtgcaagggagtaaattcccaac

SEQ ID NO: 91600 - DNA, 21 bp, Artificial Sequence
  primer
ggtgaagggacttgggtaatg

SEQ ID NO: 91601 - DNA, 21 bp, Artificial Sequence
  primer
cactgtgacaagacctcaggg

SEQ ID NO: 91602 - DNA, 21 bp, Artificial Sequence
  primer
aaagggaaatgggaggaagag

SEQ ID NO: 91603 - DNA, 38 bp, Artificial Sequence
  primer
gtaaaacgacggccagtacactgaagcaaacatctccg

SEQ ID NO: 91604 - DNA, 21 bp, Artificial Sequence
  primer
tctgtaacaggcaggcatttg

SEQ ID NO: 91605 - DNA, 21 bp, Artificial Sequence
  primer
tccttagttccctcctccacc

SEQ ID NO: 91606 - DNA, 39 bp, Artificial Sequence
  primer
gtaaaacgacggccagttcaaatatctccatcctgtgcc

SEQ ID NO: 91607 - DNA, 21 bp, Artificial Sequence
  primer
tcatccacaaccacagtgacc

SEQ ID NO: 91608 - DNA, 37 bp, Artificial Sequence
  primer
gtaaaacgacggccagtgcacccattactgctgcttc

SEQ ID NO: 91609 - DNA, 21 bp, Artificial Sequence
  primer
cattcaaagtgatcaccgacg

SEQ ID NO: 91610 - DNA, 38 bp, Artificial Sequence
  primer
gtaaaacgacggccagttcctgacggaccatgactatg

SEQ ID NO: 91611 - DNA, 21 bp, Artificial Sequence
  primer
tttcttcagcccttgtctctg

SEQ ID NO: 91612 - DNA, 38 bp, Artificial Sequence
  primer
gtaaaacgacggccagtgaaatgctcacgacttgcatc

SEQ ID NO: 91613 - DNA, 21 bp, Artificial Sequence
  primer
tccgtgtcacttagcaggttg

SEQ ID NO: 91614 - DNA, 38 bp, Artificial Sequence
  primer
gtaaaacgacggccagtcactggcttcccaattctgtc

SEQ ID NO: 91615 - DNA, 21 bp, Artificial Sequence
  primer
aactaaggctgtggatgaggc

SEQ ID NO: 91616 - DNA, 22 bp, Artificial Sequence
  primer
ccctgacccaattctttactcc

SEQ ID NO: 91617 - DNA, 37 bp, Artificial Sequence
  primer
gtaaaacgacggccagtgtctggctggaaggagtgag

SEQ ID NO: 91618 - DNA, 37 bp, Artificial Sequence
  primer
gtaaaacgacggccagtaagagtcgctttcctgagcc

SEQ ID NO: 91619 - DNA, 38 bp, Artificial Sequence
  primer
gtaaaacgacggccagtaattgagcactatgtgcaggc

SEQ ID NO: 91620 - DNA, 19 bp, Artificial Sequence
  primer
ttccctgagtgcagcattg

SEQ ID NO: 91621 - DNA, 21 bp, Artificial Sequence
  primer
ctcacaaagtacacccagggc

SEQ ID NO: 91622 - DNA, 41 bp, Artificial Sequence
  primer
gtaaaacgacggccagtgaatgaaggagtatttcagatggg

SEQ ID NO: 91623 - DNA, 38 bp, Artificial Sequence
  primer
gtaaaacgacggccagtagctgaggctggtcttgattc

SEQ ID NO: 91624 - DNA, 38 bp, Artificial Sequence
  primer
gtaaaacgacggccagtaggacttgagtcagggtttgg

SEQ ID NO: 91625 - DNA, 22 bp, Artificial Sequence
  primer
ggcttgaggctaaagaaaggac

SEQ ID NO: 91626 - DNA, 38 bp, Artificial Sequence
  primer
gtaaaacgacggccagtcagtagcaggcattggacttc

SEQ ID NO: 91627 - DNA, 38 bp, Artificial Sequence
  primer
gtaaaacgacggccagtagggctctggatttatttggg

SEQ ID NO: 91628 - DNA, 38 bp, Artificial Sequence
  primer
gtaaaacgacggccagtttatcattggagcttgggtgg

SEQ ID NO: 91629 - DNA, 20 bp, Artificial Sequence
  primer
cactgtggagctcttggacc

SEQ ID NO: 91630 - DNA, 21 bp, Artificial Sequence
  primer
agcaccctgcctatagaccac

SEQ ID NO: 91631 - DNA, 21 bp, Artificial Sequence
  primer
tgaggactggcagatggtatc

SEQ ID NO: 91632 - DNA, 18 bp, Artificial Sequence
  primer
ccgagatggcacaactgc

SEQ ID NO: 91633 - DNA, 22 bp, Artificial Sequence
  primer
tgctgaccacataccaagtctg

SEQ ID NO: 91634 - DNA, 21 bp, Artificial Sequence
  primer
ggatacagttctggccctgac

SEQ ID NO: 91635 - DNA, 21 bp, Artificial Sequence
  primer
cttatctccaccctgacccag

SEQ ID NO: 91636 - DNA, 21 bp, Artificial Sequence
  primer
gatgagggacacactgaccac

SEQ ID NO: 91637 - DNA, 38 bp, Artificial Sequence
  primer
gtaaaacgacggccagtactcgcagaatcttcaccacc

SEQ ID NO: 91638 - DNA, 21 bp, Artificial Sequence
  primer
ccacatggctagtggtcagag

SEQ ID NO: 91639 - DNA, 21 bp, Artificial Sequence
  primer
gccttggtgagatctagaggc

SEQ ID NO: 91640 - DNA, 38 bp, Artificial Sequence
  primer
gtaaaacgacggccagtgccttggtgagatctagaggc

SEQ ID NO: 91641 - DNA, 21 bp, Artificial Sequence
  primer
aaggtacactcccacccattc

SEQ ID NO: 91642 - DNA, 38 bp, Artificial Sequence
  primer
gtaaaacgacggccagtggcatattccacacattgacg

SEQ ID NO: 91643 - DNA, 38 bp, Artificial Sequence
  primer
gtaaaacgacggccagttaaatgttcccaatggttccc

SEQ ID NO: 91644 - DNA, 21 bp, Artificial Sequence
  primer
gcacctgagtccctctcactc

SEQ ID NO: 91645 - DNA, 38 bp, Artificial Sequence
  primer
gtaaaacgacggccagttccaggagtagggaggatgtg

SEQ ID NO: 91646 - DNA, 38 bp, Artificial Sequence
  primer
gtaaaacgacggccagtactcaggccctagggtaatcc

SEQ ID NO: 91647 - DNA, 21 bp, Artificial Sequence
  primer
ggaaatgggtatggcatgttg

SEQ ID NO: 91648 - DNA, 38 bp, Artificial Sequence
  primer
gtaaaacgacggccagtatgtgtagattgacccagggc

SEQ ID NO: 91649 - DNA, 21 bp, Artificial Sequence
  primer
ccatgctgccatattattccc

SEQ ID NO: 91650 - DNA, 38 bp, Artificial Sequence
  primer
gtaaaacgacggccagtgccctctcacccactatgaag

SEQ ID NO: 91651 - DNA, 21 bp, Artificial Sequence
  primer
agaactggagggcagtcagag

SEQ ID NO: 91652 - DNA, 21 bp, Artificial Sequence
  primer
cacgagagacatgaaacccac

SEQ ID NO: 91653 - DNA, 38 bp, Artificial Sequence
  primer
gtaaaacgacggccagtggagaatcctgtcacccattc

SEQ ID NO: 91654 - DNA, 38 bp, Artificial Sequence
  primer
gtaaaacgacggccagtctacccaccagcatggacttc

SEQ ID NO: 91655 - DNA, 38 bp, Artificial Sequence
  primer
gtaaaacgacggccagttcagggtctgaactttccctc

SEQ ID NO: 91656 - DNA, 18 bp, Artificial Sequence
  primer
cttccaccctggactccc

SEQ ID NO: 91657 - DNA, 21 bp, Artificial Sequence
  primer
tcccaaatttctgcttgaagg

SEQ ID NO: 91658 - DNA, 21 bp, Artificial Sequence
  primer
gtaggaaagcctgtgtgggtg

SEQ ID NO: 91659 - DNA, 21 bp, Artificial Sequence
  primer
gacactggatggtgaaggagg

SEQ ID NO: 91660 - DNA, 37 bp, Artificial Sequence
  primer
gtaaaacgacggccagtagggcctgatatgtgctgtg

SEQ ID NO: 91661 - DNA, 22 bp, Artificial Sequence
  primer
tctacatgcacaacacaggacc

SEQ ID NO: 91662 - DNA, 21 bp, Artificial Sequence
  primer
agtggctcagggctagaacag

SEQ ID NO: 91663 - DNA, 21 bp, Artificial Sequence
  primer
gtgcttggagatcttgctgtg

SEQ ID NO: 91664 - DNA, 21 bp, Artificial Sequence
  primer
tgctgggtcagaggataaacc

SEQ ID NO: 91665 - DNA, 39 bp, Artificial Sequence
  primer
gtaaaacgacggccagttttgtcaggaatatagcccagg

SEQ ID NO: 91666 - DNA, 38 bp, Artificial Sequence
  primer
gtaaaacgacggccagttcctgacagttgatgcctctg

SEQ ID NO: 91667 - DNA, 20 bp, Artificial Sequence
  primer
ctcacttcgactcacctggc

SEQ ID NO: 91668 - DNA, 21 bp, Artificial Sequence
  primer
gagacgtgggtgagggaatac

SEQ ID NO: 91669 - DNA, 38 bp, Artificial Sequence
  primer
gtaaaacgacggccagtaaagtggtgctgtaactgggc

SEQ ID NO: 91670 - DNA, 21 bp, Artificial Sequence
  primer
ccatagtgccacattcaggag

SEQ ID NO: 91671 - DNA, 21 bp, Artificial Sequence
  primer
tagcaaccggaagtgaggaac

SEQ ID NO: 91672 - DNA, 21 bp, Artificial Sequence
  primer
ccaccaaatcctccttcagtc

SEQ ID NO: 91673 - DNA, 21 bp, Artificial Sequence
  primer
ctcctgactctgcatctggtg

SEQ ID NO: 91674 - DNA, 20 bp, Artificial Sequence
  primer
cagcggactggctctaagtg

SEQ ID NO: 91675 - DNA, 38 bp, Artificial Sequence
  primer
gtaaaacgacggccagtctggtccctctgactccagac

SEQ ID NO: 91676 - DNA, 38 bp, Artificial Sequence
  primer
gtaaaacgacggccagtctagcagcatggagaggaagc

SEQ ID NO: 91677 - DNA, 21 bp, Artificial Sequence
  primer
acctaggaggagtggcaggtc

SEQ ID NO: 91678 - DNA, 20 bp, Artificial Sequence
  primer
gctcagaggcaaacttgcag

SEQ ID NO: 91679 - DNA, 37 bp, Artificial Sequence
  primer
gtaaaacgacggccagtcagaagacaggaatcagggc

SEQ ID NO: 91680 - DNA, 21 bp, Artificial Sequence
  primer
caaagttggcaacagagggag

SEQ ID NO: 91681 - DNA, 21 bp, Artificial Sequence
  primer
gcaaacctcacaacaccaatg

SEQ ID NO: 91682 - DNA, 38 bp, Artificial Sequence
  primer
gtaaaacgacggccagtgagagggagagatcccgagtc

SEQ ID NO: 91683 - DNA, 37 bp, Artificial Sequence
  primer
gtaaaacgacggccagtcctgcctccatcctctcttc

SEQ ID NO: 91684 - DNA, 20 bp, Artificial Sequence
  primer
attgcagtcctggtgctcag

SEQ ID NO: 91685 - DNA, 37 bp, Artificial Sequence
  primer
gtaaaacgacggccagtggcttggaatggtaactccc

SEQ ID NO: 91686 - DNA, 38 bp, Artificial Sequence
  primer
gtaaaacgacggccagtcagggtgccacttctcaaatc

SEQ ID NO: 91687 - DNA, 21 bp, Artificial Sequence
  primer
tagaagggaaactgaggcagg

SEQ ID NO: 91688 - DNA, 37 bp, Artificial Sequence
  primer
gtaaaacgacggccagtacggagatgagcaccaacag

SEQ ID NO: 91689 - DNA, 21 bp, Artificial Sequence
  primer
cacctggagggaaattactgc

SEQ ID NO: 91690 - DNA, 21 bp, Artificial Sequence
  primer
caacagcagcttgagccatag

SEQ ID NO: 91691 - DNA, 38 bp, Artificial Sequence
  primer
gtaaaacgacggccagtaccggagtcagcaggtatcac

SEQ ID NO: 91692 - DNA, 37 bp, Artificial Sequence
  primer
gtaaaacgacggccagtgccttgctctttctgtcctg

SEQ ID NO: 91693 - DNA, 21 bp, Artificial Sequence
  primer
taaaggcagacatgctcttgg

SEQ ID NO: 91694 - DNA, 21 bp, Artificial Sequence
  primer
atagaatcaatgagccacggg

SEQ ID NO: 91695 - DNA, 21 bp, Artificial Sequence
  primer
tagcacttgcttggcacagag

SEQ ID NO: 91696 - DNA, 22 bp, Artificial Sequence
  primer
gggctgaacctcaggaattaag

SEQ ID NO: 91697 - DNA, 20 bp, Artificial Sequence
  primer
agaagctgggagaaagaccc

SEQ ID NO: 91698 - DNA, 21 bp, Artificial Sequence
  primer
gggtctcccagtcagcttctc

SEQ ID NO: 91699 - DNA, 38 bp, Artificial Sequence
  primer
gtaaaacgacggccagtgagaggcccatgttagtccag

SEQ ID NO: 91700 - DNA, 38 bp, Artificial Sequence
  primer
gtaaaacgacggccagttttgtggccaattcatcttcc

SEQ ID NO: 91701 - DNA, 38 bp, Artificial Sequence
  primer
gtaaaacgacggccagtgagcctagggtttgtgtgctg

SEQ ID NO: 91702 - DNA, 21 bp, Artificial Sequence
  primer
ccaaggctgcactttctacag

SEQ ID NO: 91703 - DNA, 21 bp, Artificial Sequence
  primer
atcagggcctctacccttacc

SEQ ID NO: 91704 - DNA, 38 bp, Artificial Sequence
  primer
gtaaaacgacggccagttgtgtccctggtatctgcaac

SEQ ID NO: 91705 - DNA, 38 bp, Artificial Sequence
  primer
gtaaaacgacggccagtacggcgatagagtgtctcctc

SEQ ID NO: 91706 - DNA, 38 bp, Artificial Sequence
  primer
gtaaaacgacggccagtatatagcccaggaggaggagc

SEQ ID NO: 91707 - DNA, 21 bp, Artificial Sequence
  primer
taaaggcagacatgctcttgg

SEQ ID NO: 91708 - DNA, 38 bp, Artificial Sequence
  primer
gtaaaacgacggccagtcaggatttgcacaggattcac

SEQ ID NO: 91709 - DNA, 18 bp, Artificial Sequence
  primer
ccaggtcccaccaacagg

SEQ ID NO: 91710 - DNA, 35 bp, Artificial Sequence
  primer
gtaaaacgacggccagtccaccttgaaccttgccc

SEQ ID NO: 91711 - DNA, 38 bp, Artificial Sequence
  primer
gtaaaacgacggccagtctttacaggtgggacacaggg

SEQ ID NO: 91712 - DNA, 21 bp, Artificial Sequence
  primer
cttcatttcccagtcctgtgc

SEQ ID NO: 91713 - DNA, 20 bp, Artificial Sequence
  primer
gagccacatggtgcgttatc

SEQ ID NO: 91714 - DNA, 18 bp, Artificial Sequence
  primer
ggcagtggcttgacttgg

SEQ ID NO: 91715 - DNA, 36 bp, Artificial Sequence
  primer
gtaaaacgacggccagtccctgtgtgctcccttcag

SEQ ID NO: 91716 - DNA, 38 bp, Artificial Sequence
  primer
gtaaaacgacggccagtgctgaaatggtagtggtggtg

SEQ ID NO: 91717 - DNA, 38 bp, Artificial Sequence
  primer
gtaaaacgacggccagtacatgcgggatcttctcgtag

SEQ ID NO: 91718 - DNA, 37 bp, Artificial Sequence
  primer
gtaaaacgacggccagtaatgggtgtgggaatgacac

SEQ ID NO: 91719 - DNA, 38 bp, Artificial Sequence
  primer
gtaaaacgacggccagtagtacttgctgtccacgatgc

SEQ ID NO: 91720 - DNA, 38 bp, Artificial Sequence
  primer
gtaaaacgacggccagtaccgtcctaccatcaggtcag

SEQ ID NO: 91721 - DNA, 21 bp, Artificial Sequence
  primer
tacttcctcctgtgctctggg

SEQ ID NO: 91722 - DNA, 19 bp, Artificial Sequence
  primer
gagggctccttctccttcg

SEQ ID NO: 91723 - DNA, 38 bp, Artificial Sequence
  primer
gtaaaacgacggccagttacaggaccacgttccagtcc

SEQ ID NO: 91724 - DNA, 21 bp, Artificial Sequence
  primer
ccagcttcccttctctatccc

SEQ ID NO: 91725 - DNA, 20 bp, Artificial Sequence
  primer
ccagggaacacatcttcagc

SEQ ID NO: 91726 - DNA, 21 bp, Artificial Sequence
  primer
atcttcagggaaggccataag

SEQ ID NO: 91727 - DNA, 21 bp, Artificial Sequence
  primer
cctgaatcccatctcaaaccc

SEQ ID NO: 91728 - DNA, 37 bp, Artificial Sequence
  primer
gtaaaacgacggccagtcggaaatatccaccatgtgc

SEQ ID NO: 91729 - DNA, 21 bp, Artificial Sequence
  primer
attggagacgctgaggaagac

SEQ ID NO: 91730 - DNA, 19 bp, Artificial Sequence
  primer
ccacgacaatgtccaccag

SEQ ID NO: 91731 - DNA, 37 bp, Artificial Sequence
  primer
gtaaaacgacggccagtggaggagtaatgggcagtgg

SEQ ID NO: 91732 - DNA, 21 bp, Artificial Sequence
  primer
ggtggagatgttcctggtgtc

SEQ ID NO: 91733 - DNA, 21 bp, Artificial Sequence
  primer
catgatgttcacccatccatc

SEQ ID NO: 91734 - DNA, 21 bp, Artificial Sequence
  primer
tgaagtacagcagcatccagg

SEQ ID NO: 91735 - DNA, 20 bp, Artificial Sequence
  primer
ggtgtctcctcctctcctgc

SEQ ID NO: 91736 - DNA, 21 bp, Artificial Sequence
  primer
gagatgcaggcagactgtgag

SEQ ID NO: 91737 - DNA, 19 bp, Artificial Sequence
  primer
ggttgtgcccactgtgttg

SEQ ID NO: 91738 - DNA, 19 bp, Artificial Sequence
  primer
agtgacagcagcacgatgg

SEQ ID NO: 91739 - DNA, 21 bp, Artificial Sequence
  primer
ttcagcagcttcagcactagg

SEQ ID NO: 91740 - DNA, 38 bp, Artificial Sequence
  primer
gtaaaacgacggccagtgaccagagaaacgagtgaggg

SEQ ID NO: 91741 - DNA, 37 bp, Artificial Sequence
  primer
gtaaaacgacggccagtgtgtgagtggatgggcacag

SEQ ID NO: 91742 - DNA, 21 bp, Artificial Sequence
  primer
gtagctcaggcagtgcttgtc

SEQ ID NO: 91743 - DNA, 37 bp, Artificial Sequence
  primer
gtaaaacgacggccagtcagcccatatcttcctgctg

SEQ ID NO: 91744 - DNA, 36 bp, Artificial Sequence
  primer
gtaaaacgacggccagtcatccttcctcttgccctg

SEQ ID NO: 91745 - DNA, 21 bp, Artificial Sequence
  primer
ggtccttcagatgagacgagg

SEQ ID NO: 91746 - DNA, 20 bp, Artificial Sequence
  primer
cttgtccaggaagccctgag

SEQ ID NO: 91747 - DNA, 21 bp, Artificial Sequence
  primer
gctcatcttcttctttctgcg

SEQ ID NO: 91748 - DNA, 38 bp, Artificial Sequence
  primer
gtaaaacgacggccagtagaggaagctctggattctgg

SEQ ID NO: 91749 - DNA, 37 bp, Artificial Sequence
  primer
gtaaaacgacggccagtgaccctggtttctccagagg

SEQ ID NO: 91750 - DNA, 36 bp, Artificial Sequence
  primer
gtaaaacgacggccagtcaagtcagggtccatgcag

SEQ ID NO: 91751 - DNA, 21 bp, Artificial Sequence
  primer
tgtgagcagcaggactcaatc

SEQ ID NO: 91752 - DNA, 21 bp, Artificial Sequence
  primer
taagaccaggtgggagtgagg

SEQ ID NO: 91753 - DNA, 21 bp, Artificial Sequence
  primer
tgtctgtccatcattcctccc

SEQ ID NO: 91754 - DNA, 38 bp, Artificial Sequence
  primer
gtaaaacgacggccagtactcagaagcattgggaccac

SEQ ID NO: 91755 - DNA, 37 bp, Artificial Sequence
  primer
gtaaaacgacggccagtattcccaatgacccagaagg

SEQ ID NO: 91756 - DNA, 20 bp, Artificial Sequence
  primer
ggcaaatgcctagcacagag

SEQ ID NO: 91757 - DNA, 37 bp, Artificial Sequence
  primer
gtaaaacgacggccagtcaaagaccctccctcctcag

SEQ ID NO: 91758 - DNA, 21 bp, Artificial Sequence
  primer
gaagacctggaatttggaggc

SEQ ID NO: 91759 - DNA, 21 bp, Artificial Sequence
  primer
agtacttgctgtccacgatgc

SEQ ID NO: 91760 - DNA, 36 bp, Artificial Sequence
  primer
gtaaaacgacggccagtaaacccaggcagatggatg

SEQ ID NO: 91761 - DNA, 21 bp, Artificial Sequence
  primer
gtcctttatatgctggctggg

SEQ ID NO: 91762 - DNA, 21 bp, Artificial Sequence
  primer
agaagcacagtggaccacatc

SEQ ID NO: 91763 - DNA, 21 bp, Artificial Sequence
  primer
tccagggctaggctctacaag

SEQ ID NO: 91764 - DNA, 21 bp, Artificial Sequence
  primer
ctttagggataggttgcctgc

SEQ ID NO: 91765 - DNA, 21 bp, Artificial Sequence
  primer
ggtggagtcagacgctgtacc

SEQ ID NO: 91766 - DNA, 21 bp, Artificial Sequence
  primer
tggcaggtacctctcttcagg

SEQ ID NO: 91767 - DNA, 19 bp, Artificial Sequence
  primer
gagtccctgttgtcgaggg

SEQ ID NO: 91768 - DNA, 37 bp, Artificial Sequence
  primer
gtaaaacgacggccagtctcctgcctcacacctgaag

SEQ ID NO: 91769 - DNA, 21 bp, Artificial Sequence
  primer
aaatccatcttcacccagcag

SEQ ID NO: 91770 - DNA, 21 bp, Artificial Sequence
  primer
aaaggcaaacttcctgtcctg

SEQ ID NO: 91771 - DNA, 21 bp, Artificial Sequence
  primer
gggctacgagtgaaatgaagc

SEQ ID NO: 91772 - DNA, 22 bp, Artificial Sequence
  primer
ggtgtttggcactcactattgg

SEQ ID NO: 91773 - DNA, 21 bp, Artificial Sequence
  primer
tcttgtgctcagtcatctggg

SEQ ID NO: 91774 - DNA, 21 bp, Artificial Sequence
  primer
cctgagaggtgagtgctaccc

SEQ ID NO: 91775 - DNA, 38 bp, Artificial Sequence
  primer
gtaaaacgacggccagtttcaaattcaaaccactgggc

SEQ ID NO: 91776 - DNA, 19 bp, Artificial Sequence
  primer
tccagctccaaaggctcag

SEQ ID NO: 91777 - DNA, 21 bp, Artificial Sequence
  primer
ccttccagactctgagcttcc

SEQ ID NO: 91778 - DNA, 38 bp, Artificial Sequence
  primer
gtaaaacgacggccagtcctaagggtcaggactgcttc

SEQ ID NO: 91779 - DNA, 38 bp, Artificial Sequence
  primer
gtaaaacgacggccagtctcatcaggcaatgaggagtc

SEQ ID NO: 91780 - DNA, 38 bp, Artificial Sequence
  primer
gtaaaacgacggccagttctggcagatgtgaggagaag

SEQ ID NO: 91781 - DNA, 20 bp, Artificial Sequence
  primer
ctcaggacaggcaccaacac

SEQ ID NO: 91782 - DNA, 18 bp, Artificial Sequence
  primer
cactgtgctggtcctggg

SEQ ID NO: 91783 - DNA, 20 bp, Artificial Sequence
  primer
cagaggtctctgtgcaaggc

SEQ ID NO: 91784 - DNA, 21 bp, Artificial Sequence
  primer
gtctctacagcccagagccag

SEQ ID NO: 91785 - DNA, 21 bp, Artificial Sequence
  primer
atcactccacctctctgagcc

SEQ ID NO: 91786 - DNA, 21 bp, Artificial Sequence
  primer
aaactcagccatctccctctg

SEQ ID NO: 91787 - DNA, 20 bp, Artificial Sequence
  primer
ctcccagtcccttggacttc

SEQ ID NO: 91788 - DNA, 20 bp, Artificial Sequence
  primer
agaagagggaggtgagcgag

SEQ ID NO: 91789 - DNA, 37 bp, Artificial Sequence
  primer
gtaaaacgacggccagtcctgcgaccctcatctcttc

SEQ ID NO: 91790 - DNA, 22 bp, Artificial Sequence
  primer
aagtattgctgtctgctcctgg

SEQ ID NO: 91791 - DNA, 21 bp, Artificial Sequence
  primer
tcgattcccagactgtgagag

SEQ ID NO: 91792 - DNA, 22 bp, Artificial Sequence
  primer
gccctcctgtaggaagtttgtg

SEQ ID NO: 91793 - DNA, 21 bp, Artificial Sequence
  primer
atcgtcagggagttgaaccac

SEQ ID NO: 91794 - DNA, 38 bp, Artificial Sequence
  primer
gtaaaacgacggccagttctaagatgctggtggtggtg

SEQ ID NO: 91795 - DNA, 38 bp, Artificial Sequence
  primer
gtaaaacgacggccagtcctataaatcctgggaagccc

SEQ ID NO: 91796 - DNA, 21 bp, Artificial Sequence
  primer
ctcaaggtcaacagatgtggg

SEQ ID NO: 91797 - DNA, 21 bp, Artificial Sequence
  primer
ggtcacgcaagtcagagactg

SEQ ID NO: 91798 - DNA, 20 bp, Artificial Sequence
  primer
cttggcccaactgagatgac

SEQ ID NO: 91799 - DNA, 21 bp, Artificial Sequence
  primer
ggcctgattgcaaggtatgac

SEQ ID NO: 91800 - DNA, 38 bp, Artificial Sequence
  primer
gtaaaacgacggccagttgactctgaaaccactgaggg

SEQ ID NO: 91801 - DNA, 21 bp, Artificial Sequence
  primer
ccgtgaaaggagctgattagg

SEQ ID NO: 91802 - DNA, 21 bp, Artificial Sequence
  primer
gacctcaggaaatgagatggg

SEQ ID NO: 91803 - DNA, 21 bp, Artificial Sequence
  primer
cccaccttgatcttgaaggac

SEQ ID NO: 91804 - DNA, 21 bp, Artificial Sequence
  primer
agggcctggctacctagaaac

SEQ ID NO: 91805 - DNA, 21 bp, Artificial Sequence
  primer
gatcattgggttacagggagg

SEQ ID NO: 91806 - DNA, 21 bp, Artificial Sequence
  primer
ccacctgtaccctgtggtatg

SEQ ID NO: 91807 - DNA, 21 bp, Artificial Sequence
  primer
tgtctccggtgttctgatctc

SEQ ID NO: 91808 - DNA, 39 bp, Artificial Sequence
  primer
gtaaaacgacggccagtggaaccaataaacaggtccctc

SEQ ID NO: 91809 - DNA, 21 bp, Artificial Sequence
  primer
agtggagtgggcagtcctatc

SEQ ID NO: 91810 - DNA, 21 bp, Artificial Sequence
  primer
tccatccagatacttgtgggc

SEQ ID NO: 91811 - DNA, 21 bp, Artificial Sequence
  primer
gactcccactacaaagccctg

SEQ ID NO: 91812 - DNA, 21 bp, Artificial Sequence
  primer
tgctagcccagttgaggaaac

SEQ ID NO: 91813 - DNA, 21 bp, Artificial Sequence
  primer
ctccttgtgcttgagagtggg

SEQ ID NO: 91814 - DNA, 21 bp, Artificial Sequence
  primer
aagcctaaaggctgagcttcc

SEQ ID NO: 91815 - DNA, 21 bp, Artificial Sequence
  primer
gccacaggtagcagtagcacc

SEQ ID NO: 91816 - DNA, 38 bp, Artificial Sequence
  primer
gtaaaacgacggccagttcacccttaggcctctcttcc

SEQ ID NO: 91817 - DNA, 21 bp, Artificial Sequence
  primer
cctactcatcctgccctaccc

SEQ ID NO: 91818 - DNA, 37 bp, Artificial Sequence
  primer
gtaaaacgacggccagtgagcaagttgggagcagaag

SEQ ID NO: 91819 - DNA, 21 bp, Artificial Sequence
  primer
gaagccgtgacttgtcattcc

SEQ ID NO: 91820 - DNA, 38 bp, Artificial Sequence
  primer
gtaaaacgacggccagtctggactgtgtttccatctgc

SEQ ID NO: 91821 - DNA, 21 bp, Artificial Sequence
  primer
gagcgccagtcagtgtcttag

SEQ ID NO: 91822 - DNA, 38 bp, Artificial Sequence
  primer
gtaaaacgacggccagttgtccctccttctttctcacg

SEQ ID NO: 91823 - DNA, 22 bp, Artificial Sequence
  primer
tgagtataggaccctgtgtggc

SEQ ID NO: 91824 - DNA, 38 bp, Artificial Sequence
  primer
gtaaaacgacggccagttaactagagcctcctgcgtcc

SEQ ID NO: 91825 - DNA, 21 bp, Artificial Sequence
  primer
gagtgactccctgtgagacgg

SEQ ID NO: 91826 - DNA, 38 bp, Artificial Sequence
  primer
gtaaaacgacggccagtatgagttgggtgacattgctg

SEQ ID NO: 91827 - DNA, 22 bp, Artificial Sequence
  primer
tcttgagctctgagaatctggc

SEQ ID NO: 91828 - DNA, 20 bp, Artificial Sequence
  primer
gcccgtgggatctacctaag

SEQ ID NO: 91829 - DNA, 21 bp, Artificial Sequence
  primer
ctatgtctccatcattggccc

SEQ ID NO: 91830 - DNA, 38 bp, Artificial Sequence
  primer
gtaaaacgacggccagtcagccctcctctctgtgagac

SEQ ID NO: 91831 - DNA, 38 bp, Artificial Sequence
  primer
gtaaaacgacggccagttcttccaatccaacctggaac

SEQ ID NO: 91832 - DNA, 38 bp, Artificial Sequence
  primer
gtaaaacgacggccagtactgccattgtaacaggctcc

SEQ ID NO: 91833 - DNA, 39 bp, Artificial Sequence
  primer
gtaaaacgacggccagttgatcccactccaagtatcagg

SEQ ID NO: 91834 - DNA, 21 bp, Artificial Sequence
  primer
cagggaggagagtaggctgag

SEQ ID NO: 91835 - DNA, 21 bp, Artificial Sequence
  primer
atctagctgctgagagggagg

SEQ ID NO: 91836 - DNA, 18 bp, Artificial Sequence
  primer
gttcgggacgcattccag

SEQ ID NO: 91837 - DNA, 21 bp, Artificial Sequence
  primer
aggatggcatttcctgttcac

SEQ ID NO: 91838 - DNA, 38 bp, Artificial Sequence
  primer
gtaaaacgacggccagtgggtttgcatttaaaccatga

SEQ ID NO: 91839 - DNA, 21 bp, Artificial Sequence
  primer
tggctaacttaattggccctg

SEQ ID NO: 91840 - DNA, 39 bp, Artificial Sequence
  primer
gtaaaacgacggccagtgggttcagatccagagaaacac

SEQ ID NO: 91841 - DNA, 20 bp, Artificial Sequence
  primer
atggatgcaggctgtcctac

SEQ ID NO: 91842 - DNA, 39 bp, Artificial Sequence
  primer
gtaaaacgacggccagtaatccaaagccatgtaaagagg

SEQ ID NO: 91843 - DNA, 40 bp, Artificial Sequence
  primer
gtaaaacgacggccagtagcattacccacttgaactcatc

SEQ ID NO: 91844 - DNA, 21 bp, Artificial Sequence
  primer
ttgatatggcttcattgcctg

SEQ ID NO: 91845 - DNA, 26 bp, Artificial Sequence
  primer
aaagaattataagaagatcagtcgct

SEQ ID NO: 91846 - DNA, 38 bp, Artificial Sequence
  primer
gtaaaacgacggccagtttcaaaggtttcttctgcctg

SEQ ID NO: 91847 - DNA, 24 bp, Artificial Sequence
  primer
ccctcactaccactacccactatc

SEQ ID NO: 91848 - DNA, 27 bp, Artificial Sequence
  primer
catgttcagaatcttactcttgtctga

SEQ ID NO: 91849 - DNA, 26 bp, Artificial Sequence
  primer
tccatattgagcatatttaaaccaga

SEQ ID NO: 91850 - DNA, 38 bp, Artificial Sequence
  primer
gtaaaacgacggccagtattcccaatgaagggatcaag

SEQ ID NO: 91851 - DNA, 37 bp, Artificial Sequence
  primer
gtaaaacgacggccagtttgacctctggcctcacaag

SEQ ID NO: 91852 - DNA, 40 bp, Artificial Sequence
  primer
gtaaaacgacggccagtttcctttgctaagataactgccc

SEQ ID NO: 91853 - DNA, 38 bp, Artificial Sequence
  primer
gtaaaacgacggccagttcatgtgtggtccttgtcatc

SEQ ID NO: 91854 - DNA, 40 bp, Artificial Sequence
  primer
gtaaaacgacggccagtaagctaacacattgtagccgttc

SEQ ID NO: 91855 - DNA, 21 bp, Artificial Sequence
  primer
tccctccagctaagaagtgct

SEQ ID NO: 91856 - DNA, 23 bp, Artificial Sequence
  primer
tgggtatttgtcaacatttctca

SEQ ID NO: 91857 - DNA, 38 bp, Artificial Sequence
  primer
gtaaaacgacggccagttgcatgtttggaatgggttag

SEQ ID NO: 91858 - DNA, 38 bp, Artificial Sequence
  primer
gtaaaacgacggccagtcttgaatgtgaaccagcttgc

SEQ ID NO: 91859 - DNA, 38 bp, Artificial Sequence
  primer
gtaaaacgacggccagttggaactaacccagagcagtc

SEQ ID NO: 91860 - DNA, 42 bp, Artificial Sequence
  primer
gtaaaacgacggccagttgccatatttacgtttaaccatttg

SEQ ID NO: 91861 - DNA, 38 bp, Artificial Sequence
  primer
gtaaaacgacggccagttcatacccaatttccacagga

SEQ ID NO: 91862 - DNA, 44 bp, Artificial Sequence
  primer
gtaaaacgacggccagtcttccttaagcagtaatgtacaaatcc

SEQ ID NO: 91863 - DNA, 23 bp, Artificial Sequence
  primer
tggaagactgtttgctgtgtatg

SEQ ID NO: 91864 - DNA, 40 bp, Artificial Sequence
  primer
gtaaaacgacggccagttgaccttcttgataaacattgcc

SEQ ID NO: 91865 - DNA, 24 bp, Artificial Sequence
  primer
tgtatttgccactgtataaggacc

SEQ ID NO: 91866 - DNA, 44 bp, Artificial Sequence
  primer
gtaaaacgacggccagttttaccttccaaggatacatacatatt

SEQ ID NO: 91867 - DNA, 41 bp, Artificial Sequence
  primer
gtaaaacgacggccagtgacttagcatgcatttcttaatgg

SEQ ID NO: 91868 - DNA, 39 bp, Artificial Sequence
  primer
gtaaaacgacggccagtccaccagccaatttgtaatatg

SEQ ID NO: 91869 - DNA, 24 bp, Artificial Sequence
  primer
gaagtttacatccgcataacattg

SEQ ID NO: 91870 - DNA, 39 bp, Artificial Sequence
  primer
gtaaaacgacggccagtcaagatggctatgagatcaggc

SEQ ID NO: 91871 - DNA, 26 bp, Artificial Sequence
  primer
tgcctaaagagaaaggaattatcttg

SEQ ID NO: 91872 - DNA, 19 bp, Artificial Sequence
  primer
aatcgattctgcctttgcg

SEQ ID NO: 91873 - DNA, 39 bp, Artificial Sequence
  primer
gtaaaacgacggccagtttgtatccttgaattcttgcgg

SEQ ID NO: 91874 - DNA, 39 bp, Artificial Sequence
  primer
gtaaaacgacggccagtcgttactgtaattgagggcagg

SEQ ID NO: 91875 - DNA, 20 bp, Artificial Sequence
  primer
agttgcagggagaccaggac

SEQ ID NO: 91876 - DNA, 36 bp, Artificial Sequence
  primer
gtaaaacgacggccagtagcgcagggaaggagtagc

SEQ ID NO: 91877 - DNA, 38 bp, Artificial Sequence
  primer
gtaaaacgacggccagtcaccaggacctccattaaacc

SEQ ID NO: 91878 - DNA, 21 bp, Artificial Sequence
  primer
actgccctcatggtacaggac

SEQ ID NO: 91879 - DNA, 21 bp, Artificial Sequence
  primer
atatctcactgtgtgcccagc

SEQ ID NO: 91880 - DNA, 38 bp, Artificial Sequence
  primer
gtaaaacgacggccagtcggacttctagggagttgtgg

SEQ ID NO: 91881 - DNA, 21 bp, Artificial Sequence
  primer
gaggtgcgcaggagtaatctc

SEQ ID NO: 91882 - DNA, 38 bp, Artificial Sequence
  primer
gtaaaacgacggccagtgactgggctgccacagactac

SEQ ID NO: 91883 - DNA, 38 bp, Artificial Sequence
  primer
gtaaaacgacggccagtctgctaggaggcttggaaatg

SEQ ID NO: 91884 - DNA, 22 bp, Artificial Sequence
  primer
gatgtcttcatcagcttcaggg

SEQ ID NO: 91885 - DNA, 38 bp, Artificial Sequence
  primer
gtaaaacgacggccagtaacagtagggtggtgagtggc

SEQ ID NO: 91886 - DNA, 38 bp, Artificial Sequence
  primer
gtaaaacgacggccagtagctgcctgtttggtgctaac

SEQ ID NO: 91887 - DNA, 21 bp, Artificial Sequence
  primer
gtttgaggttactgctgtggc

SEQ ID NO: 91888 - DNA, 20 bp, Artificial Sequence
  primer
gaggaggcacactgtcttgc

SEQ ID NO: 91889 - DNA, 20 bp, Artificial Sequence
  primer
gcactgcctgttctgtctcg

SEQ ID NO: 91890 - DNA, 38 bp, Artificial Sequence
  primer
gtaaaacgacggccagtgtgttcagagcagggactgag

SEQ ID NO: 91891 - DNA, 20 bp, Artificial Sequence
  primer
cctcaagctgctctcacagg

SEQ ID NO: 91892 - DNA, 38 bp, Artificial Sequence
  primer
gtaaaacgacggccagttctagacccaaggtcacctcc

SEQ ID NO: 91893 - DNA, 21 bp, Artificial Sequence
  primer
aggaagtccagagtcacaggc

SEQ ID NO: 91894 - DNA, 21 bp, Artificial Sequence
  primer
agggacttgaccaacgttctg

SEQ ID NO: 91895 - DNA, 21 bp, Artificial Sequence
  primer
caggtgtagttccgtgtcacc

SEQ ID NO: 91896 - DNA, 21 bp, Artificial Sequence
  primer
tcagggtgagtagtgagcagc

SEQ ID NO: 91897 - DNA, 38 bp, Artificial Sequence
  primer
gtaaaacgacggccagttttccacagactttcgaggtg

SEQ ID NO: 91898 - DNA, 38 bp, Artificial Sequence
  primer
gtaaaacgacggccagtacagacacacagagctccagg

SEQ ID NO: 91899 - DNA, 38 bp, Artificial Sequence
  primer
gtaaaacgacggccagttgtgcctgcttatttccacac

SEQ ID NO: 91900 - DNA, 21 bp, Artificial Sequence
  primer
gggtttgggtagtgggatagg

SEQ ID NO: 91901 - DNA, 38 bp, Artificial Sequence
  primer
gtaaaacgacggccagtacccaagaggcagactggtag

SEQ ID NO: 91902 - DNA, 21 bp, Artificial Sequence
  primer
ggtcctacaaacccagcagtc

SEQ ID NO: 91903 - DNA, 21 bp, Artificial Sequence
  primer
agggaccatcagtgctacctg

SEQ ID NO: 91904 - DNA, 21 bp, Artificial Sequence
  primer
gcctccatgtaggtgttggag

SEQ ID NO: 91905 - DNA, 21 bp, Artificial Sequence
  primer
aggcagtccagtggttcagag

SEQ ID NO: 91906 - DNA, 21 bp, Artificial Sequence
  primer
ttgtagagtgccagcatcagg

SEQ ID NO: 91907 - DNA, 21 bp, Artificial Sequence
  primer
ggttaaggaaatctgcaacgg

SEQ ID NO: 91908 - DNA, 38 bp, Artificial Sequence
  primer
gtaaaacgacggccagtccgtagagaagctgctggaac

SEQ ID NO: 91909 - DNA, 20 bp, Artificial Sequence
  primer
cctccctcagtcgtagaccc

SEQ ID NO: 91910 - DNA, 38 bp, Artificial Sequence
  primer
gtaaaacgacggccagtttggtgttggtcagtctctgc

SEQ ID NO: 91911 - DNA, 21 bp, Artificial Sequence
  primer
tgcactagctcacactgctcc

SEQ ID NO: 91912 - DNA, 37 bp, Artificial Sequence
  primer
gtaaaacgacggccagtagttgcagggagaccaggac

SEQ ID NO: 91913 - DNA, 38 bp, Artificial Sequence
  primer
gtaaaacgacggccagttcggaggtgagatgtgatttg

SEQ ID NO: 91914 - DNA, 36 bp, Artificial Sequence
  primer
gtaaaacgacggccagtccaaacttgggcacagtgg

SEQ ID NO: 91915 - DNA, 21 bp, Artificial Sequence
  primer
cagtgcgagtgagtatcctgc

SEQ ID NO: 91916 - DNA, 38 bp, Artificial Sequence
  primer
gtaaaacgacggccagtattggttcatcaatgccatcc

SEQ ID NO: 91917 - DNA, 38 bp, Artificial Sequence
  primer
gtaaaacgacggccagtcactgttagaaggtggttgcg

SEQ ID NO: 91918 - DNA, 38 bp, Artificial Sequence
  primer
gtaaaacgacggccagtctatatcccaaaccagccagc

SEQ ID NO: 91919 - DNA, 38 bp, Artificial Sequence
  primer
gtaaaacgacggccagttgcaccctgacaataggtttg

SEQ ID NO: 91920 - DNA, 21 bp, Artificial Sequence
  primer
agacggagtcctttcatgctg

SEQ ID NO: 91921 - DNA, 21 bp, Artificial Sequence
  primer
tgctctggatctaacagcgag

SEQ ID NO: 91922 - DNA, 40 bp, Artificial Sequence
  primer
gtaaaacgacggccagtgtttcagaactagcaagcctttg

SEQ ID NO: 91923 - DNA, 20 bp, Artificial Sequence
  primer
gggctgggattaaaggtctg

SEQ ID NO: 91924 - DNA, 22 bp, Artificial Sequence
  primer
aaacacaaggctgagaaaccac

SEQ ID NO: 91925 - DNA, 22 bp, Artificial Sequence
  primer
gcaacagagcaagattctgtcc

SEQ ID NO: 91926 - DNA, 25 bp, Artificial Sequence
  primer
cagctacctttctgaagtacgtgtc

SEQ ID NO: 91927 - DNA, 38 bp, Artificial Sequence
  primer
gtaaaacgacggccagttctctgttcctgcccaacttc

SEQ ID NO: 91928 - DNA, 22 bp, Artificial Sequence
  primer
aagtcaccagagctggagtcag

SEQ ID NO: 91929 - DNA, 23 bp, Artificial Sequence
  primer
gagtttgaagcctgaactttgtg

SEQ ID NO: 91930 - DNA, 21 bp, Artificial Sequence
  primer
tgcagcaaagtgtcatcactg

SEQ ID NO: 91931 - DNA, 38 bp, Artificial Sequence
  primer
gtaaaacgacggccagtctccacacatggtacaaaggc

SEQ ID NO: 91932 - DNA, 42 bp, Artificial Sequence
  primer
gtaaaacgacggccagtggacacactatgatcaggttaacag

SEQ ID NO: 91933 - DNA, 38 bp, Artificial Sequence
  primer
gtaaaacgacggccagttctcctaggtgagcctgaacc

SEQ ID NO: 91934 - DNA, 38 bp, Artificial Sequence
  primer
gtaaaacgacggccagtcacaccagggaagaagaaagg

SEQ ID NO: 91935 - DNA, 38 bp, Artificial Sequence
  primer
gtaaaacgacggccagtcctaagaacatgacatggccc

SEQ ID NO: 91936 - DNA, 21 bp, Artificial Sequence
  primer
aacagctaaaccaggattggg

SEQ ID NO: 91937 - DNA, 22 bp, Artificial Sequence
  primer
tctagctcttgtggtttggagc

SEQ ID NO: 91938 - DNA, 38 bp, Artificial Sequence
  primer
gtaaaacgacggccagtcagtggacagaagccaacaag

SEQ ID NO: 91939 - DNA, 21 bp, Artificial Sequence
  primer
ctgagggttgaacttggttcc

SEQ ID NO: 91940 - DNA, 38 bp, Artificial Sequence
  primer
gtaaaacgacggccagtttgaaggagatgacaccaagc

SEQ ID NO: 91941 - DNA, 20 bp, Artificial Sequence
  primer
aggctccaggtacccaaatg

SEQ ID NO: 91942 - DNA, 21 bp, Artificial Sequence
  primer
cataaactgatgggaggtggg

SEQ ID NO: 91943 - DNA, 38 bp, Artificial Sequence
  primer
gtaaaacgacggccagtctgctgagaagcagactgtgg

SEQ ID NO: 91944 - DNA, 38 bp, Artificial Sequence
  primer
gtaaaacgacggccagtctgggcttgctttatttgacc

SEQ ID NO: 91945 - DNA, 19 bp, Artificial Sequence
  primer
ggattacgggcatgagctg

SEQ ID NO: 91946 - DNA, 39 bp, Artificial Sequence
  primer
gtaaaacgacggccagttgaaggcatgactcacaatctc

SEQ ID NO: 91947 - DNA, 21 bp, Artificial Sequence
  primer
gcacagcacttagcacaaagg

SEQ ID NO: 91948 - DNA, 38 bp, Artificial Sequence
  primer
gtaaaacgacggccagtacacagacccatctgggaaag

SEQ ID NO: 91949 - DNA, 21 bp, Artificial Sequence
  primer
tctccaacagtggaaaggatg

SEQ ID NO: 91950 - DNA, 38 bp, Artificial Sequence
  primer
gtaaaacgacggccagtgggacctagatgatggtgcag

SEQ ID NO: 91951 - DNA, 38 bp, Artificial Sequence
  primer
gtaaaacgacggccagttgatgagatgctgatggttgg

SEQ ID NO: 91952 - DNA, 38 bp, Artificial Sequence
  primer
gtaaaacgacggccagtaacccagaagggaggttatgc

SEQ ID NO: 91953 - DNA, 21 bp, Artificial Sequence
  primer
atggagatggtcaaggtaggg

SEQ ID NO: 91954 - DNA, 21 bp, Artificial Sequence
  primer
caagagagtggtcagtcgcag

SEQ ID NO: 91955 - DNA, 38 bp, Artificial Sequence
  primer
gtaaaacgacggccagtggacctgacacaatgctcttg

SEQ ID NO: 91956 - DNA, 22 bp, Artificial Sequence
  primer
aagataggagagggtcacgagg

SEQ ID NO: 91957 - DNA, 21 bp, Artificial Sequence
  primer
ctatggaatcagtggatcgcc

SEQ ID NO: 91958 - DNA, 37 bp, Artificial Sequence
  primer
gtaaaacgacggccagtctggtgagtatgcctggtgg

SEQ ID NO: 91959 - DNA, 21 bp, Artificial Sequence
  primer
atgctttgggataggaggacc

SEQ ID NO: 91960 - DNA, 21 bp, Artificial Sequence
  primer
tgtcgggctagggttctacac

SEQ ID NO: 91961 - DNA, 20 bp, Artificial Sequence
  primer
gtgggtcaccttggtacctg

SEQ ID NO: 91962 - DNA, 38 bp, Artificial Sequence
  primer
gtaaaacgacggccagtgttgtttgcatgggtaacgtg

SEQ ID NO: 91963 - DNA, 21 bp, Artificial Sequence
  primer
gcctcttggaactgtgtaggg

SEQ ID NO: 91964 - DNA, 39 bp, Artificial Sequence
  primer
gtaaaacgacggccagtcatctgaaagcaagaatggctc

SEQ ID NO: 91965 - DNA, 38 bp, Artificial Sequence
  primer
gtaaaacgacggccagtgctgacattgtctcaccttgc

SEQ ID NO: 91966 - DNA, 21 bp, Artificial Sequence
  primer
ttccctaaggaggtgctaggc

SEQ ID NO: 91967 - DNA, 21 bp, Artificial Sequence
  primer
acctccaaccaggagagtctg

SEQ ID NO: 91968 - DNA, 20 bp, Artificial Sequence
  primer
cttcttgggcagtgatggag

SEQ ID NO: 91969 - DNA, 21 bp, Artificial Sequence
  primer
gagcccaatgtgtgtttgttg

SEQ ID NO: 91970 - DNA, 21 bp, Artificial Sequence
  primer
ttctgcctgacaggaacagag

SEQ ID NO: 91971 - DNA, 38 bp, Artificial Sequence
  primer
gtaaaacgacggccagtgtccaggtccctcgtcactac

SEQ ID NO: 91972 - DNA, 38 bp, Artificial Sequence
  primer
gtaaaacgacggccagtagtttcctggatgctgacctg

SEQ ID NO: 91973 - DNA, 38 bp, Artificial Sequence
  primer
gtaaaacgacggccagtctgtcacactggctctggttg

SEQ ID NO: 91974 - DNA, 39 bp, Artificial Sequence
  primer
gtaaaacgacggccagttgggtcaatatctgtgatgcag

SEQ ID NO: 91975 - DNA, 38 bp, Artificial Sequence
  primer
gtaaaacgacggccagtccatgtgctaatgggataggg

SEQ ID NO: 91976 - DNA, 21 bp, Artificial Sequence
  primer
gagaaaggagctgtcggaatg

SEQ ID NO: 91977 - DNA, 21 bp, Artificial Sequence
  primer
atctgtcaatcccgatccttc

SEQ ID NO: 91978 - DNA, 21 bp, Artificial Sequence
  primer
tatctcgttcccatttcccac

SEQ ID NO: 91979 - DNA, 21 bp, Artificial Sequence
  primer
ctgctgtgatctatgccttgc

SEQ ID NO: 91980 - DNA, 36 bp, Artificial Sequence
  primer
gtaaaacgacggccagtgagagcctcaaggcagtgg

SEQ ID NO: 91981 - DNA, 21 bp, Artificial Sequence
  primer
ggctctctttagctggagtgg

SEQ ID NO: 91982 - DNA, 37 bp, Artificial Sequence
  primer
gtaaaacgacggccagtccaggaccacttagcgtcag

SEQ ID NO: 91983 - DNA, 21 bp, Artificial Sequence
  primer
atggagatggtcaaggtaggg

SEQ ID NO: 91984 - DNA, 37 bp, Artificial Sequence
  primer
gtaaaacgacggccagtagcctcctgctcaaggacac

SEQ ID NO: 91985 - DNA, 21 bp, Artificial Sequence
  primer
gatgtcacacacagagccagg

SEQ ID NO: 91986 - DNA, 38 bp, Artificial Sequence
  primer
gtaaaacgacggccagttggagggtgggttctttgtag

SEQ ID NO: 91987 - DNA, 20 bp, Artificial Sequence
  primer
gtgggctctgcacttagacg

SEQ ID NO: 91988 - DNA, 21 bp, Artificial Sequence
  primer
aacaaataacggagccctgtg

SEQ ID NO: 91989 - DNA, 21 bp, Artificial Sequence
  primer
acaggtgtgttcattggcatc

SEQ ID NO: 91990 - DNA, 21 bp, Artificial Sequence
  primer
cagttagctgcatcccatgtc

SEQ ID NO: 91991 - DNA, 20 bp, Artificial Sequence
  primer
cctctcgagccgaccttaac

SEQ ID NO: 91992 - DNA, 21 bp, Artificial Sequence
  primer
acatccagaagaggtcatggg

SEQ ID NO: 91993 - DNA, 21 bp, Artificial Sequence
  primer
ctaggaagtggctgggtcaag

SEQ ID NO: 91994 - DNA, 37 bp, Artificial Sequence
  primer
gtaaaacgacggccagtacacagcagattcagcctgg

SEQ ID NO: 91995 - DNA, 38 bp, Artificial Sequence
  primer
gtaaaacgacggccagtaaccattgaggcctagtccag

SEQ ID NO: 91996 - DNA, 38 bp, Artificial Sequence
  primer
gtaaaacgacggccagtaaaggaggattcagggagtgg

SEQ ID NO: 91997 - DNA, 38 bp, Artificial Sequence
  primer
gtaaaacgacggccagtctacccttccctccacctcag

SEQ ID NO: 91998 - DNA, 38 bp, Artificial Sequence
  primer
gtaaaacgacggccagtgaaagtctgtagccctcctgg

SEQ ID NO: 91999 - DNA, 21 bp, Artificial Sequence
  primer
gtcccaggattgtgattcgag

SEQ ID NO: 92000 - DNA, 38 bp, Artificial Sequence
  primer
gtaaaacgacggccagtgtggagggaacacttctggag

SEQ ID NO: 92001 - DNA, 21 bp, Artificial Sequence
  primer
ttagtaagcagtggagctggg

SEQ ID NO: 92002 - DNA, 37 bp, Artificial Sequence
  primer
gtaaaacgacggccagtgtaggccagaggaaaccagg

SEQ ID NO: 92003 - DNA, 37 bp, Artificial Sequence
  primer
gtaaaacgacggccagttcccttcctcctccatgttc

SEQ ID NO: 92004 - DNA, 22 bp, Artificial Sequence
  primer
catggtacgaaatgatcgactg

SEQ ID NO: 92005 - DNA, 38 bp, Artificial Sequence
  primer
gtaaaacgacggccagtggaatctccctagcttccctc

SEQ ID NO: 92006 - DNA, 19 bp, Artificial Sequence
  primer
gtgggacaggcaaaccttg

SEQ ID NO: 92007 - DNA, 21 bp, Artificial Sequence
  primer
aggaggtgcgaggctagagat

SEQ ID NO: 92008 - DNA, 38 bp, Artificial Sequence
  primer
gtaaaacgacggccagtaaacagcaccgtcttcacttc

SEQ ID NO: 92009 - DNA, 21 bp, Artificial Sequence
  primer
tgtccaaataagccatccacc

SEQ ID NO: 92010 - DNA, 39 bp, Artificial Sequence
  primer
gtaaaacgacggccagtaatgctacttcacagaaacggc

SEQ ID NO: 92011 - DNA, 23 bp, Artificial Sequence
  primer
aaaccatattaccagcctccttg

SEQ ID NO: 92012 - DNA, 20 bp, Artificial Sequence
  primer
aaagggcatgctcacttctg

SEQ ID NO: 92013 - DNA, 38 bp, Artificial Sequence
  primer
gtaaaacgacggccagtgacgcagacagtcaacaggac

SEQ ID NO: 92014 - DNA, 38 bp, Artificial Sequence
  primer
gtaaaacgacggccagtagagagagggtcgggagtagg

SEQ ID NO: 92015 - DNA, 38 bp, Artificial Sequence
  primer
gtaaaacgacggccagtcccaaggtcagcttatggatg

SEQ ID NO: 92016 - DNA, 37 bp, Artificial Sequence
  primer
gtaaaacgacggccagtaccatagcaacagcgactgg

SEQ ID NO: 92017 - DNA, 22 bp, Artificial Sequence
  primer
cagctgttctaagccatgaaac

SEQ ID NO: 92018 - DNA, 21 bp, Artificial Sequence
  primer
agggctgcagtgagctaagac

SEQ ID NO: 92019 - DNA, 21 bp, Artificial Sequence
  primer
agaggtgtcaccataggcaac

SEQ ID NO: 92020 - DNA, 21 bp, Artificial Sequence
  primer
gatccttggatttatgacggc

SEQ ID NO: 92021 - DNA, 38 bp, Artificial Sequence
  primer
gtaaaacgacggccagtccaggccaatttatgtagcac

SEQ ID NO: 92022 - DNA, 38 bp, Artificial Sequence
  primer
gtaaaacgacggccagtcactgtccaaagggtgagatg

SEQ ID NO: 92023 - DNA, 36 bp, Artificial Sequence
  primer
gtaaaacgacggccagtttcaaagtcctgaaccggg

SEQ ID NO: 92024 - DNA, 20 bp, Artificial Sequence
  primer
acactcaaggacatcctgcc

SEQ ID NO: 92025 - DNA, 39 bp, Artificial Sequence
  primer
gtaaaacgacggccagtggtggacaggtgtgtgttaagg

SEQ ID NO: 92026 - DNA, 21 bp, Artificial Sequence
  primer
gtgtagagctgggcatacgtg

SEQ ID NO: 92027 - DNA, 38 bp, Artificial Sequence
  primer
gtaaaacgacggccagtaacccttcccacacagttcac

SEQ ID NO: 92028 - DNA, 21 bp, Artificial Sequence
  primer
gcagaatggacatgaggtcag

SEQ ID NO: 92029 - DNA, 38 bp, Artificial Sequence
  primer
gtaaaacgacggccagtctccacatacacaccctggac

SEQ ID NO: 92030 - DNA, 38 bp, Artificial Sequence
  primer
gtaaaacgacggccagtgcttgcttctaaacctgtgcc

SEQ ID NO: 92031 - DNA, 21 bp, Artificial Sequence
  primer
agatgggaagatcgcttgaac

SEQ ID NO: 92032 - DNA, 21 bp, Artificial Sequence
  primer
agttgtgttaagggcagcagg

SEQ ID NO: 92033 - DNA, 21 bp, Artificial Sequence
  primer
tcacatcaaatgactcctggg

SEQ ID NO: 92034 - DNA, 21 bp, Artificial Sequence
  primer
ctacaatcctttggcatgctg

SEQ ID NO: 92035 - DNA, 19 bp, Artificial Sequence
  primer
ccagtctaacgccaccctg

SEQ ID NO: 92036 - DNA, 20 bp, Artificial Sequence
  primer
gagaaagggacgtggaggag

SEQ ID NO: 92037 - DNA, 36 bp, Artificial Sequence
  primer
gtaaaacgacggccagtctccgcgactcccaaatac

SEQ ID NO: 92038 - DNA, 21 bp, Artificial Sequence
  primer
catgcacaaactaacttcccg

SEQ ID NO: 92039 - DNA, 21 bp, Artificial Sequence
  primer
atttacacagcagccagcaag

SEQ ID NO: 92040 - DNA, 22 bp, Artificial Sequence
  primer
ttccagaaatgtgaggtaaggg

SEQ ID NO: 92041 - DNA, 38 bp, Artificial Sequence
  primer
gtaaaacgacggccagtctcctctctggctagtttggc

SEQ ID NO: 92042 - DNA, 25 bp, Artificial Sequence
  primer
aatggacagttattaacactgaggg

SEQ ID NO: 92043 - DNA, 22 bp, Artificial Sequence
  primer
ttctcaggttgaacgacaaatg

SEQ ID NO: 92044 - DNA, 21 bp, Artificial Sequence
  primer
aacagacccttgaggagcaag

SEQ ID NO: 92045 - DNA, 38 bp, Artificial Sequence
  primer
gtaaaacgacggccagtcatggtcctttcttcactggg

SEQ ID NO: 92046 - DNA, 21 bp, Artificial Sequence
  primer
gactctgctgccttcttgtcc

SEQ ID NO: 92047 - DNA, 21 bp, Artificial Sequence
  primer
tcagcaagacgttctcctttg

SEQ ID NO: 92048 - DNA, 21 bp, Artificial Sequence
  primer
acagcagcagtttgttccaag

SEQ ID NO: 92049 - DNA, 24 bp, Artificial Sequence
  primer
cctcttcagattaaggatgactcc

SEQ ID NO: 92050 - DNA, 24 bp, Artificial Sequence
  primer
tgttagccaagttaagatgattgg

SEQ ID NO: 92051 - DNA, 21 bp, Artificial Sequence
  primer
taggcagagaaacctgccttc

SEQ ID NO: 92052 - DNA, 21 bp, Artificial Sequence
  primer
gagctgacaaggctgttgttc

SEQ ID NO: 92053 - DNA, 21 bp, Artificial Sequence
  primer
caagctctgtctccctccaac

SEQ ID NO: 92054 - DNA, 35 bp, Artificial Sequence
  primer
gtaaaacgacggccagtccgcctcctctctggaag

SEQ ID NO: 92055 - DNA, 38 bp, Artificial Sequence
  primer
gtaaaacgacggccagtaaccaaccttgattggtggtg

SEQ ID NO: 92056 - DNA, 21 bp, Artificial Sequence
  primer
tgatgagggcctctaggtagg

SEQ ID NO: 92057 - DNA, 21 bp, Artificial Sequence
  primer
tgcaacacgacctagtgcaag

SEQ ID NO: 92058 - DNA, 20 bp, Artificial Sequence
  primer
ggtagcggtagcggtagctg

SEQ ID NO: 92059 - DNA, 19 bp, Artificial Sequence
  primer
aggcccgcggtctttatac

SEQ ID NO: 92060 - DNA, 38 bp, Artificial Sequence
  primer
gtaaaacgacggccagttttccatctcctccaaacacc

SEQ ID NO: 92061 - DNA, 22 bp, Artificial Sequence
  primer
tttctagggacagatgctgagg

SEQ ID NO: 92062 - DNA, 37 bp, Artificial Sequence
  primer
gtaaaacgacggccagtttcttgctccttccctggag

SEQ ID NO: 92063 - DNA, 38 bp, Artificial Sequence
  primer
gtaaaacgacggccagtctctttgggtgtggaattgtg

SEQ ID NO: 92064 - DNA, 39 bp, Artificial Sequence
  primer
gtaaaacgacggccagtaataccatcacaaggaccatgc

SEQ ID NO: 92065 - DNA, 18 bp, Artificial Sequence
  primer
gtgcgcgtgtgtgtgtgt

SEQ ID NO: 92066 - DNA, 38 bp, Artificial Sequence
  primer
gtaaaacgacggccagtccagtgtctctctttcctccg

SEQ ID NO: 92067 - DNA, 38 bp, Artificial Sequence
  primer
gtaaaacgacggccagtgcgatgttatgtctgcattcc

SEQ ID NO: 92068 - DNA, 21 bp, Artificial Sequence
  primer
ctgacgtggaaaccttccttc

SEQ ID NO: 92069 - DNA, 37 bp, Artificial Sequence
  primer
gtaaaacgacggccagtcacatgccatcctgtgtgac

SEQ ID NO: 92070 - DNA, 37 bp, Artificial Sequence
  primer
gtaaaacgacggccagtcattctgggatgaggaaggg

SEQ ID NO: 92071 - DNA, 38 bp, Artificial Sequence
  primer
gtaaaacgacggccagtaggaactggcctgagtaatcg

SEQ ID NO: 92072 - DNA, 21 bp, Artificial Sequence
  primer
gaatggtctccttccagcatc

SEQ ID NO: 92073 - DNA, 21 bp, Artificial Sequence
  primer
atgctggcacactgactcttc

SEQ ID NO: 92074 - DNA, 20 bp, Artificial Sequence
  primer
tggcaggcacctgtaatctc

SEQ ID NO: 92075 - DNA, 38 bp, Artificial Sequence
  primer
gtaaaacgacggccagtgttgtggaatgtcccttctcc

SEQ ID NO: 92076 - DNA, 21 bp, Artificial Sequence
  primer
gtgacaacagctaagcatggg

SEQ ID NO: 92077 - DNA, 36 bp, Artificial Sequence
  primer
gtaaaacgacggccagtgaggcaagctgtctcctcc

SEQ ID NO: 92078 - DNA, 35 bp, Artificial Sequence
  primer
gtaaaacgacggccagtcccgagcagggagaacac

SEQ ID NO: 92079 - DNA, 20 bp, Artificial Sequence
  primer
attaactctcccgccagcac

SEQ ID NO: 92080 - DNA, 38 bp, Artificial Sequence
  primer
gtaaaacgacggccagtagcgtgcaacagtgcatagag

SEQ ID NO: 92081 - DNA, 21 bp, Artificial Sequence
  primer
actcaagggatgggactatgg

SEQ ID NO: 92082 - DNA, 38 bp, Artificial Sequence
  primer
gtaaaacgacggccagtccattctgccttctttcaagc

SEQ ID NO: 92083 - DNA, 21 bp, Artificial Sequence
  primer
agcaaggaagtggctaagtgg

SEQ ID NO: 92084 - DNA, 21 bp, Artificial Sequence
  primer
cttcctcctggactcaggaac

SEQ ID NO: 92085 - DNA, 18 bp, Artificial Sequence
  primer
gagtcccgaggacggaag

SEQ ID NO: 92086 - DNA, 35 bp, Artificial Sequence
  primer
gtaaaacgacggccagttctggcagaggaggaggg

SEQ ID NO: 92087 - DNA, 38 bp, Artificial Sequence
  primer
gtaaaacgacggccagtactatctggactcggattggc

SEQ ID NO: 92088 - DNA, 21 bp, Artificial Sequence
  primer
actacacccaccttacccagc

SEQ ID NO: 92089 - DNA, 36 bp, Artificial Sequence
  primer
gtaaaacgacggccagtatggagatgtccgtggagg

SEQ ID NO: 92090 - DNA, 36 bp, Artificial Sequence
  primer
gtaaaacgacggccagtttcctgttgagcgtgttgg

SEQ ID NO: 92091 - DNA, 19 bp, Artificial Sequence
  primer
gtgcgaggtcgagtggaag

SEQ ID NO: 92092 - DNA, 38 bp, Artificial Sequence
  primer
gtaaaacgacggccagtctgatgggtcttgctccaaac

SEQ ID NO: 92093 - DNA, 20 bp, Artificial Sequence
  primer
catttggccagttaacgctc

SEQ ID NO: 92094 - DNA, 21 bp, Artificial Sequence
  primer
aaataagcctggctatgtccc

SEQ ID NO: 92095 - DNA, 23 bp, Artificial Sequence
  primer
gccctcttcaggtagtttgacag

SEQ ID NO: 92096 - DNA, 20 bp, Artificial Sequence
  primer
tgcagctcaccaatattccc

SEQ ID NO: 92097 - DNA, 22 bp, Artificial Sequence
  primer
aacactgcaagaaagaagcagg

SEQ ID NO: 92098 - DNA, 38 bp, Artificial Sequence
  primer
gtaaaacgacggccagtcagggtgtcaacgtctcctac

SEQ ID NO: 92099 - DNA, 38 bp, Artificial Sequence
  primer
gtaaaacgacggccagtaattctttctcccagcccaac

SEQ ID NO: 92100 - DNA, 21 bp, Artificial Sequence
  primer
cctgcaccaactcctaccttc

SEQ ID NO: 92101 - DNA, 21 bp, Artificial Sequence
  primer
agcaattggaccaagggatag

SEQ ID NO: 92102 - DNA, 40 bp, Artificial Sequence
  primer
gtaaaacgacggccagttctcttctcattcctgagacacc

SEQ ID NO: 92103 - DNA, 37 bp, Artificial Sequence
  primer
gtaaaacgacggccagtgatccactgccgtgctttac

SEQ ID NO: 92104 - DNA, 20 bp, Artificial Sequence
  primer
cagggcatgtccaccttatg

SEQ ID NO: 92105 - DNA, 38 bp, Artificial Sequence
  primer
gtaaaacgacggccagtatttcctccctgcaaccttag

SEQ ID NO: 92106 - DNA, 21 bp, Artificial Sequence
  primer
gaaccttgtgggtagagaggc

SEQ ID NO: 92107 - DNA, 19 bp, Artificial Sequence
  primer
cgcaacaagagcgaaactc

SEQ ID NO: 92108 - DNA, 38 bp, Artificial Sequence
  primer
gtaaaacgacggccagtactctcaaagaccttggcctg

SEQ ID NO: 92109 - DNA, 38 bp, Artificial Sequence
  primer
gtaaaacgacggccagtaaagacctcaacctcaagggc

SEQ ID NO: 92110 - DNA, 38 bp, Artificial Sequence
  primer
gtaaaacgacggccagttccggatagctctttccattc

SEQ ID NO: 92111 - DNA, 38 bp, Artificial Sequence
  primer
gtaaaacgacggccagtaatgtctcaagcacctgctcc

SEQ ID NO: 92112 - DNA, 21 bp, Artificial Sequence
  primer
tcagcaaagtggaaacaaagc

SEQ ID NO: 92113 - DNA, 21 bp, Artificial Sequence
  primer
ccaagggtccctcactgatac

SEQ ID NO: 92114 - DNA, 21 bp, Artificial Sequence
  primer
aatgccaggattagtgccaag

SEQ ID NO: 92115 - DNA, 21 bp, Artificial Sequence
  primer
aatctgagccttcctgctcac

SEQ ID NO: 92116 - DNA, 21 bp, Artificial Sequence
  primer
tacaggaggcagggagcttag

SEQ ID NO: 92117 - DNA, 38 bp, Artificial Sequence
  primer
gtaaaacgacggccagtctgctggaccagagaaggaag

SEQ ID NO: 92118 - DNA, 37 bp, Artificial Sequence
  primer
gtaaaacgacggccagtaggagacagtgcagggcttc

SEQ ID NO: 92119 - DNA, 21 bp, Artificial Sequence
  primer
tgcagtcagtgcctggtttac

SEQ ID NO: 92120 - DNA, 37 bp, Artificial Sequence
  primer
gtaaaacgacggccagtcgagactggcatagaggctg

SEQ ID NO: 92121 - DNA, 21 bp, Artificial Sequence
  primer
tacaggtatatgccaccgtgc

SEQ ID NO: 92122 - DNA, 21 bp, Artificial Sequence
  primer
gcatggctgttccatactcac

SEQ ID NO: 92123 - DNA, 21 bp, Artificial Sequence
  primer
tgtgcagtccaggacaaagag

SEQ ID NO: 92124 - DNA, 21 bp, Artificial Sequence
  primer
agaggtaaggctcactggcac

SEQ ID NO: 92125 - DNA, 38 bp, Artificial Sequence
  primer
gtaaaacgacggccagtactgctaccagcccacttagg

SEQ ID NO: 92126 - DNA, 21 bp, Artificial Sequence
  primer
gctgtctccagactctcctcc

SEQ ID NO: 92127 - DNA, 21 bp, Artificial Sequence
  primer
tagggtcccatacggatcaag

SEQ ID NO: 92128 - DNA, 21 bp, Artificial Sequence
  primer
gggaattgtccactcatgctc

SEQ ID NO: 92129 - DNA, 38 bp, Artificial Sequence
  primer
gtaaaacgacggccagtggacagtgtagatgtgctggg

SEQ ID NO: 92130 - DNA, 37 bp, Artificial Sequence
  primer
gtaaaacgacggccagtcccacttcaaattcagtccc

SEQ ID NO: 92131 - DNA, 38 bp, Artificial Sequence
  primer
gtaaaacgacggccagttaaagggatggagaggaggac

SEQ ID NO: 92132 - DNA, 21 bp, Artificial Sequence
  primer
gtactggtggtggagggtagc

SEQ ID NO: 92133 - DNA, 21 bp, Artificial Sequence
  primer
tgtgtgtgccacattgaacag

SEQ ID NO: 92134 - DNA, 38 bp, Artificial Sequence
  primer
gtaaaacgacggccagtaggaagacccactctgaccac

SEQ ID NO: 92135 - DNA, 18 bp, Artificial Sequence
  primer
ccctcactcatctggccc

SEQ ID NO: 92136 - DNA, 37 bp, Artificial Sequence
  primer
gtaaaacgacggccagtgggtaaccacttcctgcctc

SEQ ID NO: 92137 - DNA, 38 bp, Artificial Sequence
  primer
gtaaaacgacggccagtctgggtagagccaaatcgttc

SEQ ID NO: 92138 - DNA, 21 bp, Artificial Sequence
  primer
tttaacagctctgacccagcc

SEQ ID NO: 92139 - DNA, 21 bp, Artificial Sequence
  primer
gatgtacatgccgttctcagc

SEQ ID NO: 92140 - DNA, 38 bp, Artificial Sequence
  primer
gtaaaacgacggccagtcagagcctgaagtgtggtcag

SEQ ID NO: 92141 - DNA, 38 bp, Artificial Sequence
  primer
gtaaaacgacggccagtcgctccaactcttccttctcc

SEQ ID NO: 92142 - DNA, 36 bp, Artificial Sequence
  primer
gtaaaacgacggccagtcagctcccattgttcaccc

SEQ ID NO: 92143 - DNA, 21 bp, Artificial Sequence
  primer
caacccatttgccttaggaag

SEQ ID NO: 92144 - DNA, 44 bp, Artificial Sequence
  primer
gtaaaacgacggccagtaatcaagaagtatctcatagaagttgg

SEQ ID NO: 92145 - DNA, 38 bp, Artificial Sequence
  primer
gtaaaacgacggccagttccctcctctctgcttctcag

SEQ ID NO: 92146 - DNA, 21 bp, Artificial Sequence
  primer
gattgtgacgcatctaatcgc

SEQ ID NO: 92147 - DNA, 23 bp, Artificial Sequence
  primer
ccagatctttaccttggagttgg

SEQ ID NO: 92148 - DNA, 22 bp, Artificial Sequence
  primer
aaactgagcctctcagcacttg

SEQ ID NO: 92149 - DNA, 27 bp, Artificial Sequence
  primer
gtcatcctaagaattgaggaagtttac

SEQ ID NO: 92150 - DNA, 22 bp, Artificial Sequence
  primer
tgtatcctcctctgaatggtgg

SEQ ID NO: 92151 - DNA, 38 bp, Artificial Sequence
  primer
gtaaaacgacggccagtcctagcatggagtaagtgccc

SEQ ID NO: 92152 - DNA, 21 bp, Artificial Sequence
  primer
tgggagaaggtcaagtattgc

SEQ ID NO: 92153 - DNA, 38 bp, Artificial Sequence
  primer
gtaaaacgacggccagttatctcaacccaggaaatcgg

SEQ ID NO: 92154 - DNA, 21 bp, Artificial Sequence
  primer
ccaccgaaggaatgaagacag

SEQ ID NO: 92155 - DNA, 21 bp, Artificial Sequence
  primer
aaagtttcctggttattgcgg

SEQ ID NO: 92156 - DNA, 39 bp, Artificial Sequence
  primer
gtaaaacgacggccagtggcagtttcctcgcttctattc

SEQ ID NO: 92157 - DNA, 21 bp, Artificial Sequence
  primer
tttcaggtgcttccaggtttc

SEQ ID NO: 92158 - DNA, 39 bp, Artificial Sequence
  primer
gtaaaacgacggccagtggcatcttattcacaatctggc

SEQ ID NO: 92159 - DNA, 21 bp, Artificial Sequence
  primer
tcaagcctgtagtctgcttgg

SEQ ID NO: 92160 - DNA, 40 bp, Artificial Sequence
  primer
gtaaaacgacggccagttgtccacaataacagtgaaaccc

SEQ ID NO: 92161 - DNA, 20 bp, Artificial Sequence
  primer
gccatctacccttccctgag

SEQ ID NO: 92162 - DNA, 21 bp, Artificial Sequence
  primer
ccatggcttaatccacaaatg

SEQ ID NO: 92163 - DNA, 40 bp, Artificial Sequence
  primer
gtaaaacgacggccagtcctgagagacacaagtatccagc

SEQ ID NO: 92164 - DNA, 39 bp, Artificial Sequence
  primer
gtaaaacgacggccagtaacataactcctctcccaagcc

SEQ ID NO: 92165 - DNA, 21 bp, Artificial Sequence
  primer
gtgggtttaccctcaaacagg

SEQ ID NO: 92166 - DNA, 21 bp, Artificial Sequence
  primer
aagagcctaaggcagagggag

SEQ ID NO: 92167 - DNA, 22 bp, Artificial Sequence
  primer
aaatttccctttgctgtctgag

SEQ ID NO: 92168 - DNA, 38 bp, Artificial Sequence
  primer
gtaaaacgacggccagtcatgggcatggtagttgacag

SEQ ID NO: 92169 - DNA, 38 bp, Artificial Sequence; identical to SEQ ID NO: 92153
  primer

SEQ ID NO: 92170 - DNA, 39 bp, Artificial Sequence
  primer
gtaaaacgacggccagtcaaggagagtgagttggtttgg

SEQ ID NO: 92171 - DNA, 21 bp, Artificial Sequence
  primer
cacgacgaagacgtagagctg

SEQ ID NO: 92172 - DNA, 38 bp, Artificial Sequence
  primer
gtaaaacgacggccagtaaatacggtgtcctgcgtttc

SEQ ID NO: 92173 - DNA, 38 bp, Artificial Sequence
  primer
gtaaaacgacggccagtggttgcaaattcacagccttc

SEQ ID NO: 92174 - DNA, 26 bp, Artificial Sequence
  primer
aagtaaaggacatcttcataggcttg

SEQ ID NO: 92175 - DNA, 26 bp, Artificial Sequence
  primer
tgctttcagatatttgggattaagag

SEQ ID NO: 92176 - DNA, 38 bp, Artificial Sequence
  primer
gtaaaacgacggccagtagctgagtgtccaacaaatgg

SEQ ID NO: 92177 - DNA, 23 bp, Artificial Sequence
  primer
ttgtactacacagggattctgcc

SEQ ID NO: 92178 - DNA, 38 bp, Artificial Sequence
  primer
gtaaaacgacggccagtggtgtatactgggcttgtggg

SEQ ID NO: 92179 - DNA, 38 bp, Artificial Sequence
  primer
gtaaaacgacggccagtaaactccatgtgaaagcctgc

SEQ ID NO: 92180 - DNA, 23 bp, Artificial Sequence
  primer
tttcactaaattgtttggcttgg

SEQ ID NO: 92181 - DNA, 38 bp, Artificial Sequence
  primer
gtaaaacgacggccagtatgcaccctattcatcgagag

SEQ ID NO: 92182 - DNA, 22 bp, Artificial Sequence
  primer
ccacacgtaccatttactccag

SEQ ID NO: 92183 - DNA, 21 bp, Artificial Sequence
  primer
gggaagcaatcaactggaatc

SEQ ID NO: 92184 - DNA, 38 bp, Artificial Sequence
  primer
gtaaaacgacggccagtggtgataatcgcaaagcacat

SEQ ID NO: 92185 - DNA, 38 bp, Artificial Sequence
  primer
gtaaaacgacggccagtggctactgatgatcttgagcg

SEQ ID NO: 92186 - DNA, 21 bp, Artificial Sequence
  primer
gcttcagggagaatgaagtgc

SEQ ID NO: 92187 - DNA, 37 bp, Artificial Sequence
  primer
gtaaaacgacggccagtatggcacaggattgttcagg

SEQ ID NO: 92188 - DNA, 38 bp, Artificial Sequence
  primer
gtaaaacgacggccagtctatgggcaggccacttattc

SEQ ID NO: 92189 - DNA, 21 bp, Artificial Sequence
  primer
tgttacccatgcgaactcttg

SEQ ID NO: 92190 - DNA, 38 bp, Artificial Sequence
  primer
gtaaaacgacggccagtagggaccaccataagcgataa

SEQ ID NO: 92191 - DNA, 38 bp, Artificial Sequence
  primer
gtaaaacgacggccagtggtgcataatgaaacctttgc

SEQ ID NO: 92192 - DNA, 22 bp, Artificial Sequence
  primer
cgtttggtgctagagaacttgg

SEQ ID NO: 92193 - DNA, 27 bp, Artificial Sequence
  primer
ttggactattgctatgttattgtaagc

SEQ ID NO: 92194 - DNA, 25 bp, Artificial Sequence
  primer
gctgttgacatagtgttcctaacct

SEQ ID NO: 92195 - DNA, 24 bp, Artificial Sequence
  primer
ttgaaataaacccatgatgaactg

SEQ ID NO: 92196 - DNA, 19 bp, Artificial Sequence
  primer
cctaagggaatggcactgg

SEQ ID NO: 92197 - DNA, 38 bp, Artificial Sequence; identical to SEQ ID NO: 27737
  primer

SEQ ID NO: 92198 - DNA, 43 bp, Artificial Sequence
  primer
gtaaaacgacggccagttggaagtaaacagtagcacatcattg

SEQ ID NO: 92199 - DNA, 21 bp, Artificial Sequence
  primer
aagcagagccaaggttcattt

SEQ ID NO: 92200 - DNA, 37 bp, Artificial Sequence
  primer
gtaaaacgacggccagtaaaccagggtgtgtgcactg

SEQ ID NO: 92201 - DNA, 21 bp, Artificial Sequence
  primer
gggaagcaatcaactggaatc

SEQ ID NO: 92202 - DNA, 38 bp, Artificial Sequence; identical to SEQ ID NO: 92188
  primer

SEQ ID NO: 92203 - DNA, 21 bp, Artificial Sequence
  primer
aacttggaagacagagccagg

SEQ ID NO: 92204 - DNA, 21 bp, Artificial Sequence
  primer
tgttacccatgcgaactcttg

SEQ ID NO: 92205 - DNA, 21 bp, Artificial Sequence
  primer
gatgacaaatgccatgcagtc

SEQ ID NO: 92206 - DNA, 37 bp, Artificial Sequence
  primer
gtaaaacgacggccagtcctcctttatgtgtccaccg

SEQ ID NO: 92207 - DNA, 21 bp, Artificial Sequence
  primer
gggcaagttactctctgagcc

SEQ ID NO: 92208 - DNA, 21 bp, Artificial Sequence
  primer
ccatcacaatcgtacctcctc

SEQ ID NO: 92209 - DNA, 40 bp, Artificial Sequence
  primer
gtaaaacgacggccagttcaaagagattatcagtggctgg

SEQ ID NO: 92210 - DNA, 23 bp, Artificial Sequence
  primer
tcccagaagggtaggtacatctc

SEQ ID NO: 92211 - DNA, 21 bp, Artificial Sequence
  primer
ccatcacaatcgtacctcctc

SEQ ID NO: 92212 - DNA, 39 bp, Artificial Sequence
  primer
gtaaaacgacggccagttcaatgaacacttgctgtttgg

SEQ ID NO: 92213 - DNA, 21 bp, Artificial Sequence
  primer
ccgtttcaacaagtccaaagc

SEQ ID NO: 92214 - DNA, 21 bp, Artificial Sequence
  primer
ctcttcactccttgcaacctg

SEQ ID NO: 92215 - DNA, 39 bp, Artificial Sequence
  primer
gtaaaacgacggccagttcctagcctcaagagatcctcc

SEQ ID NO: 92216 - DNA, 20 bp, Artificial Sequence
  primer
aagaagggttggatggatgg

SEQ ID NO: 92217 - DNA, 21 bp, Artificial Sequence
  primer
tcaggaatcagtagtgccgtg

SEQ ID NO: 92218 - DNA, 20 bp, Artificial Sequence
  primer
catgatgccagtgtgtgacc

SEQ ID NO: 92219 - DNA, 43 bp, Artificial Sequence
  primer
gtaaaacgacggccagttgaagtagtccagacattaagcagtc

SEQ ID NO: 92220 - DNA, 35 bp, Artificial Sequence
  primer
gtaaaacgacggccagtggtgatccacccaccttg

SEQ ID NO: 92221 - DNA, 39 bp, Artificial Sequence
  primer
gtaaaacgacggccagtgccctacaagattagagggagg

SEQ ID NO: 92222 - DNA, 38 bp, Artificial Sequence
  primer
gtaaaacgacggccagtcatctgcatggattgatttgg

SEQ ID NO: 92223 - DNA, 38 bp, Artificial Sequence
  primer
gtaaaacgacggccagtagggataatgggatcaggagg

SEQ ID NO: 92224 - DNA, 21 bp, Artificial Sequence
  primer
tgcctttcgcagtcaataaac

SEQ ID NO: 92225 - DNA, 40 bp, Artificial Sequence
  primer
gtaaaacgacggccagtaaactgtactgaatgggtcttgc

SEQ ID NO: 92226 - DNA, 40 bp, Artificial Sequence
  primer
gtaaaacgacggccagttttgcttaccttaagctcctcag

SEQ ID NO: 92227 - DNA, 21 bp, Artificial Sequence
  primer
tccagaagcaattgaagatgc

SEQ ID NO: 92228 - DNA, 38 bp, Artificial Sequence
  primer
gtaaaacgacggccagtgccttgggagttagcaagaac

SEQ ID NO: 92229 - DNA, 22 bp, Artificial Sequence
  primer
ttctcctgcactggtagtaacc

SEQ ID NO: 92230 - DNA, 39 bp, Artificial Sequence
  primer
gtaaaacgacggccagtgccttattgaactctttcccac

SEQ ID NO: 92231 - DNA, 38 bp, Artificial Sequence
  primer
gtaaaacgacggccagttcagcacaagacaaattctgc

SEQ ID NO: 92232 - DNA, 22 bp, Artificial Sequence
  primer
cagttaccctgatttaggccag

SEQ ID NO: 92233 - DNA, 21 bp, Artificial Sequence
  primer
aagaatgagccacacatcctg

SEQ ID NO: 92234 - DNA, 21 bp, Artificial Sequence
  primer
ctcctgagggcaaacgtacac

SEQ ID NO: 92235 - DNA, 40 bp, Artificial Sequence
  primer
gtaaaacgacggccagttgcttatggcatacataactggg

SEQ ID NO: 92236 - DNA, 21 bp, Artificial Sequence
  primer
cacttccttcttccttgggtg

SEQ ID NO: 92237 - DNA, 37 bp, Artificial Sequence
  primer
gtaaaacgacggccagtgaccattaccaggcaggagg

SEQ ID NO: 92238 - DNA, 21 bp, Artificial Sequence
  primer
caattcagtgccaggtctgag

SEQ ID NO: 92239 - DNA, 38 bp, Artificial Sequence
  primer
gtaaaacgacggccagtagaatcagcaaacaagggacc

SEQ ID NO: 92240 - DNA, 21 bp, Artificial Sequence
  primer
caccaatggatctcagagacg

SEQ ID NO: 92241 - DNA, 21 bp, Artificial Sequence
  primer
ctgcgtgtgttgtgtatgtgg

SEQ ID NO: 92242 - DNA, 38 bp, Artificial Sequence
  primer
gtaaaacgacggccagtctgcactctgcagaaaccaac

SEQ ID NO: 92243 - DNA, 21 bp, Artificial Sequence
  primer
atgtctattgccttgctgtgg

SEQ ID NO: 92244 - DNA, 21 bp, Artificial Sequence
  primer
cagctgcccatcctctatctc

SEQ ID NO: 92245 - DNA, 20 bp, Artificial Sequence
  primer
ccaggagatggaagttgcag

SEQ ID NO: 92246 - DNA, 21 bp, Artificial Sequence
  primer
tgttctctcctacctctcggg

SEQ ID NO: 92247 - DNA, 21 bp, Artificial Sequence
  primer
aaggaaagccaccaataccag

SEQ ID NO: 92248 - DNA, 37 bp, Artificial Sequence
  primer
gtaaaacgacggccagtacctgtgggcactgattcac

SEQ ID NO: 92249 - DNA, 21 bp, Artificial Sequence
  primer
ttggaacttgagaaagggagc

SEQ ID NO: 92250 - DNA, 38 bp, Artificial Sequence
  primer
gtaaaacgacggccagttttaactccaagtcccttccc

SEQ ID NO: 92251 - DNA, 38 bp, Artificial Sequence
  primer
gtaaaacgacggccagtttctggagaccaatgcctacc

SEQ ID NO: 92252 - DNA, 39 bp, Artificial Sequence
  primer
gtaaaacgacggccagttgcactgcatgaaatacacaaa

SEQ ID NO: 92253 - DNA, 25 bp, Artificial Sequence
  primer
acatataactgaccagcaacatgac

SEQ ID NO: 92254 - DNA, 21 bp, Artificial Sequence
  primer
aacctgttggcttctttgtgg

SEQ ID NO: 92255 - DNA, 40 bp, Artificial Sequence
  primer
gtaaaacgacggccagtcactcttgcagaattcaccattc

SEQ ID NO: 92256 - DNA, 40 bp, Artificial Sequence
  primer
gtaaaacgacggccagtcagctgcttaagtccaacatgaa

SEQ ID NO: 92257 - DNA, 38 bp, Artificial Sequence
  primer
gtaaaacgacggccagtttgaaggacctgggacttgac

SEQ ID NO: 92258 - DNA, 23 bp, Artificial Sequence
  primer
caggtccatggattatgtaaagc

SEQ ID NO: 92259 - DNA, 23 bp, Artificial Sequence
  primer
ggcctctcacctttacctaggag

SEQ ID NO: 92260 - DNA, 21 bp, Artificial Sequence
  primer
cagagcgagactctgtgtcaa

SEQ ID NO: 92261 - DNA, 40 bp, Artificial Sequence
  primer
gtaaaacgacggccagtaaatgaaatttgtacagaggccc

SEQ ID NO: 92262 - DNA, 21 bp, Artificial Sequence
  primer
tcctgggaggatggagaatac

SEQ ID NO: 92263 - DNA, 21 bp, Artificial Sequence
  primer
catctttcccattctgatccc

SEQ ID NO: 92264 - DNA, 46 bp, Artificial Sequence
  primer
gtaaaacgacggccagtcctaaagcacttataatgatataatggga

SEQ ID NO: 92265 - DNA, 21 bp, Artificial Sequence
  primer
ttctgttgcttgctggatgtc

SEQ ID NO: 92266 - DNA, 40 bp, Artificial Sequence
  primer
gtaaaacgacggccagtaaaggctttataagggaatggaa

SEQ ID NO: 92267 - DNA, 46 bp, Artificial Sequence
  primer
gtaaaacgacggccagtttagtttggactcccttcttattatatgt

SEQ ID NO: 92268 - DNA, 42 bp, Artificial Sequence
  primer
gtaaaacgacggccagtcattatgcatatatcagccatgttc

SEQ ID NO: 92269 - DNA, 38 bp, Artificial Sequence
  primer
gtaaaacgacggccagtttacaaaggaacctggcatcc

SEQ ID NO: 92270 - DNA, 38 bp, Artificial Sequence
  primer
gtaaaacgacggccagtgggccatggataatgtagagg

SEQ ID NO: 92271 - DNA, 22 bp, Artificial Sequence
  primer
gggaccctgaaggataccatag

SEQ ID NO: 92272 - DNA, 39 bp, Artificial Sequence
  primer
gtaaaacgacggccagttgatctgaatccaaatggaaag

SEQ ID NO: 92273 - DNA, 21 bp, Artificial Sequence
  primer
tttaacatggttgttcctggg

SEQ ID NO: 92274 - DNA, 21 bp, Artificial Sequence
  primer
ttctggctacagagtcatggg

SEQ ID NO: 92275 - DNA, 37 bp, Artificial Sequence
  primer
gtaaaacgacggccagttttgcgaacagtttggtgtg

SEQ ID NO: 92276 - DNA, 20 bp, Artificial Sequence
  primer
aagggttgagttgggctgag

SEQ ID NO: 92277 - DNA, 21 bp, Artificial Sequence
  primer
cactgtttcctcctggctttc

SEQ ID NO: 92278 - DNA, 21 bp, Artificial Sequence
  primer
accttgttccctctcctcctc

SEQ ID NO: 92279 - DNA, 21 bp, Artificial Sequence
  primer
aagcacaggatgggaagactg

SEQ ID NO: 92280 - DNA, 36 bp, Artificial Sequence
  primer
gtaaaacgacggccagtttgagagcccatgctcaaa

SEQ ID NO: 92281 - DNA, 23 bp, Artificial Sequence
  primer
aagataaatgaacaaaggccctg

SEQ ID NO: 92282 - DNA, 21 bp, Artificial Sequence
  primer
ccagtctgctgtcaatcttgg

SEQ ID NO: 92283 - DNA, 41 bp, Artificial Sequence
  primer
gtaaaacgacggccagtgggctattggacttgattattgtc

SEQ ID NO: 92284 - DNA, 21 bp, Artificial Sequence
  primer
aaattgcaccttcttcactgc

SEQ ID NO: 92285 - DNA, 20 bp, Artificial Sequence
  primer
cagggaaagcaaagaacagg

SEQ ID NO: 92286 - DNA, 21 bp, Artificial Sequence
  primer
gtgcaggcaaagatctgtagg

SEQ ID NO: 92287 - DNA, 23 bp, Artificial Sequence
  primer
tttcacagcatgggtttctttag

SEQ ID NO: 92288 - DNA, 21 bp, Artificial Sequence
  primer
cactgtttcctcctggctttc

SEQ ID NO: 92289 - DNA, 21 bp, Artificial Sequence
  primer
catcctttccctctcttctgc

SEQ ID NO: 92290 - DNA, 38 bp, Artificial Sequence
  primer
gtaaaacgacggccagtagctgcttgttacgtttctgc

SEQ ID NO: 92291 - DNA, 20 bp, Artificial Sequence
  primer
cacaggcatcacacatttgg

SEQ ID NO: 92292 - DNA, 37 bp, Artificial Sequence
  primer
gtaaaacgacggccagtttgtgtatcgctatggcctg

SEQ ID NO: 92293 - DNA, 39 bp, Artificial Sequence
  primer
gtaaaacgacggccagtgtcatggcttgaaatacactgg

SEQ ID NO: 92294 - DNA, 38 bp, Artificial Sequence
  primer
gtaaaacgacggccagtaaatgcaacctcctttaagcg

SEQ ID NO: 92295 - DNA, 22 bp, Artificial Sequence
  primer
catctgacctcagtgtttctgc

SEQ ID NO: 92296 - DNA, 37 bp, Artificial Sequence
  primer
gtaaaacgacggccagttgcacatttgctttgctctg

SEQ ID NO: 92297 - DNA, 38 bp, Artificial Sequence
  primer
gtaaaacgacggccagtagtgagatcagaggctcaggc

SEQ ID NO: 92298 - DNA, 21 bp, Artificial Sequence
  primer
ctagtgaagcagttggcttgc

SEQ ID NO: 92299 - DNA, 21 bp, Artificial Sequence
  primer
tttgtgtgtgtggacagaagg

SEQ ID NO: 92300 - DNA, 37 bp, Artificial Sequence
  primer
gtaaaacgacggccagtgaaggtgtaagggaggcgag

SEQ ID NO: 92301 - DNA, 21 bp, Artificial Sequence
  primer
tgccaaagcaggttgaattac

SEQ ID NO: 92302 - DNA, 22 bp, Artificial Sequence
  primer
gcaaacagcaaaggtttagtgg

SEQ ID NO: 92303 - DNA, 21 bp, Artificial Sequence
  primer
ctcctttgacaagatgaacgc

SEQ ID NO: 92304 - DNA, 40 bp, Artificial Sequence
  primer
gtaaaacgacggccagtgaagggtcactaatttcgatcag

SEQ ID NO: 92305 - DNA, 38 bp, Artificial Sequence
  primer
gtaaaacgacggccagtccagagtaagccacatgcaac

SEQ ID NO: 92306 - DNA, 21 bp, Artificial Sequence
  primer
agtcgcttctggaaacctctg

SEQ ID NO: 92307 - DNA, 21 bp, Artificial Sequence
  primer
aagggatacacaggttcaccc

SEQ ID NO: 92308 - DNA, 20 bp, Artificial Sequence
  primer
actccgggaagtcaatggtc

SEQ ID NO: 92309 - DNA, 21 bp, Artificial Sequence
  primer
ataaagcctttcactgggcac

SEQ ID NO: 92310 - DNA, 36 bp, Artificial Sequence
  primer
gtaaaacgacggccagtccaacaagagggatctggg

SEQ ID NO: 92311 - DNA, 21 bp, Artificial Sequence
  primer
gagaaagagcaatcatgcagc

SEQ ID NO: 92312 - DNA, 37 bp, Artificial Sequence
  primer
gtaaaacgacggccagtaccagcacacggacaaactc

SEQ ID NO: 92313 - DNA, 36 bp, Artificial Sequence
  primer
gtaaaacgacggccagtcaggaggaagccacagtgc

SEQ ID NO: 92314 - DNA, 21 bp, Artificial Sequence
  primer
gtcttgggaaagaaacttggc

SEQ ID NO: 92315 - DNA, 20 bp, Artificial Sequence
  primer
tgtcttgccactgtgtttgc

SEQ ID NO: 92316 - DNA, 21 bp, Artificial Sequence
  primer
cgaactcctcgtagttcaccc

SEQ ID NO: 92317 - DNA, 36 bp, Artificial Sequence
  primer
gtaaaacgacggccagtcagtttcccatccaccgac

SEQ ID NO: 92318 - DNA, 20 bp, Artificial Sequence
  primer
gaccctcacacacgctgttc

SEQ ID NO: 92319 - DNA, 20 bp, Artificial Sequence
  primer
gaacaagggctgtgttggtg

SEQ ID NO: 92320 - DNA, 21 bp, Artificial Sequence
  primer
aagaaccctttgtctgcaagg

SEQ ID NO: 92321 - DNA, 38 bp, Artificial Sequence
  primer
gtaaaacgacggccagtctgcgttcattagcacgtacc

SEQ ID NO: 92322 - DNA, 38 bp, Artificial Sequence
  primer
gtaaaacgacggccagtacaaactctgggaacagaggg

SEQ ID NO: 92323 - DNA, 20 bp, Artificial Sequence
  primer
aatgggtggtgtcaggtgtc

SEQ ID NO: 92324 - DNA, 23 bp, Artificial Sequence
  primer
caattgagcttcacaatagccag

SEQ ID NO: 92325 - DNA, 38 bp, Artificial Sequence
  primer
gtaaaacgacggccagtcctgcataaaccgaaggtctc

SEQ ID NO: 92326 - DNA, 21 bp, Artificial Sequence
  primer
cagaagagatcttcacgtgcc

SEQ ID NO: 92327 - DNA, 21 bp, Artificial Sequence
  primer
agtacaagggaacatcagccc

SEQ ID NO: 92328 - DNA, 38 bp, Artificial Sequence
  primer
gtaaaacgacggccagtagtccataggtccgtgtctgc

SEQ ID NO: 92329 - DNA, 38 bp, Artificial Sequence
  primer
gtaaaacgacggccagttaaacggtaattacgggcgac

SEQ ID NO: 92330 - DNA, 37 bp, Artificial Sequence
  primer
gtaaaacgacggccagtacttcctccacctgtcctcc

SEQ ID NO: 92331 - DNA, 26 bp, Artificial Sequence
  primer
caataaattgttgctgggacttattc

SEQ ID NO: 92332 - DNA, 21 bp, Artificial Sequence
  primer
gaagaaggaagaaggtgagcg

SEQ ID NO: 92333 - DNA, 38 bp, Artificial Sequence
  primer
gtaaaacgacggccagttgaagagatcagagttggccc

SEQ ID NO: 92334 - DNA, 38 bp, Artificial Sequence
  primer
gtaaaacgacggccagtgaagggagaaggaaaccgaag

SEQ ID NO: 92335 - DNA, 21 bp, Artificial Sequence
  primer
taccctgtccctttcctcttg

SEQ ID NO: 92336 - DNA, 21 bp, Artificial Sequence
  primer
cttaagcctctgctcctcgtc

SEQ ID NO: 92337 - DNA, 39 bp, Artificial Sequence
  primer
gtaaaacgacggccagtctcacagagacattatttggcg

SEQ ID NO: 92338 - DNA, 21 bp, Artificial Sequence
  primer
taatttgggctaagggaaggg

SEQ ID NO: 92339 - DNA, 20 bp, Artificial Sequence
  primer
ttggctgtgccacaactacc

SEQ ID NO: 92340 - DNA, 22 bp, Artificial Sequence
  primer
acaacagactggtacagttgcc

SEQ ID NO: 92341 - DNA, 38 bp, Artificial Sequence
  primer
gtaaaacgacggccagttctacaaagacccatccctgg

SEQ ID NO: 92342 - DNA, 39 bp, Artificial Sequence
  primer
gtaaaacgacggccagtcatgcagcaattgtccagtaac

SEQ ID NO: 92343 - DNA, 21 bp, Artificial Sequence
  primer
tcttcatcttacggtggagcc

SEQ ID NO: 92344 - DNA, 20 bp, Artificial Sequence
  primer
gagctaggatggtgccactg

SEQ ID NO: 92345 - DNA, 20 bp, Artificial Sequence
  primer
gcagtgagccgagactatgc

SEQ ID NO: 92346 - DNA, 38 bp, Artificial Sequence
  primer
gtaaaacgacggccagtccacccagaagcatgaaacac

SEQ ID NO: 92347 - DNA, 23 bp, Artificial Sequence
  primer
ccatggttagctttcagaagatg

SEQ ID NO: 92348 - DNA, 38 bp, Artificial Sequence
  primer
gtaaaacgacggccagtatcccaggagattaagccgtc

SEQ ID NO: 92349 - DNA, 22 bp, Artificial Sequence
  primer
cagtgacagaccttggattctg

SEQ ID NO: 92350 - DNA, 36 bp, Artificial Sequence
  primer
gtaaaacgacggccagtgtgcccagccagcaaatac

SEQ ID NO: 92351 - DNA, 21 bp, Artificial Sequence
  primer
tcgccagattcagatacttgg

SEQ ID NO: 92352 - DNA, 21 bp, Artificial Sequence
  primer
tagcgcaaacaatttcatgtg

SEQ ID NO: 92353 - DNA, 38 bp, Artificial Sequence
  primer
gtaaaacgacggccagtctagatagtgctgccacaggg

SEQ ID NO: 92354 - DNA, 21 bp, Artificial Sequence
  primer
ttgtccaaagcaggaaaggag

SEQ ID NO: 92355 - DNA, 21 bp, Artificial Sequence
  primer
caatacggtcaaagagctccc

SEQ ID NO: 92356 - DNA, 21 bp, Artificial Sequence
  primer
atggaaatccaaggctcagtg

SEQ ID NO: 92357 - DNA, 20 bp, Artificial Sequence
  primer
gaagaggacgtggtggtgac

SEQ ID NO: 92358 - DNA, 38 bp, Artificial Sequence
  primer
gtaaaacgacggccagtaattgattggtggaaggaagg

SEQ ID NO: 92359 - DNA, 21 bp, Artificial Sequence
  primer
cgaagacagctctttgtgtgg

SEQ ID NO: 92360 - DNA, 21 bp, Artificial Sequence
  primer
ctcaccttccacttgctcttg

SEQ ID NO: 92361 - DNA, 38 bp, Artificial Sequence
  primer
gtaaaacgacggccagttactgtgtgcccagtgtgatg

SEQ ID NO: 92362 - DNA, 38 bp, Artificial Sequence
  primer
gtaaaacgacggccagtcagcagtctcgacagcaacag

SEQ ID NO: 92363 - DNA, 21 bp, Artificial Sequence
  primer
attgagggagacagcgctaag

SEQ ID NO: 92364 - DNA, 38 bp, Artificial Sequence
  primer
gtaaaacgacggccagttatagaaagcgcctggcaaac

SEQ ID NO: 92365 - DNA, 37 bp, Artificial Sequence
  primer
gtaaaacgacggccagtgagaacgggacaatgaggac

SEQ ID NO: 92366 - DNA, 21 bp, Artificial Sequence
  primer
gttggttatcgtttgcacagc

SEQ ID NO: 92367 - DNA, 38 bp, Artificial Sequence
  primer
gtaaaacgacggccagttcccacctgatccctttagac

SEQ ID NO: 92368 - DNA, 36 bp, Artificial Sequence
  primer
gtaaaacgacggccagtactggcatcagccctcttg

SEQ ID NO: 92369 - DNA, 21 bp, Artificial Sequence
  primer
agctgtgattacatgccaagc

SEQ ID NO: 92370 - DNA, 38 bp, Artificial Sequence
  primer
gtaaaacgacggccagtctgtacccttaaacatggccc

SEQ ID NO: 92371 - DNA, 20 bp, Artificial Sequence
  primer
ccaaccaagacaggaccctc

SEQ ID NO: 92372 - DNA, 21 bp, Artificial Sequence
  primer
tcataaatgacaacggccaac

SEQ ID NO: 92373 - DNA, 21 bp, Artificial Sequence
  primer
gttgaattgcacactccatcc

SEQ ID NO: 92374 - DNA, 38 bp, Artificial Sequence; identical to SEQ ID NO: 92364
  primer

SEQ ID NO: 92375 - DNA, 21 bp, Artificial Sequence
  primer
ttccagtcctatgcaggaagg

SEQ ID NO: 92376 - DNA, 38 bp, Artificial Sequence
  primer
gtaaaacgacggccagttcgaaatgaagtcacagcagc

SEQ ID NO: 92377 - DNA, 21 bp, Artificial Sequence
  primer
tttgctcatcaatttgttgcc

SEQ ID NO: 92378 - DNA, 21 bp, Artificial Sequence
  primer
catgaccagaggcacactcag

SEQ ID NO: 92379 - DNA, 21 bp, Artificial Sequence
  primer
ccattgttcactcatccaagg

SEQ ID NO: 92380 - DNA, 38 bp, Artificial Sequence
  primer
gtaaaacgacggccagtatcctgagacggatgaattgg

SEQ ID NO: 92381 - DNA, 38 bp, Artificial Sequence
  primer
gtaaaacgacggccagtttggaggaggagctgagacag

SEQ ID NO: 92382 - DNA, 38 bp, Artificial Sequence
  primer
gtaaaacgacggccagtgggtctttgaagcagacgaag

SEQ ID NO: 92383 - DNA, 21 bp, Artificial Sequence
  primer
ggatcaggacaagcagattcc

SEQ ID NO: 92384 - DNA, 21 bp, Artificial Sequence
  primer
atcccaaggaaagcccttatg

SEQ ID NO: 92385 - DNA, 38 bp, Artificial Sequence
  primer
gtaaaacgacggccagtagaggcctttgtgtccatttc

SEQ ID NO: 92386 - DNA, 21 bp, Artificial Sequence
  primer
acaccaggtttggaagagcag

SEQ ID NO: 92387 - DNA, 22 bp, Artificial Sequence
  primer
tggacactctgtacacaggcag

SEQ ID NO: 92388 - DNA, 21 bp, Artificial Sequence
  primer
cctgccataagtatcacccag

SEQ ID NO: 92389 - DNA, 21 bp, Artificial Sequence
  primer
aagctggctctgaggaatgtg

SEQ ID NO: 92390 - DNA, 37 bp, Artificial Sequence
  primer
gtaaaacgacggccagtggaattcagcccaagaggtc

SEQ ID NO: 92391 - DNA, 21 bp, Artificial Sequence
  primer
gtccagctctgcaggattagg

SEQ ID NO: 92392 - DNA, 38 bp, Artificial Sequence
  primer
gtaaaacgacggccagtgtccagctctgcaggattagg

SEQ ID NO: 92393 - DNA, 20 bp, Artificial Sequence
  primer
gacagggcctctgctctacc

SEQ ID NO: 92394 - DNA, 21 bp, Artificial Sequence
  primer
ggaccagagaaccttcaaccc

SEQ ID NO: 92395 - DNA, 38 bp, Artificial Sequence
  primer
gtaaaacgacggccagtgaactagagagtggcttggcg

SEQ ID NO: 92396 - DNA, 38 bp, Artificial Sequence
  primer
gtaaaacgacggccagttcttggattaagccctcttgg

SEQ ID NO: 92397 - DNA, 21 bp, Artificial Sequence
  primer
agagcaagggctcagtcattc

SEQ ID NO: 92398 - DNA, 38 bp, Artificial Sequence
  primer
gtaaaacgacggccagtaatatctgacaggacggtgcc

SEQ ID NO: 92399 - DNA, 19 bp, Artificial Sequence
  primer
aggacaccatcagcaaggc

SEQ ID NO: 92400 - DNA, 21 bp, Artificial Sequence
  primer
acacaaggcacacgtaccaag

SEQ ID NO: 92401 - DNA, 22 bp, Artificial Sequence
  primer
ccagtgtgcccagtttataagg

SEQ ID NO: 92402 - DNA, 21 bp, Artificial Sequence
  primer
aagtgagtggatgaggatcgg

SEQ ID NO: 92403 - DNA, 21 bp, Artificial Sequence
  primer
gggttaggagagggaaccaag

SEQ ID NO: 92404 - DNA, 19 bp, Artificial Sequence
  primer
ccactctgcagcctttcag

SEQ ID NO: 92405 - DNA, 38 bp, Artificial Sequence
  primer
gtaaaacgacggccagtgcaggtacagaagtgacggtg

SEQ ID NO: 92406 - DNA, 36 bp, Artificial Sequence
  primer
gtaaaacgacggccagtcatctgtgcatggagccac

SEQ ID NO: 92407 - DNA, 38 bp, Artificial Sequence
  primer
gtaaaacgacggccagttgatagagaaaccggaatggg

SEQ ID NO: 92408 - DNA, 38 bp, Artificial Sequence
  primer
gtaaaacgacggccagtagcagcagaagcacactcaag

SEQ ID NO: 92409 - DNA, 21 bp, Artificial Sequence
  primer
acgtgggttagaaagagcagc

SEQ ID NO: 92410 - DNA, 37 bp, Artificial Sequence
  primer
gtaaaacgacggccagtcacagtgccacacactgtcc

SEQ ID NO: 92411 - DNA, 38 bp, Artificial Sequence
  primer
gtaaaacgacggccagtgtgccagcgaaacctagagag

SEQ ID NO: 92412 - DNA, 38 bp, Artificial Sequence
  primer
gtaaaacgacggccagtaacccagatgagagcaagacg

SEQ ID NO: 92413 - DNA, 20 bp, Artificial Sequence
  primer
actcctagcctcttcccacg

SEQ ID NO: 92414 - DNA, 21 bp, Artificial Sequence
  primer
gatgtcaggaacaggaccctc

SEQ ID NO: 92415 - DNA, 20 bp, Artificial Sequence
  primer
tggcctgagttcacctgatg

SEQ ID NO: 92416 - DNA, 38 bp, Artificial Sequence
  primer
gtaaaacgacggccagtgtctcagagctgagggcagac

SEQ ID NO: 92417 - DNA, 21 bp, Artificial Sequence
  primer
ctcctcttacaggcgaggagc

SEQ ID NO: 92418 - DNA, 21 bp, Artificial Sequence
  primer
actcttaggtgggagaagccc

SEQ ID NO: 92419 - DNA, 38 bp, Artificial Sequence
  primer
gtaaaacgacggccagtacagtggcctcttctctccac

SEQ ID NO: 92420 - DNA, 21 bp, Artificial Sequence
  primer
ctgagccagtctgtcctgttg

SEQ ID NO: 92421 - DNA, 21 bp, Artificial Sequence
  primer
aggcttggagcaggattacag

SEQ ID NO: 92422 - DNA, 20 bp, Artificial Sequence
  primer
cctcctcacaaagaggtggg

SEQ ID NO: 92423 - DNA, 35 bp, Artificial Sequence
  primer
gtaaaacgacggccagtgtgcatgcaggtgggaag

SEQ ID NO: 92424 - DNA, 38 bp, Artificial Sequence
  primer
gtaaaacgacggccagtgtgcttcaaagcaattccctg

SEQ ID NO: 92425 - DNA, 21 bp, Artificial Sequence
  primer
agtgcttcaggctcaaacgag

SEQ ID NO: 92426 - DNA, 36 bp, Artificial Sequence
  primer
gtaaaacgacggccagtggacagggcttccataggc

SEQ ID NO: 92427 - DNA, 20 bp, Artificial Sequence
  primer
caggaaagctcagggacttc

SEQ ID NO: 92428 - DNA, 21 bp, Artificial Sequence
  primer
actcttaggtgggagaagccc

SEQ ID NO: 92429 - DNA, 35 bp, Artificial Sequence
  primer
gtaaaacgacggccagtcataggcagccaccatgc

SEQ ID NO: 92430 - DNA, 38 bp, Artificial Sequence
  primer
gtaaaacgacggccagtgagccacagttggagtaaggg

SEQ ID NO: 92431 - DNA, 21 bp, Artificial Sequence
  primer
acagaccaagaagcattcagg

SEQ ID NO: 92432 - DNA, 41 bp, Artificial Sequence
  primer
gtaaaacgacggccagtaaccaagattgaaagttaggaacc

SEQ ID NO: 92433 - DNA, 21 bp, Artificial Sequence
  primer
atcacaacggacaatgcaaag

SEQ ID NO: 92434 - DNA, 40 bp, Artificial Sequence
  primer
gtaaaacgacggccagttttctctaagaatcatcccggag

SEQ ID NO: 92435 - DNA, 21 bp, Artificial Sequence
  primer
tttaaatacccaccctctgcc

SEQ ID NO: 92436 - DNA, 38 bp, Artificial Sequence
  primer
gtaaaacgacggccagtggaagtgggattaggagccag

SEQ ID NO: 92437 - DNA, 19 bp, Artificial Sequence
  primer
agccgggattgtaccactg

SEQ ID NO: 92438 - DNA, 25 bp, Artificial Sequence
  primer
aaacgtaaactggatacaaatgctg

SEQ ID NO: 92439 - DNA, 25 bp, Artificial Sequence
  primer
ctatgcaattcagactttgctactg

SEQ ID NO: 92440 - DNA, 21 bp, Artificial Sequence
  primer
catgtgttgccaggatgattc

SEQ ID NO: 92441 - DNA, 21 bp, Artificial Sequence
  primer
ggcagccataggtgtagaagg

SEQ ID NO: 92442 - DNA, 22 bp, Artificial Sequence
  primer
ttcaacctgcaacctttatcag

SEQ ID NO: 92443 - DNA, 24 bp, Artificial Sequence
  primer
ttgtcattactgcaatgtgctaga

SEQ ID NO: 92444 - DNA, 20 bp, Artificial Sequence
  primer
caagcagtcttcccaccttg

SEQ ID NO: 92445 - DNA, 21 bp, Artificial Sequence
  primer
gtttcaaatgctggatgaagg

SEQ ID NO: 92446 - DNA, 23 bp, Artificial Sequence
  primer
cagagaatcataaacctttcccg

SEQ ID NO: 92447 - DNA, 22 bp, Artificial Sequence
  primer
tgctaccaaatagggctgaatg

SEQ ID NO: 92448 - DNA, 23 bp, Artificial Sequence
  primer
cagagaatcataaacctttcccg

SEQ ID NO: 92449 - DNA, 38 bp, Artificial Sequence
  primer
gtaaaacgacggccagtttccaactcctctccaagtgc

SEQ ID NO: 92450 - DNA, 38 bp, Artificial Sequence
  primer
gtaaaacgacggccagtcagacagaggtgatcccacac

SEQ ID NO: 92451 - DNA, 38 bp, Artificial Sequence
  primer
gtaaaacgacggccagtgtcaaatcctttccctcggac

SEQ ID NO: 92452 - DNA, 21 bp, Artificial Sequence
  primer
aacaggtacaatgctggaccc

SEQ ID NO: 92453 - DNA, 38 bp, Artificial Sequence
  primer
gtaaaacgacggccagtggaagcctagtttgggcctac

SEQ ID NO: 92454 - DNA, 20 bp, Artificial Sequence
  primer
caggaactccagctccttcc

SEQ ID NO: 92455 - DNA, 38 bp, Artificial Sequence
  primer
gtaaaacgacggccagtatttcacatacaccaggcacg

SEQ ID NO: 92456 - DNA, 38 bp, Artificial Sequence
  primer
gtaaaacgacggccagtacactaaacaagcctgctccc

SEQ ID NO: 92457 - DNA, 21 bp, Artificial Sequence
  primer
ctctgctggtaagaaggaggg

SEQ ID NO: 92458 - DNA, 21 bp, Artificial Sequence
  primer
ggagcttccttctgaaatggg

SEQ ID NO: 92459 - DNA, 21 bp, Artificial Sequence
  primer
atagcaagttgggcaggctac

SEQ ID NO: 92460 - DNA, 21 bp, Artificial Sequence
  primer
ctccctacttccctctcaggc

SEQ ID NO: 92461 - DNA, 38 bp, Artificial Sequence
  primer
gtaaaacgacggccagttgtctgactgcaaagcctgag

SEQ ID NO: 92462 - DNA, 38 bp, Artificial Sequence
  primer
gtaaaacgacggccagttcttggctcgtggaaagtagc

SEQ ID NO: 92463 - DNA, 21 bp, Artificial Sequence
  primer
aattgttgtctggaagcaggg

SEQ ID NO: 92464 - DNA, 38 bp, Artificial Sequence
  primer
gtaaaacgacggccagtcagaatgaatggcacttggag

SEQ ID NO: 92465 - DNA, 20 bp, Artificial Sequence
  primer
tcccagccttctcttcttcc

SEQ ID NO: 92466 - DNA, 38 bp, Artificial Sequence
  primer
gtaaaacgacggccagtgcttgcagatgccaagttagg

SEQ ID NO: 92467 - DNA, 38 bp, Artificial Sequence
  primer
gtaaaacgacggccagtcacagacatgcagtgaggatg

SEQ ID NO: 92468 - DNA, 20 bp, Artificial Sequence
  primer
ggcacaagaggaggaagagg

SEQ ID NO: 92469 - DNA, 21 bp, Artificial Sequence
  primer
tcccagagcttactaccacgg

SEQ ID NO: 92470 - DNA, 21 bp, Artificial Sequence
  primer
cgcacctgaatgaaggttagc

SEQ ID NO: 92471 - DNA, 22 bp, Artificial Sequence
  primer
ttatttgcacacagcagctctc

SEQ ID NO: 92472 - DNA, 40 bp, Artificial Sequence
  primer
gtaaaacgacggccagtactgacagtgaaggacaaaggtc

SEQ ID NO: 92473 - DNA, 38 bp, Artificial Sequence
  primer
gtaaaacgacggccagtacccaccttccttcaacattc

SEQ ID NO: 92474 - DNA, 20 bp, Artificial Sequence
  primer
atgcccaccttattccacac

SEQ ID NO: 92475 - DNA, 24 bp, Artificial Sequence
  primer
gcccagcaacagaatactaacttc

SEQ ID NO: 92476 - DNA, 39 bp, Artificial Sequence
  primer
gtaaaacgacggccagttgccttcctcatagagatttgc

SEQ ID NO: 92477 - DNA, 39 bp, Artificial Sequence
  primer
gtaaaacgacggccagtggacaagaattccggtctcaag

SEQ ID NO: 92478 - DNA, 20 bp, Artificial Sequence
  primer
cacccagcacagctttcttc

SEQ ID NO: 92479 - DNA, 23 bp, Artificial Sequence
  primer
ttccctggtgccttaagaaatag

SEQ ID NO: 92480 - DNA, 39 bp, Artificial Sequence
  primer
gtaaaacgacggccagtcagtcttcagcttctcctctgc

SEQ ID NO: 92481 - DNA, 38 bp, Artificial Sequence
  primer
gtaaaacgacggccagttccacacctttcttgctgaag

SEQ ID NO: 92482 - DNA, 18 bp, Artificial Sequence
  primer
gtgttcccgggagaaggg

SEQ ID NO: 92483 - DNA, 18 bp, Artificial Sequence
  primer
acagctccggagtgcctg

SEQ ID NO: 92484 - DNA, 35 bp, Artificial Sequence
  primer
gtaaaacgacggccagtagacctccgcaacccttg

SEQ ID NO: 92485 - DNA, 38 bp, Artificial Sequence
  primer
gtaaaacgacggccagtatttcatcgtgggtagcaagc

SEQ ID NO: 92486 - DNA, 38 bp, Artificial Sequence
  primer
gtaaaacgacggccagtaaagctagatagccgtgtggc

SEQ ID NO: 92487 - DNA, 21 bp, Artificial Sequence
  primer
gaatcaggagccatcttccac

SEQ ID NO: 92488 - DNA, 38 bp, Artificial Sequence
  primer
gtaaaacgacggccagtaggaatccagtctctgcttgc

SEQ ID NO: 92489 - DNA, 21 bp, Artificial Sequence
  primer
cccaaaccagtctcaagcaag

SEQ ID NO: 92490 - DNA, 21 bp, Artificial Sequence
  primer
gaacttgggaacatccctgac

SEQ ID NO: 92491 - DNA, 20 bp, Artificial Sequence
  primer
ggaatccagggcttcagaac

SEQ ID NO: 92492 - DNA, 22 bp, Artificial Sequence
  primer
ggtctccctgactatttcagcc

SEQ ID NO: 92493 - DNA, 21 bp, Artificial Sequence
  primer
cactcccactgaagctgattg

SEQ ID NO: 92494 - DNA, 21 bp, Artificial Sequence
  primer
tcaggttagaaactgggccac

SEQ ID NO: 92495 - DNA, 21 bp, Artificial Sequence
  primer
tctctcagccttctctgagcc

SEQ ID NO: 92496 - DNA, 38 bp, Artificial Sequence
  primer
gtaaaacgacggccagtaccttcatatctgcaggctgg

SEQ ID NO: 92497 - DNA, 38 bp, Artificial Sequence
  primer
gtaaaacgacggccagtggtgttgatccctccagaaag

SEQ ID NO: 92498 - DNA, 21 bp, Artificial Sequence
  primer
gaccacaagacctccctctcc

SEQ ID NO: 92499 - DNA, 21 bp, Artificial Sequence
  primer
caacgacagtgagagtgggag

SEQ ID NO: 92500 - DNA, 38 bp, Artificial Sequence
  primer
gtaaaacgacggccagttacattccagtctgtccctgg

SEQ ID NO: 92501 - DNA, 21 bp, Artificial Sequence
  primer
cctgaaccagacacaaggaac

SEQ ID NO: 92502 - DNA, 21 bp, Artificial Sequence
  primer
caacgacagtgagagtgggag

SEQ ID NO: 92503 - DNA, 37 bp, Artificial Sequence
  primer
gtaaaacgacggccagtcctaggacctggctcaccac

SEQ ID NO: 92504 - DNA, 36 bp, Artificial Sequence
  primer
gtaaaacgacggccagtagcccaaccttccacagag

SEQ ID NO: 92505 - DNA, 39 bp, Artificial Sequence
  primer
gtaaaacgacggccagtgaatttcgttggaagctttctg

SEQ ID NO: 92506 - DNA, 21 bp, Artificial Sequence
  primer
aatgggcataccacttccttc

SEQ ID NO: 92507 - DNA, 20 bp, Artificial Sequence
  primer
aactacaggcatgtggcacc

SEQ ID NO: 92508 - DNA, 21 bp, Artificial Sequence
  primer
gtctggtgtgacctggctctc

SEQ ID NO: 92509 - DNA, 38 bp, Artificial Sequence
  primer
gtaaaacgacggccagtgaaagggaaagctgtctttgg

SEQ ID NO: 92510 - DNA, 21 bp, Artificial Sequence
  primer
atgcctttgatcagatcctgg

SEQ ID NO: 92511 - DNA, 39 bp, Artificial Sequence
  primer
gtaaaacgacggccagtaagacactttccactttgcacc

SEQ ID NO: 92512 - DNA, 21 bp, Artificial Sequence
  primer
cgttgggtttctgctgcttac

SEQ ID NO: 92513 - DNA, 21 bp, Artificial Sequence
  primer
actcctaacctctgcctcagc

SEQ ID NO: 92514 - DNA, 21 bp, Artificial Sequence
  primer
atacgggtgatcaggtccttc

SEQ ID NO: 92515 - DNA, 37 bp, Artificial Sequence
  primer
gtaaaacgacggccagtcttcctacccagccctcaac

SEQ ID NO: 92516 - DNA, 38 bp, Artificial Sequence
  primer
gtaaaacgacggccagtatacatgaccaaggcccagag

SEQ ID NO: 92517 - DNA, 37 bp, Artificial Sequence
  primer
gtaaaacgacggccagtacctgtgcagagtggtctgg

SEQ ID NO: 92518 - DNA, 20 bp, Artificial Sequence
  primer
tcagacctgggtgcattctc

SEQ ID NO: 92519 - DNA, 21 bp, Artificial Sequence
  primer
tctacacacgtgctgggtttc

SEQ ID NO: 92520 - DNA, 21 bp, Artificial Sequence
  primer
tctacacacgtgctgggtttc

SEQ ID NO: 92521 - DNA, 38 bp, Artificial Sequence
  primer
gtaaaacgacggccagtgaacttcttgcaggtgtgcag

SEQ ID NO: 92522 - DNA, 21 bp, Artificial Sequence
  primer
agactaattggccagaggctg

SEQ ID NO: 92523 - DNA, 21 bp, Artificial Sequence
  primer
tttccttagctgcagagggtg

SEQ ID NO: 92524 - DNA, 21 bp, Artificial Sequence
  primer
aagacaccatgaggaccttgg

SEQ ID NO: 92525 - DNA, 21 bp, Artificial Sequence
  primer
aggtccagtaccatccacacc

SEQ ID NO: 92526 - DNA, 22 bp, Artificial Sequence
  primer
aaactcatagtcaccagccagg

SEQ ID NO: 92527 - DNA, 39 bp, Artificial Sequence
  primer
gtaaaacgacggccagtcacagaggaagatgagagcagg

SEQ ID NO: 92528 - DNA, 20 bp, Artificial Sequence
  primer
tctatgtggcatccagggac

SEQ ID NO: 92529 - DNA, 21 bp, Artificial Sequence
  primer
tgaccaaaccaaactccttcc

SEQ ID NO: 92530 - DNA, 20 bp, Artificial Sequence
  primer
ctccctttgagactcctggg

SEQ ID NO: 92531 - DNA, 38 bp, Artificial Sequence
  primer
gtaaaacgacggccagtggtgggagagggaagaatgac

SEQ ID NO: 92532 - DNA, 21 bp, Artificial Sequence
  primer
tcattgcttcttcgaatctgg

SEQ ID NO: 92533 - DNA, 21 bp, Artificial Sequence
  primer
actgatatggagggccaacag

SEQ ID NO: 92534 - DNA, 21 bp, Artificial Sequence
  primer
gcactgattcagaccgtaagc

SEQ ID NO: 92535 - DNA, 22 bp, Artificial Sequence
  primer
ttgcctcctttagagacactgc

SEQ ID NO: 92536 - DNA, 20 bp, Artificial Sequence
  primer
cagtgcagcaggagcagaag

SEQ ID NO: 92537 - DNA, 21 bp, Artificial Sequence
  primer
gaaaccatttgccatgacctc

SEQ ID NO: 92538 - DNA, 21 bp, Artificial Sequence
  primer
gagatggaactcaggtttggg

SEQ ID NO: 92539 - DNA, 21 bp, Artificial Sequence
  primer
gagctaagggctcagttgtgg

SEQ ID NO: 92540 - DNA, 38 bp, Artificial Sequence
  primer
gtaaaacgacggccagttctggcttgacattctcgaac

SEQ ID NO: 92541 - DNA, 39 bp, Artificial Sequence
  primer
gtaaaacgacggccagtagaactctgctgtgcgagaaac

SEQ ID NO: 92542 - DNA, 20 bp, Artificial Sequence
  primer
cagaagggcagggacagaag

SEQ ID NO: 92543 - DNA, 20 bp, Artificial Sequence
  primer
cagcacttcagcctggtgac

SEQ ID NO: 92544 - DNA, 21 bp, Artificial Sequence
  primer
attctgatttcaggcactccc

SEQ ID NO: 92545 - DNA, 21 bp, Artificial Sequence
  primer
gggaaccacgtctgctctaac

SEQ ID NO: 92546 - DNA, 21 bp, Artificial Sequence
  primer
actgacagtggtcctgtctcg

SEQ ID NO: 92547 - DNA, 21 bp, Artificial Sequence
  primer
ttcatgtcctcctgcagtttg

SEQ ID NO: 92548 - DNA, 21 bp, Artificial Sequence
  primer
gtgctggacttggtctcacag

SEQ ID NO: 92549 - DNA, 21 bp, Artificial Sequence
  primer
cctccatcttcttcttctggg

SEQ ID NO: 92550 - DNA, 38 bp, Artificial Sequence
  primer
gtaaaacgacggccagtaggtcacattcattcacgtcg

SEQ ID NO: 92551 - DNA, 21 bp, Artificial Sequence
  primer
gactggtgccttcactttgtg

SEQ ID NO: 92552 - DNA, 21 bp, Artificial Sequence
  primer
ggcatctttggaagaggacag

SEQ ID NO: 92553 - DNA, 38 bp, Artificial Sequence
  primer
gtaaaacgacggccagtagaggtccacttcaatgaggc

SEQ ID NO: 92554 - DNA, 39 bp, Artificial Sequence
  primer
gtaaaacgacggccagttgaaacagatgctaccaatccc

SEQ ID NO: 92555 - DNA, 38 bp, Artificial Sequence
  primer
gtaaaacgacggccagtgtggcccacaaagctaaacac

SEQ ID NO: 92556 - DNA, 21 bp, Artificial Sequence
  primer
aggagtaagaccgtcacaggc

SEQ ID NO: 92557 - DNA, 39 bp, Artificial Sequence
  primer
gtaaaacgacggccagtggataatcatctccacccttcc

SEQ ID NO: 92558 - DNA, 38 bp, Artificial Sequence
  primer
gtaaaacgacggccagttaatcaggaagtcccaccctg

SEQ ID NO: 92559 - DNA, 21 bp, Artificial Sequence
  primer
taaaccacatgcccatttcag

SEQ ID NO: 92560 - DNA, 38 bp, Artificial Sequence
  primer
gtaaaacgacggccagtccttgaaatctgcattctccc

SEQ ID NO: 92561 - DNA, 39 bp, Artificial Sequence
  primer
gtaaaacgacggccagttgcacacttcgtacccaaatag

SEQ ID NO: 92562 - DNA, 35 bp, Artificial Sequence
  primer
gtaaaacgacggccagtgtcacctcaggactcggc

SEQ ID NO: 92563 - DNA, 20 bp, Artificial Sequence
  primer
gctgaaggctgtttccactg

SEQ ID NO: 92564 - DNA, 23 bp, Artificial Sequence
  primer
tgttggttggtttctgtcaaatc

SEQ ID NO: 92565 - DNA, 21 bp, Artificial Sequence
  primer
acctcagtgtcgaaagccatc

SEQ ID NO: 92566 - DNA, 23 bp, Artificial Sequence
  primer
ttactccaagcaattccattctc

SEQ ID NO: 92567 - DNA, 38 bp, Artificial Sequence
  primer
gtaaaacgacggccagtcatcagtgggtgacagctacc

SEQ ID NO: 92568 - DNA, 36 bp, Artificial Sequence
  primer
gtaaaacgacggccagtcacagaggaccttcctggc

SEQ ID NO: 92569 - DNA, 38 bp, Artificial Sequence
  primer
gtaaaacgacggccagtctactcccacagaggacagcc

SEQ ID NO: 92570 - DNA, 20 bp, Artificial Sequence
  primer
accttgccgttcctcttctc

SEQ ID NO: 92571 - DNA, 20 bp, Artificial Sequence
  primer
ctctgacatgaacaccgtgg

SEQ ID NO: 92572 - DNA, 19 bp, Artificial Sequence
  primer
tgtggccatcagagctcac

SEQ ID NO: 92573 - DNA, 21 bp, Artificial Sequence
  primer
gtgtcctcggtcttgatctcc

SEQ ID NO: 92574 - DNA, 37 bp, Artificial Sequence
  primer
gtaaaacgacggccagtagtcactcaggctgctgtgg

SEQ ID NO: 92575 - DNA, 38 bp, Artificial Sequence
  primer
gtaaaacgacggccagtggtagtgctcagagctgcaag

SEQ ID NO: 92576 - DNA, 21 bp, Artificial Sequence
  primer
atcaggtcggagaactggttg

SEQ ID NO: 92577 - DNA, 19 bp, Artificial Sequence
  primer
gtgcatgtaggccatggtg

SEQ ID NO: 92578 - DNA, 38 bp, Artificial Sequence
  primer
gtaaaacgacggccagttctttgtggtccagagcttcc

SEQ ID NO: 92579 - DNA, 38 bp, Artificial Sequence
  primer
gtaaaacgacggccagtaaggacatgacctgctcaagg

SEQ ID NO: 92580 - DNA, 38 bp, Artificial Sequence
  primer
gtaaaacgacggccagttcacaccttgtgcaagagtcc

SEQ ID NO: 92581 - DNA, 21 bp, Artificial Sequence
  primer
ccgtaaagtactccctcaggc

SEQ ID NO: 92582 - DNA, 38 bp, Artificial Sequence
  primer
gtaaaacgacggccagtatgggtagatttcttccacgg

SEQ ID NO: 92583 - DNA, 20 bp, Artificial Sequence
  primer
ccattgaagattcccatccc

SEQ ID NO: 92584 - DNA, 27 bp, Artificial Sequence
  primer
tgaaatgtatgtgactatcctatggac

SEQ ID NO: 92585 - DNA, 21 bp, Artificial Sequence
  primer
cccagctctgtattcaccacc

SEQ ID NO: 92586 - DNA, 21 bp, Artificial Sequence
  primer
acacaaccttcggaaatggac

SEQ ID NO: 92587 - DNA, 39 bp, Artificial Sequence
  primer
gtaaaacgacggccagtggtcttctatgacacggcattc

SEQ ID NO: 92588 - DNA, 22 bp, Artificial Sequence
  primer
tgttcgcatgattctgactttc

SEQ ID NO: 92589 - DNA, 18 bp, Artificial Sequence
  primer
gtgagcccagatcatgcc

SEQ ID NO: 92590 - DNA, 37 bp, Artificial Sequence
  primer
gtaaaacgacggccagtcaatgtcagcccaggacaag

SEQ ID NO: 92591 - DNA, 21 bp, Artificial Sequence
  primer
acgtctgccctgattatctgc

SEQ ID NO: 92592 - DNA, 36 bp, Artificial Sequence
  primer
gtaaaacgacggccagtgaacggccctcccttctac

SEQ ID NO: 92593 - DNA, 20 bp, Artificial Sequence
  primer
aatcctgcagctgatctccc

SEQ ID NO: 92594 - DNA, 38 bp, Artificial Sequence
  primer
gtaaaacgacggccagtgggtttagtgtgctaccctgg

SEQ ID NO: 92595 - DNA, 21 bp, Artificial Sequence
  primer
gaatggtgctctgcacttagg

SEQ ID NO: 92596 - DNA, 38 bp, Artificial Sequence
  primer
gtaaaacgacggccagttgcgattgtagaggatgatgg

SEQ ID NO: 92597 - DNA, 21 bp, Artificial Sequence
  primer
cctacggcctggatagttgag

SEQ ID NO: 92598 - DNA, 38 bp, Artificial Sequence
  primer
gtaaaacgacggccagtcttccttctttcagacccgtg

SEQ ID NO: 92599 - DNA, 38 bp, Artificial Sequence
  primer
gtaaaacgacggccagtaatacctgagaacacaccggg

SEQ ID NO: 92600 - DNA, 20 bp, Artificial Sequence
  primer
agcatgcaaatcccatcaag

SEQ ID NO: 92601 - DNA, 21 bp, Artificial Sequence
  primer
aagtctgggcttactccctgc

SEQ ID NO: 92602 - DNA, 38 bp, Artificial Sequence
  primer
gtaaaacgacggccagtccaacaggtcctccaaacaag

SEQ ID NO: 92603 - DNA, 38 bp, Artificial Sequence
  primer
gtaaaacgacggccagtaactaggtcacagaccacggg

SEQ ID NO: 92604 - DNA, 21 bp, Artificial Sequence
  primer
aaacaacccatttgttcccag

SEQ ID NO: 92605 - DNA, 21 bp, Artificial Sequence
  primer
gtaagggaagtttgctgccac

SEQ ID NO: 92606 - DNA, 20 bp, Artificial Sequence
  primer
agagggaggagagtcatggg

SEQ ID NO: 92607 - DNA, 38 bp, Artificial Sequence
  primer
gtaaaacgacggccagtcaggtcctccaattcctcttc

SEQ ID NO: 92608 - DNA, 38 bp, Artificial Sequence
  primer
gtaaaacgacggccagtgggctcttcctccaggtagtc

SEQ ID NO: 92609 - DNA, 21 bp, Artificial Sequence
  primer
cctgcctctgtggtttgtctc

SEQ ID NO: 92610 - DNA, 36 bp, Artificial Sequence
  primer
gtaaaacgacggccagtctgcttcatggaagtcggc

SEQ ID NO: 92611 - DNA, 38 bp, Artificial Sequence
  primer
gtaaaacgacggccagtagccagttcagttcgcttctc

SEQ ID NO: 92612 - DNA, 38 bp, Artificial Sequence
  primer
gtaaaacgacggccagtaaggcctgtctgcacgactac

SEQ ID NO: 92613 - DNA, 38 bp, Artificial Sequence
  primer
gtaaaacgacggccagtacattctggaatggttaggcg

SEQ ID NO: 92614 - DNA, 21 bp, Artificial Sequence
  primer
gaaatagagggacggagaccc

SEQ ID NO: 92615 - DNA, 20 bp, Artificial Sequence
  primer
tggacctcacagaaggcatc

SEQ ID NO: 92616 - DNA, 38 bp, Artificial Sequence
  primer
gtaaaacgacggccagttccctgttaagactgcacgag

SEQ ID NO: 92617 - DNA, 38 bp, Artificial Sequence
  primer
gtaaaacgacggccagtaaaggtgaacaggaaagctgc

SEQ ID NO: 92618 - DNA, 38 bp, Artificial Sequence
  primer
gtaaaacgacggccagttctccaagatcctcatatggc

SEQ ID NO: 92619 - DNA, 39 bp, Artificial Sequence
  primer
gtaaaacgacggccagtcacattggcgtaatatgtgtcc

SEQ ID NO: 92620 - DNA, 23 bp, Artificial Sequence
  primer
tcaaattcacctatgtcagaccg

SEQ ID NO: 92621 - DNA, 21 bp, Artificial Sequence
  primer
taatcctgggaattgtctggc

SEQ ID NO: 92622 - DNA, 38 bp, Artificial Sequence
  primer
gtaaaacgacggccagtcattgcatgaacccaactgac

SEQ ID NO: 92623 - DNA, 21 bp, Artificial Sequence
  primer
ggttgaggagaaatctgtcgc

SEQ ID NO: 92624 - DNA, 39 bp, Artificial Sequence
  primer
gtaaaacgacggccagtcatgcacattaaatcctcgttg

SEQ ID NO: 92625 - DNA, 39 bp, Artificial Sequence
  primer
gtaaaacgacggccagttccgtaggttgtgtgtttaccc

SEQ ID NO: 92626 - DNA, 37 bp, Artificial Sequence
  primer
gtaaaacgacggccagtgatagctccatgcctctccc

SEQ ID NO: 92627 - DNA, 21 bp, Artificial Sequence
  primer
ttaccatgtgcctgtgtttgc

SEQ ID NO: 92628 - DNA, 20 bp, Artificial Sequence
  primer
gaggcaaatgcaggaggaag

SEQ ID NO: 92629 - DNA, 21 bp, Artificial Sequence
  primer
ctcgatgccttcgtatttcac

SEQ ID NO: 92630 - DNA, 37 bp, Artificial Sequence
  primer
gtaaaacgacggccagtaaatcaccaccagatggcag

SEQ ID NO: 92631 - DNA, 38 bp, Artificial Sequence
  primer
gtaaaacgacggccagtagactacatttccctgcaccc

SEQ ID NO: 92632 - DNA, 18 bp, Artificial Sequence
  primer
cattgcactccagcccag

SEQ ID NO: 92633 - DNA, 39 bp, Artificial Sequence
  primer
gtaaaacgacggccagttcttaggaaatgccatggagac

SEQ ID NO: 92634 - DNA, 38 bp, Artificial Sequence
  primer
gtaaaacgacggccagttgctgggagctaggattacag

SEQ ID NO: 92635 - DNA, 21 bp, Artificial Sequence
  primer
cccggccagatatacaatctt

SEQ ID NO: 92636 - DNA, 23 bp, Artificial Sequence
  primer
gagcttactcaaccaacatttcg

SEQ ID NO: 92637 - DNA, 18 bp, Artificial Sequence
  primer
gcagtgagccgaaactgc

SEQ ID NO: 92638 - DNA, 21 bp, Artificial Sequence
  primer
tataatgaccaacctggcagc

SEQ ID NO: 92639 - DNA, 39 bp, Artificial Sequence
  primer
gtaaaacgacggccagtgccaatattgccaaatgaagaa

SEQ ID NO: 92640 - DNA, 21 bp, Artificial Sequence
  primer
gaagtcaacaccaaacatggc

SEQ ID NO: 92641 - DNA, 38 bp, Artificial Sequence
  primer
gtaaaacgacggccagttacagccttaaactcctgggc

SEQ ID NO: 92642 - DNA, 41 bp, Artificial Sequence
  primer
gtaaaacgacggccagttgccataagccactgtaaactacc

SEQ ID NO: 92643 - DNA, 38 bp, Artificial Sequence
  primer
gtaaaacgacggccagtcaacctaaggtgtgccaggtc

SEQ ID NO: 92644 - DNA, 37 bp, Artificial Sequence
  primer
gtaaaacgacggccagtggaagttagcgccaaaggag

SEQ ID NO: 92645 - DNA, 38 bp, Artificial Sequence
  primer
gtaaaacgacggccagtgatgaggaccttggctgactg

SEQ ID NO: 92646 - DNA, 21 bp, Artificial Sequence
  primer
tggctctacctctgggacttg

SEQ ID NO: 92647 - DNA, 22 bp, Artificial Sequence
  primer
aagctgtcagtgactcaggacc

SEQ ID NO: 92648 - DNA, 21 bp, Artificial Sequence
  primer
attgtttgagctgggaggttg

SEQ ID NO: 92649 - DNA, 21 bp, Artificial Sequence
  primer
gcattccctcacagactttgg

SEQ ID NO: 92650 - DNA, 38 bp, Artificial Sequence
  primer
gtaaaacgacggccagttttacagacggttctggttgg

SEQ ID NO: 92651 - DNA, 22 bp, Artificial Sequence
  primer
gctccatttaacctcctgttcc

SEQ ID NO: 92652 - DNA, 38 bp, Artificial Sequence
  primer
gtaaaacgacggccagtgaaagggagtgtgtcaacgtg

SEQ ID NO: 92653 - DNA, 38 bp, Artificial Sequence
  primer
gtaaaacgacggccagtaacttgcttgaagagccaacc

SEQ ID NO: 92654 - DNA, 21 bp, Artificial Sequence
  primer
cagaaagcacctacctttggg

SEQ ID NO: 92655 - DNA, 21 bp, Artificial Sequence
  primer
aggcaggtagctgtgcttctc

SEQ ID NO: 92656 - DNA, 21 bp, Artificial Sequence
  primer
atggaaggagtagggaagctg

SEQ ID NO: 92657 - DNA, 21 bp, Artificial Sequence
  primer
ggctgttagcgttgtcagagg

SEQ ID NO: 92658 - DNA, 38 bp, Artificial Sequence
  primer
gtaaaacgacggccagtaatgcttctgttgcctccttg

SEQ ID NO: 92659 - DNA, 21 bp, Artificial Sequence
  primer
gtgcaaggagcgtgaaggtag

SEQ ID NO: 92660 - DNA, 40 bp, Artificial Sequence
  primer
gtaaaacgacggccagtgtgtagagccttggaaaggaatc

SEQ ID NO: 92661 - DNA, 21 bp, Artificial Sequence
  primer
ggtgtgagattactgggccac

SEQ ID NO: 92662 - DNA, 21 bp, Artificial Sequence
  primer
tggacataaggaacatggcag

SEQ ID NO: 92663 - DNA, 38 bp, Artificial Sequence
  primer
gtaaaacgacggccagttggtaaatggtttggctgttg

SEQ ID NO: 92664 - DNA, 21 bp, Artificial Sequence
  primer
accacattgtcaaacaccagg

SEQ ID NO: 92665 - DNA, 38 bp, Artificial Sequence
  primer
gtaaaacgacggccagtcaaataaagctcgcaggttgg

SEQ ID NO: 92666 - DNA, 21 bp, Artificial Sequence
  primer
gccaaagctaaagcagtaggg

SEQ ID NO: 92667 - DNA, 26 bp, Artificial Sequence
  primer
tttaacatgaagcaccaggtatattt

SEQ ID NO: 92668 - DNA, 29 bp, Artificial Sequence
  primer
ccatttaatagttgtcatttatgttcatt

SEQ ID NO: 92669 - DNA, 21 bp, Artificial Sequence
  primer
gcagcacagagagacttcgtc

SEQ ID NO: 92670 - DNA, 41 bp, Artificial Sequence
  primer
gtaaaacgacggccagtatttcacaaccagagtgctataaa

SEQ ID NO: 92671 - DNA, 20 bp, Artificial Sequence
  primer
caatgcatcaattgctggtc

SEQ ID NO: 92672 - DNA, 21 bp, Artificial Sequence
  primer
tatatgctggagcaggtggtg

SEQ ID NO: 92673 - DNA, 37 bp, Artificial Sequence
  primer
gtaaaacgacggccagtaggatggtcttgatctcccg

SEQ ID NO: 92674 - DNA, 38 bp, Artificial Sequence
  primer
gtaaaacgacggccagtatgccatgcagttagagaagg

SEQ ID NO: 92675 - DNA, 21 bp, Artificial Sequence
  primer
ctgcacgttctgcacatgtat

SEQ ID NO: 92676 - DNA, 24 bp, Artificial Sequence
  primer
cagatattatccataaccaagccc

SEQ ID NO: 92677 - DNA, 38 bp, Artificial Sequence
  primer
gtaaaacgacggccagttagtcgcctagttgctgatgg

SEQ ID NO: 92678 - DNA, 39 bp, Artificial Sequence
  primer
gtaaaacgacggccagttgagcatactaggaatgatggg

SEQ ID NO: 92679 - DNA, 38 bp, Artificial Sequence
  primer
gtaaaacgacggccagtcctctctgccctcttgttcac

SEQ ID NO: 92680 - DNA, 38 bp, Artificial Sequence
  primer
gtaaaacgacggccagttgagatacacagcttcccagc

SEQ ID NO: 92681 - DNA, 21 bp, Artificial Sequence
  primer
aggcccttcactgactgaatc

SEQ ID NO: 92682 - DNA, 38 bp, Artificial Sequence
  primer
gtaaaacgacggccagtctatgtggacttccctttgcc

SEQ ID NO: 92683 - DNA, 22 bp, Artificial Sequence
  primer
ctggatctccactatgatgtgc

SEQ ID NO: 92684 - DNA, 25 bp, Artificial Sequence
  primer
caaaggaaatttgtctttctttgaa

SEQ ID NO: 92685 - DNA, 22 bp, Artificial Sequence
  primer
gctcagacatgcacagttaagg

SEQ ID NO: 92686 - DNA, 27 bp, Artificial Sequence
  primer
tctctatgactcaactcaaacaaagaa

SEQ ID NO: 92687 - DNA, 22 bp, Artificial Sequence
  primer
ttctgctgccaaacactgtatc

SEQ ID NO: 92688 - DNA, 24 bp, Artificial Sequence
  primer
aaatcgaattacatggcattatcc

SEQ ID NO: 92689 - DNA, 38 bp, Artificial Sequence
  primer
gtaaaacgacggccagtacacactccaatcaatggtgc

SEQ ID NO: 92690 - DNA, 40 bp, Artificial Sequence
  primer
gtaaaacgacggccagttgcccataactgtattctcaacc

SEQ ID NO: 92691 - DNA, 38 bp, Artificial Sequence
  primer
gtaaaacgacggccagttttgaagggcacacactgttc

SEQ ID NO: 92692 - DNA, 21 bp, Artificial Sequence
  primer
ctcaagcaattctcccagctc

SEQ ID NO: 92693 - DNA, 20 bp, Artificial Sequence
  primer
ttggctcagatcctcaaagg

SEQ ID NO: 92694 - DNA, 21 bp, Artificial Sequence
  primer
tagcttgagaaactgggctgc

SEQ ID NO: 92695 - DNA, 25 bp, Artificial Sequence
  primer
aatctcatttaaggcaatgataagg

SEQ ID NO: 92696 - DNA, 38 bp, Artificial Sequence
  primer
gtaaaacgacggccagtactggcccatccatagaactt

SEQ ID NO: 92697 - DNA, 27 bp, Artificial Sequence
  primer
gcttctaggttaatctaacaattctgc

SEQ ID NO: 92698 - DNA, 35 bp, Artificial Sequence
  primer
gtaaaacgacggccagtctcaggcgatcctctggc

SEQ ID NO: 92699 - DNA, 23 bp, Artificial Sequence
  primer
ttcacagacttgatagcaaatga

SEQ ID NO: 92700 - DNA, 40 bp, Artificial Sequence
  primer
gtaaaacgacggccagtaaggtcaacaaactccttgaagc

SEQ ID NO: 92701 - DNA, 25 bp, Artificial Sequence
  primer
gcaccacactaataatgaagaatcc

SEQ ID NO: 92702 - DNA, 30 bp, Artificial Sequence
  primer
ttcagttacttaaagggtaacttctactga

SEQ ID NO: 92703 - DNA, 21 bp, Artificial Sequence
  primer
aagctatgatcatgccactgc

SEQ ID NO: 92704 - DNA, 21 bp, Artificial Sequence
  primer
attctccaaccttgccatctg

SEQ ID NO: 92705 - DNA, 43 bp, Artificial Sequence
  primer
gtaaaacgacggccagtgctaatccaactaggtctttctgaac

SEQ ID NO: 92706 - DNA, 21 bp, Artificial Sequence
  primer
tcattggctgtggcttatctc

SEQ ID NO: 92707 - DNA, 20 bp, Artificial Sequence
  primer
ggacttgagttccaacagcc

SEQ ID NO: 92708 - DNA, 21 bp, Artificial Sequence
  primer
aattcctggctgaacatttcc

SEQ ID NO: 92709 - DNA, 21 bp, Artificial Sequence
  primer
gaacatgggcttcaagtaccc

SEQ ID NO: 92710 - DNA, 21 bp, Artificial Sequence
  primer
gttgcttctccaattcttcgg

SEQ ID NO: 92711 - DNA, 22 bp, Artificial Sequence
  primer
tttagtgatgacttcagctggg

SEQ ID NO: 92712 - DNA, 38 bp, Artificial Sequence
  primer
gtaaaacgacggccagtatactcaccggtctgggacac

SEQ ID NO: 92713 - DNA, 39 bp, Artificial Sequence
  primer
gtaaaacgacggccagtggacaattacacttcagccagg

SEQ ID NO: 92714 - DNA, 21 bp, Artificial Sequence
  primer
tggaacaggtcctgaagacac

SEQ ID NO: 92715 - DNA, 22 bp, Artificial Sequence
  primer
agaaatgcagcaagtaaaggct

SEQ ID NO: 92716 - DNA, 37 bp, Artificial Sequence
  primer
gtaaaacgacggccagtgggtgtacatcaggaggcag

SEQ ID NO: 92717 - DNA, 21 bp, Artificial Sequence
  primer
agagagagggttgacagcagc

SEQ ID NO: 92718 - DNA, 37 bp, Artificial Sequence
  primer
gtaaaacgacggccagtaggcccttgtgatccatacc

SEQ ID NO: 92719 - DNA, 38 bp, Artificial Sequence
  primer
gtaaaacgacggccagtgtcttctgcagggtgagaacc

SEQ ID NO: 92720 - DNA, 21 bp, Artificial Sequence
  primer
gaggctggcatcagtccttac

SEQ ID NO: 92721 - DNA, 21 bp, Artificial Sequence
  primer
cagccctaggcagtacaccag

SEQ ID NO: 92722 - DNA, 21 bp, Artificial Sequence
  primer
ctcccagccctgtataactcc

SEQ ID NO: 92723 - DNA, 38 bp, Artificial Sequence
  primer
gtaaaacgacggccagtgcagctagacaggctgagtcc

SEQ ID NO: 92724 - DNA, 20 bp, Artificial Sequence
  primer
ctaagagggaggcctggttg

SEQ ID NO: 92725 - DNA, 21 bp, Artificial Sequence
  primer
aaagagctgggaaagcacttg

SEQ ID NO: 92726 - DNA, 21 bp, Artificial Sequence
  primer
catggagtcccatccctactc

SEQ ID NO: 92727 - DNA, 20 bp, Artificial Sequence
  primer
ggtgctagggagaatctggg

SEQ ID NO: 92728 - DNA, 38 bp, Artificial Sequence
  primer
gtaaaacgacggccagtctgcaggtattgtgggtcatc

SEQ ID NO: 92729 - DNA, 20 bp, Artificial Sequence
  primer
actctggcatcaagcaggac

SEQ ID NO: 92730 - DNA, 21 bp, Artificial Sequence
  primer
gcttaagtgcaggacagggtc

SEQ ID NO: 92731 - DNA, 38 bp, Artificial Sequence
  primer
gtaaaacgacggccagtgtcagggcaggacatgatagg

SEQ ID NO: 92732 - DNA, 38 bp, Artificial Sequence
  primer
gtaaaacgacggccagtcctctgctcaatcctgagtcc

SEQ ID NO: 92733 - DNA, 21 bp, Artificial Sequence
  primer
aggtacacaggtgaggcacag

SEQ ID NO: 92734 - DNA, 23 bp, Artificial Sequence
  primer
gctcagtaagatgacgtgccttc

SEQ ID NO: 92735 - DNA, 21 bp, Artificial Sequence
  primer
gaatcccagaatctcccttcc

SEQ ID NO: 92736 - DNA, 38 bp, Artificial Sequence
  primer
gtaaaacgacggccagttgactacctgtgctgaccctc

SEQ ID NO: 92737 - DNA, 21 bp, Artificial Sequence
  primer
aggaaaggagccagtcagagg

SEQ ID NO: 92738 - DNA, 21 bp, Artificial Sequence
  primer
tgcaaactgtaaagtgctggg

SEQ ID NO: 92739 - DNA, 21 bp, Artificial Sequence
  primer
actcacgtttgctgatgatcc

SEQ ID NO: 92740 - DNA, 38 bp, Artificial Sequence
  primer
gtaaaacgacggccagtagtatgggatggaaatggcag

SEQ ID NO: 92741 - DNA, 21 bp, Artificial Sequence
  primer
gtcctgttctctgtgctgtcc

SEQ ID NO: 92742 - DNA, 20 bp, Artificial Sequence
  primer
ttgtccaggtcaaacttccg

SEQ ID NO: 92743 - DNA, 21 bp, Artificial Sequence
  primer
tggctgttaccatgtcaccac

SEQ ID NO: 92744 - DNA, 21 bp, Artificial Sequence
  primer
attcacccatctgtcattccc

SEQ ID NO: 92745 - DNA, 38 bp, Artificial Sequence
  primer
gtaaaacgacggccagtagggaacactggccagataag

SEQ ID NO: 92746 - DNA, 21 bp, Artificial Sequence
  primer
ctggtgtggtgtggtaggagg

SEQ ID NO: 92747 - DNA, 35 bp, Artificial Sequence
  primer
gtaaaacgacggccagtgttcggagctaccctggc

SEQ ID NO: 92748 - DNA, 19 bp, Artificial Sequence
  primer
gggacaggcgagcactaag

SEQ ID NO: 92749 - DNA, 38 bp, Artificial Sequence
  primer
gtaaaacgacggccagtagacctgcaaagacagatggg

SEQ ID NO: 92750 - DNA, 37 bp, Artificial Sequence
  primer
gtaaaacgacggccagtaggccaagactcaggaccag

SEQ ID NO: 92751 - DNA, 19 bp, Artificial Sequence
  primer
caacacagcaggagatccg

SEQ ID NO: 92752 - DNA, 21 bp, Artificial Sequence
  primer
cagagtgagcagagaccctcc

SEQ ID NO: 92753 - DNA, 21 bp, Artificial Sequence
  primer
tcacaaactgaggacaccacc

SEQ ID NO: 92754 - DNA, 21 bp, Artificial Sequence
  primer
gccaagtacagtcctgacagc

SEQ ID NO: 92755 - DNA, 38 bp, Artificial Sequence
  primer
gtaaaacgacggccagtgctgaagagaaccaaactggg

SEQ ID NO: 92756 - DNA, 39 bp, Artificial Sequence
  primer
gtaaaacgacggccagtcagtcctagaacccagacctcc

SEQ ID NO: 92757 - DNA, 37 bp, Artificial Sequence
  primer
gtaaaacgacggccagtagagggaaagtgcccaaatc

SEQ ID NO: 92758 - DNA, 21 bp, Artificial Sequence
  primer
acaggcgagcactaagactcc

SEQ ID NO: 92759 - DNA, 37 bp, Artificial Sequence
  primer
gtaaaacgacggccagtcgccagtatctgtcccagac

SEQ ID NO: 92760 - DNA, 38 bp, Artificial Sequence
  primer
gtaaaacgacggccagtgggttacctaggaggtttggc

SEQ ID NO: 92761 - DNA, 22 bp, Artificial Sequence
  primer
cactgtcatctcctcagaaggg

SEQ ID NO: 92762 - DNA, 21 bp, Artificial Sequence
  primer
aaggagaagggagaaagagcc

SEQ ID NO: 92763 - DNA, 38 bp, Artificial Sequence
  primer
gtaaaacgacggccagtgagggagggatgtcctgctac

SEQ ID NO: 92764 - DNA, 21 bp, Artificial Sequence
  primer
actgaatgagaaggtgctggc

SEQ ID NO: 92765 - DNA, 38 bp, Artificial Sequence
  primer
gtaaaacgacggccagtaagctccattccactcaatcc

SEQ ID NO: 92766 - DNA, 21 bp, Artificial Sequence
  primer
tagatgggacaccagtcggtc

SEQ ID NO: 92767 - DNA, 21 bp, Artificial Sequence
  primer
gcacacttgcatcctcagttc

SEQ ID NO: 92768 - DNA, 38 bp, Artificial Sequence
  primer
gtaaaacgacggccagttaacccttgacctcatggacc

SEQ ID NO: 92769 - DNA, 21 bp, Artificial Sequence
  primer
tgaatggagattgtgccactg

SEQ ID NO: 92770 - DNA, 38 bp, Artificial Sequence
  primer
gtaaaacgacggccagtaacagggtctcttcctttccc

SEQ ID NO: 92771 - DNA, 21 bp, Artificial Sequence
  primer
agggacaaagtgagggaggac

SEQ ID NO: 92772 - DNA, 21 bp, Artificial Sequence
  primer
aagtcctggtccatgtcatcc

SEQ ID NO: 92773 - DNA, 21 bp, Artificial Sequence
  primer
agcagcctctggagctcatac

SEQ ID NO: 92774 - DNA, 21 bp, Artificial Sequence
  primer
ttgactgtgaggaagggaagg

SEQ ID NO: 92775 - DNA, 21 bp, Artificial Sequence
  primer
gaaggagtgaagaaggcatcc

SEQ ID NO: 92776 - DNA, 38 bp, Artificial Sequence
  primer
gtaaaacgacggccagttgtgtgtgtggttagggcttg

SEQ ID NO: 92777 - DNA, 21 bp, Artificial Sequence
  primer
ggtcatcatctgcatacctgg

SEQ ID NO: 92778 - DNA, 38 bp, Artificial Sequence
  primer
gtaaaacgacggccagtatccatttcatgtgtgccttg

SEQ ID NO: 92779 - DNA, 21 bp, Artificial Sequence
  primer
cactgtggagacaggaagcag

SEQ ID NO: 92780 - DNA, 21 bp, Artificial Sequence
  primer
cccatttcatcagcagagacc

SEQ ID NO: 92781 - DNA, 18 bp, Artificial Sequence
  primer
cccagccttccttcctca

SEQ ID NO: 92782 - DNA, 22 bp, Artificial Sequence
  primer
gggagagaagagactgaggagg

SEQ ID NO: 92783 - DNA, 38 bp, Artificial Sequence
  primer
gtaaaacgacggccagtagcctggatgacagagtgaga

SEQ ID NO: 92784 - DNA, 21 bp, Artificial Sequence
  primer
gtgtttggaggattgcagagc

SEQ ID NO: 92785 - DNA, 21 bp, Artificial Sequence
  primer
aacggaagcagagaacagagg

SEQ ID NO: 92786 - DNA, 19 bp, Artificial Sequence
  primer
cagacccatcccacctgtc

SEQ ID NO: 92787 - DNA, 21 bp, Artificial Sequence
  primer
aactgaccagaactcgccatc

SEQ ID NO: 92788 - DNA, 22 bp, Artificial Sequence
  primer
ttctccctattaggacccatcc

SEQ ID NO: 92789 - DNA, 22 bp, Artificial Sequence
  primer
gaggattggtccagaaggtttc

SEQ ID NO: 92790 - DNA, 18 bp, Artificial Sequence
  primer
ccctgctcctccactcct

SEQ ID NO: 92791 - DNA, 18 bp, Artificial Sequence
  primer
ccgtccaccctgcctaac

SEQ ID NO: 92792 - DNA, 19 bp, Artificial Sequence
  primer
gtctcggggcctgtctagg

SEQ ID NO: 92793 - DNA, 20 bp, Artificial Sequence
  primer
gagacacctgagatgctggg

SEQ ID NO: 92794 - DNA, 21 bp, Artificial Sequence
  primer
aggtcaggagatttaagcccg

SEQ ID NO: 92795 - DNA, 20 bp, Artificial Sequence
  primer
ccagtctgtgctcaaggcag

SEQ ID NO: 92796 - DNA, 20 bp, Artificial Sequence
  primer
tggaagtggtgtaaggccag

SEQ ID NO: 92797 - DNA, 38 bp, Artificial Sequence
  primer
gtaaaacgacggccagtccagatctctccaagtcagcc

SEQ ID NO: 92798 - DNA, 21 bp, Artificial Sequence
  primer
ctggcaacaagctaaggtgtg

SEQ ID NO: 92799 - DNA, 20 bp, Artificial Sequence
  primer
gtctgtgggtcaggcagatg

SEQ ID NO: 92800 - DNA, 38 bp, Artificial Sequence
  primer
gtaaaacgacggccagtaaggaagacagtggcttgagg

SEQ ID NO: 92801 - DNA, 21 bp, Artificial Sequence
  primer
caacgtggactagctcgtgtc

SEQ ID NO: 92802 - DNA, 21 bp, Artificial Sequence
  primer
tctccttccagtttggtttgg

SEQ ID NO: 92803 - DNA, 20 bp, Artificial Sequence
  primer
aactggcctttctccctcag

SEQ ID NO: 92804 - DNA, 22 bp, Artificial Sequence
  primer
catcttccctgtgtgttgtcag

SEQ ID NO: 92805 - DNA, 38 bp, Artificial Sequence
  primer
gtaaaacgacggccagtcaacagggactgtttgcattc

SEQ ID NO: 92806 - DNA, 21 bp, Artificial Sequence
  primer
tcctccttagctgaatggacc

SEQ ID NO: 92807 - DNA, 21 bp, Artificial Sequence
  primer
acagaaggagctgaggctgtc

SEQ ID NO: 92808 - DNA, 21 bp, Artificial Sequence
  primer
tagccacgtgtaggtgtgagc

SEQ ID NO: 92809 - DNA, 39 bp, Artificial Sequence
  primer
gtaaaacgacggccagttccaccttcgtaaatgttcagg

SEQ ID NO: 92810 - DNA, 21 bp, Artificial Sequence
  primer
agtcgctgtctcttcatgctg

SEQ ID NO: 92811 - DNA, 21 bp, Artificial Sequence
  primer
gctgtggtgcagtcaaatctc

SEQ ID NO: 92812 - DNA, 21 bp, Artificial Sequence
  primer
ctgagtgcctgtgaggatagg

SEQ ID NO: 92813 - DNA, 38 bp, Artificial Sequence
  primer
gtaaaacgacggccagtgcacgaatgcacagagaactg

SEQ ID NO: 92814 - DNA, 20 bp, Artificial Sequence
  primer
cttggaggcctggtcttctc

SEQ ID NO: 92815 - DNA, 21 bp, Artificial Sequence
  primer
gagacgatccaggaagagagg

SEQ ID NO: 92816 - DNA, 20 bp, Artificial Sequence
  primer
cttccatcagagccaccaag

SEQ ID NO: 92817 - DNA, 39 bp, Artificial Sequence
  primer
gtaaaacgacggccagtcagaaactcaaggacagggaag

SEQ ID NO: 92818 - DNA, 20 bp, Artificial Sequence
  primer
ctggtgcagggttagacacc

SEQ ID NO: 92819 - DNA, 21 bp, Artificial Sequence
  primer
ctgtgtttgagtctgcaaccg

SEQ ID NO: 92820 - DNA, 21 bp, Artificial Sequence
  primer
gctggtcacaccatctacagc

SEQ ID NO: 92821 - DNA, 22 bp, Artificial Sequence
  primer
taaggcagtaattggaggttgg

SEQ ID NO: 92822 - DNA, 21 bp, Artificial Sequence
  primer
agcagctaagccttggttcac

SEQ ID NO: 92823 - DNA, 18 bp, Artificial Sequence
  primer
actgcgaggtcctggctt

SEQ ID NO: 92824 - DNA, 38 bp, Artificial Sequence
  primer
gtaaaacgacggccagtttgtccctcatctcttccacc

SEQ ID NO: 92825 - DNA, 21 bp, Artificial Sequence
  primer
aacaccagggactgatgaacc

SEQ ID NO: 92826 - DNA, 19 bp, Artificial Sequence
  primer
aaatgatccacccacctcg

SEQ ID NO: 92827 - DNA, 21 bp, Artificial Sequence
  primer
gttgtacacaggagcagtggg

SEQ ID NO: 92828 - DNA, 21 bp, Artificial Sequence
  primer
ccgagtgtaaactggaccacc

SEQ ID NO: 92829 - DNA, 21 bp, Artificial Sequence
  primer
cttcttctctcgccctcttcc

SEQ ID NO: 92830 - DNA, 38 bp, Artificial Sequence
  primer
gtaaaacgacggccagtatggtaaactcactttggccg

SEQ ID NO: 92831 - DNA, 21 bp, Artificial Sequence
  primer
ctgggtagggcaggaggtaag

SEQ ID NO: 92832 - DNA, 36 bp, Artificial Sequence
  primer
gtaaaacgacggccagtgggtcagctttccatgcag

SEQ ID NO: 92833 - DNA, 21 bp, Artificial Sequence
  primer
ctcatccttcatgaccaccag

SEQ ID NO: 92834 - DNA, 21 bp, Artificial Sequence
  primer
attcagaggatgaaagagccc

SEQ ID NO: 92835 - DNA, 18 bp, Artificial Sequence
  primer
ccagcacagaggccagag

SEQ ID NO: 92836 - DNA, 21 bp, Artificial Sequence
  primer
ccatttgcaatttctctttgc

SEQ ID NO: 92837 - DNA, 38 bp, Artificial Sequence
  primer
gtaaaacgacggccagtcttcatccacttcttggaggg

SEQ ID NO: 92838 - DNA, 22 bp, Artificial Sequence
  primer
gagaaggccatgtgtttgaatc

SEQ ID NO: 92839 - DNA, 21 bp, Artificial Sequence
  primer
tgtttctccactctgtgcagg

SEQ ID NO: 92840 - DNA, 21 bp, Artificial Sequence
  primer
acagagggcagagcatcctac

SEQ ID NO: 92841 - DNA, 23 bp, Artificial Sequence
  primer
gagggaatttcattctcaactcc

SEQ ID NO: 92842 - DNA, 21 bp, Artificial Sequence
  primer
gatcctgcagccactccttag

SEQ ID NO: 92843 - DNA, 38 bp, Artificial Sequence
  primer
gtaaaacgacggccagtagggttaagcgactcatttgc

SEQ ID NO: 92844 - DNA, 18 bp, Artificial Sequence
  primer
ccggaggtgctgagtgag

SEQ ID NO: 92845 - DNA, 38 bp, Artificial Sequence
  primer
gtaaaacgacggccagttggaagcaagcacagattgtc

SEQ ID NO: 92846 - DNA, 21 bp, Artificial Sequence
  primer
ggaagtttcctccagcttctg

SEQ ID NO: 92847 - DNA, 21 bp, Artificial Sequence
  primer
acatgcctcttcctgtgagtg

SEQ ID NO: 92848 - DNA, 38 bp, Artificial Sequence
  primer
gtaaaacgacggccagtccagttcctgcttcctcaaac

SEQ ID NO: 92849 - DNA, 21 bp, Artificial Sequence
  primer
aatgtcctgattggaggcaag

SEQ ID NO: 92850 - DNA, 37 bp, Artificial Sequence
  primer
gtaaaacgacggccagtctcatggctcagttcccaac

SEQ ID NO: 92851 - DNA, 22 bp, Artificial Sequence
  primer
gggactgaggtctgagatttcc

SEQ ID NO: 92852 - DNA, 38 bp, Artificial Sequence
  primer
gtaaaacgacggccagtattgcaaacttctcagcatgg

SEQ ID NO: 92853 - DNA, 21 bp, Artificial Sequence
  primer
tcactgggtattgaggaagcc

SEQ ID NO: 92854 - DNA, 38 bp, Artificial Sequence
  primer
gtaaaacgacggccagttctcctatcacagtcctgccc

SEQ ID NO: 92855 - DNA, 38 bp, Artificial Sequence
  primer
gtaaaacgacggccagtcctggaggagacgtgtctagc

SEQ ID NO: 92856 - DNA, 21 bp, Artificial Sequence
  primer
ccatgccaaagtaggatttgc

SEQ ID NO: 92857 - DNA, 21 bp, Artificial Sequence
  primer
ccaccaaagtccaaagtgacc

SEQ ID NO: 92858 - DNA, 21 bp, Artificial Sequence
  primer
gatacatccatgagcgcaatc

SEQ ID NO: 92859 - DNA, 37 bp, Artificial Sequence
  primer
gtaaaacgacggccagtactgggcaccctgtatgttg

SEQ ID NO: 92860 - DNA, 21 bp, Artificial Sequence
  primer
actgcatttcgcatctcgtag

SEQ ID NO: 92861 - DNA, 38 bp, Artificial Sequence
  primer
gtaaaacgacggccagtctgggaagggaaagtgagaag

SEQ ID NO: 92862 - DNA, 20 bp, Artificial Sequence
  primer
cttgttcagcctggatggag

SEQ ID NO: 92863 - DNA, 21 bp, Artificial Sequence
  primer
caccactgtgtggaaatgagg

SEQ ID NO: 92864 - DNA, 37 bp, Artificial Sequence
  primer
gtaaaacgacggccagtaccgatcaaggatgggtagg

SEQ ID NO: 92865 - DNA, 21 bp, Artificial Sequence
  primer
gatacatccatgagcgcaatc

SEQ ID NO: 92866 - DNA, 38 bp, Artificial Sequence
  primer
gtaaaacgacggccagttcagcaccctcactttctcag

SEQ ID NO: 92867 - DNA, 38 bp, Artificial Sequence
  primer
gtaaaacgacggccagttcatctgccacaatcaggttc

SEQ ID NO: 92868 - DNA, 38 bp, Artificial Sequence
  primer
gtaaaacgacggccagttaacggaataccacgaggagc

SEQ ID NO: 92869 - DNA, 21 bp, Artificial Sequence
  primer
tgggatgtcacagttgtctcc

SEQ ID NO: 92870 - DNA, 38 bp, Artificial Sequence
  primer
gtaaaacgacggccagtagtgccaactcctccaagaag

SEQ ID NO: 92871 - DNA, 21 bp, Artificial Sequence
  primer
acacagcaaattgatgatggg

SEQ ID NO: 92872 - DNA, 21 bp, Artificial Sequence
  primer
ggattacccaaggtcatgcag

SEQ ID NO: 92873 - DNA, 38 bp, Artificial Sequence
  primer
gtaaaacgacggccagtcatcctcacaatgtctgccac

SEQ ID NO: 92874 - DNA, 36 bp, Artificial Sequence
  primer
gtaaaacgacggccagtatgggcactggtatcagcc

SEQ ID NO: 92875 - DNA, 37 bp, Artificial Sequence
  primer
gtaaaacgacggccagtgtatccgtgctggtggagag

SEQ ID NO: 92876 - DNA, 21 bp, Artificial Sequence
  primer
gtcctcgtcagagggtcttcc

SEQ ID NO: 92877 - DNA, 38 bp, Artificial Sequence
  primer
gtaaaacgacggccagtgcaagtcagtggaagagtggg

SEQ ID NO: 92878 - DNA, 23 bp, Artificial Sequence
  primer
aggctttgtaagtgaaacagtgg

SEQ ID NO: 92879 - DNA, 20 bp, Artificial Sequence
  primer
atgaaatggagggaagtcgc

SEQ ID NO: 92880 - DNA, 21 bp, Artificial Sequence
  primer
acttaaactccagggttgggc

SEQ ID NO: 92881 - DNA, 21 bp, Artificial Sequence
  primer
ttaagggcgaatttccctacc

SEQ ID NO: 92882 - DNA, 38 bp, Artificial Sequence
  primer
gtaaaacgacggccagtcactagcagtctggagggatg

SEQ ID NO: 92883 - DNA, 38 bp, Artificial Sequence
  primer
gtaaaacgacggccagtgctcatcctgaatggaaggag

SEQ ID NO: 92884 - DNA, 37 bp, Artificial Sequence
  primer
gtaaaacgacggccagtcgtagggatcctggttgttg

SEQ ID NO: 92885 - DNA, 21 bp, Artificial Sequence
  primer
ccacctggaaatgaaataggg

SEQ ID NO: 92886 - DNA, 38 bp, Artificial Sequence
  primer
gtaaaacgacggccagtcccattgaatgtctgaagagg

SEQ ID NO: 92887 - DNA, 21 bp, Artificial Sequence
  primer
agttgacatcccatcctctgc

SEQ ID NO: 92888 - DNA, 21 bp, Artificial Sequence
  primer
tcagtgtccatgcttgatgag

SEQ ID NO: 92889 - DNA, 21 bp, Artificial Sequence
  primer
gatgctacttggattgggagg

SEQ ID NO: 92890 - DNA, 21 bp, Artificial Sequence
  primer
gccagtcaggactacaggtgg

SEQ ID NO: 92891 - DNA, 21 bp, Artificial Sequence
  primer
agcagcaacagagtgagcatc

SEQ ID NO: 92892 - DNA, 42 bp, Artificial Sequence
  primer
gtaaaacgacggccagtcccattattagctttctactcatca

SEQ ID NO: 92893 - DNA, 23 bp, Artificial Sequence
  primer
tgttactgcagcctttacaacac

SEQ ID NO: 92894 - DNA, 44 bp, Artificial Sequence
  primer
gtaaaacgacggccagtgaatacaattcagcaaacctaatgaaa

SEQ ID NO: 92895 - DNA, 38 bp, Artificial Sequence
  primer
gtaaaacgacggccagttatgttgccctatccctttcc

SEQ ID NO: 92896 - DNA, 39 bp, Artificial Sequence
  primer
gtaaaacgacggccagtcataatgataaacagggcccac

SEQ ID NO: 92897 - DNA, 23 bp, Artificial Sequence
  primer
aatgatatgccctctccactttc

SEQ ID NO: 92898 - DNA, 25 bp, Artificial Sequence
  primer
aatgattaacacatgatgctactgg

SEQ ID NO: 92899 - DNA, 21 bp, Artificial Sequence
  primer
ggactggtcatcctgtttcag

SEQ ID NO: 92900 - DNA, 19 bp, Artificial Sequence
  primer
aggtcatctgcctgccttg

SEQ ID NO: 92901 - DNA, 41 bp, Artificial Sequence
  primer
gtaaaacgacggccagttccacttaaaccttgatttgtcag

SEQ ID NO: 92902 - DNA, 18 bp, Artificial Sequence
  primer
ggcagagatcatcccagg

SEQ ID NO: 92903 - DNA, 37 bp, Artificial Sequence
  primer
gtaaaacgacggccagttgaggtcaactgatccaccc

SEQ ID NO: 92904 - DNA, 23 bp, Artificial Sequence
  primer
aaacaggctggtgtttacgtatg

SEQ ID NO: 92905 - DNA, 38 bp, Artificial Sequence
  primer
gtaaaacgacggccagtgcatgaatacccatctgcttg

SEQ ID NO: 92906 - DNA, 26 bp, Artificial Sequence
  primer
tccagataataccacttacaaagcag

SEQ ID NO: 92907 - DNA, 38 bp, Artificial Sequence
  primer
gtaaaacgacggccagtattgaggccatttacgtttcc

SEQ ID NO: 92908 - DNA, 39 bp, Artificial Sequence
  primer
gtaaaacgacggccagtgattgtcctttcctcactccac

SEQ ID NO: 92909 - DNA, 41 bp, Artificial Sequence
  primer
gtaaaacgacggccagtaatgatattgaagatcccagaagg

SEQ ID NO: 92910 - DNA, 20 bp, Artificial Sequence
  primer
tgtcctgaagatttgcgtcc

SEQ ID NO: 92911 - DNA, 20 bp, Artificial Sequence
  primer
tcagttgcactgagcgtagc

SEQ ID NO: 92912 - DNA, 21 bp, Artificial Sequence
  primer
ctccattcagagggagtgagg

SEQ ID NO: 92913 - DNA, 38 bp, Artificial Sequence
  primer
gtaaaacgacggccagtttaccaggcagtgtggaaatg

SEQ ID NO: 92914 - DNA, 37 bp, Artificial Sequence
  primer
gtaaaacgacggccagtttcccagcccttagatgctc

SEQ ID NO: 92915 - DNA, 20 bp, Artificial Sequence
  primer
ccagcatagtgcctggaatg

SEQ ID NO: 92916 - DNA, 21 bp, Artificial Sequence
  primer
tttctctctttcctggcttgc

SEQ ID NO: 92917 - DNA, 21 bp, Artificial Sequence
  primer
gagcccgggaggatagtagac

SEQ ID NO: 92918 - DNA, 21 bp, Artificial Sequence
  primer
aggaaagcgagagagaagcac

SEQ ID NO: 92919 - DNA, 22 bp, Artificial Sequence
  primer
ccttatcctttggtgtcctgag

SEQ ID NO: 92920 - DNA, 38 bp, Artificial Sequence
  primer
gtaaaacgacggccagtgactcttggttgagtctcggg

SEQ ID NO: 92921 - DNA, 21 bp, Artificial Sequence
  primer
ggtacacatgggaaagggaag

SEQ ID NO: 92922 - DNA, 38 bp, Artificial Sequence
  primer
gtaaaacgacggccagtacacacatcttggtctccagg

SEQ ID NO: 92923 - DNA, 37 bp, Artificial Sequence
  primer
gtaaaacgacggccagtgactgcaaccctttgctagg

SEQ ID NO: 92924 - DNA, 22 bp, Artificial Sequence
  primer
tctacctacaaatcagccctgg

SEQ ID NO: 92925 - DNA, 20 bp, Artificial Sequence
  primer
cccaccactaggcagtcttg

SEQ ID NO: 92926 - DNA, 21 bp, Artificial Sequence
  primer
ctcccgtaagcatcggaatag

SEQ ID NO: 92927 - DNA, 21 bp, Artificial Sequence
  primer
gtgtcaggaagtgagtcctgg

SEQ ID NO: 92928 - DNA, 21 bp, Artificial Sequence
  primer
taaccaggctgtttctcatgc

SEQ ID NO: 92929 - DNA, 38 bp, Artificial Sequence
  primer
gtaaaacgacggccagtaaacatctatgcagcgtggac

SEQ ID NO: 92930 - DNA, 38 bp, Artificial Sequence
  primer
gtaaaacgacggccagtcccagatcaagatgaagggag

SEQ ID NO: 92931 - DNA, 38 bp, Artificial Sequence
  primer
gtaaaacgacggccagttgtacccaggttagcctccag

SEQ ID NO: 92932 - DNA, 19 bp, Artificial Sequence
  primer
gctaagacccatggcgaag

SEQ ID NO: 92933 - DNA, 21 bp, Artificial Sequence
  primer
aatgggaacactgggattgtc

SEQ ID NO: 92934 - DNA, 20 bp, Artificial Sequence
  primer
gatacatccatcacggccac

SEQ ID NO: 92935 - DNA, 21 bp, Artificial Sequence
  primer
acagggtggttatgacggttc

SEQ ID NO: 92936 - DNA, 21 bp, Artificial Sequence
  primer
cactactgcaaatggtccctg

SEQ ID NO: 92937 - DNA, 38 bp, Artificial Sequence
  primer
gtaaaacgacggccagttggatgtagtccttcaggtgc

SEQ ID NO: 92938 - DNA, 21 bp, Artificial Sequence
  primer
caggcttagaggagaccttgg

SEQ ID NO: 92939 - DNA, 38 bp, Artificial Sequence
  primer
gtaaaacgacggccagtctcagagctggtatgaagggc

SEQ ID NO: 92940 - DNA, 20 bp, Artificial Sequence
  primer
gtgactgcagacaggatcgg

SEQ ID NO: 92941 - DNA, 21 bp, Artificial Sequence
  primer
ctccacactggtgaaatgctg

SEQ ID NO: 92942 - DNA, 21 bp, Artificial Sequence
  primer
accaagcagctgatgaaattg

SEQ ID NO: 92943 - DNA, 38 bp, Artificial Sequence
  primer
gtaaaacgacggccagtgttgcacagggtatcagcaac

SEQ ID NO: 92944 - DNA, 18 bp, Artificial Sequence
  primer
catcccatccgctcaaac

SEQ ID NO: 92945 - DNA, 21 bp, Artificial Sequence
  primer
taccactccagccatcacatc

SEQ ID NO: 92946 - DNA, 21 bp, Artificial Sequence
  primer
ttgctgctcaaagcagaagag

SEQ ID NO: 92947 - DNA, 36 bp, Artificial Sequence
  primer
gtaaaacgacggccagtctggatccaccagcctgac

SEQ ID NO: 92948 - DNA, 39 bp, Artificial Sequence
  primer
gtaaaacgacggccagtcagacgactgagatagttgccc

SEQ ID NO: 92949 - DNA, 19 bp, Artificial Sequence
  primer
gtcagggcagtgatccacc

SEQ ID NO: 92950 - DNA, 21 bp, Artificial Sequence
  primer
cagaccttctgaaaggcaatg

SEQ ID NO: 92951 - DNA, 38 bp, Artificial Sequence
  primer
gtaaaacgacggccagttccaatagcatgagcgattcc

SEQ ID NO: 92952 - DNA, 36 bp, Artificial Sequence
  primer
gtaaaacgacggccagtggtccaagaaagcaccacc

SEQ ID NO: 92953 - DNA, 20 bp, Artificial Sequence
  primer
ctctcgtccgtgttggactc

SEQ ID NO: 92954 - DNA, 38 bp, Artificial Sequence
  primer
gtaaaacgacggccagtcctgaaacctcacactctccc

SEQ ID NO: 92955 - DNA, 37 bp, Artificial Sequence
  primer
gtaaaacgacggccagtgtcccacttcctgcacacac

SEQ ID NO: 92956 - DNA, 21 bp, Artificial Sequence
  primer
acagcagctcttagggaggag

SEQ ID NO: 92957 - DNA, 20 bp, Artificial Sequence
  primer
ccagtgtgacctgggaacag

SEQ ID NO: 92958 - DNA, 38 bp, Artificial Sequence
  primer
gtaaaacgacggccagtttaggacctttgtcccacctc

SEQ ID NO: 92959 - DNA, 23 bp, Artificial Sequence
  primer
gcagtaaacagagaaagtttggg

SEQ ID NO: 92960 - DNA, 22 bp, Artificial Sequence
  primer
gaagtagcagaactgggagctg

SEQ ID NO: 92961 - DNA, 19 bp, Artificial Sequence
  primer
cacctccatgggactccac

SEQ ID NO: 92962 - DNA, 21 bp, Artificial Sequence
  primer
tagaagccctactcctccacc

SEQ ID NO: 92963 - DNA, 23 bp, Artificial Sequence
  primer
tcccacacatgaagtgtatttga

SEQ ID NO: 92964 - DNA, 41 bp, Artificial Sequence
  primer
gtaaaacgacggccagtcaagtgccactgagaaatatctgg

SEQ ID NO: 92965 - DNA, 38 bp, Artificial Sequence
  primer
gtaaaacgacggccagtaccaacagggcttgtaacctg

SEQ ID NO: 92966 - DNA, 38 bp, Artificial Sequence
  primer
gtaaaacgacggccagttgcttcattctgggttgattt

SEQ ID NO: 92967 - DNA, 20 bp, Artificial Sequence
  primer
cctccctaatggcctcagtc

SEQ ID NO: 92968 - DNA, 27 bp, Artificial Sequence
  primer
aaatatattccagtgtttgatcatcct

SEQ ID NO: 92969 - DNA, 21 bp, Artificial Sequence
  primer
agagcgtatgtcagcatggac

SEQ ID NO: 92970 - DNA, 41 bp, Artificial Sequence
  primer
gtaaaacgacggccagtcttagctatggctacaacaagtcg

SEQ ID NO: 92971 - DNA, 20 bp, Artificial Sequence
  primer
ctgctttaatcgggcaaatg

SEQ ID NO: 92972 - DNA, 38 bp, Artificial Sequence
  primer
gtaaaacgacggccagttggttcagacatctgctttgg

SEQ ID NO: 92973 - DNA, 19 bp, Artificial Sequence
  primer
gtaggccaaagcctccaaa

SEQ ID NO: 92974 - DNA, 42 bp, Artificial Sequence
  primer
gtaaaacgacggccagtaacagggcactttactaatcacttg

SEQ ID NO: 92975 - DNA, 40 bp, Artificial Sequence
  primer
gtaaaacgacggccagttcagtctccctttgcatctacac

SEQ ID NO: 92976 - DNA, 21 bp, Artificial Sequence
  primer
ctggttggtgataagaggcac

SEQ ID NO: 92977 - DNA, 38 bp, Artificial Sequence
  primer
gtaaaacgacggccagtaatgccaacttggaaggtctg

SEQ ID NO: 92978 - DNA, 25 bp, Artificial Sequence
  primer
caagacaacgctataggttcaacag

SEQ ID NO: 92979 - DNA, 36 bp, Artificial Sequence
  primer
gtaaaacgacggccagtactgggcgcagtaaggatg

SEQ ID NO: 92980 - DNA, 21 bp, Artificial Sequence
  primer
tctcctttcccagaatgagga

SEQ ID NO: 92981 - DNA, 21 bp, Artificial Sequence
  primer
cctggacgacagagtgagact

SEQ ID NO: 92982 - DNA, 40 bp, Artificial Sequence
  primer
gtaaaacgacggccagttttgcccataagtggttatgatt

SEQ ID NO: 92983 - DNA, 22 bp, Artificial Sequence
  primer
gaatctcaccatatcctgctcc

SEQ ID NO: 92984 - DNA, 39 bp, Artificial Sequence
  primer
gtaaaacgacggccagtcaaacaaggtgtagcccaaatc

SEQ ID NO: 92985 - DNA, 39 bp, Artificial Sequence
  primer
gtaaaacgacggccagtgactagggaataaactgccagg

SEQ ID NO: 92986 - DNA, 22 bp, Artificial Sequence
  primer
gactgctgtccaaccctgttag

SEQ ID NO: 92987 - DNA, 42 bp, Artificial Sequence
  primer
gtaaaacgacggccagtttgcctacacattagtaagtctgcc

SEQ ID NO: 92988 - DNA, 21 bp, Artificial Sequence
  primer
tttaaatggcaacagcccatc

SEQ ID NO: 92989 - DNA, 21 bp, Artificial Sequence
  primer
tagtcgcccattacattgtgg

SEQ ID NO: 92990 - DNA, 38 bp, Artificial Sequence
  primer
gtaaaacgacggccagtcacctgaagaagtgagcttgc

SEQ ID NO: 92991 - DNA, 38 bp, Artificial Sequence
  primer
gtaaaacgacggccagtcaataagagtgcgggtcactg

SEQ ID NO: 92992 - DNA, 40 bp, Artificial Sequence
  primer
gtaaaacgacggccagtgcattggctaagtgagagacatc

SEQ ID NO: 92993 - DNA, 38 bp, Artificial Sequence
  primer
gtaaaacgacggccagtggtagtgagtgggactccagc

SEQ ID NO: 92994 - DNA, 38 bp, Artificial Sequence
  primer
gtaaaacgacggccagtccatcttctctctgcctggag

SEQ ID NO: 92995 - DNA, 37 bp, Artificial Sequence
  primer
gtaaaacgacggccagtacggaaggaaagctgaatgg

SEQ ID NO: 92996 - DNA, 38 bp, Artificial Sequence
  primer
gtaaaacgacggccagtgcttggccaggtaacagattc

SEQ ID NO: 92997 - DNA, 21 bp, Artificial Sequence
  primer
tgcatctgttagagagcagcg

SEQ ID NO: 92998 - DNA, 21 bp, Artificial Sequence
  primer
tggtggatttatagctggctg

SEQ ID NO: 92999 - DNA, 20 bp, Artificial Sequence
  primer
agagaaggaggccagcacag

SEQ ID NO: 93000 - DNA, 36 bp, Artificial Sequence
  primer
gtaaaacgacggccagtgaggcccaagaccacacag

SEQ ID NO: 93001 - DNA, 22 bp, Artificial Sequence
  primer
ggtcaatgatgcagctgttatg

SEQ ID NO: 93002 - DNA, 19 bp, Artificial Sequence
  primer
tactgatgcggagaccgag

SEQ ID NO: 93003 - DNA, 37 bp, Artificial Sequence
  primer
gtaaaacgacggccagttcaacaggcatagtgggagc

SEQ ID NO: 93004 - DNA, 21 bp, Artificial Sequence
  primer
aggctggctggctactacatt

SEQ ID NO: 93005 - DNA, 18 bp, Artificial Sequence
  primer
tgcaggccttcctgatcc

SEQ ID NO: 93006 - DNA, 38 bp, Artificial Sequence
  primer
gtaaaacgacggccagttccgtcaacatctgagaacaa

SEQ ID NO: 93007 - DNA, 21 bp, Artificial Sequence
  primer
tccaggtctcctgtctggttc

SEQ ID NO: 93008 - DNA, 21 bp, Artificial Sequence
  primer
ctgaggactcttcccacttcc

SEQ ID NO: 93009 - DNA, 21 bp, Artificial Sequence
  primer
taaagtacttggcctccctgc

SEQ ID NO: 93010 - DNA, 21 bp, Artificial Sequence
  primer
taaagggaagtgactgcctgg

SEQ ID NO: 93011 - DNA, 38 bp, Artificial Sequence
  primer
gtaaaacgacggccagttgagaggctggaaccaaagtc

SEQ ID NO: 93012 - DNA, 38 bp, Artificial Sequence
  primer
gtaaaacgacggccagtaagggctgccagtgtctacag

SEQ ID NO: 93013 - DNA, 21 bp, Artificial Sequence
  primer
ccaaattaagggatgtccagc

SEQ ID NO: 93014 - DNA, 21 bp, Artificial Sequence
  primer
gagggaggcatagagaaaggg

SEQ ID NO: 93015 - DNA, 21 bp, Artificial Sequence
  primer
aaagctcctcatttctcctcg

SEQ ID NO: 93016 - DNA, 38 bp, Artificial Sequence
  primer
gtaaaacgacggccagtctctgctgttctgtttgctgg

SEQ ID NO: 93017 - DNA, 21 bp, Artificial Sequence
  primer
ccaagctaaaggacactcagc

SEQ ID NO: 93018 - DNA, 21 bp, Artificial Sequence
  primer
ctttctgcacagggagtggag

SEQ ID NO: 93019 - DNA, 37 bp, Artificial Sequence
  primer
gtaaaacgacggccagtacaggagggaaaggacttgg

SEQ ID NO: 93020 - DNA, 21 bp, Artificial Sequence
  primer
acagatggcagatggagatgg

SEQ ID NO: 93021 - DNA, 20 bp, Artificial Sequence
  primer
cccagagcagcaagtagagg

SEQ ID NO: 93022 - DNA, 21 bp, Artificial Sequence
  primer
agtaggtgatggactgcggac

SEQ ID NO: 93023 - DNA, 22 bp, Artificial Sequence
  primer
gaaccatgccactactgaggac

SEQ ID NO: 93024 - DNA, 21 bp, Artificial Sequence
  primer
ttatgggagaattgagccctg

SEQ ID NO: 93025 - DNA, 36 bp, Artificial Sequence
  primer
gtaaaacgacggccagtacaccctggcaggttcatc

SEQ ID NO: 93026 - DNA, 20 bp, Artificial Sequence
  primer
aggtcctgctgacacacacc

SEQ ID NO: 93027 - DNA, 38 bp, Artificial Sequence
  primer
gtaaaacgacggccagtaggagtgatccctgcattgtc

SEQ ID NO: 93028 - DNA, 19 bp, Artificial Sequence
  primer
ggagccattcattgcacag

SEQ ID NO: 93029 - DNA, 37 bp, Artificial Sequence
  primer
gtaaaacgacggccagttcgcaggatttccagcttac

SEQ ID NO: 93030 - DNA, 38 bp, Artificial Sequence
  primer
gtaaaacgacggccagtcagtgggagaaacagatggac

SEQ ID NO: 93031 - DNA, 37 bp, Artificial Sequence
  primer
gtaaaacgacggccagtataagctgggtccctggatg

SEQ ID NO: 93032 - DNA, 38 bp, Artificial Sequence
  primer
gtaaaacgacggccagtgagcagtaccctgcctttcag

SEQ ID NO: 93033 - DNA, 38 bp, Artificial Sequence
  primer
gtaaaacgacggccagttaaggacctgtgaccctccac

SEQ ID NO: 93034 - DNA, 21 bp, Artificial Sequence
  primer
ggaagtgatttctgactcggg

SEQ ID NO: 93035 - DNA, 38 bp, Artificial Sequence
  primer
gtaaaacgacggccagtatggctgaatgcaaggcttag

SEQ ID NO: 93036 - DNA, 19 bp, Artificial Sequence
  primer
caagcagaggctctaggcg

SEQ ID NO: 93037 - DNA, 20 bp, Artificial Sequence
  primer
aaagcagtggccttctttgg

SEQ ID NO: 93038 - DNA, 21 bp, Artificial Sequence
  primer
tggattgcatttgttactgcc

SEQ ID NO: 93039 - DNA, 21 bp, Artificial Sequence
  primer
gacaggagatgtgaggcactg

SEQ ID NO: 93040 - DNA, 20 bp, Artificial Sequence
  primer
acaaggaccgatgttcctcc

SEQ ID NO: 93041 - DNA, 21 bp, Artificial Sequence
  primer
gagggaagaggaggaaagagg

SEQ ID NO: 93042 - DNA, 38 bp, Artificial Sequence
  primer
gtaaaacgacggccagtaaacaactcttcatcccaccc

SEQ ID NO: 93043 - DNA, 21 bp, Artificial Sequence
  primer
aggtcagtcccgtacttggtg

SEQ ID NO: 93044 - DNA, 20 bp, Artificial Sequence
  primer
cacccactgcatctctctgc

SEQ ID NO: 93045 - DNA, 24 bp, Artificial Sequence
  primer
aaacatacacctggtcactctttg

SEQ ID NO: 93046 - DNA, 38 bp, Artificial Sequence
  primer
gtaaaacgacggccagtccactgccaggtgatatgaag

SEQ ID NO: 93047 - DNA, 21 bp, Artificial Sequence
  primer
ttgaacttggtcagagccttg

SEQ ID NO: 93048 - DNA, 21 bp, Artificial Sequence
  primer
ttcctcaagcacctggatttc

SEQ ID NO: 93049 - DNA, 21 bp, Artificial Sequence
  primer
ctgagtcttcgtcctgctgtg

SEQ ID NO: 93050 - DNA, 21 bp, Artificial Sequence
  primer
cttcaaattcttggctcaggg

SEQ ID NO: 93051 - DNA, 21 bp, Artificial Sequence
  primer
attcaacttgctgaaatcccg

SEQ ID NO: 93052 - DNA, 21 bp, Artificial Sequence
  primer
tacaggtgctgaggaccaaac

SEQ ID NO: 93053 - DNA, 37 bp, Artificial Sequence
  primer
gtaaaacgacggccagttggttggaggcatgtttctc

SEQ ID NO: 93054 - DNA, 38 bp, Artificial Sequence
  primer
gtaaaacgacggccagtagacacagccaatgtcagagc

SEQ ID NO: 93055 - DNA, 26 bp, Artificial Sequence
  primer
aatttccatttgagacatttagtgtg

SEQ ID NO: 93056 - DNA, 38 bp, Artificial Sequence
  primer
gtaaaacgacggccagttgcctcttcaaaggaggaaag

SEQ ID NO: 93057 - DNA, 21 bp, Artificial Sequence
  primer
tctgaaggaaggccagtgttt

SEQ ID NO: 93058 - DNA, 40 bp, Artificial Sequence
  primer
gtaaaacgacggccagtccttatcttctttggcatccttt

SEQ ID NO: 93059 - DNA, 21 bp, Artificial Sequence
  primer
ccctaaaggcaacagcaagtg

SEQ ID NO: 93060 - DNA, 36 bp, Artificial Sequence
  primer
gtaaaacgacggccagtggcaaatcggcaagtaagc

SEQ ID NO: 93061 - DNA, 23 bp, Artificial Sequence
  primer
gatggaccagctagtacaaaggc

SEQ ID NO: 93062 - DNA, 22 bp, Artificial Sequence
  primer
ctaaaccacctgtcagaaaccc

SEQ ID NO: 93063 - DNA, 38 bp, Artificial Sequence
  primer
gtaaaacgacggccagtgatgaacaggccgacagattc

SEQ ID NO: 93064 - DNA, 20 bp, Artificial Sequence
  primer
gaccgaggaaagagaccctg

SEQ ID NO: 93065 - DNA, 21 bp, Artificial Sequence
  primer
ccagtgtgtcgctcatcacag

SEQ ID NO: 93066 - DNA, 21 bp, Artificial Sequence
  primer
caatcgtaccaacctcttccc

SEQ ID NO: 93067 - DNA, 21 bp, Artificial Sequence
  primer
gatgccctgaggtctaggttg

SEQ ID NO: 93068 - DNA, 21 bp, Artificial Sequence
  primer
ctatctgccctttccctggag

SEQ ID NO: 93069 - DNA, 39 bp, Artificial Sequence
  primer
gtaaaacgacggccagttgttgcctcccattggtaatag

SEQ ID NO: 93070 - DNA, 20 bp, Artificial Sequence
  primer
gtgaagtctgcctgggtcac

SEQ ID NO: 93071 - DNA, 21 bp, Artificial Sequence
  primer
ctgatcctctcttggctctgg

SEQ ID NO: 93072 - DNA, 20 bp, Artificial Sequence
  primer
ctctattgctgggcaggagg

SEQ ID NO: 93073 - DNA, 21 bp, Artificial Sequence
  primer
cctgaggtgtgtctgcacttg

SEQ ID NO: 93074 - DNA, 21 bp, Artificial Sequence
  primer
aactagcagcagctcccaaag

SEQ ID NO: 93075 - DNA, 21 bp, Artificial Sequence
  primer
tacaaacctgaccctgcacac

SEQ ID NO: 93076 - DNA, 39 bp, Artificial Sequence
  primer
gtaaaacgacggccagtggtcggtccctgtacctttatc

SEQ ID NO: 93077 - DNA, 36 bp, Artificial Sequence
  primer
gtaaaacgacggccagtcaaaccgcagagcacactc

SEQ ID NO: 93078 - DNA, 39 bp, Artificial Sequence
  primer
gtaaaacgacggccagttggtgagggttcaaggttagac

SEQ ID NO: 93079 - DNA, 22 bp, Artificial Sequence
  primer
ctaaaccacctgtcagaaaccc

SEQ ID NO: 93080 - DNA, 22 bp, Artificial Sequence
  primer
aatgagcagaacgctttacgtc

SEQ ID NO: 93081 - DNA, 38 bp, Artificial Sequence
  primer
gtaaaacgacggccagttacacacccaaagtgaccacc

SEQ ID NO: 93082 - DNA, 22 bp, Artificial Sequence
  primer
cagaaacagagtcagcactccc

SEQ ID NO: 93083 - DNA, 38 bp, Artificial Sequence
  primer
gtaaaacgacggccagtgatcggcaacctgatttcatc

SEQ ID NO: 93084 - DNA, 39 bp, Artificial Sequence
  primer
gtaaaacgacggccagttgaggacaaatcagtcttggtg

SEQ ID NO: 93085 - DNA, 38 bp, Artificial Sequence
  primer
gtaaaacgacggccagttaaccgaggtgtgttctgctc

SEQ ID NO: 93086 - DNA, 21 bp, Artificial Sequence
  primer
aaattcctggaagtcttgccc

SEQ ID NO: 93087 - DNA, 37 bp, Artificial Sequence
  primer
gtaaaacgacggccagtcgatgccctgttcagagaag

SEQ ID NO: 93088 - DNA, 38 bp, Artificial Sequence
  primer
gtaaaacgacggccagtgaccttgggaagctgagtctg

SEQ ID NO: 93089 - DNA, 38 bp, Artificial Sequence
  primer
gtaaaacgacggccagtgaaatgtcatcagggctgacc

SEQ ID NO: 93090 - DNA, 21 bp, Artificial Sequence
  primer
ctgtgatctgaaggttgtgcg

SEQ ID NO: 93091 - DNA, 21 bp, Artificial Sequence
  primer
cccacagagttgtagtccagc

SEQ ID NO: 93092 - DNA, 38 bp, Artificial Sequence
  primer
gtaaaacgacggccagtttgaaattaaggcccagaagg

SEQ ID NO: 93093 - DNA, 38 bp, Artificial Sequence
  primer
gtaaaacgacggccagtttggacagtgagcaccaaatc

SEQ ID NO: 93094 - DNA, 38 bp, Artificial Sequence
  primer
gtaaaacgacggccagtttcaatcaggaggtcaggagc

SEQ ID NO: 93095 - DNA, 38 bp, Artificial Sequence
  primer
gtaaaacgacggccagttggctgaagagtttcacctgc

SEQ ID NO: 93096 - DNA, 21 bp, Artificial Sequence
  primer
aaagaccttcagaactggccc

SEQ ID NO: 93097 - DNA, 21 bp, Artificial Sequence
  primer
acaaccgctcctatggatgag

SEQ ID NO: 93098 - DNA, 38 bp, Artificial Sequence
  primer
gtaaaacgacggccagtaaggcaagctgttctaccagg

SEQ ID NO: 93099 - DNA, 21 bp, Artificial Sequence
  primer
attctgccattcctctctccc

SEQ ID NO: 93100 - DNA, 37 bp, Artificial Sequence
  primer
gtaaaacgacggccagtaacacatgtcacccagcctc

SEQ ID NO: 93101 - DNA, 21 bp, Artificial Sequence
  primer
actcagatcagcagggagagg

SEQ ID NO: 93102 - DNA, 21 bp, Artificial Sequence
  primer
acttgggagacaggattcagc

SEQ ID NO: 93103 - DNA, 38 bp, Artificial Sequence
  primer
gtaaaacgacggccagtgcctgtcactttccttgaagc

SEQ ID NO: 93104 - DNA, 18 bp, Artificial Sequence
  primer
gttggccagcaagaccag

SEQ ID NO: 93105 - DNA, 21 bp, Artificial Sequence
  primer
cagatggacctcagtgaccag

SEQ ID NO: 93106 - DNA, 19 bp, Artificial Sequence
  primer
tgtctctctcctgcagccc

SEQ ID NO: 93107 - DNA, 21 bp, Artificial Sequence
  primer
ggagtttctgtttggctttgg

SEQ ID NO: 93108 - DNA, 20 bp, Artificial Sequence
  primer
gaagtgatgcaggacgaagg

SEQ ID NO: 93109 - DNA, 35 bp, Artificial Sequence
  primer
gtaaaacgacggccagtgtccatgatgccattccc

SEQ ID NO: 93110 - DNA, 37 bp, Artificial Sequence
  primer
gtaaaacgacggccagtcgatcatccagggacctatg

SEQ ID NO: 93111 - DNA, 38 bp, Artificial Sequence
  primer
gtaaaacgacggccagtggacaagtggaaggctttagg

SEQ ID NO: 93112 - DNA, 20 bp, Artificial Sequence
  primer
gtttcgcagcatggtgaaag

SEQ ID NO: 93113 - DNA, 38 bp, Artificial Sequence
  primer
gtaaaacgacggccagttaggagcacgaatcacccttc

SEQ ID NO: 93114 - DNA, 39 bp, Artificial Sequence
  primer
gtaaaacgacggccagtggtgcatgcctatagtctcagg

SEQ ID NO: 93115 - DNA, 38 bp, Artificial Sequence
  primer
gtaaaacgacggccagtctgcttaatggataccagggc

SEQ ID NO: 93116 - DNA, 21 bp, Artificial Sequence
  primer
ataaacagaaaccaccctgcg

SEQ ID NO: 93117 - DNA, 21 bp, Artificial Sequence
  primer
gcgggtacttagggagtttgc

SEQ ID NO: 93118 - DNA, 41 bp, Artificial Sequence
  primer
gtaaaacgacggccagttcgattcagtagaccaataagatg

SEQ ID NO: 93119 - DNA, 38 bp, Artificial Sequence
  primer
gtaaaacgacggccagtatatccaacgtgctctgggtc

SEQ ID NO: 93120 - DNA, 37 bp, Artificial Sequence
  primer
gtaaaacgacggccagtcccattatgtcatggcaagc

SEQ ID NO: 93121 - DNA, 21 bp, Artificial Sequence
  primer
gtttgacatgacttggcgttg

SEQ ID NO: 93122 - DNA, 21 bp, Artificial Sequence
  primer
acggagattagccagagcaac

SEQ ID NO: 93123 - DNA, 21 bp, Artificial Sequence
  primer
caagtcccattccttctcacc

SEQ ID NO: 93124 - DNA, 38 bp, Artificial Sequence
  primer
gtaaaacgacggccagttgactgtgtctttgctgaccc

SEQ ID NO: 93125 - DNA, 21 bp, Artificial Sequence
  primer
accacttaggcctctgctctg

SEQ ID NO: 93126 - DNA, 21 bp, Artificial Sequence
  primer
atggcttccctactgctcttg

SEQ ID NO: 93127 - DNA, 38 bp, Artificial Sequence
  primer
gtaaaacgacggccagtggcttggcttaggctgagtag

SEQ ID NO: 93128 - DNA, 38 bp, Artificial Sequence
  primer
gtaaaacgacggccagttgagtggtgtgccttagcttg

SEQ ID NO: 93129 - DNA, 38 bp, Artificial Sequence
  primer
gtaaaacgacggccagtctttaagccaggaagcagagg

SEQ ID NO: 93130 - DNA, 23 bp, Artificial Sequence
  primer
cctcattgcttaaggtttgtttc

SEQ ID NO: 93131 - DNA, 18 bp, Artificial Sequence
  primer
accacgcctggcctacac

SEQ ID NO: 93132 - DNA, 20 bp, Artificial Sequence
  primer
caacgagaaaccaggagacg

SEQ ID NO: 93133 - DNA, 38 bp, Artificial Sequence
  primer
gtaaaacgacggccagtagggtgactcctgcttctgtc

SEQ ID NO: 93134 - DNA, 24 bp, Artificial Sequence
  primer
aaatgttacctctgccttagggtc

SEQ ID NO: 93135 - DNA, 21 bp, Artificial Sequence
  primer
gatgttctcccttcccacatc

SEQ ID NO: 93136 - DNA, 21 bp, Artificial Sequence
  primer
gtgccatgtcacttggatacc

SEQ ID NO: 93137 - DNA, 21 bp, Artificial Sequence
  primer
tctgtcctgaaagcctgtgtg

SEQ ID NO: 93138 - DNA, 20 bp, Artificial Sequence
  primer
gttgaggttgggcctcagtc

SEQ ID NO: 93139 - DNA, 37 bp, Artificial Sequence
  primer
gtaaaacgacggccagtcagaggacccaacaccactg

SEQ ID NO: 93140 - DNA, 18 bp, Artificial Sequence
  primer
cagtgagcctggctgtcc

SEQ ID NO: 93141 - DNA, 20 bp, Artificial Sequence
  primer
gccagtcctcctccagtacc

SEQ ID NO: 93142 - DNA, 19 bp, Artificial Sequence
  primer
actgtgcctccaggagtgg

SEQ ID NO: 93143 - DNA, 37 bp, Artificial Sequence
  primer
gtaaaacgacggccagtccagtagtttgaggccaccc

SEQ ID NO: 93144 - DNA, 21 bp, Artificial Sequence
  primer
gtcacagagaagggttgggtc

SEQ ID NO: 93145 - DNA, 21 bp, Artificial Sequence
  primer
ctgtccgtgccttaccttacc

SEQ ID NO: 93146 - DNA, 38 bp, Artificial Sequence
  primer
gtaaaacgacggccagtgtttccctgtctgtggagtgg

SEQ ID NO: 93147 - DNA, 38 bp, Artificial Sequence
  primer
gtaaaacgacggccagtaccttgtggtcactcctcagc

SEQ ID NO: 93148 - DNA, 20 bp, Artificial Sequence
  primer
ccctcagtgtcggtgttgtc

SEQ ID NO: 93149 - DNA, 37 bp, Artificial Sequence
  primer
gtaaaacgacggccagtctttcagggcaccagattcc

SEQ ID NO: 93150 - DNA, 18 bp, Artificial Sequence
  primer
cgcgcttcacaacttccc

SEQ ID NO: 93151 - DNA, 25 bp, Artificial Sequence
  primer
tcaaattcaaagcctaaagacacag

SEQ ID NO: 93152 - DNA, 21 bp, Artificial Sequence
  primer
cagcaaggaaacaaatgatgc

SEQ ID NO: 93153 - DNA, 21 bp, Artificial Sequence
  primer
agagatccactggtctgggag

SEQ ID NO: 93154 - DNA, 20 bp, Artificial Sequence
  primer
ccagtgttgctttcagagcc

SEQ ID NO: 93155 - DNA, 38 bp, Artificial Sequence
  primer
gtaaaacgacggccagtacagccagtgcccaaatacac

SEQ ID NO: 93156 - DNA, 22 bp, Artificial Sequence
  primer
tgctggaggtaagtttacaggc

SEQ ID NO: 93157 - DNA, 38 bp, Artificial Sequence
  primer
gtaaaacgacggccagtctagtttctcaccctcagccc

SEQ ID NO: 93158 - DNA, 21 bp, Artificial Sequence
  primer
aacccaacacacacacaggag

SEQ ID NO: 93159 - DNA, 38 bp, Artificial Sequence
  primer
gtaaaacgacggccagtgtcatctccagtgtctgctgc

SEQ ID NO: 93160 - DNA, 39 bp, Artificial Sequence
  primer
gtaaaacgacggccagttggaatagagacttcattgcgg

SEQ ID NO: 93161 - DNA, 38 bp, Artificial Sequence
  primer
gtaaaacgacggccagtacaagaccctattcccactgc

SEQ ID NO: 93162 - DNA, 19 bp, Artificial Sequence
  primer
catgctgcatcctgtcctg

SEQ ID NO: 93163 - DNA, 37 bp, Artificial Sequence
  primer
gtaaaacgacggccagtaagcacccactgaagcactg

SEQ ID NO: 93164 - DNA, 21 bp, Artificial Sequence
  primer
tgccaagactgctaagctctg

SEQ ID NO: 93165 - DNA, 37 bp, Artificial Sequence
  primer
gtaaaacgacggccagtagacctcaatgtggacgctg

SEQ ID NO: 93166 - DNA, 37 bp, Artificial Sequence
  primer
gtaaaacgacggccagtctctgcacctcctgcttcag

SEQ ID NO: 93167 - DNA, 38 bp, Artificial Sequence
  primer
gtaaaacgacggccagtggaaaggatgacccacagatg

SEQ ID NO: 93168 - DNA, 20 bp, Artificial Sequence
  primer
tttctctgtctgtcccctgg

SEQ ID NO: 93169 - DNA, 37 bp, Artificial Sequence
  primer
gtaaaacgacggccagtgccttcttaaggatgcacgg

SEQ ID NO: 93170 - DNA, 21 bp, Artificial Sequence
  primer
catctccgcttcacagatgag

SEQ ID NO: 93171 - DNA, 21 bp, Artificial Sequence
  primer
tcaaactcatggactgaagcg

SEQ ID NO: 93172 - DNA, 37 bp, Artificial Sequence
  primer
gtaaaacgacggccagtcccaagcttctctaggctgg

SEQ ID NO: 93173 - DNA, 20 bp, Artificial Sequence
  primer
agggagctgaagcactgatg

SEQ ID NO: 93174 - DNA, 21 bp, Artificial Sequence
  primer
agccctcatctagcccaagtc

SEQ ID NO: 93175 - DNA, 20 bp, Artificial Sequence
  primer
ttggcccaaatctctgtgag

SEQ ID NO: 93176 - DNA, 21 bp, Artificial Sequence
  primer
gggatttctatcctggaaggc

SEQ ID NO: 93177 - DNA, 37 bp, Artificial Sequence
  primer
gtaaaacgacggccagtattggaagggatggtggaac

SEQ ID NO: 93178 - DNA, 21 bp, Artificial Sequence
  primer
gatgtcgtagctctgtctgcg

SEQ ID NO: 93179 - DNA, 21 bp, Artificial Sequence
  primer
gttgtgcccgtgtatctatgg

SEQ ID NO: 93180 - DNA, 38 bp, Artificial Sequence
  primer
gtaaaacgacggccagtcctgtgtccagagagggagac

SEQ ID NO: 93181 - DNA, 37 bp, Artificial Sequence
  primer
gtaaaacgacggccagtgaggcagagaggacggagag

SEQ ID NO: 93182 - DNA, 38 bp, Artificial Sequence
  primer
gtaaaacgacggccagtagagagagagaaagggcaggc

SEQ ID NO: 93183 - DNA, 38 bp, Artificial Sequence
  primer
gtaaaacgacggccagtcgagcttctccagtacaaggg

SEQ ID NO: 93184 - DNA, 21 bp, Artificial Sequence
  primer
ccctcagacataaggactcgc

SEQ ID NO: 93185 - DNA, 38 bp, Artificial Sequence
  primer
gtaaaacgacggccagtgaagtctgttgtgcgacaagg

SEQ ID NO: 93186 - DNA, 21 bp, Artificial Sequence
  primer
tttgtggacctaagatcgctg

SEQ ID NO: 93187 - DNA, 39 bp, Artificial Sequence
  primer
gtaaaacgacggccagtcacaagctagctcaagcctaca

SEQ ID NO: 93188 - DNA, 39 bp, Artificial Sequence
  primer
gtaaaacgacggccagtgcctgtgagactgacactaccc

SEQ ID NO: 93189 - DNA, 23 bp, Artificial Sequence
  primer
tgcacacagatcagtctatgcac

SEQ ID NO: 93190 - DNA, 37 bp, Artificial Sequence
  primer
gtaaaacgacggccagtttgacttggccgcttaattg

SEQ ID NO: 93191 - DNA, 21 bp, Artificial Sequence
  primer
gaacacctgctcctctgcttc

SEQ ID NO: 93192 - DNA, 37 bp, Artificial Sequence
  primer
gtaaaacgacggccagtgtggcctgcaaagtcaacac

SEQ ID NO: 93193 - DNA, 21 bp, Artificial Sequence
  primer
gtctccatgatgtccaggtcc

SEQ ID NO: 93194 - DNA, 21 bp, Artificial Sequence
  primer
gatcagggttcagattccacc

SEQ ID NO: 93195 - DNA, 21 bp, Artificial Sequence
  primer
tagtccagggtgtccttccac

SEQ ID NO: 93196 - DNA, 38 bp, Artificial Sequence
  primer
gtaaaacgacggccagttccattagagacatcgggagg

SEQ ID NO: 93197 - DNA, 20 bp, Artificial Sequence
  primer
cagtccaggacacatggtgg

SEQ ID NO: 93198 - DNA, 37 bp, Artificial Sequence
  primer
gtaaaacgacggccagtgcctctgttctcccagtcct

SEQ ID NO: 93199 - DNA, 21 bp, Artificial Sequence
  primer
gccagaattgccatttagctc

SEQ ID NO: 93200 - DNA, 21 bp, Artificial Sequence
  primer
ggtactaatgcacctggtggg

SEQ ID NO: 93201 - DNA, 21 bp, Artificial Sequence
  primer
actttgggattctgcatcagc

SEQ ID NO: 93202 - DNA, 20 bp, Artificial Sequence
  primer
gtcagcttcacagtttgcca

SEQ ID NO: 93203 - DNA, 21 bp, Artificial Sequence
  primer
gctgtcttggagcttgtgacc

SEQ ID NO: 93204 - DNA, 37 bp, Artificial Sequence
  primer
gtaaaacgacggccagtggacctaaagcgggtgtcag

SEQ ID NO: 93205 - DNA, 38 bp, Artificial Sequence
  primer
gtaaaacgacggccagttaaacatgataggagcgctgg

SEQ ID NO: 93206 - DNA, 20 bp, Artificial Sequence
  primer
gccctgactctgggaatagg

SEQ ID NO: 93207 - DNA, 21 bp, Artificial Sequence
  primer
gaagaaggagcccacagaatc

SEQ ID NO: 93208 - DNA, 38 bp, Artificial Sequence
  primer
gtaaaacgacggccagtaagagccctttcccttcagag

SEQ ID NO: 93209 - DNA, 21 bp, Artificial Sequence
  primer
cactaccttcctccaccttcc

SEQ ID NO: 93210 - DNA, 21 bp, Artificial Sequence
  primer
tcagtttgtttctttgtggca

SEQ ID NO: 93211 - DNA, 21 bp, Artificial Sequence
  primer
tgatgctatttcattggtggc

SEQ ID NO: 93212 - DNA, 39 bp, Artificial Sequence
  primer
gtaaaacgacggccagtcacacagcagcttattgtggta

SEQ ID NO: 93213 - DNA, 35 bp, Artificial Sequence
  primer
gtaaaacgacggccagttccactcagttggcctcg

SEQ ID NO: 93214 - DNA, 38 bp, Artificial Sequence
  primer
gtaaaacgacggccagttgcaatcagccctacactcag

SEQ ID NO: 93215 - DNA, 21 bp, Artificial Sequence
  primer
tctggagagacacactcctcc

SEQ ID NO: 93216 - DNA, 38 bp, Artificial Sequence
  primer
gtaaaacgacggccagtatggacattaacccggaacac

SEQ ID NO: 93217 - DNA, 23 bp, Artificial Sequence
  primer
gagtgggacaagtgagtaaaggg

SEQ ID NO: 93218 - DNA, 42 bp, Artificial Sequence
  primer
gtaaaacgacggccagtggtacaatcaagaattctgaacaca

SEQ ID NO: 93219 - DNA, 39 bp, Artificial Sequence
  primer
gtaaaacgacggccagttctgcttcttgaaacaggagat

SEQ ID NO: 93220 - DNA, 30 bp, Artificial Sequence
  primer
cacaataactacaagttactaagactgcaa

SEQ ID NO: 93221 - DNA, 39 bp, Artificial Sequence
  primer
gtaaaacgacggccagtaatatgccataatcaggccaag

SEQ ID NO: 93222 - DNA, 22 bp, Artificial Sequence
  primer
cacgtgactctgacctttctcc

SEQ ID NO: 93223 - DNA, 21 bp, Artificial Sequence
  primer
aagctggtgcccttaaagaaa

SEQ ID NO: 93224 - DNA, 22 bp, Artificial Sequence
  primer
gctgtctcctgtgtaccagtgc

SEQ ID NO: 93225 - DNA, 27 bp, Artificial Sequence
  primer
aaatatcgtttaagaacagaatttcaa

SEQ ID NO: 93226 - DNA, 41 bp, Artificial Sequence
  primer
gtaaaacgacggccagtgctctgactcttctcacatgcttt

SEQ ID NO: 93227 - DNA, 38 bp, Artificial Sequence
  primer
gtaaaacgacggccagtagtggactgctggactgcttt

SEQ ID NO: 93228 - DNA, 45 bp, Artificial Sequence
  primer
gtaaaacgacggccagtccgtgtccttaagatattctacaacttt

SEQ ID NO: 93229 - DNA, 41 bp, Artificial Sequence
  primer
gtaaaacgacggccagtcagagaaaggaagggcttagaaag

SEQ ID NO: 93230 - DNA, 26 bp, Artificial Sequence
  primer
tccctgtaattccataatagcttcag

SEQ ID NO: 93231 - DNA, 21 bp, Artificial Sequence
  primer
cagaactgtcctcttgccaca

SEQ ID NO: 93232 - DNA, 38 bp, Artificial Sequence
  primer
gtaaaacgacggccagtggtagctatgggctgagaagg

SEQ ID NO: 93233 - DNA, 21 bp, Artificial Sequence
  primer
cattcccagcaattgagtcag

SEQ ID NO: 93234 - DNA, 25 bp, Artificial Sequence
  primer
taatatggcaaggaattcttaggac

SEQ ID NO: 93235 - DNA, 21 bp, Artificial Sequence
  primer
acacaggcagatcccatcttt

SEQ ID NO: 93236 - DNA, 38 bp, Artificial Sequence
  primer
gtaaaacgacggccagttgcaataggcatctatctggc

SEQ ID NO: 93237 - DNA, 22 bp, Artificial Sequence
  primer
tcccagacaatttccagttgtt

SEQ ID NO: 93238 - DNA, 25 bp, Artificial Sequence
  primer
tgtatgtaacacgttgttaggtggg

SEQ ID NO: 93239 - DNA, 27 bp, Artificial Sequence
  primer
ttcctttgtgtttaataaggttaaagc

SEQ ID NO: 93240 - DNA, 38 bp, Artificial Sequence
  primer
gtaaaacgacggccagtcaagacccttgaattggcata

SEQ ID NO: 93241 - DNA, 44 bp, Artificial Sequence
  primer
gtaaaacgacggccagttatttcaatatataaatcagcagccac

SEQ ID NO: 93242 - DNA, 21 bp, Artificial Sequence
  primer
gagaaccctggatttctggtc

SEQ ID NO: 93243 - DNA, 21 bp, Artificial Sequence
  primer
gggaagccatggtctacattc

SEQ ID NO: 93244 - DNA, 43 bp, Artificial Sequence
  primer
gtaaaacgacggccagtactcattacattgtgttgcagaaata

SEQ ID NO: 93245 - DNA, 37 bp, Artificial Sequence
  primer
gtaaaacgacggccagtatccaggacacagcgaacac

SEQ ID NO: 93246 - DNA, 23 bp, Artificial Sequence
  primer
ttcaaccgattacaaggagattg

SEQ ID NO: 93247 - DNA, 21 bp, Artificial Sequence
  primer
agcgttacaagcccttgattc

SEQ ID NO: 93248 - DNA, 21 bp, Artificial Sequence
  primer
ccagcttgcaaaggtgaaata

SEQ ID NO: 93249 - DNA, 39 bp, Artificial Sequence
  primer
gtaaaacgacggccagtgcaagtagcagatggaatttgg

SEQ ID NO: 93250 - DNA, 21 bp, Artificial Sequence
  primer
gcaaactcgcattgggataac

SEQ ID NO: 93251 - DNA, 21 bp, Artificial Sequence
  primer
ccctaaatccgtgacagtgtg

SEQ ID NO: 93252 - DNA, 38 bp, Artificial Sequence
  primer
gtaaaacgacggccagtggataaacacggaggtcatgg

SEQ ID NO: 93253 - DNA, 21 bp, Artificial Sequence
  primer
ggatccttactcttccaagcc

SEQ ID NO: 93254 - DNA, 21 bp, Artificial Sequence
  primer
aggcaaatcgaagtacctggc

SEQ ID NO: 93255 - DNA, 20 bp, Artificial Sequence
  primer
actcctggcctcaagcaatc

SEQ ID NO: 93256 - DNA, 21 bp, Artificial Sequence
  primer
cacagaagtctgctctaggcg

SEQ ID NO: 93257 - DNA, 38 bp, Artificial Sequence
  primer
gtaaaacgacggccagtgtgccacatcttgctcaagtc

SEQ ID NO: 93258 - DNA, 38 bp, Artificial Sequence
  primer
gtaaaacgacggccagtctgagacagaagtcccatgcc

SEQ ID NO: 93259 - DNA, 21 bp, Artificial Sequence
  primer
agaattgcttgaactgggacc

SEQ ID NO: 93260 - DNA, 21 bp, Artificial Sequence
  primer
agaaattcaggagccaggagc

SEQ ID NO: 93261 - DNA, 20 bp, Artificial Sequence
  primer
acaaagctcaggaggatggg

SEQ ID NO: 93262 - DNA, 38 bp, Artificial Sequence
  primer
gtaaaacgacggccagtaggcgtcttggtgtcacatac

SEQ ID NO: 93263 - DNA, 21 bp, Artificial Sequence
  primer
aaatgagggaaatcctctggg

SEQ ID NO: 93264 - DNA, 22 bp, Artificial Sequence
  primer
gcctggataacagactgagacg

SEQ ID NO: 93265 - DNA, 21 bp, Artificial Sequence
  primer
taaatgagttgatgggtgcag

SEQ ID NO: 93266 - DNA, 38 bp, Artificial Sequence
  primer
gtaaaacgacggccagtgcaacagctttgtaccacagg

SEQ ID NO: 93267 - DNA, 39 bp, Artificial Sequence
  primer
gtaaaacgacggccagtcatgggatgcttacacatttcc

SEQ ID NO: 93268 - DNA, 38 bp, Artificial Sequence
  primer
gtaaaacgacggccagtcaatcctctggcttcaacctc

SEQ ID NO: 93269 - DNA, 22 bp, Artificial Sequence
  primer
tcacaggtgtgaaccactatgc

SEQ ID NO: 93270 - DNA, 38 bp, Artificial Sequence
  primer
gtaaaacgacggccagtattaactgctggacgtggtgg

SEQ ID NO: 93271 - DNA, 25 bp, Artificial Sequence
  primer
cagtacaatggccatattaatcaga

SEQ ID NO: 93272 - DNA, 38 bp, Artificial Sequence
  primer
gtaaaacgacggccagtttcgtggttcatggtttcttg

SEQ ID NO: 93273 - DNA, 21 bp, Artificial Sequence
  primer
ggaagcctttccagtttatgc

SEQ ID NO: 93274 - DNA, 21 bp, Artificial Sequence
  primer
agaagaggcactgttcggttc

SEQ ID NO: 93275 - DNA, 39 bp, Artificial Sequence
  primer
gtaaaacgacggccagtacctttagattcccgtgagttg

SEQ ID NO: 93276 - DNA, 38 bp, Artificial Sequence
  primer
gtaaaacgacggccagtatccatggcattctgagtttg

SEQ ID NO: 93277 - DNA, 39 bp, Artificial Sequence
  primer
gtaaaacgacggccagttggctaatattctggcatcctg

SEQ ID NO: 93278 - DNA, 21 bp, Artificial Sequence
  primer
atgtccatgttctcctctccg

SEQ ID NO: 93279 - DNA, 35 bp, Artificial Sequence
  primer
gtaaaacgacggccagttttcgggtgttggtgcag

SEQ ID NO: 93280 - DNA, 21 bp, Artificial Sequence
  primer
aaaggatttgacaggctctgc

SEQ ID NO: 93281 - DNA, 20 bp, Artificial Sequence
  primer
tcactggtactctccggtgc

SEQ ID NO: 93282 - DNA, 21 bp, Artificial Sequence
  primer
ttgtctttgttccaggtgtcg

SEQ ID NO: 93283 - DNA, 38 bp, Artificial Sequence
  primer
gtaaaacgacggccagtcatggcaatagtcaggtgtgg

SEQ ID NO: 93284 - DNA, 25 bp, Artificial Sequence
  primer
acagctatctgtctgttcattgttg

SEQ ID NO: 93285 - DNA, 21 bp, Artificial Sequence
  primer
tttcagaagttcctgccaatg

SEQ ID NO: 93286 - DNA, 21 bp, Artificial Sequence
  primer
gtcctctttatcctccagggc

SEQ ID NO: 93287 - DNA, 38 bp, Artificial Sequence
  primer
gtaaaacgacggccagttttgtccatgggcctaatagc

SEQ ID NO: 93288 - DNA, 21 bp, Artificial Sequence
  primer
gtttcctacagccagtgcttg

SEQ ID NO: 93289 - DNA, 21 bp, Artificial Sequence
  primer
acaaggagcagagagaggctg

SEQ ID NO: 93290 - DNA, 21 bp, Artificial Sequence
  primer
tttcacatatgggtgcagagg

SEQ ID NO: 93291 - DNA, 22 bp, Artificial Sequence
  primer
ttacaggatctggtgcttctcc

SEQ ID NO: 93292 - DNA, 38 bp, Artificial Sequence
  primer
gtaaaacgacggccagtgcggtagagaggtggtttcag

SEQ ID NO: 93293 - DNA, 38 bp, Artificial Sequence
  primer
gtaaaacgacggccagtatccaatgcctgaatctttgc

SEQ ID NO: 93294 - DNA, 21 bp, Artificial Sequence
  primer
tcaagacagagctcacctccc

SEQ ID NO: 93295 - DNA, 44 bp, Artificial Sequence
  primer
gtaaaacgacggccagttcactttaaattgctttgaagtctagc

SEQ ID NO: 93296 - DNA, 44 bp, Artificial Sequence
  primer
gtaaaacgacggccagtaacattcaaatatttcctgaactgaaa

SEQ ID NO: 93297 - DNA, 21 bp, Artificial Sequence
  primer
tgattctcttccctcaggcac

SEQ ID NO: 93298 - DNA, 20 bp, Artificial Sequence
  primer
cattccagtttgggcaacag

SEQ ID NO: 93299 - DNA, 38 bp, Artificial Sequence
  primer
gtaaaacgacggccagtacactgccaattaatgccatc

SEQ ID NO: 93300 - DNA, 26 bp, Artificial Sequence
  primer
gaccttggtaccacattacacttaaa

SEQ ID NO: 93301 - DNA, 21 bp, Artificial Sequence
  primer
caagatgtcaggatttgccac

SEQ ID NO: 93302 - DNA, 21 bp, Artificial Sequence
  primer
tacaggcgtgagccaatttac

SEQ ID NO: 93303 - DNA, 23 bp, Artificial Sequence
  primer
cctttgaagctcctcttcttcag

SEQ ID NO: 93304 - DNA, 38 bp, Artificial Sequence
  primer
gtaaaacgacggccagtctctggaggcaggaagtcatc

SEQ ID NO: 93305 - DNA, 39 bp, Artificial Sequence
  primer
gtaaaacgacggccagtgaaacaccaagtctacgcaatg

SEQ ID NO: 93306 - DNA, 37 bp, Artificial Sequence
  primer
gtaaaacgacggccagtcagcagtgctctcatcatgc

SEQ ID NO: 93307 - DNA, 39 bp, Artificial Sequence
  primer
gtaaaacgacggccagtagtagctagggctacaggaggg

SEQ ID NO: 93308 - DNA, 42 bp, Artificial Sequence
  primer
gtaaaacgacggccagtaatgcttagtggctcacttacaaag

SEQ ID NO: 93309 - DNA, 39 bp, Artificial Sequence
  primer
gtaaaacgacggccagtcccgcttacaccttaatctcag

SEQ ID NO: 93310 - DNA, 38 bp, Artificial Sequence
  primer
gtaaaacgacggccagtgatcgagaccatggtgaaacc

SEQ ID NO: 93311 - DNA, 36 bp, Artificial Sequence
  primer
gtaaaacgacggccagtaaggctgaacagcaatggg

SEQ ID NO: 93312 - DNA, 38 bp, Artificial Sequence
  primer
gtaaaacgacggccagtcaggagctccaggtacacgtc

SEQ ID NO: 93313 - DNA, 38 bp, Artificial Sequence
  primer
gtaaaacgacggccagtcccagatgaaggttaggttgg

SEQ ID NO: 93314 - DNA, 22 bp, Artificial Sequence
  primer
tgcttcctttgccactgtaaac

SEQ ID NO: 93315 - DNA, 21 bp, Artificial Sequence
  primer
agcagcagcatgctctttatc

SEQ ID NO: 93316 - DNA, 42 bp, Artificial Sequence
  primer
gtaaaacgacggccagttttcatttctctctcacacacaatg

SEQ ID NO: 93317 - DNA, 22 bp, Artificial Sequence
  primer
ggtatgaaacactgaggttggg

SEQ ID NO: 93318 - DNA, 24 bp, Artificial Sequence
  primer
aactacctggcagtcaattagtgg

SEQ ID NO: 93319 - DNA, 21 bp, Artificial Sequence
  primer
ggaccatctcatagagcaacg

SEQ ID NO: 93320 - DNA, 41 bp, Artificial Sequence
  primer
gtaaaacgacggccagtaaacaatggccagcattagtacat

SEQ ID NO: 93321 - DNA, 38 bp, Artificial Sequence
  primer
gtaaaacgacggccagtttccttagaatccgttggagg

SEQ ID NO: 93322 - DNA, 21 bp, Artificial Sequence
  primer
tgattacgaaccatgcaaagc

SEQ ID NO: 93323 - DNA, 19 bp, Artificial Sequence
  primer
ctgacctcctgatacgccc

SEQ ID NO: 93324 - DNA, 20 bp, Artificial Sequence
  primer
gactccagggaaactgcctc

SEQ ID NO: 93325 - DNA, 38 bp, Artificial Sequence
  primer
gtaaaacgacggccagttgcatgagatgaagctggcta

SEQ ID NO: 93326 - DNA, 38 bp, Artificial Sequence
  primer
gtaaaacgacggccagtatccatgtcttccttccctcc

SEQ ID NO: 93327 - DNA, 39 bp, Artificial Sequence
  primer
gtaaaacgacggccagtttgcacttaggagctcaagacc

SEQ ID NO: 93328 - DNA, 38 bp, Artificial Sequence
  primer
gtaaaacgacggccagtgcccacactgctaaagacagg

SEQ ID NO: 93329 - DNA, 38 bp, Artificial Sequence
  primer
gtaaaacgacggccagtcacaggcagaaacaatttccc

SEQ ID NO: 93330 - DNA, 41 bp, Artificial Sequence
  primer
gtaaaacgacggccagttgcattgtagctgtagtagccttg

SEQ ID NO: 93331 - DNA, 39 bp, Artificial Sequence
  primer
gtaaaacgacggccagtaaacattatgggatggaaaggg

SEQ ID NO: 93332 - DNA, 21 bp, Artificial Sequence
  primer
tgtttggctcgtaaaggaagg

SEQ ID NO: 93333 - DNA, 43 bp, Artificial Sequence
  primer
gtaaaacgacggccagttggatagagaacactgaagactgaat

SEQ ID NO: 93334 - DNA, 22 bp, Artificial Sequence
  primer
catgtgcgcctatgtcatttag

SEQ ID NO: 93335 - DNA, 22 bp, Artificial Sequence
  primer
acaacagagaagcctagaaggg

SEQ ID NO: 93336 - DNA, 22 bp, Artificial Sequence
  primer
gtgacctgtgactttctgatgg

SEQ ID NO: 93337 - DNA, 38 bp, Artificial Sequence
  primer
gtaaaacgacggccagtatttcatcagagcagccttgc

SEQ ID NO: 93338 - DNA, 38 bp, Artificial Sequence
  primer
gtaaaacgacggccagtacaaggccgataacaaagagg

SEQ ID NO: 93339 - DNA, 21 bp, Artificial Sequence
  primer
aggctgatcaattccgtgttg

SEQ ID NO: 93340 - DNA, 22 bp, Artificial Sequence
  primer
tgaaatcagactgagaccctgg

SEQ ID NO: 93341 - DNA, 37 bp, Artificial Sequence
  primer
gtaaaacgacggccagtaccatgcacgggttagactg

SEQ ID NO: 93342 - DNA, 21 bp, Artificial Sequence
  primer
ccggctctacctgatgatgtc

SEQ ID NO: 93343 - DNA, 35 bp, Artificial Sequence
  primer
gtaaaacgacggccagtcaagccagaagctggtgc

SEQ ID NO: 93344 - DNA, 21 bp, Artificial Sequence
  primer
gctgtctggctgtaggtgttc

SEQ ID NO: 93345 - DNA, 38 bp, Artificial Sequence
  primer
gtaaaacgacggccagttgttgcaataatccttggtcg

SEQ ID NO: 93346 - DNA, 18 bp, Artificial Sequence
  primer
agtctcctgcccagtgcc

SEQ ID NO: 93347 - DNA, 38 bp, Artificial Sequence
  primer
gtaaaacgacggccagtaaaggaataggtgtgggaacg

SEQ ID NO: 93348 - DNA, 38 bp, Artificial Sequence
  primer
gtaaaacgacggccagtagcacaagggagcaagatgag

SEQ ID NO: 93349 - DNA, 21 bp, Artificial Sequence
  primer
agagacggacttctgggaaag

SEQ ID NO: 93350 - DNA, 20 bp, Artificial Sequence
  primer
atgctggctccagcttcttg

SEQ ID NO: 93351 - DNA, 21 bp, Artificial Sequence
  primer
aatgacgacacccgtacacac

SEQ ID NO: 93352 - DNA, 19 bp, Artificial Sequence
  primer
ggaggcttgtcagctaggg

SEQ ID NO: 93353 - DNA, 19 bp, Artificial Sequence
  primer
cagggcatcctccactctc

SEQ ID NO: 93354 - DNA, 38 bp, Artificial Sequence
  primer
gtaaaacgacggccagtgagcatcagcttcttctggtg

SEQ ID NO: 93355 - DNA, 19 bp, Artificial Sequence
  primer
ctggagggcttctcagtgg

SEQ ID NO: 93356 - DNA, 20 bp, Artificial Sequence
  primer
gaagtggctagtgcctggtg

SEQ ID NO: 93357 - DNA, 18 bp, Artificial Sequence
  primer
gcagcacgtaggcaaagc

SEQ ID NO: 93358 - DNA, 37 bp, Artificial Sequence
  primer
gtaaaacgacggccagtctgcggttgacgttcttgtc

SEQ ID NO: 93359 - DNA, 18 bp, Artificial Sequence
  primer
caggccatcctcaggctc

SEQ ID NO: 93360 - DNA, 20 bp, Artificial Sequence
  primer
cgatggcctctttgtgtttc

SEQ ID NO: 93361 - DNA, 38 bp, Artificial Sequence
  primer
gtaaaacgacggccagtttatggtacacggacagtggc

SEQ ID NO: 93362 - DNA, 21 bp, Artificial Sequence
  primer
agaccaccgagtaaggaggtg

SEQ ID NO: 93363 - DNA, 21 bp, Artificial Sequence
  primer
tcagaccaccgagtaaggagg

SEQ ID NO: 93364 - DNA, 21 bp, Artificial Sequence
  primer
ttgtctcctccagtttctgcc

SEQ ID NO: 93365 - DNA, 35 bp, Artificial Sequence
  primer
gtaaaacgacggccagtaggatgctgccagtgctc

SEQ ID NO: 93366 - DNA, 18 bp, Artificial Sequence
  primer
gccggagttgtgcttctg

SEQ ID NO: 93367 - DNA, 21 bp, Artificial Sequence
  primer
acaagacagtccaccctcctc

SEQ ID NO: 93368 - DNA, 38 bp, Artificial Sequence
  primer
gtaaaacgacggccagtctcaggatctttccctccagc

SEQ ID NO: 93369 - DNA, 38 bp, Artificial Sequence
  primer
gtaaaacgacggccagtaggctgtgaagagtaaacggg

SEQ ID NO: 93370 - DNA, 38 bp, Artificial Sequence
  primer
gtaaaacgacggccagtgttggactgatgctggaggag

SEQ ID NO: 93371 - DNA, 21 bp, Artificial Sequence
  primer
gccacacataagtggctgttc

SEQ ID NO: 93372 - DNA, 21 bp, Artificial Sequence
  primer
gatctcgatcccagctctcag

SEQ ID NO: 93373 - DNA, 38 bp, Artificial Sequence
  primer
gtaaaacgacggccagtggaagtcaggcctctttcctg

SEQ ID NO: 93374 - DNA, 21 bp, Artificial Sequence
  primer
aagggtccttagggcatcttc

SEQ ID NO: 93375 - DNA, 22 bp, Artificial Sequence
  primer
cagaacgtggtaacatagcagg

SEQ ID NO: 93376 - DNA, 38 bp, Artificial Sequence
  primer
gtaaaacgacggccagtagtcccaagtgtcgctctgac

SEQ ID NO: 93377 - DNA, 37 bp, Artificial Sequence
  primer
gtaaaacgacggccagtaggagccaactcagcatttg

SEQ ID NO: 93378 - DNA, 19 bp, Artificial Sequence
  primer
aaaggtggcaggaggaagg

SEQ ID NO: 93379 - DNA, 21 bp, Artificial Sequence
  primer
acagaggctcttgcctctacc

SEQ ID NO: 93380 - DNA, 21 bp, Artificial Sequence
  primer
acacaaagtctggccatcagg

SEQ ID NO: 93381 - DNA, 38 bp, Artificial Sequence
  primer
gtaaaacgacggccagtgtcctcagaacaactcccagc

SEQ ID NO: 93382 - DNA, 37 bp, Artificial Sequence
  primer
gtaaaacgacggccagtacggaagtggcaaggttagc

SEQ ID NO: 93383 - DNA, 21 bp, Artificial Sequence
  primer
gtagctctgggcttagttcgc

SEQ ID NO: 93384 - DNA, 18 bp, Artificial Sequence
  primer
gtgccctctgggaggttc

SEQ ID NO: 93385 - DNA, 18 bp, Artificial Sequence
  primer
ggcttaggctgtgggacc

SEQ ID NO: 93386 - DNA, 35 bp, Artificial Sequence
  primer
gtaaaacgacggccagtagggcaaaggactggctg

SEQ ID NO: 93387 - DNA, 38 bp, Artificial Sequence
  primer
gtaaaacgacggccagtagcaggttcactcagtgttcg

SEQ ID NO: 93388 - DNA, 21 bp, Artificial Sequence
  primer
ggtctgcagtggctctctctc

SEQ ID NO: 93389 - DNA, 38 bp, Artificial Sequence
  primer
gtaaaacgacggccagtcgactagctgctgagctttcc

SEQ ID NO: 93390 - DNA, 37 bp, Artificial Sequence
  primer
gtaaaacgacggccagtaaaggttggcttgggacttg

SEQ ID NO: 93391 - DNA, 21 bp, Artificial Sequence
  primer
tggcctcttatcccgttagtg

SEQ ID NO: 93392 - DNA, 21 bp, Artificial Sequence
  primer
gtcaggttctaaggtgggctg

SEQ ID NO: 93393 - DNA, 21 bp, Artificial Sequence
  primer
ctcagttcctttctgggcttg

SEQ ID NO: 93394 - DNA, 21 bp, Artificial Sequence
  primer
ggccctgaagccagaaataag

SEQ ID NO: 93395 - DNA, 21 bp, Artificial Sequence
  primer
agaactgctcaatgaggttgg

SEQ ID NO: 93396 - DNA, 23 bp, Artificial Sequence
  primer
ggaccatgtagtatccagcactc

SEQ ID NO: 93397 - DNA, 22 bp, Artificial Sequence
  primer
ctaccaaccagccattcaattc

SEQ ID NO: 93398 - DNA, 21 bp, Artificial Sequence
  primer
ttggaacaaagcttgagttgg

SEQ ID NO: 93399 - DNA, 21 bp, Artificial Sequence
  primer
ctcctgggtttgtccactctc

SEQ ID NO: 93400 - DNA, 38 bp, Artificial Sequence
  primer
gtaaaacgacggccagtctttcctcaaccttcccacac

SEQ ID NO: 93401 - DNA, 38 bp, Artificial Sequence
  primer
gtaaaacgacggccagtctccatagcccatttacccac

SEQ ID NO: 93402 - DNA, 37 bp, Artificial Sequence
  primer
gtaaaacgacggccagtgtggagaccaccgattcctg

SEQ ID NO: 93403 - DNA, 35 bp, Artificial Sequence
  primer
gtaaaacgacggccagtctttcaaagcccaatggc

SEQ ID NO: 93404 - DNA, 38 bp, Artificial Sequence
  primer
gtaaaacgacggccagtaaaccctttccagcatctttc

SEQ ID NO: 93405 - DNA, 22 bp, Artificial Sequence
  primer
tgggtgacagagtgagtgagac

SEQ ID NO: 93406 - DNA, 39 bp, Artificial Sequence
  primer
gtaaaacgacggccagtacaataaatggtacaaaccggg

SEQ ID NO: 93407 - DNA, 21 bp, Artificial Sequence
  primer
cattcagagcagaaaccaccc

SEQ ID NO: 93408 - DNA, 20 bp, Artificial Sequence
  primer
aaatcatcgaaggctggacc

SEQ ID NO: 93409 - DNA, 20 bp, Artificial Sequence
  primer
gttgtctcgtgccaatccag

SEQ ID NO: 93410 - DNA, 21 bp, Artificial Sequence
  primer
tcacccttaccaaaggtgttg

SEQ ID NO: 93411 - DNA, 21 bp, Artificial Sequence
  primer
taaagggaggtttccgtcttg

SEQ ID NO: 93412 - DNA, 20 bp, Artificial Sequence
  primer
gttgtctcgtgccaatccag

SEQ ID NO: 93413 - DNA, 38 bp, Artificial Sequence
  primer
gtaaaacgacggccagtttcagtccctccactctttcc

SEQ ID NO: 93414 - DNA, 38 bp, Artificial Sequence
  primer
gtaaaacgacggccagtgctggagtgagaggaagaacc

SEQ ID NO: 93415 - DNA, 20 bp, Artificial Sequence
  primer
gcagtgagttgagattccgc

SEQ ID NO: 93416 - DNA, 38 bp, Artificial Sequence
  primer
gtaaaacgacggccagtgaggttcaggagttgggagtg

SEQ ID NO: 93417 - DNA, 38 bp, Artificial Sequence
  primer
gtaaaacgacggccagtggaaagttgttggaaagtggg

SEQ ID NO: 93418 - DNA, 38 bp, Artificial Sequence
  primer
gtaaaacgacggccagtaaagaaactgggtgccatttg

SEQ ID NO: 93419 - DNA, 40 bp, Artificial Sequence
  primer
gtaaaacgacggccagtaaaggaagaaagatacgacaccc

SEQ ID NO: 93420 - DNA, 37 bp, Artificial Sequence
  primer
gtaaaacgacggccagtatatggtggtgcacggagag

SEQ ID NO: 93421 - DNA, 38 bp, Artificial Sequence
  primer
gtaaaacgacggccagtcaaagtacctttgaggcaggc

SEQ ID NO: 93422 - DNA, 35 bp, Artificial Sequence
  primer
gtaaaacgacggccagtacaaggccaagaggtccg

SEQ ID NO: 93423 - DNA, 23 bp, Artificial Sequence
  primer
aagaaagatacgacaccctttcc

SEQ ID NO: 93424 - DNA, 38 bp, Artificial Sequence
  primer
gtaaaacgacggccagtagaccttagggaagtggtccg

SEQ ID NO: 93425 - DNA, 18 bp, Artificial Sequence
  primer
ttacaggcacccaccacc

SEQ ID NO: 93426 - DNA, 39 bp, Artificial Sequence
  primer
gtaaaacgacggccagttgcaaactaagttcaggttccc

SEQ ID NO: 93427 - DNA, 38 bp, Artificial Sequence
  primer
gtaaaacgacggccagtacaaacgatgtctctggtccc

SEQ ID NO: 93428 - DNA, 38 bp, Artificial Sequence
  primer
gtaaaacgacggccagtatcacttgacagacagcaggc

SEQ ID NO: 93429 - DNA, 38 bp, Artificial Sequence
  primer
gtaaaacgacggccagtagggatccaatagcacctgag

SEQ ID NO: 93430 - DNA, 22 bp, Artificial Sequence
  primer
ctttccaagtgccaatatgatg

SEQ ID NO: 93431 - DNA, 21 bp, Artificial Sequence
  primer
gaaccaataggcccaagtctg

SEQ ID NO: 93432 - DNA, 38 bp, Artificial Sequence
  primer
gtaaaacgacggccagtcgtgcatcctgaagatcaaag

SEQ ID NO: 93433 - DNA, 21 bp, Artificial Sequence
  primer
ctctggcctgagagagagacc

SEQ ID NO: 93434 - DNA, 21 bp, Artificial Sequence
  primer
ctgtaggtcctgcccaatctc

SEQ ID NO: 93435 - DNA, 23 bp, Artificial Sequence
  primer
aggtcatcttaacctaacctggg

SEQ ID NO: 93436 - DNA, 18 bp, Artificial Sequence
  primer
gggcgacagagcaagact

SEQ ID NO: 93437 - DNA, 43 bp, Artificial Sequence
  primer
gtaaaacgacggccagtaaatcttgacagtctctgaaacacac

SEQ ID NO: 93438 - DNA, 38 bp, Artificial Sequence
  primer
gtaaaacgacggccagtccctctgcagcatgagagtag

SEQ ID NO: 93439 - DNA, 21 bp, Artificial Sequence
  primer
accaggtcccatgattcaaac

SEQ ID NO: 93440 - DNA, 21 bp, Artificial Sequence
  primer
agacactgcttaggccttgga

SEQ ID NO: 93441 - DNA, 22 bp, Artificial Sequence
  primer
tcatggattgagaaaggattgg

SEQ ID NO: 93442 - DNA, 23 bp, Artificial Sequence
  primer
ccagaattgaggatatttggagg

SEQ ID NO: 93443 - DNA, 25 bp, Artificial Sequence
  primer
cactggatgaggtttaagaatgttg

SEQ ID NO: 93444 - DNA, 21 bp, Artificial Sequence
  primer
tgtggagagcacacaacattc

SEQ ID NO: 93445 - DNA, 39 bp, Artificial Sequence
  primer
gtaaaacgacggccagtcaactgaatgacagaaactggg

SEQ ID NO: 93446 - DNA, 22 bp, Artificial Sequence
  primer
aacaccaatttgaccatccaag

SEQ ID NO: 93447 - DNA, 39 bp, Artificial Sequence
  primer
gtaaaacgacggccagtgatcacagaagtcactgcatgg

SEQ ID NO: 93448 - DNA, 38 bp, Artificial Sequence
  primer
gtaaaacgacggccagtcacagataacactgcatgggc

SEQ ID NO: 93449 - DNA, 35 bp, Artificial Sequence
  primer
gtaaaacgacggccagtggcaacagagcaagaccc

SEQ ID NO: 93450 - DNA, 36 bp, Artificial Sequence
  primer
gtaaaacgacggccagtcacacgaacccagaggttg

SEQ ID NO: 93451 - DNA, 23 bp, Artificial Sequence
  primer
tgtactttatttgcactggatgg

SEQ ID NO: 93452 - DNA, 38 bp, Artificial Sequence
  primer
gtaaaacgacggccagttcagctcattgttgcataggg

SEQ ID NO: 93453 - DNA, 39 bp, Artificial Sequence
  primer
gtaaaacgacggccagttgacagaaatcaggtgccatac

SEQ ID NO: 93454 - DNA, 38 bp, Artificial Sequence
  primer
gtaaaacgacggccagtggtcattgaacttcaccaccg

SEQ ID NO: 93455 - DNA, 38 bp, Artificial Sequence
  primer
gtaaaacgacggccagtgtccactaaccctcgtttccc

SEQ ID NO: 93456 - DNA, 37 bp, Artificial Sequence
  primer
gtaaaacgacggccagtctagctcccaggacccattc

SEQ ID NO: 93457 - DNA, 21 bp, Artificial Sequence
  primer
taagtgatcctcccaccttgg

SEQ ID NO: 93458 - DNA, 21 bp, Artificial Sequence
  primer
aacggaaacacagcagcatac

SEQ ID NO: 93459 - DNA, 38 bp, Artificial Sequence
  primer
gtaaaacgacggccagtaaacggcctgtccaattactg

SEQ ID NO: 93460 - DNA, 21 bp, Artificial Sequence
  primer
gacccaaaccaatcaaaggtg

SEQ ID NO: 93461 - DNA, 35 bp, Artificial Sequence
  primer
gtaaaacgacggccagtatccgcccaccttggact

SEQ ID NO: 93462 - DNA, 22 bp, Artificial Sequence
  primer
catgtacttacgtgacccagcc

SEQ ID NO: 93463 - DNA, 37 bp, Artificial Sequence
  primer
gtaaaacgacggccagtagcatgaacctccttccctg

SEQ ID NO: 93464 - DNA, 21 bp, Artificial Sequence
  primer
tgccacagtaggtaggtgcag

SEQ ID NO: 93465 - DNA, 37 bp, Artificial Sequence
  primer
gtaaaacgacggccagtaagtgatcctcccaccttgg

SEQ ID NO: 93466 - DNA, 19 bp, Artificial Sequence
  primer
cgtaaaggctgggaaatgg

SEQ ID NO: 93467 - DNA, 26 bp, Artificial Sequence
  primer
ggagaatttctgaatatttcaagagc

SEQ ID NO: 93468 - DNA, 22 bp, Artificial Sequence
  primer
cctgaatgaagaagagtttggg

SEQ ID NO: 93469 - DNA, 37 bp, Artificial Sequence
  primer
gtaaaacgacggccagtctgaggtgggtggatcactt

SEQ ID NO: 93470 - DNA, 37 bp, Artificial Sequence
  primer
gtaaaacgacggccagttccttggtgagcatggagac

SEQ ID NO: 93471 - DNA, 18 bp, Artificial Sequence
  primer
tcccaggcactaggcagg

SEQ ID NO: 93472 - DNA, 38 bp, Artificial Sequence
  primer
gtaaaacgacggccagttctttggtctcagaaatgccc

SEQ ID NO: 93473 - DNA, 37 bp, Artificial Sequence
  primer
gtaaaacgacggccagttcaaggctgctgcttctctc

SEQ ID NO: 93474 - DNA, 38 bp, Artificial Sequence
  primer
gtaaaacgacggccagtgatgtgcatgtggtagaaggc

SEQ ID NO: 93475 - DNA, 22 bp, Artificial Sequence
  primer
ccttgtcagtttatctggcagc

SEQ ID NO: 93476 - DNA, 23 bp, Artificial Sequence
  primer
gaatgttctttacctccacaggg

SEQ ID NO: 93477 - DNA, 21 bp, Artificial Sequence
  primer
ctctggcaaagtgactggatg

SEQ ID NO: 93478 - DNA, 38 bp, Artificial Sequence
  primer
gtaaaacgacggccagttaactgacctgggaaatgcag

SEQ ID NO: 93479 - DNA, 19 bp, Artificial Sequence
  primer
gaggtgggtggatcacgag

SEQ ID NO: 93480 - DNA, 23 bp, Artificial Sequence
  primer
gaatgttctttacctccacaggg

SEQ ID NO: 93481 - DNA, 23 bp, Artificial Sequence
  primer
gaatgttctttacctccacaggg

SEQ ID NO: 93482 - DNA, 20 bp, Artificial Sequence
  primer
agaggatcccttgagctccc

SEQ ID NO: 93483 - DNA, 22 bp, Artificial Sequence
  primer
tgggttctggaagttactgtgg

SEQ ID NO: 93484 - DNA, 39 bp, Artificial Sequence
  primer
gtaaaacgacggccagtagatgcttaaattgggtcaagc

SEQ ID NO: 93485 - DNA, 20 bp, Artificial Sequence
  primer
gctaccttgctaaggctggg

SEQ ID NO: 93486 - DNA, 18 bp, Artificial Sequence
  primer
ggtggaggctgcattgag

SEQ ID NO: 93487 - DNA, 22 bp, Artificial Sequence
  primer
accaaacaccattagtgcagtg

SEQ ID NO: 93488 - DNA, 22 bp, Artificial Sequence
  primer
caggatgtccttgtagcctttg

SEQ ID NO: 93489 - DNA, 21 bp, Artificial Sequence
  primer
tggaatgaggaagtgatgctc

SEQ ID NO: 93490 - DNA, 18 bp, Artificial Sequence
  primer
ttcccactgatgcatggc

SEQ ID NO: 93491 - DNA, 41 bp, Artificial Sequence
  primer
gtaaaacgacggccagttcagtctttggttcattctgtttc

SEQ ID NO: 93492 - DNA, 39 bp, Artificial Sequence
  primer
gtaaaacgacggccagtgattatcctgggaaacaggttg

SEQ ID NO: 93493 - DNA, 20 bp, Artificial Sequence
  primer
tctgagataccgatcctggg

SEQ ID NO: 93494 - DNA, 38 bp, Artificial Sequence
  primer
gtaaaacgacggccagtactgttgttgaaagtgccacc

SEQ ID NO: 93495 - DNA, 21 bp, Artificial Sequence
  primer
cttgaggtgggctttcatttc

SEQ ID NO: 93496 - DNA, 21 bp, Artificial Sequence
  primer
tacactggaacttgaggtggg

SEQ ID NO: 93497 - DNA, 41 bp, Artificial Sequence
  primer
gtaaaacgacggccagtcatgtgcacttctagataacaggg

SEQ ID NO: 93498 - DNA, 21 bp, Artificial Sequence
  primer
cgtcgtgggatagtctttgac

SEQ ID NO: 93499 - DNA, 42 bp, Artificial Sequence
  primer
gtaaaacgacggccagtaagagggtacagcaataattggaac

SEQ ID NO: 93500 - DNA, 43 bp, Artificial Sequence
  primer
gtaaaacgacggccagtgctgactcaataattctgtgaaattg

SEQ ID NO: 93501 - DNA, 24 bp, Artificial Sequence
  primer
tgcaaacaaataatcaagttggtc

SEQ ID NO: 93502 - DNA, 23 bp, Artificial Sequence
  primer
ttctttcagcaattctctgttgg

SEQ ID NO: 93503 - DNA, 22 bp, Artificial Sequence
  primer
tggacagtgtacttccaaggag

SEQ ID NO: 93504 - DNA, 23 bp, Artificial Sequence
  primer
aagatcagaaccttgcaacaaac

SEQ ID NO: 93505 - DNA, 21 bp, Artificial Sequence
  primer
atctgacttcagaggcgatgg

SEQ ID NO: 93506 - DNA, 38 bp, Artificial Sequence
  primer
gtaaaacgacggccagttctggtccttcatcagcttcc

SEQ ID NO: 93507 - DNA, 20 bp, Artificial Sequence
  primer
aattgcctccagaacatccc

SEQ ID NO: 93508 - DNA, 38 bp, Artificial Sequence
  primer
gtaaaacgacggccagtggagattctgtggtcaagtcg

SEQ ID NO: 93509 - DNA, 38 bp, Artificial Sequence
  primer
gtaaaacgacggccagtggttgcctttaatgatgaggg

SEQ ID NO: 93510 - DNA, 25 bp, Artificial Sequence
  primer
cagccagacagattagatttctgag

SEQ ID NO: 93511 - DNA, 38 bp, Artificial Sequence
  primer
gtaaaacgacggccagtgctgtgctgggattatagctg

SEQ ID NO: 93512 - DNA, 21 bp, Artificial Sequence
  primer
caagctgaacatgctgatgtg

SEQ ID NO: 93513 - DNA, 21 bp, Artificial Sequence
  primer
gtgtttgggattctttggctc

SEQ ID NO: 93514 - DNA, 21 bp, Artificial Sequence
  primer
aattctgaatctcagcccacc

SEQ ID NO: 93515 - DNA, 38 bp, Artificial Sequence
  primer
gtaaaacgacggccagtgaagcgcagagatgaacaatc

SEQ ID NO: 93516 - DNA, 21 bp, Artificial Sequence
  primer
atggtcctccagatgtaaggg

SEQ ID NO: 93517 - DNA, 19 bp, Artificial Sequence
  primer
ggtgcagccaactcctcag

SEQ ID NO: 93518 - DNA, 21 bp, Artificial Sequence
  primer
ctctgactgcctggagagacc

SEQ ID NO: 93519 - DNA, 19 bp, Artificial Sequence
  primer
ctcaccacacagctgcctc

SEQ ID NO: 93520 - DNA, 21 bp, Artificial Sequence
  primer
ggctcagaggcaggagtctac

SEQ ID NO: 93521 - DNA, 38 bp, Artificial Sequence
  primer
gtaaaacgacggccagtccttgagttgcaggaaagtcc

SEQ ID NO: 93522 - DNA, 22 bp, Artificial Sequence
  primer
ccatcctcaaagagctacatgg

SEQ ID NO: 93523 - DNA, 21 bp, Artificial Sequence
  primer
atctgagagattcccaagccc

SEQ ID NO: 93524 - DNA, 21 bp, Artificial Sequence
  primer
gcgtgtggtgtatgtatggtg

SEQ ID NO: 93525 - DNA, 38 bp, Artificial Sequence
  primer
gtaaaacgacggccagttgcagaggtagaggctgagac

SEQ ID NO: 93526 - DNA, 38 bp, Artificial Sequence
  primer
gtaaaacgacggccagtcgattctgggagaggaaactg

SEQ ID NO: 93527 - DNA, 20 bp, Artificial Sequence
  primer
tcatctccaggcaagattgg

SEQ ID NO: 93528 - DNA, 20 bp, Artificial Sequence
  primer
ctgaggagcagtagggtggg

SEQ ID NO: 93529 - DNA, 21 bp, Artificial Sequence
  primer
gtctagccctaggctgtttgc

SEQ ID NO: 93530 - DNA, 38 bp, Artificial Sequence
  primer
gtaaaacgacggccagtcctctgaaacaaagccctcac

SEQ ID NO: 93531 - DNA, 38 bp, Artificial Sequence
  primer
gtaaaacgacggccagtgggccacattcagatcctaag

SEQ ID NO: 93532 - DNA, 20 bp, Artificial Sequence
  primer
ctggaggaactcagggaagg

SEQ ID NO: 93533 - DNA, 37 bp, Artificial Sequence
  primer
gtaaaacgacggccagtcatcctcgttcccatatccc

SEQ ID NO: 93534 - DNA, 21 bp, Artificial Sequence
  primer
gtgaaaccattcaattcaggc

SEQ ID NO: 93535 - DNA, 21 bp, Artificial Sequence
  primer
gtcacagatgaggccaggttc

SEQ ID NO: 93536 - DNA, 38 bp, Artificial Sequence
  primer
gtaaaacgacggccagtaagaggtgctgaagacccatc

SEQ ID NO: 93537 - DNA, 38 bp, Artificial Sequence
  primer
gtaaaacgacggccagtagggaggatggttaatgttgc

SEQ ID NO: 93538 - DNA, 39 bp, Artificial Sequence
  primer
gtaaaacgacggccagtaatgttagcacagagaggctcc

SEQ ID NO: 93539 - DNA, 38 bp, Artificial Sequence
  primer
gtaaaacgacggccagtgattacagttctgagccgtcg

SEQ ID NO: 93540 - DNA, 21 bp, Artificial Sequence
  primer
catacttaatgggcgaccacc

SEQ ID NO: 93541 - DNA, 38 bp, Artificial Sequence
  primer
gtaaaacgacggccagtcactgggtttcttcaagtgcc

SEQ ID NO: 93542 - DNA, 38 bp, Artificial Sequence
  primer
gtaaaacgacggccagtcaagtttccttgagcaggacc

SEQ ID NO: 93543 - DNA, 19 bp, Artificial Sequence
  primer
tgccaccttgtgctgtctg

SEQ ID NO: 93544 - DNA, 21 bp, Artificial Sequence
  primer
accaccaggtgctttaacagg

SEQ ID NO: 93545 - DNA, 21 bp, Artificial Sequence
  primer
taaaccgtatggctattgggc

SEQ ID NO: 93546 - DNA, 38 bp, Artificial Sequence
  primer
gtaaaacgacggccagtcggacaatctccttgatgagg

SEQ ID NO: 93547 - DNA, 38 bp, Artificial Sequence
  primer
gtaaaacgacggccagtgctgtcgagctgttgctaaac

SEQ ID NO: 93548 - DNA, 38 bp, Artificial Sequence
  primer
gtaaaacgacggccagtcacgcctcaactttcttgatg

SEQ ID NO: 93549 - DNA, 40 bp, Artificial Sequence
  primer
gtaaaacgacggccagttgaatccaaagctccatttagtg

SEQ ID NO: 93550 - DNA, 21 bp, Artificial Sequence
  primer
ccagagagttcagggaagtgg

SEQ ID NO: 93551 - DNA, 21 bp, Artificial Sequence
  primer
gaaactgtgcaaagcaccatc

SEQ ID NO: 93552 - DNA, 21 bp, Artificial Sequence
  primer
gatcttggcctcaaacaccag

SEQ ID NO: 93553 - DNA, 21 bp, Artificial Sequence
  primer
ggaatgaaggagatccagacg

SEQ ID NO: 93554 - DNA, 37 bp, Artificial Sequence
  primer
gtaaaacgacggccagtcaccttgaaagcgtgagctg

SEQ ID NO: 93555 - DNA, 21 bp, Artificial Sequence
  primer
gaggctcatcaaagctcagtg

SEQ ID NO: 93556 - DNA, 38 bp, Artificial Sequence
  primer
gtaaaacgacggccagtaggtccttgcagacctgtttc

SEQ ID NO: 93557 - DNA, 38 bp, Artificial Sequence
  primer
gtaaaacgacggccagtcctccaccactgatgacaaag

SEQ ID NO: 93558 - DNA, 38 bp, Artificial Sequence
  primer
gtaaaacgacggccagtggaacatgggtcaattcactg

SEQ ID NO: 93559 - DNA, 20 bp, Artificial Sequence
  primer
ggtgacagagcaagaccctg

SEQ ID NO: 93560 - DNA, 35 bp, Artificial Sequence
  primer
gtaaaacgacggccagtctgtgccaaggcaggaag

SEQ ID NO: 93561 - DNA, 21 bp, Artificial Sequence
  primer
actgctattgccacaggatgg

SEQ ID NO: 93562 - DNA, 38 bp, Artificial Sequence
  primer
gtaaaacgacggccagtcacacctcagtgtgaacaggg

SEQ ID NO: 93563 - DNA, 25 bp, Artificial Sequence
  primer
tgttcactctctatcccttaaatgc

SEQ ID NO: 93564 - DNA, 40 bp, Artificial Sequence
  primer
gtaaaacgacggccagttgcccacaagaaatcagattatg

SEQ ID NO: 93565 - DNA, 38 bp, Artificial Sequence
  primer
gtaaaacgacggccagtacttcaagaaatctgcctgcc

SEQ ID NO: 93566 - DNA, 38 bp, Artificial Sequence
  primer
gtaaaacgacggccagtggcctcaaagatacctttccc

SEQ ID NO: 93567 - DNA, 21 bp, Artificial Sequence
  primer
agaattgatagccctgttccc

SEQ ID NO: 93568 - DNA, 21 bp, Artificial Sequence
  primer
cagcacttctgactgtccctg

SEQ ID NO: 93569 - DNA, 21 bp, Artificial Sequence
  primer
tgtgctactggcagtttcctg

SEQ ID NO: 93570 - DNA, 38 bp, Artificial Sequence
  primer
gtaaaacgacggccagttagcaagggagattcgtgttc

SEQ ID NO: 93571 - DNA, 38 bp, Artificial Sequence
  primer
gtaaaacgacggccagtagggacaaaccatccctcaag

SEQ ID NO: 93572 - DNA, 23 bp, Artificial Sequence
  primer
aggagctacaggtatcagccaag

SEQ ID NO: 93573 - DNA, 38 bp, Artificial Sequence
  primer
gtaaaacgacggccagttggcatattgggctttctaac

SEQ ID NO: 93574 - DNA, 21 bp, Artificial Sequence
  primer
tgaagcccaaagaaacaacag

SEQ ID NO: 93575 - DNA, 39 bp, Artificial Sequence
  primer
gtaaaacgacggccagttcaacactgcagcttattcagg

SEQ ID NO: 93576 - DNA, 40 bp, Artificial Sequence
  primer
gtaaaacgacggccagtttcccaagtacctttgttctgtg

SEQ ID NO: 93577 - DNA, 38 bp, Artificial Sequence
  primer
gtaaaacgacggccagtaggaagtcttcactcatgggc

SEQ ID NO: 93578 - DNA, 19 bp, Artificial Sequence
  primer
ctgtactcccgcctggatg

SEQ ID NO: 93579 - DNA, 40 bp, Artificial Sequence
  primer
gtaaaacgacggccagtaaatagaaggtgcctgatcttcc

SEQ ID NO: 93580 - DNA, 21 bp, Artificial Sequence
  primer
ctccgctggtatctctgtcac

SEQ ID NO: 93581 - DNA, 38 bp, Artificial Sequence
  primer
gtaaaacgacggccagtaatatttacctgctggtcggc

SEQ ID NO: 93582 - DNA, 22 bp, Artificial Sequence
  primer
tgacaaagtaccaggcacagag

SEQ ID NO: 93583 - DNA, 22 bp, Artificial Sequence
  primer
gcagagatcgcagtaagctgag

SEQ ID NO: 93584 - DNA, 23 bp, Artificial Sequence
  primer
tcaattactttaccaagcgatgc

SEQ ID NO: 93585 - DNA, 22 bp, Artificial Sequence
  primer
gcaaactcatcccatttagtgc

SEQ ID NO: 93586 - DNA, 21 bp, Artificial Sequence
  primer
agatgacactgcttctgtcgg

SEQ ID NO: 93587 - DNA, 21 bp, Artificial Sequence
  primer
ctccgctggtatctctgtcac

SEQ ID NO: 93588 - DNA, 22 bp, Artificial Sequence
  primer
catttggaagggagagtctgag

SEQ ID NO: 93589 - DNA, 38 bp, Artificial Sequence
  primer
gtaaaacgacggccagttgtgacacggcctccatatac

SEQ ID NO: 93590 - DNA, 21 bp, Artificial Sequence
  primer
aaccctcatctgctccttgag

SEQ ID NO: 93591 - DNA, 39 bp, Artificial Sequence
  primer
gtaaaacgacggccagtaaactttcttctgcacaggtcg

SEQ ID NO: 93592 - DNA, 20 bp, Artificial Sequence
  primer
ccaagtggctgacctgagac

SEQ ID NO: 93593 - DNA, 20 bp, Artificial Sequence
  primer
ccggcaggaaggtcataaag

SEQ ID NO: 93594 - DNA, 21 bp, Artificial Sequence
  primer
cattaaatgtgcccaggaagg

SEQ ID NO: 93595 - DNA, 23 bp, Artificial Sequence
  primer
aaagcctgaacctctcagtaagg

SEQ ID NO: 93596 - DNA, 22 bp, Artificial Sequence
  primer
aagggtctttggaggaaagttg

SEQ ID NO: 93597 - DNA, 42 bp, Artificial Sequence
  primer
gtaaaacgacggccagttgcaactaccagtaagtgaaacacc

SEQ ID NO: 93598 - DNA, 38 bp, Artificial Sequence
  primer
gtaaaacgacggccagtatgcattgggatcaactttcc

SEQ ID NO: 93599 - DNA, 39 bp, Artificial Sequence
  primer
gtaaaacgacggccagtgccttcatacagtgcctcctac

SEQ ID NO: 93600 - DNA, 27 bp, Artificial Sequence
  primer
tcaggtttacagacagatttgatagac

SEQ ID NO: 93601 - DNA, 21 bp, Artificial Sequence
  primer
acagtccaaatccaccacaac

SEQ ID NO: 93602 - DNA, 21 bp, Artificial Sequence
  primer
aggcaaagtccaccatttctg

SEQ ID NO: 93603 - DNA, 22 bp, Artificial Sequence
  primer
ttcatcttctctagcccttccc

SEQ ID NO: 93604 - DNA, 38 bp, Artificial Sequence
  primer
gtaaaacgacggccagtggtccattgcactcctacctg

SEQ ID NO: 93605 - DNA, 27 bp, Artificial Sequence
  primer
gttcaaagaacgtatcactttatgatg

SEQ ID NO: 93606 - DNA, 21 bp, Artificial Sequence
  primer
ggaggtgaggtaggatggagg

SEQ ID NO: 93607 - DNA, 19 bp, Artificial Sequence
  primer
aagtccgtctgcaccgaag

SEQ ID NO: 93608 - DNA, 21 bp, Artificial Sequence
  primer
aaggtcttccaatcctttggg

SEQ ID NO: 93609 - DNA, 39 bp, Artificial Sequence
  primer
gtaaaacgacggccagttccaaatgtcacagaattgcag

SEQ ID NO: 93610 - DNA, 22 bp, Artificial Sequence
  primer
tcctcaaatgccaacctatttg

SEQ ID NO: 93611 - DNA, 39 bp, Artificial Sequence
  primer
gtaaaacgacggccagtttcacgatcaagaaatctgagg

SEQ ID NO: 93612 - DNA, 21 bp, Artificial Sequence
  primer
gggagaagccttaatctttgc

SEQ ID NO: 93613 - DNA, 23 bp, Artificial Sequence
  primer
gatgctggtaagcactcattcac

SEQ ID NO: 93614 - DNA, 21 bp, Artificial Sequence
  primer
aagatcatgccaagctgcata

SEQ ID NO: 93615 - DNA, 21 bp, Artificial Sequence
  primer
agcacctttaccaagcaggag

SEQ ID NO: 93616 - DNA, 38 bp, Artificial Sequence
  primer
gtaaaacgacggccagtttcaactccacccagtaaggg

SEQ ID NO: 93617 - DNA, 38 bp, Artificial Sequence
  primer
gtaaaacgacggccagttttagggttctcccacacagc

SEQ ID NO: 93618 - DNA, 21 bp, Artificial Sequence
  primer
tgcacagctgcctaagaaatc

SEQ ID NO: 93619 - DNA, 21 bp, Artificial Sequence
  primer
ttgcatttgcacatctagcac

SEQ ID NO: 93620 - DNA, 21 bp, Artificial Sequence
  primer
tcatcatggtagtcctcaccg

SEQ ID NO: 93621 - DNA, 38 bp, Artificial Sequence
  primer
gtaaaacgacggccagtggactcactgtagggattggg

SEQ ID NO: 93622 - DNA, 38 bp, Artificial Sequence
  primer
gtaaaacgacggccagttgatcaccttggtggtactcg

SEQ ID NO: 93623 - DNA, 38 bp, Artificial Sequence
  primer
gtaaaacgacggccagtgacatctgggtgacacgtgag

SEQ ID NO: 93624 - DNA, 21 bp, Artificial Sequence
  primer
ggagagtgaatagccagtggg

SEQ ID NO: 93625 - DNA, 38 bp, Artificial Sequence
  primer
gtaaaacgacggccagtgctgagtcctataaaccgccc

SEQ ID NO: 93626 - DNA, 38 bp, Artificial Sequence
  primer
gtaaaacgacggccagtgccatggccataatgaagaag

SEQ ID NO: 93627 - DNA, 38 bp, Artificial Sequence
  primer
gtaaaacgacggccagtattccagtgcatgacagaagg

SEQ ID NO: 93628 - DNA, 20 bp, Artificial Sequence
  primer
ctgttcagggccaaactcag

SEQ ID NO: 93629 - DNA, 20 bp, Artificial Sequence
  primer
gacctgctcccttcccatac

SEQ ID NO: 93630 - DNA, 21 bp, Artificial Sequence
  primer
ctggaagctatccaccaggac

SEQ ID NO: 93631 - DNA, 20 bp, Artificial Sequence
  primer
cagatctgccagagtcccag

SEQ ID NO: 93632 - DNA, 21 bp, Artificial Sequence
  primer
tgggaggattgttctagggtc

SEQ ID NO: 93633 - DNA, 20 bp, Artificial Sequence
  primer
attagccaggtggcacacac

SEQ ID NO: 93634 - DNA, 38 bp, Artificial Sequence
  primer
gtaaaacgacggccagtaatgagccagactttgccttc

SEQ ID NO: 93635 - DNA, 20 bp, Artificial Sequence
  primer
tcgtgtgtgtgcaccaattc

SEQ ID NO: 93636 - DNA, 21 bp, Artificial Sequence
  primer
aaaccagcaactaaacctccc

SEQ ID NO: 93637 - DNA, 25 bp, Artificial Sequence
  primer
gagtggagttctttctgatttatgc

SEQ ID NO: 93638 - DNA, 35 bp, Artificial Sequence
  primer
gtaaaacgacggccagtagctccggcaatccacac

SEQ ID NO: 93639 - DNA, 38 bp, Artificial Sequence
  primer
gtaaaacgacggccagtactcctgacctcatgacccat

SEQ ID NO: 93640 - DNA, 38 bp, Artificial Sequence
  primer
gtaaaacgacggccagttactttggacaagcttcctgg

SEQ ID NO: 93641 - DNA, 38 bp, Artificial Sequence
  primer
gtaaaacgacggccagtaccaatcccagctttcagaat

SEQ ID NO: 93642 - DNA, 38 bp, Artificial Sequence
  primer
gtaaaacgacggccagtttataaggacccttgccattg

SEQ ID NO: 93643 - DNA, 20 bp, Artificial Sequence
  primer
acagccacacttacccgaag

SEQ ID NO: 93644 - DNA, 21 bp, Artificial Sequence
  primer
aattgagaagctgagatgcca

SEQ ID NO: 93645 - DNA, 21 bp, Artificial Sequence
  primer
tgattacaagcatctgccacc

SEQ ID NO: 93646 - DNA, 21 bp, Artificial Sequence
  primer
cctcctccttctccacagcta

SEQ ID NO: 93647 - DNA, 21 bp, Artificial Sequence
  primer
tctgagggaagaggctgagag

SEQ ID NO: 93648 - DNA, 22 bp, Artificial Sequence
  primer
ccagcctgacagagtgagattc

SEQ ID NO: 93649 - DNA, 22 bp, Artificial Sequence
  primer
ggactcaacaactggaagatgg

SEQ ID NO: 93650 - DNA, 21 bp, Artificial Sequence
  primer
tacctggacatgaggaaagcc

SEQ ID NO: 93651 - DNA, 21 bp, Artificial Sequence
  primer
ctacacagctccaggtcctcc

SEQ ID NO: 93652 - DNA, 38 bp, Artificial Sequence
  primer
gtaaaacgacggccagtgaggccacctgctctctacac

SEQ ID NO: 93653 - DNA, 37 bp, Artificial Sequence
  primer
gtaaaacgacggccagtaagaaagccatgttccaccc

SEQ ID NO: 93654 - DNA, 21 bp, Artificial Sequence
  primer
ggacaactcagaaagcctgtg

SEQ ID NO: 93655 - DNA, 21 bp, Artificial Sequence
  primer
cagagttaccatgagggcctg

SEQ ID NO: 93656 - DNA, 21 bp, Artificial Sequence
  primer
agagcatccaatccaaccatc

SEQ ID NO: 93657 - DNA, 38 bp, Artificial Sequence
  primer
gtaaaacgacggccagtttgtagggccaggagtacagg

SEQ ID NO: 93658 - DNA, 21 bp, Artificial Sequence
  primer
agaggcaaagctgatctccag

SEQ ID NO: 93659 - DNA, 21 bp, Artificial Sequence
  primer
aggaaatcacagggattcagg

SEQ ID NO: 93660 - DNA, 38 bp, Artificial Sequence
  primer
gtaaaacgacggccagtgagattcaagggtgacaaggc

SEQ ID NO: 93661 - DNA, 21 bp, Artificial Sequence
  primer
ttctccaggcccttgattatg

SEQ ID NO: 93662 - DNA, 38 bp, Artificial Sequence
  primer
gtaaaacgacggccagttgccttataaatggtgagggc

SEQ ID NO: 93663 - DNA, 37 bp, Artificial Sequence
  primer
gtaaaacgacggccagtttgacaaatggtccagaggc

SEQ ID NO: 93664 - DNA, 21 bp, Artificial Sequence
  primer
ggtataagggagaggatgggc

SEQ ID NO: 93665 - DNA, 38 bp, Artificial Sequence
  primer
gtaaaacgacggccagtagtgctccgaagtggagagag

SEQ ID NO: 93666 - DNA, 21 bp, Artificial Sequence
  primer
atgctaaagaaggatgcacgg

SEQ ID NO: 93667 - DNA, 21 bp, Artificial Sequence
  primer
ggaacttgaaattggcaccag

SEQ ID NO: 93668 - DNA, 21 bp, Artificial Sequence
  primer
cctttcaaggccttccagttc

SEQ ID NO: 93669 - DNA, 39 bp, Artificial Sequence
  primer
gtaaaacgacggccagtggaaatgaacagaacagtggtg

SEQ ID NO: 93670 - DNA, 44 bp, Artificial Sequence
  primer
gtaaaacgacggccagttggtgtcaacttactgtataattctgg

SEQ ID NO: 93671 - DNA, 38 bp, Artificial Sequence
  primer
gtaaaacgacggccagttttcagggaaactgtgtctgc

SEQ ID NO: 93672 - DNA, 19 bp, Artificial Sequence
  primer
agaaagagctcgccagcag

SEQ ID NO: 93673 - DNA, 41 bp, Artificial Sequence
  primer
gtaaaacgacggccagtcagaaatcaactcctttctgacaa

SEQ ID NO: 93674 - DNA, 41 bp, Artificial Sequence
  primer
gtaaaacgacggccagttcctttaacctcacattccaagag

SEQ ID NO: 93675 - DNA, 42 bp, Artificial Sequence
  primer
gtaaaacgacggccagtttcatatcatcattacaaggacctg

SEQ ID NO: 93676 - DNA, 40 bp, Artificial Sequence
  primer
gtaaaacgacggccagtgaggtatgtagaggcacagaccc

SEQ ID NO: 93677 - DNA, 38 bp, Artificial Sequence
  primer
gtaaaacgacggccagttgcctctctcaggtggttcta

SEQ ID NO: 93678 - DNA, 39 bp, Artificial Sequence
  primer
gtaaaacgacggccagtggctaaggtaactccaaggcac

SEQ ID NO: 93679 - DNA, 38 bp, Artificial Sequence
  primer
gtaaaacgacggccagtcacagctggaggtaaatggaa

SEQ ID NO: 93680 - DNA, 21 bp, Artificial Sequence
  primer
tctcctcttcctcacccattg

SEQ ID NO: 93681 - DNA, 21 bp, Artificial Sequence
  primer
aaacaccatttcaaggatgcc

SEQ ID NO: 93682 - DNA, 38 bp, Artificial Sequence
  primer
gtaaaacgacggccagtgtccgcaaggctccattatac

SEQ ID NO: 93683 - DNA, 21 bp, Artificial Sequence
  primer
tacttccagaagcagcagcac

SEQ ID NO: 93684 - DNA, 25 bp, Artificial Sequence
  primer
aaagcaaattgtttctagggaagag

SEQ ID NO: 93685 - DNA, 22 bp, Artificial Sequence
  primer
tggaacgcttcatacaagtcag

SEQ ID NO: 93686 - DNA, 39 bp, Artificial Sequence
  primer
gtaaaacgacggccagttctagaactttgctcgctttgg

SEQ ID NO: 93687 - DNA, 38 bp, Artificial Sequence
  primer
gtaaaacgacggccagtctcagacctctctaccagccc

SEQ ID NO: 93688 - DNA, 22 bp, Artificial Sequence
  primer
caaccacagcaatcaaattctc

SEQ ID NO: 93689 - DNA, 41 bp, Artificial Sequence
  primer
gtaaaacgacggccagtgcaacaaggtatcaaatgagattg

SEQ ID NO: 93690 - DNA, 20 bp, Artificial Sequence
  primer
ctgggaagcagaagttgcag

SEQ ID NO: 93691 - DNA, 23 bp, Artificial Sequence
  primer
tttcataatcacctgagtttccc

SEQ ID NO: 93692 - DNA, 38 bp, Artificial Sequence
  primer
gtaaaacgacggccagtagggactggagggagctattc

SEQ ID NO: 93693 - DNA, 21 bp, Artificial Sequence
  primer
caagagtggactgcctgtgtc

SEQ ID NO: 93694 - DNA, 36 bp, Artificial Sequence
  primer
gtaaaacgacggccagtagctacatgcacgggttcc

SEQ ID NO: 93695 - DNA, 22 bp, Artificial Sequence
  primer
tggaacgcttcatacaagtcag

SEQ ID NO: 93696 - DNA, 21 bp, Artificial Sequence
  primer
agctctaaggagtcacagccc

SEQ ID NO: 93697 - DNA, 21 bp, Artificial Sequence
  primer
acacgagctcctcacactcag

SEQ ID NO: 93698 - DNA, 21 bp, Artificial Sequence
  primer
accaacacaacagaggcaatg

SEQ ID NO: 93699 - DNA, 19 bp, Artificial Sequence
  primer
atgtaaggagtggccgtgg

SEQ ID NO: 93700 - DNA, 21 bp, Artificial Sequence
  primer
tcacacctcttcatccacctg

SEQ ID NO: 93701 - DNA, 21 bp, Artificial Sequence
  primer
aggaggttccctctcttaccc

SEQ ID NO: 93702 - DNA, 20 bp, Artificial Sequence
  primer
ctcaggtgtacatgtgggcg

SEQ ID NO: 93703 - DNA, 19 bp, Artificial Sequence
  primer
ctgtgtgtgcatggctgtg

SEQ ID NO: 93704 - DNA, 21 bp, Artificial Sequence
  primer
actgttctgcctggtgtttcg

SEQ ID NO: 93705 - DNA, 38 bp, Artificial Sequence
  primer
gtaaaacgacggccagtgaagctcttcaaagctgagcc

SEQ ID NO: 93706 - DNA, 21 bp, Artificial Sequence
  primer
gaaccatgtgggatctctgtg

SEQ ID NO: 93707 - DNA, 21 bp, Artificial Sequence
  primer
tggttctgtgtcttctttcgg

SEQ ID NO: 93708 - DNA, 21 bp, Artificial Sequence
  primer
acacgagctcctcacactcag

SEQ ID NO: 93709 - DNA, 20 bp, Artificial Sequence
  primer
cgaaatcaggagccaaatcc

SEQ ID NO: 93710 - DNA, 21 bp, Artificial Sequence
  primer
cccttcgcttgtttagtctgg

SEQ ID NO: 93711 - DNA, 18 bp, Artificial Sequence
  primer
gcaacaagagcgaaacgc

SEQ ID NO: 93712 - DNA, 24 bp, Artificial Sequence
  primer
aacccatgaaatttagaactgctg

SEQ ID NO: 93713 - DNA, 41 bp, Artificial Sequence
  primer
gtaaaacgacggccagtcacaaagccagagagtacaacttt

SEQ ID NO: 93714 - DNA, 21 bp, Artificial Sequence
  primer
accatggcagtttgtgatgtc

SEQ ID NO: 93715 - DNA, 18 bp, Artificial Sequence
  primer
cttcaccagacccgtccc

SEQ ID NO: 93716 - DNA, 45 bp, Artificial Sequence
  primer
gtaaaacgacggccagtccaactcaactacttctatgtgttaccc

SEQ ID NO: 93717 - DNA, 25 bp, Artificial Sequence
  primer
ttaaccaaagccaggaaatacatac

SEQ ID NO: 93718 - DNA, 21 bp, Artificial Sequence
  primer
tgaggagaagaaagcagttgg

SEQ ID NO: 93719 - DNA, 38 bp, Artificial Sequence
  primer
gtaaaacgacggccagtgaaccttggctattgcgaaac

SEQ ID NO: 93720 - DNA, 23 bp, Artificial Sequence
  primer
agtctgcagtttaagaaacctgg

SEQ ID NO: 93721 - DNA, 23 bp, Artificial Sequence
  primer
ggttccaatgaattcaattatgc

SEQ ID NO: 93722 - DNA, 21 bp, Artificial Sequence
  primer
tgattcctgcagaagaagcaa

SEQ ID NO: 93723 - DNA, 43 bp, Artificial Sequence
  primer
gtaaaacgacggccagtcctatcattgtagtttggatatcgtt

SEQ ID NO: 93724 - DNA, 37 bp, Artificial Sequence
  primer
gtaaaacgacggccagtctgtggaagcagggtgaaag

SEQ ID NO: 93725 - DNA, 21 bp, Artificial Sequence
  primer
gccggttggttaattctcttc

SEQ ID NO: 93726 - DNA, 37 bp, Artificial Sequence
  primer
gtaaaacgacggccagtacagacatgagccactgtgc

SEQ ID NO: 93727 - DNA, 21 bp, Artificial Sequence
  primer
gcagagcaatgaaacagatgg

SEQ ID NO: 93728 - DNA, 36 bp, Artificial Sequence
  primer
gtaaaacgacggccagtcaagccaagcaggtgaagg

SEQ ID NO: 93729 - DNA, 21 bp, Artificial Sequence
  primer
catggtggcacgtacctgtag

SEQ ID NO: 93730 - DNA, 21 bp, Artificial Sequence
  primer
caccagagaaggtcatctccc

SEQ ID NO: 93731 - DNA, 20 bp, Artificial Sequence
  primer
gcccttctaggtgccacttg

SEQ ID NO: 93732 - DNA, 38 bp, Artificial Sequence
  primer
gtaaaacgacggccagtgttgccataacaatggttggt

SEQ ID NO: 93733 - DNA, 42 bp, Artificial Sequence
  primer
gtaaaacgacggccagtaaacaattacatggtgacgtttagg

SEQ ID NO: 93734 - DNA, 38 bp, Artificial Sequence
  primer
gtaaaacgacggccagtaccatatccaactggagggag

SEQ ID NO: 93735 - DNA, 23 bp, Artificial Sequence
  primer
aagccaaatggctcactctaaac

SEQ ID NO: 93736 - DNA, 38 bp, Artificial Sequence
  primer
gtaaaacgacggccagtcagcgggtattgctgacttac

SEQ ID NO: 93737 - DNA, 19 bp, Artificial Sequence
  primer
tcgccatcacaaagcaatc

SEQ ID NO: 93738 - DNA, 23 bp, Artificial Sequence
  primer
tgccaatactatatggaaagcaa

SEQ ID NO: 93739 - DNA, 23 bp, Artificial Sequence
  primer
tttcaaacaaagcacttaccagc

SEQ ID NO: 93740 - DNA, 24 bp, Artificial Sequence
  primer
gagtcatactccatttatgacggc

SEQ ID NO: 93741 - DNA, 22 bp, Artificial Sequence
  primer
tgggctcaccataaactaaacg

SEQ ID NO: 93742 - DNA, 21 bp, Artificial Sequence
  primer
aaatcatggcgtctgtgtttc

SEQ ID NO: 93743 - DNA, 36 bp, Artificial Sequence
  primer
gtaaaacgacggccagtagggaagtgccatgctagg

SEQ ID NO: 93744 - DNA, 21 bp, Artificial Sequence
  primer
gaatgcgtagctttctctccc

SEQ ID NO: 93745 - DNA, 40 bp, Artificial Sequence
  primer
gtaaaacgacggccagtggatttgagctggaaattaagga

SEQ ID NO: 93746 - DNA, 36 bp, Artificial Sequence
  primer
gtaaaacgacggccagtggtaatggcacgggatcag

SEQ ID NO: 93747 - DNA, 21 bp, Artificial Sequence
  primer
gcaaattcacaacccagtgag

SEQ ID NO: 93748 - DNA, 38 bp, Artificial Sequence
  primer
gtaaaacgacggccagttgacaaacaaacgtacccacg

SEQ ID NO: 93749 - DNA, 38 bp, Artificial Sequence
  primer
gtaaaacgacggccagtcttgggtggacaacattcatt

SEQ ID NO: 93750 - DNA, 21 bp, Artificial Sequence
  primer
ttctcaagctgctacacgagg

SEQ ID NO: 93751 - DNA, 20 bp, Artificial Sequence
  primer
gcctaagttcctgggtctgg

SEQ ID NO: 93752 - DNA, 21 bp, Artificial Sequence
  primer
ggagggtctccaggaaagaag

SEQ ID NO: 93753 - DNA, 37 bp, Artificial Sequence
  primer
gtaaaacgacggccagtctccctcagacccaggaatc

SEQ ID NO: 93754 - DNA, 21 bp, Artificial Sequence
  primer
actcttggaaggacatctggg

SEQ ID NO: 93755 - DNA, 21 bp, Artificial Sequence
  primer
tatgtgaatggttgcaccctc

SEQ ID NO: 93756 - DNA, 37 bp, Artificial Sequence
  primer
gtaaaacgacggccagtcaccaagccaacattccaac

SEQ ID NO: 93757 - DNA, 21 bp, Artificial Sequence
  primer
ctgataacattgccggagagg

SEQ ID NO: 93758 - DNA, 36 bp, Artificial Sequence
  primer
gtaaaacgacggccagtgtccaggctccagtccctc

SEQ ID NO: 93759 - DNA, 19 bp, Artificial Sequence
  primer
gatgggtgccttggaaatg

SEQ ID NO: 93760 - DNA, 21 bp, Artificial Sequence
  primer
ccaggcttggcagtttatttc

SEQ ID NO: 93761 - DNA, 39 bp, Artificial Sequence
  primer
gtaaaacgacggccagtgatttcttctcactgccacacc

SEQ ID NO: 93762 - DNA, 39 bp, Artificial Sequence
  primer
gtaaaacgacggccagtgggcagtattgctttcaacaac

SEQ ID NO: 93763 - DNA, 41 bp, Artificial Sequence
  primer
gtaaaacgacggccagtcccaccattagttgtgataccatt

SEQ ID NO: 93764 - DNA, 23 bp, Artificial Sequence
  primer
actggtatcaaacactccaaagg

SEQ ID NO: 93765 - DNA, 38 bp, Artificial Sequence
  primer
gtaaaacgacggccagttgcctgatttacatcactccc

SEQ ID NO: 93766 - DNA, 21 bp, Artificial Sequence
  primer
gctcatatggtgcttgtctgg

SEQ ID NO: 93767 - DNA, 38 bp, Artificial Sequence
  primer
gtaaaacgacggccagtaagtgaggagtacctgcagcc

SEQ ID NO: 93768 - DNA, 21 bp, Artificial Sequence
  primer
ccctggttgtgtaaatggagg

SEQ ID NO: 93769 - DNA, 19 bp, Artificial Sequence
  primer
atgtggtccaggaagtggg

SEQ ID NO: 93770 - DNA, 38 bp, Artificial Sequence
  primer
gtaaaacgacggccagtacaaatggtcacctctgggtc

SEQ ID NO: 93771 - DNA, 22 bp, Artificial Sequence
  primer
tgaatcaaagttgttcccaatg

SEQ ID NO: 93772 - DNA, 21 bp, Artificial Sequence
  primer
gctatctgtccctccaagcag

SEQ ID NO: 93773 - DNA, 21 bp, Artificial Sequence
  primer
ttcaagtcgtgctgctttctc

SEQ ID NO: 93774 - DNA, 37 bp, Artificial Sequence
  primer
gtaaaacgacggccagtaatagatggtcatggtgcgg

SEQ ID NO: 93775 - DNA, 37 bp, Artificial Sequence
  primer
gtaaaacgacggccagtaggacagagcctgggaactc

SEQ ID NO: 93776 - DNA, 38 bp, Artificial Sequence
  primer
gtaaaacgacggccagtagcctcagagaccaggtgaag

SEQ ID NO: 93777 - DNA, 21 bp, Artificial Sequence
  primer
ggaaacaaggtgtccaattcc

SEQ ID NO: 93778 - DNA, 19 bp, Artificial Sequence
  primer
caatcggaccagcttagcc

SEQ ID NO: 93779 - DNA, 24 bp, Artificial Sequence
  primer
tgtggaaacacaactttggataag

SEQ ID NO: 93780 - DNA, 22 bp, Artificial Sequence
  primer
tccttagaatccatatccaccc

SEQ ID NO: 93781 - DNA, 37 bp, Artificial Sequence
  primer
gtaaaacgacggccagtcctagggaggcgttatggac

SEQ ID NO: 93782 - DNA, 38 bp, Artificial Sequence
  primer
gtaaaacgacggccagtgtgaggacaaagtcctgaggc

SEQ ID NO: 93783 - DNA, 38 bp, Artificial Sequence
  primer
gtaaaacgacggccagtattgtaaatgccctttggacc

SEQ ID NO: 93784 - DNA, 37 bp, Artificial Sequence
  primer
gtaaaacgacggccagtgtcactcaagtggacgggtg

SEQ ID NO: 93785 - DNA, 21 bp, Artificial Sequence
  primer
gtgagaagccaaacactgtgg

SEQ ID NO: 93786 - DNA, 20 bp, Artificial Sequence
  primer
ccgaagcagacgtttaccag

SEQ ID NO: 93787 - DNA, 20 bp, Artificial Sequence
  primer
ccgaagcagacgtttaccag

SEQ ID NO: 93788 - DNA, 38 bp, Artificial Sequence
  primer
gtaaaacgacggccagttctgcacgagacgcattctac

SEQ ID NO: 93789 - DNA, 21 bp, Artificial Sequence
  primer
accttctggagcactggaaac

SEQ ID NO: 93790 - DNA, 22 bp, Artificial Sequence
  primer
catttaacacctgcctgactcc

SEQ ID NO: 93791 - DNA, 38 bp, Artificial Sequence
  primer
gtaaaacgacggccagtgcaatgcaaacaggctaacac

SEQ ID NO: 93792 - DNA, 38 bp, Artificial Sequence
  primer
gtaaaacgacggccagtgcatcagcaggtttgattagc

SEQ ID NO: 93793 - DNA, 38 bp, Artificial Sequence
  primer
gtaaaacgacggccagtgctgtgtggtgtccaggtaac

SEQ ID NO: 93794 - DNA, 37 bp, Artificial Sequence
  primer
gtaaaacgacggccagtgccactcattaaccagcgag

SEQ ID NO: 93795 - DNA, 21 bp, Artificial Sequence
  primer
gtacacaggcacaggaagagc

SEQ ID NO: 93796 - DNA, 38 bp, Artificial Sequence
  primer
gtaaaacgacggccagtctcctagggaatgcctgtctc

SEQ ID NO: 93797 - DNA, 19 bp, Artificial Sequence
  primer
agagagcagagcccgtgag

SEQ ID NO: 93798 - DNA, 38 bp, Artificial Sequence
  primer
gtaaaacgacggccagtatttgagctgggttctgaagg

SEQ ID NO: 93799 - DNA, 38 bp, Artificial Sequence
  primer
gtaaaacgacggccagtcttgtcttcccaaacacctcc

SEQ ID NO: 93800 - DNA, 21 bp, Artificial Sequence
  primer
ctgtttcagtggagaagctgg

SEQ ID NO: 93801 - DNA, 38 bp, Artificial Sequence
  primer
gtaaaacgacggccagttcttacacatgcaggtcggtg

SEQ ID NO: 93802 - DNA, 21 bp, Artificial Sequence
  primer
ttcacagcattaagaggctgg

SEQ ID NO: 93803 - DNA, 38 bp, Artificial Sequence
  primer
gtaaaacgacggccagtggataaggacaaacgctctcg

SEQ ID NO: 93804 - DNA, 38 bp, Artificial Sequence
  primer
gtaaaacgacggccagttgccctgaacgtctgtatgag

SEQ ID NO: 93805 - DNA, 38 bp, Artificial Sequence
  primer
gtaaaacgacggccagtacctgtttgagctgcctgtag

SEQ ID NO: 93806 - DNA, 21 bp, Artificial Sequence
  primer
cctgcaggaatcacaggtaca

SEQ ID NO: 93807 - DNA, 21 bp, Artificial Sequence
  primer
ggaagccatgtgttaacgagg

SEQ ID NO: 93808 - DNA, 21 bp, Artificial Sequence
  primer
gccttgcttcaaaggctaact

SEQ ID NO: 93809 - DNA, 40 bp, Artificial Sequence
  primer
gtaaaacgacggccagttccacatcaatacaataccttgc

SEQ ID NO: 93810 - DNA, 21 bp, Artificial Sequence
  primer
tgttcattcattcaactgcca

SEQ ID NO: 93811 - DNA, 21 bp, Artificial Sequence
  primer
aggctgaggcaagagaatcac

SEQ ID NO: 93812 - DNA, 40 bp, Artificial Sequence
  primer
gtaaaacgacggccagtcataccaaactctaccctaaccc

SEQ ID NO: 93813 - DNA, 38 bp, Artificial Sequence
  primer
gtaaaacgacggccagtcaagatgagaggcaacccata

SEQ ID NO: 93814 - DNA, 39 bp, Artificial Sequence
  primer
gtaaaacgacggccagttggaatagcaattcaccagagg

SEQ ID NO: 93815 - DNA, 25 bp, Artificial Sequence
  primer
gtaccaagaaatactccgttcattc

SEQ ID NO: 93816 - DNA, 21 bp, Artificial Sequence
  primer
gaggcacgagaatcacttgaa

SEQ ID NO: 93817 - DNA, 22 bp, Artificial Sequence
  primer
ttccctaacgttcttgaagcag

SEQ ID NO: 93818 - DNA, 38 bp, Artificial Sequence
  primer
gtaaaacgacggccagtactttgtccgaaagtctgcaa

SEQ ID NO: 93819 - DNA, 24 bp, Artificial Sequence
  primer
ggacctgaatggttaatctgtttg

SEQ ID NO: 93820 - DNA, 43 bp, Artificial Sequence
  primer
gtaaaacgacggccagtgcactagagattaaataagccctgac

SEQ ID NO: 93821 - DNA, 18 bp, Artificial Sequence
  primer
ccactgcactccatgcac

SEQ ID NO: 93822 - DNA, 21 bp, Artificial Sequence
  primer
accctctcgagtgtttggaag

SEQ ID NO: 93823 - DNA, 22 bp, Artificial Sequence
  primer
aaagcatggtttcctcagattc

SEQ ID NO: 93824 - DNA, 38 bp, Artificial Sequence
  primer
gtaaaacgacggccagtatgacctccatgcagtgattg

SEQ ID NO: 93825 - DNA, 22 bp, Artificial Sequence
  primer
agcaagctacagaatggaaagg

SEQ ID NO: 93826 - DNA, 21 bp, Artificial Sequence
  primer
taacatttcaaagcgcacagg

SEQ ID NO: 93827 - DNA, 38 bp, Artificial Sequence
  primer
gtaaaacgacggccagttccatcatagcactggaggtc

SEQ ID NO: 93828 - DNA, 23 bp, Artificial Sequence
  primer
gctgctaatatcagggaagaagc

SEQ ID NO: 93829 - DNA, 21 bp, Artificial Sequence
  primer
agacccaagattcctaagggc

SEQ ID NO: 93830 - DNA, 39 bp, Artificial Sequence
  primer
gtaaaacgacggccagtaagccacctctatggtgtcaag

SEQ ID NO: 93831 - DNA, 21 bp, Artificial Sequence
  primer
ctgggagagctgggaaatatg

SEQ ID NO: 93832 - DNA, 40 bp, Artificial Sequence
  primer
gtaaaacgacggccagtaaagacacctacaggaaagcagg

SEQ ID NO: 93833 - DNA, 36 bp, Artificial Sequence
  primer
gtaaaacgacggccagtggcagttgcagtgaccaag

SEQ ID NO: 93834 - DNA, 24 bp, Artificial Sequence
  primer
agtaaccagaatcatcctctcagc

SEQ ID NO: 93835 - DNA, 22 bp, Artificial Sequence
  primer
ccaacaactcttccaacgctac

SEQ ID NO: 93836 - DNA, 38 bp, Artificial Sequence
  primer
gtaaaacgacggccagtgggaagagacagcactccatc

SEQ ID NO: 93837 - DNA, 18 bp, Artificial Sequence
  primer
gtgcctgccaccgacttc

SEQ ID NO: 93838 - DNA, 38 bp, Artificial Sequence
  primer
gtaaaacgacggccagtcaaggacgctggttagaggag

SEQ ID NO: 93839 - DNA, 36 bp, Artificial Sequence
  primer
gtaaaacgacggccagtgaacagggtcagggtgctg

SEQ ID NO: 93840 - DNA, 21 bp, Artificial Sequence
  primer
gtagtacttgccgctcttgcc

SEQ ID NO: 93841 - DNA, 18 bp, Artificial Sequence
  primer
cttctcggagcctttgcc

SEQ ID NO: 93842 - DNA, 20 bp, Artificial Sequence
  primer
ccaccttcttctcctctgcg

SEQ ID NO: 93843 - DNA, 18 bp, Artificial Sequence
  primer
gtcccaggcaagcaggtc

SEQ ID NO: 93844 - DNA, 38 bp, Artificial Sequence
  primer
gtaaaacgacggccagtgcgcaagtctatgggttcatc

SEQ ID NO: 93845 - DNA, 42 bp, Artificial Sequence
  primer
gtaaaacgacggccagttgacgtcggtgataattatattccc

SEQ ID NO: 93846 - DNA, 37 bp, Artificial Sequence
  primer
gtaaaacgacggccagtaacatggttacctccgctcc

SEQ ID NO: 93847 - DNA, 21 bp, Artificial Sequence
  primer
cttaggaagagtgcaggaggg

SEQ ID NO: 93848 - DNA, 38 bp, Artificial Sequence
  primer
gtaaaacgacggccagttcaacatacctccctggaagc

SEQ ID NO: 93849 - DNA, 21 bp, Artificial Sequence
  primer
aacaaagggcgaaacactgtc

SEQ ID NO: 93850 - DNA, 38 bp, Artificial Sequence
  primer
gtaaaacgacggccagttgggtagaaaggagaggaggc

SEQ ID NO: 93851 - DNA, 21 bp, Artificial Sequence
  primer
ttccatttcaccaggtactcg

SEQ ID NO: 93852 - DNA, 37 bp, Artificial Sequence
  primer
gtaaaacgacggccagtctcccaagtgctgtacctgc

SEQ ID NO: 93853 - DNA, 38 bp, Artificial Sequence
  primer
gtaaaacgacggccagtatacagctcacgctccctctc

SEQ ID NO: 93854 - DNA, 38 bp, Artificial Sequence
  primer
gtaaaacgacggccagtgtatctgtccctcccttccag

SEQ ID NO: 93855 - DNA, 38 bp, Artificial Sequence
  primer
gtaaaacgacggccagtttgtcgatcaccttcaggttc

SEQ ID NO: 93856 - DNA, 21 bp, Artificial Sequence
  primer
tcagaggactgtggtgtaggc

SEQ ID NO: 93857 - DNA, 37 bp, Artificial Sequence
  primer
gtaaaacgacggccagtcagggttgcagaattccttg

SEQ ID NO: 93858 - DNA, 38 bp, Artificial Sequence
  primer
gtaaaacgacggccagtagacaagcaaagcacagggag

SEQ ID NO: 93859 - DNA, 21 bp, Artificial Sequence
  primer
ctaatctccagctcaggcagg

SEQ ID NO: 93860 - DNA, 21 bp, Artificial Sequence
  primer
gaagagaagctggagacccac

SEQ ID NO: 93861 - DNA, 21 bp, Artificial Sequence
  primer
atcacccaacaacaggaaagg

SEQ ID NO: 93862 - DNA, 38 bp, Artificial Sequence
  primer
gtaaaacgacggccagtgatcagctcaatcagccagtg

SEQ ID NO: 93863 - DNA, 21 bp, Artificial Sequence
  primer
aaccagctggaccttatgacc

SEQ ID NO: 93864 - DNA, 21 bp, Artificial Sequence
  primer
caggtggtgggagagtagtgg

SEQ ID NO: 93865 - DNA, 38 bp, Artificial Sequence
  primer
gtaaaacgacggccagtgtgcatcgctgcaagtctaag

SEQ ID NO: 93866 - DNA, 21 bp, Artificial Sequence
  primer
ccatgtgctgtacctaaaggg

SEQ ID NO: 93867 - DNA, 38 bp, Artificial Sequence
  primer
gtaaaacgacggccagtgggtgcgtgagtaaagaaagc

SEQ ID NO: 93868 - DNA, 38 bp, Artificial Sequence
  primer
gtaaaacgacggccagtggtgctgctactgacttggtg

SEQ ID NO: 93869 - DNA, 19 bp, Artificial Sequence
  primer
agctgggcttgtcatccac

SEQ ID NO: 93870 - DNA, 20 bp, Artificial Sequence
  primer
cagccctgtgctttatcacc

SEQ ID NO: 93871 - DNA, 21 bp, Artificial Sequence
  primer
gccttggtccgtgttactttc

SEQ ID NO: 93872 - DNA, 38 bp, Artificial Sequence
  primer
gtaaaacgacggccagtcaagctcacgctcactctctc

SEQ ID NO: 93873 - DNA, 19 bp, Artificial Sequence
  primer
acttgggtggtgttggagc

SEQ ID NO: 93874 - DNA, 20 bp, Artificial Sequence
  primer
cattggctccaggagaacag

SEQ ID NO: 93875 - DNA, 21 bp, Artificial Sequence
  primer
cttctgctcctctccaaggac

SEQ ID NO: 93876 - DNA, 36 bp, Artificial Sequence
  primer
gtaaaacgacggccagtgaggtgggaggatcccttg

SEQ ID NO: 93877 - DNA, 21 bp, Artificial Sequence
  primer
aaggcgtgagtattggtttgg

SEQ ID NO: 93878 - DNA, 21 bp, Artificial Sequence
  primer
tctcacaatcagtgcacagcc

SEQ ID NO: 93879 - DNA, 37 bp, Artificial Sequence
  primer
gtaaaacgacggccagtatgcaaatttgggtgctttg

SEQ ID NO: 93880 - DNA, 21 bp, Artificial Sequence
  primer
gaacctacctgttgtggaggg

SEQ ID NO: 93881 - DNA, 36 bp, Artificial Sequence
  primer
gtaaaacgacggccagtacctggtaccgctccatcc

SEQ ID NO: 93882 - DNA, 21 bp, Artificial Sequence
  primer
gatggcatcttggtattgctg

SEQ ID NO: 93883 - DNA, 20 bp, Artificial Sequence
  primer
ctggaggaacaggagcttgg

SEQ ID NO: 93884 - DNA, 36 bp, Artificial Sequence
  primer
gtaaaacgacggccagtcctcccatcttggattccc

SEQ ID NO: 93885 - DNA, 38 bp, Artificial Sequence
  primer
gtaaaacgacggccagtagcataggctccagtcccttg

SEQ ID NO: 93886 - DNA, 23 bp, Artificial Sequence
  primer
ttctagttcacgtggctgctaag

SEQ ID NO: 93887 - DNA, 21 bp, Artificial Sequence
  primer
tttgagtggttcaggcacatc

SEQ ID NO: 93888 - DNA, 38 bp, Artificial Sequence
  primer
gtaaaacgacggccagtgaatgtccatgctccgcttac

SEQ ID NO: 93889 - DNA, 21 bp, Artificial Sequence
  primer
tttgcatgctctgtgctcttc

SEQ ID NO: 93890 - DNA, 21 bp, Artificial Sequence
  primer
cgaacaaagacatccagatcg

SEQ ID NO: 93891 - DNA, 38 bp, Artificial Sequence
  primer
gtaaaacgacggccagttcctatgaccagagaggaggc

SEQ ID NO: 93892 - DNA, 38 bp, Artificial Sequence
  primer
gtaaaacgacggccagtttgaactctgcaggaggaagg

SEQ ID NO: 93893 - DNA, 21 bp, Artificial Sequence
  primer
acaggatggttggttcagagg

SEQ ID NO: 93894 - DNA, 38 bp, Artificial Sequence
  primer
gtaaaacgacggccagtctgcaagtatttagggctggg

SEQ ID NO: 93895 - DNA, 22 bp, Artificial Sequence
  primer
agaaccagtcctgtgagtcctg

SEQ ID NO: 93896 - DNA, 21 bp, Artificial Sequence
  primer
catggacatgaaccacaggag

SEQ ID NO: 93897 - DNA, 38 bp, Artificial Sequence
  primer
gtaaaacgacggccagtgggccaggatctagaggatac

SEQ ID NO: 93898 - DNA, 21 bp, Artificial Sequence
  primer
cagatatgcatccctgagcac

SEQ ID NO: 93899 - DNA, 19 bp, Artificial Sequence
  primer
aggtgggctacgaccacag

SEQ ID NO: 93900 - DNA, 20 bp, Artificial Sequence
  primer
gtctggttcgtggctgtgtc

SEQ ID NO: 93901 - DNA, 37 bp, Artificial Sequence
  primer
gtaaaacgacggccagtgtctggttcgtggctgtgtc

SEQ ID NO: 93902 - DNA, 21 bp, Artificial Sequence
  primer
tttggtgattcctgaaccctc

SEQ ID NO: 93903 - DNA, 38 bp, Artificial Sequence
  primer
gtaaaacgacggccagtgcagatgggtattggaaggac

SEQ ID NO: 93904 - DNA, 38 bp, Artificial Sequence
  primer
gtaaaacgacggccagtcccaactgcagagcttagacc

SEQ ID NO: 93905 - DNA, 21 bp, Artificial Sequence
  primer
ttgtgctcagtttctgcttgg

SEQ ID NO: 93906 - DNA, 21 bp, Artificial Sequence
  primer
agaactggtccagaaacccag

SEQ ID NO: 93907 - DNA, 21 bp, Artificial Sequence
  primer
gtaatgaacagtggtggcagg

SEQ ID NO: 93908 - DNA, 39 bp, Artificial Sequence
  primer
gtaaaacgacggccagtggccaatctcactcaatctcag

SEQ ID NO: 93909 - DNA, 20 bp, Artificial Sequence
  primer
aatgactgagggtgctgtgg

SEQ ID NO: 93910 - DNA, 21 bp, Artificial Sequence
  primer
gcatccagcactgtctgtgac

SEQ ID NO: 93911 - DNA, 20 bp, Artificial Sequence
  primer
ggaggaccagggagacagag

SEQ ID NO: 93912 - DNA, 38 bp, Artificial Sequence
  primer
gtaaaacgacggccagtagagaagcacaaagctacccg

SEQ ID NO: 93913 - DNA, 38 bp, Artificial Sequence
  primer
gtaaaacgacggccagtgtatggacaacagggtctggg

SEQ ID NO: 93914 - DNA, 21 bp, Artificial Sequence
  primer
agggagaaggccactggttag

SEQ ID NO: 93915 - DNA, 38 bp, Artificial Sequence
  primer
gtaaaacgacggccagtagaagctgcccttgttcacag

SEQ ID NO: 93916 - DNA, 21 bp, Artificial Sequence
  primer
tctgagctccaggtcttcctc

SEQ ID NO: 93917 - DNA, 38 bp, Artificial Sequence
  primer
gtaaaacgacggccagttgacagggatgggtatgtcag

SEQ ID NO: 93918 - DNA, 21 bp, Artificial Sequence
  primer
ggtccagagctctttccacag

SEQ ID NO: 93919 - DNA, 21 bp, Artificial Sequence
  primer
gggtagtgaaactcaaaccgc

SEQ ID NO: 93920 - DNA, 21 bp, Artificial Sequence
  primer
agcctggtcctaagcagtgag

SEQ ID NO: 93921 - DNA, 21 bp, Artificial Sequence
  primer
gtaagggcatagatgggaacc

SEQ ID NO: 93922 - DNA, 20 bp, Artificial Sequence
  primer
aagaggcagcagaggattgg

SEQ ID NO: 93923 - DNA, 21 bp, Artificial Sequence
  primer
acaacaaggtgtggcattcag

SEQ ID NO: 93924 - DNA, 21 bp, Artificial Sequence
  primer
acccagcatggtaggtctttc

SEQ ID NO: 93925 - DNA, 36 bp, Artificial Sequence
  primer
gtaaaacgacggccagtgacctcgtgatccacctcc

SEQ ID NO: 93926 - DNA, 20 bp, Artificial Sequence
  primer
catgcctggcccaactattc

SEQ ID NO: 93927 - DNA, 38 bp, Artificial Sequence
  primer
gtaaaacgacggccagttaggaccaccctcctatctcc

SEQ ID NO: 93928 - DNA, 39 bp, Artificial Sequence
  primer
gtaaaacgacggccagttcacagctgaacctacaaggag

SEQ ID NO: 93929 - DNA, 24 bp, Artificial Sequence
  primer
acaatttctgccacaactaaacag

SEQ ID NO: 93930 - DNA, 38 bp, Artificial Sequence
  primer
gtaaaacgacggccagttgggtttgcgactgattcttc

SEQ ID NO: 93931 - DNA, 44 bp, Artificial Sequence
  primer
gtaaaacgacggccagtgctatggaagtagatgtgtcctattca

SEQ ID NO: 93932 - DNA, 39 bp, Artificial Sequence
  primer
gtaaaacgacggccagtctctctctcacgactgaaagca

SEQ ID NO: 93933 - DNA, 37 bp, Artificial Sequence
  primer
gtaaaacgacggccagttgtcgggaaatcaatcttgc

SEQ ID NO: 93934 - DNA, 38 bp, Artificial Sequence
  primer
gtaaaacgacggccagtacagctcaagagatgaggcaa

SEQ ID NO: 93935 - DNA, 38 bp, Artificial Sequence
  primer
gtaaaacgacggccagtcatcattaaattctgggtgcc

SEQ ID NO: 93936 - DNA, 21 bp, Artificial Sequence
  primer
gattacctgcattgaccaggg

SEQ ID NO: 93937 - DNA, 36 bp, Artificial Sequence
  primer
gtaaaacgacggccagtgtgtgcatttgtgcctgtg

SEQ ID NO: 93938 - DNA, 21 bp, Artificial Sequence
  primer
tctactgaacccaggaggcag

SEQ ID NO: 93939 - DNA, 42 bp, Artificial Sequence
  primer
gtaaaacgacggccagttcttaactcacgtattccaagaaca

SEQ ID NO: 93940 - DNA, 36 bp, Artificial Sequence
  primer
gtaaaacgacggccagtgagccaccatcatgccaat

SEQ ID NO: 93941 - DNA, 22 bp, Artificial Sequence
  primer
ctgatggaaatcaacatcaacc

SEQ ID NO: 93942 - DNA, 21 bp, Artificial Sequence
  primer
aatttgttccgccaaattgag

SEQ ID NO: 93943 - DNA, 22 bp, Artificial Sequence
  primer
aagtgagaaacggagactgtgc

SEQ ID NO: 93944 - DNA, 20 bp, Artificial Sequence
  primer
cacgcctggcccttatattg

SEQ ID NO: 93945 - DNA, 22 bp, Artificial Sequence
  primer
tcctgctttactgttggtgttg

SEQ ID NO: 93946 - DNA, 21 bp, Artificial Sequence
  primer
cttgggtaacggagtgagacc

SEQ ID NO: 93947 - DNA, 42 bp, Artificial Sequence
  primer
gtaaaacgacggccagtggtcacaatgctatcattatttgct

SEQ ID NO: 93948 - DNA, 28 bp, Artificial Sequence
  primer
tcaattaaactgatgaactttattggag

SEQ ID NO: 93949 - DNA, 19 bp, Artificial Sequence
  primer
gaagtgtcgcccaggacag

SEQ ID NO: 93950 - DNA, 38 bp, Artificial Sequence
  primer
gtaaaacgacggccagtcaaccaaccctcaaagattcg

SEQ ID NO: 93951 - DNA, 21 bp, Artificial Sequence
  primer
aatgattcagacactgcacgc

SEQ ID NO: 93952 - DNA, 21 bp, Artificial Sequence
  primer
tgagaactgaagggtccaacc

SEQ ID NO: 93953 - DNA, 27 bp, Artificial Sequence
  primer
ggcacttggaaactttagacattaaac

SEQ ID NO: 93954 - DNA, 21 bp, Artificial Sequence
  primer
aaacctcactggcatcaactg

SEQ ID NO: 93955 - DNA, 38 bp, Artificial Sequence
  primer
gtaaaacgacggccagttggacacctgccttgtttctc

SEQ ID NO: 93956 - DNA, 21 bp, Artificial Sequence
  primer
agaaccatctcttcctggtgc

SEQ ID NO: 93957 - DNA, 21 bp, Artificial Sequence
  primer
cagaggctgtaatgagccaag

SEQ ID NO: 93958 - DNA, 38 bp, Artificial Sequence
  primer
gtaaaacgacggccagttccaaactagcagctaagggc

SEQ ID NO: 93959 - DNA, 23 bp, Artificial Sequence
  primer
ggtctccagtggtctttcttctc

SEQ ID NO: 93960 - DNA, 21 bp, Artificial Sequence
  primer
aatctggcagtctgtgtaccg

SEQ ID NO: 93961 - DNA, 22 bp, Artificial Sequence
  primer
aaggctctgggacagaggatac

SEQ ID NO: 93962 - DNA, 21 bp, Artificial Sequence
  primer
agggtcaaatcagctggagtc

SEQ ID NO: 93963 - DNA, 38 bp, Artificial Sequence
  primer
gtaaaacgacggccagtctcccagcttagaggaactgg

SEQ ID NO: 93964 - DNA, 38 bp, Artificial Sequence
  primer
gtaaaacgacggccagtcacacaaacgaagaaacggag

SEQ ID NO: 93965 - DNA, 37 bp, Artificial Sequence
  primer
gtaaaacgacggccagtatctgcagggctccataacc

SEQ ID NO: 93966 - DNA, 21 bp, Artificial Sequence
  primer
ttcatgatgtgatctggaccc

SEQ ID NO: 93967 - DNA, 21 bp, Artificial Sequence
  primer
agagtgctcaccatcttgcac

SEQ ID NO: 93968 - DNA, 38 bp, Artificial Sequence
  primer
gtaaaacgacggccagtaccatatcagggatggagacg

SEQ ID NO: 93969 - DNA, 21 bp, Artificial Sequence
  primer
gcgtagtctagatgctggctg

SEQ ID NO: 93970 - DNA, 38 bp, Artificial Sequence
  primer
gtaaaacgacggccagtccctggagagagcactttgag

SEQ ID NO: 93971 - DNA, 21 bp, Artificial Sequence
  primer
ccgtttctcctccagagtcag

SEQ ID NO: 93972 - DNA, 38 bp, Artificial Sequence
  primer
gtaaaacgacggccagtgctctgctctcacctccatta

SEQ ID NO: 93973 - DNA, 44 bp, Artificial Sequence
  primer
gtaaaacgacggccagtccattcttctacgaggtaagggtatag

SEQ ID NO: 93974 - DNA, 38 bp, Artificial Sequence
  primer
gtaaaacgacggccagtctttcccaagcagctcataga

SEQ ID NO: 93975 - DNA, 21 bp, Artificial Sequence
  primer
atctcgaaggtctcatcgtcc

SEQ ID NO: 93976 - DNA, 20 bp, Artificial Sequence
  primer
ctctagggacacagcgaggg

SEQ ID NO: 93977 - DNA, 21 bp, Artificial Sequence
  primer
acagtggagccttgagtctgg

SEQ ID NO: 93978 - DNA, 38 bp, Artificial Sequence
  primer
gtaaaacgacggccagtaaggacacacagcaattcagc

SEQ ID NO: 93979 - DNA, 42 bp, Artificial Sequence
  primer
gtaaaacgacggccagtgaacatagttctcaagcacacactg

SEQ ID NO: 93980 - DNA, 37 bp, Artificial Sequence
  primer
gtaaaacgacggccagttgtaacaggcctgcaaactg

SEQ ID NO: 93981 - DNA, 21 bp, Artificial Sequence
  primer
tgaagccatcttccacaagac

SEQ ID NO: 93982 - DNA, 36 bp, Artificial Sequence
  primer
gtaaaacgacggccagttgcatccctcatggtgttt

SEQ ID NO: 93983 - DNA, 21 bp, Artificial Sequence
  primer
aactcctggcttcaagcaatc

SEQ ID NO: 93984 - DNA, 21 bp, Artificial Sequence
  primer
ggcacaggtttattcaaagga

SEQ ID NO: 93985 - DNA, 38 bp, Artificial Sequence
  primer
gtaaaacgacggccagttagccctttgctctcctcaag

SEQ ID NO: 93986 - DNA, 21 bp, Artificial Sequence
  primer
ctgaacagagttgggaggacc

SEQ ID NO: 93987 - DNA, 37 bp, Artificial Sequence
  primer
gtaaaacgacggccagttctcagagagcaaagcctgc

SEQ ID NO: 93988 - DNA, 21 bp, Artificial Sequence
  primer
gaagtgacgagaaggaatggg

SEQ ID NO: 93989 - DNA, 39 bp, Artificial Sequence
  primer
gtaaaacgacggccagtccaccacttatgtcctcctcag

SEQ ID NO: 93990 - DNA, 38 bp, Artificial Sequence
  primer
gtaaaacgacggccagtagaggctaggctgtcttcctg

SEQ ID NO: 93991 - DNA, 38 bp, Artificial Sequence
  primer
gtaaaacgacggccagtgaagccaaactggaggtgatg

SEQ ID NO: 93992 - DNA, 20 bp, Artificial Sequence
  primer
ctccggtggtacacacacac

SEQ ID NO: 93993 - DNA, 21 bp, Artificial Sequence
  primer
gaacctgctgtctgccctatc

SEQ ID NO: 93994 - DNA, 38 bp, Artificial Sequence
  primer
gtaaaacgacggccagtactgcgtgacttgagaaagcc

SEQ ID NO: 93995 - DNA, 21 bp, Artificial Sequence
  primer
ctgaggatgcagcaatggtag

SEQ ID NO: 93996 - DNA, 21 bp, Artificial Sequence
  primer
gctccagaaaggaatccactg

SEQ ID NO: 93997 - DNA, 21 bp, Artificial Sequence
  primer
tgcactgtgagacctaaaggc

SEQ ID NO: 93998 - DNA, 20 bp, Artificial Sequence
  primer
gaccacatgtgcctcagagc

SEQ ID NO: 93999 - DNA, 38 bp, Artificial Sequence
  primer
gtaaaacgacggccagtgttacacaggtggcattgagg

SEQ ID NO: 94000 - DNA, 38 bp, Artificial Sequence
  primer
gtaaaacgacggccagtgaaagaagtggaaggagctgg

SEQ ID NO: 94001 - DNA, 20 bp, Artificial Sequence
  primer
agaggcccacgtattggaag

SEQ ID NO: 94002 - DNA, 38 bp, Artificial Sequence
  primer
gtaaaacgacggccagtgggatggcaatactggttgag

SEQ ID NO: 94003 - DNA, 21 bp, Artificial Sequence
  primer
aacacagtgtgacgacaaggc

SEQ ID NO: 94004 - DNA, 37 bp, Artificial Sequence
  primer
gtaaaacgacggccagtctgcctggctcctctgttag

SEQ ID NO: 94005 - DNA, 21 bp, Artificial Sequence
  primer
gaccaaacaggacaagccttc

SEQ ID NO: 94006 - DNA, 38 bp, Artificial Sequence
  primer
gtaaaacgacggccagtggtagaagtggttgagctggc

SEQ ID NO: 94007 - DNA, 21 bp, Artificial Sequence
  primer
cccaagatgaagacagcaatg

SEQ ID NO: 94008 - DNA, 21 bp, Artificial Sequence
  primer
gaggagttgcctgagattctg

SEQ ID NO: 94009 - DNA, 40 bp, Artificial Sequence
  primer
gtaaaacgacggccagtgcaataaattcaacagtccctcc

SEQ ID NO: 94010 - DNA, 40 bp, Artificial Sequence
  primer
gtaaaacgacggccagtaagtcccatctaccttgttctgc

SEQ ID NO: 94011 - DNA, 40 bp, Artificial Sequence
  primer
gtaaaacgacggccagttttaaatccacaggaaagaaggg

SEQ ID NO: 94012 - DNA, 38 bp, Artificial Sequence
  primer
gtaaaacgacggccagttcatttgcacctttgttctgg

SEQ ID NO: 94013 - DNA, 26 bp, Artificial Sequence
  primer
ggcacacagtaggtattcagtaagtg

SEQ ID NO: 94014 - DNA, 38 bp, Artificial Sequence
  primer
gtaaaacgacggccagtacattgactagggcttcctcc

SEQ ID NO: 94015 - DNA, 21 bp, Artificial Sequence
  primer
acatttcgccaggtttgaaat

SEQ ID NO: 94016 - DNA, 21 bp, Artificial Sequence
  primer
ttcaggtgcatcttctgcttc

SEQ ID NO: 94017 - DNA, 22 bp, Artificial Sequence
  primer
caaggccatttctgaagtcttg

SEQ ID NO: 94018 - DNA, 21 bp, Artificial Sequence
  primer
gcacccaggattagagaaggc

SEQ ID NO: 94019 - DNA, 22 bp, Artificial Sequence
  primer
ggaaagcaattctgttactgcc

SEQ ID NO: 94020 - DNA, 41 bp, Artificial Sequence
  primer
gtaaaacgacggccagttccctacctcataccctagatgtc

SEQ ID NO: 94021 - DNA, 23 bp, Artificial Sequence
  primer
tgtcacaatttactcaagcatcc

SEQ ID NO: 94022 - DNA, 42 bp, Artificial Sequence
  primer
gtaaaacgacggccagtcctttatcccatccttagttagctg

SEQ ID NO: 94023 - DNA, 40 bp, Artificial Sequence
  primer
gtaaaacgacggccagtaaatgatatggcagtgaagcaaa

SEQ ID NO: 94024 - DNA, 38 bp, Artificial Sequence
  primer
gtaaaacgacggccagttcaatactctgggctttcagc

SEQ ID NO: 94025 - DNA, 21 bp, Artificial Sequence
  primer
tctttgtggagaacatgctgg

SEQ ID NO: 94026 - DNA, 39 bp, Artificial Sequence
  primer
gtaaaacgacggccagtggcagaatatcttggtctttgg

SEQ ID NO: 94027 - DNA, 38 bp, Artificial Sequence
  primer
gtaaaacgacggccagtcctgaaggcttactgggagtc

SEQ ID NO: 94028 - DNA, 21 bp, Artificial Sequence
  primer
ctgctttctcaattgaccctg

SEQ ID NO: 94029 - DNA, 38 bp, Artificial Sequence
  primer
gtaaaacgacggccagtttatttcatcctggcgattcc

SEQ ID NO: 94030 - DNA, 21 bp, Artificial Sequence
  primer
caggtacccaaatcttgaggc

SEQ ID NO: 94031 - DNA, 20 bp, Artificial Sequence
  primer
gcactcgagtctgcgttagg

SEQ ID NO: 94032 - DNA, 37 bp, Artificial Sequence
  primer
gtaaaacgacggccagtagagcagcatgctcagcaac

SEQ ID NO: 94033 - DNA, 41 bp, Artificial Sequence
  primer
gtaaaacgacggccagtccagaggcaggttagaaacaatac

SEQ ID NO: 94034 - DNA, 26 bp, Artificial Sequence
  primer
ttatggaaaccatgaataaggtattt

SEQ ID NO: 94035 - DNA, 38 bp, Artificial Sequence
  primer
gtaaaacgacggccagtaggcaatgtggcaatacaagg

SEQ ID NO: 94036 - DNA, 40 bp, Artificial Sequence
  primer
gtaaaacgacggccagtacagccaagaggagttatgattg

SEQ ID NO: 94037 - DNA, 21 bp, Artificial Sequence
  primer
cccaatccaggatgctaataa

SEQ ID NO: 94038 - DNA, 25 bp, Artificial Sequence
  primer
tctgttaacacattccatccttctc

SEQ ID NO: 94039 - DNA, 24 bp, Artificial Sequence
  primer
cagtttcagtcatgaagcctatcc

SEQ ID NO: 94040 - DNA, 40 bp, Artificial Sequence
  primer
gtaaaacgacggccagtgaagctaataaagcaaccacaaa

SEQ ID NO: 94041 - DNA, 36 bp, Artificial Sequence
  primer
gtaaaacgacggccagtccggccaattaagggtctt

SEQ ID NO: 94042 - DNA, 21 bp, Artificial Sequence
  primer
acaaacctccatgacacaagc

SEQ ID NO: 94043 - DNA, 18 bp, Artificial Sequence
  primer
gaacccaggaggcagagc

SEQ ID NO: 94044 - DNA, 24 bp, Artificial Sequence
  primer
tttgtgtatctttgtgtcctcgtc

SEQ ID NO: 94045 - DNA, 26 bp, Artificial Sequence
  primer
tcttcagatacttggttctgtaatgc

SEQ ID NO: 94046 - DNA, 20 bp, Artificial Sequence
  primer
cactccagcctaggcaaatg

SEQ ID NO: 94047 - DNA, 18 bp, Artificial Sequence
  primer
cccaggaggcagaggttc

SEQ ID NO: 94048 - DNA, 38 bp, Artificial Sequence
  primer
gtaaaacgacggccagtaagtgctggaattatgggcac

SEQ ID NO: 94049 - DNA, 21 bp, Artificial Sequence
  primer
aattcctcaagcaaatgctcc

SEQ ID NO: 94050 - DNA, 38 bp, Artificial Sequence
  primer
gtaaaacgacggccagtcccaccatctcaaattctcac

SEQ ID NO: 94051 - DNA, 38 bp, Artificial Sequence
  primer
gtaaaacgacggccagtgagccaaagtgagccaaagac

SEQ ID NO: 94052 - DNA, 21 bp, Artificial Sequence
  primer
ttggtgacctctcaaatcctg

SEQ ID NO: 94053 - DNA, 20 bp, Artificial Sequence
  primer
cagcctgggtgacagagaac

SEQ ID NO: 94054 - DNA, 24 bp, Artificial Sequence
  primer
caaagaaactaacaggtttctggc

SEQ ID NO: 94055 - DNA, 23 bp, Artificial Sequence
  primer
tcggtgggattaagtacattcac

SEQ ID NO: 94056 - DNA, 43 bp, Artificial Sequence
  primer
gtaaaacgacggccagtcaataatgaacacttaagagctggac

SEQ ID NO: 94057 - DNA, 40 bp, Artificial Sequence
  primer
gtaaaacgacggccagtaaacaggccaatatttggtcata

SEQ ID NO: 94058 - DNA, 23 bp, Artificial Sequence
  primer
aaagaaagcagcaagtttaagcc

SEQ ID NO: 94059 - DNA, 21 bp, Artificial Sequence
  primer
gtgttctccttactcctgggc

SEQ ID NO: 94060 - DNA, 21 bp, Artificial Sequence
  primer
ggaagaagctaggtgtccctg

SEQ ID NO: 94061 - DNA, 21 bp, Artificial Sequence
  primer
tgggtttacccatctccctac

SEQ ID NO: 94062 - DNA, 22 bp, Artificial Sequence
  primer
ttgctctttggtctcctttctg

SEQ ID NO: 94063 - DNA, 20 bp, Artificial Sequence
  primer
ttgtccagtgcgggaataag

SEQ ID NO: 94064 - DNA, 23 bp, Artificial Sequence
  primer
tcatctcttccctctttgctagg

SEQ ID NO: 94065 - DNA, 38 bp, Artificial Sequence
  primer
gtaaaacgacggccagtatccaaatcactgctcatccc

SEQ ID NO: 94066 - DNA, 38 bp, Artificial Sequence
  primer
gtaaaacgacggccagtgcccttgaactaaggatgtgc

SEQ ID NO: 94067 - DNA, 38 bp, Artificial Sequence
  primer
gtaaaacgacggccagttaacttgcatcctttcctccg

SEQ ID NO: 94068 - DNA, 40 bp, Artificial Sequence
  primer
gtaaaacgacggccagttgccagaaagcttctctctatcc

SEQ ID NO: 94069 - DNA, 36 bp, Artificial Sequence
  primer
gtaaaacgacggccagtctccctgagcatctctgcc

SEQ ID NO: 94070 - DNA, 21 bp, Artificial Sequence
  primer
taccctgtagcagccacattc

SEQ ID NO: 94071 - DNA, 21 bp, Artificial Sequence
  primer
gattgactggtcaggaggagg

SEQ ID NO: 94072 - DNA, 21 bp, Artificial Sequence
  primer
acacagattcctcactgctgg

SEQ ID NO: 94073 - DNA, 38 bp, Artificial Sequence
  primer
gtaaaacgacggccagtttctcacttgacaccgacagg

SEQ ID NO: 94074 - DNA, 22 bp, Artificial Sequence
  primer
gcaggagagagagagggcatac

SEQ ID NO: 94075 - DNA, 22 bp, Artificial Sequence
  primer
ctgcatgtacgaaacctcactc

SEQ ID NO: 94076 - DNA, 21 bp, Artificial Sequence
  primer
gggaacacctctactggttgc

SEQ ID NO: 94077 - DNA, 21 bp, Artificial Sequence
  primer
accctattgcacaacctggag

SEQ ID NO: 94078 - DNA, 20 bp, Artificial Sequence
  primer
tctcccttctcctcccagac

SEQ ID NO: 94079 - DNA, 37 bp, Artificial Sequence
  primer
gtaaaacgacggccagtcgatcacctggagagcagag

SEQ ID NO: 94080 - DNA, 21 bp, Artificial Sequence
  primer
gcaggttctcctgaagctgag

SEQ ID NO: 94081 - DNA, 38 bp, Artificial Sequence
  primer
gtaaaacgacggccagtacttgggttgtaccatgggtg

SEQ ID NO: 94082 - DNA, 21 bp, Artificial Sequence
  primer
tttcaacagaactcacctccg

SEQ ID NO: 94083 - DNA, 21 bp, Artificial Sequence
  primer
accctgaccctggttacacac

SEQ ID NO: 94084 - DNA, 38 bp, Artificial Sequence
  primer
gtaaaacgacggccagtgggaattaagaccgagccttc

SEQ ID NO: 94085 - DNA, 40 bp, Artificial Sequence
  primer
gtaaaacgacggccagtgatctcctgatcttgtgatctgc

SEQ ID NO: 94086 - DNA, 37 bp, Artificial Sequence
  primer
gtaaaacgacggccagtaagggatccacttgcctcag

SEQ ID NO: 94087 - DNA, 42 bp, Artificial Sequence
  primer
gtaaaacgacggccagttgtgtgtaagtcctatggtttggtt

SEQ ID NO: 94088 - DNA, 38 bp, Artificial Sequence
  primer
gtaaaacgacggccagttggcttcttgaactgagatgg

SEQ ID NO: 94089 - DNA, 21 bp, Artificial Sequence
  primer
aggaacctcaccactggaaac

SEQ ID NO: 94090 - DNA, 21 bp, Artificial Sequence
  primer
gtgaactgagattgcaccacc

SEQ ID NO: 94091 - DNA, 38 bp, Artificial Sequence
  primer
gtaaaacgacggccagtcaaattctccaggctgtaggg

SEQ ID NO: 94092 - DNA, 37 bp, Artificial Sequence
  primer
gtaaaacgacggccagtctatgagcctgcctctgtgg

SEQ ID NO: 94093 - DNA, 21 bp, Artificial Sequence
  primer
agccagttgtcttgggaagag

SEQ ID NO: 94094 - DNA, 38 bp, Artificial Sequence
  primer
gtaaaacgacggccagtttcagggactttctgctgttg

SEQ ID NO: 94095 - DNA, 36 bp, Artificial Sequence
  primer
gtaaaacgacggccagtcgggaactggtgaagaagg

SEQ ID NO: 94096 - DNA, 36 bp, Artificial Sequence
  primer
gtaaaacgacggccagtcgcttctccttcctgggtc

SEQ ID NO: 94097 - DNA, 38 bp, Artificial Sequence
  primer
gtaaaacgacggccagtccagccacctaatgtatgcac

SEQ ID NO: 94098 - DNA, 38 bp, Artificial Sequence
  primer
gtaaaacgacggccagtttgtcttgcaaggaatatggc

SEQ ID NO: 94099 - DNA, 38 bp, Artificial Sequence
  primer
gtaaaacgacggccagtaaacaggctagtggctcctcc

SEQ ID NO: 94100 - DNA, 38 bp, Artificial Sequence
  primer
gtaaaacgacggccagtggcaacagacccataaacctc

SEQ ID NO: 94101 - DNA, 19 bp, Artificial Sequence
  primer
aacgctaaggcaaacggag

SEQ ID NO: 94102 - DNA, 38 bp, Artificial Sequence
  primer
gtaaaacgacggccagtggagttcaatcctgtgaagcc

SEQ ID NO: 94103 - DNA, 23 bp, Artificial Sequence
  primer
ctgttgatacgaagctgatgaaa

SEQ ID NO: 94104 - DNA, 21 bp, Artificial Sequence
  primer
aatgcatcagcattagcttgg

SEQ ID NO: 94105 - DNA, 29 bp, Artificial Sequence
  primer
tgatcaatgtatttatttcttagaaggca

SEQ ID NO: 94106 - DNA, 22 bp, Artificial Sequence
  primer
aggaagtatggcatcccattta

SEQ ID NO: 94107 - DNA, 38 bp, Artificial Sequence
  primer
gtaaaacgacggccagtcctccagacatcatgttccac

SEQ ID NO: 94108 - DNA, 19 bp, Artificial Sequence
  primer
cagggtgaagagcacatgg

SEQ ID NO: 94109 - DNA, 27 bp, Artificial Sequence
  primer
gcagttagccaaagaagcttattaaag

SEQ ID NO: 94110 - DNA, 21 bp, Artificial Sequence
  primer
caatgatctcctgacctcgtg

SEQ ID NO: 94111 - DNA, 22 bp, Artificial Sequence
  primer
cataaggcaaacacctggtatg

SEQ ID NO: 94112 - DNA, 21 bp, Artificial Sequence
  primer
gggagggtgcaaagtactgac

SEQ ID NO: 94113 - DNA, 38 bp, Artificial Sequence
  primer
gtaaaacgacggccagtaaggtaacacaggctgttggg

SEQ ID NO: 94114 - DNA, 38 bp, Artificial Sequence
  primer
gtaaaacgacggccagtgccaaaggtcactgtaaaccc

SEQ ID NO: 94115 - DNA, 22 bp, Artificial Sequence
  primer
ggaatagggctcccaatgttag

SEQ ID NO: 94116 - DNA, 21 bp, Artificial Sequence
  primer
ggaaatgccttgggaaactac

SEQ ID NO: 94117 - DNA, 21 bp, Artificial Sequence
  primer
cagtgcctctctctctcccac

SEQ ID NO: 94118 - DNA, 38 bp, Artificial Sequence
  primer
gtaaaacgacggccagtctgctcaaggccgttattatg

SEQ ID NO: 94119 - DNA, 39 bp, Artificial Sequence
  primer
gtaaaacgacggccagttctcatgtatggacctgacctc

SEQ ID NO: 94120 - DNA, 39 bp, Artificial Sequence
  primer
gtaaaacgacggccagttccaaccagctggaacaataag

SEQ ID NO: 94121 - DNA, 40 bp, Artificial Sequence
  primer
gtaaaacgacggccagttggtgccatcttggtatattacg

SEQ ID NO: 94122 - DNA, 22 bp, Artificial Sequence
  primer
tcaaatcccatgtccagttagc

SEQ ID NO: 94123 - DNA, 39 bp, Artificial Sequence
  primer
gtaaaacgacggccagtgcaaccaaagaccatgttaagc

SEQ ID NO: 94124 - DNA, 21 bp, Artificial Sequence
  primer
cacacacacggccttctaatc

SEQ ID NO: 94125 - DNA, 39 bp, Artificial Sequence
  primer
gtaaaacgacggccagtgaattgcaggatgaggctgtag

SEQ ID NO: 94126 - DNA, 24 bp, Artificial Sequence
  primer
ttctacctgcttgacttacggaac

SEQ ID NO: 94127 - DNA, 25 bp, Artificial Sequence
  primer
ggaagatccaggtgtttgatattac

SEQ ID NO: 94128 - DNA, 38 bp, Artificial Sequence
  primer
gtaaaacgacggccagttcatggtagcatctggctgag

SEQ ID NO: 94129 - DNA, 38 bp, Artificial Sequence
  primer
gtaaaacgacggccagtgagctcatgattaaggccctg

SEQ ID NO: 94130 - DNA, 38 bp, Artificial Sequence
  primer
gtaaaacgacggccagtgctttcagtgctgtgtccttg

SEQ ID NO: 94131 - DNA, 21 bp, Artificial Sequence
  primer
gtcatgccttcttagggcttc

SEQ ID NO: 94132 - DNA, 20 bp, Artificial Sequence
  primer
aactgttgcccagctagcac

SEQ ID NO: 94133 - DNA, 38 bp, Artificial Sequence
  primer
gtaaaacgacggccagtcacgaacaaagaaggtggtcc

SEQ ID NO: 94134 - DNA, 43 bp, Artificial Sequence
  primer
gtaaaacgacggccagtggtttattgtcaacagactaagcaag

SEQ ID NO: 94135 - DNA, 38 bp, Artificial Sequence
  primer
gtaaaacgacggccagtaaccaccaatgtacgaggtcc

SEQ ID NO: 94136 - DNA, 40 bp, Artificial Sequence
  primer
gtaaaacgacggccagtggcttagactgtttactggctcg

SEQ ID NO: 94137 - DNA, 21 bp, Artificial Sequence
  primer
agtttgttccatcatccctgc

SEQ ID NO: 94138 - DNA, 23 bp, Artificial Sequence
  primer
catgtgtgtgttgtttcaaatgg

SEQ ID NO: 94139 - DNA, 35 bp, Artificial Sequence
  primer
gtaaaacgacggccagtgctgggatttcagccctc

SEQ ID NO: 94140 - DNA, 18 bp, Artificial Sequence
  primer
tgtgagccactgcacctg

SEQ ID NO: 94141 - DNA, 38 bp, Artificial Sequence
  primer
gtaaaacgacggccagttgatttctggcaacaatttgg

SEQ ID NO: 94142 - DNA, 38 bp, Artificial Sequence
  primer
gtaaaacgacggccagtagacaaaggccagacaaggag

SEQ ID NO: 94143 - DNA, 42 bp, Artificial Sequence
  primer
gtaaaacgacggccagtaaatgccactgatctcacagtttac

SEQ ID NO: 94144 - DNA, 38 bp, Artificial Sequence
  primer
gtaaaacgacggccagtctttccacagtttggcaggac

SEQ ID NO: 94145 - DNA, 27 bp, Artificial Sequence
  primer
tgttgaatactgaggcataactaaatc

SEQ ID NO: 94146 - DNA, 22 bp, Artificial Sequence
  primer
tcttgaatgtgcagttaaggga

SEQ ID NO: 94147 - DNA, 23 bp, Artificial Sequence
  primer
gatgttcaccagaatcatccaac

SEQ ID NO: 94148 - DNA, 20 bp, Artificial Sequence
  primer
taagcccttctcaaggccac

SEQ ID NO: 94149 - DNA, 18 bp, Artificial Sequence
  primer
taaattgcctgaggcccg

SEQ ID NO: 94150 - DNA, 22 bp, Artificial Sequence
  primer
tgtttcaagtgcaacctcttcc

SEQ ID NO: 94151 - DNA, 23 bp, Artificial Sequence
  primer
ggttggaagaatggatggataac

SEQ ID NO: 94152 - DNA, 45 bp, Artificial Sequence
  primer
gtaaaacgacggccagtcccacataaacattcctatctcatacta

SEQ ID NO: 94153 - DNA, 26 bp, Artificial Sequence
  primer
cagtagctatttctaaacagcctgga

SEQ ID NO: 94154 - DNA, 39 bp, Artificial Sequence
  primer
gtaaaacgacggccagtcacagacttcaagggtctgtcc

SEQ ID NO: 94155 - DNA, 21 bp, Artificial Sequence
  primer
aaacttcccaaggctaaacgc

SEQ ID NO: 94156 - DNA, 42 bp, Artificial Sequence
  primer
gtaaaacgacggccagtaagagagattaatttcaaatgccaa

SEQ ID NO: 94157 - DNA, 22 bp, Artificial Sequence
  primer
aaagatgacctgcatttctgag

SEQ ID NO: 94158 - DNA, 20 bp, Artificial Sequence
  primer
gcagaagctacagtgagccg

SEQ ID NO: 94159 - DNA, 21 bp, Artificial Sequence
  primer
tttgtgatgggaaactgatgc

SEQ ID NO: 94160 - DNA, 21 bp, Artificial Sequence
  primer
ctctgacccgattgtatggct

SEQ ID NO: 94161 - DNA, 21 bp, Artificial Sequence
  primer
cagaactgtgagccaatcaaa

SEQ ID NO: 94162 - DNA, 21 bp, Artificial Sequence
  primer
aatgatcaaacagcgtgcatc

SEQ ID NO: 94163 - DNA, 21 bp, Artificial Sequence
  primer
atataagggtggtggcaatgg

SEQ ID NO: 94164 - DNA, 38 bp, Artificial Sequence
  primer
gtaaaacgacggccagtgccatggttatccactccttc

SEQ ID NO: 94165 - DNA, 21 bp, Artificial Sequence
  primer
gccaaccttagaatccaggtg

SEQ ID NO: 94166 - DNA, 22 bp, Artificial Sequence
  primer
caagagaatcaatggccttagc

SEQ ID NO: 94167 - DNA, 21 bp, Artificial Sequence
  primer
gggcaacaagattgaaactcc

SEQ ID NO: 94168 - DNA, 37 bp, Artificial Sequence
  primer
gtaaaacgacggccagtacagggcaggtgttcatgtc

SEQ ID NO: 94169 - DNA, 38 bp, Artificial Sequence
  primer
gtaaaacgacggccagtatcagccacaagaaggtgctc

SEQ ID NO: 94170 - DNA, 38 bp, Artificial Sequence
  primer
gtaaaacgacggccagtaagtcaatggacggacatcac

SEQ ID NO: 94171 - DNA, 38 bp, Artificial Sequence
  primer
gtaaaacgacggccagtagacccttacaggttggcaag

SEQ ID NO: 94172 - DNA, 38 bp, Artificial Sequence
  primer
gtaaaacgacggccagtgtagccaaggtggtctgaagg

SEQ ID NO: 94173 - DNA, 21 bp, Artificial Sequence
  primer
caatgaagcagggtcactttg

SEQ ID NO: 94174 - DNA, 21 bp, Artificial Sequence
  primer
tcaggagagtctaagcacggg

SEQ ID NO: 94175 - DNA, 22 bp, Artificial Sequence
  primer
gcgacagagcaagattgtctaa

SEQ ID NO: 94176 - DNA, 41 bp, Artificial Sequence
  primer
gtaaaacgacggccagtccacccttcataaatctaatcctg

SEQ ID NO: 94177 - DNA, 40 bp, Artificial Sequence
  primer
gtaaaacgacggccagttccagctccactaatcattcaac

SEQ ID NO: 94178 - DNA, 21 bp, Artificial Sequence
  primer
ctggatgcctgagtttgaatc

SEQ ID NO: 94179 - DNA, 41 bp, Artificial Sequence
  primer
gtaaaacgacggccagtgagggcatatacagctaaacaagg

SEQ ID NO: 94180 - DNA, 18 bp, Artificial Sequence
  primer
accgtgcctggcctaaac

SEQ ID NO: 94181 - DNA, 23 bp, Artificial Sequence
  primer
ccactgtgcccagctactatatg

SEQ ID NO: 94182 - DNA, 43 bp, Artificial Sequence
  primer
gtaaaacgacggccagtgcaacacacagtaagaaaccatattc

SEQ ID NO: 94183 - DNA, 20 bp, Artificial Sequence
  primer
cttggaacgtcggagacttg

SEQ ID NO: 94184 - DNA, 38 bp, Artificial Sequence
  primer
gtaaaacgacggccagtaagccctaagaaaccagcctc

SEQ ID NO: 94185 - DNA, 22 bp, Artificial Sequence
  primer
cttaaacctggtcaagtgctcc

SEQ ID NO: 94186 - DNA, 38 bp, Artificial Sequence
  primer
gtaaaacgacggccagtgagcccgtgacctacagaaag

SEQ ID NO: 94187 - DNA, 21 bp, Artificial Sequence
  primer
aaacagtcccaggtccctaag

SEQ ID NO: 94188 - DNA, 39 bp, Artificial Sequence
  primer
gtaaaacgacggccagtttatggactttgctgctaatgc

SEQ ID NO: 94189 - DNA, 22 bp, Artificial Sequence
  primer
cttcagccattagaagtcgagc

SEQ ID NO: 94190 - DNA, 22 bp, Artificial Sequence
  primer
catggtgatggaatcttcacag

SEQ ID NO: 94191 - DNA, 41 bp, Artificial Sequence
  primer
gtaaaacgacggccagttcttcttagggaactgaaatctcc

SEQ ID NO: 94192 - DNA, 21 bp, Artificial Sequence
  primer
tttgatgaaagcgttgtgctc

SEQ ID NO: 94193 - DNA, 38 bp, Artificial Sequence
  primer
gtaaaacgacggccagtatcccaggaatgcaaacacag

SEQ ID NO: 94194 - DNA, 21 bp, Artificial Sequence
  primer
ttgtgaggacttgggtgaaag

SEQ ID NO: 94195 - DNA, 22 bp, Artificial Sequence
  primer
tgataccaggacttccatcgag

SEQ ID NO: 94196 - DNA, 38 bp, Artificial Sequence
  primer
gtaaaacgacggccagtctgggcatggaataactctcc

SEQ ID NO: 94197 - DNA, 21 bp, Artificial Sequence
  primer
ttaatcagctcaggagggacc

SEQ ID NO: 94198 - DNA, 22 bp, Artificial Sequence
  primer
aacacaattgggtgatgagagg

SEQ ID NO: 94199 - DNA, 38 bp, Artificial Sequence
  primer
gtaaaacgacggccagtaatcactcccaaatgcaatga

SEQ ID NO: 94200 - DNA, 21 bp, Artificial Sequence
  primer
tttcttccttccaacctgctg

SEQ ID NO: 94201 - DNA, 26 bp, Artificial Sequence
  primer
aacttggttacttggtttagcagttt

SEQ ID NO: 94202 - DNA, 22 bp, Artificial Sequence
  primer
cattaaattccagctcctttgg

SEQ ID NO: 94203 - DNA, 38 bp, Artificial Sequence
  primer
gtaaaacgacggccagtagcttggtagtggacatgtgg

SEQ ID NO: 94204 - DNA, 38 bp, Artificial Sequence
  primer
gtaaaacgacggccagtggttcatactccctcgcaaag

SEQ ID NO: 94205 - DNA, 39 bp, Artificial Sequence
  primer
gtaaaacgacggccagttttcacaagcgtaaggtcacac

SEQ ID NO: 94206 - DNA, 38 bp, Artificial Sequence
  primer
gtaaaacgacggccagtgctgctatgctgcatttgttc

SEQ ID NO: 94207 - DNA, 38 bp, Artificial Sequence
  primer
gtaaaacgacggccagtccttacagcctcaaggcactc

SEQ ID NO: 94208 - DNA, 19 bp, Artificial Sequence
  primer
cccgccctgttgatatctg

SEQ ID NO: 94209 - DNA, 21 bp, Artificial Sequence
  primer
gagtgtgctctcagagggtcc

SEQ ID NO: 94210 - DNA, 38 bp, Artificial Sequence
  primer
gtaaaacgacggccagttgactattacaccgctgccac

SEQ ID NO: 94211 - DNA, 38 bp, Artificial Sequence
  primer
gtaaaacgacggccagtttcctccaggcatcttaaagc

SEQ ID NO: 94212 - DNA, 23 bp, Artificial Sequence
  primer
tgtgcatcaccaaagaattaagg

SEQ ID NO: 94213 - DNA, 21 bp, Artificial Sequence
  primer
ttccattccaggatgatgaac

SEQ ID NO: 94214 - DNA, 37 bp, Artificial Sequence
  primer
gtaaaacgacggccagtacgcagtggcattcattagc

SEQ ID NO: 94215 - DNA, 38 bp, Artificial Sequence
  primer
gtaaaacgacggccagtaagggaacacagtcagggttg

SEQ ID NO: 94216 - DNA, 20 bp, Artificial Sequence
  primer
atgtctaagggcaccgatcc

SEQ ID NO: 94217 - DNA, 37 bp, Artificial Sequence
  primer
gtaaaacgacggccagtccagagaaggaagcctttgg

SEQ ID NO: 94218 - DNA, 38 bp, Artificial Sequence
  primer
gtaaaacgacggccagtagatccttctccttctgtcgg

SEQ ID NO: 94219 - DNA, 21 bp, Artificial Sequence
  primer
ggtgagtggttccctaactgc

SEQ ID NO: 94220 - DNA, 38 bp, Artificial Sequence
  primer
gtaaaacgacggccagtgtctgaagtgcttctcccacc

SEQ ID NO: 94221 - DNA, 21 bp, Artificial Sequence
  primer
ttcccatttagtttcgcacag

SEQ ID NO: 94222 - DNA, 21 bp, Artificial Sequence
  primer
gacctcagcatcatccactcc

SEQ ID NO: 94223 - DNA, 38 bp, Artificial Sequence
  primer
gtaaaacgacggccagtcagctgagcactagggaggag

SEQ ID NO: 94224 - DNA, 20 bp, Artificial Sequence
  primer
atggctgacctcaccctatg

SEQ ID NO: 94225 - DNA, 38 bp, Artificial Sequence
  primer
gtaaaacgacggccagtctgcactgaactgaaggttgg

SEQ ID NO: 94226 - DNA, 21 bp, Artificial Sequence
  primer
ctacaggtacattcttgccgc

SEQ ID NO: 94227 - DNA, 21 bp, Artificial Sequence
  primer
agactgaggcaggaagctctg

SEQ ID NO: 94228 - DNA, 30 bp, Artificial Sequence
  primer
caggttaaattagagtttaagagtcacagt

SEQ ID NO: 94229 - DNA, 21 bp, Artificial Sequence
  primer
tcagctggtttccattcattc

SEQ ID NO: 94230 - DNA, 37 bp, Artificial Sequence
  primer
gtaaaacgacggccagtctcttgccctcctgatccac

SEQ ID NO: 94231 - DNA, 21 bp, Artificial Sequence
  primer
cctgggcaacaagagagaaac

SEQ ID NO: 94232 - DNA, 21 bp, Artificial Sequence
  primer
gggcaaatgtggaataaatgg

SEQ ID NO: 94233 - DNA, 40 bp, Artificial Sequence
  primer
gtaaaacgacggccagtccaaacctgaaaccaattagaca

SEQ ID NO: 94234 - DNA, 38 bp, Artificial Sequence
  primer
gtaaaacgacggccagtgtgacacaactggacaggacc

SEQ ID NO: 94235 - DNA, 21 bp, Artificial Sequence
  primer
gcagtgagctatgattgcacc

SEQ ID NO: 94236 - DNA, 21 bp, Artificial Sequence
  primer
cctgtgcaacagaatgagtcc

SEQ ID NO: 94237 - DNA, 23 bp, Artificial Sequence
  primer
tgtttcaacaaagctgttatccc

SEQ ID NO: 94238 - DNA, 22 bp, Artificial Sequence
  primer
acactggtcattacaccgattg

SEQ ID NO: 94239 - DNA, 39 bp, Artificial Sequence
  primer
gtaaaacgacggccagtaacagccttaccaaagcatacg

SEQ ID NO: 94240 - DNA, 38 bp, Artificial Sequence
  primer
gtaaaacgacggccagtgctgtccagatcttgaatccc

SEQ ID NO: 94241 - DNA, 40 bp, Artificial Sequence
  primer
gtaaaacgacggccagtttggaatttaaagttgttgacgg

SEQ ID NO: 94242 - DNA, 37 bp, Artificial Sequence
  primer
gtaaaacgacggccagtctgggatgcaccgaagtaac

SEQ ID NO: 94243 - DNA, 38 bp, Artificial Sequence
  primer
gtaaaacgacggccagtcagttgagccagtgagcacat

SEQ ID NO: 94244 - DNA, 38 bp, Artificial Sequence
  primer
gtaaaacgacggccagtcatatttcctctcatccgcct

SEQ ID NO: 94245 - DNA, 38 bp, Artificial Sequence
  primer
gtaaaacgacggccagtataaatgctgttgctgatgcc

SEQ ID NO: 94246 - DNA, 22 bp, Artificial Sequence
  primer
aacagggaaagacatgaccaag

SEQ ID NO: 94247 - DNA, 23 bp, Artificial Sequence
  primer
tggacactagagacaaatagccc

SEQ ID NO: 94248 - DNA, 38 bp, Artificial Sequence
  primer
gtaaaacgacggccagtcccacctttggacctactctc

SEQ ID NO: 94249 - DNA, 21 bp, Artificial Sequence
  primer
acgcatcaagtgcgaattact

SEQ ID NO: 94250 - DNA, 43 bp, Artificial Sequence
  primer
gtaaaacgacggccagttgacagaaatatccataaatcaggac

SEQ ID NO: 94251 - DNA, 21 bp, Artificial Sequence
  primer
atgtcggaattagcagcttgg

SEQ ID NO: 94252 - DNA, 21 bp, Artificial Sequence
  primer
tattctgcctgcttgcatacc

SEQ ID NO: 94253 - DNA, 40 bp, Artificial Sequence
  primer
gtaaaacgacggccagtgccatcggtatgactatatgtgg

SEQ ID NO: 94254 - DNA, 39 bp, Artificial Sequence
  primer
gtaaaacgacggccagtttcatggatgggaaattcattc

SEQ ID NO: 94255 - DNA, 21 bp, Artificial Sequence
  primer
tgttggctgactggatagcag

SEQ ID NO: 94256 - DNA, 38 bp, Artificial Sequence
  primer
gtaaaacgacggccagttcacttgggattcagaatggg

SEQ ID NO: 94257 - DNA, 41 bp, Artificial Sequence
  primer
gtaaaacgacggccagtcatccacttattccttgtctaccc

SEQ ID NO: 94258 - DNA, 25 bp, Artificial Sequence
  primer
tgacccattatcttacattcagtgc

SEQ ID NO: 94259 - DNA, 20 bp, Artificial Sequence
  primer
ggctgcagtgagcgatattc

SEQ ID NO: 94260 - DNA, 38 bp, Artificial Sequence
  primer
gtaaaacgacggccagtaactccaaggcaaggagtctg

SEQ ID NO: 94261 - DNA, 25 bp, Artificial Sequence
  primer
tttcaatatttctgcaataaacacg

SEQ ID NO: 94262 - DNA, 41 bp, Artificial Sequence
  primer
gtaaaacgacggccagttcaaggactggaactattcagatg

SEQ ID NO: 94263 - DNA, 30 bp, Artificial Sequence
  primer
ttaaatagctctttgatttctatcctaaca

SEQ ID NO: 94264 - DNA, 22 bp, Artificial Sequence
  primer
ttgtggttcaatctcctcttcc

SEQ ID NO: 94265 - DNA, 23 bp, Artificial Sequence
  primer
tgatgagaagagtccatcaacaa

SEQ ID NO: 94266 - DNA, 38 bp, Artificial Sequence
  primer
gtaaaacgacggccagtttcacactgcaaccatgacag

SEQ ID NO: 94267 - DNA, 20 bp, Artificial Sequence
  primer
cgcaccatagcactctagcc

SEQ ID NO: 94268 - DNA, 24 bp, Artificial Sequence
  primer
aagggttagttcctcactatctgg

SEQ ID NO: 94269 - DNA, 37 bp, Artificial Sequence
  primer
gtaaaacgacggccagtcatgtatctgctcaggtggg

SEQ ID NO: 94270 - DNA, 21 bp, Artificial Sequence
  primer
ggctgtttcagtggcttcttc

SEQ ID NO: 94271 - DNA, 21 bp, Artificial Sequence
  primer
tgaaagccttatcttcctggg

SEQ ID NO: 94272 - DNA, 21 bp, Artificial Sequence
  primer
gactggctagagaccattcgc

SEQ ID NO: 94273 - DNA, 21 bp, Artificial Sequence
  primer
ctctggcaagattctgagctg

SEQ ID NO: 94274 - DNA, 26 bp, Artificial Sequence
  primer
tccctgatcatttacttaatctgtcc

SEQ ID NO: 94275 - DNA, 38 bp, Artificial Sequence
  primer
gtaaaacgacggccagtccaccttgtctctcccttgac

SEQ ID NO: 94276 - DNA, 43 bp, Artificial Sequence
  primer
gtaaaacgacggccagtcatttcctacttcccataataccttg

SEQ ID NO: 94277 - DNA, 26 bp, Artificial Sequence
  primer
tgaagtaacatgattatcttgggtcc

SEQ ID NO: 94278 - DNA, 39 bp, Artificial Sequence
  primer
gtaaaacgacggccagttgtcagctttgctttgtagctt

SEQ ID NO: 94279 - DNA, 21 bp, Artificial Sequence
  primer
atttgggatgctcaacctgta

SEQ ID NO: 94280 - DNA, 38 bp, Artificial Sequence
  primer
gtaaaacgacggccagtcccgtactgcaacatgaaaga

SEQ ID NO: 94281 - DNA, 38 bp, Artificial Sequence
  primer
gtaaaacgacggccagtaatggattgcaacaaatgcac

SEQ ID NO: 94282 - DNA, 21 bp, Artificial Sequence
  primer
gctgtcctggagataccactg

SEQ ID NO: 94283 - DNA, 27 bp, Artificial Sequence
  primer
atttgttagggtatcactggtctaatc

SEQ ID NO: 94284 - DNA, 44 bp, Artificial Sequence
  primer
gtaaaacgacggccagtaagttgaaggaagtcaatatcttaccc

SEQ ID NO: 94285 - DNA, 22 bp, Artificial Sequence
  primer
gtatttgtgtggtcttccatgc

SEQ ID NO: 94286 - DNA, 27 bp, Artificial Sequence
  primer
tgaccttcaattcttatgtcatactgt

SEQ ID NO: 94287 - DNA, 22 bp, Artificial Sequence
  primer
tgactccaagaacattctcagc

SEQ ID NO: 94288 - DNA, 38 bp, Artificial Sequence
  primer
gtaaaacgacggccagtccagggcttgagttaggtttc

SEQ ID NO: 94289 - DNA, 39 bp, Artificial Sequence
  primer
gtaaaacgacggccagtttgaccttccgcttctgtttac

SEQ ID NO: 94290 - DNA, 22 bp, Artificial Sequence
  primer
ggtctctccttcagcaacaaag

SEQ ID NO: 94291 - DNA, 39 bp, Artificial Sequence
  primer
gtaaaacgacggccagtcacacttggcagaagccttaac

SEQ ID NO: 94292 - DNA, 21 bp, Artificial Sequence
  primer
gcatccagatgcgtacagttc

SEQ ID NO: 94293 - DNA, 24 bp, Artificial Sequence
  primer
ggatattgaagaagcaatgagcac

SEQ ID NO: 94294 - DNA, 39 bp, Artificial Sequence
  primer
gtaaaacgacggccagtcatcatcctcactctccaggtc

SEQ ID NO: 94295 - DNA, 38 bp, Artificial Sequence
  primer
gtaaaacgacggccagtacacctggctgacatactccc

SEQ ID NO: 94296 - DNA, 38 bp, Artificial Sequence
  primer
gtaaaacgacggccagttccctttgactatctgcagcc

SEQ ID NO: 94297 - DNA, 38 bp, Artificial Sequence
  primer
gtaaaacgacggccagttgtggttatctgtgccctgtg

SEQ ID NO: 94298 - DNA, 38 bp, Artificial Sequence
  primer
gtaaaacgacggccagtcactgtcttgacctgtttccg

SEQ ID NO: 94299 - DNA, 20 bp, Artificial Sequence
  primer
agagcatctctccctcccac

SEQ ID NO: 94300 - DNA, 38 bp, Artificial Sequence
  primer
gtaaaacgacggccagtccatccataccagggactttc

SEQ ID NO: 94301 - DNA, 21 bp, Artificial Sequence
  primer
ttggcctttatcctgacagtg

SEQ ID NO: 94302 - DNA, 38 bp, Artificial Sequence
  primer
gtaaaacgacggccagtggttcttctcctggaagaggg

SEQ ID NO: 94303 - DNA, 21 bp, Artificial Sequence
  primer
cacacaggacaaatgtgcatc

SEQ ID NO: 94304 - DNA, 36 bp, Artificial Sequence
  primer
gtaaaacgacggccagtgcactgggttgggttcaag

SEQ ID NO: 94305 - DNA, 21 bp, Artificial Sequence
  primer
tctgtctggttcctgctatgc

SEQ ID NO: 94306 - DNA, 21 bp, Artificial Sequence
  primer
tggcatctcaggatacttggc

SEQ ID NO: 94307 - DNA, 21 bp, Artificial Sequence
  primer
actgctctttctccttctgcg

SEQ ID NO: 94308 - DNA, 38 bp, Artificial Sequence
  primer
gtaaaacgacggccagttacccacaccttcacagcaag

SEQ ID NO: 94309 - DNA, 38 bp, Artificial Sequence
  primer
gtaaaacgacggccagtatgtcctcccattcttcatcc

SEQ ID NO: 94310 - DNA, 38 bp, Artificial Sequence
  primer
gtaaaacgacggccagtgggagaattcagctccacctc

SEQ ID NO: 94311 - DNA, 21 bp, Artificial Sequence
  primer
ggaatgtcattggaggatgtg

SEQ ID NO: 94312 - DNA, 21 bp, Artificial Sequence
  primer
ttcttggcagagttgaaaggg

SEQ ID NO: 94313 - DNA, 38 bp, Artificial Sequence
  primer
gtaaaacgacggccagtgaaactagggccgaaataggg

SEQ ID NO: 94314 - DNA, 22 bp, Artificial Sequence
  primer
gcaatacctgttctttgcttgg

SEQ ID NO: 94315 - DNA, 21 bp, Artificial Sequence
  primer
ctgagcctccaagtcttcctg

SEQ ID NO: 94316 - DNA, 21 bp, Artificial Sequence
  primer
taggtaccaccttctctcccg

SEQ ID NO: 94317 - DNA, 38 bp, Artificial Sequence
  primer
gtaaaacgacggccagtaggaggtggcatctttgtttc

SEQ ID NO: 94318 - DNA, 21 bp, Artificial Sequence
  primer
aacactggttgaatggatgcc

SEQ ID NO: 94319 - DNA, 38 bp, Artificial Sequence
  primer
gtaaaacgacggccagtgacagggtccctccctaagtc

SEQ ID NO: 94320 - DNA, 21 bp, Artificial Sequence
  primer
aggatcctcagcaacaaggtg

SEQ ID NO: 94321 - DNA, 21 bp, Artificial Sequence
  primer
aaggaggaaggtgaatggatg

SEQ ID NO: 94322 - DNA, 21 bp, Artificial Sequence
  primer
aactcaaggctcacgtctgtg

SEQ ID NO: 94323 - DNA, 18 bp, Artificial Sequence
  primer
ctgctgcagctcctgctc

SEQ ID NO: 94324 - DNA, 21 bp, Artificial Sequence
  primer
ggcatatcagcaggagctttg

SEQ ID NO: 94325 - DNA, 21 bp, Artificial Sequence
  primer
gctttgaacacactttgaggg

SEQ ID NO: 94326 - DNA, 38 bp, Artificial Sequence
  primer
gtaaaacgacggccagtatagagcctccctcaccatcc

SEQ ID NO: 94327 - DNA, 21 bp, Artificial Sequence
  primer
agagaggaggctctttggtcc

SEQ ID NO: 94328 - DNA, 38 bp, Artificial Sequence
  primer
gtaaaacgacggccagtacatttccaaacaatggctcc

SEQ ID NO: 94329 - DNA, 38 bp, Artificial Sequence
  primer
gtaaaacgacggccagttacagtgaactcgaaggcgtg

SEQ ID NO: 94330 - DNA, 21 bp, Artificial Sequence
  primer
agggttgtatgggatgaggtg

SEQ ID NO: 94331 - DNA, 21 bp, Artificial Sequence
  primer
ttgtcatccatgtcataccgc

SEQ ID NO: 94332 - DNA, 38 bp, Artificial Sequence
  primer
gtaaaacgacggccagtataacctttcaccaagcaccg

SEQ ID NO: 94333 - DNA, 21 bp, Artificial Sequence
  primer
agtcctttgtctggacatcgc

SEQ ID NO: 94334 - DNA, 38 bp, Artificial Sequence
  primer
gtaaaacgacggccagtacaacaggccatcttcctctc

SEQ ID NO: 94335 - DNA, 21 bp, Artificial Sequence
  primer
agcgctagagaagagggtcag

SEQ ID NO: 94336 - DNA, 21 bp, Artificial Sequence
  primer
gtgtggttgcactggacaatc

SEQ ID NO: 94337 - DNA, 20 bp, Artificial Sequence
  primer
tatcagccttgcctttgctg

SEQ ID NO: 94338 - DNA, 38 bp, Artificial Sequence
  primer
gtaaaacgacggccagttgtcagaggtttgggaaggtc

SEQ ID NO: 94339 - DNA, 35 bp, Artificial Sequence
  primer
gtaaaacgacggccagtaaccactctgggcaaggc

SEQ ID NO: 94340 - DNA, 19 bp, Artificial Sequence
  primer
aatactgggcccgtgactg

SEQ ID NO: 94341 - DNA, 38 bp, Artificial Sequence
  primer
gtaaaacgacggccagttatggctgtacgagaacctgg

SEQ ID NO: 94342 - DNA, 37 bp, Artificial Sequence
  primer
gtaaaacgacggccagttccatcagctctgctccttc

SEQ ID NO: 94343 - DNA, 21 bp, Artificial Sequence
  primer
aggtagtgtggagctcgttgg

SEQ ID NO: 94344 - DNA, 21 bp, Artificial Sequence
  primer
cacaagcatcagtgggacttc

SEQ ID NO: 94345 - DNA, 38 bp, Artificial Sequence
  primer
gtaaaacgacggccagtattctgggcaatggtcgtaag

SEQ ID NO: 94346 - DNA, 38 bp, Artificial Sequence
  primer
gtaaaacgacggccagtcctcaccttcatttcagtccc

SEQ ID NO: 94347 - DNA, 21 bp, Artificial Sequence
  primer
acggtgcatgaagcagtagac

SEQ ID NO: 94348 - DNA, 38 bp, Artificial Sequence
  primer
gtaaaacgacggccagtggtttcctgtgtcagttgtgg

SEQ ID NO: 94349 - DNA, 21 bp, Artificial Sequence
  primer
ccaagttcaccattcctcctc

SEQ ID NO: 94350 - DNA, 37 bp, Artificial Sequence
  primer
gtaaaacgacggccagtgctggcagctctgggtttag

SEQ ID NO: 94351 - DNA, 38 bp, Artificial Sequence
  primer
gtaaaacgacggccagtccaagcagatcctctgtgacc

SEQ ID NO: 94352 - DNA, 21 bp, Artificial Sequence
  primer
tgactggatgtgaggttgagg

SEQ ID NO: 94353 - DNA, 38 bp, Artificial Sequence
  primer
gtaaaacgacggccagtatgactcccagcaactgtgac

SEQ ID NO: 94354 - DNA, 22 bp, Artificial Sequence
  primer
tcagaatgcattgtaagaaggg

SEQ ID NO: 94355 - DNA, 20 bp, Artificial Sequence
  primer
cactcgggcttaggtcttcc

SEQ ID NO: 94356 - DNA, 21 bp, Artificial Sequence
  primer
atttgcatcacacagtctggc

SEQ ID NO: 94357 - DNA, 21 bp, Artificial Sequence
  primer
agcaacctacttgctcaaggc

SEQ ID NO: 94358 - DNA, 39 bp, Artificial Sequence
  primer
gtaaaacgacggccagtaagataccagccctcctttctg

SEQ ID NO: 94359 - DNA, 21 bp, Artificial Sequence
  primer
ccatgtagtcacacctgggag

SEQ ID NO: 94360 - DNA, 20 bp, Artificial Sequence
  primer
ctgagagttagcggtgggtg

SEQ ID NO: 94361 - DNA, 38 bp, Artificial Sequence
  primer
gtaaaacgacggccagtcctgtttcctgagacccagtc

SEQ ID NO: 94362 - DNA, 21 bp, Artificial Sequence
  primer
aggtctataccctgctggtgc

SEQ ID NO: 94363 - DNA, 38 bp, Artificial Sequence
  primer
gtaaaacgacggccagtcctcccattctgtaaacaggg

SEQ ID NO: 94364 - DNA, 21 bp, Artificial Sequence
  primer
gtatctggcaggatccagagg

SEQ ID NO: 94365 - DNA, 38 bp, Artificial Sequence
  primer
gtaaaacgacggccagtggctcagcagttgcttcagtt

SEQ ID NO: 94366 - DNA, 38 bp, Artificial Sequence
  primer
gtaaaacgacggccagtcagggtcttatgaggccagag

SEQ ID NO: 94367 - DNA, 21 bp, Artificial Sequence
  primer
ttaggaattaatcccaggccc

SEQ ID NO: 94368 - DNA, 21 bp, Artificial Sequence
  primer
tgtgactggctagtttcagcc

SEQ ID NO: 94369 - DNA, 21 bp, Artificial Sequence
  primer
aatcctagtgctgtgggcttc

SEQ ID NO: 94370 - DNA, 38 bp, Artificial Sequence
  primer
gtaaaacgacggccagtgaataggttggacctcatggc

SEQ ID NO: 94371 - DNA, 38 bp, Artificial Sequence
  primer
gtaaaacgacggccagtcatggctccagttcagacaag

SEQ ID NO: 94372 - DNA, 39 bp, Artificial Sequence
  primer
gtaaaacgacggccagttgaggatccctaatttcacacg

SEQ ID NO: 94373 - DNA, 21 bp, Artificial Sequence
  primer
gagtcctttaccttgatgggc

SEQ ID NO: 94374 - DNA, 37 bp, Artificial Sequence
  primer
gtaaaacgacggccagtgggcatagcagatgggactc

SEQ ID NO: 94375 - DNA, 38 bp, Artificial Sequence
  primer
gtaaaacgacggccagtaagcatttgcctgaactcacc

SEQ ID NO: 94376 - DNA, 21 bp, Artificial Sequence
  primer
ggaacctgtttcagggatttc

SEQ ID NO: 94377 - DNA, 37 bp, Artificial Sequence
  primer
gtaaaacgacggccagtaaggatcatgggctggaatc

SEQ ID NO: 94378 - DNA, 21 bp, Artificial Sequence
  primer
tctgaccacactcaccctctc

SEQ ID NO: 94379 - DNA, 20 bp, Artificial Sequence
  primer
actgtgggtaccacgtctgc

SEQ ID NO: 94380 - DNA, 23 bp, Artificial Sequence
  primer
tctaggtttatgaggcttgtccc

SEQ ID NO: 94381 - DNA, 23 bp, Artificial Sequence
  primer
ggcataatgtttcacatcaacaa

SEQ ID NO: 94382 - DNA, 20 bp, Artificial Sequence
  primer
gggcagacaacttccatcac

SEQ ID NO: 94383 - DNA, 39 bp, Artificial Sequence
  primer
gtaaaacgacggccagttctttgccacatcatttctttc

SEQ ID NO: 94384 - DNA, 42 bp, Artificial Sequence
  primer
gtaaaacgacggccagtcaacaagaatcaggcagctagtaac

SEQ ID NO: 94385 - DNA, 37 bp, Artificial Sequence
  primer
gtaaaacgacggccagtaaccctccatgatgtgcaag

SEQ ID NO: 94386 - DNA, 21 bp, Artificial Sequence
  primer
tggctgtacttgaggcaacag

SEQ ID NO: 94387 - DNA, 21 bp, Artificial Sequence
  primer
agccttcttagtcttgcccac

SEQ ID NO: 94388 - DNA, 21 bp, Artificial Sequence
  primer
tccttcttgcatcttgggttc

SEQ ID NO: 94389 - DNA, 38 bp, Artificial Sequence
  primer
gtaaaacgacggccagttccttcttgcatcttgggttc

SEQ ID NO: 94390 - DNA, 21 bp, Artificial Sequence
  primer
tcttctgctcttggtccagtg

SEQ ID NO: 94391 - DNA, 20 bp, Artificial Sequence
  primer
caagcctgaactgagccatc

SEQ ID NO: 94392 - DNA, 21 bp, Artificial Sequence
  primer
gaatgcagagagttggcacag

SEQ ID NO: 94393 - DNA, 21 bp, Artificial Sequence
  primer
tacaggagggcaatgtgtctc

SEQ ID NO: 94394 - DNA, 21 bp, Artificial Sequence
  primer
cctcccattctgtaaacaggg

SEQ ID NO: 94395 - DNA, 21 bp, Artificial Sequence
  primer
agtctatcaggtcctccctgc

SEQ ID NO: 94396 - DNA, 21 bp, Artificial Sequence
  primer
ccaggagattaggctgcagtg

SEQ ID NO: 94397 - DNA, 21 bp, Artificial Sequence
  primer
ctcagagctggagcttgaacc

SEQ ID NO: 94398 - DNA, 38 bp, Artificial Sequence
  primer
gtaaaacgacggccagtctgaccttgcttctcagggac

SEQ ID NO: 94399 - DNA, 37 bp, Artificial Sequence
  primer
gtaaaacgacggccagtatcactgtggcttctccagg

SEQ ID NO: 94400 - DNA, 38 bp, Artificial Sequence
  primer
gtaaaacgacggccagtattcagtggagatgggattgg

SEQ ID NO: 94401 - DNA, 20 bp, Artificial Sequence
  primer
aggttagggtgtaggctggc

SEQ ID NO: 94402 - DNA, 39 bp, Artificial Sequence
  primer
gtaaaacgacggccagtggcaggtgtcagtattctggtc

SEQ ID NO: 94403 - DNA, 38 bp, Artificial Sequence
  primer
gtaaaacgacggccagtgaggtgaatctcctgtcccag

SEQ ID NO: 94404 - DNA, 38 bp, Artificial Sequence
  primer
gtaaaacgacggccagtatcaggccaactccctctttc

SEQ ID NO: 94405 - DNA, 38 bp, Artificial Sequence; identical to SEQ ID NO: 94403
  primer

SEQ ID NO: 94406 - DNA, 21 bp, Artificial Sequence
  primer
ttgtggctgtattggaagcag

SEQ ID NO: 94407 - DNA, 21 bp, Artificial Sequence
  primer
ctagcctgggcaacaagaaag

SEQ ID NO: 94408 - DNA, 38 bp, Artificial Sequence
  primer
gtaaaacgacggccagtactctgggaggaaacaccctc

SEQ ID NO: 94409 - DNA, 38 bp, Artificial Sequence
  primer
gtaaaacgacggccagtggtggcagtaggaatgctagg

SEQ ID NO: 94410 - DNA, 21 bp, Artificial Sequence
  primer
gaattagcagttagggctggg

SEQ ID NO: 94411 - DNA, 21 bp, Artificial Sequence
  primer
gcatgcatgtatgtaggtgcc

SEQ ID NO: 94412 - DNA, 21 bp, Artificial Sequence
  primer
acctcaatccttccagcacag

SEQ ID NO: 94413 - DNA, 38 bp, Artificial Sequence
  primer
gtaaaacgacggccagtatcaagcaaagcctttccaac

SEQ ID NO: 94414 - DNA, 37 bp, Artificial Sequence
  primer
gtaaaacgacggccagttggctacatttgcataccgc

SEQ ID NO: 94415 - DNA, 22 bp, Artificial Sequence
  primer
gaaagaccaagatgtttggcag

SEQ ID NO: 94416 - DNA, 20 bp, Artificial Sequence
  primer
caagtcaggtcacacctcgg

SEQ ID NO: 94417 - DNA, 38 bp, Artificial Sequence
  primer
gtaaaacgacggccagtttggcaacaaccagtccatag

SEQ ID NO: 94418 - DNA, 38 bp, Artificial Sequence
  primer
gtaaaacgacggccagtgcaatcttcctagctgccttt

SEQ ID NO: 94419 - DNA, 20 bp, Artificial Sequence
  primer
ctcactgctctcagggaagg

SEQ ID NO: 94420 - DNA, 21 bp, Artificial Sequence
  primer
tggaggagatgtgtctcatgg

SEQ ID NO: 94421 - DNA, 20 bp, Artificial Sequence
  primer
gtgggacagtcattgggatg

SEQ ID NO: 94422 - DNA, 21 bp, Artificial Sequence
  primer
gctggaggataggtggaagtg

SEQ ID NO: 94423 - DNA, 38 bp, Artificial Sequence
  primer
gtaaaacgacggccagttgctgtgtggtagaatctggg

SEQ ID NO: 94424 - DNA, 21 bp, Artificial Sequence
  primer
gttcaggctctacccaacagc

SEQ ID NO: 94425 - DNA, 38 bp, Artificial Sequence
  primer
gtaaaacgacggccagtttctcactggcaaatgtctgg

SEQ ID NO: 94426 - DNA, 39 bp, Artificial Sequence
  primer
gtaaaacgacggccagtccactctgagaaaggacagggt

SEQ ID NO: 94427 - DNA, 38 bp, Artificial Sequence
  primer
gtaaaacgacggccagttcaggaaagatcaagggaacc

SEQ ID NO: 94428 - DNA, 21 bp, Artificial Sequence
  primer
tggactccttctcatggactg

SEQ ID NO: 94429 - DNA, 38 bp, Artificial Sequence
  primer
gtaaaacgacggccagttaatgtcacactgcacctggg

SEQ ID NO: 94430 - DNA, 35 bp, Artificial Sequence
  primer
gtaaaacgacggccagtaaaggcacgtggcagaaa

SEQ ID NO: 94431 - DNA, 24 bp, Artificial Sequence
  primer
cctagggaactacacttcacatca

SEQ ID NO: 94432 - DNA, 21 bp, Artificial Sequence
  primer
actgttgagccaagaagcctg

SEQ ID NO: 94433 - DNA, 21 bp, Artificial Sequence
  primer
caggacaaccttatcttcggg

SEQ ID NO: 94434 - DNA, 19 bp, Artificial Sequence
  primer
ccactgtaccaggccttca

SEQ ID NO: 94435 - DNA, 27 bp, Artificial Sequence
  primer
tgaaagctctgtatcactaagaagctg

SEQ ID NO: 94436 - DNA, 23 bp, Artificial Sequence
  primer
ccatagggcagaccttacaattc

SEQ ID NO: 94437 - DNA, 43 bp, Artificial Sequence
  primer
gtaaaacgacggccagttttcagatgaactctcaaacatacaa

SEQ ID NO: 94438 - DNA, 38 bp, Artificial Sequence
  primer
gtaaaacgacggccagtactcttgccacagatcctcaa

SEQ ID NO: 94439 - DNA, 21 bp, Artificial Sequence
  primer
agggacttacctgtttcagca

SEQ ID NO: 94440 - DNA, 21 bp, Artificial Sequence
  primer
aactccgccaattatcacagg

SEQ ID NO: 94441 - DNA, 44 bp, Artificial Sequence
  primer
gtaaaacgacggccagtttatttaattccaaaccaatgtaatgt

SEQ ID NO: 94442 - DNA, 40 bp, Artificial Sequence
  primer
gtaaaacgacggccagttttcaatttcaagcattgtgaac

SEQ ID NO: 94443 - DNA, 39 bp, Artificial Sequence
  primer
gtaaaacgacggccagttgagttgcaatgaacagtcttg

SEQ ID NO: 94444 - DNA, 21 bp, Artificial Sequence
  primer
tagaaggcctggctttattcc

SEQ ID NO: 94445 - DNA, 21 bp, Artificial Sequence
  primer
tttaagcgatctcccaccttg

SEQ ID NO: 94446 - DNA, 19 bp, Artificial Sequence
  primer
aaagcccacctgaccattg

SEQ ID NO: 94447 - DNA, 21 bp, Artificial Sequence
  primer
aggtgtttgtgtggctgtgtc

SEQ ID NO: 94448 - DNA, 38 bp, Artificial Sequence
  primer
gtaaaacgacggccagtaatcacatggagcaagtgtcg

SEQ ID NO: 94449 - DNA, 38 bp, Artificial Sequence
  primer
gtaaaacgacggccagtattggtcgtgacaaacagcag

SEQ ID NO: 94450 - DNA, 21 bp, Artificial Sequence
  primer
gtggagactagggtgaggcag

SEQ ID NO: 94451 - DNA, 21 bp, Artificial Sequence
  primer
cagtaactgcgctattccagg

SEQ ID NO: 94452 - DNA, 21 bp, Artificial Sequence
  primer
aagctgggtacagtgggtctg

SEQ ID NO: 94453 - DNA, 37 bp, Artificial Sequence
  primer
gtaaaacgacggccagttgacctcactcactgcagcc

SEQ ID NO: 94454 - DNA, 37 bp, Artificial Sequence
  primer
gtaaaacgacggccagtacattcccaggagggatcag

SEQ ID NO: 94455 - DNA, 36 bp, Artificial Sequence
  primer
gtaaaacgacggccagtgtctgggcagctccttctg

SEQ ID NO: 94456 - DNA, 21 bp, Artificial Sequence
  primer
ccaagcaatgggactaacacc

SEQ ID NO: 94457 - DNA, 22 bp, Artificial Sequence
  primer
tccagggttgtaatactcaggg

SEQ ID NO: 94458 - DNA, 39 bp, Artificial Sequence
  primer
gtaaaacgacggccagttccactaaccctctacaggcag

SEQ ID NO: 94459 - DNA, 40 bp, Artificial Sequence
  primer
gtaaaacgacggccagtccattcactagtggttatggacc

SEQ ID NO: 94460 - DNA, 24 bp, Artificial Sequence
  primer
caagcattgcatttcttcaataag

SEQ ID NO: 94461 - DNA, 21 bp, Artificial Sequence
  primer
ctgaaggatgattgggaaagg

SEQ ID NO: 94462 - DNA, 21 bp, Artificial Sequence
  primer
actcagtggcatgttgtggtc

SEQ ID NO: 94463 - DNA, 37 bp, Artificial Sequence
  primer
gtaaaacgacggccagttccaacctggcaccagatac

SEQ ID NO: 94464 - DNA, 38 bp, Artificial Sequence
  primer
gtaaaacgacggccagtttccagacgaatatgtcagcc

SEQ ID NO: 94465 - DNA, 20 bp, Artificial Sequence
  primer
atgccttctcgccactcttc

SEQ ID NO: 94466 - DNA, 41 bp, Artificial Sequence
  primer
gtaaaacgacggccagtaagtcacatcctttctaagccttg

SEQ ID NO: 94467 - DNA, 22 bp, Artificial Sequence
  primer
tggctgtttcttcatgtaaccc

SEQ ID NO: 94468 - DNA, 22 bp, Artificial Sequence
  primer
cactgactctgcctggtgtatg

SEQ ID NO: 94469 - DNA, 39 bp, Artificial Sequence
  primer
gtaaaacgacggccagtcaccactgctgtacaaaggaac

SEQ ID NO: 94470 - DNA, 23 bp, Artificial Sequence
  primer
aagaacatctaggcaaccctcag

SEQ ID NO: 94471 - DNA, 38 bp, Artificial Sequence
  primer
gtaaaacgacggccagtagcttctcaaggaggctatgg

SEQ ID NO: 94472 - DNA, 40 bp, Artificial Sequence
  primer
gtaaaacgacggccagtacttggccacaacttctgtattc

SEQ ID NO: 94473 - DNA, 21 bp, Artificial Sequence
  primer
ctttctcaccttcctccctcc

SEQ ID NO: 94474 - DNA, 22 bp, Artificial Sequence
  primer
tgaaatgtttctgcatcaaagg

SEQ ID NO: 94475 - DNA, 42 bp, Artificial Sequence
  primer
gtaaaacgacggccagtgaccctgacataacctctctaaagc

SEQ ID NO: 94476 - DNA, 21 bp, Artificial Sequence
  primer
tctcttaagaaatgctgccca

SEQ ID NO: 94477 - DNA, 21 bp, Artificial Sequence
  primer
tcctaaccttgtgatccaccc

SEQ ID NO: 94478 - DNA, 38 bp, Artificial Sequence
  primer
gtaaaacgacggccagtgaattcaacgtgcttggtcag

SEQ ID NO: 94479 - DNA, 21 bp, Artificial Sequence
  primer
gagtgacagagcgagaccttg

SEQ ID NO: 94480 - DNA, 21 bp, Artificial Sequence
  primer
aataaaccaggcatttgcagg

SEQ ID NO: 94481 - DNA, 41 bp, Artificial Sequence
  primer
gtaaaacgacggccagtcagtaggaagtaaccacattcaaa

SEQ ID NO: 94482 - DNA, 41 bp, Artificial Sequence
  primer
gtaaaacgacggccagttgagtgatggaattatgagtgctt

SEQ ID NO: 94483 - DNA, 38 bp, Artificial Sequence
  primer
gtaaaacgacggccagtgtctcgactgaatgcttggaa

SEQ ID NO: 94484 - DNA, 37 bp, Artificial Sequence
  primer
gtaaaacgacggccagtggctcaagtgatcctcccag

SEQ ID NO: 94485 - DNA, 21 bp, Artificial Sequence
  primer
ggagcagatgagagaagcgac

SEQ ID NO: 94486 - DNA, 37 bp, Artificial Sequence
  primer
gtaaaacgacggccagtgaatagcgcaagacagccag

SEQ ID NO: 94487 - DNA, 22 bp, Artificial Sequence
  primer
gagctccagctatgaatgttcg

SEQ ID NO: 94488 - DNA, 21 bp, Artificial Sequence
  primer
ctgaccttgtttgcttcccag

SEQ ID NO: 94489 - DNA, 21 bp, Artificial Sequence
  primer
tcaaaggcttgacacacttgg

SEQ ID NO: 94490 - DNA, 27 bp, Artificial Sequence
  primer
gctttccttaaattaggtcaaggtttc

SEQ ID NO: 94491 - DNA, 21 bp, Artificial Sequence
  primer
acgtgacagaatgagaccctg

SEQ ID NO: 94492 - DNA, 22 bp, Artificial Sequence
  primer
gcttgctttcagggtttatcag

SEQ ID NO: 94493 - DNA, 23 bp, Artificial Sequence
  primer
caaagcaagctttcactgatttc

SEQ ID NO: 94494 - DNA, 21 bp, Artificial Sequence
  primer
attctccaatacaagggctgc

SEQ ID NO: 94495 - DNA, 21 bp, Artificial Sequence
  primer
ctgaaactgggtcattggtcc

SEQ ID NO: 94496 - DNA, 37 bp, Artificial Sequence
  primer
gtaaaacgacggccagtcagcacccagggttaatgtg

SEQ ID NO: 94497 - DNA, 22 bp, Artificial Sequence
  primer
tttccagtaaggacacctcctc

SEQ ID NO: 94498 - DNA, 21 bp, Artificial Sequence
  primer
gttgtctgcaatactggtggc

SEQ ID NO: 94499 - DNA, 37 bp, Artificial Sequence
  primer
gtaaaacgacggccagtcctcctcagtgctaggcttc

SEQ ID NO: 94500 - DNA, 38 bp, Artificial Sequence
  primer
gtaaaacgacggccagtgaaacctcctcctgagtggtg

SEQ ID NO: 94501 - DNA, 21 bp, Artificial Sequence
  primer
ttctttaaagggcagtggctc

SEQ ID NO: 94502 - DNA, 38 bp, Artificial Sequence
  primer
gtaaaacgacggccagtatcttctgcaagaccagtggc

SEQ ID NO: 94503 - DNA, 21 bp, Artificial Sequence
  primer
gaatcctcttcggcatcagtc

SEQ ID NO: 94504 - DNA, 21 bp, Artificial Sequence
  primer
aggacagcctccttctcagtg

SEQ ID NO: 94505 - DNA, 39 bp, Artificial Sequence
  primer
gtaaaacgacggccagttccaaagactccttgaagatgg

SEQ ID NO: 94506 - DNA, 38 bp, Artificial Sequence
  primer
gtaaaacgacggccagtgatggtaccagatttgcccac

SEQ ID NO: 94507 - DNA, 39 bp, Artificial Sequence
  primer
gtaaaacgacggccagtgggagatgaatacctcctttgg

SEQ ID NO: 94508 - DNA, 21 bp, Artificial Sequence
  primer
aactttgctagcagccacctc

SEQ ID NO: 94509 - DNA, 21 bp, Artificial Sequence
  primer
aacttgcacactgaaggatgg

SEQ ID NO: 94510 - DNA, 40 bp, Artificial Sequence
  primer
gtaaaacgacggccagtgcaggaaccacagcttattcaac

SEQ ID NO: 94511 - DNA, 21 bp, Artificial Sequence
  primer
taagcagtccatcattgacca

SEQ ID NO: 94512 - DNA, 21 bp, Artificial Sequence
  primer
ttggatggaaggagaaagctc

SEQ ID NO: 94513 - DNA, 21 bp, Artificial Sequence
  primer
tcccgtggccttaatttacac

SEQ ID NO: 94514 - DNA, 21 bp, Artificial Sequence
  primer
aacaagtgggacatacagccc

SEQ ID NO: 94515 - DNA, 21 bp, Artificial Sequence
  primer
gggctcctgaacaataagagg

SEQ ID NO: 94516 - DNA, 21 bp, Artificial Sequence
  primer
ctagaaatcattgcccaaccc

SEQ ID NO: 94517 - DNA, 27 bp, Artificial Sequence
  primer
acaaagattaagtcagttggtacacag

SEQ ID NO: 94518 - DNA, 38 bp, Artificial Sequence
  primer
gtaaaacgacggccagtaagcgcatcttgattctgacc

SEQ ID NO: 94519 - DNA, 22 bp, Artificial Sequence
  primer
caaattgtcttgagtgcctgtg

SEQ ID NO: 94520 - DNA, 26 bp, Artificial Sequence
  primer
aacacacatgtaggagccattaatac

SEQ ID NO: 94521 - DNA, 27 bp, Artificial Sequence
  primer
acaaagattaagtcagttggtacacag

SEQ ID NO: 94522 - DNA, 26 bp, Artificial Sequence
  primer
aataaagccaaccaatctcatatgtc

SEQ ID NO: 94523 - DNA, 42 bp, Artificial Sequence
  primer
gtaaaacgacggccagtaatatttgaaactgccatttctagg

SEQ ID NO: 94524 - DNA, 27 bp, Artificial Sequence
  primer
atataaataggctaccatgatttcacc

SEQ ID NO: 94525 - DNA, 46 bp, Artificial Sequence
  primer
gtaaaacgacggccagttttatggaacagataatttaggattgttt

SEQ ID NO: 94526 - DNA, 38 bp, Artificial Sequence
  primer
gtaaaacgacggccagtattgaaagctcacatgcaagg

SEQ ID NO: 94527 - DNA, 39 bp, Artificial Sequence
  primer
gtaaaacgacggccagttcttcttagcctggtggacatc

SEQ ID NO: 94528 - DNA, 27 bp, Artificial Sequence
  primer
gagatacctgtaatatacctccactgc

SEQ ID NO: 94529 - DNA, 41 bp, Artificial Sequence
  primer
gtaaaacgacggccagttccaatatgcttgacagaaacaag

SEQ ID NO: 94530 - DNA, 21 bp, Artificial Sequence
  primer
tgagtagcaaagaaacgtggg

SEQ ID NO: 94531 - DNA, 38 bp, Artificial Sequence
  primer
gtaaaacgacggccagtcggaggagcagatatgtcaga

SEQ ID NO: 94532 - DNA, 21 bp, Artificial Sequence
  primer
gacatcttcccagacagcacc

SEQ ID NO: 94533 - DNA, 36 bp, Artificial Sequence
  primer
gtaaaacgacggccagtcccaaccttgtcacccttg

SEQ ID NO: 94534 - DNA, 38 bp, Artificial Sequence
  primer
gtaaaacgacggccagtcaaggagaatgaagctttccc

SEQ ID NO: 94535 - DNA, 19 bp, Artificial Sequence
  primer
ctcccaggtttagggctcc

SEQ ID NO: 94536 - DNA, 38 bp, Artificial Sequence
  primer
gtaaaacgacggccagttctggcagtggtgatagaagg

SEQ ID NO: 94537 - DNA, 21 bp, Artificial Sequence
  primer
ccctcctccaaactcctgaac

SEQ ID NO: 94538 - DNA, 21 bp, Artificial Sequence
  primer
atcaaatccgtcgtctccttc

SEQ ID NO: 94539 - DNA, 24 bp, Artificial Sequence
  primer
tgtacttcaaataggcaccaaatg

SEQ ID NO: 94540 - DNA, 37 bp, Artificial Sequence
  primer
gtaaaacgacggccagtcatcctgcagattgctgtgg

SEQ ID NO: 94541 - DNA, 21 bp, Artificial Sequence
  primer
caattcctttcccaaaggtcc

SEQ ID NO: 94542 - DNA, 22 bp, Artificial Sequence
  primer
cctgttcactgtgagaccttgg

SEQ ID NO: 94543 - DNA, 38 bp, Artificial Sequence
  primer
gtaaaacgacggccagtgggttggaggtttccctctac

SEQ ID NO: 94544 - DNA, 37 bp, Artificial Sequence
  primer
gtaaaacgacggccagtatgtggtgtggttcctggag

SEQ ID NO: 94545 - DNA, 21 bp, Artificial Sequence
  primer
ctcgattaaactcctcggtgg

SEQ ID NO: 94546 - DNA, 21 bp, Artificial Sequence
  primer
aggcaggtgccaatacgttag

SEQ ID NO: 94547 - DNA, 38 bp, Artificial Sequence
  primer
gtaaaacgacggccagttcggtcttcacaacaatcctg

SEQ ID NO: 94548 - DNA, 38 bp, Artificial Sequence
  primer
gtaaaacgacggccagtcttatgagtcaggcaaggcag

SEQ ID NO: 94549 - DNA, 20 bp, Artificial Sequence
  primer
gtcattgttctcagggctgg

SEQ ID NO: 94550 - DNA, 21 bp, Artificial Sequence
  primer
tcaacaagagacagccacagc

SEQ ID NO: 94551 - DNA, 21 bp, Artificial Sequence
  primer
tgggacctatctggtcaatgc

SEQ ID NO: 94552 - DNA, 39 bp, Artificial Sequence
  primer
gtaaaacgacggccagtaaatgtgaacaacaggcaaatc

SEQ ID NO: 94553 - DNA, 38 bp, Artificial Sequence
  primer
gtaaaacgacggccagtcaaacgcatgcaagaactgtg

SEQ ID NO: 94554 - DNA, 38 bp, Artificial Sequence
  primer
gtaaaacgacggccagtcttgaaatgggagctagggag

SEQ ID NO: 94555 - DNA, 38 bp, Artificial Sequence
  primer
gtaaaacgacggccagtactccctttcaatccagcaag

SEQ ID NO: 94556 - DNA, 36 bp, Artificial Sequence
  primer
gtaaaacgacggccagtccgtcctccttcatggtgt

SEQ ID NO: 94557 - DNA, 18 bp, Artificial Sequence
  primer
gttcctgcccaagggacc

SEQ ID NO: 94558 - DNA, 38 bp, Artificial Sequence
  primer
gtaaaacgacggccagttccagcaagagacaagacagc

SEQ ID NO: 94559 - DNA, 21 bp, Artificial Sequence
  primer
agaatgcgtccatgctatgag

SEQ ID NO: 94560 - DNA, 38 bp, Artificial Sequence
  primer
gtaaaacgacggccagttcgagggaataaaccacacag

SEQ ID NO: 94561 - DNA, 38 bp, Artificial Sequence
  primer
gtaaaacgacggccagttgctataggctaagcgccaac

SEQ ID NO: 94562 - DNA, 38 bp, Artificial Sequence
  primer
gtaaaacgacggccagtcagaggcactcacacttcagg

SEQ ID NO: 94563 - DNA, 38 bp, Artificial Sequence
  primer
gtaaaacgacggccagtgaaatgatacaaggccgaagc

SEQ ID NO: 94564 - DNA, 21 bp, Artificial Sequence
  primer
taccctgcagtgaagacatcg

SEQ ID NO: 94565 - DNA, 18 bp, Artificial Sequence
  primer
cctggcctcaagtgatcg

SEQ ID NO: 94566 - DNA, 38 bp, Artificial Sequence
  primer
gtaaaacgacggccagtaacactttgccctgtttgatg

SEQ ID NO: 94567 - DNA, 21 bp, Artificial Sequence
  primer
ttcttggcctggattatctgg

SEQ ID NO: 94568 - DNA, 23 bp, Artificial Sequence
  primer
tttcttggtgacctcctctcttc

SEQ ID NO: 94569 - DNA, 38 bp, Artificial Sequence
  primer
gtaaaacgacggccagtattcgggcacatagaaaccac

SEQ ID NO: 94570 - DNA, 38 bp, Artificial Sequence
  primer
gtaaaacgacggccagtttgcaaccagcactactctca

SEQ ID NO: 94571 - DNA, 38 bp, Artificial Sequence
  primer
gtaaaacgacggccagtctttccactttgggtgcaatc

SEQ ID NO: 94572 - DNA, 23 bp, Artificial Sequence
  primer
ttcatccctgtggtaatgttcag

SEQ ID NO: 94573 - DNA, 42 bp, Artificial Sequence
  primer
gtaaaacgacggccagttgatgcattaacctcttagaactgg

SEQ ID NO: 94574 - DNA, 27 bp, Artificial Sequence
  primer
ggactcctaaagaatgaaagtactcag

SEQ ID NO: 94575 - DNA, 24 bp, Artificial Sequence
  primer
ttgttgatacacattcaggattgg

SEQ ID NO: 94576 - DNA, 23 bp, Artificial Sequence
  primer
ttgagacacttcacaaatcttgc

SEQ ID NO: 94577 - DNA, 21 bp, Artificial Sequence
  primer
tagggcaatcaatcacagcac

SEQ ID NO: 94578 - DNA, 38 bp, Artificial Sequence
  primer
gtaaaacgacggccagtgggttaaagagctcgagccag

SEQ ID NO: 94579 - DNA, 39 bp, Artificial Sequence
  primer
gtaaaacgacggccagtcagttaagaacacaaggcctga

SEQ ID NO: 94580 - DNA, 37 bp, Artificial Sequence
  primer
gtaaaacgacggccagttctgccaccctcagtcactc

SEQ ID NO: 94581 - DNA, 21 bp, Artificial Sequence
  primer
caagaggcgactttcgtaacc

SEQ ID NO: 94582 - DNA, 21 bp, Artificial Sequence
  primer
gcatcttcacttcccttaggc

SEQ ID NO: 94583 - DNA, 37 bp, Artificial Sequence
  primer
gtaaaacgacggccagtctctgctgttctcaccgtcc

SEQ ID NO: 94584 - DNA, 21 bp, Artificial Sequence
  primer
accaagaatagccgactgacc

SEQ ID NO: 94585 - DNA, 21 bp, Artificial Sequence
  primer
ttagggtgtccctcaatcctg

SEQ ID NO: 94586 - DNA, 21 bp, Artificial Sequence
  primer
ataagggaactctatgccgcc

SEQ ID NO: 94587 - DNA, 18 bp, Artificial Sequence
  primer
gcacatgaagggcaggtg

SEQ ID NO: 94588 - DNA, 20 bp, Artificial Sequence
  primer
gctctctgagtccatgaggc

SEQ ID NO: 94589 - DNA, 21 bp, Artificial Sequence
  primer
ggacaaatggatgctggactc

SEQ ID NO: 94590 - DNA, 20 bp, Artificial Sequence
  primer
ggaattataggcgtgcacca

SEQ ID NO: 94591 - DNA, 37 bp, Artificial Sequence
  primer
gtaaaacgacggccagttgtagctcagcacctgaggg

SEQ ID NO: 94592 - DNA, 21 bp, Artificial Sequence
  primer
gagacagtggaggttacgcag

SEQ ID NO: 94593 - DNA, 37 bp, Artificial Sequence
  primer
gtaaaacgacggccagttctgtgcacatcttcctccc

SEQ ID NO: 94594 - DNA, 21 bp, Artificial Sequence
  primer
acggaggagtaccctgaggtc

SEQ ID NO: 94595 - DNA, 21 bp, Artificial Sequence
  primer
tatgctatgctcccacccttc

SEQ ID NO: 94596 - DNA, 38 bp, Artificial Sequence
  primer
gtaaaacgacggccagtttcctatgctatgctcccacc

SEQ ID NO: 94597 - DNA, 42 bp, Artificial Sequence
  primer
gtaaaacgacggccagtaaggtcaagtttatgaataccagcc

SEQ ID NO: 94598 - DNA, 39 bp, Artificial Sequence
  primer
gtaaaacgacggccagtttaaagttcaaggagccacagc

SEQ ID NO: 94599 - DNA, 22 bp, Artificial Sequence
  primer
tgcaatgatagacaatgccaac

SEQ ID NO: 94600 - DNA, 22 bp, Artificial Sequence
  primer
catttggatacaagctcttgcc

SEQ ID NO: 94601 - DNA, 42 bp, Artificial Sequence
  primer
gtaaaacgacggccagtgactagatcagtgatgtcatctccc

SEQ ID NO: 94602 - DNA, 22 bp, Artificial Sequence
  primer
gctttagtcatgattcaacggg

SEQ ID NO: 94603 - DNA, 41 bp, Artificial Sequence
  primer
gtaaaacgacggccagtaaatatttcttgaaccctgtgtgc

SEQ ID NO: 94604 - DNA, 21 bp, Artificial Sequence
  primer
caagagcgaaattccttctcc

SEQ ID NO: 94605 - DNA, 22 bp, Artificial Sequence
  primer
gcacaaggctaatacagatggc

SEQ ID NO: 94606 - DNA, 21 bp, Artificial Sequence
  primer
tactgtctgggtcaaagctgc

SEQ ID NO: 94607 - DNA, 43 bp, Artificial Sequence
  primer
gtaaaacgacggccagtttcttagctcttagtgtaggtgcttg

SEQ ID NO: 94608 - DNA, 38 bp, Artificial Sequence
  primer
gtaaaacgacggccagtgggctaaaccaggaaactacc

SEQ ID NO: 94609 - DNA, 21 bp, Artificial Sequence
  primer
tggttacttgtctgccattcg

SEQ ID NO: 94610 - DNA, 41 bp, Artificial Sequence
  primer
gtaaaacgacggccagtttgagtggacagggaatttagaag

SEQ ID NO: 94611 - DNA, 40 bp, Artificial Sequence
  primer
gtaaaacgacggccagttctctctcacaattctctcctcc

SEQ ID NO: 94612 - DNA, 38 bp, Artificial Sequence
  primer
gtaaaacgacggccagtccagacccacaggttgtatcc

SEQ ID NO: 94613 - DNA, 21 bp, Artificial Sequence
  primer
tcttctcaccaaccatcccag

SEQ ID NO: 94614 - DNA, 39 bp, Artificial Sequence
  primer
gtaaaacgacggccagtccaatgtgtctttcatgcttcc

SEQ ID NO: 94615 - DNA, 41 bp, Artificial Sequence
  primer
gtaaaacgacggccagtggatcagtcagctttcctctaatg

SEQ ID NO: 94616 - DNA, 25 bp, Artificial Sequence
  primer
ctttctatgaacacaggaaggattc

SEQ ID NO: 94617 - DNA, 21 bp, Artificial Sequence
  primer
aggcaaatgagttgcagcttt

SEQ ID NO: 94618 - DNA, 40 bp, Artificial Sequence
  primer
gtaaaacgacggccagtaaatggtacacactcctccaatg

SEQ ID NO: 94619 - DNA, 38 bp, Artificial Sequence
  primer
gtaaaacgacggccagtttctccagcaaagttctccac

SEQ ID NO: 94620 - DNA, 18 bp, Artificial Sequence
  primer
gggaacagggacagggag

SEQ ID NO: 94621 - DNA, 24 bp, Artificial Sequence
  primer
tgcgaattaagcttcagtgatatg

SEQ ID NO: 94622 - DNA, 24 bp, Artificial Sequence
  primer
ttaagaatggtttgccattacaac

SEQ ID NO: 94623 - DNA, 21 bp, Artificial Sequence
  primer
tgacagaaacaggctgcaaag

SEQ ID NO: 94624 - DNA, 39 bp, Artificial Sequence
  primer
gtaaaacgacggccagttttccttctacagcctttcctg

SEQ ID NO: 94625 - DNA, 37 bp, Artificial Sequence
  primer
gtaaaacgacggccagtctggcccggaagatagtgag

SEQ ID NO: 94626 - DNA, 22 bp, Artificial Sequence
  primer
ctggaatgaatgggatttgatg

SEQ ID NO: 94627 - DNA, 41 bp, Artificial Sequence
  primer
gtaaaacgacggccagtagaaggtgcataatttagaaaggc

SEQ ID NO: 94628 - DNA, 38 bp, Artificial Sequence
  primer
gtaaaacgacggccagtgctcatggcagcaagtaactg

SEQ ID NO: 94629 - DNA, 22 bp, Artificial Sequence
  primer
cgcttacccatagcttcatgtc

SEQ ID NO: 94630 - DNA, 22 bp, Artificial Sequence
  primer
ccaccagaaacaacattcaaac

SEQ ID NO: 94631 - DNA, 24 bp, Artificial Sequence
  primer
aaggtaccacgggagtaaactttc

SEQ ID NO: 94632 - DNA, 38 bp, Artificial Sequence
  primer
gtaaaacgacggccagtagagactggcagacacaaggg

SEQ ID NO: 94633 - DNA, 38 bp, Artificial Sequence
  primer
gtaaaacgacggccagtcatgcccttggtatttcacac

SEQ ID NO: 94634 - DNA, 21 bp, Artificial Sequence
  primer
tttgccattaactggctcctc

SEQ ID NO: 94635 - DNA, 38 bp, Artificial Sequence
  primer
gtaaaacgacggccagtatccattcttgggactcaggg

SEQ ID NO: 94636 - DNA, 37 bp, Artificial Sequence
  primer
gtaaaacgacggccagtggaaagcctgctctacccag

SEQ ID NO: 94637 - DNA, 21 bp, Artificial Sequence
  primer
cttcccatactgcaactgtcg

SEQ ID NO: 94638 - DNA, 21 bp, Artificial Sequence
  primer
tgatactgagatgcggcgtag

SEQ ID NO: 94639 - DNA, 38 bp, Artificial Sequence
  primer
gtaaaacgacggccagtaagctggctgctgacactacc

SEQ ID NO: 94640 - DNA, 21 bp, Artificial Sequence
  primer
ttgtccataaatgcaactgcc

SEQ ID NO: 94641 - DNA, 38 bp, Artificial Sequence
  primer
gtaaaacgacggccagtttcgatgaagcctgaaccttt

SEQ ID NO: 94642 - DNA, 23 bp, Artificial Sequence
  primer
tgacttaccatcatggactaccc

SEQ ID NO: 94643 - DNA, 21 bp, Artificial Sequence
  primer
gagttggcaacggaatctaaa

SEQ ID NO: 94644 - DNA, 21 bp, Artificial Sequence
  primer
tcatagtttggctgttggagg

SEQ ID NO: 94645 - DNA, 38 bp, Artificial Sequence
  primer
gtaaaacgacggccagtatgttggttgactgccatgag

SEQ ID NO: 94646 - DNA, 21 bp, Artificial Sequence
  primer
ctcgatcgacttgcacttctg

SEQ ID NO: 94647 - DNA, 39 bp, Artificial Sequence
  primer
gtaaaacgacggccagttgggtagctcctacacttctcc

SEQ ID NO: 94648 - DNA, 23 bp, Artificial Sequence
  primer
caaatcctaatcagtttgcgttt

SEQ ID NO: 94649 - DNA, 21 bp, Artificial Sequence
  primer
ctagacatccagcttctgccc

SEQ ID NO: 94650 - DNA, 21 bp, Artificial Sequence
  primer
cagcaacacagcacataatgg

SEQ ID NO: 94651 - DNA, 22 bp, Artificial Sequence
  primer
aggattacaggtatggtgagcc

SEQ ID NO: 94652 - DNA, 22 bp, Artificial Sequence
  primer
tgcattcactctatggaacagg

SEQ ID NO: 94653 - DNA, 37 bp, Artificial Sequence
  primer
gtaaaacgacggccagtgtccaccacaaaccacaacc

SEQ ID NO: 94654 - DNA, 44 bp, Artificial Sequence
  primer
gtaaaacgacggccagtttcaccagagaattatctatagcacac

SEQ ID NO: 94655 - DNA, 38 bp, Artificial Sequence
  primer
gtaaaacgacggccagtctgaatcaagtcacctttggc

SEQ ID NO: 94656 - DNA, 40 bp, Artificial Sequence
  primer
gtaaaacgacggccagtcctgctatcccatagagacactg

SEQ ID NO: 94657 - DNA, 21 bp, Artificial Sequence
  primer
ttcacattggcttccatgttc

SEQ ID NO: 94658 - DNA, 38 bp, Artificial Sequence
  primer
gtaaaacgacggccagtaggacgtttgttcccagtacc

SEQ ID NO: 94659 - DNA, 38 bp, Artificial Sequence
  primer
gtaaaacgacggccagtttgtctgggtcgtgttgtgac

SEQ ID NO: 94660 - DNA, 21 bp, Artificial Sequence
  primer
gaagtggtggaggaggttctg

SEQ ID NO: 94661 - DNA, 37 bp, Artificial Sequence
  primer
gtaaaacgacggccagtcaaggccttctaccaccctc

SEQ ID NO: 94662 - DNA, 21 bp, Artificial Sequence
  primer
tcctggtgtgatgataaaccg

SEQ ID NO: 94663 - DNA, 21 bp, Artificial Sequence
  primer
cctggagtagtggaaattggc

SEQ ID NO: 94664 - DNA, 38 bp, Artificial Sequence
  primer
gtaaaacgacggccagtaatgtttgctcttcccactgc

SEQ ID NO: 94665 - DNA, 21 bp, Artificial Sequence
  primer
tcattgacatgcagcctcttc

SEQ ID NO: 94666 - DNA, 37 bp, Artificial Sequence
  primer
gtaaaacgacggccagtccacctggtatgtgacaggg

SEQ ID NO: 94667 - DNA, 38 bp, Artificial Sequence
  primer
gtaaaacgacggccagtaacagtgagtccagcatgtcg

SEQ ID NO: 94668 - DNA, 38 bp, Artificial Sequence
  primer
gtaaaacgacggccagtcggaacattacttccctgacc

SEQ ID NO: 94669 - DNA, 20 bp, Artificial Sequence
  primer
aatccaacaacgcaatgacc

SEQ ID NO: 94670 - DNA, 38 bp, Artificial Sequence
  primer
gtaaaacgacggccagttttggaaggcaccactaattg

SEQ ID NO: 94671 - DNA, 22 bp, Artificial Sequence
  primer
aaccaggcaaccttattctgtc

SEQ ID NO: 94672 - DNA, 38 bp, Artificial Sequence
  primer
gtaaaacgacggccagtctaatacttggaagccctccg

SEQ ID NO: 94673 - DNA, 37 bp, Artificial Sequence
  primer
gtaaaacgacggccagtcctgtcgcaacaagggtaag

SEQ ID NO: 94674 - DNA, 41 bp, Artificial Sequence
  primer
gtaaaacgacggccagttttctttaggctgatgaattgttg

SEQ ID NO: 94675 - DNA, 27 bp, Artificial Sequence
  primer
ggaatactgcaaagattatttaaccac

SEQ ID NO: 94676 - DNA, 21 bp, Artificial Sequence
  primer
tcctggtgtgatgataaaccg

SEQ ID NO: 94677 - DNA, 21 bp, Artificial Sequence
  primer
cctggagtagtggaaattggc

SEQ ID NO: 94678 - DNA, 21 bp, Artificial Sequence
  primer
aatgtttgctcttcccactgc

SEQ ID NO: 94679 - DNA, 38 bp, Artificial Sequence
  primer
gtaaaacgacggccagttcattgacatgcagcctcttc

SEQ ID NO: 94680 - DNA, 21 bp, Artificial Sequence
  primer
acatgttcattccttgggcac

SEQ ID NO: 94681 - DNA, 21 bp, Artificial Sequence
  primer
agccagccattcatcctaatg

SEQ ID NO: 94682 - DNA, 38 bp, Artificial Sequence
  primer
gtaaaacgacggccagtgggcctgaacaataacaaacc

SEQ ID NO: 94683 - DNA, 21 bp, Artificial Sequence
  primer
cacctggaaagaaggcaagac

SEQ ID NO: 94684 - DNA, 24 bp, Artificial Sequence
  primer
tcaagaatgcaatctacttccaaa

SEQ ID NO: 94685 - DNA, 30 bp, Artificial Sequence
  primer
cgaaacactaggtattaatagatttcacac

SEQ ID NO: 94686 - DNA, 40 bp, Artificial Sequence
  primer
gtaaaacgacggccagtaaacagatcccaagagtcctcac

SEQ ID NO: 94687 - DNA, 42 bp, Artificial Sequence
  primer
gtaaaacgacggccagtaatacccgtactcaattcaacaatg

SEQ ID NO: 94688 - DNA, 38 bp, Artificial Sequence
  primer
gtaaaacgacggccagtccagctcagtgagtctttccc

SEQ ID NO: 94689 - DNA, 39 bp, Artificial Sequence
  primer
gtaaaacgacggccagtccttcacagcttctttagcctg

SEQ ID NO: 94690 - DNA, 38 bp, Artificial Sequence
  primer
gtaaaacgacggccagtgctcatggactcttgttgagc

SEQ ID NO: 94691 - DNA, 43 bp, Artificial Sequence
  primer
gtaaaacgacggccagtgatcatgtataaagacaccgtttagg

SEQ ID NO: 94692 - DNA, 38 bp, Artificial Sequence
  primer
gtaaaacgacggccagtctctcagtggccataaagcac

SEQ ID NO: 94693 - DNA, 21 bp, Artificial Sequence
  primer
tacctgtcaatcgtcagcagg

SEQ ID NO: 94694 - DNA, 21 bp, Artificial Sequence
  primer
cggacagctttggatttcttc

SEQ ID NO: 94695 - DNA, 38 bp, Artificial Sequence
  primer
gtaaaacgacggccagtgttggcctcctatggtctgag

SEQ ID NO: 94696 - DNA, 21 bp, Artificial Sequence
  primer
tgtgccaagagtcagaacctg

SEQ ID NO: 94697 - DNA, 21 bp, Artificial Sequence
  primer
cagcccatttatctggaggac

SEQ ID NO: 94698 - DNA, 38 bp, Artificial Sequence
  primer
gtaaaacgacggccagtctgatacaggccaggaagagg

SEQ ID NO: 94699 - DNA, 18 bp, Artificial Sequence
  primer
gaagatgaggcgacagcg

SEQ ID NO: 94700 - DNA, 37 bp, Artificial Sequence
  primer
gtaaaacgacggccagtaggcgtagagaacgggattg

SEQ ID NO: 94701 - DNA, 38 bp, Artificial Sequence
  primer
gtaaaacgacggccagtagattcgcagccctagttgtc

SEQ ID NO: 94702 - DNA, 21 bp, Artificial Sequence
  primer
gtccctgcctctttctcagtg

SEQ ID NO: 94703 - DNA, 21 bp, Artificial Sequence
  primer
ctcgctgtacaagcctgtgtg

SEQ ID NO: 94704 - DNA, 38 bp, Artificial Sequence
  primer
gtaaaacgacggccagtagcagagggagaacgagacag

SEQ ID NO: 94705 - DNA, 38 bp, Artificial Sequence
  primer
gtaaaacgacggccagtaagtgcctgtggaagaagtgg

SEQ ID NO: 94706 - DNA, 39 bp, Artificial Sequence
  primer
gtaaaacgacggccagttgagtgtggaaggcttaatgtg

SEQ ID NO: 94707 - DNA, 21 bp, Artificial Sequence
  primer
accaccacagaatttccaagc

SEQ ID NO: 94708 - DNA, 38 bp, Artificial Sequence
  primer
gtaaaacgacggccagttttgcagtaggtatggttgcg

SEQ ID NO: 94709 - DNA, 38 bp, Artificial Sequence
  primer
gtaaaacgacggccagtgggattaaggcagcagtgaac

SEQ ID NO: 94710 - DNA, 21 bp, Artificial Sequence
  primer
atcatgatccatggtggactg

SEQ ID NO: 94711 - DNA, 37 bp, Artificial Sequence
  primer
gtaaaacgacggccagtgggtgtaagccttcctcctg

SEQ ID NO: 94712 - DNA, 38 bp, Artificial Sequence
  primer
gtaaaacgacggccagttcctgcaaggagcacagtaac

SEQ ID NO: 94713 - DNA, 21 bp, Artificial Sequence
  primer
ggagatgatgactgacagccc

SEQ ID NO: 94714 - DNA, 38 bp, Artificial Sequence
  primer
gtaaaacgacggccagttgacaagccagaaacacaagc

SEQ ID NO: 94715 - DNA, 38 bp, Artificial Sequence
  primer
gtaaaacgacggccagttcacacatgccttagggagac

SEQ ID NO: 94716 - DNA, 38 bp, Artificial Sequence
  primer
gtaaaacgacggccagtcatgcatacctggccatagac

SEQ ID NO: 94717 - DNA, 38 bp, Artificial Sequence
  primer
gtaaaacgacggccagtctgatttctccaggaagcacc

SEQ ID NO: 94718 - DNA, 21 bp, Artificial Sequence
  primer
atcttctagcaaatgcccagc

SEQ ID NO: 94719 - DNA, 38 bp, Artificial Sequence
  primer
gtaaaacgacggccagtggctagtatccagatgcccac

SEQ ID NO: 94720 - DNA, 38 bp, Artificial Sequence
  primer
gtaaaacgacggccagtacagcgatgatcaccttgatg

SEQ ID NO: 94721 - DNA, 21 bp, Artificial Sequence
  primer
aagagatcgttgcggaacttg

SEQ ID NO: 94722 - DNA, 21 bp, Artificial Sequence
  primer
ctgagtcattgcatctgctcc

SEQ ID NO: 94723 - DNA, 21 bp, Artificial Sequence
  primer
tacagtcccaaacacccactg

SEQ ID NO: 94724 - DNA, 38 bp, Artificial Sequence
  primer
gtaaaacgacggccagttgatcgtcctcacctttaggg

SEQ ID NO: 94725 - DNA, 38 bp, Artificial Sequence
  primer
gtaaaacgacggccagtaagaaccacgttgaatgggac

SEQ ID NO: 94726 - DNA, 38 bp, Artificial Sequence
  primer
gtaaaacgacggccagtacagctctccctaggcatttg

SEQ ID NO: 94727 - DNA, 37 bp, Artificial Sequence
  primer
gtaaaacgacggccagtacacccacacctttgctcac

SEQ ID NO: 94728 - DNA, 21 bp, Artificial Sequence
  primer
ttgcacatgaaggtctggaac

SEQ ID NO: 94729 - DNA, 38 bp, Artificial Sequence
  primer
gtaaaacgacggccagttcagggtgtgaatgatgatgg

SEQ ID NO: 94730 - DNA, 21 bp, Artificial Sequence
  primer
tcaagcttccctctctccttg

SEQ ID NO: 94731 - DNA, 39 bp, Artificial Sequence
  primer
gtaaaacgacggccagttgctttggcaaattctgactac

SEQ ID NO: 94732 - DNA, 19 bp, Artificial Sequence
  primer
cccaaagcatagctgcctc

SEQ ID NO: 94733 - DNA, 21 bp, Artificial Sequence
  primer
ttgcacatgaaggtctggaac

SEQ ID NO: 94734 - DNA, 21 bp, Artificial Sequence
  primer
tcagggtgtgaatgatgatgg

SEQ ID NO: 94735 - DNA, 38 bp, Artificial Sequence
  primer
gtaaaacgacggccagttcaagcttccctctctccttg

SEQ ID NO: 94736 - DNA, 39 bp, Artificial Sequence; identical to SEQ ID NO: 94731
  primer

SEQ ID NO: 94737 - DNA, 21 bp, Artificial Sequence
  primer
aacggcccaaagtaggtttag

SEQ ID NO: 94738 - DNA, 21 bp, Artificial Sequence
  primer
gggtaaggaggcagatgaatg

SEQ ID NO: 94739 - DNA, 21 bp, Artificial Sequence
  primer
acttacctggaggccttgacc

SEQ ID NO: 94740 - DNA, 21 bp, Artificial Sequence
  primer
catgttaccctttgaccaccc

SEQ ID NO: 94741 - DNA, 38 bp, Artificial Sequence
  primer
gtaaaacgacggccagtggagggagtggttacttgctg

SEQ ID NO: 94742 - DNA, 38 bp, Artificial Sequence
  primer
gtaaaacgacggccagtatgccaatcacaggttctgag

SEQ ID NO: 94743 - DNA, 21 bp, Artificial Sequence
  primer
tgaatctcctctgctcgactg

SEQ ID NO: 94744 - DNA, 38 bp, Artificial Sequence
  primer
gtaaaacgacggccagttgaaagctggtgaaggcgtag

SEQ ID NO: 94745 - DNA, 21 bp, Artificial Sequence
  primer
tctgctacagccaaattcagg

SEQ ID NO: 94746 - DNA, 22 bp, Artificial Sequence
  primer
ccagaaactgcattccagagac

SEQ ID NO: 94747 - DNA, 21 bp, Artificial Sequence
  primer
gagtgcgatgctttctgtgac

SEQ ID NO: 94748 - DNA, 37 bp, Artificial Sequence
  primer
gtaaaacgacggccagttataagttgcaaccacggcg

SEQ ID NO: 94749 - DNA, 21 bp, Artificial Sequence
  primer
cactttcaggccagactccac

SEQ ID NO: 94750 - DNA, 37 bp, Artificial Sequence
  primer
gtaaaacgacggccagtcccacacctcttccttccac

SEQ ID NO: 94751 - DNA, 21 bp, Artificial Sequence
  primer
ggttctgaaggaggtcacagc

SEQ ID NO: 94752 - DNA, 21 bp, Artificial Sequence
  primer
agatgtaatccagggtgtgcc

SEQ ID NO: 94753 - DNA, 21 bp, Artificial Sequence
  primer
cctgttgggtccaatctgttc

SEQ ID NO: 94754 - DNA, 21 bp, Artificial Sequence
  primer
tgattcaaggtcaggagatcg

SEQ ID NO: 94755 - DNA, 21 bp, Artificial Sequence
  primer
ttcccaaggtaacgatcatcc

SEQ ID NO: 94756 - DNA, 21 bp, Artificial Sequence
  primer
acatgcctttcactctctggg

SEQ ID NO: 94757 - DNA, 37 bp, Artificial Sequence
  primer
gtaaaacgacggccagtaacccagagcctgagaatcc

SEQ ID NO: 94758 - DNA, 39 bp, Artificial Sequence
  primer
gtaaaacgacggccagttgtgcctcacagagtattggtg

SEQ ID NO: 94759 - DNA, 21 bp, Artificial Sequence
  primer
tgttatgatcccaagagctgc

SEQ ID NO: 94760 - DNA, 38 bp, Artificial Sequence
  primer
gtaaaacgacggccagtcaatcacatcccacacctttg

SEQ ID NO: 94761 - DNA, 21 bp, Artificial Sequence
  primer
aacctgcagaagaatgtgtgg

SEQ ID NO: 94762 - DNA, 38 bp, Artificial Sequence
  primer
gtaaaacgacggccagttttcatttgccaagggaacac

SEQ ID NO: 94763 - DNA, 38 bp, Artificial Sequence
  primer
gtaaaacgacggccagtcctacgaccctagcaggacag

SEQ ID NO: 94764 - DNA, 20 bp, Artificial Sequence
  primer
tcagttcatccgcctacctc

SEQ ID NO: 94765 - DNA, 43 bp, Artificial Sequence
  primer
gtaaaacgacggccagtaaatgataacagtacttgtcattggg

SEQ ID NO: 94766 - DNA, 37 bp, Artificial Sequence
  primer
gtaaaacgacggccagttacgattggtcaacacagcc

SEQ ID NO: 94767 - DNA, 21 bp, Artificial Sequence
  primer
cgctatgatggtctgtggatg

SEQ ID NO: 94768 - DNA, 38 bp, Artificial Sequence
  primer
gtaaaacgacggccagtctggaggctgatgtaggtttg

SEQ ID NO: 94769 - DNA, 21 bp, Artificial Sequence
  primer
ggctttgtaaagggtcactgg

SEQ ID NO: 94770 - DNA, 37 bp, Artificial Sequence
  primer
gtaaaacgacggccagtcagatgatccaccaccttgg

SEQ ID NO: 94771 - DNA, 39 bp, Artificial Sequence
  primer
gtaaaacgacggccagttcaatcccgtaattctggtcac

SEQ ID NO: 94772 - DNA, 21 bp, Artificial Sequence
  primer
gattacaggcacaagccactg

SEQ ID NO: 94773 - DNA, 25 bp, Artificial Sequence
  primer
caaagacacggtaaatatgaggttg

SEQ ID NO: 94774 - DNA, 20 bp, Artificial Sequence
  primer
ttgcctggtgttctattggc

SEQ ID NO: 94775 - DNA, 22 bp, Artificial Sequence
  primer
tgctcacgaagaggagaaactc

SEQ ID NO: 94776 - DNA, 24 bp, Artificial Sequence
  primer
ttcccagcacatgtaatgattatg

SEQ ID NO: 94777 - DNA, 21 bp, Artificial Sequence
  primer
taagagctacctcagctgccc

SEQ ID NO: 94778 - DNA, 38 bp, Artificial Sequence
  primer
gtaaaacgacggccagttgggcaccgataaacagattc

SEQ ID NO: 94779 - DNA, 38 bp, Artificial Sequence
  primer
gtaaaacgacggccagtaagagaagagaggaaagcggg

SEQ ID NO: 94780 - DNA, 38 bp, Artificial Sequence
  primer
gtaaaacgacggccagttagatgcacaggacacatggc

SEQ ID NO: 94781 - DNA, 22 bp, Artificial Sequence
  primer
aaacacacctctcgaagaatgg

SEQ ID NO: 94782 - DNA, 22 bp, Artificial Sequence
  primer
gccctactgacgcctttatttc

SEQ ID NO: 94783 - DNA, 21 bp, Artificial Sequence
  primer
ccagatttgcatagctcaccc

SEQ ID NO: 94784 - DNA, 37 bp, Artificial Sequence
  primer
gtaaaacgacggccagtcctgacctcaagatccaccc

SEQ ID NO: 94785 - DNA, 21 bp, Artificial Sequence
  primer
aggcaacaaggtgagactctg

SEQ ID NO: 94786 - DNA, 21 bp, Artificial Sequence
  primer
cccagaaggcatgcaataaac

SEQ ID NO: 94787 - DNA, 38 bp, Artificial Sequence
  primer
gtaaaacgacggccagtatattggcccgcataaggtag

SEQ ID NO: 94788 - DNA, 21 bp, Artificial Sequence
  primer
aggacttctgaagagggcagg

SEQ ID NO: 94789 - DNA, 21 bp, Artificial Sequence
  primer
taggccctttgggaaactctc

SEQ ID NO: 94790 - DNA, 41 bp, Artificial Sequence
  primer
gtaaaacgacggccagttggatagccagataagaatcttcc

SEQ ID NO: 94791 - DNA, 37 bp, Artificial Sequence
  primer
gtaaaacgacggccagtagcctgggtgactgagactg

SEQ ID NO: 94792 - DNA, 38 bp, Artificial Sequence
  primer
gtaaaacgacggccagtaagacgtccacagtgttcctg

SEQ ID NO: 94793 - DNA, 21 bp, Artificial Sequence
  primer
gaaatgggaaatgagccaaac

SEQ ID NO: 94794 - DNA, 38 bp, Artificial Sequence
  primer
gtaaaacgacggccagtacagcctctccaggagctagg

SEQ ID NO: 94795 - DNA, 21 bp, Artificial Sequence
  primer
agaaatgaatctgggaggcag

SEQ ID NO: 94796 - DNA, 21 bp, Artificial Sequence
  primer
aaggagcccagcaaatatcag

SEQ ID NO: 94797 - DNA, 21 bp, Artificial Sequence
  primer
agccttatggctcatttcctc

SEQ ID NO: 94798 - DNA, 38 bp, Artificial Sequence
  primer
gtaaaacgacggccagttttgatccactgctgccttac

SEQ ID NO: 94799 - DNA, 21 bp, Artificial Sequence
  primer
cttgtcacttgtggcaccaac

SEQ ID NO: 94800 - DNA, 22 bp, Artificial Sequence
  primer
aaattctccatttcgtttcacc

SEQ ID NO: 94801 - DNA, 37 bp, Artificial Sequence
  primer
gtaaaacgacggccagtggcttggttccaattgtctg

SEQ ID NO: 94802 - DNA, 18 bp, Artificial Sequence
  primer
tgtagtcccagcttcccg

SEQ ID NO: 94803 - DNA, 21 bp, Artificial Sequence
  primer
caccacctcctgcaataagag

SEQ ID NO: 94804 - DNA, 40 bp, Artificial Sequence
  primer
gtaaaacgacggccagtcagagctttccattcaacagatg

SEQ ID NO: 94805 - DNA, 21 bp, Artificial Sequence
  primer
aaaccaaccaaccaaccaaac

SEQ ID NO: 94806 - DNA, 21 bp, Artificial Sequence
  primer
ttccaaacaaggaacaccaag

SEQ ID NO: 94807 - DNA, 38 bp, Artificial Sequence
  primer
gtaaaacgacggccagtgacggagattctcgacctttc

SEQ ID NO: 94808 - DNA, 22 bp, Artificial Sequence
  primer
ccctcaatactccacctttctg

SEQ ID NO: 94809 - DNA, 38 bp, Artificial Sequence
  primer
gtaaaacgacggccagtatctcagcaggcatgttagcc

SEQ ID NO: 94810 - DNA, 23 bp, Artificial Sequence
  primer
tttgtgttgcctttaagaaatgg

SEQ ID NO: 94811 - DNA, 38 bp, Artificial Sequence
  primer
gtaaaacgacggccagtcgcatcttccactttctatgg

SEQ ID NO: 94812 - DNA, 21 bp, Artificial Sequence
  primer
ctcgatgatctcacgatctgc

SEQ ID NO: 94813 - DNA, 38 bp, Artificial Sequence
  primer
gtaaaacgacggccagttgcagttatttaaggcagggc

SEQ ID NO: 94814 - DNA, 23 bp, Artificial Sequence
  primer
acaccatgatacgtcattgtttg

SEQ ID NO: 94815 - DNA, 38 bp, Artificial Sequence
  primer
gtaaaacgacggccagtcctacacacagctcacgatgc

SEQ ID NO: 94816 - DNA, 22 bp, Artificial Sequence
  primer
agacaccatcatctcacagcac

SEQ ID NO: 94817 - DNA, 24 bp, Artificial Sequence
  primer
cacgattacacagctttgaacaag

SEQ ID NO: 94818 - DNA, 19 bp, Artificial Sequence
  primer
taggagggacacaggaccg

SEQ ID NO: 94819 - DNA, 21 bp, Artificial Sequence
  primer
cgccacttctgaatgttctcc

SEQ ID NO: 94820 - DNA, 23 bp, Artificial Sequence
  primer
gataaagacccagatttaagccc

SEQ ID NO: 94821 - DNA, 40 bp, Artificial Sequence
  primer
gtaaaacgacggccagtcagcaccttgtaattgaaattgg

SEQ ID NO: 94822 - DNA, 19 bp, Artificial Sequence
  primer
cctgaggtgatttgcccac

SEQ ID NO: 94823 - DNA, 38 bp, Artificial Sequence
  primer
gtaaaacgacggccagtcagttcactgagctccaatcc

SEQ ID NO: 94824 - DNA, 37 bp, Artificial Sequence
  primer
gtaaaacgacggccagtcgcagagcaactatgccttc

SEQ ID NO: 94825 - DNA, 20 bp, Artificial Sequence
  primer
gagatggacagtgctgacgg

SEQ ID NO: 94826 - DNA, 21 bp, Artificial Sequence
  primer
cccaggaagatgaggctgtag

SEQ ID NO: 94827 - DNA, 37 bp, Artificial Sequence
  primer
gtaaaacgacggccagtaacacagtattcggccatgc

SEQ ID NO: 94828 - DNA, 21 bp, Artificial Sequence
  primer
ggcttcccagagaaaccaaat

SEQ ID NO: 94829 - DNA, 38 bp, Artificial Sequence
  primer
gtaaaacgacggccagtactggtgtcaaattgcaaagc

SEQ ID NO: 94830 - DNA, 21 bp, Artificial Sequence
  primer
ctcaacttcccacttccaacc

SEQ ID NO: 94831 - DNA, 21 bp, Artificial Sequence
  primer
ttccaaatttcaacagatgcc

SEQ ID NO: 94832 - DNA, 38 bp, Artificial Sequence
  primer
gtaaaacgacggccagtcaagaacatccacagcgctac

SEQ ID NO: 94833 - DNA, 23 bp, Artificial Sequence
  primer
tcacagccttggcttaaagatac

SEQ ID NO: 94834 - DNA, 20 bp, Artificial Sequence
  primer
gagccaagattctgccactg

SEQ ID NO: 94835 - DNA, 21 bp, Artificial Sequence
  primer
cccacctttcaagtcacgttt

SEQ ID NO: 94836 - DNA, 23 bp, Artificial Sequence
  primer
ttcccattacctagagcagtgac

SEQ ID NO: 94837 - DNA, 22 bp, Artificial Sequence
  primer
gagcacagactttgtccttcag

SEQ ID NO: 94838 - DNA, 37 bp, Artificial Sequence
  primer
gtaaaacgacggccagtgggtccacagaccacacttc

SEQ ID NO: 94839 - DNA, 24 bp, Artificial Sequence
  primer
gcagtaggttaacaaccttgcttt

SEQ ID NO: 94840 - DNA, 43 bp, Artificial Sequence
  primer
gtaaaacgacggccagttttcttatcaagcataactaagggag

SEQ ID NO: 94841 - DNA, 18 bp, Artificial Sequence
  primer
gcactaaagcctgggcaa

SEQ ID NO: 94842 - DNA, 37 bp, Artificial Sequence
  primer
gtaaaacgacggccagtaggatcctgggctgttatcg

SEQ ID NO: 94843 - DNA, 43 bp, Artificial Sequence
  primer
gtaaaacgacggccagttctactcctttaccataagatctggg

SEQ ID NO: 94844 - DNA, 26 bp, Artificial Sequence
  primer
tgaataccacacctttcatacacttg

SEQ ID NO: 94845 - DNA, 38 bp, Artificial Sequence
  primer
gtaaaacgacggccagtgaaattcagaatggctcaggc

SEQ ID NO: 94846 - DNA, 22 bp, Artificial Sequence
  primer
agcccagagactcctctaaagc

SEQ ID NO: 94847 - DNA, 22 bp, Artificial Sequence
  primer
cctatgctagtcccaaacaccc

SEQ ID NO: 94848 - DNA, 23 bp, Artificial Sequence
  primer
cacaacctgttaagatctcaggc

SEQ ID NO: 94849 - DNA, 21 bp, Artificial Sequence
  primer
aatgcccaaagtaccctgttc

SEQ ID NO: 94850 - DNA, 21 bp, Artificial Sequence
  primer
aggttctgacaaaggcctgac

SEQ ID NO: 94851 - DNA, 22 bp, Artificial Sequence
  primer
ctctgccatatgaagctgtctg

SEQ ID NO: 94852 - DNA, 38 bp, Artificial Sequence
  primer
gtaaaacgacggccagtccacaatagccatgaagaccc

SEQ ID NO: 94853 - DNA, 38 bp, Artificial Sequence
  primer
gtaaaacgacggccagtcacgccaacctgacagtacac

SEQ ID NO: 94854 - DNA, 21 bp, Artificial Sequence
  primer
tggctcaaaggtgagactctg

SEQ ID NO: 94855 - DNA, 38 bp, Artificial Sequence
  primer
gtaaaacgacggccagttcaccacacaaatccaaggtc

SEQ ID NO: 94856 - DNA, 21 bp, Artificial Sequence
  primer
gagttgcagcctatctcctgg

SEQ ID NO: 94857 - DNA, 39 bp, Artificial Sequence
  primer
gtaaaacgacggccagtaaatgaagtaaccaagccaagg

SEQ ID NO: 94858 - DNA, 20 bp, Artificial Sequence
  primer
cacgctcagcccgttagtag

SEQ ID NO: 94859 - DNA, 41 bp, Artificial Sequence
  primer
gtaaaacgacggccagttcagaacaagtctgaaagaagacg

SEQ ID NO: 94860 - DNA, 38 bp, Artificial Sequence
  primer
gtaaaacgacggccagttgtatcacaaccaatccctcc

SEQ ID NO: 94861 - DNA, 38 bp, Artificial Sequence
  primer
gtaaaacgacggccagttggctggtacagagcaaactg

SEQ ID NO: 94862 - DNA, 38 bp, Artificial Sequence
  primer
gtaaaacgacggccagtttatcaacattgaaatggccg

SEQ ID NO: 94863 - DNA, 19 bp, Artificial Sequence
  primer
ccaacctgggcaacaagag

SEQ ID NO: 94864 - DNA, 24 bp, Artificial Sequence
  primer
tctactagaagggctgtgtgtcag

SEQ ID NO: 94865 - DNA, 20 bp, Artificial Sequence
  primer
tcagaggtgtttcctgaccc

SEQ ID NO: 94866 - DNA, 38 bp, Artificial Sequence
  primer
gtaaaacgacggccagtttcaaggacaggaggtgtctg

SEQ ID NO: 94867 - DNA, 22 bp, Artificial Sequence
  primer
tcagattgtctgtagagcctcg

SEQ ID NO: 94868 - DNA, 44 bp, Artificial Sequence
  primer
gtaaaacgacggccagttcatttcatataaaccactcattctga

SEQ ID NO: 94869 - DNA, 38 bp, Artificial Sequence
  primer
gtaaaacgacggccagttcaaatgcctcagcaaacttc

SEQ ID NO: 94870 - DNA, 21 bp, Artificial Sequence
  primer
acgttcctccatcagacaacc

SEQ ID NO: 94871 - DNA, 27 bp, Artificial Sequence
  primer
gtgaggactaagaatcctttgaattag

SEQ ID NO: 94872 - DNA, 39 bp, Artificial Sequence
  primer
gtaaaacgacggccagtcatttagagccaataaccgtgg

SEQ ID NO: 94873 - DNA, 20 bp, Artificial Sequence
  primer
aacctccaggccagtaccag

SEQ ID NO: 94874 - DNA, 21 bp, Artificial Sequence
  primer
cttggaagagcatccaggaac

SEQ ID NO: 94875 - DNA, 23 bp, Artificial Sequence
  primer
tgaaacgtgaaatgtgtgaattg

SEQ ID NO: 94876 - DNA, 38 bp, Artificial Sequence
  primer
gtaaaacgacggccagtacaagcagaacttcccagagg

SEQ ID NO: 94877 - DNA, 27 bp, Artificial Sequence
  primer
tgaaagctaaataaacccttgataaac

SEQ ID NO: 94878 - DNA, 38 bp, Artificial Sequence
  primer
gtaaaacgacggccagtgcagtgaaatgtggagctctg

SEQ ID NO: 94879 - DNA, 38 bp, Artificial Sequence
  primer
gtaaaacgacggccagtttcaatgctggaaagctcttg

SEQ ID NO: 94880 - DNA, 23 bp, Artificial Sequence
  primer
tttagaaagtcaatgatgctccc

SEQ ID NO: 94881 - DNA, 22 bp, Artificial Sequence
  primer
ttggaaacaaatctacatgccc

SEQ ID NO: 94882 - DNA, 21 bp, Artificial Sequence
  primer
aggttgagtgcctaccacaag

SEQ ID NO: 94883 - DNA, 21 bp, Artificial Sequence
  primer
ttgttgccactaaccaccaac

SEQ ID NO: 94884 - DNA, 37 bp, Artificial Sequence
  primer
gtaaaacgacggccagtaccgacactgggtcctatgg

SEQ ID NO: 94885 - DNA, 26 bp, Artificial Sequence
  primer
aaatttctaaccagtttggcttaatg

SEQ ID NO: 94886 - DNA, 39 bp, Artificial Sequence
  primer
gtaaaacgacggccagttgatgaaagagagcaaggacac

SEQ ID NO: 94887 - DNA, 22 bp, Artificial Sequence
  primer
aatggtgaattgttccatttgc

SEQ ID NO: 94888 - DNA, 18 bp, Artificial Sequence
  primer
catgtcatggcccagatg

SEQ ID NO: 94889 - DNA, 21 bp, Artificial Sequence
  primer
tcattgatgagaccttcctgc

SEQ ID NO: 94890 - DNA, 20 bp, Artificial Sequence
  primer
aaattgaggagctgacgctg

SEQ ID NO: 94891 - DNA, 38 bp, Artificial Sequence
  primer
gtaaaacgacggccagttgcccagatactacacaaccc

SEQ ID NO: 94892 - DNA, 39 bp, Artificial Sequence
  primer
gtaaaacgacggccagttgccaacaaatttaaccaagag

SEQ ID NO: 94893 - DNA, 43 bp, Artificial Sequence
  primer
gtaaaacgacggccagtgccttcatattataatgagttgttgg

SEQ ID NO: 94894 - DNA, 21 bp, Artificial Sequence
  primer
ccgtgtagcccatcacttacc

SEQ ID NO: 94895 - DNA, 23 bp, Artificial Sequence
  primer
ttctgtttcttccacacacacac

SEQ ID NO: 94896 - DNA, 39 bp, Artificial Sequence
  primer
gtaaaacgacggccagttttccacacacatatttgaccc

SEQ ID NO: 94897 - DNA, 41 bp, Artificial Sequence
  primer
gtaaaacgacggccagtgatgtaatcaatttcaaacctggc

SEQ ID NO: 94898 - DNA, 27 bp, Artificial Sequence
  primer
ctaaactttgaaactgccaagtaattt

SEQ ID NO: 94899 - DNA, 39 bp, Artificial Sequence
  primer
gtaaaacgacggccagtgggcaccacttctccctattac

SEQ ID NO: 94900 - DNA, 21 bp, Artificial Sequence
  primer
tactcattggctggcaacatc

SEQ ID NO: 94901 - DNA, 23 bp, Artificial Sequence
  primer
tcaaatgtgttatacgtccaggg

SEQ ID NO: 94902 - DNA, 22 bp, Artificial Sequence
  primer
gccatgttaaactcattcaggg

SEQ ID NO: 94903 - DNA, 38 bp, Artificial Sequence
  primer
gtaaaacgacggccagtcagaaccaatccaatgtgtgg

SEQ ID NO: 94904 - DNA, 21 bp, Artificial Sequence
  primer
gttgtacaccatccctgcaac

SEQ ID NO: 94905 - DNA, 21 bp, Artificial Sequence
  primer
atcgtccagctcacaaggttc

SEQ ID NO: 94906 - DNA, 38 bp, Artificial Sequence
  primer
gtaaaacgacggccagtctggaaagtgcaagtcctgtg

SEQ ID NO: 94907 - DNA, 38 bp, Artificial Sequence
  primer
gtaaaacgacggccagttgtcagacaggtctaggctgg

SEQ ID NO: 94908 - DNA, 38 bp, Artificial Sequence
  primer
gtaaaacgacggccagtcccgtccagtgtcaggttatc

SEQ ID NO: 94909 - DNA, 38 bp, Artificial Sequence
  primer
gtaaaacgacggccagtgacacggacccgttgtttaag

SEQ ID NO: 94910 - DNA, 21 bp, Artificial Sequence
  primer
ccagcaggctgatgtagtcac

SEQ ID NO: 94911 - DNA, 20 bp, Artificial Sequence
  primer
agcaaggcacaggttcaaag

SEQ ID NO: 94912 - DNA, 20 bp, Artificial Sequence
  primer
ccctgcagagacctagaccc

SEQ ID NO: 94913 - DNA, 21 bp, Artificial Sequence
  primer
cagcagtggaactgcatcaag

SEQ ID NO: 94914 - DNA, 21 bp, Artificial Sequence
  primer
tagatattggaggcgtgtccc

SEQ ID NO: 94915 - DNA, 21 bp, Artificial Sequence
  primer
atcatgccaaagacctgtgtg

SEQ ID NO: 94916 - DNA, 36 bp, Artificial Sequence
  primer
gtaaaacgacggccagtggtgggtgtcatcagggag

SEQ ID NO: 94917 - DNA, 18 bp, Artificial Sequence
  primer
aaatcacgggatccagcc

SEQ ID NO: 94918 - DNA, 22 bp, Artificial Sequence
  primer
ttccaggacctgaactatctgg

SEQ ID NO: 94919 - DNA, 21 bp, Artificial Sequence
  primer
ggagaataaccaaggtggcag

SEQ ID NO: 94920 - DNA, 20 bp, Artificial Sequence
  primer
cctgatggtgaggagcaaag

SEQ ID NO: 94921 - DNA, 21 bp, Artificial Sequence
  primer
caaaggtgctgccatataagc

SEQ ID NO: 94922 - DNA, 20 bp, Artificial Sequence
  primer
catttggtgaggaaccatgc

SEQ ID NO: 94923 - DNA, 38 bp, Artificial Sequence
  primer
gtaaaacgacggccagtttgcttacaggaaagtggctt

SEQ ID NO: 94924 - DNA, 45 bp, Artificial Sequence
  primer
gtaaaacgacggccagtagagttcaggctcttaagatttattacc

SEQ ID NO: 94925 - DNA, 38 bp, Artificial Sequence
  primer
gtaaaacgacggccagtttaaggagcacaggactttcc

SEQ ID NO: 94926 - DNA, 38 bp, Artificial Sequence
  primer
gtaaaacgacggccagttgactctcccagtggaatttg

SEQ ID NO: 94927 - DNA, 38 bp, Artificial Sequence
  primer
gtaaaacgacggccagttggaaggagacagggctttag

SEQ ID NO: 94928 - DNA, 22 bp, Artificial Sequence
  primer
tcattcttctcatgacccttca

SEQ ID NO: 94929 - DNA, 38 bp, Artificial Sequence
  primer
gtaaaacgacggccagtatttaccaggcgaagttgacc

SEQ ID NO: 94930 - DNA, 21 bp, Artificial Sequence
  primer
ttctgttgtcctgactcccac

SEQ ID NO: 94931 - DNA, 41 bp, Artificial Sequence
  primer
gtaaaacgacggccagttttaagccagtgtgagaataggaa

SEQ ID NO: 94932 - DNA, 39 bp, Artificial Sequence
  primer
gtaaaacgacggccagtttacacaacacacatcactgcc

SEQ ID NO: 94933 - DNA, 38 bp, Artificial Sequence
  primer
gtaaaacgacggccagtaggatcccgactgcaataaag

SEQ ID NO: 94934 - DNA, 39 bp, Artificial Sequence
  primer
gtaaaacgacggccagttccatctttctggccattagac

SEQ ID NO: 94935 - DNA, 39 bp, Artificial Sequence
  primer
gtaaaacgacggccagtgctaaaggcctccctatgattg

SEQ ID NO: 94936 - DNA, 38 bp, Artificial Sequence
  primer
gtaaaacgacggccagtgccagaagagctctcagtcct

SEQ ID NO: 94937 - DNA, 21 bp, Artificial Sequence
  primer
cacctcgacttgcaacacttc

SEQ ID NO: 94938 - DNA, 38 bp, Artificial Sequence
  primer
gtaaaacgacggccagtggaatctaaagggaggatggg

SEQ ID NO: 94939 - DNA, 38 bp, Artificial Sequence
  primer
gtaaaacgacggccagtacaaggctttctgaggcaatg

SEQ ID NO: 94940 - DNA, 38 bp, Artificial Sequence
  primer
gtaaaacgacggccagtgcaaatctgctcacattcacc

SEQ ID NO: 94941 - DNA, 38 bp, Artificial Sequence
  primer
gtaaaacgacggccagtatggcagaaattgtaaagggc

SEQ ID NO: 94942 - DNA, 21 bp, Artificial Sequence
  primer
tggaatagcgtcttccatgtg

SEQ ID NO: 94943 - DNA, 38 bp, Artificial Sequence
  primer
gtaaaacgacggccagtagagtccttccaaccctttcc

SEQ ID NO: 94944 - DNA, 38 bp, Artificial Sequence
  primer
gtaaaacgacggccagtgctcatactgaagccacgaag

SEQ ID NO: 94945 - DNA, 37 bp, Artificial Sequence
  primer
gtaaaacgacggccagtctcagcaatgacttaggccc

SEQ ID NO: 94946 - DNA, 19 bp, Artificial Sequence
  primer
gaggctgggagtagccctc

SEQ ID NO: 94947 - DNA, 21 bp, Artificial Sequence
  primer
gggaggctagaggaagactgg

SEQ ID NO: 94948 - DNA, 21 bp, Artificial Sequence
  primer
gaggaggtagctttggagctg

SEQ ID NO: 94949 - DNA, 21 bp, Artificial Sequence
  primer
attacgacttcaggctctggg

SEQ ID NO: 94950 - DNA, 38 bp, Artificial Sequence
  primer
gtaaaacgacggccagtgtcaggttcctcatagccctc

SEQ ID NO: 94951 - DNA, 22 bp, Artificial Sequence
  primer
gcgctgcaattacacctaagtc

SEQ ID NO: 94952 - DNA, 39 bp, Artificial Sequence
  primer
gtaaaacgacggccagtaagagagagaactccagggacc

SEQ ID NO: 94953 - DNA, 21 bp, Artificial Sequence
  primer
ttgaaagcatctctcacccag

SEQ ID NO: 94954 - DNA, 38 bp, Artificial Sequence
  primer
gtaaaacgacggccagtaggagtcacaggattgggttc

SEQ ID NO: 94955 - DNA, 38 bp, Artificial Sequence
  primer
gtaaaacgacggccagtatctggataggaccagggagg

SEQ ID NO: 94956 - DNA, 21 bp, Artificial Sequence
  primer
ggctatgcagaagaaacggtg

SEQ ID NO: 94957 - DNA, 21 bp, Artificial Sequence
  primer
gggacctggagtcatggatag

SEQ ID NO: 94958 - DNA, 23 bp, Artificial Sequence
  primer
cagaagagagtcaggctgtttcc

SEQ ID NO: 94959 - DNA, 38 bp, Artificial Sequence
  primer
gtaaaacgacggccagttaaattggaaggaggtggtgg

SEQ ID NO: 94960 - DNA, 35 bp, Artificial Sequence
  primer
gtaaaacgacggccagtttcagcttgccctccctc

SEQ ID NO: 94961 - DNA, 22 bp, Artificial Sequence
  primer
gagctgagaattgaggagcaag

SEQ ID NO: 94962 - DNA, 38 bp, Artificial Sequence
  primer
gtaaaacgacggccagtcgtcatcatcacgatgtgttc

SEQ ID NO: 94963 - DNA, 38 bp, Artificial Sequence
  primer
gtaaaacgacggccagtcaaccaccagaatggttgaag

SEQ ID NO: 94964 - DNA, 23 bp, Artificial Sequence
  primer
gcatcagagagagcaacactttg

SEQ ID NO: 94965 - DNA, 38 bp, Artificial Sequence
  primer
gtaaaacgacggccagtcactcctttgggaaccaaata

SEQ ID NO: 94966 - DNA, 36 bp, Artificial Sequence
  primer
gtaaaacgacggccagtcccagtgcctccctctatg

SEQ ID NO: 94967 - DNA, 21 bp, Artificial Sequence
  primer
gggaaaggatatggtgaaagg

SEQ ID NO: 94968 - DNA, 22 bp, Artificial Sequence
  primer
aaagggagtcaccattaagtca

SEQ ID NO: 94969 - DNA, 38 bp, Artificial Sequence
  primer
gtaaaacgacggccagtcaggtatgctcagatggcaag

SEQ ID NO: 94970 - DNA, 36 bp, Artificial Sequence
  primer
gtaaaacgacggccagttgggataatgggaaatggc

SEQ ID NO: 94971 - DNA, 38 bp, Artificial Sequence
  primer
gtaaaacgacggccagtctgagtttgaagggtgggaac

SEQ ID NO: 94972 - DNA, 39 bp, Artificial Sequence
  primer
gtaaaacgacggccagtccctcacctaggtctgctatcc

SEQ ID NO: 94973 - DNA, 21 bp, Artificial Sequence
  primer
ccctgaataagttggaggtgg

SEQ ID NO: 94974 - DNA, 38 bp, Artificial Sequence
  primer
gtaaaacgacggccagttttaaatggagagtcgacggg

SEQ ID NO: 94975 - DNA, 20 bp, Artificial Sequence
  primer
ttctacctagatcgcgccag

SEQ ID NO: 94976 - DNA, 20 bp, Artificial Sequence
  primer
gccacagtctcccagttgag

SEQ ID NO: 94977 - DNA, 38 bp, Artificial Sequence
  primer
gtaaaacgacggccagtttgaatgctcaaagggatgag

SEQ ID NO: 94978 - DNA, 38 bp, Artificial Sequence
  primer
gtaaaacgacggccagtgggtatatcaagccacatccc

SEQ ID NO: 94979 - DNA, 21 bp, Artificial Sequence
  primer
tgggttccagagacacagatg

SEQ ID NO: 94980 - DNA, 38 bp, Artificial Sequence
  primer
gtaaaacgacggccagtaaagggtgtgatgaaagctgc

SEQ ID NO: 94981 - DNA, 21 bp, Artificial Sequence
  primer
gcctgaaaggcatattccaag

SEQ ID NO: 94982 - DNA, 43 bp, Artificial Sequence
  primer
gtaaaacgacggccagtgggaacaaggttagtaaggttaaatg

SEQ ID NO: 94983 - DNA, 21 bp, Artificial Sequence
  primer
agtcctgaacccacacatctc

SEQ ID NO: 94984 - DNA, 37 bp, Artificial Sequence
  primer
gtaaaacgacggccagttcctacccatttcctcagcc

SEQ ID NO: 94985 - DNA, 21 bp, Artificial Sequence
  primer
tcttggtgtcctgagtgttgg

SEQ ID NO: 94986 - DNA, 21 bp, Artificial Sequence
  primer
agttgatgtcctgacccaagg

SEQ ID NO: 94987 - DNA, 18 bp, Artificial Sequence
  primer
ccctggaggcagaggtca

SEQ ID NO: 94988 - DNA, 38 bp, Artificial Sequence
  primer
gtaaaacgacggccagtttgaaggtttccaggaggaag

SEQ ID NO: 94989 - DNA, 38 bp, Artificial Sequence
  primer
gtaaaacgacggccagttgcagattcaaggtgtcatcc

SEQ ID NO: 94990 - DNA, 22 bp, Artificial Sequence
  primer
gaggtgacaatgttctgcacac

SEQ ID NO: 94991 - DNA, 38 bp, Artificial Sequence
  primer
gtaaaacgacggccagttcaacaccgctgatctagtcc

SEQ ID NO: 94992 - DNA, 38 bp, Artificial Sequence
  primer
gtaaaacgacggccagtttcatgcagacaaatggaacc

SEQ ID NO: 94993 - DNA, 38 bp, Artificial Sequence
  primer
gtaaaacgacggccagtggcactacggctatattccaa

SEQ ID NO: 94994 - DNA, 37 bp, Artificial Sequence
  primer
gtaaaacgacggccagtcaggacattcactgccttcc

SEQ ID NO: 94995 - DNA, 21 bp, Artificial Sequence
  primer
cacattgttgccattccctta

SEQ ID NO: 94996 - DNA, 38 bp, Artificial Sequence
  primer
gtaaaacgacggccagtgatccttaaggctttcgctcc

SEQ ID NO: 94997 - DNA, 38 bp, Artificial Sequence
  primer
gtaaaacgacggccagttgcaattgatttgtattgccc

SEQ ID NO: 94998 - DNA, 39 bp, Artificial Sequence
  primer
gtaaaacgacggccagttgcatgagacaattcaagatcc

SEQ ID NO: 94999 - DNA, 22 bp, Artificial Sequence
  primer
tggagaacaactagaggttggg

SEQ ID NO: 95000 - DNA, 24 bp, Artificial Sequence
  primer
aagcatatggaattcagagagaca

SEQ ID NO: 95001 - DNA, 20 bp, Artificial Sequence
  primer
ggagagcatcctcgaacaaa

SEQ ID NO: 95002 - DNA, 22 bp, Artificial Sequence
  primer
ccaagatcctaccctaaatggc

SEQ ID NO: 95003 - DNA, 22 bp, Artificial Sequence
  primer
tggtgacaagaaacaccaattc

SEQ ID NO: 95004 - DNA, 40 bp, Artificial Sequence
  primer
gtaaaacgacggccagttcctgcacaatttgaatatttgg

SEQ ID NO: 95005 - DNA, 40 bp, Artificial Sequence
  primer
gtaaaacgacggccagtgctgctaggacaagtcaagaaac

SEQ ID NO: 95006 - DNA, 21 bp, Artificial Sequence
  primer
caggccatcagctaatgattc

SEQ ID NO: 95007 - DNA, 38 bp, Artificial Sequence
  primer
gtaaaacgacggccagtaactgcagagaggaaagaggg

SEQ ID NO: 95008 - DNA, 39 bp, Artificial Sequence
  primer
gtaaaacgacggccagtttacctgctgtttggttattcg

SEQ ID NO: 95009 - DNA, 23 bp, Artificial Sequence
  primer
gctggagggagaatacaacatac

SEQ ID NO: 95010 - DNA, 21 bp, Artificial Sequence
  primer
tggaccatcactcatctcacc

SEQ ID NO: 95011 - DNA, 21 bp, Artificial Sequence
  primer
aggaggctctgttggaagaag

SEQ ID NO: 95012 - DNA, 38 bp, Artificial Sequence
  primer
gtaaaacgacggccagtgtggtctcgatctgaagggag

SEQ ID NO: 95013 - DNA, 38 bp, Artificial Sequence
  primer
gtaaaacgacggccagtggtctgggacaggtaagatcc

SEQ ID NO: 95014 - DNA, 21 bp, Artificial Sequence
  primer
cgcagtataatcttgcccatc

SEQ ID NO: 95015 - DNA, 38 bp, Artificial Sequence
  primer
gtaaaacgacggccagttcgatcttggttgcaatgttc

SEQ ID NO: 95016 - DNA, 21 bp, Artificial Sequence
  primer
taacgtgcaaagtcatcctgg

SEQ ID NO: 95017 - DNA, 21 bp, Artificial Sequence
  primer
ttgtatcctcgagtctgtcgg

SEQ ID NO: 95018 - DNA, 21 bp, Artificial Sequence
  primer
aaactcaacctcctcaggtcc

SEQ ID NO: 95019 - DNA, 38 bp, Artificial Sequence
  primer
gtaaaacgacggccagtctcctgtcctgccctagagtg

SEQ ID NO: 95020 - DNA, 38 bp, Artificial Sequence
  primer
gtaaaacgacggccagtatctcctgcagcttggatttc

SEQ ID NO: 95021 - DNA, 38 bp, Artificial Sequence
  primer
gtaaaacgacggccagtaccacacaacgaccatctcag

SEQ ID NO: 95022 - DNA, 21 bp, Artificial Sequence
  primer
gcaaagtcatctctgagcacc

SEQ ID NO: 95023 - DNA, 21 bp, Artificial Sequence
  primer
tctagggtgtcagggagttgg

SEQ ID NO: 95024 - DNA, 21 bp, Artificial Sequence
  primer
caagaaggacagaatgggacc

SEQ ID NO: 95025 - DNA, 21 bp, Artificial Sequence
  primer
aagacagcaggatgcaatgag

SEQ ID NO: 95026 - DNA, 38 bp, Artificial Sequence
  primer
gtaaaacgacggccagtaccgggtggatactcagtgtg

SEQ ID NO: 95027 - DNA, 38 bp, Artificial Sequence
  primer
gtaaaacgacggccagttgccaggagtcaggtatttcc

SEQ ID NO: 95028 - DNA, 20 bp, Artificial Sequence
  primer
gaaacaccagggctgacaag

SEQ ID NO: 95029 - DNA, 20 bp, Artificial Sequence
  primer
gaggatctgaaccgtggaag

SEQ ID NO: 95030 - DNA, 20 bp, Artificial Sequence
  primer
gctgctccttgctcttgact

SEQ ID NO: 95031 - DNA, 37 bp, Artificial Sequence
  primer
gtaaaacgacggccagttctgttgaagacactggccc

SEQ ID NO: 95032 - DNA, 37 bp, Artificial Sequence
  primer
gtaaaacgacggccagtgtgcgaagtcactaccaggc

SEQ ID NO: 95033 - DNA, 21 bp, Artificial Sequence
  primer
aaagaggaggaggagagggag

SEQ ID NO: 95034 - DNA, 37 bp, Artificial Sequence
  primer
gtaaaacgacggccagtgcttcgagatggagcaactg

SEQ ID NO: 95035 - DNA, 20 bp, Artificial Sequence
  primer
tggaattacaggcatggacc

SEQ ID NO: 95036 - DNA, 38 bp, Artificial Sequence
  primer
gtaaaacgacggccagttgaggcagagcatgtatcagg

SEQ ID NO: 95037 - DNA, 38 bp, Artificial Sequence
  primer
gtaaaacgacggccagtacccaactccttcctatgtgg

SEQ ID NO: 95038 - DNA, 21 bp, Artificial Sequence
  primer
gttctccgcagtgagtgtgtg

SEQ ID NO: 95039 - DNA, 38 bp, Artificial Sequence
  primer
gtaaaacgacggccagtggctgacagtttctgcctttg

SEQ ID NO: 95040 - DNA, 21 bp, Artificial Sequence
  primer
gaattggagaatgccacagaa

SEQ ID NO: 95041 - DNA, 40 bp, Artificial Sequence
  primer
gtaaaacgacggccagtgctgaatatgcgcattaaatgaa

SEQ ID NO: 95042 - DNA, 38 bp, Artificial Sequence
  primer
gtaaaacgacggccagttgtgaatgctgagacagcttg

SEQ ID NO: 95043 - DNA, 38 bp, Artificial Sequence
  primer
gtaaaacgacggccagtgcaactgcatggtcaggttac

SEQ ID NO: 95044 - DNA, 21 bp, Artificial Sequence
  primer
cttgcccaaagcttaatctcc

SEQ ID NO: 95045 - DNA, 38 bp, Artificial Sequence
  primer
gtaaaacgacggccagttctggctctgatctccctgag

SEQ ID NO: 95046 - DNA, 24 bp, Artificial Sequence
  primer
tgatcagaaaggcattggaaatac

SEQ ID NO: 95047 - DNA, 19 bp, Artificial Sequence
  primer
actgggagaggaggccaag

SEQ ID NO: 95048 - DNA, 20 bp, Artificial Sequence
  primer
gagatgctgtgctcccagac

SEQ ID NO: 95049 - DNA, 21 bp, Artificial Sequence
  primer
cttcagcctccctttcatctc

SEQ ID NO: 95050 - DNA, 38 bp, Artificial Sequence
  primer
gtaaaacgacggccagttcaatggtgtgagtttcaggg

SEQ ID NO: 95051 - DNA, 20 bp, Artificial Sequence
  primer
aacaacttgccaggatgtgc

SEQ ID NO: 95052 - DNA, 22 bp, Artificial Sequence
  primer
cctaagtgtaccctttcatggc

SEQ ID NO: 95053 - DNA, 22 bp, Artificial Sequence
  primer
aacagccttgctcttatcatgg

SEQ ID NO: 95054 - DNA, 18 bp, Artificial Sequence
  primer
ccaccaggctgtccacac

SEQ ID NO: 95055 - DNA, 35 bp, Artificial Sequence
  primer
gtaaaacgacggccagtccctcgaagccaaactgg

SEQ ID NO: 95056 - DNA, 39 bp, Artificial Sequence
  primer
gtaaaacgacggccagtccactcaaactctgtggagacc

SEQ ID NO: 95057 - DNA, 19 bp, Artificial Sequence
  primer
acctccctcaggctgcttc

SEQ ID NO: 95058 - DNA, 21 bp, Artificial Sequence
  primer
ctcctccacacattcgtgttc

SEQ ID NO: 95059 - DNA, 20 bp, Artificial Sequence
  primer
cagctcatgtccctcgctac

SEQ ID NO: 95060 - DNA, 38 bp, Artificial Sequence
  primer
gtaaaacgacggccagttctgtggctctctgtcctctg

SEQ ID NO: 95061 - DNA, 21 bp, Artificial Sequence
  primer
agctccggatatttggttgag

SEQ ID NO: 95062 - DNA, 38 bp, Artificial Sequence
  primer
gtaaaacgacggccagtagttgggataatgggaagctg

SEQ ID NO: 95063 - DNA, 20 bp, Artificial Sequence
  primer
ccatcttcccttgggatttg

SEQ ID NO: 95064 - DNA, 20 bp, Artificial Sequence
  primer
gacccagcgatagcagtcag

SEQ ID NO: 95065 - DNA, 21 bp, Artificial Sequence
  primer
tggtgtatccttggtcacgag

SEQ ID NO: 95066 - DNA, 25 bp, Artificial Sequence
  primer
aaataacacattgccctattacagc

SEQ ID NO: 95067 - DNA, 22 bp, Artificial Sequence
  primer
aatttcccatcacagttgaacc

SEQ ID NO: 95068 - DNA, 36 bp, Artificial Sequence
  primer
gtaaaacgacggccagtcccaccactgaccacaacc

SEQ ID NO: 95069 - DNA, 22 bp, Artificial Sequence
  primer
tgccttctgggaaatctaactc

SEQ ID NO: 95070 - DNA, 38 bp, Artificial Sequence
  primer
gtaaaacgacggccagtgcggtcatttcctatccagag

SEQ ID NO: 95071 - DNA, 38 bp, Artificial Sequence
  primer
gtaaaacgacggccagttgagaagagcaaggtggaagg

SEQ ID NO: 95072 - DNA, 38 bp, Artificial Sequence
  primer
gtaaaacgacggccagtctatccagcaggacacagagc

SEQ ID NO: 95073 - DNA, 44 bp, Artificial Sequence
  primer
gtaaaacgacggccagtcagagcctcatgctttaatttataatg

SEQ ID NO: 95074 - DNA, 25 bp, Artificial Sequence
  primer
acagcaaggatgagtaaagaaactc

SEQ ID NO: 95075 - DNA, 26 bp, Artificial Sequence
  primer
gactaattgaagctgactcaaagttc

SEQ ID NO: 95076 - DNA, 22 bp, Artificial Sequence
  primer
cacagcctcctcattcataacc

SEQ ID NO: 95077 - DNA, 38 bp, Artificial Sequence
  primer
gtaaaacgacggccagttgatgttccaggcacagattc

SEQ ID NO: 95078 - DNA, 39 bp, Artificial Sequence
  primer
gtaaaacgacggccagtccagctcttctagattccaggg

SEQ ID NO: 95079 - DNA, 43 bp, Artificial Sequence
  primer
gtaaaacgacggccagttcagtacagtcgagaaagaaacaaag

SEQ ID NO: 95080 - DNA, 27 bp, Artificial Sequence
  primer
aaatgacagatactaatgcatgtgaac

SEQ ID NO: 95081 - DNA, 40 bp, Artificial Sequence
  primer
gtaaaacgacggccagttgagaaatgaactactccctccc

SEQ ID NO: 95082 - DNA, 21 bp, Artificial Sequence
  primer
cagttaccgaagccattccac

SEQ ID NO: 95083 - DNA, 25 bp, Artificial Sequence
  primer
tcagtcctctgatcagtaagaaacc

SEQ ID NO: 95084 - DNA, 38 bp, Artificial Sequence
  primer
gtaaaacgacggccagttaccagcatttgccacttgag

SEQ ID NO: 95085 - DNA, 23 bp, Artificial Sequence
  primer
gcagcaattatttcatttcttgg

SEQ ID NO: 95086 - DNA, 37 bp, Artificial Sequence
  primer
gtaaaacgacggccagtactaccacacccagccacag

SEQ ID NO: 95087 - DNA, 21 bp, Artificial Sequence
  primer
caggaaccgattacccagttg

SEQ ID NO: 95088 - DNA, 23 bp, Artificial Sequence
  primer
ccagcacagttaagaaataaggc

SEQ ID NO: 95089 - DNA, 21 bp, Artificial Sequence
  primer
gagccacactaaagacgctcc

SEQ ID NO: 95090 - DNA, 20 bp, Artificial Sequence
  primer
acctgcaccaaagacacagg

SEQ ID NO: 95091 - DNA, 38 bp, Artificial Sequence
  primer
gtaaaacgacggccagtatggagtgatttcccaccaac

SEQ ID NO: 95092 - DNA, 20 bp, Artificial Sequence
  primer
ccttcagacgcatagccaac

SEQ ID NO: 95093 - DNA, 21 bp, Artificial Sequence
  primer
tcacatccaccagaccatctc

SEQ ID NO: 95094 - DNA, 21 bp, Artificial Sequence
  primer
agtagccttcactcacccagg

SEQ ID NO: 95095 - DNA, 21 bp, Artificial Sequence
  primer
ttgggaaagggaaattgactg

SEQ ID NO: 95096 - DNA, 21 bp, Artificial Sequence
  primer
atgtggtagacagagcgcacc

SEQ ID NO: 95097 - DNA, 38 bp, Artificial Sequence
  primer
gtaaaacgacggccagtcgtctctgatctgattcctgc

SEQ ID NO: 95098 - DNA, 21 bp, Artificial Sequence
  primer
agactatggcttccaacctgg

SEQ ID NO: 95099 - DNA, 38 bp, Artificial Sequence
  primer
gtaaaacgacggccagtagctttgaagatgagcgtctg

SEQ ID NO: 95100 - DNA, 20 bp, Artificial Sequence
  primer
acatctcccagcatcattcg

SEQ ID NO: 95101 - DNA, 21 bp, Artificial Sequence
  primer
atgacaccaagccctcctaag

SEQ ID NO: 95102 - DNA, 38 bp, Artificial Sequence
  primer
gtaaaacgacggccagtctgcctgtctgttggtcactg

SEQ ID NO: 95103 - DNA, 37 bp, Artificial Sequence
  primer
gtaaaacgacggccagtctatgaccgctactccagcg

SEQ ID NO: 95104 - DNA, 39 bp, Artificial Sequence
  primer
gtaaaacgacggccagtccacttctttcttcagggacag

SEQ ID NO: 95105 - DNA, 21 bp, Artificial Sequence
  primer
aagaagggactggaagaaggg

SEQ ID NO: 95106 - DNA, 21 bp, Artificial Sequence
  primer
aggattccaggagatgtggag

SEQ ID NO: 95107 - DNA, 22 bp, Artificial Sequence
  primer
aagacagagccctcccttattc

SEQ ID NO: 95108 - DNA, 21 bp, Artificial Sequence
  primer
ctgcctgtagcttgtgtgttg

SEQ ID NO: 95109 - DNA, 38 bp, Artificial Sequence
  primer
gtaaaacgacggccagtgaggccacaggaatcatcaac

SEQ ID NO: 95110 - DNA, 22 bp, Artificial Sequence
  primer
gcaatccagtgcctcagtttac

SEQ ID NO: 95111 - DNA, 24 bp, Artificial Sequence
  primer
gtgcacaacacagatgaatctaaa

SEQ ID NO: 95112 - DNA, 27 bp, Artificial Sequence
  primer
aaagctctaatatccaatgtcaagttt

SEQ ID NO: 95113 - DNA, 38 bp, Artificial Sequence
  primer
gtaaaacgacggccagtagtgactaggcgttgtcggtg

SEQ ID NO: 95114 - DNA, 22 bp, Artificial Sequence
  primer
tcttatgacccacagacccaag

SEQ ID NO: 95115 - DNA, 18 bp, Artificial Sequence
  primer
aaaggcatgtgtccacgc

SEQ ID NO: 95116 - DNA, 37 bp, Artificial Sequence
  primer
gtaaaacgacggccagtgttctgcagctcatccctcc

SEQ ID NO: 95117 - DNA, 36 bp, Artificial Sequence
  primer
gtaaaacgacggccagtgtggccagaagagctcagg

SEQ ID NO: 95118 - DNA, 38 bp, Artificial Sequence
  primer
gtaaaacgacggccagtagggtatgggatggaagaaag

SEQ ID NO: 95119 - DNA, 38 bp, Artificial Sequence
  primer
gtaaaacgacggccagttaagcacgacaggctttaccc

SEQ ID NO: 95120 - DNA, 21 bp, Artificial Sequence
  primer
aggcctccaggacactaaatg

SEQ ID NO: 95121 - DNA, 38 bp, Artificial Sequence
  primer
gtaaaacgacggccagtagcattatttggatgggcaag

SEQ ID NO: 95122 - DNA, 38 bp, Artificial Sequence
  primer
gtaaaacgacggccagtccctccaggacccttctacac

SEQ ID NO: 95123 - DNA, 21 bp, Artificial Sequence
  primer
atctgttggcctcaacgtacc

SEQ ID NO: 95124 - DNA, 21 bp, Artificial Sequence
  primer
tctccaagaatcagcctttgg

SEQ ID NO: 95125 - DNA, 20 bp, Artificial Sequence
  primer
agctcttcctcctccacagg

SEQ ID NO: 95126 - DNA, 19 bp, Artificial Sequence
  primer
ctccctcgacttgggagtg

SEQ ID NO: 95127 - DNA, 19 bp, Artificial Sequence
  primer
gctctcgtagcggtcatgg

SEQ ID NO: 95128 - DNA, 38 bp, Artificial Sequence
  primer
gtaaaacgacggccagttctacgagagtcacggcaatg

SEQ ID NO: 95129 - DNA, 37 bp, Artificial Sequence
  primer
gtaaaacgacggccagtaaaccgacattctggcagtg

SEQ ID NO: 95130 - DNA, 38 bp, Artificial Sequence
  primer
gtaaaacgacggccagtgtctgtccagggaagaccttg

SEQ ID NO: 95131 - DNA, 21 bp, Artificial Sequence
  primer
ccgaaatggttgtccacatag

SEQ ID NO: 95132 - DNA, 37 bp, Artificial Sequence
  primer
gtaaaacgacggccagtctgttcagcctcccagaaag

SEQ ID NO: 95133 - DNA, 21 bp, Artificial Sequence
  primer
atcaggatcagctcccaagac

SEQ ID NO: 95134 - DNA, 37 bp, Artificial Sequence
  primer
gtaaaacgacggccagtggtggagggaaagaaacagc

SEQ ID NO: 95135 - DNA, 22 bp, Artificial Sequence
  primer
gcaatccaagaaggtttaaggg

SEQ ID NO: 95136 - DNA, 37 bp, Artificial Sequence
  primer
gtaaaacgacggccagtagcacctgtggtctctctgg

SEQ ID NO: 95137 - DNA, 20 bp, Artificial Sequence
  primer
acagatgcttgagggcattg

SEQ ID NO: 95138 - DNA, 21 bp, Artificial Sequence
  primer
gctccatgacatccactgaac

SEQ ID NO: 95139 - DNA, 20 bp, Artificial Sequence
  primer
tgggcgtaagagatgtcacc

SEQ ID NO: 95140 - DNA, 21 bp, Artificial Sequence
  primer
gtaagcagggctgtgagacac

SEQ ID NO: 95141 - DNA, 23 bp, Artificial Sequence
  primer
tcgcatcatatagagttgcagtg

SEQ ID NO: 95142 - DNA, 24 bp, Artificial Sequence
  primer
ttcaatacaatgacatttgccaag

SEQ ID NO: 95143 - DNA, 38 bp, Artificial Sequence
  primer
gtaaaacgacggccagtcaaatgaccatgcctccattc

SEQ ID NO: 95144 - DNA, 25 bp, Artificial Sequence
  primer
ggaaagctgaagctataatgagaag

SEQ ID NO: 95145 - DNA, 40 bp, Artificial Sequence
  primer
gtaaaacgacggccagtcctagcagaacaggagtttccag

SEQ ID NO: 95146 - DNA, 22 bp, Artificial Sequence
  primer
tgtcagtacaacggtggatttg

SEQ ID NO: 95147 - DNA, 19 bp, Artificial Sequence
  primer
gcccttctggacttgatcg

SEQ ID NO: 95148 - DNA, 38 bp, Artificial Sequence
  primer
gtaaaacgacggccagtctgccaccattctttcttctg

SEQ ID NO: 95149 - DNA, 41 bp, Artificial Sequence
  primer
gtaaaacgacggccagtggaagaaatcgacctaagtttcag

SEQ ID NO: 95150 - DNA, 44 bp, Artificial Sequence
  primer
gtaaaacgacggccagtcataagcatttaataatgattggtgac

SEQ ID NO: 95151 - DNA, 41 bp, Artificial Sequence
  primer
gtaaaacgacggccagtttcaattggatcatctcaaatagg

SEQ ID NO: 95152 - DNA, 21 bp, Artificial Sequence
  primer
caactttggcacaagtgcttt

SEQ ID NO: 95153 - DNA, 38 bp, Artificial Sequence
  primer
gtaaaacgacggccagtgatgccgaagcagaagatcag

SEQ ID NO: 95154 - DNA, 21 bp, Artificial Sequence
  primer
taggtctccctgagacaaggg

SEQ ID NO: 95155 - DNA, 21 bp, Artificial Sequence
  primer
tgagtggagatgaggattccc

SEQ ID NO: 95156 - DNA, 38 bp, Artificial Sequence
  primer
gtaaaacgacggccagtttgtttcggtctctctccacc

SEQ ID NO: 95157 - DNA, 21 bp, Artificial Sequence
  primer
agggtctgggtactgggagac

SEQ ID NO: 95158 - DNA, 20 bp, Artificial Sequence
  primer
ttctcaggccgctactcact

SEQ ID NO: 95159 - DNA, 36 bp, Artificial Sequence
  primer
gtaaaacgacggccagtctgagctcgtccttcccag

SEQ ID NO: 95160 - DNA, 22 bp, Artificial Sequence
  primer
caaatatttacaggcagcaggg

SEQ ID NO: 95161 - DNA, 21 bp, Artificial Sequence
  primer
gactccctactcagcaccacc

SEQ ID NO: 95162 - DNA, 38 bp, Artificial Sequence
  primer
gtaaaacgacggccagtgcctgcaaattccattcctac

SEQ ID NO: 95163 - DNA, 38 bp, Artificial Sequence
  primer
gtaaaacgacggccagtctaatcattcagggcctccag

SEQ ID NO: 95164 - DNA, 38 bp, Artificial Sequence
  primer
gtaaaacgacggccagttgggtacgtgcaaagattctg

SEQ ID NO: 95165 - DNA, 38 bp, Artificial Sequence
  primer
gtaaaacgacggccagtaggagacaactctctccacgg

SEQ ID NO: 95166 - DNA, 38 bp, Artificial Sequence
  primer
gtaaaacgacggccagttgttgggattcatgcacattc

SEQ ID NO: 95167 - DNA, 21 bp, Artificial Sequence
  primer
gaaagattcacacagccctcc

SEQ ID NO: 95168 - DNA, 38 bp, Artificial Sequence
  primer
gtaaaacgacggccagttgaccttattgtggaggaccc

SEQ ID NO: 95169 - DNA, 21 bp, Artificial Sequence
  primer
ctcaaaggatcctcccacttc

SEQ ID NO: 95170 - DNA, 21 bp, Artificial Sequence
  primer
cagatgggttcaccatatccc

SEQ ID NO: 95171 - DNA, 21 bp, Artificial Sequence
  primer
gactaaacctaccaccagccc

SEQ ID NO: 95172 - DNA, 38 bp, Artificial Sequence
  primer
gtaaaacgacggccagtgtcacacccagcaatgaactc

SEQ ID NO: 95173 - DNA, 21 bp, Artificial Sequence
  primer
aagcaagtcaggacaactccc

SEQ ID NO: 95174 - DNA, 38 bp, Artificial Sequence
  primer
gtaaaacgacggccagtctggtaaatgaggctccttgg

SEQ ID NO: 95175 - DNA, 38 bp, Artificial Sequence
  primer
gtaaaacgacggccagttctgtggaagttctgtgggag

SEQ ID NO: 95176 - DNA, 21 bp, Artificial Sequence
  primer
atggtagctccaacccacatc

SEQ ID NO: 95177 - DNA, 21 bp, Artificial Sequence
  primer
gagttgagaatgcaatgctgg

SEQ ID NO: 95178 - DNA, 20 bp, Artificial Sequence
  primer
ggcactgtgagctgggttag

SEQ ID NO: 95179 - DNA, 38 bp, Artificial Sequence
  primer
gtaaaacgacggccagtgctgttctgacctagctgtgg

SEQ ID NO: 95180 - DNA, 21 bp, Artificial Sequence
  primer
acctctccatggttgtggaag

SEQ ID NO: 95181 - DNA, 38 bp, Artificial Sequence
  primer
gtaaaacgacggccagtactagcccaggaaacagggag

SEQ ID NO: 95182 - DNA, 21 bp, Artificial Sequence
  primer
attccttctcctccatgggac

SEQ ID NO: 95183 - DNA, 39 bp, Artificial Sequence
  primer
gtaaaacgacggccagttgtcaggtcactgatttggttg

SEQ ID NO: 95184 - DNA, 23 bp, Artificial Sequence
  primer
aggatctatttccactttcaccc

SEQ ID NO: 95185 - DNA, 39 bp, Artificial Sequence
  primer
gtaaaacgacggccagtcaactcagtctcttccattggg

SEQ ID NO: 95186 - DNA, 39 bp, Artificial Sequence
  primer
gtaaaacgacggccagttgacctcagtctctgtcaatcc

SEQ ID NO: 95187 - DNA, 38 bp, Artificial Sequence
  primer
gtaaaacgacggccagtgatgcttatagccgcttaggg

SEQ ID NO: 95188 - DNA, 20 bp, Artificial Sequence
  primer
gcaggatttgaaggagaccc

SEQ ID NO: 95189 - DNA, 21 bp, Artificial Sequence
  primer
cttgctttgctcctggatacc

SEQ ID NO: 95190 - DNA, 38 bp, Artificial Sequence
  primer
gtaaaacgacggccagtaggttaaacaagttgcagccg

SEQ ID NO: 95191 - DNA, 21 bp, Artificial Sequence
  primer
gagccaaggaggaaggaagag

SEQ ID NO: 95192 - DNA, 21 bp, Artificial Sequence
  primer
atttgcagctgggatgagaag

SEQ ID NO: 95193 - DNA, 20 bp, Artificial Sequence
  primer
acttattggcagtggcgttg

SEQ ID NO: 95194 - DNA, 38 bp, Artificial Sequence
  primer
gtaaaacgacggccagtagtgaaccgggttgtaaatgc

SEQ ID NO: 95195 - DNA, 21 bp, Artificial Sequence
  primer
ccactttctttccctgagtgg

SEQ ID NO: 95196 - DNA, 21 bp, Artificial Sequence
  primer
cagatctcagacaccaaaggc

SEQ ID NO: 95197 - DNA, 38 bp, Artificial Sequence
  primer
gtaaaacgacggccagtatttggaggccagtttgacag

SEQ ID NO: 95198 - DNA, 38 bp, Artificial Sequence
  primer
gtaaaacgacggccagtagaaccagaaacagggcagtc

SEQ ID NO: 95199 - DNA, 35 bp, Artificial Sequence
  primer
gtaaaacgacggccagtcttgcctcagagggagcc

SEQ ID NO: 95200 - DNA, 19 bp, Artificial Sequence
  primer
ctgggtggtctctgccaac

SEQ ID NO: 95201 - DNA, 38 bp, Artificial Sequence
  primer
gtaaaacgacggccagtggaacttacgagtgggcagag

SEQ ID NO: 95202 - DNA, 20 bp, Artificial Sequence
  primer
ctctccatcctcccttcctg

SEQ ID NO: 95203 - DNA, 21 bp, Artificial Sequence
  primer
ctacattcatctggtccgcag

SEQ ID NO: 95204 - DNA, 37 bp, Artificial Sequence
  primer
gtaaaacgacggccagtagaagagagaggcagcccac

SEQ ID NO: 95205 - DNA, 21 bp, Artificial Sequence
  primer
cattctgacagtgaagcaggg

SEQ ID NO: 95206 - DNA, 21 bp, Artificial Sequence
  primer
atcagagcagaccctggctac

SEQ ID NO: 95207 - DNA, 21 bp, Artificial Sequence
  primer
ataccgacataggttggagcc

SEQ ID NO: 95208 - DNA, 20 bp, Artificial Sequence
  primer
agtgtgtgtggacctctggg

SEQ ID NO: 95209 - DNA, 38 bp, Artificial Sequence
  primer
gtaaaacgacggccagtgaagtgatttgcccagactcc

SEQ ID NO: 95210 - DNA, 22 bp, Artificial Sequence
  primer
gggtgacctaccttattggttg

SEQ ID NO: 95211 - DNA, 38 bp, Artificial Sequence
  primer
gtaaaacgacggccagtggattgagctctggatggaag

SEQ ID NO: 95212 - DNA, 37 bp, Artificial Sequence
  primer
gtaaaacgacggccagtggagctatgcccagtcagtg

SEQ ID NO: 95213 - DNA, 38 bp, Artificial Sequence; identical to SEQ ID NO: 95211
  primer

SEQ ID NO: 95214 - DNA, 21 bp, Artificial Sequence
  primer
taccatcatccatcatttggg

SEQ ID NO: 95215 - DNA, 22 bp, Artificial Sequence
  primer
aacattggcattgtcagtttcc

SEQ ID NO: 95216 - DNA, 21 bp, Artificial Sequence
  primer
ttccctgatgcaacaacactg

SEQ ID NO: 95217 - DNA, 21 bp, Artificial Sequence
  primer
gtttgtaaattgggtcccagg

SEQ ID NO: 95218 - DNA, 38 bp, Artificial Sequence
  primer
gtaaaacgacggccagttatgaagactcccagcgtcag

SEQ ID NO: 95219 - DNA, 38 bp, Artificial Sequence
  primer
gtaaaacgacggccagttaagctcttatggagcagggc

SEQ ID NO: 95220 - DNA, 21 bp, Artificial Sequence
  primer
agctcacttgactccagtccc

SEQ ID NO: 95221 - DNA, 38 bp, Artificial Sequence
  primer
gtaaaacgacggccagtaggagccttccagttctaagc

SEQ ID NO: 95222 - DNA, 22 bp, Artificial Sequence
  primer
ccacttaagctgagctccaaag

SEQ ID NO: 95223 - DNA, 20 bp, Artificial Sequence
  primer
tttcgccatattgttcaggc

SEQ ID NO: 95224 - DNA, 37 bp, Artificial Sequence
  primer
gtaaaacgacggccagtgtgcaatgctcaggaaggtc

SEQ ID NO: 95225 - DNA, 39 bp, Artificial Sequence
  primer
gtaaaacgacggccagtggctttaataacatcccagagg

SEQ ID NO: 95226 - DNA, 26 bp, Artificial Sequence
  primer
aaagacaatctgtagcagtagatccc

SEQ ID NO: 95227 - DNA, 21 bp, Artificial Sequence
  primer
cactgtgcctcgatgattgac

SEQ ID NO: 95228 - DNA, 21 bp, Artificial Sequence
  primer
agatgcggccaatttctaaac

SEQ ID NO: 95229 - DNA, 21 bp, Artificial Sequence
  primer
ctcgtgacaattcctccagtg

SEQ ID NO: 95230 - DNA, 23 bp, Artificial Sequence
  primer
ggtccttcaggaaagtagtttgg

SEQ ID NO: 95231 - DNA, 37 bp, Artificial Sequence
  primer
gtaaaacgacggccagtccacatagcaccattccacc

SEQ ID NO: 95232 - DNA, 21 bp, Artificial Sequence
  primer
atgcacctccaccaaagacac

SEQ ID NO: 95233 - DNA, 22 bp, Artificial Sequence
  primer
tcacaaactagtccaatcccag

SEQ ID NO: 95234 - DNA, 38 bp, Artificial Sequence
  primer
gtaaaacgacggccagtccctgcaattgtgatgtatgc

SEQ ID NO: 95235 - DNA, 21 bp, Artificial Sequence
  primer
gagtctcttcgtccttgctgg

SEQ ID NO: 95236 - DNA, 38 bp, Artificial Sequence
  primer
gtaaaacgacggccagtggtctgagattgtgcatttcc

SEQ ID NO: 95237 - DNA, 38 bp, Artificial Sequence
  primer
gtaaaacgacggccagtgttaagtgtcccagctccctg

SEQ ID NO: 95238 - DNA, 21 bp, Artificial Sequence
  primer
aagacgaccagggaaaggaag

SEQ ID NO: 95239 - DNA, 18 bp, Artificial Sequence
  primer
cccatttggcctcctctc

SEQ ID NO: 95240 - DNA, 39 bp, Artificial Sequence
  primer
gtaaaacgacggccagttttcgctgacaatgtctcgtag

SEQ ID NO: 95241 - DNA, 38 bp, Artificial Sequence
  primer
gtaaaacgacggccagtgaaactaatgcagccctcctc

SEQ ID NO: 95242 - DNA, 22 bp, Artificial Sequence
  primer
tgctgattggcatcaaatacat

SEQ ID NO: 95243 - DNA, 20 bp, Artificial Sequence
  primer
cccgtaattgcactccttgg

SEQ ID NO: 95244 - DNA, 42 bp, Artificial Sequence
  primer
gtaaaacgacggccagtccctctttaattatcctcgaatcac

SEQ ID NO: 95245 - DNA, 20 bp, Artificial Sequence
  primer
cattcatgcaaaggtcatgc

SEQ ID NO: 95246 - DNA, 38 bp, Artificial Sequence
  primer
gtaaaacgacggccagtcccagcccataattcttgatg

SEQ ID NO: 95247 - DNA, 43 bp, Artificial Sequence
  primer
gtaaaacgacggccagtttaactaacaatcacgtaagggtctc

SEQ ID NO: 95248 - DNA, 21 bp, Artificial Sequence
  primer
ggagtctgattcgtgacaccc

SEQ ID NO: 95249 - DNA, 38 bp, Artificial Sequence
  primer
gtaaaacgacggccagtccaacagtgaatcatcaaggc

SEQ ID NO: 95250 - DNA, 38 bp, Artificial Sequence
  primer
gtaaaacgacggccagtttgaactacatcccgtctccc

SEQ ID NO: 95251 - DNA, 19 bp, Artificial Sequence
  primer
ccaggaagccctacagtgg

SEQ ID NO: 95252 - DNA, 19 bp, Artificial Sequence
  primer
accaccacactgtgcaagg

SEQ ID NO: 95253 - DNA, 22 bp, Artificial Sequence
  primer
cagtctctgtcctggtgaggag

SEQ ID NO: 95254 - DNA, 38 bp, Artificial Sequence
  primer
gtaaaacgacggccagtacatgtggatcccagagtcag

SEQ ID NO: 95255 - DNA, 38 bp, Artificial Sequence
  primer
gtaaaacgacggccagtagaagtgatggcttcatcgag

SEQ ID NO: 95256 - DNA, 22 bp, Artificial Sequence
  primer
gctcagaccctagatcacaggc

SEQ ID NO: 95257 - DNA, 21 bp, Artificial Sequence
  primer
ttccaatgtaactgggcatcc

SEQ ID NO: 95258 - DNA, 38 bp, Artificial Sequence
  primer
gtaaaacgacggccagtgaccttctgggatgctctgtg

SEQ ID NO: 95259 - DNA, 38 bp, Artificial Sequence
  primer
gtaaaacgacggccagtttagagacatgcaccctgacc

SEQ ID NO: 95260 - DNA, 37 bp, Artificial Sequence
  primer
gtaaaacgacggccagtgtgaagcagaggtgtcctgc

SEQ ID NO: 95261 - DNA, 38 bp, Artificial Sequence
  primer
gtaaaacgacggccagtagagagcctcgactctgcctc

SEQ ID NO: 95262 - DNA, 21 bp, Artificial Sequence
  primer
ggtctccattctgtctttggg

SEQ ID NO: 95263 - DNA, 21 bp, Artificial Sequence
  primer
cctattcatgtatgggcaggg

SEQ ID NO: 95264 - DNA, 21 bp, Artificial Sequence
  primer
tgttggagtccatctgctgtg

SEQ ID NO: 95265 - DNA, 35 bp, Artificial Sequence
  primer
gtaaaacgacggccagtcctcccaaagatggaggg

SEQ ID NO: 95266 - DNA, 20 bp, Artificial Sequence
  primer
gctggacatgacccaaacac

SEQ ID NO: 95267 - DNA, 20 bp, Artificial Sequence
  primer
caagaaacatcttgcctggg

SEQ ID NO: 95268 - DNA, 21 bp, Artificial Sequence
  primer
ccaaacacacagaggaaagca

SEQ ID NO: 95269 - DNA, 21 bp, Artificial Sequence
  primer
attctgggattcagggatgtg

SEQ ID NO: 95270 - DNA, 38 bp, Artificial Sequence
  primer
gtaaaacgacggccagtcctctatgactgcagtttccg

SEQ ID NO: 95271 - DNA, 22 bp, Artificial Sequence
  primer
cattatttgctacttggctggg

SEQ ID NO: 95272 - DNA, 21 bp, Artificial Sequence
  primer
caacacccacttctctggttg

SEQ ID NO: 95273 - DNA, 36 bp, Artificial Sequence
  primer
gtaaaacgacggccagtcttaaaggcacaggacggc

SEQ ID NO: 95274 - DNA, 21 bp, Artificial Sequence
  primer
attagctggagtgtgacgtgc

SEQ ID NO: 95275 - DNA, 21 bp, Artificial Sequence
  primer
agcatgaatgaaggaagggat

SEQ ID NO: 95276 - DNA, 38 bp, Artificial Sequence
  primer
gtaaaacgacggccagtggtctttgaggagagggattg

SEQ ID NO: 95277 - DNA, 23 bp, Artificial Sequence
  primer
tcttcacagctgctaaatgaagg

SEQ ID NO: 95278 - DNA, 38 bp, Artificial Sequence
  primer
gtaaaacgacggccagtttcattgaatgtctgcaaccc

SEQ ID NO: 95279 - DNA, 21 bp, Artificial Sequence
  primer
tactgtggtgggtttctgagg

SEQ ID NO: 95280 - DNA, 22 bp, Artificial Sequence
  primer
ccatttaatcctgcaatcttgg

SEQ ID NO: 95281 - DNA, 22 bp, Artificial Sequence
  primer
gctgaatccgagcgagtatatg

SEQ ID NO: 95282 - DNA, 38 bp, Artificial Sequence
  primer
gtaaaacgacggccagtgaatgtgattccaggactgcc

SEQ ID NO: 95283 - DNA, 21 bp, Artificial Sequence
  primer
ctgactccatgagggacactg

SEQ ID NO: 95284 - DNA, 45 bp, Artificial Sequence
  primer
gtaaaacgacggccagttctcatagaccattaatttgtgctagtc

SEQ ID NO: 95285 - DNA, 22 bp, Artificial Sequence
  primer
cagagcgagactctgtctcaaa

SEQ ID NO: 95286 - DNA, 21 bp, Artificial Sequence
  primer
agcagtcccacacacgtaaag

SEQ ID NO: 95287 - DNA, 21 bp, Artificial Sequence
  primer
atctggcttcccaagtaatgg

SEQ ID NO: 95288 - DNA, 40 bp, Artificial Sequence
  primer
gtaaaacgacggccagtgcagctgcttcaagttacatttc

SEQ ID NO: 95289 - DNA, 21 bp, Artificial Sequence
  primer
actcaggacgggctgtaactc

SEQ ID NO: 95290 - DNA, 21 bp, Artificial Sequence
  primer
tagcccaatacacacctgacg

SEQ ID NO: 95291 - DNA, 38 bp, Artificial Sequence
  primer
gtaaaacgacggccagtaagcctttagaatgtggcagc

SEQ ID NO: 95292 - DNA, 38 bp, Artificial Sequence
  primer
gtaaaacgacggccagttaaatctgttccaggttggcg

SEQ ID NO: 95293 - DNA, 38 bp, Artificial Sequence
  primer
gtaaaacgacggccagtagccagaaaggaagtctgctg

SEQ ID NO: 95294 - DNA, 39 bp, Artificial Sequence
  primer
gtaaaacgacggccagtagccattgtgtgaacgtctatg

SEQ ID NO: 95295 - DNA, 38 bp, Artificial Sequence
  primer
gtaaaacgacggccagtaatggtcctttggtgcgttag

SEQ ID NO: 95296 - DNA, 36 bp, Artificial Sequence
  primer
gtaaaacgacggccagtcttcatggcgcttgtgaaa

SEQ ID NO: 95297 - DNA, 21 bp, Artificial Sequence
  primer
aggcataagcccagtgttcag

SEQ ID NO: 95298 - DNA, 38 bp, Artificial Sequence
  primer
gtaaaacgacggccagttgaccacaaggaaacaaccag

SEQ ID NO: 95299 - DNA, 21 bp, Artificial Sequence
  primer
acctgcccacctgtatgtgac

SEQ ID NO: 95300 - DNA, 39 bp, Artificial Sequence
  primer
gtaaaacgacggccagtgctcagatctggaaatgactcg

SEQ ID NO: 95301 - DNA, 37 bp, Artificial Sequence
  primer
gtaaaacgacggccagtacctctccggcactaactcc

SEQ ID NO: 95302 - DNA, 20 bp, Artificial Sequence
  primer
cgatctggtgcctattgtgg

SEQ ID NO: 95303 - DNA, 21 bp, Artificial Sequence
  primer
gatgaggaccaaaccatcctc

SEQ ID NO: 95304 - DNA, 21 bp, Artificial Sequence
  primer
cacacatgcacagtctggttc

SEQ ID NO: 95305 - DNA, 38 bp, Artificial Sequence
  primer
gtaaaacgacggccagtccagctgtgtgtacgtcttgg

SEQ ID NO: 95306 - DNA, 38 bp, Artificial Sequence
  primer
gtaaaacgacggccagtgactactgacctgacggtccc

SEQ ID NO: 95307 - DNA, 21 bp, Artificial Sequence
  primer
caggaaagggagaatggtgac

SEQ ID NO: 95308 - DNA, 19 bp, Artificial Sequence
  primer
cagggctcccagctttatg

SEQ ID NO: 95309 - DNA, 38 bp, Artificial Sequence
  primer
gtaaaacgacggccagtcgaatgcatccaatagttccc

SEQ ID NO: 95310 - DNA, 38 bp, Artificial Sequence
  primer
gtaaaacgacggccagttttccttccatctctccaagg

SEQ ID NO: 95311 - DNA, 21 bp, Artificial Sequence
  primer
taattctcattccctcagccc

SEQ ID NO: 95312 - DNA, 21 bp, Artificial Sequence
  primer
acaaaggtcttcctcacccac

SEQ ID NO: 95313 - DNA, 21 bp, Artificial Sequence
  primer
ttcgggtaattctccatctgc

SEQ ID NO: 95314 - DNA, 19 bp, Artificial Sequence
  primer
cactcaccaccacacctgg

SEQ ID NO: 95315 - DNA, 38 bp, Artificial Sequence
  primer
gtaaaacgacggccagtcccttagcatttccagatccc

SEQ ID NO: 95316 - DNA, 21 bp, Artificial Sequence
  primer
cagacccatgcaagagactcc

SEQ ID NO: 95317 - DNA, 21 bp, Artificial Sequence
  primer
catgcattaaggtcccagagg

SEQ ID NO: 95318 - DNA, 38 bp, Artificial Sequence
  primer
gtaaaacgacggccagtggcagagaggagatggttagc

SEQ ID NO: 95319 - DNA, 38 bp, Artificial Sequence
  primer
gtaaaacgacggccagtgactcgaatctgaatctgggc

SEQ ID NO: 95320 - DNA, 21 bp, Artificial Sequence
  primer
gcctgcggaagttaaagactg

SEQ ID NO: 95321 - DNA, 21 bp, Artificial Sequence
  primer
aaggagtagcgtgtgggattg

SEQ ID NO: 95322 - DNA, 21 bp, Artificial Sequence
  primer
cagatcctatccacctccctg

SEQ ID NO: 95323 - DNA, 21 bp, Artificial Sequence
  primer
agagatgagtggcttatgggc

SEQ ID NO: 95324 - DNA, 20 bp, Artificial Sequence
  primer
tgcgtgtcgaggaaataagg

SEQ ID NO: 95325 - DNA, 21 bp, Artificial Sequence
  primer
gacaaagcctcacttccttcc

SEQ ID NO: 95326 - DNA, 25 bp, Artificial Sequence
  primer
aaactaatattgatttcagctgggc

SEQ ID NO: 95327 - DNA, 23 bp, Artificial Sequence
  primer
tttctccacttagaaacggaagg

SEQ ID NO: 95328 - DNA, 42 bp, Artificial Sequence
  primer
gtaaaacgacggccagtacgcattcagaagagattgttagag

SEQ ID NO: 95329 - DNA, 38 bp, Artificial Sequence
  primer
gtaaaacgacggccagtgagcagcatccactgacacag

SEQ ID NO: 95330 - DNA, 38 bp, Artificial Sequence
  primer
gtaaaacgacggccagtgagtcctcagacactggaggc

SEQ ID NO: 95331 - DNA, 21 bp, Artificial Sequence
  primer
agttcaggcacatgtaggagg

SEQ ID NO: 95332 - DNA, 21 bp, Artificial Sequence
  primer
ccacttccaccctgagagttc

SEQ ID NO: 95333 - DNA, 19 bp, Artificial Sequence
  primer
ggcccttcaaactctgctg

SEQ ID NO: 95334 - DNA, 20 bp, Artificial Sequence
  primer
ggatttgggaatgggatctg

SEQ ID NO: 95335 - DNA, 20 bp, Artificial Sequence
  primer
cagtgagccatgatcacacc

SEQ ID NO: 95336 - DNA, 20 bp, Artificial Sequence
  primer
accggatgaaggtgaatgtg

SEQ ID NO: 95337 - DNA, 38 bp, Artificial Sequence
  primer
gtaaaacgacggccagtctgaggaagatcagctttggg

SEQ ID NO: 95338 - DNA, 21 bp, Artificial Sequence
  primer
tgggtgatagactcctgccac

SEQ ID NO: 95339 - DNA, 21 bp, Artificial Sequence
  primer
actgccattcctgacttgatg

SEQ ID NO: 95340 - DNA, 37 bp, Artificial Sequence
  primer
gtaaaacgacggccagtgaccaggtgggaaggaaatc

SEQ ID NO: 95341 - DNA, 21 bp, Artificial Sequence
  primer
accctaacaagcagaccaagc

SEQ ID NO: 95342 - DNA, 21 bp, Artificial Sequence
  primer
aaccctgttccttcgtctgtg

SEQ ID NO: 95343 - DNA, 38 bp, Artificial Sequence
  primer
gtaaaacgacggccagtcctgaatccctctttcctgtg

SEQ ID NO: 95344 - DNA, 21 bp, Artificial Sequence
  primer
ggagggtatcagacccagatg

SEQ ID NO: 95345 - DNA, 21 bp, Artificial Sequence
  primer
agagactcttcacctgtgccc

SEQ ID NO: 95346 - DNA, 38 bp, Artificial Sequence
  primer
gtaaaacgacggccagtccaggtatacaggccttggag

SEQ ID NO: 95347 - DNA, 21 bp, Artificial Sequence
  primer
ccttcagcttcctgagaatgg

SEQ ID NO: 95348 - DNA, 21 bp, Artificial Sequence
  primer
agtgagagctgagaggatggg

SEQ ID NO: 95349 - DNA, 21 bp, Artificial Sequence
  primer
aggtgggtggatggataaagg

SEQ ID NO: 95350 - DNA, 21 bp, Artificial Sequence
  primer
aaccctgttccttcgtctgtg

SEQ ID NO: 95351 - DNA, 38 bp, Artificial Sequence
  primer
gtaaaacgacggccagttgttgacagatggagattggg

SEQ ID NO: 95352 - DNA, 39 bp, Artificial Sequence
  primer
gtaaaacgacggccagttttctataggcatcttccctgg

SEQ ID NO: 95353 - DNA, 37 bp, Artificial Sequence
  primer
gtaaaacgacggccagtaggagaatgtccgtccctct

SEQ ID NO: 95354 - DNA, 38 bp, Artificial Sequence
  primer
gtaaaacgacggccagtagagggctacctgggtattgg

SEQ ID NO: 95355 - DNA, 21 bp, Artificial Sequence
  primer
tcatacatggagcagtcgtcc

SEQ ID NO: 95356 - DNA, 21 bp, Artificial Sequence
  primer
agaatgtcccagggaagtgag

SEQ ID NO: 95357 - DNA, 20 bp, Artificial Sequence
  primer
gacagaggaggagggtggag

SEQ ID NO: 95358 - DNA, 21 bp, Artificial Sequence
  primer
tctgatgaggatgacagtggg

SEQ ID NO: 95359 - DNA, 20 bp, Artificial Sequence
  primer
accatcaccacaagaggcag

SEQ ID NO: 95360 - DNA, 37 bp, Artificial Sequence
  primer
gtaaaacgacggccagtaccaagaaggccacaacgag

SEQ ID NO: 95361 - DNA, 21 bp, Artificial Sequence
  primer
taggtggctgtctggtcaatg

SEQ ID NO: 95362 - DNA, 20 bp, Artificial Sequence
  primer
ctggagacaaatggcagctc

SEQ ID NO: 95363 - DNA, 38 bp, Artificial Sequence
  primer
gtaaaacgacggccagttgtgtgatgataggcaggtcc

SEQ ID NO: 95364 - DNA, 24 bp, Artificial Sequence
  primer
cacctaaatcaatagccatgtgtc

SEQ ID NO: 95365 - DNA, 39 bp, Artificial Sequence
  primer
gtaaaacgacggccagtttcagacaatgacagaattgcc

SEQ ID NO: 95366 - DNA, 21 bp, Artificial Sequence
  primer
ttgctgtaaacatgagaagcg

SEQ ID NO: 95367 - DNA, 38 bp, Artificial Sequence
  primer
gtaaaacgacggccagtggatgccagccatcttgtaac

SEQ ID NO: 95368 - DNA, 21 bp, Artificial Sequence
  primer
tgtctttcaccctccatgtcc

SEQ ID NO: 95369 - DNA, 36 bp, Artificial Sequence
  primer
gtaaaacgacggccagtagaattctaggctccgccc

SEQ ID NO: 95370 - DNA, 21 bp, Artificial Sequence
  primer
aatgctgcctcctccataaag

SEQ ID NO: 95371 - DNA, 21 bp, Artificial Sequence
  primer
ttcatccaggacgagacacac

SEQ ID NO: 95372 - DNA, 21 bp, Artificial Sequence
  primer
cagagcctccaccttcttcac

SEQ ID NO: 95373 - DNA, 21 bp, Artificial Sequence
  primer
caccatgctcaggatcatctc

SEQ ID NO: 95374 - DNA, 38 bp, Artificial Sequence
  primer
gtaaaacgacggccagtatatacacaggcggtgatggc

SEQ ID NO: 95375 - DNA, 38 bp, Artificial Sequence
  primer
gtaaaacgacggccagtagtccacatcttcggagcaag

SEQ ID NO: 95376 - DNA, 38 bp, Artificial Sequence
  primer
gtaaaacgacggccagtggtactccaagttcagctgcg

SEQ ID NO: 95377 - DNA, 21 bp, Artificial Sequence
  primer
tttcagccacagatgtgatcc

SEQ ID NO: 95378 - DNA, 21 bp, Artificial Sequence
  primer
gtcatttcccaaacgtccttc

SEQ ID NO: 95379 - DNA, 22 bp, Artificial Sequence
  primer
tcagcgtaggctcattcttctc

SEQ ID NO: 95380 - DNA, 36 bp, Artificial Sequence
  primer
gtaaaacgacggccagtgagacccagggtgttctgc

SEQ ID NO: 95381 - DNA, 27 bp, Artificial Sequence
  primer
gacccaattatcagaaatgtagatgtg

SEQ ID NO: 95382 - DNA, 21 bp, Artificial Sequence
  primer
caggccaaagataaaggaagc

SEQ ID NO: 95383 - DNA, 21 bp, Artificial Sequence
  primer
gggcctttcagctaaaccttg

SEQ ID NO: 95384 - DNA, 38 bp, Artificial Sequence
  primer
gtaaaacgacggccagtctggttggaacctctggactc

SEQ ID NO: 95385 - DNA, 38 bp, Artificial Sequence
  primer
gtaaaacgacggccagtacttctgcatttgaagggtgg

SEQ ID NO: 95386 - DNA, 38 bp, Artificial Sequence
  primer
gtaaaacgacggccagtctatgcccagcagaaggtttc

SEQ ID NO: 95387 - DNA, 20 bp, Artificial Sequence
  primer
atgaactgctttgggcattg

SEQ ID NO: 95388 - DNA, 37 bp, Artificial Sequence
  primer
gtaaaacgacggccagtaaacccaccaagtctcaggc

SEQ ID NO: 95389 - DNA, 19 bp, Artificial Sequence
  primer
agtggctgtcctctgcctt

SEQ ID NO: 95390 - DNA, 36 bp, Artificial Sequence
  primer
gtaaaacgacggccagtggtttcctagcaagtcggg

SEQ ID NO: 95391 - DNA, 21 bp, Artificial Sequence
  primer
ctaggctcagccaacaagctc

SEQ ID NO: 95392 - DNA, 21 bp, Artificial Sequence
  primer
ttgtgcattggataccctgtc

SEQ ID NO: 95393 - DNA, 21 bp, Artificial Sequence
  primer
tccacttagagggagtcctgg

SEQ ID NO: 95394 - DNA, 38 bp, Artificial Sequence
  primer
gtaaaacgacggccagtcacttcagctccactgtctcg

SEQ ID NO: 95395 - DNA, 20 bp, Artificial Sequence
  primer
tgctgtgtctgtgaaatggg

SEQ ID NO: 95396 - DNA, 38 bp, Artificial Sequence
  primer
gtaaaacgacggccagttggacagcccttgactctacc

SEQ ID NO: 95397 - DNA, 21 bp, Artificial Sequence
  primer
aaagaagtgcctgtacctgcg

SEQ ID NO: 95398 - DNA, 38 bp, Artificial Sequence
  primer
gtaaaacgacggccagtgttcccactatttgctgctgg

SEQ ID NO: 95399 - DNA, 39 bp, Artificial Sequence
  primer
gtaaaacgacggccagtaatgaaagggaaggacttgctc

SEQ ID NO: 95400 - DNA, 21 bp, Artificial Sequence
  primer
catgggcagcatttcttactc

SEQ ID NO: 95401 - DNA, 20 bp, Artificial Sequence
  primer
ctcccatgcacatcacacac

SEQ ID NO: 95402 - DNA, 38 bp, Artificial Sequence
  primer
gtaaaacgacggccagtccaggacagccacttatcacc

SEQ ID NO: 95403 - DNA, 21 bp, Artificial Sequence
  primer
gagcctgcttcttacccacac

SEQ ID NO: 95404 - DNA, 20 bp, Artificial Sequence
  primer
ggttggcagcattaagcaag

SEQ ID NO: 95405 - DNA, 21 bp, Artificial Sequence
  primer
gagactgtgagttgctggcac

SEQ ID NO: 95406 - DNA, 20 bp, Artificial Sequence
  primer
actgcagccttgaactcctg

SEQ ID NO: 95407 - DNA, 36 bp, Artificial Sequence
  primer
gtaaaacgacggccagtgtgtgggaggatccctctg

SEQ ID NO: 95408 - DNA, 38 bp, Artificial Sequence
  primer
gtaaaacgacggccagtccaggccaagaactacctctg

SEQ ID NO: 95409 - DNA, 21 bp, Artificial Sequence
  primer
cctaggcgagctaaagtgctc

SEQ ID NO: 95410 - DNA, 21 bp, Artificial Sequence
  primer
tgcacaacttgaaagggacac

SEQ ID NO: 95411 - DNA, 38 bp, Artificial Sequence
  primer
gtaaaacgacggccagtctttgggtaccttcctgaccc

SEQ ID NO: 95412 - DNA, 21 bp, Artificial Sequence
  primer
ataagaggcctggtcaacagc

SEQ ID NO: 95413 - DNA, 21 bp, Artificial Sequence
  primer
tcaactacagcgagaaggcag

SEQ ID NO: 95414 - DNA, 21 bp, Artificial Sequence
  primer
gtaaacagagggcccaaagtg

SEQ ID NO: 95415 - DNA, 38 bp, Artificial Sequence
  primer
gtaaaacgacggccagtgcacgaggacaaagtgagttg

SEQ ID NO: 95416 - DNA, 20 bp, Artificial Sequence
  primer
aaccaaagcaaaccaaaccc

SEQ ID NO: 95417 - DNA, 21 bp, Artificial Sequence
  primer
cacaaatgacccattcccttc

SEQ ID NO: 95418 - DNA, 21 bp, Artificial Sequence
  primer
agctgaatgaaagcacatccc

SEQ ID NO: 95419 - DNA, 38 bp, Artificial Sequence
  primer
gtaaaacgacggccagtatgctgagcaccaagcctaac

SEQ ID NO: 95420 - DNA, 21 bp, Artificial Sequence
  primer
ttgcctgtgagaaggaatctg

SEQ ID NO: 95421 - DNA, 21 bp, Artificial Sequence
  primer
tagggtgcttcctcttcaagg

SEQ ID NO: 95422 - DNA, 38 bp, Artificial Sequence
  primer
gtaaaacgacggccagtattcctggcaactatgcaacc

SEQ ID NO: 95423 - DNA, 41 bp, Artificial Sequence
  primer
gtaaaacgacggccagtgggcaatgacaatttctaatgttc

SEQ ID NO: 95424 - DNA, 42 bp, Artificial Sequence
  primer
gtaaaacgacggccagttggaagtgataatcttcccattaaa

SEQ ID NO: 95425 - DNA, 22 bp, Artificial Sequence
  primer
catgaatgatgcaagtttgctg

SEQ ID NO: 95426 - DNA, 21 bp, Artificial Sequence
  primer
gctgtttgctgaaacgtcaac

SEQ ID NO: 95427 - DNA, 21 bp, Artificial Sequence
  primer
ctctcgattcccactgtctcc

SEQ ID NO: 95428 - DNA, 24 bp, Artificial Sequence
  primer
tggtctctatcttctttgaatggc

SEQ ID NO: 95429 - DNA, 21 bp, Artificial Sequence
  primer
ctgtttgaccctgacaacacc

SEQ ID NO: 95430 - DNA, 21 bp, Artificial Sequence
  primer
gactaggccaatgcagagagg

SEQ ID NO: 95431 - DNA, 38 bp, Artificial Sequence
  primer
gtaaaacgacggccagtagatggaagagggtgagttgc

SEQ ID NO: 95432 - DNA, 21 bp, Artificial Sequence
  primer
cgttctttagctgaatctggc

SEQ ID NO: 95433 - DNA, 21 bp, Artificial Sequence
  primer
tcctgggaggtgaatccttag

SEQ ID NO: 95434 - DNA, 38 bp, Artificial Sequence
  primer
gtaaaacgacggccagtaccatgtggcttcctctatcg

SEQ ID NO: 95435 - DNA, 21 bp, Artificial Sequence
  primer
gcattgacacacgaggagttc

SEQ ID NO: 95436 - DNA, 38 bp, Artificial Sequence
  primer
gtaaaacgacggccagtgagtactcctggcctcaaacg

SEQ ID NO: 95437 - DNA, 21 bp, Artificial Sequence
  primer
ggcactgaccctacaaccaag

SEQ ID NO: 95438 - DNA, 21 bp, Artificial Sequence
  primer
cttgtcttggagtctctgccc

SEQ ID NO: 95439 - DNA, 21 bp, Artificial Sequence
  primer
gtgtccgggtgtgtatgtttg

SEQ ID NO: 95440 - DNA, 20 bp, Artificial Sequence
  primer
tggatcatcagggtcagctc

SEQ ID NO: 95441 - DNA, 22 bp, Artificial Sequence
  primer
tctattctgaacctcaccctgg

SEQ ID NO: 95442 - DNA, 21 bp, Artificial Sequence
  primer
gactgagtcacgtcgggaaag

SEQ ID NO: 95443 - DNA, 21 bp, Artificial Sequence
  primer
ccatggagaactagctgcctg

SEQ ID NO: 95444 - DNA, 38 bp, Artificial Sequence
  primer
gtaaaacgacggccagttttaaagagacaacccgaccc

SEQ ID NO: 95445 - DNA, 37 bp, Artificial Sequence
  primer
gtaaaacgacggccagtggacattgtgtgtggcactg

SEQ ID NO: 95446 - DNA, 38 bp, Artificial Sequence
  primer
gtaaaacgacggccagtagcagattgtgggttagaggg

SEQ ID NO: 95447 - DNA, 21 bp, Artificial Sequence
  primer
aagatgaacaggccaaagacc

SEQ ID NO: 95448 - DNA, 21 bp, Artificial Sequence
  primer
aacttctgggctcaagcaatc

SEQ ID NO: 95449 - DNA, 38 bp, Artificial Sequence
  primer
gtaaaacgacggccagtaagggaggatggatggtcttc

SEQ ID NO: 95450 - DNA, 21 bp, Artificial Sequence
  primer
tatagctgccactccctcctg

SEQ ID NO: 95451 - DNA, 19 bp, Artificial Sequence
  primer
agaatgaacgaacgcctgg

SEQ ID NO: 95452 - DNA, 36 bp, Artificial Sequence
  primer
gtaaaacgacggccagtctctccggctactccgacc

SEQ ID NO: 95453 - DNA, 35 bp, Artificial Sequence
  primer
gtaaaacgacggccagtcgtgagctaccgtgtccg

SEQ ID NO: 95454 - DNA, 21 bp, Artificial Sequence
  primer
atagggttctccagtggcttg

SEQ ID NO: 95455 - DNA, 38 bp, Artificial Sequence
  primer
gtaaaacgacggccagtgctgggatgtctgggaactac

SEQ ID NO: 95456 - DNA, 18 bp, Artificial Sequence
  primer
caaattgtgagggaggcg

SEQ ID NO: 95457 - DNA, 21 bp, Artificial Sequence
  primer
gagggatctggatctgtcctg

SEQ ID NO: 95458 - DNA, 39 bp, Artificial Sequence
  primer
gtaaaacgacggccagtccctgcttctctagcacagttc

SEQ ID NO: 95459 - DNA, 21 bp, Artificial Sequence
  primer
cacaaacacccagagctcatc

SEQ ID NO: 95460 - DNA, 38 bp, Artificial Sequence
  primer
gtaaaacgacggccagttctcgatcatttcgatcatcc

SEQ ID NO: 95461 - DNA, 38 bp, Artificial Sequence
  primer
gtaaaacgacggccagttaggaacattccagcggagac

SEQ ID NO: 95462 - DNA, 39 bp, Artificial Sequence
  primer
gtaaaacgacggccagttccttatcctcagcactcatcc

SEQ ID NO: 95463 - DNA, 21 bp, Artificial Sequence
  primer
agggaggccttagaagtcagc

SEQ ID NO: 95464 - DNA, 38 bp, Artificial Sequence
  primer
gtaaaacgacggccagtaacatcatctttgcccagtcc

SEQ ID NO: 95465 - DNA, 38 bp, Artificial Sequence
  primer
gtaaaacgacggccagtaccaggaaatgcagaaggacc

SEQ ID NO: 95466 - DNA, 37 bp, Artificial Sequence
  primer
gtaaaacgacggccagtttgcatcccaacactaaggc

SEQ ID NO: 95467 - DNA, 18 bp, Artificial Sequence
  primer
ctgcccagttcagggttg

SEQ ID NO: 95468 - DNA, 39 bp, Artificial Sequence
  primer
gtaaaacgacggccagtcaaaggtacaggcctctgagtg

SEQ ID NO: 95469 - DNA, 20 bp, Artificial Sequence
  primer
gtaagctggcccttggaaag

SEQ ID NO: 95470 - DNA, 40 bp, Artificial Sequence
  primer
gtaaaacgacggccagtcaggcaacatgtgctgaaattat

SEQ ID NO: 95471 - DNA, 38 bp, Artificial Sequence
  primer
gtaaaacgacggccagttggtttaattggcagtcatgc

SEQ ID NO: 95472 - DNA, 21 bp, Artificial Sequence
  primer
gaccctggagttatttcctgc

SEQ ID NO: 95473 - DNA, 26 bp, Artificial Sequence
  primer
ccctctgttctgattctacaggtatc

SEQ ID NO: 95474 - DNA, 38 bp, Artificial Sequence
  primer
gtaaaacgacggccagtgttgcaaagtaccatggtttg

SEQ ID NO: 95475 - DNA, 22 bp, Artificial Sequence
  primer
tttctggtcaaatggaatgaag

SEQ ID NO: 95476 - DNA, 38 bp, Artificial Sequence
  primer
gtaaaacgacggccagtggagcatgtccttgctctttg

SEQ ID NO: 95477 - DNA, 37 bp, Artificial Sequence
  primer
gtaaaacgacggccagtgggtggtcattctgctaagg

SEQ ID NO: 95478 - DNA, 22 bp, Artificial Sequence
  primer
aaggataatgagttggctccat

SEQ ID NO: 95479 - DNA, 21 bp, Artificial Sequence
  primer
ttatgggagaggagagggaaa

SEQ ID NO: 95480 - DNA, 21 bp, Artificial Sequence
  primer
tgggaacacagcaggaatatg

SEQ ID NO: 95481 - DNA, 23 bp, Artificial Sequence
  primer
tgatgctttgaacagaacttgaa

SEQ ID NO: 95482 - DNA, 21 bp, Artificial Sequence
  primer
atgcaacacattccacaaagg

SEQ ID NO: 95483 - DNA, 38 bp, Artificial Sequence
  primer
gtaaaacgacggccagttggagttcaatgacgggagac

SEQ ID NO: 95484 - DNA, 22 bp, Artificial Sequence
  primer
cggctgggaattataaagtgtc

SEQ ID NO: 95485 - DNA, 40 bp, Artificial Sequence
  primer
gtaaaacgacggccagtcccttgatagtagaaatggaggc

SEQ ID NO: 95486 - DNA, 20 bp, Artificial Sequence
  primer
tgggatgacaggcataaacc

SEQ ID NO: 95487 - DNA, 21 bp, Artificial Sequence
  primer
aagtcagtgttagcatccggc

SEQ ID NO: 95488 - DNA, 38 bp, Artificial Sequence
  primer
gtaaaacgacggccagtatacaacccaaccaatcagcc

SEQ ID NO: 95489 - DNA, 38 bp, Artificial Sequence
  primer
gtaaaacgacggccagtctgctgggagaaagagttgtc

SEQ ID NO: 95490 - DNA, 38 bp, Artificial Sequence
  primer
gtaaaacgacggccagtcctgtaatgcaccgaagactg

SEQ ID NO: 95491 - DNA, 39 bp, Artificial Sequence
  primer
gtaaaacgacggccagtggcagtgaggaccaagctttac

SEQ ID NO: 95492 - DNA, 42 bp, Artificial Sequence
  primer
gtaaaacgacggccagtgggtgggaatcactaacttacaata

SEQ ID NO: 95493 - DNA, 22 bp, Artificial Sequence
  primer
ggcactttccatagcacctagc

SEQ ID NO: 95494 - DNA, 22 bp, Artificial Sequence
  primer
tggttgaagttattgctccctc

SEQ ID NO: 95495 - DNA, 21 bp, Artificial Sequence
  primer
agcgttatcctagggcagaag

SEQ ID NO: 95496 - DNA, 22 bp, Artificial Sequence
  primer
gaagttcaacaggaacggtacg

SEQ ID NO: 95497 - DNA, 38 bp, Artificial Sequence
  primer
gtaaaacgacggccagtgagctcgaatgactgactccc

SEQ ID NO: 95498 - DNA, 37 bp, Artificial Sequence
  primer
gtaaaacgacggccagtccagccttctacccatcctg

SEQ ID NO: 95499 - DNA, 22 bp, Artificial Sequence
  primer
aagagggaaatcaatttcaggg

SEQ ID NO: 95500 - DNA, 20 bp, Artificial Sequence
  primer
caaggctcagttccaagtgc

SEQ ID NO: 95501 - DNA, 21 bp, Artificial Sequence
  primer
ggatgctttggaacagtggac

SEQ ID NO: 95502 - DNA, 21 bp, Artificial Sequence
  primer
ccgatctcaattctttcaggg

SEQ ID NO: 95503 - DNA, 21 bp, Artificial Sequence
  primer
ctccctcttattcttgcccag

SEQ ID NO: 95504 - DNA, 37 bp, Artificial Sequence
  primer
gtaaaacgacggccagtagaatgaagccaggtggtcc

SEQ ID NO: 95505 - DNA, 21 bp, Artificial Sequence
  primer
ccctttcgaatagaggcagag

SEQ ID NO: 95506 - DNA, 38 bp, Artificial Sequence
  primer
gtaaaacgacggccagtctcttgttcaaattccagccc

SEQ ID NO: 95507 - DNA, 38 bp, Artificial Sequence
  primer
gtaaaacgacggccagtaggcaaaggagactggagaac

SEQ ID NO: 95508 - DNA, 20 bp, Artificial Sequence
  primer
aggcttccagaacaattccc

SEQ ID NO: 95509 - DNA, 21 bp, Artificial Sequence
  primer
ccaaggaaaccagtcagcttc

SEQ ID NO: 95510 - DNA, 20 bp, Artificial Sequence
  primer
cacagtgcagactgctcgac

SEQ ID NO: 95511 - DNA, 22 bp, Artificial Sequence
  primer
cacctctgagatgatgggaatc

SEQ ID NO: 95512 - DNA, 22 bp, Artificial Sequence
  primer
tttacaagggttacatctgccc

SEQ ID NO: 95513 - DNA, 21 bp, Artificial Sequence
  primer
gagcaatatccaagggagctg

SEQ ID NO: 95514 - DNA, 20 bp, Artificial Sequence
  primer
ctgccacgaactctacggtc

SEQ ID NO: 95515 - DNA, 38 bp, Artificial Sequence
  primer
gtaaaacgacggccagtaaatgtgtcagccatttcagc

SEQ ID NO: 95516 - DNA, 21 bp, Artificial Sequence
  primer
cttatagagaatgggcgcagg

SEQ ID NO: 95517 - DNA, 21 bp, Artificial Sequence
  primer
gcaacaaaggatgccagagtc

SEQ ID NO: 95518 - DNA, 37 bp, Artificial Sequence
  primer
gtaaaacgacggccagtttcaccatgctaacccatgc

SEQ ID NO: 95519 - DNA, 21 bp, Artificial Sequence
  primer
ctggagctgatgtgagaaagg

SEQ ID NO: 95520 - DNA, 21 bp, Artificial Sequence
  primer
gccagtgtggctctggttatc

SEQ ID NO: 95521 - DNA, 40 bp, Artificial Sequence
  primer
gtaaaacgacggccagtctaatcttgcttgtacccaaccc

SEQ ID NO: 95522 - DNA, 38 bp, Artificial Sequence
  primer
gtaaaacgacggccagtcagagcagctcatagtttggg

SEQ ID NO: 95523 - DNA, 21 bp, Artificial Sequence
  primer
ccaactaactgcctgcctttc

SEQ ID NO: 95524 - DNA, 37 bp, Artificial Sequence
  primer
gtaaaacgacggccagtaccagtgagggtctgcattg

SEQ ID NO: 95525 - DNA, 20 bp, Artificial Sequence
  primer
aagaaagagaagccggaagc

SEQ ID NO: 95526 - DNA, 21 bp, Artificial Sequence
  primer
agttgctgtttgttgtggtgg

SEQ ID NO: 95527 - DNA, 42 bp, Artificial Sequence
  primer
gtaaaacgacggccagtaggaggatcactttcaaactctagg

SEQ ID NO: 95528 - DNA, 20 bp, Artificial Sequence
  primer
accgtctctcaatcccactg

SEQ ID NO: 95529 - DNA, 24 bp, Artificial Sequence
  primer
aaactaccatctcatttcattcca

SEQ ID NO: 95530 - DNA, 21 bp, Artificial Sequence
  primer
ttaaacgacaaagaaaggccc

SEQ ID NO: 95531 - DNA, 25 bp, Artificial Sequence
  primer
gactcctgattcaaaggaaataacc

SEQ ID NO: 95532 - DNA, 22 bp, Artificial Sequence
  primer
gggtcaggtaaagtgaacatcc

SEQ ID NO: 95533 - DNA, 23 bp, Artificial Sequence
  primer
aatgagtttgtgtcccagttgtc

SEQ ID NO: 95534 - DNA, 20 bp, Artificial Sequence
  primer
aggctgacatggtccacaac

SEQ ID NO: 95535 - DNA, 21 bp, Artificial Sequence
  primer
aaacttggtactcgtggcatc

SEQ ID NO: 95536 - DNA, 38 bp, Artificial Sequence
  primer
gtaaaacgacggccagtagactgagatggcagcagttg

SEQ ID NO: 95537 - DNA, 21 bp, Artificial Sequence
  primer
tctaccaccaccacacagtcc

SEQ ID NO: 95538 - DNA, 21 bp, Artificial Sequence
  primer
agctaaactcatcgcctgctg

SEQ ID NO: 95539 - DNA, 42 bp, Artificial Sequence
  primer
gtaaaacgacggccagtccttggcactattaaatttctttgg

SEQ ID NO: 95540 - DNA, 39 bp, Artificial Sequence
  primer
gtaaaacgacggccagtaaggcagagatattcttccagc

SEQ ID NO: 95541 - DNA, 21 bp, Artificial Sequence
  primer
caaggcacagaagttgcattc

SEQ ID NO: 95542 - DNA, 39 bp, Artificial Sequence
  primer
gtaaaacgacggccagtttggcgtttacttgaagaggag

SEQ ID NO: 95543 - DNA, 21 bp, Artificial Sequence
  primer
aaacttggtactcgtggcatc

SEQ ID NO: 95544 - DNA, 38 bp, Artificial Sequence
  primer
gtaaaacgacggccagttctgagtcatttgcttgcacc

SEQ ID NO: 95545 - DNA, 38 bp, Artificial Sequence
  primer
gtaaaacgacggccagttgtcagtctccagaggtaggg

SEQ ID NO: 95546 - DNA, 38 bp, Artificial Sequence
  primer
gtaaaacgacggccagtcaggccatcccatttataacc

SEQ ID NO: 95547 - DNA, 36 bp, Artificial Sequence
  primer
gtaaaacgacggccagttgtgcatgtcccaaacacc

SEQ ID NO: 95548 - DNA, 20 bp, Artificial Sequence
  primer
gcacagcttccttgaattgg

SEQ ID NO: 95549 - DNA, 39 bp, Artificial Sequence
  primer
gtaaaacgacggccagtcagatctgtggtgttatttgcg

SEQ ID NO: 95550 - DNA, 38 bp, Artificial Sequence
  primer
gtaaaacgacggccagtctgtcaccataggcatcttgg

SEQ ID NO: 95551 - DNA, 26 bp, Artificial Sequence
  primer
cagagtacaaaccatcagaggataag

SEQ ID NO: 95552 - DNA, 40 bp, Artificial Sequence
  primer
gtaaaacgacggccagtcacttggtcaagcttggtgtaac

SEQ ID NO: 95553 - DNA, 21 bp, Artificial Sequence
  primer
aaatcaaaggtttcacggcac

SEQ ID NO: 95554 - DNA, 41 bp, Artificial Sequence
  primer
gtaaaacgacggccagtgaaactaaaggaaattccactccc

SEQ ID NO: 95555 - DNA, 23 bp, Artificial Sequence
  primer
gtagatctggctgaagagctcac

SEQ ID NO: 95556 - DNA, 21 bp, Artificial Sequence
  primer
taggcaagcatttcaaagtgg

SEQ ID NO: 95557 - DNA, 21 bp, Artificial Sequence
  primer
ctgatggctcaatacccagtg

SEQ ID NO: 95558 - DNA, 37 bp, Artificial Sequence
  primer
gtaaaacgacggccagtgtgcagaacgaggctcagac

SEQ ID NO: 95559 - DNA, 38 bp, Artificial Sequence
  primer
gtaaaacgacggccagtccaaccaatagatgtcctggg

SEQ ID NO: 95560 - DNA, 18 bp, Artificial Sequence
  primer
cacctgccttggctttcc

SEQ ID NO: 95561 - DNA, 38 bp, Artificial Sequence
  primer
gtaaaacgacggccagtcatgtcagcatgtggtaaacg

SEQ ID NO: 95562 - DNA, 23 bp, Artificial Sequence
  primer
gaagataatgtgtttctgccacg

SEQ ID NO: 95563 - DNA, 38 bp, Artificial Sequence
  primer
gtaaaacgacggccagtcctgtatgtggcctgttgttg

SEQ ID NO: 95564 - DNA, 22 bp, Artificial Sequence
  primer
catgcaacaccattccatttac

SEQ ID NO: 95565 - DNA, 21 bp, Artificial Sequence
  primer
attattcagagagcacgtccg

SEQ ID NO: 95566 - DNA, 21 bp, Artificial Sequence
  primer
attggccatttgctactttcc

SEQ ID NO: 95567 - DNA, 25 bp, Artificial Sequence
  primer
tttgcttgaacttaagctattgtct

SEQ ID NO: 95568 - DNA, 22 bp, Artificial Sequence
  primer
tgagctattattgcaccactgc

SEQ ID NO: 95569 - DNA, 38 bp, Artificial Sequence
  primer
gtaaaacgacggccagttaggcaaatgcatacaccagc

SEQ ID NO: 95570 - DNA, 26 bp, Artificial Sequence
  primer
ggaaatccaagataacagtttctctc

SEQ ID NO: 95571 - DNA, 41 bp, Artificial Sequence
  primer
gtaaaacgacggccagtgaaggcaagagatttctgtgttgt

SEQ ID NO: 95572 - DNA, 41 bp, Artificial Sequence
  primer
gtaaaacgacggccagttttatctgagcagccaagtacaag

SEQ ID NO: 95573 - DNA, 22 bp, Artificial Sequence
  primer
gcacctcactgcaaacactaag

SEQ ID NO: 95574 - DNA, 21 bp, Artificial Sequence
  primer
agctttaaactgaacgcaccc

SEQ ID NO: 95575 - DNA, 39 bp, Artificial Sequence
  primer
gtaaaacgacggccagtggaagtgggacattcttaagcc

SEQ ID NO: 95576 - DNA, 20 bp, Artificial Sequence
  primer
aacggtcattagggattcgg

SEQ ID NO: 95577 - DNA, 38 bp, Artificial Sequence
  primer
gtaaaacgacggccagttctacatcacccagctcctcc

SEQ ID NO: 95578 - DNA, 39 bp, Artificial Sequence
  primer
gtaaaacgacggccagtccagactaccctagcttccaac

SEQ ID NO: 95579 - DNA, 21 bp, Artificial Sequence
  primer
ctggccacacttcattattgg

SEQ ID NO: 95580 - DNA, 44 bp, Artificial Sequence
  primer
gtaaaacgacggccagtacaatgtacataacagacacctagctc

SEQ ID NO: 95581 - DNA, 26 bp, Artificial Sequence
  primer
acgaagtacagctgaagtttgataac

SEQ ID NO: 95582 - DNA, 36 bp, Artificial Sequence
  primer
gtaaaacgacggccagtacagtctgaccaggctccc

SEQ ID NO: 95583 - DNA, 20 bp, Artificial Sequence
  primer
cactgagccgaaggatcttg

SEQ ID NO: 95584 - DNA, 20 bp, Artificial Sequence
  primer
aaatcaacacctcccttgcc

SEQ ID NO: 95585 - DNA, 21 bp, Artificial Sequence
  primer
ccaatccacaaggttcaggtc

SEQ ID NO: 95586 - DNA, 38 bp, Artificial Sequence
  primer
gtaaaacgacggccagtgatcagagattgggacttggc

SEQ ID NO: 95587 - DNA, 38 bp, Artificial Sequence
  primer
gtaaaacgacggccagtgaagggaatcaggttctgtgg

SEQ ID NO: 95588 - DNA, 38 bp, Artificial Sequence
  primer
gtaaaacgacggccagtacccagtccaatcctaccatc

SEQ ID NO: 95589 - DNA, 21 bp, Artificial Sequence
  primer
atcaccagggcatagagttgg

SEQ ID NO: 95590 - DNA, 20 bp, Artificial Sequence
  primer
ccattaccctctctcagccc

SEQ ID NO: 95591 - DNA, 22 bp, Artificial Sequence
  primer
gctgggacataggtcatgaaag

SEQ ID NO: 95592 - DNA, 21 bp, Artificial Sequence
  primer
gcaatgcagggagagagaaag

SEQ ID NO: 95593 - DNA, 38 bp, Artificial Sequence
  primer
gtaaaacgacggccagttctttgaatgcctgaattccc

SEQ ID NO: 95594 - DNA, 38 bp, Artificial Sequence
  primer
gtaaaacgacggccagtgtggcccactgctaagctatt

SEQ ID NO: 95595 - DNA, 39 bp, Artificial Sequence
  primer
gtaaaacgacggccagtgaaagccatcacaataccaacc

SEQ ID NO: 95596 - DNA, 21 bp, Artificial Sequence
  primer
cacaaacacatcaatggcctc

SEQ ID NO: 95597 - DNA, 39 bp, Artificial Sequence
  primer
gtaaaacgacggccagtgaactataaccaaagccctgcc

SEQ ID NO: 95598 - DNA, 39 bp, Artificial Sequence
  primer
gtaaaacgacggccagtagagggctttgtcaatatctgc

SEQ ID NO: 95599 - DNA, 21 bp, Artificial Sequence
  primer
acaagtgggtgacaatccaac

SEQ ID NO: 95600 - DNA, 22 bp, Artificial Sequence
  primer
caccaccatccctagctaattg

SEQ ID NO: 95601 - DNA, 38 bp, Artificial Sequence
  primer
gtaaaacgacggccagtgttggcaacttgcaggcttag

SEQ ID NO: 95602 - DNA, 21 bp, Artificial Sequence
  primer
aaccaaacagccttcagcaac

SEQ ID NO: 95603 - DNA, 22 bp, Artificial Sequence
  primer
ttagagcacagatagcccaacc

SEQ ID NO: 95604 - DNA, 38 bp, Artificial Sequence
  primer
gtaaaacgacggccagtacaaaccagcattcacacacc

SEQ ID NO: 95605 - DNA, 37 bp, Artificial Sequence
  primer
gtaaaacgacggccagtgcagtgctttcctccaagtg

SEQ ID NO: 95606 - DNA, 39 bp, Artificial Sequence
  primer
gtaaaacgacggccagtgattataggtgtgagccgcttg

SEQ ID NO: 95607 - DNA, 21 bp, Artificial Sequence
  primer
gctgaggtccttggaacagac

SEQ ID NO: 95608 - DNA, 37 bp, Artificial Sequence
  primer
gtaaaacgacggccagttttcctggcctgatctctcc

SEQ ID NO: 95609 - DNA, 21 bp, Artificial Sequence
  primer
atcacccaatgccatgacttc

SEQ ID NO: 95610 - DNA, 38 bp, Artificial Sequence
  primer
gtaaaacgacggccagtagggctccagtccagtgtatg

SEQ ID NO: 95611 - DNA, 38 bp, Artificial Sequence
  primer
gtaaaacgacggccagtctctggaagttgaggtgggag

SEQ ID NO: 95612 - DNA, 39 bp, Artificial Sequence
  primer
gtaaaacgacggccagtcagccacttctaagccactgac

SEQ ID NO: 95613 - DNA, 21 bp, Artificial Sequence
  primer
actaccgcctgtctgttctcc

SEQ ID NO: 95614 - DNA, 21 bp, Artificial Sequence
  primer
cacatcacatgccttctccag

SEQ ID NO: 95615 - DNA, 21 bp, Artificial Sequence
  primer
tcatgcatttcaatctttggc

SEQ ID NO: 95616 - DNA, 21 bp, Artificial Sequence
  primer
gcaacatcgctagatcccatc

SEQ ID NO: 95617 - DNA, 21 bp, Artificial Sequence
  primer
gagacaggctgagtgggattc

SEQ ID NO: 95618 - DNA, 37 bp, Artificial Sequence
  primer
gtaaaacgacggccagtataccttgatgtggcctccc

SEQ ID NO: 95619 - DNA, 38 bp, Artificial Sequence
  primer
gtaaaacgacggccagttcaaatgccttccacactcac

SEQ ID NO: 95620 - DNA, 21 bp, Artificial Sequence
  primer
ttgttatgtgccagaggttgc

SEQ ID NO: 95621 - DNA, 38 bp, Artificial Sequence
  primer
gtaaaacgacggccagttagggagccagttctacaggg

SEQ ID NO: 95622 - DNA, 38 bp, Artificial Sequence
  primer
gtaaaacgacggccagtcctctccaaatgtcacacagc

SEQ ID NO: 95623 - DNA, 37 bp, Artificial Sequence
  primer
gtaaaacgacggccagtccacctcctggattcgacta

SEQ ID NO: 95624 - DNA, 21 bp, Artificial Sequence
  primer
atgttagtttgatcggcaggg

SEQ ID NO: 95625 - DNA, 38 bp, Artificial Sequence
  primer
gtaaaacgacggccagtatggtctgtctgctttcccag

SEQ ID NO: 95626 - DNA, 38 bp, Artificial Sequence
  primer
gtaaaacgacggccagtagtcaggcctcgaagacactc

SEQ ID NO: 95627 - DNA, 22 bp, Artificial Sequence
  primer
cagctcctcccacttacctacc

SEQ ID NO: 95628 - DNA, 37 bp, Artificial Sequence
  primer
gtaaaacgacggccagtcaagatgggagaggagggtc

SEQ ID NO: 95629 - DNA, 21 bp, Artificial Sequence
  primer
agaggtggagatagttcccgc

SEQ ID NO: 95630 - DNA, 21 bp, Artificial Sequence
  primer
tggaatgacatcatggtcctg

SEQ ID NO: 95631 - DNA, 20 bp, Artificial Sequence
  primer
gtcccatccctcaaatccac

SEQ ID NO: 95632 - DNA, 21 bp, Artificial Sequence
  primer
tgccctctgccacaaacttag

SEQ ID NO: 95633 - DNA, 21 bp, Artificial Sequence
  primer
aggtggagtcaggagacaagg

SEQ ID NO: 95634 - DNA, 21 bp, Artificial Sequence
  primer
tagggccaccatctgtaggag

SEQ ID NO: 95635 - DNA, 20 bp, Artificial Sequence
  primer
gtgcagtcgctgtccttctc

SEQ ID NO: 95636 - DNA, 21 bp, Artificial Sequence
  primer
aggtcagctctaggccatcag

SEQ ID NO: 95637 - DNA, 20 bp, Artificial Sequence
  primer
aatgggtaagtttggcaggg

SEQ ID NO: 95638 - DNA, 38 bp, Artificial Sequence
  primer
gtaaaacgacggccagtaggacacccacaccatctttc

SEQ ID NO: 95639 - DNA, 21 bp, Artificial Sequence
  primer
atgttagtttgatcggcaggg

SEQ ID NO: 95640 - DNA, 21 bp, Artificial Sequence
  primer
agaggtggagatagttcccgc

SEQ ID NO: 95641 - DNA, 38 bp, Artificial Sequence; identical to SEQ ID NO: 95625
  primer

SEQ ID NO: 95642 - DNA, 38 bp, Artificial Sequence
  primer
gtaaaacgacggccagtttaaagcctgacctttgagcc

SEQ ID NO: 95643 - DNA, 38 bp, Artificial Sequence
  primer
gtaaaacgacggccagtcaccaccttccgtctctatcc

SEQ ID NO: 95644 - DNA, 21 bp, Artificial Sequence
  primer
gcctcaaagcccacttatacc

SEQ ID NO: 95645 - DNA, 22 bp, Artificial Sequence
  primer
aaccattcggagtgctacaaag

SEQ ID NO: 95646 - DNA, 21 bp, Artificial Sequence
  primer
gaagatttggagctgggtgtc

SEQ ID NO: 95647 - DNA, 21 bp, Artificial Sequence
  primer
tatgagggttgctggattcac

SEQ ID NO: 95648 - DNA, 18 bp, Artificial Sequence
  primer
ctgcacccggcctatgac

SEQ ID NO: 95649 - DNA, 38 bp, Artificial Sequence
  primer
gtaaaacgacggccagtatttacaccaggcattctcgg

SEQ ID NO: 95650 - DNA, 18 bp, Artificial Sequence
  primer
tgagccaccatgcctgac

SEQ ID NO: 95651 - DNA, 21 bp, Artificial Sequence
  primer
gggaaagggaaagtaacctgc

SEQ ID NO: 95652 - DNA, 21 bp, Artificial Sequence
  primer
ctctgtctgaactggtgtggg

SEQ ID NO: 95653 - DNA, 38 bp, Artificial Sequence
  primer
gtaaaacgacggccagtaatagagatgctgctgctggc

SEQ ID NO: 95654 - DNA, 37 bp, Artificial Sequence
  primer
gtaaaacgacggccagtaaggcctctttctgctcagg

SEQ ID NO: 95655 - DNA, 36 bp, Artificial Sequence
  primer
gtaaaacgacggccagtatgaacctgtggtcccagc

SEQ ID NO: 95656 - DNA, 22 bp, Artificial Sequence
  primer
tgactgcaagcactcaattctc

SEQ ID NO: 95657 - DNA, 38 bp, Artificial Sequence
  primer
gtaaaacgacggccagtccagaggtaacacggcttagg

SEQ ID NO: 95658 - DNA, 30 bp, Artificial Sequence
  primer
tcatagcatataaacctgaatcaattctac

SEQ ID NO: 95659 - DNA, 39 bp, Artificial Sequence
  primer
gtaaaacgacggccagtaggcaacagtgtaaacatttcg

SEQ ID NO: 95660 - DNA, 44 bp, Artificial Sequence
  primer
gtaaaacgacggccagtcagccaagtaatatttgataaacactg

SEQ ID NO: 95661 - DNA, 42 bp, Artificial Sequence
  primer
gtaaaacgacggccagtgggtagatgatctgtattgctctcc

SEQ ID NO: 95662 - DNA, 42 bp, Artificial Sequence
  primer
gtaaaacgacggccagtcactgaggaatctgtattcaaggag

SEQ ID NO: 95663 - DNA, 41 bp, Artificial Sequence
  primer
gtaaaacgacggccagttttccacagtgatttagaagttgc

SEQ ID NO: 95664 - DNA, 37 bp, Artificial Sequence
  primer
gtaaaacgacggccagtaccctctacctgctgggttc

SEQ ID NO: 95665 - DNA, 21 bp, Artificial Sequence
  primer
acaaatccatgaggcaatcag

SEQ ID NO: 95666 - DNA, 39 bp, Artificial Sequence
  primer
gtaaaacgacggccagtggaatggagtcatcaatgaaca

SEQ ID NO: 95667 - DNA, 19 bp, Artificial Sequence
  primer
cccatttcacgaagaaggc

SEQ ID NO: 95668 - DNA, 38 bp, Artificial Sequence
  primer
gtaaaacgacggccagtccttcttaagcatgggcattt

SEQ ID NO: 95669 - DNA, 39 bp, Artificial Sequence
  primer
gtaaaacgacggccagttgtttgaattgcttggttcatc

SEQ ID NO: 95670 - DNA, 42 bp, Artificial Sequence
  primer
gtaaaacgacggccagtttgaccagtatgtaccatccctaag

SEQ ID NO: 95671 - DNA, 21 bp, Artificial Sequence
  primer
agggataagggcaattctgtg

SEQ ID NO: 95672 - DNA, 27 bp, Artificial Sequence
  primer
cacacctatccttcctatgagtatttc

SEQ ID NO: 95673 - DNA, 21 bp, Artificial Sequence
  primer
attcccagagcactcagttcg

SEQ ID NO: 95674 - DNA, 22 bp, Artificial Sequence
  primer
tttgtcaaagtcacacagcaaa

SEQ ID NO: 95675 - DNA, 38 bp, Artificial Sequence
  primer
gtaaaacgacggccagttaagtgacggacgatgacacc

SEQ ID NO: 95676 - DNA, 20 bp, Artificial Sequence
  primer
ggctcacctgcgacatttag

SEQ ID NO: 95677 - DNA, 38 bp, Artificial Sequence
  primer
gtaaaacgacggccagtgtgaccctaggaaggactggc

SEQ ID NO: 95678 - DNA, 38 bp, Artificial Sequence
  primer
gtaaaacgacggccagtttctgaacggtctgtgacacc

SEQ ID NO: 95679 - DNA, 22 bp, Artificial Sequence
  primer
ccatgtctaccacttctgcacc

SEQ ID NO: 95680 - DNA, 19 bp, Artificial Sequence
  primer
tgtgacagcaagtgcccag

SEQ ID NO: 95681 - DNA, 38 bp, Artificial Sequence
  primer
gtaaaacgacggccagttgaagcggttacttagctggg

SEQ ID NO: 95682 - DNA, 21 bp, Artificial Sequence
  primer
ttcttcctcagaacctgagcc

SEQ ID NO: 95683 - DNA, 19 bp, Artificial Sequence
  primer
cccgccagctacttctctg

SEQ ID NO: 95684 - DNA, 19 bp, Artificial Sequence
  primer
ttggtcagcactgtgcctc

SEQ ID NO: 95685 - DNA, 18 bp, Artificial Sequence
  primer
agccctgtgaggcgacag

SEQ ID NO: 95686 - DNA, 38 bp, Artificial Sequence
  primer
gtaaaacgacggccagttggcttctagaggtgctgagg

SEQ ID NO: 95687 - DNA, 20 bp, Artificial Sequence
  primer
gtgtggtctgtgaagggctc

SEQ ID NO: 95688 - DNA, 21 bp, Artificial Sequence
  primer
agctggatcatcagggtcttc

SEQ ID NO: 95689 - DNA, 19 bp, Artificial Sequence
  primer
cacctgcaacgacagatgg

SEQ ID NO: 95690 - DNA, 38 bp, Artificial Sequence
  primer
gtaaaacgacggccagtaggtcaggagaggtgttcagg

SEQ ID NO: 95691 - DNA, 21 bp, Artificial Sequence
  primer
acctgtgtcccgtcagagaag

SEQ ID NO: 95692 - DNA, 20 bp, Artificial Sequence
  primer
agcagttctggaacgtggtg

SEQ ID NO: 95693 - DNA, 37 bp, Artificial Sequence
  primer
gtaaaacgacggccagtctccttcaggtcgtcgtcac

SEQ ID NO: 95694 - DNA, 37 bp, Artificial Sequence
  primer
gtaaaacgacggccagtgagtctcatcgcagctccag

SEQ ID NO: 95695 - DNA, 38 bp, Artificial Sequence; identical to SEQ ID NO: 95681
  primer

SEQ ID NO: 95696 - DNA, 21 bp, Artificial Sequence
  primer
ttcttcctcagaacctgagcc

SEQ ID NO: 95697 - DNA, 19 bp, Artificial Sequence
  primer
cccgccagctacttctctg

SEQ ID NO: 95698 - DNA, 19 bp, Artificial Sequence
  primer
ttggtcagcactgtgcctc

SEQ ID NO: 95699 - DNA, 18 bp, Artificial Sequence
  primer
agccctgtgaggcgacag

SEQ ID NO: 95700 - DNA, 38 bp, Artificial Sequence; identical to SEQ ID NO: 95686
  primer

SEQ ID NO: 95701 - DNA, 20 bp, Artificial Sequence
  primer
gtgtggtctgtgaagggctc

SEQ ID NO: 95702 - DNA, 21 bp, Artificial Sequence
  primer
agctggatcatcagggtcttc

SEQ ID NO: 95703 - DNA, 19 bp, Artificial Sequence
  primer
cacctgcaacgacagatgg

SEQ ID NO: 95704 - DNA, 38 bp, Artificial Sequence; identical to SEQ ID NO: 95690
  primer

SEQ ID NO: 95705 - DNA, 21 bp, Artificial Sequence
  primer
acctgtgtcccgtcagagaag

SEQ ID NO: 95706 - DNA, 20 bp, Artificial Sequence
  primer
agcagttctggaacgtggtg

SEQ ID NO: 95707 - DNA, 37 bp, Artificial Sequence; identical to SEQ ID NO: 95693
  primer

SEQ ID NO: 95708 - DNA, 37 bp, Artificial Sequence; identical to SEQ ID NO: 95694
  primer

SEQ ID NO: 95709 - DNA, 20 bp, Artificial Sequence
  primer
ggctcacctgcgacatttag

SEQ ID NO: 95710 - DNA, 38 bp, Artificial Sequence; identical to SEQ ID NO: 95677
  primer

SEQ ID NO: 95711 - DNA, 38 bp, Artificial Sequence; identical to SEQ ID NO: 95678
  primer

SEQ ID NO: 95712 - DNA, 22 bp, Artificial Sequence
  primer
ccatgtctaccacttctgcacc

SEQ ID NO: 95713 - DNA, 35 bp, Artificial Sequence
  primer
gtaaaacgacggccagtccgcctgtgacagcaagt

SEQ ID NO: 95714 - DNA, 38 bp, Artificial Sequence; identical to SEQ ID NO: 95681
  primer

SEQ ID NO: 95715 - DNA, 21 bp, Artificial Sequence
  primer
ttcttcctcagaacctgagcc

SEQ ID NO: 95716 - DNA, 19 bp, Artificial Sequence
  primer
cccgccagctacttctctg

SEQ ID NO: 95717 - DNA, 19 bp, Artificial Sequence
  primer
ttggtcagcactgtgcctc

SEQ ID NO: 95718 - DNA, 18 bp, Artificial Sequence
  primer
agccctgtgaggcgacag

SEQ ID NO: 95719 - DNA, 38 bp, Artificial Sequence; identical to SEQ ID NO: 95686
  primer

SEQ ID NO: 95720 - DNA, 20 bp, Artificial Sequence
  primer
gtgtggtctgtgaagggctc

SEQ ID NO: 95721 - DNA, 21 bp, Artificial Sequence
  primer
agctggatcatcagggtcttc

SEQ ID NO: 95722 - DNA, 19 bp, Artificial Sequence
  primer
cacctgcaacgacagatgg

SEQ ID NO: 95723 - DNA, 38 bp, Artificial Sequence; identical to SEQ ID NO: 95690
  primer

SEQ ID NO: 95724 - DNA, 21 bp, Artificial Sequence
  primer
acctgtgtcccgtcagagaag

SEQ ID NO: 95725 - DNA, 20 bp, Artificial Sequence
  primer
agcagttctggaacgtggtg

SEQ ID NO: 95726 - DNA, 37 bp, Artificial Sequence; identical to SEQ ID NO: 95693
  primer

SEQ ID NO: 95727 - DNA, 37 bp, Artificial Sequence; identical to SEQ ID NO: 95694
  primer

SEQ ID NO: 95728 - DNA, 20 bp, Artificial Sequence
  primer
ggctcacctgcgacatttag

SEQ ID NO: 95729 - DNA, 38 bp, Artificial Sequence; identical to SEQ ID NO: 95677
  primer

SEQ ID NO: 95730 - DNA, 38 bp, Artificial Sequence; identical to SEQ ID NO: 95678
  primer

SEQ ID NO: 95731 - DNA, 22 bp, Artificial Sequence
  primer
ccatgtctaccacttctgcacc

SEQ ID NO: 95732 - DNA, 19 bp, Artificial Sequence
  primer
tgtgacagcaagtgcccag

SEQ ID NO: 95733 - DNA, 38 bp, Artificial Sequence; identical to SEQ ID NO: 95681
  primer

SEQ ID NO: 95734 - DNA, 21 bp, Artificial Sequence
  primer
ttcttcctcagaacctgagcc

SEQ ID NO: 95735 - DNA, 19 bp, Artificial Sequence
  primer
cccgccagctacttctctg

SEQ ID NO: 95736 - DNA, 19 bp, Artificial Sequence
  primer
ttggtcagcactgtgcctc

SEQ ID NO: 95737 - DNA, 18 bp, Artificial Sequence
  primer
agccctgtgaggcgacag

SEQ ID NO: 95738 - DNA, 38 bp, Artificial Sequence; identical to SEQ ID NO: 95686
  primer

SEQ ID NO: 95739 - DNA, 20 bp, Artificial Sequence
  primer
gtgtggtctgtgaagggctc

SEQ ID NO: 95740 - DNA, 21 bp, Artificial Sequence
  primer
agctggatcatcagggtcttc

SEQ ID NO: 95741 - DNA, 19 bp, Artificial Sequence
  primer
cacctgcaacgacagatgg

SEQ ID NO: 95742 - DNA, 38 bp, Artificial Sequence; identical to SEQ ID NO: 95690
  primer

SEQ ID NO: 95743 - DNA, 21 bp, Artificial Sequence
  primer
acctgtgtcccgtcagagaag

SEQ ID NO: 95744 - DNA, 20 bp, Artificial Sequence
  primer
agcagttctggaacgtggtg

SEQ ID NO: 95745 - DNA, 37 bp, Artificial Sequence; identical to SEQ ID NO: 95693
  primer

SEQ ID NO: 95746 - DNA, 37 bp, Artificial Sequence; identical to SEQ ID NO: 95694
  primer

SEQ ID NO: 95747 - DNA, 20 bp, Artificial Sequence
  primer
ggctcacctgcgacatttag

SEQ ID NO: 95748 - DNA, 38 bp, Artificial Sequence; identical to SEQ ID NO: 95677
  primer

SEQ ID NO: 95749 - DNA, 38 bp, Artificial Sequence; identical to SEQ ID NO: 95678
  primer

SEQ ID NO: 95750 - DNA, 22 bp, Artificial Sequence
  primer
ccatgtctaccacttctgcacc

SEQ ID NO: 95751 - DNA, 19 bp, Artificial Sequence
  primer
tgtgacagcaagtgcccag

SEQ ID NO: 95752 - DNA, 38 bp, Artificial Sequence; identical to SEQ ID NO: 95681
  primer

SEQ ID NO: 95753 - DNA, 21 bp, Artificial Sequence
  primer
agaacctgagcctgattctgc

SEQ ID NO: 95754 - DNA, 19 bp, Artificial Sequence
  primer
cccgccagctacttctctg

SEQ ID NO: 95755 - DNA, 18 bp, Artificial Sequence
  primer
gtgcctcgctgaggaatg

SEQ ID NO: 95756 - DNA, 18 bp, Artificial Sequence
  primer
agccctgtgaggcgacag

SEQ ID NO: 95757 - DNA, 38 bp, Artificial Sequence; identical to SEQ ID NO: 95686
  primer

SEQ ID NO: 95758 - DNA, 20 bp, Artificial Sequence
  primer
gtgtggtctgtgaagggctc

SEQ ID NO: 95759 - DNA, 21 bp, Artificial Sequence
  primer
agctggatcatcagggtcttc

SEQ ID NO: 95760 - DNA, 19 bp, Artificial Sequence
  primer
cacctgcaacgacagatgg

SEQ ID NO: 95761 - DNA, 38 bp, Artificial Sequence
  primer
gtaaaacgacggccagtcaggagaggtgttcaggaagg

SEQ ID NO: 95762 - DNA, 21 bp, Artificial Sequence
  primer
acctgtgtcccgtcagagaag

SEQ ID NO: 95763 - DNA, 20 bp, Artificial Sequence
  primer
agcagttctggaacgtggtg

SEQ ID NO: 95764 - DNA, 37 bp, Artificial Sequence; identical to SEQ ID NO: 95693
  primer

SEQ ID NO: 95765 - DNA, 37 bp, Artificial Sequence; identical to SEQ ID NO: 95694
  primer

SEQ ID NO: 95766 - DNA, 20 bp, Artificial Sequence
  primer
ggctcacctgcgacatttag

SEQ ID NO: 95767 - DNA, 38 bp, Artificial Sequence; identical to SEQ ID NO: 95677
  primer

SEQ ID NO: 95768 - DNA, 38 bp, Artificial Sequence; identical to SEQ ID NO: 95678
  primer

SEQ ID NO: 95769 - DNA, 22 bp, Artificial Sequence
  primer
ccatgtctaccacttctgcacc

SEQ ID NO: 95770 - DNA, 35 bp, Artificial Sequence; identical to SEQ ID NO: 95713
  primer

SEQ ID NO: 95771 - DNA, 38 bp, Artificial Sequence; identical to SEQ ID NO: 95681
  primer

SEQ ID NO: 95772 - DNA, 21 bp, Artificial Sequence
  primer
agaacctgagcctgattctgc

SEQ ID NO: 95773 - DNA, 19 bp, Artificial Sequence
  primer
cccgccagctacttctctg

SEQ ID NO: 95774 - DNA, 18 bp, Artificial Sequence
  primer
gtgcctcgctgaggaatg

SEQ ID NO: 95775 - DNA, 18 bp, Artificial Sequence
  primer
agccctgtgaggcgacag

SEQ ID NO: 95776 - DNA, 38 bp, Artificial Sequence; identical to SEQ ID NO: 95686
  primer

SEQ ID NO: 95777 - DNA, 20 bp, Artificial Sequence
  primer
gtgtggtctgtgaagggctc

SEQ ID NO: 95778 - DNA, 21 bp, Artificial Sequence
  primer
agctggatcatcagggtcttc

SEQ ID NO: 95779 - DNA, 19 bp, Artificial Sequence
  primer
cacctgcaacgacagatgg

SEQ ID NO: 95780 - DNA, 38 bp, Artificial Sequence; identical to SEQ ID NO: 95761
  primer

SEQ ID NO: 95781 - DNA, 21 bp, Artificial Sequence
  primer
acctgtgtcccgtcagagaag

SEQ ID NO: 95782 - DNA, 20 bp, Artificial Sequence
  primer
agcagttctggaacgtggtg

SEQ ID NO: 95783 - DNA, 37 bp, Artificial Sequence; identical to SEQ ID NO: 95693
  primer

SEQ ID NO: 95784 - DNA, 37 bp, Artificial Sequence; identical to SEQ ID NO: 95694
  primer

SEQ ID NO: 95785 - DNA, 20 bp, Artificial Sequence
  primer
ggctcacctgcgacatttag

SEQ ID NO: 95786 - DNA, 38 bp, Artificial Sequence; identical to SEQ ID NO: 95677
  primer

SEQ ID NO: 95787 - DNA, 38 bp, Artificial Sequence; identical to SEQ ID NO: 95678
  primer

SEQ ID NO: 95788 - DNA, 22 bp, Artificial Sequence
  primer
ccatgtctaccacttctgcacc

SEQ ID NO: 95789 - DNA, 19 bp, Artificial Sequence
  primer
tgtgacagcaagtgcccag

SEQ ID NO: 95790 - DNA, 38 bp, Artificial Sequence; identical to SEQ ID NO: 95681
  primer

SEQ ID NO: 95791 - DNA, 21 bp, Artificial Sequence
  primer
agaacctgagcctgattctgc

SEQ ID NO: 95792 - DNA, 19 bp, Artificial Sequence
  primer
cccgccagctacttctctg

SEQ ID NO: 95793 - DNA, 18 bp, Artificial Sequence
  primer
gtgcctcgctgaggaatg

SEQ ID NO: 95794 - DNA, 18 bp, Artificial Sequence
  primer
agccctgtgaggcgacag

SEQ ID NO: 95795 - DNA, 38 bp, Artificial Sequence; identical to SEQ ID NO: 95686
  primer

SEQ ID NO: 95796 - DNA, 20 bp, Artificial Sequence
  primer
gtgtggtctgtgaagggctc

SEQ ID NO: 95797 - DNA, 21 bp, Artificial Sequence
  primer
agctggatcatcagggtcttc

SEQ ID NO: 95798 - DNA, 19 bp, Artificial Sequence
  primer
cacctgcaacgacagatgg

SEQ ID NO: 95799 - DNA, 38 bp, Artificial Sequence; identical to SEQ ID NO: 95761
  primer

SEQ ID NO: 95800 - DNA, 21 bp, Artificial Sequence
  primer
acctgtgtcccgtcagagaag

SEQ ID NO: 95801 - DNA, 20 bp, Artificial Sequence
  primer
agcagttctggaacgtggtg

SEQ ID NO: 95802 - DNA, 37 bp, Artificial Sequence; identical to SEQ ID NO: 95693
  primer

SEQ ID NO: 95803 - DNA, 37 bp, Artificial Sequence; identical to SEQ ID NO: 95694
  primer

SEQ ID NO: 95804 - DNA, 20 bp, Artificial Sequence
  primer
gctgaagcaagaggaggagg

SEQ ID NO: 95805 - DNA, 38 bp, Artificial Sequence
  primer
gtaaaacgacggccagtgctcacatcctcgtattccac

SEQ ID NO: 95806 - DNA, 21 bp, Artificial Sequence
  primer
ctgctactgctgctggatgtg

SEQ ID NO: 95807 - DNA, 38 bp, Artificial Sequence
  primer
gtaaaacgacggccagtcttaggctcggtcttgtcctc

SEQ ID NO: 95808 - DNA, 18 bp, Artificial Sequence
  primer
agaggccctgtgggacac

SEQ ID NO: 95809 - DNA, 38 bp, Artificial Sequence
  primer
gtaaaacgacggccagtacctgagtcgttctgaggacc

SEQ ID NO: 95810 - DNA, 38 bp, Artificial Sequence
  primer
gtaaaacgacggccagtcaccacttgagggagaaggtg

SEQ ID NO: 95811 - DNA, 37 bp, Artificial Sequence
  primer
gtaaaacgacggccagtttatcttcaggcagcatggg

SEQ ID NO: 95812 - DNA, 40 bp, Artificial Sequence
  primer
gtaaaacgacggccagtccatcttgtatgcaatgtgcttc

SEQ ID NO: 95813 - DNA, 23 bp, Artificial Sequence
  primer
tcattgtgaataggaatgcaagc

SEQ ID NO: 95814 - DNA, 29 bp, Artificial Sequence
  primer
cacatatacagacccacttacatgtactc

SEQ ID NO: 95815 - DNA, 22 bp, Artificial Sequence
  primer
ttggcaaataccctttacgaag

SEQ ID NO: 95816 - DNA, 22 bp, Artificial Sequence
  primer
cgctacggtttccagtctattc

SEQ ID NO: 95817 - DNA, 43 bp, Artificial Sequence
  primer
gtaaaacgacggccagtcaataatcaacccaatatggtataaa

SEQ ID NO: 95818 - DNA, 38 bp, Artificial Sequence
  primer
gtaaaacgacggccagttcgccaaggatacagctaatg

SEQ ID NO: 95819 - DNA, 37 bp, Artificial Sequence
  primer
gtaaaacgacggccagtccctccagagaaccatgttg

SEQ ID NO: 95820 - DNA, 46 bp, Artificial Sequence
  primer
gtaaaacgacggccagtggtttacctcagatcactagagaatagac

SEQ ID NO: 95821 - DNA, 22 bp, Artificial Sequence
  primer
cccagatgtgcaaattatgtgt

SEQ ID NO: 95822 - DNA, 41 bp, Artificial Sequence
  primer
gtaaaacgacggccagtttgttagccacaagatgctttaac

SEQ ID NO: 95823 - DNA, 21 bp, Artificial Sequence
  primer
tgcagctgtgttagtggtctg

SEQ ID NO: 95824 - DNA, 40 bp, Artificial Sequence
  primer
gtaaaacgacggccagtttgccagttacctgagattcttc

SEQ ID NO: 95825 - DNA, 21 bp, Artificial Sequence
  primer
cttcctcagtgactggtggtg

SEQ ID NO: 95826 - DNA, 21 bp, Artificial Sequence
  primer
gtggaccaccagaatgagatg

SEQ ID NO: 95827 - DNA, 21 bp, Artificial Sequence
  primer
gtgaatatccaggtccttggg

SEQ ID NO: 95828 - DNA, 38 bp, Artificial Sequence
  primer
gtaaaacgacggccagttggattgctgccttaaattgc

SEQ ID NO: 95829 - DNA, 24 bp, Artificial Sequence
  primer
ttggcaatgtcactgaactataca

SEQ ID NO: 95830 - DNA, 19 bp, Artificial Sequence
  primer
gagttcgaggtacgcgacg

SEQ ID NO: 95831 - DNA, 20 bp, Artificial Sequence
  primer
gagcctaggaggttcacgct

SEQ ID NO: 95832 - DNA, 38 bp, Artificial Sequence
  primer
gtaaaacgacggccagtagcaagctttcctttctgtgc

SEQ ID NO: 95833 - DNA, 43 bp, Artificial Sequence
  primer
gtaaaacgacggccagttgatacccaccaaatgttaaatagtg

SEQ ID NO: 95834 - DNA, 23 bp, Artificial Sequence
  primer
tttccagtgatgcctcaacttag

SEQ ID NO: 95835 - DNA, 40 bp, Artificial Sequence
  primer
gtaaaacgacggccagtccatagcaactcaacaggatcag

SEQ ID NO: 95836 - DNA, 38 bp, Artificial Sequence
  primer
gtaaaacgacggccagtgaagtgtgggatattctggca

SEQ ID NO: 95837 - DNA, 21 bp, Artificial Sequence
  primer
ggattacaaacatgccagtgc

SEQ ID NO: 95838 - DNA, 21 bp, Artificial Sequence
  primer
agtgaaggctgaaagacaggg

SEQ ID NO: 95839 - DNA, 38 bp, Artificial Sequence
  primer
gtaaaacgacggccagtagtgcttcccttgctttcaac

SEQ ID NO: 95840 - DNA, 37 bp, Artificial Sequence
  primer
gtaaaacgacggccagtaacacacaccggaagctcag

SEQ ID NO: 95841 - DNA, 41 bp, Artificial Sequence
  primer
gtaaaacgacggccagtcaggattgcacagtcaaatgtaag

SEQ ID NO: 95842 - DNA, 21 bp, Artificial Sequence
  primer
gctatcagtcctgcacaatgc

SEQ ID NO: 95843 - DNA, 37 bp, Artificial Sequence
  primer
gtaaaacgacggccagtccatagaagggaaacgagcc

SEQ ID NO: 95844 - DNA, 38 bp, Artificial Sequence
  primer
gtaaaacgacggccagtagaacaggtcagaggtcagca

SEQ ID NO: 95845 - DNA, 21 bp, Artificial Sequence
  primer
ctctaggtggttccagacggt

SEQ ID NO: 95846 - DNA, 21 bp, Artificial Sequence
  primer
ctgtaaatgggcaccaggaag

SEQ ID NO: 95847 - DNA, 38 bp, Artificial Sequence
  primer
gtaaaacgacggccagttccgtgaggtagtctgtcgtc

SEQ ID NO: 95848 - DNA, 21 bp, Artificial Sequence
  primer
aatcctaggtgtgaacagcgg

SEQ ID NO: 95849 - DNA, 35 bp, Artificial Sequence
  primer
gtaaaacgacggccagtctgaccaggcattgggtg

SEQ ID NO: 95850 - DNA, 21 bp, Artificial Sequence
  primer
gtcaatgcaccaaatgaccag

SEQ ID NO: 95851 - DNA, 38 bp, Artificial Sequence
  primer
gtaaaacgacggccagttccaggataaattgcatgacg

SEQ ID NO: 95852 - DNA, 21 bp, Artificial Sequence
  primer
gagtcccagtggagaggagtc

SEQ ID NO: 95853 - DNA, 21 bp, Artificial Sequence
  primer
cacatcgaagcacttctggag

SEQ ID NO: 95854 - DNA, 38 bp, Artificial Sequence
  primer
gtaaaacgacggccagttactccttggagaagccttgg

SEQ ID NO: 95855 - DNA, 21 bp, Artificial Sequence
  primer
gcgcaagtagaggaagtcagg

SEQ ID NO: 95856 - DNA, 21 bp, Artificial Sequence
  primer
aaggcgtagaagagggtctgg

SEQ ID NO: 95857 - DNA, 21 bp, Artificial Sequence
  primer
ccaaatacgcacaactggttt

SEQ ID NO: 95858 - DNA, 22 bp, Artificial Sequence
  primer
tctatacagctgtgccagaagc

SEQ ID NO: 95859 - DNA, 39 bp, Artificial Sequence
  primer
gtaaaacgacggccagtttccatctaatgaccttcctgc

SEQ ID NO: 95860 - DNA, 38 bp, Artificial Sequence
  primer
gtaaaacgacggccagtctgcttggatgccttctattg

SEQ ID NO: 95861 - DNA, 23 bp, Artificial Sequence
  primer
caacagttatcttctgaggcagg

SEQ ID NO: 95862 - DNA, 40 bp, Artificial Sequence
  primer
gtaaaacgacggccagtttcagtactctttccctcccatc

SEQ ID NO: 95863 - DNA, 21 bp, Artificial Sequence
  primer
attccgaacttccaattctgc

SEQ ID NO: 95864 - DNA, 22 bp, Artificial Sequence
  primer
cagagcgagactctgtctcaaa

SEQ ID NO: 95865 - DNA, 21 bp, Artificial Sequence
  primer
cgacaacaaagagcattctgg

SEQ ID NO: 95866 - DNA, 21 bp, Artificial Sequence
  primer
atttctacagggttggcatgg

SEQ ID NO: 95867 - DNA, 42 bp, Artificial Sequence
  primer
gtaaaacgacggccagtttgatgagtcatttggttctctaaa

SEQ ID NO: 95868 - DNA, 22 bp, Artificial Sequence
  primer
ttccttgggatacaaattgtcc

SEQ ID NO: 95869 - DNA, 21 bp, Artificial Sequence
  primer
tctccaaagcataactcaggc

SEQ ID NO: 95870 - DNA, 38 bp, Artificial Sequence
  primer
gtaaaacgacggccagttggaccacagagccatagttg

SEQ ID NO: 95871 - DNA, 38 bp, Artificial Sequence
  primer
gtaaaacgacggccagtactcctccttccagattcagc

SEQ ID NO: 95872 - DNA, 40 bp, Artificial Sequence
  primer
gtaaaacgacggccagtttgctgacagtgaatggtatgag

SEQ ID NO: 95873 - DNA, 21 bp, Artificial Sequence
  primer
aagaatggtgcattagccgtc

SEQ ID NO: 95874 - DNA, 23 bp, Artificial Sequence
  primer
caaatggttgcatattatcaggc

SEQ ID NO: 95875 - DNA, 38 bp, Artificial Sequence
  primer
gtaaaacgacggccagtatggcacagtgacaaacttcc

SEQ ID NO: 95876 - DNA, 25 bp, Artificial Sequence
  primer
tgtgagagtgatgtgtcaagtgtta

SEQ ID NO: 95877 - DNA, 23 bp, Artificial Sequence
  primer
aaactcaaactgcttgccaatta

SEQ ID NO: 95878 - DNA, 21 bp, Artificial Sequence
  primer
ggaaacaaaggcagacaacag

SEQ ID NO: 95879 - DNA, 38 bp, Artificial Sequence
  primer
gtaaaacgacggccagtttcacccagggtactccaaac

SEQ ID NO: 95880 - DNA, 21 bp, Artificial Sequence
  primer
ggtgagttatctcaggcaccc

SEQ ID NO: 95881 - DNA, 40 bp, Artificial Sequence
  primer
gtaaaacgacggccagttgagcactgctgatcactgttag

SEQ ID NO: 95882 - DNA, 21 bp, Artificial Sequence
  primer
cagggcatttgtcattattgc

SEQ ID NO: 95883 - DNA, 39 bp, Artificial Sequence
  primer
gtaaaacgacggccagtcagaggttgctctaaggtggtg

SEQ ID NO: 95884 - DNA, 21 bp, Artificial Sequence
  primer
atcaaggcaacaattgagcag

SEQ ID NO: 95885 - DNA, 22 bp, Artificial Sequence
  primer
caacagcacaatcaatcacatc

SEQ ID NO: 95886 - DNA, 41 bp, Artificial Sequence
  primer
gtaaaacgacggccagtcccattacaagggtttccatttag

SEQ ID NO: 95887 - DNA, 24 bp, Artificial Sequence
  primer
caacttaccctgtatgaaatgcac

SEQ ID NO: 95888 - DNA, 21 bp, Artificial Sequence
  primer
cacatcggttctgtaatgctg

SEQ ID NO: 95889 - DNA, 37 bp, Artificial Sequence
  primer
gtaaaacgacggccagtggaggtggcgcatagataga

SEQ ID NO: 95890 - DNA, 39 bp, Artificial Sequence
  primer
gtaaaacgacggccagttgttgtcctgtcccatactagg

SEQ ID NO: 95891 - DNA, 21 bp, Artificial Sequence
  primer
cagaataagcaccagaagcca

SEQ ID NO: 95892 - DNA, 39 bp, Artificial Sequence
  primer
gtaaaacgacggccagtcatgatacacctgtcttggcct

SEQ ID NO: 95893 - DNA, 21 bp, Artificial Sequence
  primer
tgtacccacaggagaccaaag

SEQ ID NO: 95894 - DNA, 38 bp, Artificial Sequence
  primer
gtaaaacgacggccagtatttgcccttccctgactagc

SEQ ID NO: 95895 - DNA, 40 bp, Artificial Sequence
  primer
gtaaaacgacggccagttgaactttcaagcttcaacaaag

SEQ ID NO: 95896 - DNA, 23 bp, Artificial Sequence
  primer
tcccaatgagaatttaccttgta

SEQ ID NO: 95897 - DNA, 42 bp, Artificial Sequence
  primer
gtaaaacgacggccagttccctcctgatagattcatatttcc

SEQ ID NO: 95898 - DNA, 38 bp, Artificial Sequence
  primer
gtaaaacgacggccagtcaatcctgactttggtctcct

SEQ ID NO: 95899 - DNA, 28 bp, Artificial Sequence
  primer
tcaaatataaagttatacccacaattcc

SEQ ID NO: 95900 - DNA, 21 bp, Artificial Sequence
  primer
ccacctggaattcataccaac

SEQ ID NO: 95901 - DNA, 43 bp, Artificial Sequence
  primer
gtaaaacgacggccagttaggctcaaagtctaaacaaactgat

SEQ ID NO: 95902 - DNA, 43 bp, Artificial Sequence
  primer
gtaaaacgacggccagtcaagcaatggaaactaaacatgtaac

SEQ ID NO: 95903 - DNA, 22 bp, Artificial Sequence
  primer
tcaacaattctcccacctatgc

SEQ ID NO: 95904 - DNA, 43 bp, Artificial Sequence
  primer
gtaaaacgacggccagttttgttaaacagaggtgggattatag

SEQ ID NO: 95905 - DNA, 23 bp, Artificial Sequence
  primer
aaatcacagcaaatgcatagagc

SEQ ID NO: 95906 - DNA, 42 bp, Artificial Sequence
  primer
gtaaaacgacggccagtagacaacacagattatttccattcc

SEQ ID NO: 95907 - DNA, 38 bp, Artificial Sequence
  primer
gtaaaacgacggccagtaccatatgccacctctcttgc

SEQ ID NO: 95908 - DNA, 42 bp, Artificial Sequence
  primer
gtaaaacgacggccagttcatttaaataaaccatggcaacac

SEQ ID NO: 95909 - DNA, 39 bp, Artificial Sequence
  primer
gtaaaacgacggccagttgatgctttctccaggtctttc

SEQ ID NO: 95910 - DNA, 21 bp, Artificial Sequence
  primer
cctagatgaaagccaatccct

SEQ ID NO: 95911 - DNA, 24 bp, Artificial Sequence
  primer
gaaatgcaatctgagttcgtacag

SEQ ID NO: 95912 - DNA, 20 bp, Artificial Sequence
  primer
tttcatagccacacacaggc

SEQ ID NO: 95913 - DNA, 38 bp, Artificial Sequence
  primer
gtaaaacgacggccagtacaagaggaaggatttgctgg

SEQ ID NO: 95914 - DNA, 39 bp, Artificial Sequence
  primer
gtaaaacgacggccagtcaacaatgacaacatttgggag

SEQ ID NO: 95915 - DNA, 38 bp, Artificial Sequence
  primer
gtaaaacgacggccagtgtcccaaactgccaattacac

SEQ ID NO: 95916 - DNA, 21 bp, Artificial Sequence
  primer
ttgaaatctggactctggcac

SEQ ID NO: 95917 - DNA, 27 bp, Artificial Sequence
  primer
tccaaatcaaatatagtatcatcaccg

SEQ ID NO: 95918 - DNA, 24 bp, Artificial Sequence
  primer
gaagtctacccatgtatttaagcc

SEQ ID NO: 95919 - DNA, 36 bp, Artificial Sequence
  primer
gtaaaacgacggccagtaaggacatgtcacccacgg

SEQ ID NO: 95920 - DNA, 38 bp, Artificial Sequence
  primer
gtaaaacgacggccagtagaagtctgaatgcctctggg

SEQ ID NO: 95921 - DNA, 38 bp, Artificial Sequence
  primer
gtaaaacgacggccagtcctgaatccctgtcctgctac

SEQ ID NO: 95922 - DNA, 36 bp, Artificial Sequence
  primer
gtaaaacgacggccagtagagcgagaggaggcgaag

SEQ ID NO: 95923 - DNA, 38 bp, Artificial Sequence
  primer
gtaaaacgacggccagtcccaaaccaatgtataggtgc

SEQ ID NO: 95924 - DNA, 21 bp, Artificial Sequence
  primer
acagtgtccagcaagcaagtg

SEQ ID NO: 95925 - DNA, 21 bp, Artificial Sequence
  primer
aacccagcaaacaaacgaatc

SEQ ID NO: 95926 - DNA, 21 bp, Artificial Sequence
  primer
atgtgggcaaatcagtctgtg

SEQ ID NO: 95927 - DNA, 38 bp, Artificial Sequence
  primer
gtaaaacgacggccagtacctgacaactcccattctgg

SEQ ID NO: 95928 - DNA, 21 bp, Artificial Sequence
  primer
ttgcttcctaacggatcttcc

SEQ ID NO: 95929 - DNA, 38 bp, Artificial Sequence
  primer
gtaaaacgacggccagtgacttgataagcaacgccctc

SEQ ID NO: 95930 - DNA, 21 bp, Artificial Sequence
  primer
tcccttaagtaatggcctccc

SEQ ID NO: 95931 - DNA, 37 bp, Artificial Sequence
  primer
gtaaaacgacggccagtgatggagagacagcgtgagg

SEQ ID NO: 95932 - DNA, 18 bp, Artificial Sequence
  primer
cccaggaggtggaggttt

SEQ ID NO: 95933 - DNA, 38 bp, Artificial Sequence
  primer
gtaaaacgacggccagtaggagtcccaagaggtcttcc

SEQ ID NO: 95934 - DNA, 21 bp, Artificial Sequence
  primer
cagcccaagatttcaaagacg

SEQ ID NO: 95935 - DNA, 21 bp, Artificial Sequence
  primer
cggaccacacattacacaagg

SEQ ID NO: 95936 - DNA, 20 bp, Artificial Sequence
  primer
ccaaggtgagcgagaaacag

SEQ ID NO: 95937 - DNA, 41 bp, Artificial Sequence
  primer
gtaaaacgacggccagtccaaacttccaagactcaagaatg

SEQ ID NO: 95938 - DNA, 38 bp, Artificial Sequence
  primer
gtaaaacgacggccagtgagcacaggatcaggcagaag

SEQ ID NO: 95939 - DNA, 21 bp, Artificial Sequence
  primer
catgatgatctgagagctggc

SEQ ID NO: 95940 - DNA, 19 bp, Artificial Sequence
  primer
ctaaggctccagcaaacgc

SEQ ID NO: 95941 - DNA, 40 bp, Artificial Sequence
  primer
gtaaaacgacggccagttgaatttggaattctgtaggtgc

SEQ ID NO: 95942 - DNA, 21 bp, Artificial Sequence
  primer
cacctgatgcgtttaatgtgg

SEQ ID NO: 95943 - DNA, 20 bp, Artificial Sequence
  primer
aaatgaaaggtgggcttgag

SEQ ID NO: 95944 - DNA, 23 bp, Artificial Sequence
  primer
cacaccattctcaacaactttcc

SEQ ID NO: 95945 - DNA, 21 bp, Artificial Sequence
  primer
tcctcaaatcatgccaatgac

SEQ ID NO: 95946 - DNA, 37 bp, Artificial Sequence
  primer
gtaaaacgacggccagtactctgagtgagcgtctgcg

SEQ ID NO: 95947 - DNA, 19 bp, Artificial Sequence
  primer
catgtgagcgcctgaagtc

SEQ ID NO: 95948 - DNA, 21 bp, Artificial Sequence
  primer
tgtaggagaagggagggtcag

SEQ ID NO: 95949 - DNA, 38 bp, Artificial Sequence
  primer
gtaaaacgacggccagttggacctgtgaccttcatctg

SEQ ID NO: 95950 - DNA, 21 bp, Artificial Sequence
  primer
tcaagcgcatttgtcttaacc

SEQ ID NO: 95951 - DNA, 38 bp, Artificial Sequence
  primer
gtaaaacgacggccagtaagcaaagcaggtactcctcg

SEQ ID NO: 95952 - DNA, 37 bp, Artificial Sequence
  primer
gtaaaacgacggccagtctctcccgatgctctgtgac

SEQ ID NO: 95953 - DNA, 21 bp, Artificial Sequence
  primer
aaccagggagggacagtaagc

SEQ ID NO: 95954 - DNA, 21 bp, Artificial Sequence
  primer
agcatctgcttcttgctgttg

SEQ ID NO: 95955 - DNA, 20 bp, Artificial Sequence
  primer
acgtggttgaagttggttgg

SEQ ID NO: 95956 - DNA, 38 bp, Artificial Sequence
  primer
gtaaaacgacggccagtctttgggacagtctcagccag

SEQ ID NO: 95957 - DNA, 21 bp, Artificial Sequence
  primer
gctccgatccacctacagaac

SEQ ID NO: 95958 - DNA, 38 bp, Artificial Sequence
  primer
gtaaaacgacggccagtgtgacagccctgtccctagtc

SEQ ID NO: 95959 - DNA, 20 bp, Artificial Sequence
  primer
tccttggacaacactggagg

SEQ ID NO: 95960 - DNA, 38 bp, Artificial Sequence
  primer
gtaaaacgacggccagtaattggagtgagggtgaggtg

SEQ ID NO: 95961 - DNA, 21 bp, Artificial Sequence
  primer
actgacctcagccctcttcag

SEQ ID NO: 95962 - DNA, 21 bp, Artificial Sequence
  primer
acaaatcagtggctgctgagg

SEQ ID NO: 95963 - DNA, 21 bp, Artificial Sequence
  primer
gtgggaagtgggagtctcttg

SEQ ID NO: 95964 - DNA, 21 bp, Artificial Sequence
  primer
atgattccaaggaagcacacg

SEQ ID NO: 95965 - DNA, 38 bp, Artificial Sequence
  primer
gtaaaacgacggccagtgaagccatgaggacagctttg

SEQ ID NO: 95966 - DNA, 21 bp, Artificial Sequence
  primer
gtcaagtgtccaggaacccag

SEQ ID NO: 95967 - DNA, 37 bp, Artificial Sequence
  primer
gtaaaacgacggccagtaacgggtcagtctgggagtc

SEQ ID NO: 95968 - DNA, 20 bp, Artificial Sequence
  primer
ctgccacatgcagatactgg

SEQ ID NO: 95969 - DNA, 21 bp, Artificial Sequence
  primer
cacttccttccgtagctgctc

SEQ ID NO: 95970 - DNA, 21 bp, Artificial Sequence
  primer
atcatacagcttgtccagggc

SEQ ID NO: 95971 - DNA, 37 bp, Artificial Sequence
  primer
gtaaaacgacggccagtgaaggacaaggcccagagtc

SEQ ID NO: 95972 - DNA, 21 bp, Artificial Sequence
  primer
tagcctctgccagctacaacc

SEQ ID NO: 95973 - DNA, 21 bp, Artificial Sequence
  primer
gtctcagaggctgtgtggatg

SEQ ID NO: 95974 - DNA, 38 bp, Artificial Sequence
  primer
gtaaaacgacggccagtcgtctgttgtaccctgctcac

SEQ ID NO: 95975 - DNA, 19 bp, Artificial Sequence
  primer
gtccatgtccaccctgctc

SEQ ID NO: 95976 - DNA, 21 bp, Artificial Sequence
  primer
gttcctcaaggactccagctc

SEQ ID NO: 95977 - DNA, 21 bp, Artificial Sequence
  primer
gaccttcagtagcagggatgc

SEQ ID NO: 95978 - DNA, 18 bp, Artificial Sequence
  primer
ggagaatggcaagggctc

SEQ ID NO: 95979 - DNA, 38 bp, Artificial Sequence
  primer
gtaaaacgacggccagtgatggagtaagcggcagagtc

SEQ ID NO: 95980 - DNA, 20 bp, Artificial Sequence
  primer
aggagcaaagtcaaggtccc

SEQ ID NO: 95981 - DNA, 38 bp, Artificial Sequence
  primer
gtaaaacgacggccagtctgtagaggctgtgttggcag

SEQ ID NO: 95982 - DNA, 36 bp, Artificial Sequence
  primer
gtaaaacgacggccagtacgatgcacgtggagtgtc

SEQ ID NO: 95983 - DNA, 21 bp, Artificial Sequence
  primer
agcaggaggaaatttgaccag

SEQ ID NO: 95984 - DNA, 19 bp, Artificial Sequence
  primer
acagcagcaggcgtgagtc

SEQ ID NO: 95985 - DNA, 21 bp, Artificial Sequence
  primer
tcagaaatctccctgtccctg

SEQ ID NO: 95986 - DNA, 21 bp, Artificial Sequence
  primer
atcctaaacgaggtgagaccg

SEQ ID NO: 95987 - DNA, 21 bp, Artificial Sequence
  primer
gtgcaaggcagtctgtgtctc

SEQ ID NO: 95988 - DNA, 21 bp, Artificial Sequence
  primer
caggtggttgaagagtgaccc

SEQ ID NO: 95989 - DNA, 38 bp, Artificial Sequence
  primer
gtaaaacgacggccagttagatgccagcagtggtgaag

SEQ ID NO: 95990 - DNA, 19 bp, Artificial Sequence
  primer
aggctcatgagttgaggcg

SEQ ID NO: 95991 - DNA, 21 bp, Artificial Sequence
  primer
agctggttcctgaggtaggtc

SEQ ID NO: 95992 - DNA, 21 bp, Artificial Sequence
  primer
actcgtccttctctgtgggag

SEQ ID NO: 95993 - DNA, 38 bp, Artificial Sequence
  primer
gtaaaacgacggccagtgtaagtagtgggtggcgaagc

SEQ ID NO: 95994 - DNA, 21 bp, Artificial Sequence
  primer
ccgtgattggctagagctcac

SEQ ID NO: 95995 - DNA, 21 bp, Artificial Sequence
  primer
gatgtccagggtttcctcttc

SEQ ID NO: 95996 - DNA, 37 bp, Artificial Sequence
  primer
gtaaaacgacggccagtcctaggtcactgtgcaaggc

SEQ ID NO: 95997 - DNA, 21 bp, Artificial Sequence
  primer
aggcaagtctcccagtcattg

SEQ ID NO: 95998 - DNA, 18 bp, Artificial Sequence
  primer
ggtgagcgatgggtgctc

SEQ ID NO: 95999 - DNA, 20 bp, Artificial Sequence
  primer
tcacttggagcttggaggag

SEQ ID NO: 96000 - DNA, 37 bp, Artificial Sequence
  primer
gtaaaacgacggccagtctggacttcacctcagccac

SEQ ID NO: 96001 - DNA, 20 bp, Artificial Sequence
  primer
catccgcaaattcaaaggtg

SEQ ID NO: 96002 - DNA, 38 bp, Artificial Sequence
  primer
gtaaaacgacggccagtatgtctgtcctgcagaggtgg

SEQ ID NO: 96003 - DNA, 21 bp, Artificial Sequence
  primer
agccagtctctggaatcctcc

SEQ ID NO: 96004 - DNA, 21 bp, Artificial Sequence
  primer
accatacaggtgggatcttgg

SEQ ID NO: 96005 - DNA, 21 bp, Artificial Sequence
  primer
ctggtggactgtcccattctc

SEQ ID NO: 96006 - DNA, 38 bp, Artificial Sequence
  primer
gtaaaacgacggccagtagcccttctcttcaactgtgg

SEQ ID NO: 96007 - DNA, 21 bp, Artificial Sequence
  primer
agcttactggtgcccttctcc

SEQ ID NO: 96008 - DNA, 37 bp, Artificial Sequence
  primer
gtaaaacgacggccagtcctccttgtccatgatgctg

SEQ ID NO: 96009 - DNA, 35 bp, Artificial Sequence
  primer
gtaaaacgacggccagtggagggagggcaagtctg

SEQ ID NO: 96010 - DNA, 39 bp, Artificial Sequence
  primer
gtaaaacgacggccagtgccgtagggtcaaaggtcatag

SEQ ID NO: 96011 - DNA, 37 bp, Artificial Sequence
  primer
gtaaaacgacggccagtgatccaggtggaaggacagc

SEQ ID NO: 96012 - DNA, 38 bp, Artificial Sequence
  primer
gtaaaacgacggccagtcaggaccctatcattcatccc

SEQ ID NO: 96013 - DNA, 21 bp, Artificial Sequence
  primer
tggcagatcctagatggtgtg

SEQ ID NO: 96014 - DNA, 20 bp, Artificial Sequence
  primer
aggtctcgggtttccacaac

SEQ ID NO: 96015 - DNA, 39 bp, Artificial Sequence
  primer
gtaaaacgacggccagttgagtcagggtatcaggttgtg

SEQ ID NO: 96016 - DNA, 20 bp, Artificial Sequence
  primer
ggatcccaatcctcagtttg

SEQ ID NO: 96017 - DNA, 21 bp, Artificial Sequence
  primer
gggacaaaggcagctatgaag

SEQ ID NO: 96018 - DNA, 25 bp, Artificial Sequence
  primer
aaacttacattccaagtgcagaaac

SEQ ID NO: 96019 - DNA, 22 bp, Artificial Sequence
  primer
gaagagaaggaccctctatcgg

SEQ ID NO: 96020 - DNA, 20 bp, Artificial Sequence
  primer
cagcacccatcctgacactc

SEQ ID NO: 96021 - DNA, 38 bp, Artificial Sequence
  primer
gtaaaacgacggccagtacaacttgggcgtggtaagtc

SEQ ID NO: 96022 - DNA, 21 bp, Artificial Sequence
  primer
ccagtcccacagggtagtcag

SEQ ID NO: 96023 - DNA, 20 bp, Artificial Sequence
  primer
gcaggcttcaggatgacctc

SEQ ID NO: 96024 - DNA, 21 bp, Artificial Sequence
  primer
tggcccaaaggttctaaactc

SEQ ID NO: 96025 - DNA, 38 bp, Artificial Sequence
  primer
gtaaaacgacggccagttttaaggctcagagagcttgc

SEQ ID NO: 96026 - DNA, 21 bp, Artificial Sequence
  primer
tcccatgtttgtgtgaagctc

SEQ ID NO: 96027 - DNA, 20 bp, Artificial Sequence
  primer
agggccagtcctcacttctc

SEQ ID NO: 96028 - DNA, 38 bp, Artificial Sequence
  primer
gtaaaacgacggccagtaacccacagagggtgacaaag

SEQ ID NO: 96029 - DNA, 21 bp, Artificial Sequence
  primer
aggagcttatggcagaacagg

SEQ ID NO: 96030 - DNA, 22 bp, Artificial Sequence
  primer
tttgtacattctcgggttgttg

SEQ ID NO: 96031 - DNA, 21 bp, Artificial Sequence
  primer
tctgcaggacacagtcactcc

SEQ ID NO: 96032 - DNA, 20 bp, Artificial Sequence
  primer
atgacatctggagtgccctg

SEQ ID NO: 96033 - DNA, 38 bp, Artificial Sequence
  primer
gtaaaacgacggccagtatggatgtgcctagaccttgc

SEQ ID NO: 96034 - DNA, 22 bp, Artificial Sequence
  primer
actcagcagggctaataagctg

SEQ ID NO: 96035 - DNA, 37 bp, Artificial Sequence
  primer
gtaaaacgacggccagtcaccaggagtagcctgtccc

SEQ ID NO: 96036 - DNA, 21 bp, Artificial Sequence
  primer
agtagaagcctccgttgaggg

SEQ ID NO: 96037 - DNA, 21 bp, Artificial Sequence
  primer
acatcacggtccctgtcctac

SEQ ID NO: 96038 - DNA, 38 bp, Artificial Sequence
  primer
gtaaaacgacggccagtaaacacccaacttccatctcc

SEQ ID NO: 96039 - DNA, 39 bp, Artificial Sequence
  primer
gtaaaacgacggccagtagctttgggtttactcacatcc

SEQ ID NO: 96040 - DNA, 21 bp, Artificial Sequence
  primer
atgattgtgccacttcattcc

SEQ ID NO: 96041 - DNA, 21 bp, Artificial Sequence
  primer
gaattgattgcctgattgctg

SEQ ID NO: 96042 - DNA, 39 bp, Artificial Sequence
  primer
gtaaaacgacggccagtaaggataatacttggcccttcg

SEQ ID NO: 96043 - DNA, 38 bp, Artificial Sequence
  primer
gtaaaacgacggccagttccagcacaaacctggtacac

SEQ ID NO: 96044 - DNA, 21 bp, Artificial Sequence
  primer
ccaaaccgcttagttctcctg

SEQ ID NO: 96045 - DNA, 26 bp, Artificial Sequence
  primer
tccaacacaataagtagtcattctcc

SEQ ID NO: 96046 - DNA, 40 bp, Artificial Sequence
  primer
gtaaaacgacggccagtggcatccacaggtgtatagattc

SEQ ID NO: 96047 - DNA, 22 bp, Artificial Sequence
  primer
tggctattcttcattcttccag

SEQ ID NO: 96048 - DNA, 38 bp, Artificial Sequence
  primer
gtaaaacgacggccagtacagcatgaattaaacagcgg

SEQ ID NO: 96049 - DNA, 44 bp, Artificial Sequence
  primer
gtaaaacgacggccagtaacatgcatctcctaatcatacatttc

SEQ ID NO: 96050 - DNA, 38 bp, Artificial Sequence
  primer
gtaaaacgacggccagttctgacattgtctccagtggc

SEQ ID NO: 96051 - DNA, 22 bp, Artificial Sequence
  primer
caacttgcctggtctatccatc

SEQ ID NO: 96052 - DNA, 38 bp, Artificial Sequence
  primer
gtaaaacgacggccagtgtccgtcctgtggagttaagg

SEQ ID NO: 96053 - DNA, 39 bp, Artificial Sequence
  primer
gtaaaacgacggccagtaaagctccttcaaaggacacac

SEQ ID NO: 96054 - DNA, 21 bp, Artificial Sequence
  primer
agtgggtggtttcatttggag

SEQ ID NO: 96055 - DNA, 18 bp, Artificial Sequence
  primer
gaacctgggaggcagagc

SEQ ID NO: 96056 - DNA, 40 bp, Artificial Sequence
  primer
gtaaaacgacggccagtcactttcctaaagctgagaccag

SEQ ID NO: 96057 - DNA, 21 bp, Artificial Sequence
  primer
acggcagaaagctggtttaag

SEQ ID NO: 96058 - DNA, 21 bp, Artificial Sequence
  primer
tccataggaactccttgctcc

SEQ ID NO: 96059 - DNA, 22 bp, Artificial Sequence
  primer
cagagcctcttaagccacattc

SEQ ID NO: 96060 - DNA, 39 bp, Artificial Sequence
  primer
gtaaaacgacggccagttcatttccagtaatgcacgaac

SEQ ID NO: 96061 - DNA, 38 bp, Artificial Sequence
  primer
gtaaaacgacggccagtcaatccaagggaaataggtgc

SEQ ID NO: 96062 - DNA, 44 bp, Artificial Sequence
  primer
gtaaaacgacggccagtaaacgacttgtttaactaactgtggtc

SEQ ID NO: 96063 - DNA, 37 bp, Artificial Sequence
  primer
gtaaaacgacggccagttcaggcccgaatgtgtaaag

SEQ ID NO: 96064 - DNA, 20 bp, Artificial Sequence
  primer
tccaaatcgcaattcagtcc

SEQ ID NO: 96065 - DNA, 25 bp, Artificial Sequence
  primer
aaactgtttcaatggcataatacat

SEQ ID NO: 96066 - DNA, 21 bp, Artificial Sequence
  primer
ccctcatccctgctaaatatc

SEQ ID NO: 96067 - DNA, 23 bp, Artificial Sequence
  primer
tcccgtacttcttgaaaggaaag

SEQ ID NO: 96068 - DNA, 24 bp, Artificial Sequence
  primer
aatgcacactctgaagattacagg

SEQ ID NO: 96069 - DNA, 41 bp, Artificial Sequence
  primer
gtaaaacgacggccagttctatctccctctgttggttgaag

SEQ ID NO: 96070 - DNA, 21 bp, Artificial Sequence
  primer
taccttctgccaaagccaaac

SEQ ID NO: 96071 - DNA, 38 bp, Artificial Sequence
  primer
gtaaaacgacggccagttgatctgaactgatcccttgc

SEQ ID NO: 96072 - DNA, 38 bp, Artificial Sequence
  primer
gtaaaacgacggccagtataggaatgccacactgcaag

SEQ ID NO: 96073 - DNA, 25 bp, Artificial Sequence
  primer
tgcaacagtgtattactttgtgctt

SEQ ID NO: 96074 - DNA, 21 bp, Artificial Sequence
  primer
aggtacctcattccagccttc

SEQ ID NO: 96075 - DNA, 39 bp, Artificial Sequence
  primer
gtaaaacgacggccagttttagaatgtgccaccaaacac

SEQ ID NO: 96076 - DNA, 35 bp, Artificial Sequence
  primer
gtaaaacgacggccagtcgcctcccattcacagag

SEQ ID NO: 96077 - DNA, 20 bp, Artificial Sequence
  primer
agaagcctcatctgcttccc

SEQ ID NO: 96078 - DNA, 21 bp, Artificial Sequence
  primer
gggaggaccacttaagtccag

SEQ ID NO: 96079 - DNA, 21 bp, Artificial Sequence
  primer
ggccagaagtttcaccatcac

SEQ ID NO: 96080 - DNA, 38 bp, Artificial Sequence
  primer
gtaaaacgacggccagtacagccctgtgtgagtctttg

SEQ ID NO: 96081 - DNA, 20 bp, Artificial Sequence
  primer
caccacacctggcctagaac

SEQ ID NO: 96082 - DNA, 21 bp, Artificial Sequence
  primer
actgcctttactaacccgtgc

SEQ ID NO: 96083 - DNA, 38 bp, Artificial Sequence
  primer
gtaaaacgacggccagtaagtaagtagccggaagtggg

SEQ ID NO: 96084 - DNA, 21 bp, Artificial Sequence
  primer
tgaaggcaggttccttaggtg

SEQ ID NO: 96085 - DNA, 38 bp, Artificial Sequence
  primer
gtaaaacgacggccagttattgtgcttcatgcctctgc

SEQ ID NO: 96086 - DNA, 38 bp, Artificial Sequence
  primer
gtaaaacgacggccagttaactgtgcctccttcacgtc

SEQ ID NO: 96087 - DNA, 38 bp, Artificial Sequence
  primer
gtaaaacgacggccagtcctggactcgaacctcttctg

SEQ ID NO: 96088 - DNA, 39 bp, Artificial Sequence
  primer
gtaaaacgacggccagttccctttcttgccacacaatag

SEQ ID NO: 96089 - DNA, 23 bp, Artificial Sequence
  primer
aagccagtatgcattgtaagcag

SEQ ID NO: 96090 - DNA, 43 bp, Artificial Sequence
  primer
gtaaaacgacggccagttgaaagtttgaatgaatgtatatggg

SEQ ID NO: 96091 - DNA, 22 bp, Artificial Sequence
  primer
ggcaatttccttgaagttgttt

SEQ ID NO: 96092 - DNA, 43 bp, Artificial Sequence
  primer
gtaaaacgacggccagtgagttcaattctaaaggcaatacagc

SEQ ID NO: 96093 - DNA, 40 bp, Artificial Sequence
  primer
gtaaaacgacggccagtaaaggcaaactcaaatactctgc

SEQ ID NO: 96094 - DNA, 22 bp, Artificial Sequence
  primer
cctccactatatgtcccaccac

SEQ ID NO: 96095 - DNA, 23 bp, Artificial Sequence
  primer
tttgcccataataacacacacag

SEQ ID NO: 96096 - DNA, 21 bp, Artificial Sequence
  primer
aatctcaccacccagcatttc

SEQ ID NO: 96097 - DNA, 24 bp, Artificial Sequence
  primer
tttcatagcatacattgccacatc

SEQ ID NO: 96098 - DNA, 21 bp, Artificial Sequence
  primer
tgatgcaaaggaattggaact

SEQ ID NO: 96099 - DNA, 25 bp, Artificial Sequence
  primer
gatgcctgttctcattaaacttagg

SEQ ID NO: 96100 - DNA, 40 bp, Artificial Sequence
  primer
gtaaaacgacggccagtctgatacttccattcgcttcaac

SEQ ID NO: 96101 - DNA, 22 bp, Artificial Sequence
  primer
tctgaggagtcacaatcttccc

SEQ ID NO: 96102 - DNA, 22 bp, Artificial Sequence
  primer
gaactgtgcatgtgcaaagaag

SEQ ID NO: 96103 - DNA, 39 bp, Artificial Sequence
  primer
gtaaaacgacggccagttctccctccagatttgaaacag

SEQ ID NO: 96104 - DNA, 20 bp, Artificial Sequence
  primer
caaccatgcggaaatgtagg

SEQ ID NO: 96105 - DNA, 38 bp, Artificial Sequence
  primer
gtaaaacgacggccagtaaattgaagaacggcactgac

SEQ ID NO: 96106 - DNA, 25 bp, Artificial Sequence
  primer
aaagtaggaaacaatttcagttccc

SEQ ID NO: 96107 - DNA, 24 bp, Artificial Sequence
  primer
cggtaagacgagtaagacatttcc

SEQ ID NO: 96108 - DNA, 24 bp, Artificial Sequence
  primer
tcattcacgtgttatttcagaagc

SEQ ID NO: 96109 - DNA, 37 bp, Artificial Sequence
  primer
gtaaaacgacggccagtattgctcatgcaaagcaggt

SEQ ID NO: 96110 - DNA, 22 bp, Artificial Sequence
  primer
aatagcttcatgtcagcttccc

SEQ ID NO: 96111 - DNA, 38 bp, Artificial Sequence
  primer
gtaaaacgacggccagttttcacccattatcatttggc

SEQ ID NO: 96112 - DNA, 21 bp, Artificial Sequence
  primer
tcttggtccaaagtcaactgg

SEQ ID NO: 96113 - DNA, 24 bp, Artificial Sequence
  primer
tcatggtaatgtgaggaaacattg

SEQ ID NO: 96114 - DNA, 21 bp, Artificial Sequence
  primer
tgggactatctgatgccacac

SEQ ID NO: 96115 - DNA, 21 bp, Artificial Sequence
  primer
tttctacagagctgcccacac

SEQ ID NO: 96116 - DNA, 38 bp, Artificial Sequence
  primer
gtaaaacgacggccagttcctcttaccaggttcatcgg

SEQ ID NO: 96117 - DNA, 21 bp, Artificial Sequence
  primer
aaagcatttactctctggcgg

SEQ ID NO: 96118 - DNA, 21 bp, Artificial Sequence
  primer
gccctcagatatccagcctac

SEQ ID NO: 96119 - DNA, 38 bp, Artificial Sequence
  primer
gtaaaacgacggccagttgagagaatggcttcatggac

SEQ ID NO: 96120 - DNA, 38 bp, Artificial Sequence
  primer
gtaaaacgacggccagtactcacccatggaccttatcc

SEQ ID NO: 96121 - DNA, 21 bp, Artificial Sequence
  primer
aaacggcagtgtatgagttgg

SEQ ID NO: 96122 - DNA, 38 bp, Artificial Sequence
  primer
gtaaaacgacggccagtagtatccctgggaaagaaggg

SEQ ID NO: 96123 - DNA, 21 bp, Artificial Sequence
  primer
tcatctcctcttggatctgcc

SEQ ID NO: 96124 - DNA, 21 bp, Artificial Sequence
  primer
tgtgtccaggtcgtagtaggg

SEQ ID NO: 96125 - DNA, 38 bp, Artificial Sequence
  primer
gtaaaacgacggccagttctcagaatcagcagacaggg

SEQ ID NO: 96126 - DNA, 38 bp, Artificial Sequence
  primer
gtaaaacgacggccagtacagcgagaagattcccaaac

SEQ ID NO: 96127 - DNA, 38 bp, Artificial Sequence
  primer
gtaaaacgacggccagtagacgatgggctttctgactg

SEQ ID NO: 96128 - DNA, 20 bp, Artificial Sequence
  primer
aactcaccctagggctcctg

SEQ ID NO: 96129 - DNA, 21 bp, Artificial Sequence
  primer
gatgtgaggagccaatgtgtg

SEQ ID NO: 96130 - DNA, 20 bp, Artificial Sequence
  primer
cctgcctctcactcaccaag

SEQ ID NO: 96131 - DNA, 37 bp, Artificial Sequence
  primer
gtaaaacgacggccagtctggagcatctcacccacac

SEQ ID NO: 96132 - DNA, 22 bp, Artificial Sequence
  primer
cacacaggtaacaagaccaggg

SEQ ID NO: 96133 - DNA, 38 bp, Artificial Sequence
  primer
gtaaaacgacggccagtctaggcaggccaccagttaag

SEQ ID NO: 96134 - DNA, 38 bp, Artificial Sequence
  primer
gtaaaacgacggccagttaatcacgcacaaagcatctg

SEQ ID NO: 96135 - DNA, 38 bp, Artificial Sequence
  primer
gtaaaacgacggccagtaaggtcaacaaagtctgctgg

SEQ ID NO: 96136 - DNA, 22 bp, Artificial Sequence
  primer
tgcgtgatggaacagatttaag

SEQ ID NO: 96137 - DNA, 21 bp, Artificial Sequence
  primer
cccttcgtttgtctagaaggc

SEQ ID NO: 96138 - DNA, 38 bp, Artificial Sequence
  primer
gtaaaacgacggccagttatggatcgcctggtgttaag

SEQ ID NO: 96139 - DNA, 38 bp, Artificial Sequence
  primer
gtaaaacgacggccagtaacgcttagggacagaagctc

SEQ ID NO: 96140 - DNA, 38 bp, Artificial Sequence
  primer
gtaaaacgacggccagtcataacagaaagggctccacc

SEQ ID NO: 96141 - DNA, 20 bp, Artificial Sequence
  primer
cccgccagagataaccactc

SEQ ID NO: 96142 - DNA, 21 bp, Artificial Sequence
  primer
gctccagaaacacatgtctgc

SEQ ID NO: 96143 - DNA, 21 bp, Artificial Sequence
  primer
ttgattcgtatttccactgcg

SEQ ID NO: 96144 - DNA, 20 bp, Artificial Sequence
  primer
acatctgagcgagccctttc

SEQ ID NO: 96145 - DNA, 21 bp, Artificial Sequence
  primer
gaactgccaccttctgtaggg

SEQ ID NO: 96146 - DNA, 38 bp, Artificial Sequence
  primer
gtaaaacgacggccagtaagaggctctaccaacaaggc

SEQ ID NO: 96147 - DNA, 23 bp, Artificial Sequence
  primer
tctacacactttgcacaccagtc

SEQ ID NO: 96148 - DNA, 38 bp, Artificial Sequence
  primer
gtaaaacgacggccagttgctttcaaacactagccacc

SEQ ID NO: 96149 - DNA, 21 bp, Artificial Sequence
  primer
tagacgcagcgtttcatcatc

SEQ ID NO: 96150 - DNA, 20 bp, Artificial Sequence
  primer
aggactctgagggtgaagcg

SEQ ID NO: 96151 - DNA, 21 bp, Artificial Sequence
  primer
agaaagtattagcccaggccc

SEQ ID NO: 96152 - DNA, 38 bp, Artificial Sequence
  primer
gtaaaacgacggccagtccttgctctggaacttcacac

SEQ ID NO: 96153 - DNA, 18 bp, Artificial Sequence
  primer
cgcaggaaccgaacagtc

SEQ ID NO: 96154 - DNA, 21 bp, Artificial Sequence
  primer
atgggaaagacagtcagggag

SEQ ID NO: 96155 - DNA, 37 bp, Artificial Sequence
  primer
gtaaaacgacggccagtccttcttgcatcttgatccg

SEQ ID NO: 96156 - DNA, 39 bp, Artificial Sequence
  primer
gtaaaacgacggccagttgctgacatttgaccatttctg

SEQ ID NO: 96157 - DNA, 38 bp, Artificial Sequence
  primer
gtaaaacgacggccagtactcttgctgggtccagagtc

SEQ ID NO: 96158 - DNA, 21 bp, Artificial Sequence
  primer
ttacaacctacccagggaacc

SEQ ID NO: 96159 - DNA, 38 bp, Artificial Sequence
  primer
gtaaaacgacggccagtccttctttccaaactggcaac

SEQ ID NO: 96160 - DNA, 21 bp, Artificial Sequence
  primer
caggcttgctctctatcctcc

SEQ ID NO: 96161 - DNA, 21 bp, Artificial Sequence
  primer
cctgaaagcatgactcacacc

SEQ ID NO: 96162 - DNA, 37 bp, Artificial Sequence
  primer
gtaaaacgacggccagttctggttaggaacacggacg

SEQ ID NO: 96163 - DNA, 21 bp, Artificial Sequence
  primer
gcgctgtgcaccttaagaatc

SEQ ID NO: 96164 - DNA, 38 bp, Artificial Sequence
  primer
gtaaaacgacggccagtcacttccctcagttcctttgg

SEQ ID NO: 96165 - DNA, 39 bp, Artificial Sequence
  primer
gtaaaacgacggccagtaatgtcaaccatctggtgagtg

SEQ ID NO: 96166 - DNA, 21 bp, Artificial Sequence
  primer
ccttgggaaagcctaaacttg

SEQ ID NO: 96167 - DNA, 38 bp, Artificial Sequence
  primer
gtaaaacgacggccagtccaatcttcatttcaatcggg

SEQ ID NO: 96168 - DNA, 21 bp, Artificial Sequence
  primer
gcacgatcctcagacactgac

SEQ ID NO: 96169 - DNA, 21 bp, Artificial Sequence
  primer
ctgccatcttggtcctgagac

SEQ ID NO: 96170 - DNA, 30 bp, Artificial Sequence
  primer
ttataagtttctctttcagagctagtgtgt

SEQ ID NO: 96171 - DNA, 22 bp, Artificial Sequence
  primer
ttaggcctagccctggagtaag

SEQ ID NO: 96172 - DNA, 21 bp, Artificial Sequence
  primer
gaagaggctgctggtgaagac

SEQ ID NO: 96173 - DNA, 38 bp, Artificial Sequence
  primer
gtaaaacgacggccagttattgccttgcaaactcaagc

SEQ ID NO: 96174 - DNA, 21 bp, Artificial Sequence
  primer
aagtccctttggcagaaactg

SEQ ID NO: 96175 - DNA, 21 bp, Artificial Sequence
  primer
cttccactgttgcttgtggag

SEQ ID NO: 96176 - DNA, 38 bp, Artificial Sequence
  primer
gtaaaacgacggccagtgagatctcagggctgtcttgg

SEQ ID NO: 96177 - DNA, 38 bp, Artificial Sequence
  primer
gtaaaacgacggccagtatctagagaatggctctggcg

SEQ ID NO: 96178 - DNA, 38 bp, Artificial Sequence
  primer
gtaaaacgacggccagtggaacaccaccttgcctaatc

SEQ ID NO: 96179 - DNA, 38 bp, Artificial Sequence
  primer
gtaaaacgacggccagtgaggccacattctcaaaccag

SEQ ID NO: 96180 - DNA, 21 bp, Artificial Sequence
  primer
agggagaatcatctttggcag

SEQ ID NO: 96181 - DNA, 21 bp, Artificial Sequence
  primer
tctgtcactgtggatgaaggg

SEQ ID NO: 96182 - DNA, 38 bp, Artificial Sequence
  primer
gtaaaacgacggccagttaacgtgtgcctggaatatgg

SEQ ID NO: 96183 - DNA, 21 bp, Artificial Sequence
  primer
ctcaggacccgaactttcttg

SEQ ID NO: 96184 - DNA, 21 bp, Artificial Sequence
  primer
aatctgcgtaaattccaaggg

SEQ ID NO: 96185 - DNA, 21 bp, Artificial Sequence
  primer
aaatgtcaacggtaccaaggc

SEQ ID NO: 96186 - DNA, 21 bp, Artificial Sequence
  primer
aaagaaggatcccaacactgg

SEQ ID NO: 96187 - DNA, 39 bp, Artificial Sequence
  primer
gtaaaacgacggccagtaagctcctcatgtgttcagagc

SEQ ID NO: 96188 - DNA, 37 bp, Artificial Sequence
  primer
gtaaaacgacggccagttacacaacctttgggcttgg

SEQ ID NO: 96189 - DNA, 21 bp, Artificial Sequence
  primer
aactgacaactggcctagcag

SEQ ID NO: 96190 - DNA, 21 bp, Artificial Sequence
  primer
gcaacttcacaatcttgcacc

SEQ ID NO: 96191 - DNA, 38 bp, Artificial Sequence
  primer
gtaaaacgacggccagtcaatctgggaaagtcaccctg

SEQ ID NO: 96192 - DNA, 38 bp, Artificial Sequence
  primer
gtaaaacgacggccagtgaagggaacaggtgaaaggag

SEQ ID NO: 96193 - DNA, 37 bp, Artificial Sequence
  primer
gtaaaacgacggccagtgcatgttatttgggtgacgg

SEQ ID NO: 96194 - DNA, 21 bp, Artificial Sequence
  primer
cagaagggacaaggaagcaag

SEQ ID NO: 96195 - DNA, 21 bp, Artificial Sequence
  primer
tgggagtctctttcccacatc

SEQ ID NO: 96196 - DNA, 21 bp, Artificial Sequence
  primer
ttcagagctgtttcaaatgcc

SEQ ID NO: 96197 - DNA, 21 bp, Artificial Sequence
  primer
ggcaacaagagtgaaacttcg

SEQ ID NO: 96198 - DNA, 20 bp, Artificial Sequence
  primer
atctcaagggaagggagctg

SEQ ID NO: 96199 - DNA, 26 bp, Artificial Sequence
  primer
tcctttagggagatttaaagaatcag

SEQ ID NO: 96200 - DNA, 40 bp, Artificial Sequence
  primer
gtaaaacgacggccagtctcatggtagcaaatcaaagagg

SEQ ID NO: 96201 - DNA, 23 bp, Artificial Sequence
  primer
tttgttcttattctcccatggtc

SEQ ID NO: 96202 - DNA, 41 bp, Artificial Sequence
  primer
gtaaaacgacggccagttgagttcatcagcatgtacacctt

SEQ ID NO: 96203 - DNA, 38 bp, Artificial Sequence
  primer
gtaaaacgacggccagtatggatcattcatgagcgaag

SEQ ID NO: 96204 - DNA, 35 bp, Artificial Sequence
  primer
gtaaaacgacggccagtgacctcgtgatccacccg

SEQ ID NO: 96205 - DNA, 26 bp, Artificial Sequence
  primer
ggtatccctctatgcactgatgtaag

SEQ ID NO: 96206 - DNA, 43 bp, Artificial Sequence
  primer
gtaaaacgacggccagttctgtgtattctttcctctcaggatt

SEQ ID NO: 96207 - DNA, 38 bp, Artificial Sequence
  primer
gtaaaacgacggccagtattgcaatggttacactcggg

SEQ ID NO: 96208 - DNA, 21 bp, Artificial Sequence
  primer
actggaatgaattctaggccc

SEQ ID NO: 96209 - DNA, 22 bp, Artificial Sequence
  primer
ttccttcataggcataggttgc

SEQ ID NO: 96210 - DNA, 37 bp, Artificial Sequence
  primer
gtaaaacgacggccagtaaattgtgctgactggcagg

SEQ ID NO: 96211 - DNA, 21 bp, Artificial Sequence
  primer
ctctcttagatgcctgtgggc

SEQ ID NO: 96212 - DNA, 38 bp, Artificial Sequence
  primer
gtaaaacgacggccagtacttcctgatttgggagaacg

SEQ ID NO: 96213 - DNA, 22 bp, Artificial Sequence
  primer
ggcacaggccaagtatctaatc

SEQ ID NO: 96214 - DNA, 22 bp, Artificial Sequence
  primer
gcaggaataggttagaggaggg

SEQ ID NO: 96215 - DNA, 21 bp, Artificial Sequence
  primer
tccctgtttcttgcagtgttg

SEQ ID NO: 96216 - DNA, 38 bp, Artificial Sequence
  primer
gtaaaacgacggccagtgtggttcctacagggctttcc

SEQ ID NO: 96217 - DNA, 29 bp, Artificial Sequence
  primer
cctatatgtactcctagaaagataaccga

SEQ ID NO: 96218 - DNA, 20 bp, Artificial Sequence
  primer
tgggcagtggttggtatctc

SEQ ID NO: 96219 - DNA, 21 bp, Artificial Sequence
  primer
catcaaatgagcccatgtttc

SEQ ID NO: 96220 - DNA, 41 bp, Artificial Sequence
  primer
gtaaaacgacggccagtggttaccagcctgtatttgagaag

SEQ ID NO: 96221 - DNA, 21 bp, Artificial Sequence
  primer
caagtctgaatctgtggtggc

SEQ ID NO: 96222 - DNA, 38 bp, Artificial Sequence
  primer
gtaaaacgacggccagtaccactttgatgtcctcgcag

SEQ ID NO: 96223 - DNA, 21 bp, Artificial Sequence
  primer
tggtttgttcaactcctgtgc

SEQ ID NO: 96224 - DNA, 40 bp, Artificial Sequence
  primer
gtaaaacgacggccagtagatgtttacatcaacctgcaaa

SEQ ID NO: 96225 - DNA, 21 bp, Artificial Sequence
  primer
ccatcttctttgcttaatgcg

SEQ ID NO: 96226 - DNA, 21 bp, Artificial Sequence
  primer
cccatagcattcaatgacacc

SEQ ID NO: 96227 - DNA, 21 bp, Artificial Sequence
  primer
ctctcacatggttcaagggtc

SEQ ID NO: 96228 - DNA, 23 bp, Artificial Sequence
  primer
cccaatcctataacatttcctct

SEQ ID NO: 96229 - DNA, 21 bp, Artificial Sequence
  primer
attggcagctgtcacaatttc

SEQ ID NO: 96230 - DNA, 37 bp, Artificial Sequence
  primer
gtaaaacgacggccagtatctgtgcggtatcacctcc

SEQ ID NO: 96231 - DNA, 21 bp, Artificial Sequence
  primer
attgattcctccctttgtgcc

SEQ ID NO: 96232 - DNA, 23 bp, Artificial Sequence
  primer
aaattgaggagagagatggagga

SEQ ID NO: 96233 - DNA, 21 bp, Artificial Sequence
  primer
tctgccaagactttaaagcgg

SEQ ID NO: 96234 - DNA, 38 bp, Artificial Sequence
  primer
gtaaaacgacggccagttcttgtcccagagtgtgtgtg

SEQ ID NO: 96235 - DNA, 20 bp, Artificial Sequence
  primer
gctcggaatgacctccctac

SEQ ID NO: 96236 - DNA, 22 bp, Artificial Sequence
  primer
ttgggtcaagcagtgacataag

SEQ ID NO: 96237 - DNA, 20 bp, Artificial Sequence
  primer
atcaattaattcccgctgcc

SEQ ID NO: 96238 - DNA, 37 bp, Artificial Sequence
  primer
gtaaaacgacggccagtttccagctggtcaccaagac

SEQ ID NO: 96239 - DNA, 38 bp, Artificial Sequence
  primer
gtaaaacgacggccagtccacagaaacaccctaaagcc

SEQ ID NO: 96240 - DNA, 21 bp, Artificial Sequence
  primer
ctttccaacctggcttctacg

SEQ ID NO: 96241 - DNA, 22 bp, Artificial Sequence
  primer
tggtaaacacctcatttctgcc

SEQ ID NO: 96242 - DNA, 21 bp, Artificial Sequence
  primer
aaacaccatcgtctctcccac

SEQ ID NO: 96243 - DNA, 21 bp, Artificial Sequence
  primer
atacgagtgcacccttaagcc

SEQ ID NO: 96244 - DNA, 21 bp, Artificial Sequence
  primer
gtgtctgctcctgacaaccag

SEQ ID NO: 96245 - DNA, 39 bp, Artificial Sequence
  primer
gtaaaacgacggccagttttgctgttcccacacacttac

SEQ ID NO: 96246 - DNA, 21 bp, Artificial Sequence
  primer
catttgtttgttggtgggaaa

SEQ ID NO: 96247 - DNA, 39 bp, Artificial Sequence
  primer
gtaaaacgacggccagtgggaaacatcttcttggaaagg

SEQ ID NO: 96248 - DNA, 22 bp, Artificial Sequence
  primer
tgaggcctagttgtgaagttcg

SEQ ID NO: 96249 - DNA, 38 bp, Artificial Sequence
  primer
gtaaaacgacggccagtttccaccagatggagtgtttg

SEQ ID NO: 96250 - DNA, 38 bp, Artificial Sequence
  primer
gtaaaacgacggccagtcctttagagaatgagggaggc

SEQ ID NO: 96251 - DNA, 37 bp, Artificial Sequence
  primer
gtaaaacgacggccagtcctcacttaagggtgcctgg

SEQ ID NO: 96252 - DNA, 21 bp, Artificial Sequence
  primer
cttgcttaagggaagtcctgg

SEQ ID NO: 96253 - DNA, 18 bp, Artificial Sequence
  primer
cagtgacggcagggacag

SEQ ID NO: 96254 - DNA, 21 bp, Artificial Sequence
  primer
gttccttctccaaagcacacc

SEQ ID NO: 96255 - DNA, 20 bp, Artificial Sequence
  primer
ccctacaccctctgaccctc

SEQ ID NO: 96256 - DNA, 21 bp, Artificial Sequence
  primer
ctccaggatctcgatggacag

SEQ ID NO: 96257 - DNA, 19 bp, Artificial Sequence
  primer
ggacctgttgcaggaccac

SEQ ID NO: 96258 - DNA, 35 bp, Artificial Sequence
  primer
gtaaaacgacggccagtgtggctggtaatgacggg

SEQ ID NO: 96259 - DNA, 21 bp, Artificial Sequence
  primer
ggtggaggtctcaggtacagg

SEQ ID NO: 96260 - DNA, 19 bp, Artificial Sequence
  primer
accatcttcctctgcggtg

SEQ ID NO: 96261 - DNA, 18 bp, Artificial Sequence
  primer
acctcaggctgcctctgc

SEQ ID NO: 96262 - DNA, 21 bp, Artificial Sequence
  primer
tctttgacctcctcatcccac

SEQ ID NO: 96263 - DNA, 22 bp, Artificial Sequence
  primer
gggacactcaacctgtgtaacg

SEQ ID NO: 96264 - DNA, 21 bp, Artificial Sequence
  primer
ccacaagacatgtccatcctg

SEQ ID NO: 96265 - DNA, 21 bp, Artificial Sequence
  primer
aactgtctggccatctcttcg

SEQ ID NO: 96266 - DNA, 38 bp, Artificial Sequence
  primer
gtaaaacgacggccagttttacctctcaagctcccacc

SEQ ID NO: 96267 - DNA, 21 bp, Artificial Sequence
  primer
aaatatccatgagactcgggc

SEQ ID NO: 96268 - DNA, 39 bp, Artificial Sequence
  primer
gtaaaacgacggccagtgcctcagcctctgttgtagttg

SEQ ID NO: 96269 - DNA, 21 bp, Artificial Sequence
  primer
tatggagggacattgacatgg

SEQ ID NO: 96270 - DNA, 37 bp, Artificial Sequence
  primer
gtaaaacgacggccagtgtggacgtgttggtgaggtc

SEQ ID NO: 96271 - DNA, 21 bp, Artificial Sequence
  primer
gcttataggcccaatctggag

SEQ ID NO: 96272 - DNA, 37 bp, Artificial Sequence
  primer
gtaaaacgacggccagtgaggttctggaaccaggagg

SEQ ID NO: 96273 - DNA, 38 bp, Artificial Sequence
  primer
gtaaaacgacggccagtgccacagataatgtgagtccc

SEQ ID NO: 96274 - DNA, 21 bp, Artificial Sequence
  primer
atatctgcctctcctgcttgg

SEQ ID NO: 96275 - DNA, 25 bp, Artificial Sequence
  primer
catggtagaagggtatctcacttcc

SEQ ID NO: 96276 - DNA, 21 bp, Artificial Sequence
  primer
tatgcatgtgtaccagctccc

SEQ ID NO: 96277 - DNA, 38 bp, Artificial Sequence
  primer
gtaaaacgacggccagtgactatgatcaaagggcaggc

SEQ ID NO: 96278 - DNA, 21 bp, Artificial Sequence
  primer
ccataaagttggtgtccaggc

SEQ ID NO: 96279 - DNA, 38 bp, Artificial Sequence
  primer
gtaaaacgacggccagtatagccattctttccctggtg

SEQ ID NO: 96280 - DNA, 21 bp, Artificial Sequence
  primer
ctgaggccactcatctctctg

SEQ ID NO: 96281 - DNA, 38 bp, Artificial Sequence
  primer
gtaaaacgacggccagtattctgtgcaaggaaggaagg

SEQ ID NO: 96282 - DNA, 21 bp, Artificial Sequence
  primer
tgcagctattagccacacaag

SEQ ID NO: 96283 - DNA, 38 bp, Artificial Sequence
  primer
gtaaaacgacggccagtcctcccatgtccttcactgag

SEQ ID NO: 96284 - DNA, 21 bp, Artificial Sequence
  primer
cagtgaagactgtgagggtgg

SEQ ID NO: 96285 - DNA, 25 bp, Artificial Sequence
  primer
caataatatgctggagtctgaaatg

SEQ ID NO: 96286 - DNA, 38 bp, Artificial Sequence
  primer
gtaaaacgacggccagttcccagtaaggtctcctgctc

SEQ ID NO: 96287 - DNA, 21 bp, Artificial Sequence
  primer
cataccagacattagcgcagg

SEQ ID NO: 96288 - DNA, 21 bp, Artificial Sequence
  primer
gcagcccttggaataaatgag

SEQ ID NO: 96289 - DNA, 36 bp, Artificial Sequence
  primer
gtaaaacgacggccagtcatgcctgagagatggctg

SEQ ID NO: 96290 - DNA, 37 bp, Artificial Sequence
  primer
gtaaaacgacggccagtggtatgctgtgagggtcagc

SEQ ID NO: 96291 - DNA, 21 bp, Artificial Sequence
  primer
tatcctccctcccatttcaac

SEQ ID NO: 96292 - DNA, 21 bp, Artificial Sequence
  primer
tgctgagtacagcaaacccac

SEQ ID NO: 96293 - DNA, 38 bp, Artificial Sequence
  primer
gtaaaacgacggccagtactcaccaatcaccagaaggg

SEQ ID NO: 96294 - DNA, 38 bp, Artificial Sequence
  primer
gtaaaacgacggccagttattgcctgagttgccatttg

SEQ ID NO: 96295 - DNA, 43 bp, Artificial Sequence
  primer
gtaaaacgacggccagtttagcaaatattaaaggacaagaggg

SEQ ID NO: 96296 - DNA, 27 bp, Artificial Sequence
  primer
cgtaattcactctacaacataatttgc

SEQ ID NO: 96297 - DNA, 26 bp, Artificial Sequence
  primer
ccaatagtctttaacactttatgcca

SEQ ID NO: 96298 - DNA, 39 bp, Artificial Sequence
  primer
gtaaaacgacggccagtttgcacgggtataaataatggg

SEQ ID NO: 96299 - DNA, 42 bp, Artificial Sequence
  primer
gtaaaacgacggccagtgctggagtgatttcatgagtcttac

SEQ ID NO: 96300 - DNA, 37 bp, Artificial Sequence
  primer
gtaaaacgacggccagtgcctctgccaaatttccatt

SEQ ID NO: 96301 - DNA, 40 bp, Artificial Sequence
  primer
gtaaaacgacggccagtaaatccaactgctaagctacaca

SEQ ID NO: 96302 - DNA, 40 bp, Artificial Sequence
  primer
gtaaaacgacggccagtactccgcttactctcctagatcc

SEQ ID NO: 96303 - DNA, 21 bp, Artificial Sequence
  primer
aattacactgtgggctttggg

SEQ ID NO: 96304 - DNA, 39 bp, Artificial Sequence
  primer
gtaaaacgacggccagttgatttgcaagatgtttgtgtg

SEQ ID NO: 96305 - DNA, 38 bp, Artificial Sequence
  primer
gtaaaacgacggccagtagcagctgtttccttacccac

SEQ ID NO: 96306 - DNA, 21 bp, Artificial Sequence
  primer
gattgtgtcgttgctgaatcc

SEQ ID NO: 96307 - DNA, 38 bp, Artificial Sequence
  primer
gtaaaacgacggccagttccttgtcattgctgaggttg

SEQ ID NO: 96308 - DNA, 21 bp, Artificial Sequence
  primer
attgatgctgctgtttgaagc

SEQ ID NO: 96309 - DNA, 25 bp, Artificial Sequence
  primer
gacccttaaatcatctacttccaaa

SEQ ID NO: 96310 - DNA, 22 bp, Artificial Sequence
  primer
tttaaattgggttgctggtctc

SEQ ID NO: 96311 - DNA, 38 bp, Artificial Sequence
  primer
gtaaaacgacggccagtgatcataacccaatgagaccc

SEQ ID NO: 96312 - DNA, 27 bp, Artificial Sequence
  primer
aaacataaattactggttctcatttca

SEQ ID NO: 96313 - DNA, 39 bp, Artificial Sequence
  primer
gtaaaacgacggccagttcgagcctagaagacagagtga

SEQ ID NO: 96314 - DNA, 24 bp, Artificial Sequence
  primer
cgcaagtacacacatttacattga

SEQ ID NO: 96315 - DNA, 42 bp, Artificial Sequence
  primer
gtaaaacgacggccagtccatgccataaattccattaaagtc

SEQ ID NO: 96316 - DNA, 38 bp, Artificial Sequence
  primer
gtaaaacgacggccagtatgttcagttcagcaccacct

SEQ ID NO: 96317 - DNA, 21 bp, Artificial Sequence
  primer
ttcctgaatatggcactgtcg

SEQ ID NO: 96318 - DNA, 39 bp, Artificial Sequence
  primer
gtaaaacgacggccagttgcctgtgagctgattgtttac

SEQ ID NO: 96319 - DNA, 37 bp, Artificial Sequence
  primer
gtaaaacgacggccagtgaaaggcgcgagagacctac

SEQ ID NO: 96320 - DNA, 39 bp, Artificial Sequence
  primer
gtaaaacgacggccagttcaagagatcaggagccttcaa

SEQ ID NO: 96321 - DNA, 40 bp, Artificial Sequence
  primer
gtaaaacgacggccagtcatccattaatgtggtctgaagc

SEQ ID NO: 96322 - DNA, 21 bp, Artificial Sequence
  primer
taatccacagtgtgcaggacc

SEQ ID NO: 96323 - DNA, 39 bp, Artificial Sequence
  primer
gtaaaacgacggccagtaagaggcaatggtaaactctgc

SEQ ID NO: 96324 - DNA, 23 bp, Artificial Sequence
  primer
agttaccttccttctttcccaaa

SEQ ID NO: 96325 - DNA, 46 bp, Artificial Sequence
  primer
gtaaaacgacggccagtcatttgaataacactgtgagtatattgtg

SEQ ID NO: 96326 - DNA, 21 bp, Artificial Sequence
  primer
gaaatgtccgagttagcagcc

SEQ ID NO: 96327 - DNA, 25 bp, Artificial Sequence
  primer
cctcccaaatatatatcagacccac

SEQ ID NO: 96328 - DNA, 41 bp, Artificial Sequence
  primer
gtaaaacgacggccagttgattgcaatgaaaatttctactc

SEQ ID NO: 96329 - DNA, 22 bp, Artificial Sequence
  primer
tggacatcgagaacagtcattg

SEQ ID NO: 96330 - DNA, 21 bp, Artificial Sequence
  primer
agcggattacaactatgctgc

SEQ ID NO: 96331 - DNA, 38 bp, Artificial Sequence
  primer
gtaaaacgacggccagtcaggcaatagcaacacatgac

SEQ ID NO: 96332 - DNA, 22 bp, Artificial Sequence
  primer
aacaggagggaaacctgatacc

SEQ ID NO: 96333 - DNA, 21 bp, Artificial Sequence
  primer
gtattccaagcaatttgtggc

SEQ ID NO: 96334 - DNA, 36 bp, Artificial Sequence
  primer
gtaaaacgacggccagtctatgccaaagcctccagc

SEQ ID NO: 96335 - DNA, 40 bp, Artificial Sequence
  primer
gtaaaacgacggccagttcaggtctcagataaaggctagg

SEQ ID NO: 96336 - DNA, 21 bp, Artificial Sequence
  primer
tgtgtgcatgtgcatatgtgt

SEQ ID NO: 96337 - DNA, 21 bp, Artificial Sequence
  primer
ttgggtctgtcatagcagcag

SEQ ID NO: 96338 - DNA, 21 bp, Artificial Sequence
  primer
actcaaactgggctttctccc

SEQ ID NO: 96339 - DNA, 27 bp, Artificial Sequence
  primer
tttcatgtaaacataagggttaagagg

SEQ ID NO: 96340 - DNA, 25 bp, Artificial Sequence
  primer
gagagtctccagaaatgggatagag

SEQ ID NO: 96341 - DNA, 23 bp, Artificial Sequence
  primer
gcataaagcatgatttccatttc

SEQ ID NO: 96342 - DNA, 39 bp, Artificial Sequence
  primer
gtaaaacgacggccagtaatggctttgatggtgaatttg

SEQ ID NO: 96343 - DNA, 21 bp, Artificial Sequence
  primer
gctggtatggaacaggtagcc

SEQ ID NO: 96344 - DNA, 21 bp, Artificial Sequence
  primer
tgtgcagcctcactctaccac

SEQ ID NO: 96345 - DNA, 21 bp, Artificial Sequence
  primer
aggaagtcgaagctctgttcc

SEQ ID NO: 96346 - DNA, 38 bp, Artificial Sequence
  primer
gtaaaacgacggccagtagcacagtattgctcgtgtgg

SEQ ID NO: 96347 - DNA, 38 bp, Artificial Sequence
  primer
gtaaaacgacggccagtgcagaagaggcacatgaaaca

SEQ ID NO: 96348 - DNA, 21 bp, Artificial Sequence
  primer
ctgtaccctaggtcagcaggc

SEQ ID NO: 96349 - DNA, 21 bp, Artificial Sequence
  primer
tttctgttcctcagtccgtcc

SEQ ID NO: 96350 - DNA, 21 bp, Artificial Sequence
  primer
tttggtgggaagtctaaaggg

SEQ ID NO: 96351 - DNA, 21 bp, Artificial Sequence
  primer
tccattgagtggagtgaggtg

SEQ ID NO: 96352 - DNA, 18 bp, Artificial Sequence
  primer
ctctgcccgcagtctgtc

SEQ ID NO: 96353 - DNA, 38 bp, Artificial Sequence
  primer
gtaaaacgacggccagtcaccgctgtgagatctttgtc

SEQ ID NO: 96354 - DNA, 38 bp, Artificial Sequence
  primer
gtaaaacgacggccagtgaccactctgggtcgaggtag

SEQ ID NO: 96355 - DNA, 21 bp, Artificial Sequence
  primer
ctgccatttcttatccttggg

SEQ ID NO: 96356 - DNA, 21 bp, Artificial Sequence
  primer
ctggttaggaaggaaacccag

SEQ ID NO: 96357 - DNA, 21 bp, Artificial Sequence
  primer
ctgctgagataggcgaagtcc

SEQ ID NO: 96358 - DNA, 38 bp, Artificial Sequence
  primer
gtaaaacgacggccagtagagtccgctcctagcaagtc

SEQ ID NO: 96359 - DNA, 38 bp, Artificial Sequence
  primer
gtaaaacgacggccagtgtctccagagtcccagagcac

SEQ ID NO: 96360 - DNA, 38 bp, Artificial Sequence
  primer
gtaaaacgacggccagtgtggaagatgacctcaacctg

SEQ ID NO: 96361 - DNA, 38 bp, Artificial Sequence
  primer
gtaaaacgacggccagtaagatgccactgtggagtcag

SEQ ID NO: 96362 - DNA, 38 bp, Artificial Sequence
  primer
gtaaaacgacggccagtgatcacctggcaagagaaagg

SEQ ID NO: 96363 - DNA, 19 bp, Artificial Sequence
  primer
agagccacagctgctctcc

SEQ ID NO: 96364 - DNA, 21 bp, Artificial Sequence
  primer
atcatcgagtgtgtgccactg

SEQ ID NO: 96365 - DNA, 36 bp, Artificial Sequence
  primer
gtaaaacgacggccagtgagcccagcccactaacag

SEQ ID NO: 96366 - DNA, 21 bp, Artificial Sequence
  primer
gcgaggactgtccctgtagtc

SEQ ID NO: 96367 - DNA, 36 bp, Artificial Sequence
  primer
gtaaaacgacggccagtactgctggaggttggcatc

SEQ ID NO: 96368 - DNA, 19 bp, Artificial Sequence
  primer
gaggacctgaacagcccag

SEQ ID NO: 96369 - DNA, 21 bp, Artificial Sequence
  primer
atcttctaccctaccctcgcc

SEQ ID NO: 96370 - DNA, 20 bp, Artificial Sequence
  primer
ctgattgctgaggtcccttg

SEQ ID NO: 96371 - DNA, 21 bp, Artificial Sequence
  primer
tgccacaatcagagtcaaacc

SEQ ID NO: 96372 - DNA, 22 bp, Artificial Sequence
  primer
cgcaatgaactctgattgtacc

SEQ ID NO: 96373 - DNA, 21 bp, Artificial Sequence
  primer
gtagcccagagtgtcagggag

SEQ ID NO: 96374 - DNA, 21 bp, Artificial Sequence
  primer
ggagagacttgctaagggcag

SEQ ID NO: 96375 - DNA, 21 bp, Artificial Sequence
  primer
tagatgtttccaaaggctccc

SEQ ID NO: 96376 - DNA, 21 bp, Artificial Sequence
  primer
tacactggtgctcaaagctgg

SEQ ID NO: 96377 - DNA, 38 bp, Artificial Sequence
  primer
gtaaaacgacggccagttctcacaaagcctcacactgg

SEQ ID NO: 96378 - DNA, 38 bp, Artificial Sequence
  primer
gtaaaacgacggccagtgagggacacagagtccaccag

SEQ ID NO: 96379 - DNA, 20 bp, Artificial Sequence
  primer
acatagacctcctgggtggg

SEQ ID NO: 96380 - DNA, 21 bp, Artificial Sequence
  primer
ctgtccttcaagacccagctc

SEQ ID NO: 96381 - DNA, 21 bp, Artificial Sequence
  primer
cctcattaacaagggagcctg

SEQ ID NO: 96382 - DNA, 21 bp, Artificial Sequence
  primer
cctagtctggctgtccatctg

SEQ ID NO: 96383 - DNA, 21 bp, Artificial Sequence
  primer
tgggcagagttcagcctttag

SEQ ID NO: 96384 - DNA, 37 bp, Artificial Sequence
  primer
gtaaaacgacggccagtagccagagccctatcctcag

SEQ ID NO: 96385 - DNA, 21 bp, Artificial Sequence
  primer
acccacctggtgtgaataagg

SEQ ID NO: 96386 - DNA, 38 bp, Artificial Sequence
  primer
gtaaaacgacggccagtccttaggcccagatgtcattc

SEQ ID NO: 96387 - DNA, 38 bp, Artificial Sequence
  primer
gtaaaacgacggccagtggcctagacatggctaaatgg

SEQ ID NO: 96388 - DNA, 38 bp, Artificial Sequence
  primer
gtaaaacgacggccagttgcacacagaaggagctcaac

SEQ ID NO: 96389 - DNA, 21 bp, Artificial Sequence
  primer
ctcaggctatcaagaccctcg

SEQ ID NO: 96390 - DNA, 20 bp, Artificial Sequence
  primer
gaacctggtgcttggtgatg

SEQ ID NO: 96391 - DNA, 21 bp, Artificial Sequence
  primer
tgttacttggtgacagcaggg

SEQ ID NO: 96392 - DNA, 21 bp, Artificial Sequence
  primer
gccaggcagacatttaaacag

SEQ ID NO: 96393 - DNA, 21 bp, Artificial Sequence
  primer
attctcacccatcttgttccc

SEQ ID NO: 96394 - DNA, 21 bp, Artificial Sequence
  primer
gactgcatctttgctccatcc

SEQ ID NO: 96395 - DNA, 21 bp, Artificial Sequence
  primer
tttccctcagacaatcttccc

SEQ ID NO: 96396 - DNA, 21 bp, Artificial Sequence
  primer
gacctcccttcttatcctccc

SEQ ID NO: 96397 - DNA, 39 bp, Artificial Sequence
  primer
gtaaaacgacggccagtcctctcttggcacaagggtaac

SEQ ID NO: 96398 - DNA, 21 bp, Artificial Sequence
  primer
acagaggtgtcctcatcccag

SEQ ID NO: 96399 - DNA, 21 bp, Artificial Sequence
  primer
aaagccacgcacctactgaag

SEQ ID NO: 96400 - DNA, 21 bp, Artificial Sequence
  primer
ccgttaggcataagggaggtc

SEQ ID NO: 96401 - DNA, 20 bp, Artificial Sequence
  primer
ctgggtccagcactgagaag

SEQ ID NO: 96402 - DNA, 37 bp, Artificial Sequence
  primer
gtaaaacgacggccagtcaaactccgtgtccaacctg

SEQ ID NO: 96403 - DNA, 21 bp, Artificial Sequence
  primer
atattcacagcaaaggcgtcc

SEQ ID NO: 96404 - DNA, 39 bp, Artificial Sequence
  primer
gtaaaacgacggccagtgagtagcaagggaacagcaaag

SEQ ID NO: 96405 - DNA, 20 bp, Artificial Sequence
  primer
gcaactgggtcttgttgctc

SEQ ID NO: 96406 - DNA, 21 bp, Artificial Sequence
  primer
gtttccggcagacatcaagag

SEQ ID NO: 96407 - DNA, 20 bp, Artificial Sequence
  primer
ggagaggaagatgcccaaag

SEQ ID NO: 96408 - DNA, 38 bp, Artificial Sequence
  primer
gtaaaacgacggccagtcttggctaaagaacctctggg

SEQ ID NO: 96409 - DNA, 21 bp, Artificial Sequence
  primer
tccacttgctagaggctttgc

SEQ ID NO: 96410 - DNA, 20 bp, Artificial Sequence
  primer
cttcccacgcttccctctac

SEQ ID NO: 96411 - DNA, 38 bp, Artificial Sequence
  primer
gtaaaacgacggccagtgggtgcttccactcttctagg

SEQ ID NO: 96412 - DNA, 20 bp, Artificial Sequence
  primer
ctagggactttccaggaggc

SEQ ID NO: 96413 - DNA, 21 bp, Artificial Sequence
  primer
taggagagtgtgtgcttgcag

SEQ ID NO: 96414 - DNA, 22 bp, Artificial Sequence
  primer
tggaagttcttctcttcgttgc

SEQ ID NO: 96415 - DNA, 21 bp, Artificial Sequence
  primer
ggaagaggcaggtggtgtaag

SEQ ID NO: 96416 - DNA, 21 bp, Artificial Sequence
  primer
gaataggattggtgtggctgg

SEQ ID NO: 96417 - DNA, 20 bp, Artificial Sequence
  primer
ctgtctctccttgtggcctg

SEQ ID NO: 96418 - DNA, 21 bp, Artificial Sequence
  primer
tggtctgtgtctcctttggtg

SEQ ID NO: 96419 - DNA, 21 bp, Artificial Sequence
  primer
caggaacaggaggatagccag

SEQ ID NO: 96420 - DNA, 21 bp, Artificial Sequence
  primer
tgagcttcctcttgtgtctgg

SEQ ID NO: 96421 - DNA, 38 bp, Artificial Sequence
  primer
gtaaaacgacggccagttgtccatgatgtcgatgaagc

SEQ ID NO: 96422 - DNA, 37 bp, Artificial Sequence
  primer
gtaaaacgacggccagtgtggtttctgagggtggagg

SEQ ID NO: 96423 - DNA, 21 bp, Artificial Sequence
  primer
ggatgttagctggagcagagg

SEQ ID NO: 96424 - DNA, 38 bp, Artificial Sequence
  primer
gtaaaacgacggccagttggacacaggtggactcactc

SEQ ID NO: 96425 - DNA, 20 bp, Artificial Sequence
  primer
ctgctgtctgacttcctggc

SEQ ID NO: 96426 - DNA, 18 bp, Artificial Sequence
  primer
ctgtccctgcccttgctc

SEQ ID NO: 96427 - DNA, 21 bp, Artificial Sequence
  primer
ctcagctcagtctcgtcaccc

SEQ ID NO: 96428 - DNA, 21 bp, Artificial Sequence
  primer
ggaccaaggtcattgcagaag

SEQ ID NO: 96429 - DNA, 21 bp, Artificial Sequence
  primer
gcagacaacaagaagggaagg

SEQ ID NO: 96430 - DNA, 38 bp, Artificial Sequence
  primer
gtaaaacgacggccagttcctagggagagatgctggtc

SEQ ID NO: 96431 - DNA, 21 bp, Artificial Sequence
  primer
ggagggaaggtttctccagac

SEQ ID NO: 96432 - DNA, 20 bp, Artificial Sequence
  primer
tttctaagctccagggcctc

SEQ ID NO: 96433 - DNA, 23 bp, Artificial Sequence
  primer
gggcacatttactcattctctgg

SEQ ID NO: 96434 - DNA, 38 bp, Artificial Sequence
  primer
gtaaaacgacggccagtcagttagcacccttctccacc

SEQ ID NO: 96435 - DNA, 38 bp, Artificial Sequence
  primer
gtaaaacgacggccagttccctgtctgtatgggctagg

SEQ ID NO: 96436 - DNA, 38 bp, Artificial Sequence
  primer
gtaaaacgacggccagtaacttcatctctgtccagggc

SEQ ID NO: 96437 - DNA, 38 bp, Artificial Sequence
  primer
gtaaaacgacggccagtcaagtccacacccatcttctg

SEQ ID NO: 96438 - DNA, 38 bp, Artificial Sequence
  primer
gtaaaacgacggccagtagaggcctggttcttctccac

SEQ ID NO: 96439 - DNA, 20 bp, Artificial Sequence
  primer
ccctcgtagccgtacacctg

SEQ ID NO: 96440 - DNA, 20 bp, Artificial Sequence
  primer
acacaaggacagggaggagg

SEQ ID NO: 96441 - DNA, 20 bp, Artificial Sequence
  primer
cactacctgggctgaagtgc

SEQ ID NO: 96442 - DNA, 38 bp, Artificial Sequence
  primer
gtaaaacgacggccagtggtcacactcagtccctctcc

SEQ ID NO: 96443 - DNA, 21 bp, Artificial Sequence
  primer
agcatcacctgcaactctctg

SEQ ID NO: 96444 - DNA, 21 bp, Artificial Sequence
  primer
cttaatcttcctggccaaagg

SEQ ID NO: 96445 - DNA, 21 bp, Artificial Sequence
  primer
atttctcaatctcccggaacc

SEQ ID NO: 96446 - DNA, 21 bp, Artificial Sequence
  primer
acctcaaagcatttcgctcag

SEQ ID NO: 96447 - DNA, 21 bp, Artificial Sequence
  primer
actgaggagcggtctatgtgg

SEQ ID NO: 96448 - DNA, 19 bp, Artificial Sequence
  primer
cctagaagctgagccggtg

SEQ ID NO: 96449 - DNA, 38 bp, Artificial Sequence
  primer
gtaaaacgacggccagtctccctggttcattgtgagtg

SEQ ID NO: 96450 - DNA, 35 bp, Artificial Sequence
  primer
gtaaaacgacggccagtacctcatgatccacccgc

SEQ ID NO: 96451 - DNA, 38 bp, Artificial Sequence
  primer
gtaaaacgacggccagttctctgctgtgctgaaagacg

SEQ ID NO: 96452 - DNA, 36 bp, Artificial Sequence
  primer
gtaaaacgacggccagtgccagaacgcagacctctc

SEQ ID NO: 96453 - DNA, 21 bp, Artificial Sequence
  primer
cattctcaaagccattccacc

SEQ ID NO: 96454 - DNA, 21 bp, Artificial Sequence
  primer
attaagaggtggcacaatggg

SEQ ID NO: 96455 - DNA, 38 bp, Artificial Sequence
  primer
gtaaaacgacggccagtcttgaagaagaacctccctgg

SEQ ID NO: 96456 - DNA, 21 bp, Artificial Sequence
  primer
gatggaaatagagtcgggtgg

SEQ ID NO: 96457 - DNA, 21 bp, Artificial Sequence
  primer
aaagaaatttgccagggactg

SEQ ID NO: 96458 - DNA, 37 bp, Artificial Sequence
  primer
gtaaaacgacggccagtaaatcaagcctggagcacag

SEQ ID NO: 96459 - DNA, 20 bp, Artificial Sequence
  primer
ttgctttggttcaagatggc

SEQ ID NO: 96460 - DNA, 38 bp, Artificial Sequence
  primer
gtaaaacgacggccagtacttcagcctccctgaagacc

SEQ ID NO: 96461 - DNA, 19 bp, Artificial Sequence
  primer
cagtggctaccggacaagg

SEQ ID NO: 96462 - DNA, 39 bp, Artificial Sequence
  primer
gtaaaacgacggccagtaacactacctcctctgaagggc

SEQ ID NO: 96463 - DNA, 37 bp, Artificial Sequence
  primer
gtaaaacgacggccagtgcaagaaatctcatgcaggc

SEQ ID NO: 96464 - DNA, 38 bp, Artificial Sequence
  primer
gtaaaacgacggccagtctccactgaggcaccattctc

SEQ ID NO: 96465 - DNA, 21 bp, Artificial Sequence
  primer
agccaaggaaatcaggtatgg

SEQ ID NO: 96466 - DNA, 39 bp, Artificial Sequence
  primer
gtaaaacgacggccagtggataggagcttctgctctcag

SEQ ID NO: 96467 - DNA, 38 bp, Artificial Sequence
  primer
gtaaaacgacggccagtcagccatagtgctgagactgg

SEQ ID NO: 96468 - DNA, 21 bp, Artificial Sequence
  primer
ggactagcccacggtagacag

SEQ ID NO: 96469 - DNA, 21 bp, Artificial Sequence
  primer
ttcagcctcaaagagggtagg

SEQ ID NO: 96470 - DNA, 38 bp, Artificial Sequence
  primer
gtaaaacgacggccagtctgtggaggaaacatgctgtg

SEQ ID NO: 96471 - DNA, 38 bp, Artificial Sequence
  primer
gtaaaacgacggccagttgctaggataggaacgtgtgc

SEQ ID NO: 96472 - DNA, 21 bp, Artificial Sequence
  primer
tgttggtggcctcttagttcc

SEQ ID NO: 96473 - DNA, 38 bp, Artificial Sequence
  primer
gtaaaacgacggccagtcagcaatggaccagagaagtg

SEQ ID NO: 96474 - DNA, 21 bp, Artificial Sequence
  primer
tcagaatttgaacccagaccc

SEQ ID NO: 96475 - DNA, 21 bp, Artificial Sequence
  primer
agactcatagcctgtctccgc

SEQ ID NO: 96476 - DNA, 17 bp, Artificial Sequence
  primer
cactcccaccctgctcc

SEQ ID NO: 96477 - DNA, 21 bp, Artificial Sequence
  primer
aatttgcacctcgtggacttc

SEQ ID NO: 96478 - DNA, 38 bp, Artificial Sequence
  primer
gtaaaacgacggccagtggaggaggtgactgtctgtcc

SEQ ID NO: 96479 - DNA, 38 bp, Artificial Sequence
  primer
gtaaaacgacggccagtgaaatcgcgaccttctcagac

SEQ ID NO: 96480 - DNA, 38 bp, Artificial Sequence
  primer
gtaaaacgacggccagtgtagagttagggcaggcatgg

SEQ ID NO: 96481 - DNA, 20 bp, Artificial Sequence
  primer
tctgctgcatgctgtgtgtc

SEQ ID NO: 96482 - DNA, 38 bp, Artificial Sequence
  primer
gtaaaacgacggccagtcctcctttgctgagtctctcc

SEQ ID NO: 96483 - DNA, 21 bp, Artificial Sequence
  primer
tacacgctatctgccaagtgc

SEQ ID NO: 96484 - DNA, 21 bp, Artificial Sequence
  primer
ggttacctgcctctacccttg

SEQ ID NO: 96485 - DNA, 21 bp, Artificial Sequence
  primer
gggtatttctggacccttctg

SEQ ID NO: 96486 - DNA, 36 bp, Artificial Sequence
  primer
gtaaaacgacggccagtctgggtgaccctctggatg

SEQ ID NO: 96487 - DNA, 38 bp, Artificial Sequence
  primer
gtaaaacgacggccagtgaggactgtcacccacctctg

SEQ ID NO: 96488 - DNA, 20 bp, Artificial Sequence
  primer
gctgagagatgagggctgag

SEQ ID NO: 96489 - DNA, 37 bp, Artificial Sequence
  primer
gtaaaacgacggccagtctcagcccaggctaggaaac

SEQ ID NO: 96490 - DNA, 22 bp, Artificial Sequence
  primer
tggcttctgtgtgtgttaccag

SEQ ID NO: 96491 - DNA, 38 bp, Artificial Sequence
  primer
gtaaaacgacggccagtgggcctcctaacagcactaag

SEQ ID NO: 96492 - DNA, 21 bp, Artificial Sequence
  primer
attaccacctttgccaccatc

SEQ ID NO: 96493 - DNA, 36 bp, Artificial Sequence
  primer
gtaaaacgacggccagttggctgatgtgagaggtgc

SEQ ID NO: 96494 - DNA, 38 bp, Artificial Sequence
  primer
gtaaaacgacggccagtgacttgagtccacctcttggg

SEQ ID NO: 96495 - DNA, 21 bp, Artificial Sequence
  primer
atgtggtattgggatggaagc

SEQ ID NO: 96496 - DNA, 39 bp, Artificial Sequence
  primer
gtaaaacgacggccagtgagctttgatggtcctttgatg

SEQ ID NO: 96497 - DNA, 38 bp, Artificial Sequence
  primer
gtaaaacgacggccagtgtgctaggagaagccagttcc

SEQ ID NO: 96498 - DNA, 39 bp, Artificial Sequence
  primer
gtaaaacgacggccagtggagctctatagcatcccaacc

SEQ ID NO: 96499 - DNA, 22 bp, Artificial Sequence
  primer
ggaactcctgctgactctgttg

SEQ ID NO: 96500 - DNA, 38 bp, Artificial Sequence
  primer
gtaaaacgacggccagttagctcactgcagcctcaaac

SEQ ID NO: 96501 - DNA, 21 bp, Artificial Sequence
  primer
acatgaactggctaagggctg

SEQ ID NO: 96502 - DNA, 38 bp, Artificial Sequence
  primer
gtaaaacgacggccagtcctaatacagcagctcctccc

SEQ ID NO: 96503 - DNA, 37 bp, Artificial Sequence
  primer
gtaaaacgacggccagtatcccaaggctgatgaggtc

SEQ ID NO: 96504 - DNA, 21 bp, Artificial Sequence
  primer
tgcagggctaacatttctcag

SEQ ID NO: 96505 - DNA, 38 bp, Artificial Sequence
  primer
gtaaaacgacggccagtagctcgtgggattccttactc

SEQ ID NO: 96506 - DNA, 38 bp, Artificial Sequence
  primer
gtaaaacgacggccagtgggtgggtgaaagattcattg

SEQ ID NO: 96507 - DNA, 22 bp, Artificial Sequence
  primer
ttcctgagtgtatgccatgttg

SEQ ID NO: 96508 - DNA, 20 bp, Artificial Sequence
  primer
aagagatcctcctgccttgg

SEQ ID NO: 96509 - DNA, 24 bp, Artificial Sequence
  primer
gagcaaagagagttaaaggtgctg

SEQ ID NO: 96510 - DNA, 38 bp, Artificial Sequence
  primer
gtaaaacgacggccagtacatggtgacaagctacgctc

SEQ ID NO: 96511 - DNA, 38 bp, Artificial Sequence
  primer
gtaaaacgacggccagttggaatcagcctcagtctttg

SEQ ID NO: 96512 - DNA, 22 bp, Artificial Sequence
  primer
gcaaagtggtgaatgtatgtgg

SEQ ID NO: 96513 - DNA, 20 bp, Artificial Sequence
  primer
aggctgtatgccttaatggg

SEQ ID NO: 96514 - DNA, 21 bp, Artificial Sequence
  primer
aagtggccaaggagtcgtatg

SEQ ID NO: 96515 - DNA, 21 bp, Artificial Sequence
  primer
gaagccttcacggagtagtgg

SEQ ID NO: 96516 - DNA, 20 bp, Artificial Sequence
  primer
gcaacttcgcagtggctatc

SEQ ID NO: 96517 - DNA, 21 bp, Artificial Sequence
  primer
ccctcaccctaactgacaatc

SEQ ID NO: 96518 - DNA, 24 bp, Artificial Sequence
  primer
gcattcaggagatagaagctgaaa

SEQ ID NO: 96519 - DNA, 27 bp, Artificial Sequence
  primer
cccttataatccatattcctgaatcaa

SEQ ID NO: 96520 - DNA, 41 bp, Artificial Sequence
  primer
gtaaaacgacggccagttcggtttgtctagtacattctccc

SEQ ID NO: 96521 - DNA, 23 bp, Artificial Sequence
  primer
gaacaaaggaacatcagagcgta

SEQ ID NO: 96522 - DNA, 43 bp, Artificial Sequence
  primer
gtaaaacgacggccagttttcacagcttagaaatttggtattc

SEQ ID NO: 96523 - DNA, 21 bp, Artificial Sequence
  primer
gctggaagaatttcaaaggca

SEQ ID NO: 96524 - DNA, 21 bp, Artificial Sequence
  primer
tccataatcagcattcctggg

SEQ ID NO: 96525 - DNA, 23 bp, Artificial Sequence
  primer
tggagaagataataggcaagtcg

SEQ ID NO: 96526 - DNA, 21 bp, Artificial Sequence
  primer
ttcgaattaaggttccaaggc

SEQ ID NO: 96527 - DNA, 38 bp, Artificial Sequence
  primer
gtaaaacgacggccagtaaccatctgtctccagcaagg

SEQ ID NO: 96528 - DNA, 41 bp, Artificial Sequence
  primer
gtaaaacgacggccagttggcttgaacaatttacagctaag

SEQ ID NO: 96529 - DNA, 37 bp, Artificial Sequence
  primer
gtaaaacgacggccagttacaccatccttgatgccag

SEQ ID NO: 96530 - DNA, 41 bp, Artificial Sequence
  primer
gtaaaacgacggccagtcaaatattattgatgcaggcagtg

SEQ ID NO: 96531 - DNA, 42 bp, Artificial Sequence
  primer
gtaaaacgacggccagtaataagccactcaatagttgctgtc

SEQ ID NO: 96532 - DNA, 38 bp, Artificial Sequence
  primer
gtaaaacgacggccagtccaggaactccacacaagtcc

SEQ ID NO: 96533 - DNA, 39 bp, Artificial Sequence
  primer
gtaaaacgacggccagtccacagaaggtacaagcaaagg

SEQ ID NO: 96534 - DNA, 24 bp, Artificial Sequence
  primer
tcaaggtacctaacagaaacaggg

SEQ ID NO: 96535 - DNA, 38 bp, Artificial Sequence
  primer
gtaaaacgacggccagttggatgtgtttcttgcctgag

SEQ ID NO: 96536 - DNA, 24 bp, Artificial Sequence
  primer
ccatgccattatactgataagctg

SEQ ID NO: 96537 - DNA, 38 bp, Artificial Sequence
  primer
gtaaaacgacggccagtggaatgctcttgcctgtgtag

SEQ ID NO: 96538 - DNA, 39 bp, Artificial Sequence
  primer
gtaaaacgacggccagtacagagtagagttcgcccagtc

SEQ ID NO: 96539 - DNA, 22 bp, Artificial Sequence
  primer
gatgactggtgctaaacttgcc

SEQ ID NO: 96540 - DNA, 24 bp, Artificial Sequence
  primer
tttgcaatatcacaccttcagaac

SEQ ID NO: 96541 - DNA, 44 bp, Artificial Sequence
  primer
gtaaaacgacggccagtttataactcttattctgaaagaggcca

SEQ ID NO: 96542 - DNA, 25 bp, Artificial Sequence
  primer
tgacaggaaacaaatagaaacatga

SEQ ID NO: 96543 - DNA, 41 bp, Artificial Sequence
  primer
gtaaaacgacggccagttgaaatgtgaatattaaactcggc

SEQ ID NO: 96544 - DNA, 42 bp, Artificial Sequence
  primer
gtaaaacgacggccagttcatttatctgaaggatagacagca

SEQ ID NO: 96545 - DNA, 22 bp, Artificial Sequence
  primer
tttgttctctggaagtgtttgg

SEQ ID NO: 96546 - DNA, 26 bp, Artificial Sequence
  primer
ttgctaaggatacaatcataccactc

SEQ ID NO: 96547 - DNA, 23 bp, Artificial Sequence
  primer
gaagtattgacaacagcctgcac

SEQ ID NO: 96548 - DNA, 20 bp, Artificial Sequence
  primer
ttccgagtcatgattcctgc

SEQ ID NO: 96549 - DNA, 37 bp, Artificial Sequence
  primer
gtaaaacgacggccagttcagtgcaccatgctcagac

SEQ ID NO: 96550 - DNA, 21 bp, Artificial Sequence
  primer
atatggaggtgcacttgggtc

SEQ ID NO: 96551 - DNA, 38 bp, Artificial Sequence
  primer
gtaaaacgacggccagtgagaatgcaggccactcaatc

SEQ ID NO: 96552 - DNA, 37 bp, Artificial Sequence
  primer
gtaaaacgacggccagtgcataaccttggaacgggac

SEQ ID NO: 96553 - DNA, 20 bp, Artificial Sequence
  primer
tctgactctgaggtcccgag

SEQ ID NO: 96554 - DNA, 20 bp, Artificial Sequence
  primer
acccttccgtctaggctcag

SEQ ID NO: 96555 - DNA, 21 bp, Artificial Sequence
  primer
tcagtcccttctctttgcagg

SEQ ID NO: 96556 - DNA, 38 bp, Artificial Sequence
  primer
gtaaaacgacggccagtgaacagtcccacagagccaac

SEQ ID NO: 96557 - DNA, 21 bp, Artificial Sequence
  primer
gtcaccaaagagaggctgacc

SEQ ID NO: 96558 - DNA, 19 bp, Artificial Sequence
  primer
ggatggagactgcagagcc

SEQ ID NO: 96559 - DNA, 21 bp, Artificial Sequence
  primer
catgcccagtgacactcagtc

SEQ ID NO: 96560 - DNA, 21 bp, Artificial Sequence
  primer
ctgaagctcgctgaaacactg

SEQ ID NO: 96561 - DNA, 20 bp, Artificial Sequence
  primer
ctgggcaacacagagagacc

SEQ ID NO: 96562 - DNA, 21 bp, Artificial Sequence
  primer
aaggagacctccaccagacag

SEQ ID NO: 96563 - DNA, 21 bp, Artificial Sequence
  primer
aagtccctccctgctctcttc

SEQ ID NO: 96564 - DNA, 38 bp, Artificial Sequence
  primer
gtaaaacgacggccagtggaaatggaggtgtgtgagag

SEQ ID NO: 96565 - DNA, 39 bp, Artificial Sequence
  primer
gtaaaacgacggccagtaaatatcaccctgaattgcctg

SEQ ID NO: 96566 - DNA, 23 bp, Artificial Sequence
  primer
atgaattccatgcataccctaag

SEQ ID NO: 96567 - DNA, 21 bp, Artificial Sequence
  primer
aacagttgcatcctttcccac

SEQ ID NO: 96568 - DNA, 21 bp, Artificial Sequence
  primer
ctcatccttccttcatcctgg

SEQ ID NO: 96569 - DNA, 38 bp, Artificial Sequence
  primer
gtaaaacgacggccagtctgagtccaaatagcccaagg

SEQ ID NO: 96570 - DNA, 39 bp, Artificial Sequence
  primer
gtaaaacgacggccagtttccaccaacttctctcctctg

SEQ ID NO: 96571 - DNA, 21 bp, Artificial Sequence
  primer
tgagtgagcctcatccctagc

SEQ ID NO: 96572 - DNA, 21 bp, Artificial Sequence
  primer
aagggtttcatctgaacaggg

SEQ ID NO: 96573 - DNA, 21 bp, Artificial Sequence
  primer
aaacgtggactccaggaaaga

SEQ ID NO: 96574 - DNA, 21 bp, Artificial Sequence
  primer
tcctggctgaggaactcaaac

SEQ ID NO: 96575 - DNA, 21 bp, Artificial Sequence
  primer
ggtagctctggagaaacgagc

SEQ ID NO: 96576 - DNA, 21 bp, Artificial Sequence
  primer
cagtatcactcagggtggctg

SEQ ID NO: 96577 - DNA, 21 bp, Artificial Sequence
  primer
ctctttaatccgcctcgaatg

SEQ ID NO: 96578 - DNA, 21 bp, Artificial Sequence
  primer
tgccagggttatgtaagaggc

SEQ ID NO: 96579 - DNA, 21 bp, Artificial Sequence
  primer
tcctctcttggcaatgggtag

SEQ ID NO: 96580 - DNA, 36 bp, Artificial Sequence
  primer
gtaaaacgacggccagtccctttaacccaacatggc

SEQ ID NO: 96581 - DNA, 21 bp, Artificial Sequence
  primer
atgcactggaaactaggcacc

SEQ ID NO: 96582 - DNA, 21 bp, Artificial Sequence
  primer
gacttctcaattgctacgggc

SEQ ID NO: 96583 - DNA, 21 bp, Artificial Sequence
  primer
agaatgggcaaggtatggatg

SEQ ID NO: 96584 - DNA, 37 bp, Artificial Sequence
  primer
gtaaaacgacggccagttcaggagggtcctccagttc

SEQ ID NO: 96585 - DNA, 20 bp, Artificial Sequence
  primer
cattaaccacagtggccagg

SEQ ID NO: 96586 - DNA, 41 bp, Artificial Sequence
  primer
gtaaaacgacggccagtctctgtagaaagatggaggaggac

SEQ ID NO: 96587 - DNA, 38 bp, Artificial Sequence
  primer
gtaaaacgacggccagtgctaaggttggagtgagagcc

SEQ ID NO: 96588 - DNA, 38 bp, Artificial Sequence
  primer
gtaaaacgacggccagtcttgtgcttcagctccttgag

SEQ ID NO: 96589 - DNA, 21 bp, Artificial Sequence
  primer
agtcagcttcttgtcgctgtg

SEQ ID NO: 96590 - DNA, 21 bp, Artificial Sequence
  primer
caatctcaggatcgaggtcac

SEQ ID NO: 96591 - DNA, 21 bp, Artificial Sequence
  primer
ctgttcagggcccaaacttag

SEQ ID NO: 96592 - DNA, 38 bp, Artificial Sequence
  primer
gtaaaacgacggccagtaactccatcctcccagtcctc

SEQ ID NO: 96593 - DNA, 21 bp, Artificial Sequence
  primer
gtcgatggacgtggagtacag

SEQ ID NO: 96594 - DNA, 37 bp, Artificial Sequence
  primer
gtaaaacgacggccagtctgaccttccagctccagtc

SEQ ID NO: 96595 - DNA, 20 bp, Artificial Sequence
  primer
acaatcagggtgtccagcac

SEQ ID NO: 96596 - DNA, 38 bp, Artificial Sequence
  primer
gtaaaacgacggccagtgtacatcggatagggctgtgg

SEQ ID NO: 96597 - DNA, 21 bp, Artificial Sequence
  primer
tcttctgctgagatacgctgg

SEQ ID NO: 96598 - DNA, 21 bp, Artificial Sequence
  primer
caaagggagtgagaaattcgg

SEQ ID NO: 96599 - DNA, 37 bp, Artificial Sequence
  primer
gtaaaacgacggccagtacaggtgcttcaggcggtag

SEQ ID NO: 96600 - DNA, 38 bp, Artificial Sequence
  primer
gtaaaacgacggccagttcggaggagataacatccctg

SEQ ID NO: 96601 - DNA, 38 bp, Artificial Sequence
  primer
gtaaaacgacggccagtaatgcattgaatccttgagcc

SEQ ID NO: 96602 - DNA, 37 bp, Artificial Sequence
  primer
gtaaaacgacggccagtgggagagactgtgggaaagg

SEQ ID NO: 96603 - DNA, 21 bp, Artificial Sequence
  primer
gtcaccttcttgctgcctttc

SEQ ID NO: 96604 - DNA, 21 bp, Artificial Sequence
  primer
gttgcccatgtaggagtaggc

SEQ ID NO: 96605 - DNA, 38 bp, Artificial Sequence
  primer
gtaaaacgacggccagtcctagcggtccaggttcatag

SEQ ID NO: 96606 - DNA, 37 bp, Artificial Sequence
  primer
gtaaaacgacggccagtgtgtcccggtctccactttc

SEQ ID NO: 96607 - DNA, 39 bp, Artificial Sequence
  primer
gtaaaacgacggccagtcactgttaaccttccaagccag

SEQ ID NO: 96608 - DNA, 38 bp, Artificial Sequence
  primer
gtaaaacgacggccagtttcacccaagggaactctctc

SEQ ID NO: 96609 - DNA, 21 bp, Artificial Sequence
  primer
cactcagaacctgacaccacg

SEQ ID NO: 96610 - DNA, 37 bp, Artificial Sequence
  primer
gtaaaacgacggccagttcagacactgggaatccagc

SEQ ID NO: 96611 - DNA, 21 bp, Artificial Sequence
  primer
tggatgacaagagtgagaccc

SEQ ID NO: 96612 - DNA, 21 bp, Artificial Sequence
  primer
tttgtgggcaataaaccaatg

SEQ ID NO: 96613 - DNA, 37 bp, Artificial Sequence
  primer
gtaaaacgacggccagtcctactgggtccagcctttg

SEQ ID NO: 96614 - DNA, 38 bp, Artificial Sequence
  primer
gtaaaacgacggccagtgctaggttcttggcaacaagg

SEQ ID NO: 96615 - DNA, 19 bp, Artificial Sequence
  primer
tgaggccacaaggtgatcc

SEQ ID NO: 96616 - DNA, 21 bp, Artificial Sequence
  primer
cggaagtgaatcgtaagagcc

SEQ ID NO: 96617 - DNA, 38 bp, Artificial Sequence
  primer
gtaaaacgacggccagtacttgagcccagcagtttgag

SEQ ID NO: 96618 - DNA, 38 bp, Artificial Sequence
  primer
gtaaaacgacggccagtgcccttccattgtactggttg

SEQ ID NO: 96619 - DNA, 38 bp, Artificial Sequence
  primer
gtaaaacgacggccagttccaccttcatgacctgtttc

SEQ ID NO: 96620 - DNA, 21 bp, Artificial Sequence
  primer
atgctactggcaattgtggtg

SEQ ID NO: 96621 - DNA, 39 bp, Artificial Sequence
  primer
gtaaaacgacggccagttgaaagctcaagatgctcacag

SEQ ID NO: 96622 - DNA, 21 bp, Artificial Sequence
  primer
agggctgactgcatttgtacg

SEQ ID NO: 96623 - DNA, 27 bp, Artificial Sequence
  primer
aatcaattcagattaaatgaaagcatc

SEQ ID NO: 96624 - DNA, 20 bp, Artificial Sequence
  primer
gcttgtgaacattcacgctg

SEQ ID NO: 96625 - DNA, 21 bp, Artificial Sequence
  primer
gggtagctgttgtttctgctg

SEQ ID NO: 96626 - DNA, 40 bp, Artificial Sequence
  primer
gtaaaacgacggccagttgtgttggacttgttcccattag

SEQ ID NO: 96627 - DNA, 21 bp, Artificial Sequence
  primer
tgtgtgtgaaccatgaggacc

SEQ ID NO: 96628 - DNA, 39 bp, Artificial Sequence
  primer
gtaaaacgacggccagtaatgggaatgcctacttcacag

SEQ ID NO: 96629 - DNA, 40 bp, Artificial Sequence
  primer
gtaaaacgacggccagtccggttgactagaggatcatttc

SEQ ID NO: 96630 - DNA, 21 bp, Artificial Sequence
  primer
cagctgcaaagtcctcacctc

SEQ ID NO: 96631 - DNA, 21 bp, Artificial Sequence
  primer
accctacaaccagacacagcc

SEQ ID NO: 96632 - DNA, 18 bp, Artificial Sequence
  primer
gtggctgaagcccaaatg

SEQ ID NO: 96633 - DNA, 38 bp, Artificial Sequence
  primer
gtaaaacgacggccagtccaacaagaaggcatttgagg

SEQ ID NO: 96634 - DNA, 21 bp, Artificial Sequence
  primer
tcagcactgattgaaagggtg

SEQ ID NO: 96635 - DNA, 21 bp, Artificial Sequence
  primer
aaggatctccaaacgaaaccc

SEQ ID NO: 96636 - DNA, 37 bp, Artificial Sequence
  primer
gtaaaacgacggccagtacacacaacaaggcagaggg

SEQ ID NO: 96637 - DNA, 20 bp, Artificial Sequence
  primer
ctcactgcagcctcaacgtc

SEQ ID NO: 96638 - DNA, 38 bp, Artificial Sequence
  primer
gtaaaacgacggccagtctggcacatgaaaggtacagg

SEQ ID NO: 96639 - DNA, 21 bp, Artificial Sequence
  primer
attccttccaagccatttcag

SEQ ID NO: 96640 - DNA, 38 bp, Artificial Sequence
  primer
gtaaaacgacggccagtgatcggtttctcttcccaagc

SEQ ID NO: 96641 - DNA, 38 bp, Artificial Sequence
  primer
gtaaaacgacggccagtgggagacactggacattcttg

SEQ ID NO: 96642 - DNA, 40 bp, Artificial Sequence
  primer
gtaaaacgacggccagtaaggttgacatttcaagcagttc

SEQ ID NO: 96643 - DNA, 19 bp, Artificial Sequence
  primer
ctgagagggctgctatggg

SEQ ID NO: 96644 - DNA, 21 bp, Artificial Sequence
  primer
tagccttccagctcagtttcc

SEQ ID NO: 96645 - DNA, 38 bp, Artificial Sequence
  primer
gtaaaacgacggccagtgctcccacctagtggcaatac

SEQ ID NO: 96646 - DNA, 37 bp, Artificial Sequence
  primer
gtaaaacgacggccagtagttagctcctcctgtgccc

SEQ ID NO: 96647 - DNA, 38 bp, Artificial Sequence
  primer
gtaaaacgacggccagtacaaacagaatgggaaggagc

SEQ ID NO: 96648 - DNA, 35 bp, Artificial Sequence
  primer
gtaaaacgacggccagtagcattggccctaatggg

SEQ ID NO: 96649 - DNA, 21 bp, Artificial Sequence
  primer
tggcagacttctccaagatgg

SEQ ID NO: 96650 - DNA, 38 bp, Artificial Sequence
  primer
gtaaaacgacggccagtcatcacagagccacaggattc

SEQ ID NO: 96651 - DNA, 37 bp, Artificial Sequence
  primer
gtaaaacgacggccagtgcctgccactgtgcactaag

SEQ ID NO: 96652 - DNA, 21 bp, Artificial Sequence
  primer
acacccatccactctacccac

SEQ ID NO: 96653 - DNA, 19 bp, Artificial Sequence
  primer
gggcaaaggcatcattcag

SEQ ID NO: 96654 - DNA, 38 bp, Artificial Sequence
  primer
gtaaaacgacggccagtataccctcctgagttgggacc

SEQ ID NO: 96655 - DNA, 37 bp, Artificial Sequence
  primer
gtaaaacgacggccagtctaatgaggacaactgcgcc

SEQ ID NO: 96656 - DNA, 22 bp, Artificial Sequence
  primer
ggtgccatctcctccctaatac

SEQ ID NO: 96657 - DNA, 38 bp, Artificial Sequence
  primer
gtaaaacgacggccagtgctccaaagtgggtaatccag

SEQ ID NO: 96658 - DNA, 38 bp, Artificial Sequence
  primer
gtaaaacgacggccagtcactgctggcagaaacaactc

SEQ ID NO: 96659 - DNA, 22 bp, Artificial Sequence
  primer
tgacaacaactctcaagccaac

SEQ ID NO: 96660 - DNA, 20 bp, Artificial Sequence
  primer
catttcaacgtcccaaccac

SEQ ID NO: 96661 - DNA, 38 bp, Artificial Sequence
  primer
gtaaaacgacggccagtcatctcgactcaggctttcag

SEQ ID NO: 96662 - DNA, 21 bp, Artificial Sequence
  primer
cagccctggtggctaaataac

SEQ ID NO: 96663 - DNA, 38 bp, Artificial Sequence
  primer
gtaaaacgacggccagtctggagcctcagagagaccac

SEQ ID NO: 96664 - DNA, 21 bp, Artificial Sequence
  primer
aagaggtgagtggtggaggac

SEQ ID NO: 96665 - DNA, 21 bp, Artificial Sequence
  primer
aagaggtgagtggtggaggac

SEQ ID NO: 96666 - DNA, 38 bp, Artificial Sequence
  primer
gtaaaacgacggccagtagtaagacactggcccaaagg

SEQ ID NO: 96667 - DNA, 21 bp, Artificial Sequence
  primer
gcacacaactgactctcctgc

SEQ ID NO: 96668 - DNA, 38 bp, Artificial Sequence
  primer
gtaaaacgacggccagtttctctctgggtcttgggttg

SEQ ID NO: 96669 - DNA, 22 bp, Artificial Sequence
  primer
tgccgttacagacacaaatgac

SEQ ID NO: 96670 - DNA, 38 bp, Artificial Sequence
  primer
gtaaaacgacggccagtaaatgtgcaagaagcctcatc

SEQ ID NO: 96671 - DNA, 21 bp, Artificial Sequence
  primer
taatacgtgaggctcctgctg

SEQ ID NO: 96672 - DNA, 35 bp, Artificial Sequence
  primer
gtaaaacgacggccagtgatggcaatggccaggag

SEQ ID NO: 96673 - DNA, 21 bp, Artificial Sequence
  primer
ataccaagtgggcagaagcag

SEQ ID NO: 96674 - DNA, 21 bp, Artificial Sequence
  primer
ctttccatcttccagtcagcc

SEQ ID NO: 96675 - DNA, 20 bp, Artificial Sequence
  primer
ctttctgggcctgaggattc

SEQ ID NO: 96676 - DNA, 41 bp, Artificial Sequence
  primer
gtaaaacgacggccagttttcataaggaaagaaagccattg

SEQ ID NO: 96677 - DNA, 21 bp, Artificial Sequence
  primer
atccaccaactagtcatgggc

SEQ ID NO: 96678 - DNA, 21 bp, Artificial Sequence
  primer
atgatagaaatgccatgctgc

SEQ ID NO: 96679 - DNA, 38 bp, Artificial Sequence
  primer
gtaaaacgacggccagtccatgtctccactcaccacac

SEQ ID NO: 96680 - DNA, 39 bp, Artificial Sequence
  primer
gtaaaacgacggccagtaactgatatttgtgcccaccac

SEQ ID NO: 96681 - DNA, 38 bp, Artificial Sequence
  primer
gtaaaacgacggccagtcagatagcaatcctccacagc

SEQ ID NO: 96682 - DNA, 21 bp, Artificial Sequence
  primer
aggatgtaaagaatgggcagc

SEQ ID NO: 96683 - DNA, 20 bp, Artificial Sequence
  primer
cgtttgggaacacaaagcac

SEQ ID NO: 96684 - DNA, 21 bp, Artificial Sequence
  primer
gtggtggcacatgtttacagc

SEQ ID NO: 96685 - DNA, 41 bp, Artificial Sequence
  primer
gtaaaacgacggccagttttaagcttctacaaggctcatcc

SEQ ID NO: 96686 - DNA, 21 bp, Artificial Sequence
  primer
aggcagaaatgccaatgaaat

SEQ ID NO: 96687 - DNA, 21 bp, Artificial Sequence
  primer
tacagcaccaactgctggaac

SEQ ID NO: 96688 - DNA, 22 bp, Artificial Sequence
  primer
gccaagatagttcagagaagcc

SEQ ID NO: 96689 - DNA, 18 bp, Artificial Sequence
  primer
actacaggcacccgccac

SEQ ID NO: 96690 - DNA, 38 bp, Artificial Sequence
  primer
gtaaaacgacggccagtcctgaggtcaggattactggg

SEQ ID NO: 96691 - DNA, 23 bp, Artificial Sequence
  primer
ctctcctgtatctctgtgtgcat

SEQ ID NO: 96692 - DNA, 21 bp, Artificial Sequence
  primer
cagtcgctagccatacacgag

SEQ ID NO: 96693 - DNA, 39 bp, Artificial Sequence
  primer
gtaaaacgacggccagttgggtcagatcttccaaataac

SEQ ID NO: 96694 - DNA, 21 bp, Artificial Sequence
  primer
gatccctcgtacaccacttcc

SEQ ID NO: 96695 - DNA, 47 bp, Artificial Sequence
  primer
gtaaaacgacggccagtagagtttatatagacagaactacatgaccc

SEQ ID NO: 96696 - DNA, 38 bp, Artificial Sequence
  primer
gtaaaacgacggccagtctctagccttcgtcatgccac

SEQ ID NO: 96697 - DNA, 38 bp, Artificial Sequence
  primer
gtaaaacgacggccagttatgtcagagaagcaggaggc

SEQ ID NO: 96698 - DNA, 40 bp, Artificial Sequence
  primer
gtaaaacgacggccagttggcttcgatcatatggaactac

SEQ ID NO: 96699 - DNA, 37 bp, Artificial Sequence
  primer
gtaaaacgacggccagtactcaagtgatccagctgcc

SEQ ID NO: 96700 - DNA, 39 bp, Artificial Sequence
  primer
gtaaaacgacggccagtcggatctttgataaatgcaagt

SEQ ID NO: 96701 - DNA, 26 bp, Artificial Sequence
  primer
acttctcactaatgtctagcttccaa

SEQ ID NO: 96702 - DNA, 24 bp, Artificial Sequence
  primer
caaaccatgatatgagtctggaag

SEQ ID NO: 96703 - DNA, 40 bp, Artificial Sequence
  primer
gtaaaacgacggccagtgagcaacttaagagctgacaagc

SEQ ID NO: 96704 - DNA, 21 bp, Artificial Sequence
  primer
gtggccagttccattagtgtg

SEQ ID NO: 96705 - DNA, 22 bp, Artificial Sequence
  primer
cccttgctaccataccactgtc

SEQ ID NO: 96706 - DNA, 19 bp, Artificial Sequence
  primer
catggcccataccaggttc

SEQ ID NO: 96707 - DNA, 21 bp, Artificial Sequence
  primer
cgacttctctaccaactcggg

SEQ ID NO: 96708 - DNA, 20 bp, Artificial Sequence
  primer
gagactcccagaagcagcag

SEQ ID NO: 96709 - DNA, 22 bp, Artificial Sequence
  primer
ccatgggtccatctgagttaag

SEQ ID NO: 96710 - DNA, 39 bp, Artificial Sequence
  primer
gtaaaacgacggccagttgggtcctttagtgacatccac

SEQ ID NO: 96711 - DNA, 19 bp, Artificial Sequence
  primer
caagaagccctggcagttg

SEQ ID NO: 96712 - DNA, 38 bp, Artificial Sequence
  primer
gtaaaacgacggccagtcgctccttccattctactccc

SEQ ID NO: 96713 - DNA, 21 bp, Artificial Sequence
  primer
ctcctggtctctcagccaatg

SEQ ID NO: 96714 - DNA, 22 bp, Artificial Sequence
  primer
aatagccaggtatggtggtgtg

SEQ ID NO: 96715 - DNA, 38 bp, Artificial Sequence
  primer
gtaaaacgacggccagtatcaagggaagcttggtgatg

SEQ ID NO: 96716 - DNA, 21 bp, Artificial Sequence
  primer
tggcacatgtttgcctatgta

SEQ ID NO: 96717 - DNA, 23 bp, Artificial Sequence
  primer
tgacagtttcagggacaataagg

SEQ ID NO: 96718 - DNA, 38 bp, Artificial Sequence
  primer
gtaaaacgacggccagtgactggcaaattcatgaagcc

SEQ ID NO: 96719 - DNA, 21 bp, Artificial Sequence
  primer
taagggcatagctgggaaatg

SEQ ID NO: 96720 - DNA, 21 bp, Artificial Sequence
  primer
tccatggagtctagaggtggg

SEQ ID NO: 96721 - DNA, 22 bp, Artificial Sequence
  primer
gatgtgatgatactgaggctgc

SEQ ID NO: 96722 - DNA, 38 bp, Artificial Sequence
  primer
gtaaaacgacggccagttcgaaagtctcgccttctctc

SEQ ID NO: 96723 - DNA, 22 bp, Artificial Sequence
  primer
tgtgtgaaggtaggcaacacag

SEQ ID NO: 96724 - DNA, 44 bp, Artificial Sequence
  primer
gtaaaacgacggccagtaattggtaagtgtatttcagaatcacc

SEQ ID NO: 96725 - DNA, 38 bp, Artificial Sequence
  primer
gtaaaacgacggccagtaagcctaaagctggtcctgtc

SEQ ID NO: 96726 - DNA, 21 bp, Artificial Sequence
  primer
agaaacatggcctggaatcac

SEQ ID NO: 96727 - DNA, 38 bp, Artificial Sequence
  primer
gtaaaacgacggccagtatgtcgctttcctgttcattg

SEQ ID NO: 96728 - DNA, 21 bp, Artificial Sequence
  primer
gctatgatcacatggctgcac

SEQ ID NO: 96729 - DNA, 36 bp, Artificial Sequence
  primer
gtaaaacgacggccagtcacccggccttacctagtc

SEQ ID NO: 96730 - DNA, 21 bp, Artificial Sequence
  primer
ccaggcttatgaagatttggg

SEQ ID NO: 96731 - DNA, 42 bp, Artificial Sequence
  primer
gtaaaacgacggccagtaaatggtagaaatcagggaggtaag

SEQ ID NO: 96732 - DNA, 38 bp, Artificial Sequence
  primer
gtaaaacgacggccagttgccttaaagggcattaggtg

SEQ ID NO: 96733 - DNA, 21 bp, Artificial Sequence
  primer
cagcagcctctaaatgagcag

SEQ ID NO: 96734 - DNA, 18 bp, Artificial Sequence
  primer
caggtgtgagccactgcc

SEQ ID NO: 96735 - DNA, 37 bp, Artificial Sequence
  primer
gtaaaacgacggccagtctggagctgaaagccacaac

SEQ ID NO: 96736 - DNA, 37 bp, Artificial Sequence
  primer
gtaaaacgacggccagtgttggcctcccagtttcttg

SEQ ID NO: 96737 - DNA, 23 bp, Artificial Sequence
  primer
tctttgggactcctaacacagac

SEQ ID NO: 96738 - DNA, 43 bp, Artificial Sequence
  primer
gtaaaacgacggccagttcaaatgcataaatcaataagacaga

SEQ ID NO: 96739 - DNA, 38 bp, Artificial Sequence
  primer
gtaaaacgacggccagtgtccctgaaactcaagccttc

SEQ ID NO: 96740 - DNA, 21 bp, Artificial Sequence
  primer
caaggagagcgaaactccatc

SEQ ID NO: 96741 - DNA, 21 bp, Artificial Sequence
  primer
aatggtgaagcttgcagtgag

SEQ ID NO: 96742 - DNA, 38 bp, Artificial Sequence
  primer
gtaaaacgacggccagttcctgcaaagtaggtgggaac

SEQ ID NO: 96743 - DNA, 21 bp, Artificial Sequence
  primer
ttgcacagtctggcacataac

SEQ ID NO: 96744 - DNA, 21 bp, Artificial Sequence
  primer
gatgaattgacaaacccttgc

SEQ ID NO: 96745 - DNA, 42 bp, Artificial Sequence
  primer
gtaaaacgacggccagttgcacaattaaggtttcactttatg

SEQ ID NO: 96746 - DNA, 21 bp, Artificial Sequence
  primer
tggaatcaatcactggagacg

SEQ ID NO: 96747 - DNA, 21 bp, Artificial Sequence
  primer
atgccttgcacatagcagaaa

SEQ ID NO: 96748 - DNA, 26 bp, Artificial Sequence
  primer
ggtctgccttatagttggaattactg

SEQ ID NO: 96749 - DNA, 20 bp, Artificial Sequence
  primer
acagagcaacacgccatctc

SEQ ID NO: 96750 - DNA, 38 bp, Artificial Sequence
  primer
gtaaaacgacggccagtacccatctgctgccatctatc

SEQ ID NO: 96751 - DNA, 22 bp, Artificial Sequence
  primer
aatctcatgacctgggagtcag

SEQ ID NO: 96752 - DNA, 20 bp, Artificial Sequence
  primer
caggtgtgagccactatgcc

SEQ ID NO: 96753 - DNA, 40 bp, Artificial Sequence
  primer
gtaaaacgacggccagttgaccaagtccaccttcatactc

SEQ ID NO: 96754 - DNA, 42 bp, Artificial Sequence
  primer
gtaaaacgacggccagtcagacactatgaacacgattctttg

SEQ ID NO: 96755 - DNA, 21 bp, Artificial Sequence
  primer
ccaaaggtgctgatacaaagg

SEQ ID NO: 96756 - DNA, 20 bp, Artificial Sequence
  primer
tgccatggttaattccacag

SEQ ID NO: 96757 - DNA, 38 bp, Artificial Sequence
  primer
gtaaaacgacggccagtgggattactggctgaacttcc

SEQ ID NO: 96758 - DNA, 21 bp, Artificial Sequence
  primer
agcagagttgaagtgcaaacg

SEQ ID NO: 96759 - DNA, 22 bp, Artificial Sequence
  primer
caacccagaactgagaacaacc

SEQ ID NO: 96760 - DNA, 21 bp, Artificial Sequence
  primer
ggaggatcacttgagtctcgg

SEQ ID NO: 96761 - DNA, 37 bp, Artificial Sequence
  primer
gtaaaacgacggccagtgtctggtgtctgcatggctc

SEQ ID NO: 96762 - DNA, 21 bp, Artificial Sequence
  primer
tcttggtgtccaccttgtctc

SEQ ID NO: 96763 - DNA, 25 bp, Artificial Sequence
  primer
gagtgagacccaaattgtttaagag

SEQ ID NO: 96764 - DNA, 20 bp, Artificial Sequence
  primer
ccacacgcaaagaccactac

SEQ ID NO: 96765 - DNA, 22 bp, Artificial Sequence
  primer
ccagctagatcccacttcttcc

SEQ ID NO: 96766 - DNA, 26 bp, Artificial Sequence
  primer
agagtttaagacttcagaagccaaat

SEQ ID NO: 96767 - DNA, 36 bp, Artificial Sequence
  primer
gtaaaacgacggccagtggcaatgccaatgcttatg

SEQ ID NO: 96768 - DNA, 37 bp, Artificial Sequence
  primer
gtaaaacgacggccagtgggcatatgggtgtatttgc

SEQ ID NO: 96769 - DNA, 21 bp, Artificial Sequence
  primer
ccagctgaactcaaactggtg

SEQ ID NO: 96770 - DNA, 44 bp, Artificial Sequence
  primer
gtaaaacgacggccagtaatagggattataaacactgtaatggg

SEQ ID NO: 96771 - DNA, 40 bp, Artificial Sequence
  primer
gtaaaacgacggccagttggactgtgacaataccagatcc

SEQ ID NO: 96772 - DNA, 38 bp, Artificial Sequence
  primer
gtaaaacgacggccagtatttaagcagccacctcctcc

SEQ ID NO: 96773 - DNA, 21 bp, Artificial Sequence
  primer
tgttggtgagatctttgctgg

SEQ ID NO: 96774 - DNA, 38 bp, Artificial Sequence
  primer
gtaaaacgacggccagtttggtcctgtaggagggactc

SEQ ID NO: 96775 - DNA, 38 bp, Artificial Sequence
  primer
gtaaaacgacggccagtattcgtgaggtgcagacagtg

SEQ ID NO: 96776 - DNA, 21 bp, Artificial Sequence
  primer
attgcttccctaaatgcatcc

SEQ ID NO: 96777 - DNA, 21 bp, Artificial Sequence
  primer
gcccaaatttagaaccgtacc

SEQ ID NO: 96778 - DNA, 21 bp, Artificial Sequence
  primer
gcgacagtgtaggtgagaagg

SEQ ID NO: 96779 - DNA, 38 bp, Artificial Sequence
  primer
gtaaaacgacggccagtaggcctagcaggagaaaggac

SEQ ID NO: 96780 - DNA, 22 bp, Artificial Sequence
  primer
ttgccaagtgcaaagtgtaaag

SEQ ID NO: 96781 - DNA, 21 bp, Artificial Sequence
  primer
aggaggtgctcagccttactg

SEQ ID NO: 96782 - DNA, 38 bp, Artificial Sequence
  primer
gtaaaacgacggccagtattcgtgagcgatttgttctg

SEQ ID NO: 96783 - DNA, 20 bp, Artificial Sequence
  primer
cagtgagccgagattgtgtg

SEQ ID NO: 96784 - DNA, 20 bp, Artificial Sequence
  primer
atttctacagctcctcgggc

SEQ ID NO: 96785 - DNA, 22 bp, Artificial Sequence
  primer
cctcagcgttaatggttgattc

SEQ ID NO: 96786 - DNA, 21 bp, Artificial Sequence
  primer
tgacaggtccacatggtcttc

SEQ ID NO: 96787 - DNA, 38 bp, Artificial Sequence
  primer
gtaaaacgacggccagttctgggcctgtttccttctac

SEQ ID NO: 96788 - DNA, 38 bp, Artificial Sequence
  primer
gtaaaacgacggccagtggccagggtatgtacatgagg

SEQ ID NO: 96789 - DNA, 18 bp, Artificial Sequence
  primer
gctcgcctcttccatgtc

SEQ ID NO: 96790 - DNA, 38 bp, Artificial Sequence
  primer
gtaaaacgacggccagtcattctatggttgggaaaggg

SEQ ID NO: 96791 - DNA, 37 bp, Artificial Sequence
  primer
gtaaaacgacggccagtgccaggtagcactgaacacc

SEQ ID NO: 96792 - DNA, 38 bp, Artificial Sequence
  primer
gtaaaacgacggccagtgccagcaaccagtaagatcag

SEQ ID NO: 96793 - DNA, 35 bp, Artificial Sequence
  primer
gtaaaacgacggccagtaccgggacactaggcagc

SEQ ID NO: 96794 - DNA, 19 bp, Artificial Sequence
  primer
ggctcaccggagatcagag

SEQ ID NO: 96795 - DNA, 37 bp, Artificial Sequence
  primer
gtaaaacgacggccagtctttaatgccacgggaggag

SEQ ID NO: 96796 - DNA, 38 bp, Artificial Sequence
  primer
gtaaaacgacggccagtgctctaaactgcgaggagagg

SEQ ID NO: 96797 - DNA, 21 bp, Artificial Sequence
  primer
agcgctacctgattccaattc

SEQ ID NO: 96798 - DNA, 19 bp, Artificial Sequence
  primer
ccgggctgaactttctgtg

SEQ ID NO: 96799 - DNA, 36 bp, Artificial Sequence
  primer
gtaaaacgacggccagtggcagttgtggccctgtag

SEQ ID NO: 96800 - DNA, 39 bp, Artificial Sequence
  primer
gtaaaacgacggccagtcctgggctagagacgaattatc

SEQ ID NO: 96801 - DNA, 20 bp, Artificial Sequence
  primer
ctatgcgggcatggttactg

SEQ ID NO: 96802 - DNA, 20 bp, Artificial Sequence
  primer
acatcggcgatctaggttcc

SEQ ID NO: 96803 - DNA, 38 bp, Artificial Sequence
  primer
gtaaaacgacggccagtgccttcatcgaattaggtggg

SEQ ID NO: 96804 - DNA, 22 bp, Artificial Sequence
  primer
cccaattcagtctattccttgc

SEQ ID NO: 96805 - DNA, 23 bp, Artificial Sequence
  primer
aaactaagaccaaatctggaccc

SEQ ID NO: 96806 - DNA, 37 bp, Artificial Sequence
  primer
gtaaaacgacggccagtgcctgcatcaggctaacaac

SEQ ID NO: 96807 - DNA, 38 bp, Artificial Sequence
  primer
gtaaaacgacggccagtaacttgggtgttgagattggc

SEQ ID NO: 96808 - DNA, 20 bp, Artificial Sequence
  primer
cacaacctagcctcacccac

SEQ ID NO: 96809 - DNA, 21 bp, Artificial Sequence
  primer
gttctcttgctggagagggtg

SEQ ID NO: 96810 - DNA, 19 bp, Artificial Sequence
  primer
cctgctccttcgtctctcg

SEQ ID NO: 96811 - DNA, 26 bp, Artificial Sequence
  primer
tggagttagaatgtataaagaagggc

SEQ ID NO: 96812 - DNA, 26 bp, Artificial Sequence
  primer
tcataaacaggaggtaaactttgagg

SEQ ID NO: 96813 - DNA, 23 bp, Artificial Sequence
  primer
gcaactccatggttaggtaaatg

SEQ ID NO: 96814 - DNA, 38 bp, Artificial Sequence
  primer
gtaaaacgacggccagtcattgtgccagtgctttccta

SEQ ID NO: 96815 - DNA, 21 bp, Artificial Sequence
  primer
cagggaacaccatgtttaggg

SEQ ID NO: 96816 - DNA, 26 bp, Artificial Sequence
  primer
ggtatttgaataacagagtgctttgg

SEQ ID NO: 96817 - DNA, 42 bp, Artificial Sequence
  primer
gtaaaacgacggccagtaacactggtggtttcatttcaatac

SEQ ID NO: 96818 - DNA, 36 bp, Artificial Sequence
  primer
gtaaaacgacggccagtagccagtcactttgggctg

SEQ ID NO: 96819 - DNA, 21 bp, Artificial Sequence
  primer
ggcaacaagagtgaaccactg

SEQ ID NO: 96820 - DNA, 23 bp, Artificial Sequence
  primer
tgattccaaccaagatacaaagg

SEQ ID NO: 96821 - DNA, 25 bp, Artificial Sequence
  primer
caatcaagatatattgggccttatc

SEQ ID NO: 96822 - DNA, 39 bp, Artificial Sequence
  primer
gtaaaacgacggccagttggatagcacgtggtaggtagc

SEQ ID NO: 96823 - DNA, 38 bp, Artificial Sequence
  primer
gtaaaacgacggccagtgctaatgcccaaagcactacc

SEQ ID NO: 96824 - DNA, 38 bp, Artificial Sequence
  primer
gtaaaacgacggccagttatgctttacaccaaagccca

SEQ ID NO: 96825 - DNA, 38 bp, Artificial Sequence
  primer
gtaaaacgacggccagtcagttcgtccctagcacacag

SEQ ID NO: 96826 - DNA, 20 bp, Artificial Sequence
  primer
gtgacccaccacacctagcc

SEQ ID NO: 96827 - DNA, 23 bp, Artificial Sequence
  primer
aatgaaacttgttctggctaggg

SEQ ID NO: 96828 - DNA, 39 bp, Artificial Sequence
  primer
gtaaaacgacggccagtgttcttgtacggtgctagggtt

SEQ ID NO: 96829 - DNA, 21 bp, Artificial Sequence
  primer
gcaactcaccaaccatgagag

SEQ ID NO: 96830 - DNA, 21 bp, Artificial Sequence
  primer
caggttatattctgggcctgc

SEQ ID NO: 96831 - DNA, 38 bp, Artificial Sequence
  primer
gtaaaacgacggccagtttgttctgtttcctgccattc

SEQ ID NO: 96832 - DNA, 18 bp, Artificial Sequence
  primer
cctgcgtgacagagcaag

SEQ ID NO: 96833 - DNA, 38 bp, Artificial Sequence
  primer
gtaaaacgacggccagtaacaaacaccctattccaccc

SEQ ID NO: 96834 - DNA, 19 bp, Artificial Sequence
  primer
gggccaacagagtgagacc

SEQ ID NO: 96835 - DNA, 21 bp, Artificial Sequence
  primer
atattggtgcccttgcacttc

SEQ ID NO: 96836 - DNA, 38 bp, Artificial Sequence
  primer
gtaaaacgacggccagtctttgggacaaattcaacagc

SEQ ID NO: 96837 - DNA, 21 bp, Artificial Sequence
  primer
gcagcgagttgagattgtacc

SEQ ID NO: 96838 - DNA, 38 bp, Artificial Sequence
  primer
gtaaaacgacggccagttgatgctccacttactctggc

SEQ ID NO: 96839 - DNA, 38 bp, Artificial Sequence
  primer
gtaaaacgacggccagtcattcgaggaaacttgtgagg

SEQ ID NO: 96840 - DNA, 27 bp, Artificial Sequence
  primer
gacaaatagagcctttaagatggtttc

SEQ ID NO: 96841 - DNA, 21 bp, Artificial Sequence
  primer
tcaccttcccatacacagctc

SEQ ID NO: 96842 - DNA, 21 bp, Artificial Sequence
  primer
aaggtccttcacacagttcgc

SEQ ID NO: 96843 - DNA, 21 bp, Artificial Sequence
  primer
tccttgtcttccctcaaatcc

SEQ ID NO: 96844 - DNA, 38 bp, Artificial Sequence
  primer
gtaaaacgacggccagtgtcttccggataatttgggtc

SEQ ID NO: 96845 - DNA, 38 bp, Artificial Sequence
  primer
gtaaaacgacggccagtccaggtcttccagtcagtcag

SEQ ID NO: 96846 - DNA, 38 bp, Artificial Sequence
  primer
gtaaaacgacggccagtaccaaatccagatcttccagg

SEQ ID NO: 96847 - DNA, 19 bp, Artificial Sequence
  primer
tttaacagtttcgcagcgg

SEQ ID NO: 96848 - DNA, 18 bp, Artificial Sequence
  primer
ctactcgggaggcggttc

SEQ ID NO: 96849 - DNA, 21 bp, Artificial Sequence
  primer
atattgacccaaacccactgc

SEQ ID NO: 96850 - DNA, 23 bp, Artificial Sequence
  primer
tctactggaaatcagaatgtgcc

SEQ ID NO: 96851 - DNA, 21 bp, Artificial Sequence
  primer
ctgaggatcgtctcactgctg

SEQ ID NO: 96852 - DNA, 38 bp, Artificial Sequence
  primer
gtaaaacgacggccagtagccttgtgtgacagggagtc

SEQ ID NO: 96853 - DNA, 21 bp, Artificial Sequence
  primer
aagcaaagcaatgaggcaaac

SEQ ID NO: 96854 - DNA, 21 bp, Artificial Sequence
  primer
cagacggttgttgaatggatg

SEQ ID NO: 96855 - DNA, 21 bp, Artificial Sequence
  primer
ggtacttcacctccactgctg

SEQ ID NO: 96856 - DNA, 21 bp, Artificial Sequence
  primer
cacgatgtctacagggagcag

SEQ ID NO: 96857 - DNA, 38 bp, Artificial Sequence
  primer
gtaaaacgacggccagttctcctcctgacagcaaatcc

SEQ ID NO: 96858 - DNA, 38 bp, Artificial Sequence
  primer
gtaaaacgacggccagtcttgttgtgctgttccaggag

SEQ ID NO: 96859 - DNA, 38 bp, Artificial Sequence
  primer
gtaaaacgacggccagttccaaacacagaaacgacctc

SEQ ID NO: 96860 - DNA, 21 bp, Artificial Sequence
  primer
cctcctgcacacagataaacc

SEQ ID NO: 96861 - DNA, 38 bp, Artificial Sequence
  primer
gtaaaacgacggccagttaaatggtagggcaggtggtg

SEQ ID NO: 96862 - DNA, 36 bp, Artificial Sequence
  primer
gtaaaacgacggccagtctcttcccactgcgaatcc

SEQ ID NO: 96863 - DNA, 21 bp, Artificial Sequence
  primer
ttgcatgtttctccttgttgg

SEQ ID NO: 96864 - DNA, 38 bp, Artificial Sequence
  primer
gtaaaacgacggccagtacccacctacagcttgcattc

SEQ ID NO: 96865 - DNA, 20 bp, Artificial Sequence
  primer
ccctctggagaaggaggaag

SEQ ID NO: 96866 - DNA, 38 bp, Artificial Sequence
  primer
gtaaaacgacggccagtaccacctaataccatggctgg

SEQ ID NO: 96867 - DNA, 42 bp, Artificial Sequence
  primer
gtaaaacgacggccagtttctgtgactgagtgttgaattagc

SEQ ID NO: 96868 - DNA, 38 bp, Artificial Sequence
  primer
gtaaaacgacggccagtctgactgatcaagacgcttcc

SEQ ID NO: 96869 - DNA, 21 bp, Artificial Sequence
  primer
cggcctggagtgattcttaac

SEQ ID NO: 96870 - DNA, 23 bp, Artificial Sequence
  primer
aaacaacagctagcagattcgac

SEQ ID NO: 96871 - DNA, 26 bp, Artificial Sequence
  primer
gaatggtatccagttgttaatgaagc

SEQ ID NO: 96872 - DNA, 38 bp, Artificial Sequence
  primer
gtaaaacgacggccagttatggtttgctgcttctgcac

SEQ ID NO: 96873 - DNA, 38 bp, Artificial Sequence
  primer
gtaaaacgacggccagtagggctgctgaggtacagaac

SEQ ID NO: 96874 - DNA, 39 bp, Artificial Sequence
  primer
gtaaaacgacggccagttgcagtaagttgagattacgcc

SEQ ID NO: 96875 - DNA, 21 bp, Artificial Sequence
  primer
acattcagatcaacgtggcag

SEQ ID NO: 96876 - DNA, 21 bp, Artificial Sequence
  primer
attgggtcttcaatgtggtcc

SEQ ID NO: 96877 - DNA, 23 bp, Artificial Sequence
  primer
gctggcaatttgctacttatttc

SEQ ID NO: 96878 - DNA, 38 bp, Artificial Sequence
  primer
gtaaaacgacggccagtgggtcagagaacaagacgacc

SEQ ID NO: 96879 - DNA, 39 bp, Artificial Sequence
  primer
gtaaaacgacggccagtgattacactcaatggagcctgg

SEQ ID NO: 96880 - DNA, 38 bp, Artificial Sequence
  primer
gtaaaacgacggccagtacctcgcacttaagacaaccg

SEQ ID NO: 96881 - DNA, 21 bp, Artificial Sequence
  primer
catgataactgcctctccagc

SEQ ID NO: 96882 - DNA, 21 bp, Artificial Sequence
  primer
ggtgacagagtgagaccctgg

SEQ ID NO: 96883 - DNA, 21 bp, Artificial Sequence
  primer
ctcagggtcctagtggagagg

SEQ ID NO: 96884 - DNA, 36 bp, Artificial Sequence
  primer
gtaaaacgacggccagtgtgagggccactggcttag

SEQ ID NO: 96885 - DNA, 39 bp, Artificial Sequence
  primer
gtaaaacgacggccagtcatgaagacatggccacaatac

SEQ ID NO: 96886 - DNA, 38 bp, Artificial Sequence
  primer
gtaaaacgacggccagtgcctccaaagacactctccag

SEQ ID NO: 96887 - DNA, 21 bp, Artificial Sequence
  primer
gcttacagctttgggaaggag

SEQ ID NO: 96888 - DNA, 38 bp, Artificial Sequence
  primer
gtaaaacgacggccagtgtgcatgggtcaagatcacac

SEQ ID NO: 96889 - DNA, 21 bp, Artificial Sequence
  primer
ttcactggaacttagatgccg

SEQ ID NO: 96890 - DNA, 38 bp, Artificial Sequence
  primer
gtaaaacgacggccagttgagttgaagcctcgtcattg

SEQ ID NO: 96891 - DNA, 22 bp, Artificial Sequence
  primer
aagaaacttacctgaggcgacc

SEQ ID NO: 96892 - DNA, 38 bp, Artificial Sequence
  primer
gtaaaacgacggccagtctgctgaactgaaagctgctg

SEQ ID NO: 96893 - DNA, 21 bp, Artificial Sequence
  primer
ggatgtccgaactacagggac

SEQ ID NO: 96894 - DNA, 38 bp, Artificial Sequence
  primer
gtaaaacgacggccagtgtatttgccctcagagatggg

SEQ ID NO: 96895 - DNA, 38 bp, Artificial Sequence
  primer
gtaaaacgacggccagtggatggtagggtaaaccggag

SEQ ID NO: 96896 - DNA, 20 bp, Artificial Sequence
  primer
cccagtcagtgtcaaggagg

SEQ ID NO: 96897 - DNA, 38 bp, Artificial Sequence
  primer
gtaaaacgacggccagtctgagctaaccctatgcctgg

SEQ ID NO: 96898 - DNA, 35 bp, Artificial Sequence
  primer
gtaaaacgacggccagttccctccgcctcagtttc

SEQ ID NO: 96899 - DNA, 21 bp, Artificial Sequence
  primer
cagagatggtgtccttcaggg

SEQ ID NO: 96900 - DNA, 18 bp, Artificial Sequence
  primer
ctctgacaggctcgctgg

SEQ ID NO: 96901 - DNA, 35 bp, Artificial Sequence
  primer
gtaaaacgacggccagtacgcctatgggaggatgg

SEQ ID NO: 96902 - DNA, 18 bp, Artificial Sequence
  primer
ccagcacctcacacccac

SEQ ID NO: 96903 - DNA, 21 bp, Artificial Sequence
  primer
atgctccaagcacagggttag

SEQ ID NO: 96904 - DNA, 21 bp, Artificial Sequence
  primer
cttccacctcttaagcctggg

SEQ ID NO: 96905 - DNA, 19 bp, Artificial Sequence
  primer
catctgtgccagctgcttc

SEQ ID NO: 96906 - DNA, 22 bp, Artificial Sequence
  primer
gatcagtgacagacacctctgc

SEQ ID NO: 96907 - DNA, 23 bp, Artificial Sequence
  primer
gaaggccaaagtgtatcatgttc

SEQ ID NO: 96908 - DNA, 37 bp, Artificial Sequence
  primer
gtaaaacgacggccagtatgtgcccaagactcacagc

SEQ ID NO: 96909 - DNA, 37 bp, Artificial Sequence
  primer
gtaaaacgacggccagtgccatcaaatgagggaaacc

SEQ ID NO: 96910 - DNA, 39 bp, Artificial Sequence
  primer
gtaaaacgacggccagttgccacttggaactacaaagac

SEQ ID NO: 96911 - DNA, 41 bp, Artificial Sequence
  primer
gtaaaacgacggccagtcagtaaggaactaccaaaggtccc

SEQ ID NO: 96912 - DNA, 21 bp, Artificial Sequence
  primer
aaagctctaggctccaggtcc

SEQ ID NO: 96913 - DNA, 35 bp, Artificial Sequence
  primer
gtaaaacgacggccagttgttagccactgcacccg

SEQ ID NO: 96914 - DNA, 40 bp, Artificial Sequence
  primer
gtaaaacgacggccagtccttctccagctaggaaatgatg

SEQ ID NO: 96915 - DNA, 42 bp, Artificial Sequence
  primer
gtaaaacgacggccagttgggatactacagaaagcagttcac

SEQ ID NO: 96916 - DNA, 43 bp, Artificial Sequence
  primer
gtaaaacgacggccagtactatggagattagcagtgacagaac

SEQ ID NO: 96917 - DNA, 44 bp, Artificial Sequence
  primer
gtaaaacgacggccagtcgtcccaatattaacattcacactaag

SEQ ID NO: 96918 - DNA, 37 bp, Artificial Sequence
  primer
gtaaaacgacggccagtcttgaggccgggagtttaag

SEQ ID NO: 96919 - DNA, 21 bp, Artificial Sequence
  primer
ctcaggtgtgactgggaggag

SEQ ID NO: 96920 - DNA, 38 bp, Artificial Sequence
  primer
gtaaaacgacggccagttcccagctgctccttaatttg

SEQ ID NO: 96921 - DNA, 24 bp, Artificial Sequence
  primer
gaagaatcattcaagggttcagtg

SEQ ID NO: 96922 - DNA, 38 bp, Artificial Sequence
  primer
gtaaaacgacggccagttggagtttaacaagctccctg

SEQ ID NO: 96923 - DNA, 20 bp, Artificial Sequence
  primer
tggccaacaggtatcaaatg

SEQ ID NO: 96924 - DNA, 28 bp, Artificial Sequence
  primer
agctatagacttagtaaacaacgtttgg

SEQ ID NO: 96925 - DNA, 38 bp, Artificial Sequence
  primer
gtaaaacgacggccagtgccaacagtgatgaaatgagg

SEQ ID NO: 96926 - DNA, 20 bp, Artificial Sequence
  primer
cactcatccatgagggaagc

SEQ ID NO: 96927 - DNA, 22 bp, Artificial Sequence
  primer
tgatggctattggaccttcatc

SEQ ID NO: 96928 - DNA, 21 bp, Artificial Sequence
  primer
agaaatgaaactcctgccagc

SEQ ID NO: 96929 - DNA, 37 bp, Artificial Sequence
  primer
gtaaaacgacggccagtatggagtgcatgagtgggag

SEQ ID NO: 96930 - DNA, 41 bp, Artificial Sequence
  primer
gtaaaacgacggccagttcaaggcacaatgtacaataccac

SEQ ID NO: 96931 - DNA, 21 bp, Artificial Sequence
  primer
atgctggacacacagtaaggg

SEQ ID NO: 96932 - DNA, 38 bp, Artificial Sequence
  primer
gtaaaacgacggccagtcgtcctccctgacttacccta

SEQ ID NO: 96933 - DNA, 21 bp, Artificial Sequence
  primer
agcatgtcctgcgtgatacag

SEQ ID NO: 96934 - DNA, 20 bp, Artificial Sequence
  primer
aaagccacccgtatgaaagg

SEQ ID NO: 96935 - DNA, 19 bp, Artificial Sequence
  primer
ggaagggtccttaccgctg

SEQ ID NO: 96936 - DNA, 37 bp, Artificial Sequence
  primer
gtaaaacgacggccagtggagcagaggtcagacaggg

SEQ ID NO: 96937 - DNA, 38 bp, Artificial Sequence
  primer
gtaaaacgacggccagttgagctctgtactctgcctgg

SEQ ID NO: 96938 - DNA, 38 bp, Artificial Sequence
  primer
gtaaaacgacggccagtaggtgactgtccaccatgtcc

SEQ ID NO: 96939 - DNA, 37 bp, Artificial Sequence
  primer
gtaaaacgacggccagtgtggtgcggatggtagtctg

SEQ ID NO: 96940 - DNA, 21 bp, Artificial Sequence
  primer
cactcccaggctcagtaggtc

SEQ ID NO: 96941 - DNA, 21 bp, Artificial Sequence
  primer
ctccacagatttagatggccc

SEQ ID NO: 96942 - DNA, 21 bp, Artificial Sequence
  primer
taggtctatggctgtgggtgg

SEQ ID NO: 96943 - DNA, 21 bp, Artificial Sequence
  primer
aagttgctgtagtcggtcgag

SEQ ID NO: 96944 - DNA, 38 bp, Artificial Sequence
  primer
gtaaaacgacggccagtcaggccgaccaagagaagtag

SEQ ID NO: 96945 - DNA, 21 bp, Artificial Sequence
  primer
ttgaaatgcaagctacttggg

SEQ ID NO: 96946 - DNA, 21 bp, Artificial Sequence
  primer
ggaattacaccctgctccaac

SEQ ID NO: 96947 - DNA, 20 bp, Artificial Sequence
  primer
ccgtgttaaccaggatggtc

SEQ ID NO: 96948 - DNA, 38 bp, Artificial Sequence
  primer
gtaaaacgacggccagttaaagggagagtgtggtgtgg

SEQ ID NO: 96949 - DNA, 21 bp, Artificial Sequence
  primer
gattcgtggtctttcccaatc

SEQ ID NO: 96950 - DNA, 21 bp, Artificial Sequence
  primer
gcagctccctagacactcacc

SEQ ID NO: 96951 - DNA, 38 bp, Artificial Sequence
  primer
gtaaaacgacggccagtaaggagaaggcgaaatctctg

SEQ ID NO: 96952 - DNA, 22 bp, Artificial Sequence
  primer
ggaggtttagaaagagcacagg

SEQ ID NO: 96953 - DNA, 38 bp, Artificial Sequence
  primer
gtaaaacgacggccagtcttggtcaggcccattctatc

SEQ ID NO: 96954 - DNA, 22 bp, Artificial Sequence
  primer
ggtcaacaacgtctatgaaccc

SEQ ID NO: 96955 - DNA, 21 bp, Artificial Sequence
  primer
tatttgcaaagggaaggcaag

SEQ ID NO: 96956 - DNA, 21 bp, Artificial Sequence
  primer
caggctgtgagaatggatcag

SEQ ID NO: 96957 - DNA, 22 bp, Artificial Sequence
  primer
ggaggtttagaaagagcacagg

SEQ ID NO: 96958 - DNA, 37 bp, Artificial Sequence
  primer
gtaaaacgacggccagtgaaagagaaagagggagcgg

SEQ ID NO: 96959 - DNA, 38 bp, Artificial Sequence
  primer
gtaaaacgacggccagtccaaagtgcctctcatccttc

SEQ ID NO: 96960 - DNA, 38 bp, Artificial Sequence
  primer
gtaaaacgacggccagttgctggctagctaagagacgg

SEQ ID NO: 96961 - DNA, 21 bp, Artificial Sequence
  primer
gttaccatcctcagctccctg

SEQ ID NO: 96962 - DNA, 21 bp, Artificial Sequence
  primer
ttcctggttgtttgaaattcg

SEQ ID NO: 96963 - DNA, 38 bp, Artificial Sequence
  primer
gtaaaacgacggccagtacaccctcaggtttctagccc

SEQ ID NO: 96964 - DNA, 21 bp, Artificial Sequence
  primer
gcgacctctagcaagtcagtg

SEQ ID NO: 96965 - DNA, 21 bp, Artificial Sequence
  primer
caccttgacaaactccttggc

SEQ ID NO: 96966 - DNA, 38 bp, Artificial Sequence
  primer
gtaaaacgacggccagtctcttagagctccatcctccc

SEQ ID NO: 96967 - DNA, 38 bp, Artificial Sequence
  primer
gtaaaacgacggccagtaatcctgtgtcattctgggtg

SEQ ID NO: 96968 - DNA, 37 bp, Artificial Sequence
  primer
gtaaaacgacggccagtagaggaggacacaggcacag

SEQ ID NO: 96969 - DNA, 39 bp, Artificial Sequence
  primer
gtaaaacgacggccagttctgcgtccttagacctgagag

SEQ ID NO: 96970 - DNA, 21 bp, Artificial Sequence
  primer
atgaattgagagggttcaggg

SEQ ID NO: 96971 - DNA, 25 bp, Artificial Sequence
  primer
ggtctcttcattgatattctgcctc

SEQ ID NO: 96972 - DNA, 38 bp, Artificial Sequence
  primer
gtaaaacgacggccagtaggagtatgagatccaggccc

SEQ ID NO: 96973 - DNA, 21 bp, Artificial Sequence
  primer
aattcagaagggagggagtgg

SEQ ID NO: 96974 - DNA, 21 bp, Artificial Sequence
  primer
tgcactgaggaacattaaccc

SEQ ID NO: 96975 - DNA, 21 bp, Artificial Sequence
  primer
ttgggtttcctacagactccc

SEQ ID NO: 96976 - DNA, 38 bp, Artificial Sequence
  primer
gtaaaacgacggccagtactctgccaagcctcagtttc

SEQ ID NO: 96977 - DNA, 18 bp, Artificial Sequence
  primer
ttagctgggtgtggtcgc

SEQ ID NO: 96978 - DNA, 21 bp, Artificial Sequence
  primer
gacttctgctcacaccttccc

SEQ ID NO: 96979 - DNA, 21 bp, Artificial Sequence
  primer
tttccctgatgatttgttgga

SEQ ID NO: 96980 - DNA, 18 bp, Artificial Sequence
  primer
tcctggcctcagtttccc

SEQ ID NO: 96981 - DNA, 21 bp, Artificial Sequence
  primer
gcaaatggtggcttaaccttc

SEQ ID NO: 96982 - DNA, 20 bp, Artificial Sequence
  primer
gcctgatggaggaagcaaag

SEQ ID NO: 96983 - DNA, 20 bp, Artificial Sequence
  primer
caggagaacagcaggaccac

SEQ ID NO: 96984 - DNA, 20 bp, Artificial Sequence
  primer
ttcctcgagtgcacacacac

SEQ ID NO: 96985 - DNA, 38 bp, Artificial Sequence
  primer
gtaaaacgacggccagtgctgactgaaccagttgttgc

SEQ ID NO: 96986 - DNA, 21 bp, Artificial Sequence
  primer
tccgcatctggatggtatttc

SEQ ID NO: 96987 - DNA, 21 bp, Artificial Sequence
  primer
acacagtatccaaaggccctg

SEQ ID NO: 96988 - DNA, 22 bp, Artificial Sequence
  primer
cagattcatgcctgacacagag

SEQ ID NO: 96989 - DNA, 23 bp, Artificial Sequence
  primer
gggtagactaggtagctgggacc

SEQ ID NO: 96990 - DNA, 38 bp, Artificial Sequence
  primer
gtaaaacgacggccagtttcttgaacaatgcccacaac

SEQ ID NO: 96991 - DNA, 21 bp, Artificial Sequence
  primer
tgccctgatcatacagtgacc

SEQ ID NO: 96992 - DNA, 38 bp, Artificial Sequence
  primer
gtaaaacgacggccagtgagacttaacctggcactggg

SEQ ID NO: 96993 - DNA, 21 bp, Artificial Sequence
  primer
catctgacccagctctctgtg

SEQ ID NO: 96994 - DNA, 21 bp, Artificial Sequence
  primer
agaaaggaattgggtggagtg

SEQ ID NO: 96995 - DNA, 38 bp, Artificial Sequence
  primer
gtaaaacgacggccagtgaacttgcaagcaaacgcttc

SEQ ID NO: 96996 - DNA, 38 bp, Artificial Sequence
  primer
gtaaaacgacggccagtcctctgtctcctctcagagcc

SEQ ID NO: 96997 - DNA, 38 bp, Artificial Sequence
  primer
gtaaaacgacggccagttggtgagatgcctgttcaatc

SEQ ID NO: 96998 - DNA, 38 bp, Artificial Sequence
  primer
gtaaaacgacggccagtgggtgtgtcctgcactaaatg

SEQ ID NO: 96999 - DNA, 23 bp, Artificial Sequence
  primer
aggaatctcatccttctcattcc

SEQ ID NO: 97000 - DNA, 21 bp, Artificial Sequence
  primer
gagcctggcactgaatacaag

SEQ ID NO: 97001 - DNA, 21 bp, Artificial Sequence
  primer
taactggcaggagtggacaac

SEQ ID NO: 97002 - DNA, 38 bp, Artificial Sequence
  primer
gtaaaacgacggccagttccaagtcattctgggtaggg

SEQ ID NO: 97003 - DNA, 21 bp, Artificial Sequence
  primer
tgattgtcttgttgtgacccg

SEQ ID NO: 97004 - DNA, 38 bp, Artificial Sequence
  primer
gtaaaacgacggccagtatgtaatgcagagagggccac

SEQ ID NO: 97005 - DNA, 20 bp, Artificial Sequence
  primer
gagagcctggccctgaatac

SEQ ID NO: 97006 - DNA, 20 bp, Artificial Sequence
  primer
gtcctgaccctgtagggagg

SEQ ID NO: 97007 - DNA, 38 bp, Artificial Sequence
  primer
gtaaaacgacggccagtcctgaatctcagagctcagcc

SEQ ID NO: 97008 - DNA, 38 bp, Artificial Sequence
  primer
gtaaaacgacggccagtttatccagcctccaacagagg

SEQ ID NO: 97009 - DNA, 37 bp, Artificial Sequence
  primer
gtaaaacgacggccagtaatgcccaaatctcaacacg

SEQ ID NO: 97010 - DNA, 20 bp, Artificial Sequence
  primer
gaaagcctggccctgaatac

SEQ ID NO: 97011 - DNA, 21 bp, Artificial Sequence
  primer
tgtttcctgacatcctccttg

SEQ ID NO: 97012 - DNA, 22 bp, Artificial Sequence
  primer
ggttctcctcaggtgtagaggg

SEQ ID NO: 97013 - DNA, 37 bp, Artificial Sequence
  primer
gtaaaacgacggccagtgctcaccaccacctgttctc

SEQ ID NO: 97014 - DNA, 21 bp, Artificial Sequence
  primer
actcagagctggttctctggc

SEQ ID NO: 97015 - DNA, 21 bp, Artificial Sequence
  primer
tgtcctcttccctattcaggc

SEQ ID NO: 97016 - DNA, 21 bp, Artificial Sequence
  primer
caggcctgataatcctgtgtg

SEQ ID NO: 97017 - DNA, 38 bp, Artificial Sequence
  primer
gtaaaacgacggccagtactgagaaatcctgcctctgg

SEQ ID NO: 97018 - DNA, 21 bp, Artificial Sequence
  primer
actggacacaggctgggatag

SEQ ID NO: 97019 - DNA, 38 bp, Artificial Sequence
  primer
gtaaaacgacggccagtgactgagaggcctggactttg

SEQ ID NO: 97020 - DNA, 21 bp, Artificial Sequence
  primer
caggattgaatttgggattgc

SEQ ID NO: 97021 - DNA, 38 bp, Artificial Sequence
  primer
gtaaaacgacggccagtaggagaactgagagtcctggc

SEQ ID NO: 97022 - DNA, 38 bp, Artificial Sequence
  primer
gtaaaacgacggccagtgaatttgggatttccttgtgc

SEQ ID NO: 97023 - DNA, 38 bp, Artificial Sequence
  primer
gtaaaacgacggccagtgaccagggaagaagagacctg

SEQ ID NO: 97024 - DNA, 38 bp, Artificial Sequence; identical to SEQ ID NO: 96996
  primer

SEQ ID NO: 97025 - DNA, 38 bp, Artificial Sequence; identical to SEQ ID NO: 97004
  primer

SEQ ID NO: 97026 - DNA, 38 bp, Artificial Sequence
  primer
gtaaaacgacggccagtgagggactgagagacctggac

SEQ ID NO: 97027 - DNA, 21 bp, Artificial Sequence
  primer
cttggacacaggttgggaaag

SEQ ID NO: 97028 - DNA, 21 bp, Artificial Sequence
  primer
ggtacagggagcatgaagacc

SEQ ID NO: 97029 - DNA, 21 bp, Artificial Sequence
  primer
gtctggtgtcctctcccaaag

SEQ ID NO: 97030 - DNA, 20 bp, Artificial Sequence
  primer
agcacccagaagtcatggag

SEQ ID NO: 97031 - DNA, 38 bp, Artificial Sequence
  primer
gtaaaacgacggccagtcaggaaagggattctggtctg

SEQ ID NO: 97032 - DNA, 38 bp, Artificial Sequence
  primer
gtaaaacgacggccagtgagggactaagaggcctggtc

SEQ ID NO: 97033 - DNA, 21 bp, Artificial Sequence
  primer
aagtcctttccctctcccaag

SEQ ID NO: 97034 - DNA, 21 bp, Artificial Sequence
  primer
cctgcctcttaccaattccag

SEQ ID NO: 97035 - DNA, 38 bp, Artificial Sequence
  primer
gtaaaacgacggccagtcaggcctaacaatcctgtgtg

SEQ ID NO: 97036 - DNA, 21 bp, Artificial Sequence
  primer
atgacgagctgggtttctagg

SEQ ID NO: 97037 - DNA, 38 bp, Artificial Sequence
  primer
gtaaaacgacggccagtttctggctcatctctgaaagc

SEQ ID NO: 97038 - DNA, 37 bp, Artificial Sequence
  primer
gtaaaacgacggccagtcctgcaggaaacaggacaag

SEQ ID NO: 97039 - DNA, 21 bp, Artificial Sequence
  primer
atgaggctgtgattctgttgc

SEQ ID NO: 97040 - DNA, 38 bp, Artificial Sequence
  primer
gtaaaacgacggccagtatgaaatggtgtttgcacagc

SEQ ID NO: 97041 - DNA, 37 bp, Artificial Sequence
  primer
gtaaaacgacggccagtgccggatgatgtgacttgtg

SEQ ID NO: 97042 - DNA, 38 bp, Artificial Sequence
  primer
gtaaaacgacggccagttagtttgaaccagggaggtcg

SEQ ID NO: 97043 - DNA, 38 bp, Artificial Sequence
  primer
gtaaaacgacggccagtcgctcagattatgtgggtgag

SEQ ID NO: 97044 - DNA, 21 bp, Artificial Sequence
  primer
attcccaaacctggtgtcaag

SEQ ID NO: 97045 - DNA, 21 bp, Artificial Sequence
  primer
aagaaggaaattgcagccttg

SEQ ID NO: 97046 - DNA, 38 bp, Artificial Sequence
  primer
gtaaaacgacggccagttgctgagtctttggctgagtc

SEQ ID NO: 97047 - DNA, 37 bp, Artificial Sequence
  primer
gtaaaacgacggccagtttgtcactggtcagctccag

SEQ ID NO: 97048 - DNA, 36 bp, Artificial Sequence
  primer
gtaaaacgacggccagttcctagtcctggctcgcac

SEQ ID NO: 97049 - DNA, 19 bp, Artificial Sequence
  primer
caggtacgggctgaagtcg

SEQ ID NO: 97050 - DNA, 20 bp, Artificial Sequence
  primer
gcttcttgcagttcttgccc

SEQ ID NO: 97051 - DNA, 18 bp, Artificial Sequence
  primer
ctccttccgcttgcagtc

SEQ ID NO: 97052 - DNA, 38 bp, Artificial Sequence
  primer
gtaaaacgacggccagtgacagctgctccaccttcttc

SEQ ID NO: 97053 - DNA, 37 bp, Artificial Sequence
  primer
gtaaaacgacggccagttgcttgaacaagttccgcag

SEQ ID NO: 97054 - DNA, 38 bp, Artificial Sequence
  primer
gtaaaacgacggccagtctttaaataacaccacgggcg

SEQ ID NO: 97055 - DNA, 38 bp, Artificial Sequence
  primer
gtaaaacgacggccagttgattgctgttgaagaggtcg

SEQ ID NO: 97056 - DNA, 36 bp, Artificial Sequence
  primer
gtaaaacgacggccagtagctcaccacggtctgtgc

SEQ ID NO: 97057 - DNA, 21 bp, Artificial Sequence
  primer
ggtctgaggtatgggtcgttg

SEQ ID NO: 97058 - DNA, 38 bp, Artificial Sequence
  primer
gtaaaacgacggccagtcgctcctatgtcccaagaaac

SEQ ID NO: 97059 - DNA, 21 bp, Artificial Sequence
  primer
cgaaggtatgtggagggtagg

SEQ ID NO: 97060 - DNA, 38 bp, Artificial Sequence
  primer
gtaaaacgacggccagtctggcctgctcttaccttgag

SEQ ID NO: 97061 - DNA, 37 bp, Artificial Sequence
  primer
gtaaaacgacggccagtgacaccaagcacaggctcag

SEQ ID NO: 97062 - DNA, 38 bp, Artificial Sequence
  primer
gtaaaacgacggccagttccatggtctatgtctcaggg

SEQ ID NO: 97063 - DNA, 21 bp, Artificial Sequence
  primer
cattgacatgagtggtgtcgg

SEQ ID NO: 97064 - DNA, 37 bp, Artificial Sequence
  primer
gtaaaacgacggccagtacacatgcttcagaggctgg

SEQ ID NO: 97065 - DNA, 39 bp, Artificial Sequence
  primer
gtaaaacgacggccagtcggcatcatcctgaataagaag

SEQ ID NO: 97066 - DNA, 38 bp, Artificial Sequence
  primer
gtaaaacgacggccagtcttgagtccttgttgccactg

SEQ ID NO: 97067 - DNA, 21 bp, Artificial Sequence
  primer
ctttcttcatgggacagagcc

SEQ ID NO: 97068 - DNA, 38 bp, Artificial Sequence
  primer
gtaaaacgacggccagttcgatccgatattgtctgctg

SEQ ID NO: 97069 - DNA, 37 bp, Artificial Sequence
  primer
gtaaaacgacggccagtcgagtagcaagctgctgagg

SEQ ID NO: 97070 - DNA, 25 bp, Artificial Sequence
  primer
tgctccagagaactaggttactgtc

SEQ ID NO: 97071 - DNA, 18 bp, Artificial Sequence
  primer
tagccaggtgtggtggca

SEQ ID NO: 97072 - DNA, 20 bp, Artificial Sequence
  primer
cagcctggtgacagaggaag

SEQ ID NO: 97073 - DNA, 21 bp, Artificial Sequence
  primer
ataactgcgtggctttcaatg

SEQ ID NO: 97074 - DNA, 35 bp, Artificial Sequence
  primer
gtaaaacgacggccagttcggctgcatcacaacac

SEQ ID NO: 97075 - DNA, 23 bp, Artificial Sequence
  primer
ggataatgtctttgatgctcagg

SEQ ID NO: 97076 - DNA, 21 bp, Artificial Sequence
  primer
tcccactaatgttccatggtc

SEQ ID NO: 97077 - DNA, 37 bp, Artificial Sequence
  primer
gtaaaacgacggccagtcaaacaatcttcctgcctcg

SEQ ID NO: 97078 - DNA, 42 bp, Artificial Sequence
  primer
gtaaaacgacggccagtgatgaaagtactgtatccacttccc

SEQ ID NO: 97079 - DNA, 42 bp, Artificial Sequence
  primer
gtaaaacgacggccagttctggctgacatgagtattaatttg

SEQ ID NO: 97080 - DNA, 43 bp, Artificial Sequence
  primer
gtaaaacgacggccagtatcaaatttaggagagttcatttccc

SEQ ID NO: 97081 - DNA, 39 bp, Artificial Sequence
  primer
gtaaaacgacggccagtttcatccaatagatggccaaac

SEQ ID NO: 97082 - DNA, 19 bp, Artificial Sequence
  primer
ctgggcaagggagtgagac

SEQ ID NO: 97083 - DNA, 24 bp, Artificial Sequence
  primer
aaatccactgagaagtctggaatg

SEQ ID NO: 97084 - DNA, 21 bp, Artificial Sequence
  primer
gccacaagcacagtaatagcc

SEQ ID NO: 97085 - DNA, 38 bp, Artificial Sequence
  primer
gtaaaacgacggccagttaccaagggagacacctaccc

SEQ ID NO: 97086 - DNA, 37 bp, Artificial Sequence
  primer
gtaaaacgacggccagtccttgcaccagagacctgag

SEQ ID NO: 97087 - DNA, 37 bp, Artificial Sequence
  primer
gtaaaacgacggccagtctcacacaggcacagcacag

SEQ ID NO: 97088 - DNA, 21 bp, Artificial Sequence
  primer
agggtaccaacaggcacattg

SEQ ID NO: 97089 - DNA, 38 bp, Artificial Sequence
  primer
gtaaaacgacggccagttgtaggctctaaccctgaggc

SEQ ID NO: 97090 - DNA, 21 bp, Artificial Sequence
  primer
aggagagtggagggatgtagg

SEQ ID NO: 97091 - DNA, 21 bp, Artificial Sequence
  primer
ccatgatgagaaggaacccac

SEQ ID NO: 97092 - DNA, 21 bp, Artificial Sequence
  primer
agaggatgaatttgctcagcc

SEQ ID NO: 97093 - DNA, 38 bp, Artificial Sequence
  primer
gtaaaacgacggccagtgaaagcctctgtctcagcgtc

SEQ ID NO: 97094 - DNA, 21 bp, Artificial Sequence
  primer
cactcagtcttgctgagggag

SEQ ID NO: 97095 - DNA, 21 bp, Artificial Sequence
  primer
tgattccatatcccaacccag

SEQ ID NO: 97096 - DNA, 38 bp, Artificial Sequence
  primer
gtaaaacgacggccagtccaccagacatgaggactgac

SEQ ID NO: 97097 - DNA, 21 bp, Artificial Sequence
  primer
ccaaagaagcatggacaaatc

SEQ ID NO: 97098 - DNA, 37 bp, Artificial Sequence
  primer
gtaaaacgacggccagtctgcaggcagtcacactgag

SEQ ID NO: 97099 - DNA, 21 bp, Artificial Sequence
  primer
ctacctaagtgaggtcccggc

SEQ ID NO: 97100 - DNA, 22 bp, Artificial Sequence
  primer
gccgtatacgtcagacataggg

SEQ ID NO: 97101 - DNA, 35 bp, Artificial Sequence
  primer
gtaaaacgacggccagtgatcaggccagagcccag

SEQ ID NO: 97102 - DNA, 34 bp, Artificial Sequence
  primer
gtaaaacgacggccagtaacacgggcagcaggag

SEQ ID NO: 97103 - DNA, 35 bp, Artificial Sequence
  primer
gtaaaacgacggccagttcagtggcgatccaggag

SEQ ID NO: 97104 - DNA, 37 bp, Artificial Sequence
  primer
gtaaaacgacggccagtgataagccaggccaggtagg

SEQ ID NO: 97105 - DNA, 38 bp, Artificial Sequence
  primer
gtaaaacgacggccagtggagtgaaggcgatggagtag

SEQ ID NO: 97106 - DNA, 38 bp, Artificial Sequence
  primer
gtaaaacgacggccagtggttcttgagcatgaagatgg

SEQ ID NO: 97107 - DNA, 21 bp, Artificial Sequence
  primer
tcaccgttaactgctggtctc

SEQ ID NO: 97108 - DNA, 21 bp, Artificial Sequence
  primer
catctgggtagaacctgaggg

SEQ ID NO: 97109 - DNA, 41 bp, Artificial Sequence
  primer
gtaaaacgacggccagtccagcctatacccagatttctatc

SEQ ID NO: 97110 - DNA, 37 bp, Artificial Sequence
  primer
gtaaaacgacggccagtcctcaggctctctgctctcc

SEQ ID NO: 97111 - DNA, 22 bp, Artificial Sequence
  primer
gcatggtaagcagctggaatag

SEQ ID NO: 97112 - DNA, 21 bp, Artificial Sequence
  primer
acgagttagggacaaagctgg

SEQ ID NO: 97113 - DNA, 21 bp, Artificial Sequence
  primer
atgacaaagacctggaggagg

SEQ ID NO: 97114 - DNA, 21 bp, Artificial Sequence
  primer
catgggacaggaaactcattc

SEQ ID NO: 97115 - DNA, 22 bp, Artificial Sequence
  primer
ttcactcactcgttcacagagc

SEQ ID NO: 97116 - DNA, 38 bp, Artificial Sequence
  primer
gtaaaacgacggccagtcttaggtcctgggtgtcatgg

SEQ ID NO: 97117 - DNA, 21 bp, Artificial Sequence
  primer
taaggctaggctgagccactc

SEQ ID NO: 97118 - DNA, 21 bp, Artificial Sequence
  primer
cacagttatgccatcaaaggg

SEQ ID NO: 97119 - DNA, 38 bp, Artificial Sequence
  primer
gtaaaacgacggccagtattcccaacagtggaaagtcg

SEQ ID NO: 97120 - DNA, 21 bp, Artificial Sequence
  primer
agagggttctaggaagctggg

SEQ ID NO: 97121 - DNA, 38 bp, Artificial Sequence
  primer
gtaaaacgacggccagtgtgggtgggataactggtagg

SEQ ID NO: 97122 - DNA, 21 bp, Artificial Sequence
  primer
gggcatcctgtgttctacctg

SEQ ID NO: 97123 - DNA, 37 bp, Artificial Sequence
  primer
gtaaaacgacggccagtgaagttcttggccttcaggg

SEQ ID NO: 97124 - DNA, 21 bp, Artificial Sequence
  primer
catggaagttcagctttgcag

SEQ ID NO: 97125 - DNA, 20 bp, Artificial Sequence
  primer
gtctttctgtgaaccgccac

SEQ ID NO: 97126 - DNA, 21 bp, Artificial Sequence
  primer
gtctacgggacccagaaatcc

SEQ ID NO: 97127 - DNA, 21 bp, Artificial Sequence
  primer
agggctcagaaccatttgaag

SEQ ID NO: 97128 - DNA, 21 bp, Artificial Sequence
  primer
agttggtgacaggacaagacc

SEQ ID NO: 97129 - DNA, 20 bp, Artificial Sequence
  primer
gtgccaacaggaaggtgtgt

SEQ ID NO: 97130 - DNA, 37 bp, Artificial Sequence
  primer
gtaaaacgacggccagtctggcaaatgagggaacaag

SEQ ID NO: 97131 - DNA, 37 bp, Artificial Sequence
  primer
gtaaaacgacggccagtactgcaggcatctgagcttc

SEQ ID NO: 97132 - DNA, 38 bp, Artificial Sequence
  primer
gtaaaacgacggccagtccaagggttgagtcaaaggac

SEQ ID NO: 97133 - DNA, 35 bp, Artificial Sequence
  primer
gtaaaacgacggccagtcaccgcgtaggtacagcc

SEQ ID NO: 97134 - DNA, 37 bp, Artificial Sequence
  primer
gtaaaacgacggccagtggtcgttggtgtctttgacc

SEQ ID NO: 97135 - DNA, 36 bp, Artificial Sequence
  primer
gtaaaacgacggccagtgtgcagctggaggatgagg

SEQ ID NO: 97136 - DNA, 20 bp, Artificial Sequence
  primer
ggtagttgggcatcggaaac

SEQ ID NO: 97137 - DNA, 38 bp, Artificial Sequence
  primer
gtaaaacgacggccagtctccaccaggagctggtactc

SEQ ID NO: 97138 - DNA, 38 bp, Artificial Sequence
  primer
gtaaaacgacggccagtttctggacatcctcgaaatcc

SEQ ID NO: 97139 - DNA, 38 bp, Artificial Sequence
  primer
gtaaaacgacggccagtctgctcacaaagataggctcg

SEQ ID NO: 97140 - DNA, 18 bp, Artificial Sequence
  primer
caaccggagctgttgtgg

SEQ ID NO: 97141 - DNA, 21 bp, Artificial Sequence
  primer
ctgctgctcctgcttgtagtc

SEQ ID NO: 97142 - DNA, 21 bp, Artificial Sequence
  primer
gcgacctggttctcatagtcc

SEQ ID NO: 97143 - DNA, 21 bp, Artificial Sequence
  primer
agagcccaaaggttgtacacg

SEQ ID NO: 97144 - DNA, 21 bp, Artificial Sequence
  primer
ctgcaccaccagcacatactc

SEQ ID NO: 97145 - DNA, 38 bp, Artificial Sequence
  primer
gtaaaacgacggccagttcaccagacacagacacctcc

SEQ ID NO: 97146 - DNA, 21 bp, Artificial Sequence
  primer
gtcttgaacttgggagaaccg

SEQ ID NO: 97147 - DNA, 38 bp, Artificial Sequence
  primer
gtaaaacgacggccagtgtgtcgttctggacgttgaag

SEQ ID NO: 97148 - DNA, 21 bp, Artificial Sequence
  primer
atctccgtctcgcagtagtcg

SEQ ID NO: 97149 - DNA, 38 bp, Artificial Sequence
  primer
gtaaaacgacggccagtcagaggaaaccacctgagacc

SEQ ID NO: 97150 - DNA, 38 bp, Artificial Sequence
  primer
gtaaaacgacggccagtaactatcaaaggccacacacg

SEQ ID NO: 97151 - DNA, 21 bp, Artificial Sequence
  primer
accttgtgattcacccacctc

SEQ ID NO: 97152 - DNA, 20 bp, Artificial Sequence
  primer
ccaggctcaagtgactctcc

SEQ ID NO: 97153 - DNA, 21 bp, Artificial Sequence
  primer
ctctagcctggaatgaggtcg

SEQ ID NO: 97154 - DNA, 38 bp, Artificial Sequence
  primer
gtaaaacgacggccagtcaagcagtgacctctgtgtgg

SEQ ID NO: 97155 - DNA, 21 bp, Artificial Sequence
  primer
tgcagcatataccaccagagg

SEQ ID NO: 97156 - DNA, 19 bp, Artificial Sequence
  primer
agtagcaggtgcccgagtg

SEQ ID NO: 97157 - DNA, 20 bp, Artificial Sequence
  primer
cacaaggtctctggtgggtc

SEQ ID NO: 97158 - DNA, 38 bp, Artificial Sequence
  primer
gtaaaacgacggccagtagctaacaggttgaccaacgg

SEQ ID NO: 97159 - DNA, 36 bp, Artificial Sequence
  primer
gtaaaacgacggccagtacggaaccacagggagttg

SEQ ID NO: 97160 - DNA, 39 bp, Artificial Sequence
  primer
gtaaaacgacggccagtgaagacactgagtcgagggaac

SEQ ID NO: 97161 - DNA, 20 bp, Artificial Sequence
  primer
agggtatgtgaaggcgtgtg

SEQ ID NO: 97162 - DNA, 21 bp, Artificial Sequence
  primer
gaactcagaacacgagggagc

SEQ ID NO: 97163 - DNA, 21 bp, Artificial Sequence
  primer
cacgaaacattccatgagtcc

SEQ ID NO: 97164 - DNA, 20 bp, Artificial Sequence
  primer
agacacagagctgggtcctc

SEQ ID NO: 97165 - DNA, 38 bp, Artificial Sequence
  primer
gtaaaacgacggccagtaaccgtcttccacgaactgag

SEQ ID NO: 97166 - DNA, 19 bp, Artificial Sequence
  primer
ctaagagcatggccaaggg

SEQ ID NO: 97167 - DNA, 37 bp, Artificial Sequence
  primer
gtaaaacgacggccagtagatcttcagtgcgcaggtc

SEQ ID NO: 97168 - DNA, 38 bp, Artificial Sequence
  primer
gtaaaacgacggccagtgtgtggtatcctgtggcagac

SEQ ID NO: 97169 - DNA, 21 bp, Artificial Sequence
  primer
gtgcatctgtgtgtggacatc

SEQ ID NO: 97170 - DNA, 20 bp, Artificial Sequence
  primer
ggctcagcaggtttgaggac

SEQ ID NO: 97171 - DNA, 38 bp, Artificial Sequence
  primer
gtaaaacgacggccagtagtggccaggacaggactatg

SEQ ID NO: 97172 - DNA, 20 bp, Artificial Sequence
  primer
gcagggaagagaaaggaggg

SEQ ID NO: 97173 - DNA, 20 bp, Artificial Sequence
  primer
ctgctcagaggagttggtgg

SEQ ID NO: 97174 - DNA, 21 bp, Artificial Sequence
  primer
ggattccagacagcccaatac

SEQ ID NO: 97175 - DNA, 21 bp, Artificial Sequence
  primer
gttccctggagacacaagtgg

SEQ ID NO: 97176 - DNA, 21 bp, Artificial Sequence
  primer
ttctaaggcctggaagagcag

SEQ ID NO: 97177 - DNA, 37 bp, Artificial Sequence
  primer
gtaaaacgacggccagtgttgaatggcaggacacagg

SEQ ID NO: 97178 - DNA, 38 bp, Artificial Sequence
  primer
gtaaaacgacggccagtcagtctgtccagtgaccgaag

SEQ ID NO: 97179 - DNA, 21 bp, Artificial Sequence
  primer
catatcctgggaggaagggac

SEQ ID NO: 97180 - DNA, 19 bp, Artificial Sequence
  primer
caggaggccacgtctgttc

SEQ ID NO: 97181 - DNA, 19 bp, Artificial Sequence
  primer
aggtgaggtgggtgtcagg

SEQ ID NO: 97182 - DNA, 20 bp, Artificial Sequence
  primer
ctttggcacttgtcaccagg

SEQ ID NO: 97183 - DNA, 36 bp, Artificial Sequence
  primer
gtaaaacgacggccagttgcaggactggcatctgag

SEQ ID NO: 97184 - DNA, 38 bp, Artificial Sequence
  primer
gtaaaacgacggccagtgtactccagtcgacctgcctc

SEQ ID NO: 97185 - DNA, 38 bp, Artificial Sequence
  primer
gtaaaacgacggccagtgtgctcttggtctcacgatcc

SEQ ID NO: 97186 - DNA, 21 bp, Artificial Sequence
  primer
ggtcatggtcattggtgtcag

SEQ ID NO: 97187 - DNA, 21 bp, Artificial Sequence
  primer
agtcacatcctccctcacctg

SEQ ID NO: 97188 - DNA, 38 bp, Artificial Sequence
  primer
gtaaaacgacggccagtggacatggagaaccaggtagc

SEQ ID NO: 97189 - DNA, 38 bp, Artificial Sequence
  primer
gtaaaacgacggccagtctctggttgggtaaaggttgg

SEQ ID NO: 97190 - DNA, 21 bp, Artificial Sequence
  primer
gtgggagctctgaaagacagg

SEQ ID NO: 97191 - DNA, 21 bp, Artificial Sequence
  primer
gaatcacgatcagtggctgag

SEQ ID NO: 97192 - DNA, 21 bp, Artificial Sequence
  primer
aaagtcaccgtctccatcgtc

SEQ ID NO: 97193 - DNA, 21 bp, Artificial Sequence
  primer
agctgaaagacctcagggatg

SEQ ID NO: 97194 - DNA, 38 bp, Artificial Sequence
  primer
gtaaaacgacggccagtaaggatctcaaagttgcccag

SEQ ID NO: 97195 - DNA, 38 bp, Artificial Sequence
  primer
gtaaaacgacggccagtggtggatctgtagctgcttcc

SEQ ID NO: 97196 - DNA, 21 bp, Artificial Sequence
  primer
caggctgcggttgaggtatag

SEQ ID NO: 97197 - DNA, 21 bp, Artificial Sequence
  primer
tcacgacagaggcaggtgtag

SEQ ID NO: 97198 - DNA, 21 bp, Artificial Sequence
  primer
agcatttgtcctgatttgtgc

SEQ ID NO: 97199 - DNA, 38 bp, Artificial Sequence
  primer
gtaaaacgacggccagtcttcaaccacagaacaggagg

SEQ ID NO: 97200 - DNA, 21 bp, Artificial Sequence
  primer
gcccagatttggctgatagag

SEQ ID NO: 97201 - DNA, 21 bp, Artificial Sequence
  primer
ccttcctctcagccagaaatg

SEQ ID NO: 97202 - DNA, 37 bp, Artificial Sequence
  primer
gtaaaacgacggccagtaggcaaagggagagagaccc

SEQ ID NO: 97203 - DNA, 21 bp, Artificial Sequence
  primer
cctctgagaccctccattctg

SEQ ID NO: 97204 - DNA, 37 bp, Artificial Sequence
  primer
gtaaaacgacggccagtgtctcctgtgttgccctttc

SEQ ID NO: 97205 - DNA, 21 bp, Artificial Sequence
  primer
atccagcggcctctatatgtc

SEQ ID NO: 97206 - DNA, 37 bp, Artificial Sequence
  primer
gtaaaacgacggccagtgagcagtgttgccctcagtg

SEQ ID NO: 97207 - DNA, 21 bp, Artificial Sequence
  primer
ctcagagaggtggtgtgatgc

SEQ ID NO: 97208 - DNA, 21 bp, Artificial Sequence
  primer
acctaggtgagccctatgtgg

SEQ ID NO: 97209 - DNA, 38 bp, Artificial Sequence
  primer
gtaaaacgacggccagtaggaagacccatccctacagc

SEQ ID NO: 97210 - DNA, 37 bp, Artificial Sequence
  primer
gtaaaacgacggccagtaagagcacatggtcacccag

SEQ ID NO: 97211 - DNA, 21 bp, Artificial Sequence
  primer
atgtgaaccaaggaagatggg

SEQ ID NO: 97212 - DNA, 38 bp, Artificial Sequence
  primer
gtaaaacgacggccagtgttctcaaagatgggagtggg

SEQ ID NO: 97213 - DNA, 21 bp, Artificial Sequence
  primer
gagctccttgtaggtgggatg

SEQ ID NO: 97214 - DNA, 20 bp, Artificial Sequence
  primer
agatcggacctgtgaggcag

SEQ ID NO: 97215 - DNA, 22 bp, Artificial Sequence
  primer
ggacactgtcacacttagctgg

SEQ ID NO: 97216 - DNA, 37 bp, Artificial Sequence
  primer
gtaaaacgacggccagtacagtcaccacggcagtcac

SEQ ID NO: 97217 - DNA, 38 bp, Artificial Sequence
  primer
gtaaaacgacggccagtcactgaccctgtgtgaggaag

SEQ ID NO: 97218 - DNA, 37 bp, Artificial Sequence
  primer
gtaaaacgacggccagtcagggaattaggaagggcag

SEQ ID NO: 97219 - DNA, 20 bp, Artificial Sequence
  primer
agccacagaagaggaaaccc

SEQ ID NO: 97220 - DNA, 21 bp, Artificial Sequence
  primer
atgtgggtggagagaacatgg

SEQ ID NO: 97221 - DNA, 21 bp, Artificial Sequence
  primer
tggcctcagctgttcctaaag

SEQ ID NO: 97222 - DNA, 21 bp, Artificial Sequence
  primer
gatagggacaggccatgagtc

SEQ ID NO: 97223 - DNA, 20 bp, Artificial Sequence
  primer
ggacctccttgctaagcacc

SEQ ID NO: 97224 - DNA, 21 bp, Artificial Sequence
  primer
gaacacagcatttcacctccc

SEQ ID NO: 97225 - DNA, 38 bp, Artificial Sequence
  primer
gtaaaacgacggccagtcagtgtgtgctcctcaactcc

SEQ ID NO: 97226 - DNA, 21 bp, Artificial Sequence
  primer
tccgtgtcaggatctaggagg

SEQ ID NO: 97227 - DNA, 20 bp, Artificial Sequence
  primer
agtcctgcttcccaagaacc

SEQ ID NO: 97228 - DNA, 38 bp, Artificial Sequence
  primer
gtaaaacgacggccagtcttcttaaggatgcctgtggg

SEQ ID NO: 97229 - DNA, 21 bp, Artificial Sequence
  primer
atttgtcctccaaatgccatc

SEQ ID NO: 97230 - DNA, 38 bp, Artificial Sequence
  primer
gtaaaacgacggccagtgcactagatggccttaggtgg

SEQ ID NO: 97231 - DNA, 36 bp, Artificial Sequence
  primer
gtaaaacgacggccagttttgcaaaggtcctgtccg

SEQ ID NO: 97232 - DNA, 20 bp, Artificial Sequence
  primer
tccctgttgcccataattcc

SEQ ID NO: 97233 - DNA, 18 bp, Artificial Sequence
  primer
gggtgctgaacctgatgc

SEQ ID NO: 97234 - DNA, 38 bp, Artificial Sequence
  primer
gtaaaacgacggccagtgcgtctggtagttgtactgcg

SEQ ID NO: 97235 - DNA, 36 bp, Artificial Sequence
  primer
gtaaaacgacggccagtatgctgaacagctccagcg

SEQ ID NO: 97236 - DNA, 21 bp, Artificial Sequence
  primer
gatagggtagccctcctccac

SEQ ID NO: 97237 - DNA, 38 bp, Artificial Sequence
  primer
gtaaaacgacggccagtatgttgtagtgcaccaatccg

SEQ ID NO: 97238 - DNA, 38 bp, Artificial Sequence
  primer
gtaaaacgacggccagtgcctgaatgtggatgactgag

SEQ ID NO: 97239 - DNA, 19 bp, Artificial Sequence
  primer
cacggtgacactggctgag

SEQ ID NO: 97240 - DNA, 38 bp, Artificial Sequence
  primer
gtaaaacgacggccagtaccagcttgaagtagcgttcc

SEQ ID NO: 97241 - DNA, 21 bp, Artificial Sequence
  primer
cattgtcccgagctgtgatag

SEQ ID NO: 97242 - DNA, 21 bp, Artificial Sequence
  primer
ctggaaagtgtactggacccg

SEQ ID NO: 97243 - DNA, 38 bp, Artificial Sequence
  primer
gtaaaacgacggccagtactcctcagctgggaagacag

SEQ ID NO: 97244 - DNA, 21 bp, Artificial Sequence
  primer
agggctgttgtcattctggtc

SEQ ID NO: 97245 - DNA, 38 bp, Artificial Sequence
  primer
gtaaaacgacggccagtatccctctttggtttgaggtg

SEQ ID NO: 97246 - DNA, 38 bp, Artificial Sequence
  primer
gtaaaacgacggccagtacggacacgcatttcatgtag

SEQ ID NO: 97247 - DNA, 38 bp, Artificial Sequence
  primer
gtaaaacgacggccagttcccagtactcactcgcattg

SEQ ID NO: 97248 - DNA, 39 bp, Artificial Sequence
  primer
gtaaaacgacggccagtcagtcaggaatctgagtcaggg

SEQ ID NO: 97249 - DNA, 21 bp, Artificial Sequence
  primer
gcacagtgaagcaaacctgag

SEQ ID NO: 97250 - DNA, 21 bp, Artificial Sequence
  primer
aatcatccacgcttagcacag

SEQ ID NO: 97251 - DNA, 21 bp, Artificial Sequence
  primer
aaagatgggagagtttggcag

SEQ ID NO: 97252 - DNA, 38 bp, Artificial Sequence
  primer
gtaaaacgacggccagtatggagtcctccacttcctcc

SEQ ID NO: 97253 - DNA, 38 bp, Artificial Sequence
  primer
gtaaaacgacggccagtccaaagttccagctcagtgtg

SEQ ID NO: 97254 - DNA, 21 bp, Artificial Sequence
  primer
gagaatcaagggctagggtcc

SEQ ID NO: 97255 - DNA, 21 bp, Artificial Sequence
  primer
aggagctggactagaggtggg

SEQ ID NO: 97256 - DNA, 21 bp, Artificial Sequence
  primer
gctagactcccacctccaatg

SEQ ID NO: 97257 - DNA, 38 bp, Artificial Sequence
  primer
gtaaaacgacggccagtatgatccctggttctgacagg

SEQ ID NO: 97258 - DNA, 38 bp, Artificial Sequence
  primer
gtaaaacgacggccagttaagatgcctccacggtatcc

SEQ ID NO: 97259 - DNA, 21 bp, Artificial Sequence
  primer
agaggttagggcccaagtcag

SEQ ID NO: 97260 - DNA, 21 bp, Artificial Sequence
  primer
tgggtgtaagtggtctccctc

SEQ ID NO: 97261 - DNA, 38 bp, Artificial Sequence
  primer
gtaaaacgacggccagtcttccacctctttgcaggaac

SEQ ID NO: 97262 - DNA, 38 bp, Artificial Sequence
  primer
gtaaaacgacggccagtgagttcaagggctagggtgtg

SEQ ID NO: 97263 - DNA, 21 bp, Artificial Sequence
  primer
agagcccaggaccttcacttc

SEQ ID NO: 97264 - DNA, 21 bp, Artificial Sequence
  primer
attggcattgatagccacagc

SEQ ID NO: 97265 - DNA, 22 bp, Artificial Sequence
  primer
ggcaggagggcaacatagtatc

SEQ ID NO: 97266 - DNA, 38 bp, Artificial Sequence
  primer
gtaaaacgacggccagtgaacctacgcatctacccacc

SEQ ID NO: 97267 - DNA, 21 bp, Artificial Sequence
  primer
ggtacagcattcctcatggtc

SEQ ID NO: 97268 - DNA, 37 bp, Artificial Sequence
  primer
gtaaaacgacggccagtggatggttgatgggttgttg

SEQ ID NO: 97269 - DNA, 37 bp, Artificial Sequence
  primer
gtaaaacgacggccagtatccctgacctctgaccctg

SEQ ID NO: 97270 - DNA, 38 bp, Artificial Sequence
  primer
gtaaaacgacggccagtctgagggtgtgtgttccagag

SEQ ID NO: 97271 - DNA, 38 bp, Artificial Sequence
  primer
gtaaaacgacggccagtctgagtccactgcacctcctc

SEQ ID NO: 97272 - DNA, 38 bp, Artificial Sequence
  primer
gtaaaacgacggccagtagggcaggtgtgacttcattc

SEQ ID NO: 97273 - DNA, 22 bp, Artificial Sequence
  primer
tccagtaagagtcagctccagg

SEQ ID NO: 97274 - DNA, 21 bp, Artificial Sequence
  primer
tcaaagagagccgtgttgttg

SEQ ID NO: 97275 - DNA, 38 bp, Artificial Sequence
  primer
gtaaaacgacggccagttgtgtggtgggaagcatttag

SEQ ID NO: 97276 - DNA, 38 bp, Artificial Sequence
  primer
gtaaaacgacggccagtaaggacgaatcaggagtggac

SEQ ID NO: 97277 - DNA, 38 bp, Artificial Sequence
  primer
gtaaaacgacggccagtcccttaactggaggtggacag

SEQ ID NO: 97278 - DNA, 21 bp, Artificial Sequence
  primer
ctcagtttgggatgaggaagc

SEQ ID NO: 97279 - DNA, 21 bp, Artificial Sequence
  primer
tctagaagagtagcggctggc

SEQ ID NO: 97280 - DNA, 38 bp, Artificial Sequence
  primer
gtaaaacgacggccagtcctagacagagagtccagcgg

SEQ ID NO: 97281 - DNA, 38 bp, Artificial Sequence
  primer
gtaaaacgacggccagtagttgaaagaggcaaggatgg

SEQ ID NO: 97282 - DNA, 38 bp, Artificial Sequence
  primer
gtaaaacgacggccagttttcttgccagattcctgtcc

SEQ ID NO: 97283 - DNA, 20 bp, Artificial Sequence
  primer
agatgcacatggagcctcag

SEQ ID NO: 97284 - DNA, 21 bp, Artificial Sequence
  primer
acaagaagacggcgttaggag

SEQ ID NO: 97285 - DNA, 21 bp, Artificial Sequence
  primer
agaggtcccttggccagttag

SEQ ID NO: 97286 - DNA, 38 bp, Artificial Sequence
  primer
gtaaaacgacggccagtctgctatcaccacgcagaatc

SEQ ID NO: 97287 - DNA, 38 bp, Artificial Sequence
  primer
gtaaaacgacggccagtagagaacaaagggaaggcgag

SEQ ID NO: 97288 - DNA, 35 bp, Artificial Sequence
  primer
gtaaaacgacggccagtggtgaagtcgtccatgcc

SEQ ID NO: 97289 - DNA, 36 bp, Artificial Sequence
  primer
gtaaaacgacggccagtgccaaccagtagtgctccc

SEQ ID NO: 97290 - DNA, 34 bp, Artificial Sequence
  primer
gtaaaacgacggccagttgccgggagggaagaag

SEQ ID NO: 97291 - DNA, 19 bp, Artificial Sequence
  primer
ggtgatggtggcattaggg

SEQ ID NO: 97292 - DNA, 38 bp, Artificial Sequence
  primer
gtaaaacgacggccagtatcaacatcaccctcctcctc

SEQ ID NO: 97293 - DNA, 38 bp, Artificial Sequence
  primer
gtaaaacgacggccagttgaaccagatcgtgttccaag

SEQ ID NO: 97294 - DNA, 38 bp, Artificial Sequence
  primer
gtaaaacgacggccagtaggcaataagcaggcagtgag

SEQ ID NO: 97295 - DNA, 21 bp, Artificial Sequence
  primer
atcgacacacgatcacacttg

SEQ ID NO: 97296 - DNA, 22 bp, Artificial Sequence
  primer
tcattgcactgcttgcattaac

SEQ ID NO: 97297 - DNA, 26 bp, Artificial Sequence
  primer
tttaaaccctagaacatatttgctgc

SEQ ID NO: 97298 - DNA, 21 bp, Artificial Sequence
  primer
tcccataatcccaattccaac

SEQ ID NO: 97299 - DNA, 38 bp, Artificial Sequence
  primer
gtaaaacgacggccagtagcaacacatgcaccattagc

SEQ ID NO: 97300 - DNA, 24 bp, Artificial Sequence
  primer
ccatctctccttacaggtcagaaa

SEQ ID NO: 97301 - DNA, 25 bp, Artificial Sequence
  primer
cttgactttctaccttgaaggagtg

SEQ ID NO: 97302 - DNA, 39 bp, Artificial Sequence
  primer
gtaaaacgacggccagttttggaaacacaatcatttccc

SEQ ID NO: 97303 - DNA, 22 bp, Artificial Sequence
  primer
ttgcctacttgccaaagctaag

SEQ ID NO: 97304 - DNA, 44 bp, Artificial Sequence
  primer
gtaaaacgacggccagtcaatttaacttggtcctcatgatattc

SEQ ID NO: 97305 - DNA, 39 bp, Artificial Sequence
  primer
gtaaaacgacggccagtcatgctaattactgcctgtcca

SEQ ID NO: 97306 - DNA, 21 bp, Artificial Sequence
  primer
taagcctcccagattgctgag

SEQ ID NO: 97307 - DNA, 39 bp, Artificial Sequence
  primer
gtaaaacgacggccagtcgccatcagtgacaatgtaaac

SEQ ID NO: 97308 - DNA, 23 bp, Artificial Sequence
  primer
ccacataatcgtatttctcctgc

SEQ ID NO: 97309 - DNA, 25 bp, Artificial Sequence
  primer
tgatacaggaataacaacattcagc

SEQ ID NO: 97310 - DNA, 40 bp, Artificial Sequence
  primer
gtaaaacgacggccagtttgcaaagagcttcttctcaaag

SEQ ID NO: 97311 - DNA, 21 bp, Artificial Sequence
  primer
tagacaggccaatcatcaagc

SEQ ID NO: 97312 - DNA, 22 bp, Artificial Sequence
  primer
tcaaataactgttggctggttg

SEQ ID NO: 97313 - DNA, 24 bp, Artificial Sequence
  primer
tgacatccatcagtcatatcacac

SEQ ID NO: 97314 - DNA, 24 bp, Artificial Sequence
  primer
tggacatcgctacaagctattatg

SEQ ID NO: 97315 - DNA, 20 bp, Artificial Sequence
  primer
ggctcctggaaacatcgtag

SEQ ID NO: 97316 - DNA, 25 bp, Artificial Sequence
  primer
ttccagtgaagcagtttatagaagg

SEQ ID NO: 97317 - DNA, 38 bp, Artificial Sequence
  primer
gtaaaacgacggccagttgaagcagtctgtccataggc

SEQ ID NO: 97318 - DNA, 41 bp, Artificial Sequence
  primer
gtaaaacgacggccagtggtggagctaaccattctgataac

SEQ ID NO: 97319 - DNA, 42 bp, Artificial Sequence
  primer
gtaaaacgacggccagtttctaacctgatacttccaacttgc

SEQ ID NO: 97320 - DNA, 20 bp, Artificial Sequence
  primer
gatttgaggtccaaacgtgc

SEQ ID NO: 97321 - DNA, 40 bp, Artificial Sequence
  primer
gtaaaacgacggccagtcttcacaattagaaggttcaccc

SEQ ID NO: 97322 - DNA, 41 bp, Artificial Sequence
  primer
gtaaaacgacggccagtttattaaaccaaacatccagcaac

SEQ ID NO: 97323 - DNA, 21 bp, Artificial Sequence
  primer
gctttcctgctgtacaatccc

SEQ ID NO: 97324 - DNA, 39 bp, Artificial Sequence
  primer
gtaaaacgacggccagtttgagtgtcatcgaaatgttgc

SEQ ID NO: 97325 - DNA, 25 bp, Artificial Sequence
  primer
caacatatcgattataacaggcgag

SEQ ID NO: 97326 - DNA, 38 bp, Artificial Sequence
  primer
gtaaaacgacggccagtagagtctctgagcatttgggc

SEQ ID NO: 97327 - DNA, 28 bp, Artificial Sequence
  primer
ctgtatcaaaggatagaaagtgcatact

SEQ ID NO: 97328 - DNA, 37 bp, Artificial Sequence
  primer
gtaaaacgacggccagtcaaccacgcacagctagttt

SEQ ID NO: 97329 - DNA, 36 bp, Artificial Sequence
  primer
gtaaaacgacggccagtgccttcctctaggtgcctg

SEQ ID NO: 97330 - DNA, 26 bp, Artificial Sequence
  primer
tgttagctagatttaaccattccaca

SEQ ID NO: 97331 - DNA, 44 bp, Artificial Sequence
  primer
gtaaaacgacggccagtaaacataattcccttatttctgacatc

SEQ ID NO: 97332 - DNA, 39 bp, Artificial Sequence
  primer
gtaaaacgacggccagtacacagcacaaagtaggtccag

SEQ ID NO: 97333 - DNA, 20 bp, Artificial Sequence
  primer
gcctccaactggctttgata

SEQ ID NO: 97334 - DNA, 43 bp, Artificial Sequence
  primer
gtaaaacgacggccagtgaaatatgcttgtcaaattgtttagg

SEQ ID NO: 97335 - DNA, 27 bp, Artificial Sequence
  primer
aacgtttacagtatctctcttgtctgc

SEQ ID NO: 97336 - DNA, 21 bp, Artificial Sequence
  primer
gcagagcagtctgaggcatac

SEQ ID NO: 97337 - DNA, 40 bp, Artificial Sequence
  primer
gtaaaacgacggccagtaaataataaatgatggcctctgc

SEQ ID NO: 97338 - DNA, 23 bp, Artificial Sequence
  primer
tttcaaaggcattagggataagc

SEQ ID NO: 97339 - DNA, 39 bp, Artificial Sequence
  primer
gtaaaacgacggccagttcagaccatacacttccaccag

SEQ ID NO: 97340 - DNA, 21 bp, Artificial Sequence
  primer
gttcatttgggaggtatgtgc

SEQ ID NO: 97341 - DNA, 23 bp, Artificial Sequence
  primer
aatattcttccaacattgctccc

SEQ ID NO: 97342 - DNA, 41 bp, Artificial Sequence
  primer
gtaaaacgacggccagttcaattaatgaaccacatcctagc

SEQ ID NO: 97343 - DNA, 42 bp, Artificial Sequence
  primer
gtaaaacgacggccagtcaataccttcttggtattcaagagc

SEQ ID NO: 97344 - DNA, 25 bp, Artificial Sequence
  primer
ccctttccaaatatttagggtttat

SEQ ID NO: 97345 - DNA, 45 bp, Artificial Sequence
  primer
gtaaaacgacggccagtcatgccaaatagtagtcttcataattca

SEQ ID NO: 97346 - DNA, 24 bp, Artificial Sequence
  primer
ttaacatgaacaccgtcattatca

SEQ ID NO: 97347 - DNA, 21 bp, Artificial Sequence
  primer
caccaaccctatggcagattt

SEQ ID NO: 97348 - DNA, 24 bp, Artificial Sequence
  primer
tgttctttctcctgaagttcttgg

SEQ ID NO: 97349 - DNA, 42 bp, Artificial Sequence
  primer
gtaaaacgacggccagttccagcattagtaaatactgccaag

SEQ ID NO: 97350 - DNA, 21 bp, Artificial Sequence
  primer
agacacaacgctgcagtgaac

SEQ ID NO: 97351 - DNA, 24 bp, Artificial Sequence
  primer
tcttcaaggaaggcaaatagtgtc

SEQ ID NO: 97352 - DNA, 25 bp, Artificial Sequence
  primer
tcataggaatttccagagaaagaaa

SEQ ID NO: 97353 - DNA, 21 bp, Artificial Sequence
  primer
cccacttcaggtttcggtaag

SEQ ID NO: 97354 - DNA, 20 bp, Artificial Sequence
  primer
ggcacctgaagcaggactta

SEQ ID NO: 97355 - DNA, 37 bp, Artificial Sequence
  primer
gtaaaacgacggccagtctggccaggtatcactctgc

SEQ ID NO: 97356 - DNA, 42 bp, Artificial Sequence
  primer
gtaaaacgacggccagttcgttaccttgatcagtatgaattg

SEQ ID NO: 97357 - DNA, 23 bp, Artificial Sequence
  primer
aaatcaagcccatcacttacaaa

SEQ ID NO: 97358 - DNA, 38 bp, Artificial Sequence
  primer
gtaaaacgacggccagtagagcacaaggagatttgctg

SEQ ID NO: 97359 - DNA, 39 bp, Artificial Sequence
  primer
gtaaaacgacggccagttgttcaaagacacagcgtgtta

SEQ ID NO: 97360 - DNA, 22 bp, Artificial Sequence
  primer
ggccaacttctgtttactctcg

SEQ ID NO: 97361 - DNA, 22 bp, Artificial Sequence
  primer
cgtgcatataccatgtccctac

SEQ ID NO: 97362 - DNA, 38 bp, Artificial Sequence
  primer
gtaaaacgacggccagtgccctttgggatcacatatta

SEQ ID NO: 97363 - DNA, 40 bp, Artificial Sequence
  primer
gtaaaacgacggccagtgcactacaacatcattaccaggg

SEQ ID NO: 97364 - DNA, 21 bp, Artificial Sequence
  primer
gcaggtaagcagaaatgagga

SEQ ID NO: 97365 - DNA, 23 bp, Artificial Sequence
  primer
ttcaagttacggtacagagaccg

SEQ ID NO: 97366 - DNA, 22 bp, Artificial Sequence
  primer
tggatatgtaacaagtggctgc

SEQ ID NO: 97367 - DNA, 21 bp, Artificial Sequence
  primer
ataatcacctccactgagccc

SEQ ID NO: 97368 - DNA, 38 bp, Artificial Sequence
  primer
gtaaaacgacggccagtttgaacaccgatgtgcctaac

SEQ ID NO: 97369 - DNA, 19 bp, Artificial Sequence
  primer
tcagctgggaaagtacggc

SEQ ID NO: 97370 - DNA, 40 bp, Artificial Sequence
  primer
gtaaaacgacggccagtcccaaattgtgataacaactccc

SEQ ID NO: 97371 - DNA, 21 bp, Artificial Sequence
  primer
tagggaaagtgaaggtggagc

SEQ ID NO: 97372 - DNA, 21 bp, Artificial Sequence
  primer
tgacaagcaactgacaaatgg

SEQ ID NO: 97373 - DNA, 21 bp, Artificial Sequence
  primer
aactcttccacatcaactgcg

SEQ ID NO: 97374 - DNA, 21 bp, Artificial Sequence
  primer
actcagcaaggctttggactc

SEQ ID NO: 97375 - DNA, 38 bp, Artificial Sequence
  primer
gtaaaacgacggccagttccctgaggctctcatattcg

SEQ ID NO: 97376 - DNA, 23 bp, Artificial Sequence
  primer
cggactttggtctgcttctaaac

SEQ ID NO: 97377 - DNA, 38 bp, Artificial Sequence
  primer
gtaaaacgacggccagttttccttgttctcaagggcac

SEQ ID NO: 97378 - DNA, 21 bp, Artificial Sequence
  primer
atgcatttccggtttcttcac

SEQ ID NO: 97379 - DNA, 38 bp, Artificial Sequence
  primer
gtaaaacgacggccagtttgctttaaaccaccagcctc

SEQ ID NO: 97380 - DNA, 38 bp, Artificial Sequence
  primer
gtaaaacgacggccagtcttctaattgcaccaactgcg

SEQ ID NO: 97381 - DNA, 38 bp, Artificial Sequence
  primer
gtaaaacgacggccagtgtttgcagagagcactgaagg

SEQ ID NO: 97382 - DNA, 21 bp, Artificial Sequence
  primer
ttactctcgtccaatggagcc

SEQ ID NO: 97383 - DNA, 21 bp, Artificial Sequence
  primer
acaagaggatgacagggatgg

SEQ ID NO: 97384 - DNA, 21 bp, Artificial Sequence
  primer
acctcacagagggactcaagc

SEQ ID NO: 97385 - DNA, 21 bp, Artificial Sequence
  primer
atcttctgtgtcgatgccaag

SEQ ID NO: 97386 - DNA, 22 bp, Artificial Sequence
  primer
ggtaccaaagcattaggaccag

SEQ ID NO: 97387 - DNA, 38 bp, Artificial Sequence
  primer
gtaaaacgacggccagtttccagctgtcattcaccttg

SEQ ID NO: 97388 - DNA, 21 bp, Artificial Sequence
  primer
caggtagagggcttcatgctc

SEQ ID NO: 97389 - DNA, 20 bp, Artificial Sequence
  primer
acaactgatccagtgccgtg

SEQ ID NO: 97390 - DNA, 21 bp, Artificial Sequence
  primer
aatgcgaactcacctttctcc

SEQ ID NO: 97391 - DNA, 21 bp, Artificial Sequence
  primer
tgcaattccctttcaaggttc

SEQ ID NO: 97392 - DNA, 39 bp, Artificial Sequence
  primer
gtaaaacgacggccagttgctactgcctcatttagctcc

SEQ ID NO: 97393 - DNA, 38 bp, Artificial Sequence
  primer
gtaaaacgacggccagttcctttggaattctctgcctc

SEQ ID NO: 97394 - DNA, 38 bp, Artificial Sequence
  primer
gtaaaacgacggccagtcagactttgggtcatcccttc

SEQ ID NO: 97395 - DNA, 24 bp, Artificial Sequence
  primer
tttaattgtgtttgaagcatctcc

SEQ ID NO: 97396 - DNA, 21 bp, Artificial Sequence
  primer
agcacttggatcttctgctcc

SEQ ID NO: 97397 - DNA, 38 bp, Artificial Sequence
  primer
gtaaaacgacggccagttttctgcaattcaagacccag

SEQ ID NO: 97398 - DNA, 21 bp, Artificial Sequence
  primer
gctcctgatagtgctggatgg

SEQ ID NO: 97399 - DNA, 25 bp, Artificial Sequence
  primer
aagatcgtgaagttaatgtgagacc

SEQ ID NO: 97400 - DNA, 42 bp, Artificial Sequence
  primer
gtaaaacgacggccagtcaagctatgagactgtagatgaccc

SEQ ID NO: 97401 - DNA, 21 bp, Artificial Sequence
  primer
tgatcccaagataagcacaaa

SEQ ID NO: 97402 - DNA, 21 bp, Artificial Sequence
  primer
acttctggaagtccctctggc

SEQ ID NO: 97403 - DNA, 42 bp, Artificial Sequence
  primer
gtaaaacgacggccagtaagcagactattgcttatgaacgtc

SEQ ID NO: 97404 - DNA, 37 bp, Artificial Sequence
  primer
gtaaaacgacggccagttttgaaagcgctcctgaatc

SEQ ID NO: 97405 - DNA, 42 bp, Artificial Sequence
  primer
gtaaaacgacggccagtctaataaagcatgccctgactaaag

SEQ ID NO: 97406 - DNA, 21 bp, Artificial Sequence
  primer
gaattcgaaccctagcccttc

SEQ ID NO: 97407 - DNA, 21 bp, Artificial Sequence
  primer
cagtagcatgtgcctgtggtc

SEQ ID NO: 97408 - DNA, 41 bp, Artificial Sequence
  primer
gtaaaacgacggccagtctctagcctgcatgatagtgagac

SEQ ID NO: 97409 - DNA, 39 bp, Artificial Sequence
  primer
gtaaaacgacggccagtgcttgactaattcactcagccc

SEQ ID NO: 97410 - DNA, 21 bp, Artificial Sequence
  primer
ccagacaaaggtagttggcag

SEQ ID NO: 97411 - DNA, 22 bp, Artificial Sequence
  primer
cgaattccaatcatagcattcc

SEQ ID NO: 97412 - DNA, 39 bp, Artificial Sequence
  primer
gtaaaacgacggccagtctcagtggctaagagatctggc

SEQ ID NO: 97413 - DNA, 35 bp, Artificial Sequence
  primer
gtaaaacgacggccagtttgcttgaaccaggaggc

SEQ ID NO: 97414 - DNA, 38 bp, Artificial Sequence
  primer
gtaaaacgacggccagtttacggtggacagacaaatgc

SEQ ID NO: 97415 - DNA, 21 bp, Artificial Sequence
  primer
cccttctttgaattcactcgc

SEQ ID NO: 97416 - DNA, 42 bp, Artificial Sequence
  primer
gtaaaacgacggccagtgaaacctgcaatgacataaattcac

SEQ ID NO: 97417 - DNA, 39 bp, Artificial Sequence
  primer
gtaaaacgacggccagtggatgggcatcagtacatcatc

SEQ ID NO: 97418 - DNA, 22 bp, Artificial Sequence
  primer
tcgggctagcctttaaagaaac

SEQ ID NO: 97419 - DNA, 24 bp, Artificial Sequence
  primer
aaacatggaaaggcttcatcttag

SEQ ID NO: 97420 - DNA, 40 bp, Artificial Sequence
  primer
gtaaaacgacggccagtgcagcttgacatatctcctcaac

SEQ ID NO: 97421 - DNA, 37 bp, Artificial Sequence
  primer
gtaaaacgacggccagtttgattggcaatggtccttc

SEQ ID NO: 97422 - DNA, 26 bp, Artificial Sequence
  primer
cactcttggttctagctttactgtcc

SEQ ID NO: 97423 - DNA, 21 bp, Artificial Sequence
  primer
gccctgttgaaagaggaagtc

SEQ ID NO: 97424 - DNA, 38 bp, Artificial Sequence
  primer
gtaaaacgacggccagtccaaatcctcactgcggttac

SEQ ID NO: 97425 - DNA, 21 bp, Artificial Sequence
  primer
ttggaacaccttcatcgtcac

SEQ ID NO: 97426 - DNA, 38 bp, Artificial Sequence
  primer
gtaaaacgacggccagtattagggtagcatgtctgcgg

SEQ ID NO: 97427 - DNA, 22 bp, Artificial Sequence
  primer
aagaatttcatcatcagctccg

SEQ ID NO: 97428 - DNA, 24 bp, Artificial Sequence
  primer
tgtacacatcattgactaccctgg

SEQ ID NO: 97429 - DNA, 22 bp, Artificial Sequence
  primer
catccatgacattatcgtggtc

SEQ ID NO: 97430 - DNA, 36 bp, Artificial Sequence
  primer
gtaaaacgacggccagtccatccagctccaggacac

SEQ ID NO: 97431 - DNA, 38 bp, Artificial Sequence
  primer
gtaaaacgacggccagtactggcggaataagatgatgc

SEQ ID NO: 97432 - DNA, 21 bp, Artificial Sequence
  primer
tgggaagttcagtggttcaag

SEQ ID NO: 97433 - DNA, 37 bp, Artificial Sequence
  primer
gtaaaacgacggccagtgcatcttgtccaaagagccc

SEQ ID NO: 97434 - DNA, 23 bp, Artificial Sequence
  primer
tctgggcagctgcatagtagtag

SEQ ID NO: 97435 - DNA, 39 bp, Artificial Sequence
  primer
gtaaaacgacggccagttctgacaattgtaccatctggg

SEQ ID NO: 97436 - DNA, 38 bp, Artificial Sequence
  primer
gtaaaacgacggccagtatgcctgtgggacattcattc

SEQ ID NO: 97437 - DNA, 44 bp, Artificial Sequence
  primer
gtaaaacgacggccagttccttagtctattgaaagacagggtag

SEQ ID NO: 97438 - DNA, 20 bp, Artificial Sequence
  primer
agagtagcccaaggctccag

SEQ ID NO: 97439 - DNA, 21 bp, Artificial Sequence
  primer
actgatgcacaatgaccttcc

SEQ ID NO: 97440 - DNA, 22 bp, Artificial Sequence
  primer
cagaaggagggagagagagaga

SEQ ID NO: 97441 - DNA, 19 bp, Artificial Sequence
  primer
cagaggctcagcccaacac

SEQ ID NO: 97442 - DNA, 36 bp, Artificial Sequence
  primer
gtaaaacgacggccagtgtaccgtccaagcacccac

SEQ ID NO: 97443 - DNA, 20 bp, Artificial Sequence
  primer
ctagggctcaacatcatccc

SEQ ID NO: 97444 - DNA, 37 bp, Artificial Sequence
  primer
gtaaaacgacggccagtaaggctgctgcacttcagtc

SEQ ID NO: 97445 - DNA, 38 bp, Artificial Sequence
  primer
gtaaaacgacggccagtctccttgctgccaatgaagac

SEQ ID NO: 97446 - DNA, 19 bp, Artificial Sequence
  primer
aacagggtccagcgttgtc

SEQ ID NO: 97447 - DNA, 20 bp, Artificial Sequence
  primer
gggttagagatcaggcccag

SEQ ID NO: 97448 - DNA, 20 bp, Artificial Sequence
  primer
gtgagaggttcacggtgtgg

SEQ ID NO: 97449 - DNA, 20 bp, Artificial Sequence
  primer
ccctctgtagaatgggagcc

SEQ ID NO: 97450 - DNA, 38 bp, Artificial Sequence
  primer
gtaaaacgacggccagtagacaccaaagatggagaggg

SEQ ID NO: 97451 - DNA, 38 bp, Artificial Sequence
  primer
gtaaaacgacggccagtacagtgagaacagcaggcatc

SEQ ID NO: 97452 - DNA, 38 bp, Artificial Sequence
  primer
gtaaaacgacggccagttgttgtgcctaactctcaggg

SEQ ID NO: 97453 - DNA, 38 bp, Artificial Sequence
  primer
gtaaaacgacggccagtatctcagactgggaggcaatg

SEQ ID NO: 97454 - DNA, 38 bp, Artificial Sequence
  primer
gtaaaacgacggccagttcttcgaggtcaacagacagg

SEQ ID NO: 97455 - DNA, 38 bp, Artificial Sequence
  primer
gtaaaacgacggccagtgcttggcctaacacctttcac

SEQ ID NO: 97456 - DNA, 21 bp, Artificial Sequence
  primer
ggagaagcttcatgccatagg

SEQ ID NO: 97457 - DNA, 21 bp, Artificial Sequence
  primer
ggcaataatggcatgtctgtg

SEQ ID NO: 97458 - DNA, 38 bp, Artificial Sequence
  primer
gtaaaacgacggccagtggagctgatggataaagccac

SEQ ID NO: 97459 - DNA, 21 bp, Artificial Sequence
  primer
gcattggagtaccctgctttc

SEQ ID NO: 97460 - DNA, 21 bp, Artificial Sequence
  primer
agatcctgagcttcttgtcgg

SEQ ID NO: 97461 - DNA, 19 bp, Artificial Sequence
  primer
cagccctcctcttccacag

SEQ ID NO: 97462 - DNA, 20 bp, Artificial Sequence
  primer
atctgctgctgcagtgtgtg

SEQ ID NO: 97463 - DNA, 37 bp, Artificial Sequence
  primer
gtaaaacgacggccagtactcctgggctcaagcaatc

SEQ ID NO: 97464 - DNA, 21 bp, Artificial Sequence
  primer
aatcacgttgatctgaggacg

SEQ ID NO: 97465 - DNA, 38 bp, Artificial Sequence
  primer
gtaaaacgacggccagttcctttcgatactgggacagc

SEQ ID NO: 97466 - DNA, 21 bp, Artificial Sequence
  primer
ctccatgtccctcttctctcg

SEQ ID NO: 97467 - DNA, 38 bp, Artificial Sequence
  primer
gtaaaacgacggccagtctcaagcaatcttcccacctc

SEQ ID NO: 97468 - DNA, 23 bp, Artificial Sequence
  primer
tctttgctgatggaatgaaactc

SEQ ID NO: 97469 - DNA, 38 bp, Artificial Sequence
  primer
gtaaaacgacggccagtcactgtgcagagacgaaggtc

SEQ ID NO: 97470 - DNA, 21 bp, Artificial Sequence
  primer
catcaccctgtaccctcttcc

SEQ ID NO: 97471 - DNA, 20 bp, Artificial Sequence
  primer
agagcctatggccaggtgtc

SEQ ID NO: 97472 - DNA, 38 bp, Artificial Sequence
  primer
gtaaaacgacggccagtgtgtgatgcgctctgtattgg

SEQ ID NO: 97473 - DNA, 38 bp, Artificial Sequence
  primer
gtaaaacgacggccagttggttgatgatgacatttccc

SEQ ID NO: 97474 - DNA, 37 bp, Artificial Sequence
  primer
gtaaaacgacggccagttgaatccaggcctccttctc

SEQ ID NO: 97475 - DNA, 20 bp, Artificial Sequence
  primer
cttcacactctgtgcctccc

SEQ ID NO: 97476 - DNA, 37 bp, Artificial Sequence
  primer
gtaaaacgacggccagtgaagccctagggaacaggtg

SEQ ID NO: 97477 - DNA, 37 bp, Artificial Sequence
  primer
gtaaaacgacggccagtatgtcagcgttggctgtttc

SEQ ID NO: 97478 - DNA, 21 bp, Artificial Sequence
  primer
cacagcacaggcttctgtttc

SEQ ID NO: 97479 - DNA, 37 bp, Artificial Sequence
  primer
gtaaaacgacggccagtaccagaagggaagagcgaag

SEQ ID NO: 97480 - DNA, 18 bp, Artificial Sequence
  primer
ggcagagggcaaggaaag

SEQ ID NO: 97481 - DNA, 18 bp, Artificial Sequence
  primer
ttagctgggcatggtggt

SEQ ID NO: 97482 - DNA, 21 bp, Artificial Sequence
  primer
taatgcgcaatgcaaatcaac

SEQ ID NO: 97483 - DNA, 39 bp, Artificial Sequence
  primer
gtaaaacgacggccagtcaatcaaagccatgtaattccc

SEQ ID NO: 97484 - DNA, 25 bp, Artificial Sequence
  primer
ccagaacacgtatttgtggaataag

SEQ ID NO: 97485 - DNA, 21 bp, Artificial Sequence
  primer
ggcagaactcagaaccaaagg

SEQ ID NO: 97486 - DNA, 23 bp, Artificial Sequence
  primer
aaagaagtccagtgccacataag

SEQ ID NO: 97487 - DNA, 37 bp, Artificial Sequence
  primer
gtaaaacgacggccagtgatgccttgctttccctttg

SEQ ID NO: 97488 - DNA, 41 bp, Artificial Sequence
  primer
gtaaaacgacggccagtcaatgataccttgcataaaccaac

SEQ ID NO: 97489 - DNA, 22 bp, Artificial Sequence
  primer
tcttcaatagactgggttcagg

SEQ ID NO: 97490 - DNA, 24 bp, Artificial Sequence
  primer
tccatctcaaagcaaggaattaag

SEQ ID NO: 97491 - DNA, 42 bp, Artificial Sequence
  primer
gtaaaacgacggccagtcaaatgcaaatttctctactctgga

SEQ ID NO: 97492 - DNA, 42 bp, Artificial Sequence
  primer
gtaaaacgacggccagtcatcttccataacaaacgatgctac

SEQ ID NO: 97493 - DNA, 40 bp, Artificial Sequence
  primer
gtaaaacgacggccagtgggcaactaacaagtgaaacaac

SEQ ID NO: 97494 - DNA, 25 bp, Artificial Sequence
  primer
gctagcatacattggtagcatgaag

SEQ ID NO: 97495 - DNA, 40 bp, Artificial Sequence
  primer
gtaaaacgacggccagtcgaacagaagtggtaatgactgc

SEQ ID NO: 97496 - DNA, 25 bp, Artificial Sequence
  primer
agaaaggtgaaatattatggcattg

SEQ ID NO: 97497 - DNA, 22 bp, Artificial Sequence
  primer
tgggcagtaagagtgaaactcc

SEQ ID NO: 97498 - DNA, 23 bp, Artificial Sequence
  primer
aacccatctcttgaagcaaagac

SEQ ID NO: 97499 - DNA, 43 bp, Artificial Sequence
  primer
gtaaaacgacggccagtcatggaacacatctctttacaaacac

SEQ ID NO: 97500 - DNA, 37 bp, Artificial Sequence
  primer
gtaaaacgacggccagttcactgtggataaccgaggg

SEQ ID NO: 97501 - DNA, 39 bp, Artificial Sequence
  primer
gtaaaacgacggccagtgccacccaaggattcagttaag

SEQ ID NO: 97502 - DNA, 41 bp, Artificial Sequence
  primer
gtaaaacgacggccagttttccaagccattcaatatctacc

SEQ ID NO: 97503 - DNA, 38 bp, Artificial Sequence
  primer
gtaaaacgacggccagtacattcctggaggagcagatg

SEQ ID NO: 97504 - DNA, 21 bp, Artificial Sequence
  primer
ccgactagaggagcagaaacg

SEQ ID NO: 97505 - DNA, 21 bp, Artificial Sequence
  primer
aacgtggactggacctctctg

SEQ ID NO: 97506 - DNA, 21 bp, Artificial Sequence
  primer
ccctccagttctgtacaaggc

SEQ ID NO: 97507 - DNA, 21 bp, Artificial Sequence
  primer
ctgtagccctgctggaagaag

SEQ ID NO: 97508 - DNA, 20 bp, Artificial Sequence
  primer
gtgctttcgctccatctcac

SEQ ID NO: 97509 - DNA, 20 bp, Artificial Sequence
  primer
ctagagagggtgtgggcagg

SEQ ID NO: 97510 - DNA, 37 bp, Artificial Sequence
  primer
gtaaaacgacggccagtggtagaggagggaaaggcac

SEQ ID NO: 97511 - DNA, 21 bp, Artificial Sequence
  primer
tgttctgaatggagaaccagc

SEQ ID NO: 97512 - DNA, 38 bp, Artificial Sequence
  primer
gtaaaacgacggccagttctctgctccctgactgttcc

SEQ ID NO: 97513 - DNA, 21 bp, Artificial Sequence
  primer
tcgctatagcaactgtcaggg

SEQ ID NO: 97514 - DNA, 18 bp, Artificial Sequence
  primer
tggcacgtgtgtgtgtgc

SEQ ID NO: 97515 - DNA, 21 bp, Artificial Sequence
  primer
gctcctggagagcagaggtag

SEQ ID NO: 97516 - DNA, 21 bp, Artificial Sequence
  primer
acacatcagctagcgggagac

SEQ ID NO: 97517 - DNA, 19 bp, Artificial Sequence
  primer
tgatccaggcctccttgtc

SEQ ID NO: 97518 - DNA, 38 bp, Artificial Sequence
  primer
gtaaaacgacggccagttgttcagagtgtggaacaggc

SEQ ID NO: 97519 - DNA, 20 bp, Artificial Sequence
  primer
cacactcaggcacccttcag

SEQ ID NO: 97520 - DNA, 18 bp, Artificial Sequence
  primer
acaggcgacccttgtgtg

SEQ ID NO: 97521 - DNA, 36 bp, Artificial Sequence
  primer
gtaaaacgacggccagtacaggcaaacctggctgag

SEQ ID NO: 97522 - DNA, 18 bp, Artificial Sequence
  primer
ggaggcacagcgtgagac

SEQ ID NO: 97523 - DNA, 35 bp, Artificial Sequence
  primer
gtaaaacgacggccagtgctgccaggtatcgaccc

SEQ ID NO: 97524 - DNA, 20 bp, Artificial Sequence
  primer
tggcttctttccacacttgc

SEQ ID NO: 97525 - DNA, 42 bp, Artificial Sequence
  primer
gtaaaacgacggccagtagaatcattcaaagaacccaaattc

SEQ ID NO: 97526 - DNA, 23 bp, Artificial Sequence
  primer
tgtgtgatccacagtcttctttg

SEQ ID NO: 97527 - DNA, 21 bp, Artificial Sequence
  primer
ccctggaatctctggtacagg

SEQ ID NO: 97528 - DNA, 41 bp, Artificial Sequence
  primer
gtaaaacgacggccagtaataatgtccaatgggatgaagac

SEQ ID NO: 97529 - DNA, 37 bp, Artificial Sequence
  primer
gtaaaacgacggccagtctataccacaggtgggctgc

SEQ ID NO: 97530 - DNA, 39 bp, Artificial Sequence
  primer
gtaaaacgacggccagttgccattcttcaaatagcttgg

SEQ ID NO: 97531 - DNA, 39 bp, Artificial Sequence
  primer
gtaaaacgacggccagtgggtgctgctatgcttacattt

SEQ ID NO: 97532 - DNA, 22 bp, Artificial Sequence
  primer
gatattgcctgtgaagaaacgg

SEQ ID NO: 97533 - DNA, 39 bp, Artificial Sequence
  primer
gtaaaacgacggccagtcaaccctggaggtttagaaatg

SEQ ID NO: 97534 - DNA, 44 bp, Artificial Sequence
  primer
gtaaaacgacggccagtttcatgttgagaatctacctcctattc

SEQ ID NO: 97535 - DNA, 44 bp, Artificial Sequence
  primer
gtaaaacgacggccagtggtttcttgacattcctagtctaactg

SEQ ID NO: 97536 - DNA, 21 bp, Artificial Sequence
  primer
ctttcttgctggtggagacac

SEQ ID NO: 97537 - DNA, 38 bp, Artificial Sequence
  primer
gtaaaacgacggccagtccacgaacaacataaaggtgg

SEQ ID NO: 97538 - DNA, 40 bp, Artificial Sequence
  primer
gtaaaacgacggccagtaatatgcaacaatgaagagcatt

SEQ ID NO: 97539 - DNA, 21 bp, Artificial Sequence
  primer
agccacttccataatgtggtg

SEQ ID NO: 97540 - DNA, 40 bp, Artificial Sequence
  primer
gtaaaacgacggccagttgaatccttaaatgaaacaaggg

SEQ ID NO: 97541 - DNA, 30 bp, Artificial Sequence
  primer
cttacatttataagattacgggaacataaa

SEQ ID NO: 97542 - DNA, 21 bp, Artificial Sequence
  primer
aatccctgctgcagtacatga

SEQ ID NO: 97543 - DNA, 37 bp, Artificial Sequence
  primer
gtaaaacgacggccagtgaaatttcagaaggcgcaag

SEQ ID NO: 97544 - DNA, 38 bp, Artificial Sequence
  primer
gtaaaacgacggccagtccctgaagctcaaacacagac

SEQ ID NO: 97545 - DNA, 39 bp, Artificial Sequence
  primer
gtaaaacgacggccagtaagtttgggagtaagccatcaa

SEQ ID NO: 97546 - DNA, 24 bp, Artificial Sequence
  primer
gcaaatgtcacagaggaatctagg

SEQ ID NO: 97547 - DNA, 40 bp, Artificial Sequence
  primer
gtaaaacgacggccagtagtcttattgggagaaggaatgg

SEQ ID NO: 97548 - DNA, 23 bp, Artificial Sequence
  primer
aaaggcaagcatgtattatggtc

SEQ ID NO: 97549 - DNA, 38 bp, Artificial Sequence
  primer
gtaaaacgacggccagtcagatgcatttgaggacactg

SEQ ID NO: 97550 - DNA, 26 bp, Artificial Sequence
  primer
aaatgcaaccaaatttaaataatgac

SEQ ID NO: 97551 - DNA, 24 bp, Artificial Sequence
  primer
ttgcatatatgtatcaggttgctg

SEQ ID NO: 97552 - DNA, 21 bp, Artificial Sequence
  primer
cagtcgtttgaactggagagg

SEQ ID NO: 97553 - DNA, 23 bp, Artificial Sequence
  primer
aagcggtacctaaagtcttgcac

SEQ ID NO: 97554 - DNA, 39 bp, Artificial Sequence
  primer
gtaaaacgacggccagtttaccacagagcaacacattgg

SEQ ID NO: 97555 - DNA, 21 bp, Artificial Sequence
  primer
cttccaagagagatggctgac

SEQ ID NO: 97556 - DNA, 22 bp, Artificial Sequence
  primer
gatctgccataagaaccctgtg

SEQ ID NO: 97557 - DNA, 38 bp, Artificial Sequence
  primer
gtaaaacgacggccagtggatacatgggacttgaaccc

SEQ ID NO: 97558 - DNA, 21 bp, Artificial Sequence
  primer
acctcacctaagccaaggagg

SEQ ID NO: 97559 - DNA, 38 bp, Artificial Sequence
  primer
gtaaaacgacggccagttatgtgattgggtggtcaatg

SEQ ID NO: 97560 - DNA, 20 bp, Artificial Sequence
  primer
ggaagggttcttgaccgttg

SEQ ID NO: 97561 - DNA, 41 bp, Artificial Sequence
  primer
gtaaaacgacggccagtaaggactgaccacctaagtaaccc

SEQ ID NO: 97562 - DNA, 37 bp, Artificial Sequence
  primer
gtaaaacgacggccagtcgccactagcgagagatgag

SEQ ID NO: 97563 - DNA, 21 bp, Artificial Sequence
  primer
gagtgataccagtgtcctggg

SEQ ID NO: 97564 - DNA, 21 bp, Artificial Sequence
  primer
agacaagaccctgtgctgacc

SEQ ID NO: 97565 - DNA, 21 bp, Artificial Sequence
  primer
atgcaccatgactctcttccc

SEQ ID NO: 97566 - DNA, 38 bp, Artificial Sequence
  primer
gtaaaacgacggccagtgaggacatatccaggcaaagg

SEQ ID NO: 97567 - DNA, 21 bp, Artificial Sequence
  primer
agggaaggagatcagagaggg

SEQ ID NO: 97568 - DNA, 21 bp, Artificial Sequence
  primer
taggatacctgccatcccaac

SEQ ID NO: 97569 - DNA, 38 bp, Artificial Sequence
  primer
gtaaaacgacggccagtgtctcttccagctccaaggtg

SEQ ID NO: 97570 - DNA, 38 bp, Artificial Sequence
  primer
gtaaaacgacggccagtaagacagcatgaggaacaggg

SEQ ID NO: 97571 - DNA, 40 bp, Artificial Sequence
  primer
gtaaaacgacggccagttgagagcagcaggtaaatcaaac

SEQ ID NO: 97572 - DNA, 21 bp, Artificial Sequence
  primer
agccctctagggtgactctgc

SEQ ID NO: 97573 - DNA, 38 bp, Artificial Sequence
  primer
gtaaaacgacggccagtgggtctatttccctgtctccc

SEQ ID NO: 97574 - DNA, 19 bp, Artificial Sequence
  primer
tgggatacatgggattggc

SEQ ID NO: 97575 - DNA, 38 bp, Artificial Sequence
  primer
gtaaaacgacggccagtccaggcagagttcagatttcc

SEQ ID NO: 97576 - DNA, 39 bp, Artificial Sequence
  primer
gtaaaacgacggccagtcctacacctatcccaccctgtc

SEQ ID NO: 97577 - DNA, 21 bp, Artificial Sequence
  primer
cctgaggcatagagtcatggg

SEQ ID NO: 97578 - DNA, 37 bp, Artificial Sequence
  primer
gtaaaacgacggccagttagtgcaagtgccacaaggg

SEQ ID NO: 97579 - DNA, 38 bp, Artificial Sequence
  primer
gtaaaacgacggccagtcagaggagggtagtcagccag

SEQ ID NO: 97580 - DNA, 21 bp, Artificial Sequence
  primer
gagctcttcctcatccacctg

SEQ ID NO: 97581 - DNA, 21 bp, Artificial Sequence
  primer
actgtgcagatgaagtcaccg

SEQ ID NO: 97582 - DNA, 38 bp, Artificial Sequence
  primer
gtaaaacgacggccagtaggtcccaaactggtcctctc

SEQ ID NO: 97583 - DNA, 21 bp, Artificial Sequence
  primer
cagcaacatgtcatcaaagcc

SEQ ID NO: 97584 - DNA, 20 bp, Artificial Sequence
  primer
ctgttcctacctggcaccac

SEQ ID NO: 97585 - DNA, 38 bp, Artificial Sequence
  primer
gtaaaacgacggccagtatttccacttgcagaccaagg

SEQ ID NO: 97586 - DNA, 39 bp, Artificial Sequence
  primer
gtaaaacgacggccagtgggacaggattagggataaagg

SEQ ID NO: 97587 - DNA, 21 bp, Artificial Sequence
  primer
ctgcacttggcagagaatttg

SEQ ID NO: 97588 - DNA, 37 bp, Artificial Sequence
  primer
gtaaaacgacggccagtcctgactgagcagggaacac

SEQ ID NO: 97589 - DNA, 38 bp, Artificial Sequence
  primer
gtaaaacgacggccagttagcacagaagccaatgtccc

SEQ ID NO: 97590 - DNA, 38 bp, Artificial Sequence
  primer
gtaaaacgacggccagtcagggcaatcatctactgtgg

SEQ ID NO: 97591 - DNA, 21 bp, Artificial Sequence
  primer
tgaacacctggacagagttgg

SEQ ID NO: 97592 - DNA, 37 bp, Artificial Sequence
  primer
gtaaaacgacggccagtggctgaagactgctcagagg

SEQ ID NO: 97593 - DNA, 21 bp, Artificial Sequence
  primer
aggaagaacaagccttcatgc

SEQ ID NO: 97594 - DNA, 37 bp, Artificial Sequence
  primer
gtaaaacgacggccagtaaggaagaggagatcgctgg

SEQ ID NO: 97595 - DNA, 21 bp, Artificial Sequence
  primer
tggctggtgaatactcaatgc

SEQ ID NO: 97596 - DNA, 38 bp, Artificial Sequence
  primer
gtaaaacgacggccagtgaaggaaggagccaagatcag

SEQ ID NO: 97597 - DNA, 38 bp, Artificial Sequence
  primer
gtaaaacgacggccagtcacaatggacttccctccttc

SEQ ID NO: 97598 - DNA, 37 bp, Artificial Sequence
  primer
gtaaaacgacggccagtgagaagcaggtcagtggctg

SEQ ID NO: 97599 - DNA, 38 bp, Artificial Sequence
  primer
gtaaaacgacggccagtcagttcgatgaagcagatccc

SEQ ID NO: 97600 - DNA, 38 bp, Artificial Sequence
  primer
gtaaaacgacggccagtaggcctctagtcctctgcacc

SEQ ID NO: 97601 - DNA, 19 bp, Artificial Sequence
  primer
ggtgtgtgagggtgtgagg

SEQ ID NO: 97602 - DNA, 38 bp, Artificial Sequence
  primer
gtaaaacgacggccagtcagatgttccattcctgtccc

SEQ ID NO: 97603 - DNA, 21 bp, Artificial Sequence
  primer
cccaagtctaggcattccaac

SEQ ID NO: 97604 - DNA, 21 bp, Artificial Sequence
  primer
agataggccctggaggatctg

SEQ ID NO: 97605 - DNA, 21 bp, Artificial Sequence
  primer
taactatcacccaatgctgcc

SEQ ID NO: 97606 - DNA, 38 bp, Artificial Sequence
  primer
gtaaaacgacggccagtggagagaagatgaggtcaggg

SEQ ID NO: 97607 - DNA, 38 bp, Artificial Sequence
  primer
gtaaaacgacggccagtgtgctcagtcacccttagctg

SEQ ID NO: 97608 - DNA, 21 bp, Artificial Sequence
  primer
gagcttgtacctgaagccacc

SEQ ID NO: 97609 - DNA, 20 bp, Artificial Sequence
  primer
accagacttcccagagccac

SEQ ID NO: 97610 - DNA, 20 bp, Artificial Sequence
  primer
ctgtgctcacgttctccacc

SEQ ID NO: 97611 - DNA, 20 bp, Artificial Sequence
  primer
caaaccatggattctggtgg

SEQ ID NO: 97612 - DNA, 21 bp, Artificial Sequence
  primer
gtctgcctgatccctcaaatc

SEQ ID NO: 97613 - DNA, 21 bp, Artificial Sequence
  primer
tgttggaagtgaagttgtggg

SEQ ID NO: 97614 - DNA, 38 bp, Artificial Sequence
  primer
gtaaaacgacggccagtctggaaacttcctcaactggg

SEQ ID NO: 97615 - DNA, 38 bp, Artificial Sequence
  primer
gtaaaacgacggccagtaagtcacccacaagtccatcc

SEQ ID NO: 97616 - DNA, 22 bp, Artificial Sequence
  primer
tcactgatgaccttgaccacac

SEQ ID NO: 97617 - DNA, 37 bp, Artificial Sequence
  primer
gtaaaacgacggccagtctctcacgtcggatacctgg

SEQ ID NO: 97618 - DNA, 38 bp, Artificial Sequence
  primer
gtaaaacgacggccagttatgggctgtggagtcagagg

SEQ ID NO: 97619 - DNA, 38 bp, Artificial Sequence
  primer
gtaaaacgacggccagtcagggcaggaggtactcacag

SEQ ID NO: 97620 - DNA, 21 bp, Artificial Sequence
  primer
cagtgcaggacaagtagctgg

SEQ ID NO: 97621 - DNA, 38 bp, Artificial Sequence
  primer
gtaaaacgacggccagtggataggcagcaaaggcatag

SEQ ID NO: 97622 - DNA, 20 bp, Artificial Sequence
  primer
aggcacaccactgcctactg

SEQ ID NO: 97623 - DNA, 21 bp, Artificial Sequence
  primer
ctgcagtggtctctcctttcc

SEQ ID NO: 97624 - DNA, 21 bp, Artificial Sequence
  primer
gattctggagtctttccagcc

SEQ ID NO: 97625 - DNA, 21 bp, Artificial Sequence
  primer
ctttcccagagtcccatcttg

SEQ ID NO: 97626 - DNA, 21 bp, Artificial Sequence
  primer
cgattccctattcccaaagag

SEQ ID NO: 97627 - DNA, 38 bp, Artificial Sequence
  primer
gtaaaacgacggccagttccacacctgcctaatcattg

SEQ ID NO: 97628 - DNA, 38 bp, Artificial Sequence
  primer
gtaaaacgacggccagtcagatgaagacctgggaaacc

SEQ ID NO: 97629 - DNA, 21 bp, Artificial Sequence
  primer
gtggccatttccacaccttac

SEQ ID NO: 97630 - DNA, 21 bp, Artificial Sequence
  primer
cccacaaaggctaatttcctg

SEQ ID NO: 97631 - DNA, 21 bp, Artificial Sequence
  primer
tttcactgccatttccatctg

SEQ ID NO: 97632 - DNA, 22 bp, Artificial Sequence
  primer
cccaacagaggagtctagggac

SEQ ID NO: 97633 - DNA, 21 bp, Artificial Sequence
  primer
gaaagccattactggacaggg

SEQ ID NO: 97634 - DNA, 37 bp, Artificial Sequence
  primer
gtaaaacgacggccagtgcacatggtgggctcttaac

SEQ ID NO: 97635 - DNA, 21 bp, Artificial Sequence
  primer
tggtccctctttatcacccag

SEQ ID NO: 97636 - DNA, 22 bp, Artificial Sequence
  primer
aagctcaggcagttgacgttag

SEQ ID NO: 97637 - DNA, 21 bp, Artificial Sequence
  primer
gggatgtccatccactctttc

SEQ ID NO: 97638 - DNA, 19 bp, Artificial Sequence
  primer
cctctcacacgacttcggc

SEQ ID NO: 97639 - DNA, 37 bp, Artificial Sequence
  primer
gtaaaacgacggccagtacactcgatgcagatgaggg

SEQ ID NO: 97640 - DNA, 20 bp, Artificial Sequence
  primer
ctgcaagaccagggatcaac

SEQ ID NO: 97641 - DNA, 20 bp, Artificial Sequence
  primer
cacatggccaagcctacttc

SEQ ID NO: 97642 - DNA, 36 bp, Artificial Sequence
  primer
gtaaaacgacggccagtagaggtgagtgggtgcgtc

SEQ ID NO: 97643 - DNA, 38 bp, Artificial Sequence
  primer
gtaaaacgacggccagtcgctgacgatctatcttcctg

SEQ ID NO: 97644 - DNA, 21 bp, Artificial Sequence
  primer
caggaacacacccagagtcac

SEQ ID NO: 97645 - DNA, 23 bp, Artificial Sequence
  primer
caaagtgaatataacgggtttgc

SEQ ID NO: 97646 - DNA, 20 bp, Artificial Sequence
  primer
cctgcaggatttagtctggg

SEQ ID NO: 97647 - DNA, 25 bp, Artificial Sequence
  primer
tggtttcaccatagaatcaaatcag

SEQ ID NO: 97648 - DNA, 21 bp, Artificial Sequence
  primer
aacgacatatttccaccaccc

SEQ ID NO: 97649 - DNA, 38 bp, Artificial Sequence
  primer
gtaaaacgacggccagtaccttagcattggctgggaac

SEQ ID NO: 97650 - DNA, 20 bp, Artificial Sequence
  primer
atgtggcaaccaggtttacg

SEQ ID NO: 97651 - DNA, 37 bp, Artificial Sequence
  primer
gtaaaacgacggccagtccagcatcatctccaggaag

SEQ ID NO: 97652 - DNA, 38 bp, Artificial Sequence
  primer
gtaaaacgacggccagtcaaacagagacaagaggctgg

SEQ ID NO: 97653 - DNA, 38 bp, Artificial Sequence
  primer
gtaaaacgacggccagtgtccaacattatcctcgagcc

SEQ ID NO: 97654 - DNA, 39 bp, Artificial Sequence
  primer
gtaaaacgacggccagtgaccagcattactgtgcatttg

SEQ ID NO: 97655 - DNA, 21 bp, Artificial Sequence
  primer
tcctgtcattcacactggtcc

SEQ ID NO: 97656 - DNA, 21 bp, Artificial Sequence
  primer
aagactcacagaaacgcaccc

SEQ ID NO: 97657 - DNA, 21 bp, Artificial Sequence
  primer
tacaggttatcagggccttcc

SEQ ID NO: 97658 - DNA, 20 bp, Artificial Sequence
  primer
cgagaacaacagccttctgc

SEQ ID NO: 97659 - DNA, 20 bp, Artificial Sequence
  primer
gactcacgtgctgcgacttc

SEQ ID NO: 97660 - DNA, 19 bp, Artificial Sequence
  primer
agttggagagcgcgaactg

SEQ ID NO: 97661 - DNA, 37 bp, Artificial Sequence
  primer
gtaaaacgacggccagtaacacagatcggcaaacctc

SEQ ID NO: 97662 - DNA, 37 bp, Artificial Sequence
  primer
gtaaaacgacggccagtccaagctgagcagagaaggg

SEQ ID NO: 97663 - DNA, 39 bp, Artificial Sequence
  primer
gtaaaacgacggccagtgggccaagaagaaatctacagc

SEQ ID NO: 97664 - DNA, 38 bp, Artificial Sequence
  primer
gtaaaacgacggccagtcttctccctggacataccacc

SEQ ID NO: 97665 - DNA, 20 bp, Artificial Sequence
  primer
tcacagggacagcaggtttc

SEQ ID NO: 97666 - DNA, 38 bp, Artificial Sequence
  primer
gtaaaacgacggccagtgacacacagccttgctctcac

SEQ ID NO: 97667 - DNA, 37 bp, Artificial Sequence
  primer
gtaaaacgacggccagtgaaggtggacaggtgtgagc

SEQ ID NO: 97668 - DNA, 38 bp, Artificial Sequence
  primer
gtaaaacgacggccagtgtaccgtcttcctgacttggg

SEQ ID NO: 97669 - DNA, 21 bp, Artificial Sequence
  primer
gagaaggtggcttctcactgg

SEQ ID NO: 97670 - DNA, 38 bp, Artificial Sequence
  primer
gtaaaacgacggccagtgctacccgcattctgttatcc

SEQ ID NO: 97671 - DNA, 21 bp, Artificial Sequence
  primer
gttagggcacatgtctttggc

SEQ ID NO: 97672 - DNA, 38 bp, Artificial Sequence
  primer
gtaaaacgacggccagtagcagggtctctctgacaagc

SEQ ID NO: 97673 - DNA, 23 bp, Artificial Sequence
  primer
gaagtaagcccacatttcaacag

SEQ ID NO: 97674 - DNA, 38 bp, Artificial Sequence
  primer
gtaaaacgacggccagtgcacagcaggagagacaagac

SEQ ID NO: 97675 - DNA, 38 bp, Artificial Sequence
  primer
gtaaaacgacggccagtgaatgatacagcgacagcagg

SEQ ID NO: 97676 - DNA, 21 bp, Artificial Sequence
  primer
accatcacagccactccaatc

SEQ ID NO: 97677 - DNA, 38 bp, Artificial Sequence
  primer
gtaaaacgacggccagttgggaggagagagattggttg

SEQ ID NO: 97678 - DNA, 38 bp, Artificial Sequence
  primer
gtaaaacgacggccagtccctgcttctccatctctgtg

SEQ ID NO: 97679 - DNA, 39 bp, Artificial Sequence
  primer
gtaaaacgacggccagtcctccaactgtccttacagtcc

SEQ ID NO: 97680 - DNA, 21 bp, Artificial Sequence
  primer
ggtctgccacaaattaggtga

SEQ ID NO: 97681 - DNA, 25 bp, Artificial Sequence
  primer
tcaaatcattctttcagtaatgtgg

SEQ ID NO: 97682 - DNA, 20 bp, Artificial Sequence
  primer
gttgacctaggaacccatgc

SEQ ID NO: 97683 - DNA, 21 bp, Artificial Sequence
  primer
tgatttatgctgccatttccc

SEQ ID NO: 97684 - DNA, 40 bp, Artificial Sequence
  primer
gtaaaacgacggccagtcccattatatggtcaggaagttg

SEQ ID NO: 97685 - DNA, 21 bp, Artificial Sequence
  primer
actcccggagccaaataagtc

SEQ ID NO: 97686 - DNA, 25 bp, Artificial Sequence
  primer
aataaatgctcgataaatctgcttg

SEQ ID NO: 97687 - DNA, 25 bp, Artificial Sequence
  primer
atcattccataattaactaggcagc

SEQ ID NO: 97688 - DNA, 40 bp, Artificial Sequence
  primer
gtaaaacgacggccagtggactctggactctgatgctaac

SEQ ID NO: 97689 - DNA, 44 bp, Artificial Sequence
  primer
gtaaaacgacggccagttgggtatcctgtaaatatttccctatc

SEQ ID NO: 97690 - DNA, 21 bp, Artificial Sequence
  primer
tttcagggatagaaatgcagc

SEQ ID NO: 97691 - DNA, 21 bp, Artificial Sequence
  primer
aaattctgcctttcccatcac

SEQ ID NO: 97692 - DNA, 38 bp, Artificial Sequence
  primer
gtaaaacgacggccagtgcaggttgctaagtgcctgac

SEQ ID NO: 97693 - DNA, 26 bp, Artificial Sequence
  primer
tgagtttatcattgaacctcacactc

SEQ ID NO: 97694 - DNA, 24 bp, Artificial Sequence
  primer
gacaaaggaagcattgtaatttgc

SEQ ID NO: 97695 - DNA, 39 bp, Artificial Sequence
  primer
gtaaaacgacggccagtcatctcagctgacctagttgcc

SEQ ID NO: 97696 - DNA, 21 bp, Artificial Sequence
  primer
agaacgcagtatccatggcag

SEQ ID NO: 97697 - DNA, 21 bp, Artificial Sequence
  primer
tacttggaaactgcaccaagc

SEQ ID NO: 97698 - DNA, 39 bp, Artificial Sequence
  primer
gtaaaacgacggccagtgctctctgaatcaagcatggac

SEQ ID NO: 97699 - DNA, 38 bp, Artificial Sequence
  primer
gtaaaacgacggccagtcgctacagaacctcaatgcac

SEQ ID NO: 97700 - DNA, 23 bp, Artificial Sequence
  primer
ggagtctggattgtgtcttaggg

SEQ ID NO: 97701 - DNA, 23 bp, Artificial Sequence
  primer
cactttgccatataatccagtca

SEQ ID NO: 97702 - DNA, 37 bp, Artificial Sequence
  primer
gtaaaacgacggccagtgctcaacagccacactgagc

SEQ ID NO: 97703 - DNA, 41 bp, Artificial Sequence
  primer
gtaaaacgacggccagttggacaactgtcctcttatcacac

SEQ ID NO: 97704 - DNA, 40 bp, Artificial Sequence
  primer
gtaaaacgacggccagtcaggtcctgtagacttaccatgc

SEQ ID NO: 97705 - DNA, 38 bp, Artificial Sequence
  primer
gtaaaacgacggccagtgatcctaagggactcggaacc

SEQ ID NO: 97706 - DNA, 27 bp, Artificial Sequence
  primer
tgcttaacaactataatacatagccgc

SEQ ID NO: 97707 - DNA, 21 bp, Artificial Sequence
  primer
cagaggaggcaagatttcagg

SEQ ID NO: 97708 - DNA, 38 bp, Artificial Sequence
  primer
gtaaaacgacggccagtaacctgcttgctttgcttatt

SEQ ID NO: 97709 - DNA, 44 bp, Artificial Sequence
  primer
gtaaaacgacggccagtctctaactccagtttctcctaaatcag

SEQ ID NO: 97710 - DNA, 24 bp, Artificial Sequence
  primer
aaagctagaaggaaattctccaaa

SEQ ID NO: 97711 - DNA, 42 bp, Artificial Sequence
  primer
gtaaaacgacggccagttgctcattagcaggaattacttgtc

SEQ ID NO: 97712 - DNA, 21 bp, Artificial Sequence
  primer
agcaaaccactgctctccatc

SEQ ID NO: 97713 - DNA, 21 bp, Artificial Sequence
  primer
atttctcagcagctttctgcc

SEQ ID NO: 97714 - DNA, 38 bp, Artificial Sequence
  primer
gtaaaacgacggccagttgctttacttctcctgcctcc

SEQ ID NO: 97715 - DNA, 21 bp, Artificial Sequence
  primer
tgtgttgaagtggtgttgcag

SEQ ID NO: 97716 - DNA, 22 bp, Artificial Sequence
  primer
aacaatacaatctgcctgagcc

SEQ ID NO: 97717 - DNA, 38 bp, Artificial Sequence
  primer
gtaaaacgacggccagtctgctacaaatggaagccaac

SEQ ID NO: 97718 - DNA, 21 bp, Artificial Sequence
  primer
catggatgtgaaagcatcagg

SEQ ID NO: 97719 - DNA, 21 bp, Artificial Sequence
  primer
gtgatggtaccaatgcactcc

SEQ ID NO: 97720 - DNA, 22 bp, Artificial Sequence
  primer
gccacatgttggtttaaattcc

SEQ ID NO: 97721 - DNA, 39 bp, Artificial Sequence
  primer
gtaaaacgacggccagtccaaagcatgaagttcaatcag

SEQ ID NO: 97722 - DNA, 21 bp, Artificial Sequence
  primer
cacaccatccagctgtaggac

SEQ ID NO: 97723 - DNA, 26 bp, Artificial Sequence
  primer
actacccggatcattagaaataaatc

SEQ ID NO: 97724 - DNA, 21 bp, Artificial Sequence
  primer
gtatttactgagtgccggtgc

SEQ ID NO: 97725 - DNA, 21 bp, Artificial Sequence
  primer
taaagccacctaagccattcc

SEQ ID NO: 97726 - DNA, 38 bp, Artificial Sequence
  primer
gtaaaacgacggccagttcagtgaacaactcctgccac

SEQ ID NO: 97727 - DNA, 38 bp, Artificial Sequence
  primer
gtaaaacgacggccagtaaagggatcaagcttaccgtg

SEQ ID NO: 97728 - DNA, 37 bp, Artificial Sequence
  primer
gtaaaacgacggccagtcatgttgatgtggctggatg

SEQ ID NO: 97729 - DNA, 22 bp, Artificial Sequence
  primer
tctaaggtccttgagggagaga

SEQ ID NO: 97730 - DNA, 22 bp, Artificial Sequence
  primer
tgttcctatagtgcaggccata

SEQ ID NO: 97731 - DNA, 43 bp, Artificial Sequence
  primer
gtaaaacgacggccagttgtgaaagatatatacaggctccatt

SEQ ID NO: 97732 - DNA, 38 bp, Artificial Sequence
  primer
gtaaaacgacggccagtacaaagtggtctggatttggc

SEQ ID NO: 97733 - DNA, 20 bp, Artificial Sequence
  primer
gtgccactgtactccaaccg

SEQ ID NO: 97734 - DNA, 38 bp, Artificial Sequence
  primer
gtaaaacgacggccagtaactactgcacaaaggcccag

SEQ ID NO: 97735 - DNA, 38 bp, Artificial Sequence
  primer
gtaaaacgacggccagtgagcctcctcatcctgtgaag

SEQ ID NO: 97736 - DNA, 21 bp, Artificial Sequence
  primer
tccttgagcccaagagatagg

SEQ ID NO: 97737 - DNA, 41 bp, Artificial Sequence
  primer
gtaaaacgacggccagtttgaaagggaaattcttctattgc

SEQ ID NO: 97738 - DNA, 21 bp, Artificial Sequence
  primer
ccctgataaacaccattgtcc

SEQ ID NO: 97739 - DNA, 25 bp, Artificial Sequence
  primer
cctggaacacctatgtcataaacac

SEQ ID NO: 97740 - DNA, 21 bp, Artificial Sequence
  primer
taagcaaagatcgtgccattg

SEQ ID NO: 97741 - DNA, 41 bp, Artificial Sequence
  primer
gtaaaacgacggccagtaacaagtatatgcatggtgtggtg

SEQ ID NO: 97742 - DNA, 21 bp, Artificial Sequence
  primer
actgcacctggcctatctttc

SEQ ID NO: 97743 - DNA, 23 bp, Artificial Sequence
  primer
gcatccgctatgtaatacttgct

SEQ ID NO: 97744 - DNA, 36 bp, Artificial Sequence
  primer
gtaaaacgacggccagtaacgccttaccaggcaatc

SEQ ID NO: 97745 - DNA, 21 bp, Artificial Sequence
  primer
cttccaaagccaaccattacc

SEQ ID NO: 97746 - DNA, 21 bp, Artificial Sequence
  primer
ctccaattgctcaggatgatg

SEQ ID NO: 97747 - DNA, 21 bp, Artificial Sequence
  primer
acacaggatgtcggtcttcag

SEQ ID NO: 97748 - DNA, 43 bp, Artificial Sequence
  primer
gtaaaacgacggccagtttcttgaatgtgctcaaatattcatt

SEQ ID NO: 97749 - DNA, 43 bp, Artificial Sequence
  primer
gtaaaacgacggccagtgcttcgtatgtaatctgaggttattg

SEQ ID NO: 97750 - DNA, 21 bp, Artificial Sequence
  primer
tcgggataccaattctgaagc

SEQ ID NO: 97751 - DNA, 21 bp, Artificial Sequence
  primer
attgcgtccagccaatatcac

SEQ ID NO: 97752 - DNA, 21 bp, Artificial Sequence
  primer
actggtctccagcttccaaat

SEQ ID NO: 97753 - DNA, 38 bp, Artificial Sequence
  primer
gtaaaacgacggccagtcttgccaactgtgtgaaggag

SEQ ID NO: 97754 - DNA, 38 bp, Artificial Sequence
  primer
gtaaaacgacggccagtatgcaaggtatctgcattcaa

SEQ ID NO: 97755 - DNA, 20 bp, Artificial Sequence
  primer
acagagtgacgccctgtctc

SEQ ID NO: 97756 - DNA, 41 bp, Artificial Sequence
  primer
gtaaaacgacggccagtaactcacattgcctctttatttgc

SEQ ID NO: 97757 - DNA, 38 bp, Artificial Sequence
  primer
gtaaaacgacggccagtctgccaatccaagatctcaac

SEQ ID NO: 97758 - DNA, 23 bp, Artificial Sequence
  primer
tccaactcagaccttggatacac

SEQ ID NO: 97759 - DNA, 44 bp, Artificial Sequence
  primer
gtaaaacgacggccagttcactttctcctatctatatgccattg

SEQ ID NO: 97760 - DNA, 41 bp, Artificial Sequence
  primer
gtaaaacgacggccagtcacttgctaggctttgagctattg

SEQ ID NO: 97761 - DNA, 19 bp, Artificial Sequence
  primer
tttccattctgggtcagcg

SEQ ID NO: 97762 - DNA, 38 bp, Artificial Sequence
  primer
gtaaaacgacggccagtcatgcaaacctttggatttcg

SEQ ID NO: 97763 - DNA, 41 bp, Artificial Sequence
  primer
gtaaaacgacggccagtagaagaagagggcctaaattaacc

SEQ ID NO: 97764 - DNA, 42 bp, Artificial Sequence
  primer
gtaaaacgacggccagttttaatcagagctgaaatcttcctc

SEQ ID NO: 97765 - DNA, 25 bp, Artificial Sequence
  primer
gaggtcactagagggtatcttcagg

SEQ ID NO: 97766 - DNA, 41 bp, Artificial Sequence
  primer
gtaaaacgacggccagtttccctagaagaactactgctggt

SEQ ID NO: 97767 - DNA, 21 bp, Artificial Sequence
  primer
agggtagcacagccataaacc

SEQ ID NO: 97768 - DNA, 38 bp, Artificial Sequence
  primer
gtaaaacgacggccagtctcactccttaccttccctgc

SEQ ID NO: 97769 - DNA, 21 bp, Artificial Sequence
  primer
gctcacatttgatctaacccg

SEQ ID NO: 97770 - DNA, 38 bp, Artificial Sequence
  primer
gtaaaacgacggccagtccagttcaaaccgatctccag

SEQ ID NO: 97771 - DNA, 39 bp, Artificial Sequence
  primer
gtaaaacgacggccagtcagacacctagaggttcccaac

SEQ ID NO: 97772 - DNA, 21 bp, Artificial Sequence
  primer
gaggactccaccgattctgtc

SEQ ID NO: 97773 - DNA, 20 bp, Artificial Sequence
  primer
gggtgcacacattgtgaagg

SEQ ID NO: 97774 - DNA, 21 bp, Artificial Sequence
  primer
ctcatctggaaggactgggac

SEQ ID NO: 97775 - DNA, 38 bp, Artificial Sequence
  primer
gtaaaacgacggccagtaacagagcagcagagggctac

SEQ ID NO: 97776 - DNA, 38 bp, Artificial Sequence
  primer
gtaaaacgacggccagtcgcaaatgaagctcctgactc

SEQ ID NO: 97777 - DNA, 38 bp, Artificial Sequence
  primer
gtaaaacgacggccagtataagctgcgtgatgctaggc

SEQ ID NO: 97778 - DNA, 21 bp, Artificial Sequence
  primer
acagaaatgcaccctgtgatg

SEQ ID NO: 97779 - DNA, 38 bp, Artificial Sequence
  primer
gtaaaacgacggccagtgcaactgtacactgagccagg

SEQ ID NO: 97780 - DNA, 21 bp, Artificial Sequence
  primer
cccatctctctcagcactagc

SEQ ID NO: 97781 - DNA, 21 bp, Artificial Sequence
  primer
accacccaagagtgaataggc

SEQ ID NO: 97782 - DNA, 20 bp, Artificial Sequence
  primer
aggctaagagggtgtccctg

SEQ ID NO: 97783 - DNA, 21 bp, Artificial Sequence
  primer
gacacagtggaatggtaacgg

SEQ ID NO: 97784 - DNA, 37 bp, Artificial Sequence
  primer
gtaaaacgacggccagtcttgtgcactcagtccctcc

SEQ ID NO: 97785 - DNA, 20 bp, Artificial Sequence
  primer
tgttctgaggacctggcatc

SEQ ID NO: 97786 - DNA, 38 bp, Artificial Sequence
  primer
gtaaaacgacggccagtcctggcttcaagggaactaag

SEQ ID NO: 97787 - DNA, 21 bp, Artificial Sequence
  primer
tccctgaccacagtttatccc

SEQ ID NO: 97788 - DNA, 21 bp, Artificial Sequence
  primer
aatcctgagtgtgttccctgg

SEQ ID NO: 97789 - DNA, 37 bp, Artificial Sequence
  primer
gtaaaacgacggccagtcctccttgcagggaagagac

SEQ ID NO: 97790 - DNA, 21 bp, Artificial Sequence
  primer
ttgtggaatactggccaacag

SEQ ID NO: 97791 - DNA, 38 bp, Artificial Sequence
  primer
gtaaaacgacggccagtctcttctgcctagctcccaag

SEQ ID NO: 97792 - DNA, 38 bp, Artificial Sequence
  primer
gtaaaacgacggccagtttggcccaccttatactcctc

SEQ ID NO: 97793 - DNA, 38 bp, Artificial Sequence
  primer
gtaaaacgacggccagtaccgtctcctcacttcagctc

SEQ ID NO: 97794 - DNA, 21 bp, Artificial Sequence
  primer
agtcccgagaatgaccaactg

SEQ ID NO: 97795 - DNA, 38 bp, Artificial Sequence
  primer
gtaaaacgacggccagtagacaagcctactgcccaatc

SEQ ID NO: 97796 - DNA, 21 bp, Artificial Sequence
  primer
ctagtccagacaccggctcac

SEQ ID NO: 97797 - DNA, 21 bp, Artificial Sequence
  primer
ggagcaggagaaagagggtag

SEQ ID NO: 97798 - DNA, 21 bp, Artificial Sequence
  primer
taagaccaggaggtctgctcc

SEQ ID NO: 97799 - DNA, 38 bp, Artificial Sequence
  primer
gtaaaacgacggccagttgaaagggtcaaaggctgaac

SEQ ID NO: 97800 - DNA, 37 bp, Artificial Sequence
  primer
gtaaaacgacggccagtgtggctcctgcaagtcaaag

SEQ ID NO: 97801 - DNA, 23 bp, Artificial Sequence
  primer
tttactccatgctatgctgattt

SEQ ID NO: 97802 - DNA, 25 bp, Artificial Sequence
  primer
ccaaagtgctatgtacctgataagc

SEQ ID NO: 97803 - DNA, 41 bp, Artificial Sequence
  primer
gtaaaacgacggccagtcacccaataaatagaaattctggc

SEQ ID NO: 97804 - DNA, 22 bp, Artificial Sequence
  primer
tggacatagccaactttctgag

SEQ ID NO: 97805 - DNA, 23 bp, Artificial Sequence
  primer
tggtagacagctgtttgcttaga

SEQ ID NO: 97806 - DNA, 21 bp, Artificial Sequence
  primer
ttcccatagcatttgaggagg

SEQ ID NO: 97807 - DNA, 38 bp, Artificial Sequence
  primer
gtaaaacgacggccagtgacatgggcagtgtagcttcc

SEQ ID NO: 97808 - DNA, 38 bp, Artificial Sequence
  primer
gtaaaacgacggccagttgctgttggagactttgcttt

SEQ ID NO: 97809 - DNA, 18 bp, Artificial Sequence
  primer
atcctgccattgcactcc

SEQ ID NO: 97810 - DNA, 26 bp, Artificial Sequence
  primer
catttatcagcatgagaatatgtgaa

SEQ ID NO: 97811 - DNA, 46 bp, Artificial Sequence
  primer
gtaaaacgacggccagtaaatcaagtacaagctaaactttgttacc

SEQ ID NO: 97812 - DNA, 38 bp, Artificial Sequence
  primer
gtaaaacgacggccagtcagggagggtggacataactg

SEQ ID NO: 97813 - DNA, 22 bp, Artificial Sequence
  primer
gccctactcactgaatggttcc

SEQ ID NO: 97814 - DNA, 39 bp, Artificial Sequence
  primer
gtaaaacgacggccagtaaagcaaatcaacgaacagctc

SEQ ID NO: 97815 - DNA, 26 bp, Artificial Sequence
  primer
tgaataatgtgaatgtttgaactctg

SEQ ID NO: 97816 - DNA, 21 bp, Artificial Sequence
  primer
gctgaccaagctgtcttgttt

SEQ ID NO: 97817 - DNA, 22 bp, Artificial Sequence
  primer
tgtgtgcattaataaaggcgtg

SEQ ID NO: 97818 - DNA, 21 bp, Artificial Sequence
  primer
ttgcttaaggaaatggcttgg

SEQ ID NO: 97819 - DNA, 21 bp, Artificial Sequence
  primer
aacacggtcacccatttaacc

SEQ ID NO: 97820 - DNA, 38 bp, Artificial Sequence
  primer
gtaaaacgacggccagtttgcaagaaatctgaagccag

SEQ ID NO: 97821 - DNA, 38 bp, Artificial Sequence
  primer
gtaaaacgacggccagtctggtgccctcacacttacac

SEQ ID NO: 97822 - DNA, 21 bp, Artificial Sequence
  primer
tcacatgcttctcactgttgc

SEQ ID NO: 97823 - DNA, 37 bp, Artificial Sequence
  primer
gtaaaacgacggccagtctcatcctctgagccacgtc

SEQ ID NO: 97824 - DNA, 21 bp, Artificial Sequence
  primer
acctttgagagacgaatgcac

SEQ ID NO: 97825 - DNA, 22 bp, Artificial Sequence
  primer
cctctgtgtctaccagcatgag

SEQ ID NO: 97826 - DNA, 20 bp, Artificial Sequence
  primer
cgctgagagagggttgtgtc

SEQ ID NO: 97827 - DNA, 20 bp, Artificial Sequence
  primer
cccatggttcaattccacag

SEQ ID NO: 97828 - DNA, 21 bp, Artificial Sequence
  primer
acgcttgcacagaaatacacg

SEQ ID NO: 97829 - DNA, 22 bp, Artificial Sequence
  primer
tgtgtgcattaataaaggcgtg

SEQ ID NO: 97830 - DNA, 36 bp, Artificial Sequence
  primer
gtaaaacgacggccagtggcaccttcgtccacaaat

SEQ ID NO: 97831 - DNA, 36 bp, Artificial Sequence
  primer
gtaaaacgacggccagtaaacagcgccaggctacag

SEQ ID NO: 97832 - DNA, 42 bp, Artificial Sequence
  primer
gtaaaacgacggccagtgctgatctgtttctttggactatgg

SEQ ID NO: 97833 - DNA, 21 bp, Artificial Sequence
  primer
catgccatctgcctcaatttc

SEQ ID NO: 97834 - DNA, 38 bp, Artificial Sequence
  primer
gtaaaacgacggccagtggcaagacagacatttcaacg

SEQ ID NO: 97835 - DNA, 21 bp, Artificial Sequence
  primer
gaggttcagggcactctgttg

SEQ ID NO: 97836 - DNA, 22 bp, Artificial Sequence
  primer
tgaaactacaggtgcacaccac

SEQ ID NO: 97837 - DNA, 21 bp, Artificial Sequence
  primer
tgcacaattgagcctgaagag

SEQ ID NO: 97838 - DNA, 22 bp, Artificial Sequence
  primer
ctcacagttactggtcaatcgc

SEQ ID NO: 97839 - DNA, 24 bp, Artificial Sequence
  primer
tggctgctattataacttgccaat

SEQ ID NO: 97840 - DNA, 38 bp, Artificial Sequence
  primer
gtaaaacgacggccagttcgacacagacacaagtgcat

SEQ ID NO: 97841 - DNA, 37 bp, Artificial Sequence
  primer
gtaaaacgacggccagtaattccaaatcccaagccac

SEQ ID NO: 97842 - DNA, 38 bp, Artificial Sequence
  primer
gtaaaacgacggccagtctgcctgacactgcatctaaa

SEQ ID NO: 97843 - DNA, 21 bp, Artificial Sequence
  primer
aacaacggtgagtctgagtgc

SEQ ID NO: 97844 - DNA, 35 bp, Artificial Sequence
  primer
gtaaaacgacggccagttggataggccatgggcac

SEQ ID NO: 97845 - DNA, 21 bp, Artificial Sequence
  primer
ttgaactcacagctgacctgc

SEQ ID NO: 97846 - DNA, 22 bp, Artificial Sequence
  primer
gggtcaagtacgctttcatttg

SEQ ID NO: 97847 - DNA, 26 bp, Artificial Sequence
  primer
tcaccaacttatggctaagaataaag

SEQ ID NO: 97848 - DNA, 37 bp, Artificial Sequence
  primer
gtaaaacgacggccagtcttgagcctgggaggttgag

SEQ ID NO: 97849 - DNA, 21 bp, Artificial Sequence
  primer
tagcactgctccaggtgaaac

SEQ ID NO: 97850 - DNA, 38 bp, Artificial Sequence
  primer
gtaaaacgacggccagtagccaaatccagtcctcaaac

SEQ ID NO: 97851 - DNA, 21 bp, Artificial Sequence
  primer
cgtaagaactttctgggcgag

SEQ ID NO: 97852 - DNA, 19 bp, Artificial Sequence
  primer
gcgacagcgagactccatc

SEQ ID NO: 97853 - DNA, 37 bp, Artificial Sequence
  primer
gtaaaacgacggccagttgcagcagaggagacctcac

SEQ ID NO: 97854 - DNA, 24 bp, Artificial Sequence
  primer
caatgcaaacacagaactctcttc

SEQ ID NO: 97855 - DNA, 21 bp, Artificial Sequence
  primer
tcctgcaacccttatctcacc

SEQ ID NO: 97856 - DNA, 21 bp, Artificial Sequence
  primer
tgagaaagagagccttccacc

SEQ ID NO: 97857 - DNA, 21 bp, Artificial Sequence
  primer
tcctgggagtaagatggcaac

SEQ ID NO: 97858 - DNA, 21 bp, Artificial Sequence
  primer
gtggcaggtctaagctgaagg

SEQ ID NO: 97859 - DNA, 38 bp, Artificial Sequence
  primer
gtaaaacgacggccagtggaaggagtgtggtgatcagg

SEQ ID NO: 97860 - DNA, 19 bp, Artificial Sequence
  primer
cttgggcacatcttctccc

SEQ ID NO: 97861 - DNA, 23 bp, Artificial Sequence
  primer
cctgcactatctgtccataaagc

SEQ ID NO: 97862 - DNA, 38 bp, Artificial Sequence
  primer
gtaaaacgacggccagtcccacaagactttaagcaccc

SEQ ID NO: 97863 - DNA, 21 bp, Artificial Sequence
  primer
ggaggtacctgaggcacaaac

SEQ ID NO: 97864 - DNA, 38 bp, Artificial Sequence
  primer
gtaaaacgacggccagtctgatgggagtgggtaaatgg

SEQ ID NO: 97865 - DNA, 22 bp, Artificial Sequence
  primer
ccactgcatgccagacttctac

SEQ ID NO: 97866 - DNA, 37 bp, Artificial Sequence
  primer
gtaaaacgacggccagtaggtgaagaatgaggcaggc

SEQ ID NO: 97867 - DNA, 39 bp, Artificial Sequence
  primer
gtaaaacgacggccagttttcagacctacatttgggagc

SEQ ID NO: 97868 - DNA, 21 bp, Artificial Sequence
  primer
cccagcctcagtgaagaattg

SEQ ID NO: 97869 - DNA, 21 bp, Artificial Sequence
  primer
ctgcatacttatggcagggag

SEQ ID NO: 97870 - DNA, 38 bp, Artificial Sequence
  primer
gtaaaacgacggccagttagtctcccaccatcttcctg

SEQ ID NO: 97871 - DNA, 21 bp, Artificial Sequence
  primer
gcaataactggaccaagaggc

SEQ ID NO: 97872 - DNA, 23 bp, Artificial Sequence
  primer
tcactgttagcaaagtgggtagc

SEQ ID NO: 97873 - DNA, 37 bp, Artificial Sequence
  primer
gtaaaacgacggccagtcccaagaacccttcatggtc

SEQ ID NO: 97874 - DNA, 38 bp, Artificial Sequence
  primer
gtaaaacgacggccagtctgtcctgcaagaggaagtgg

SEQ ID NO: 97875 - DNA, 20 bp, Artificial Sequence
  primer
ggcctgagcaaacaactgtc

SEQ ID NO: 97876 - DNA, 39 bp, Artificial Sequence
  primer
gtaaaacgacggccagtgactcagagcaatcaatccacc

SEQ ID NO: 97877 - DNA, 22 bp, Artificial Sequence
  primer
aatagcattcctctccctttcc

SEQ ID NO: 97878 - DNA, 38 bp, Artificial Sequence
  primer
gtaaaacgacggccagtcccaggaacttcaaatgcttc

SEQ ID NO: 97879 - DNA, 38 bp, Artificial Sequence
  primer
gtaaaacgacggccagtaagacataggttgcagcgagc

SEQ ID NO: 97880 - DNA, 21 bp, Artificial Sequence
  primer
agacttgctgaaggaagtggg

SEQ ID NO: 97881 - DNA, 21 bp, Artificial Sequence
  primer
cacagtcagcttctgctctcg

SEQ ID NO: 97882 - DNA, 39 bp, Artificial Sequence
  primer
gtaaaacgacggccagtgcattccagagtaaccaactgc

SEQ ID NO: 97883 - DNA, 38 bp, Artificial Sequence
  primer
gtaaaacgacggccagtctcctccaggatcttggtctg

SEQ ID NO: 97884 - DNA, 38 bp, Artificial Sequence
  primer
gtaaaacgacggccagtactatttcctgctctcgctgg

SEQ ID NO: 97885 - DNA, 38 bp, Artificial Sequence
  primer
gtaaaacgacggccagtcttgtggtcctgaagctctcc

SEQ ID NO: 97886 - DNA, 19 bp, Artificial Sequence
  primer
ggtctccacctcatgctcc

SEQ ID NO: 97887 - DNA, 38 bp, Artificial Sequence
  primer
gtaaaacgacggccagtctcagctcttcatccctctgg

SEQ ID NO: 97888 - DNA, 39 bp, Artificial Sequence
  primer
gtaaaacgacggccagttcagctccagaatctcctgttc

SEQ ID NO: 97889 - DNA, 38 bp, Artificial Sequence
  primer
gtaaaacgacggccagtagaggcttgtaggaacatggc

SEQ ID NO: 97890 - DNA, 21 bp, Artificial Sequence
  primer
ctcccgactagcacagtagcc

SEQ ID NO: 97891 - DNA, 21 bp, Artificial Sequence
  primer
gagacctgtgggaaagacctg

SEQ ID NO: 97892 - DNA, 21 bp, Artificial Sequence
  primer
agagcaagactctgtctcggg

SEQ ID NO: 97893 - DNA, 21 bp, Artificial Sequence
  primer
gatatgcaatgaggagggctg

SEQ ID NO: 97894 - DNA, 20 bp, Artificial Sequence
  primer
caggatcatgctttcttccc

SEQ ID NO: 97895 - DNA, 37 bp, Artificial Sequence
  primer
gtaaaacgacggccagtaaacctgtaggtgtgcggag

SEQ ID NO: 97896 - DNA, 27 bp, Artificial Sequence
  primer
aaatataagaacacttccagattgtga

SEQ ID NO: 97897 - DNA, 21 bp, Artificial Sequence
  primer
tgtctgcatttgtcatttgga

SEQ ID NO: 97898 - DNA, 29 bp, Artificial Sequence
  primer
aaagagtccatcatgattataaggtaaca

SEQ ID NO: 97899 - DNA, 39 bp, Artificial Sequence
  primer
gtaaaacgacggccagtttcacaaccatatgctcagtcc

SEQ ID NO: 97900 - DNA, 24 bp, Artificial Sequence
  primer
ggtaacaagtttgatgtcctgaga

SEQ ID NO: 97901 - DNA, 38 bp, Artificial Sequence
  primer
gtaaaacgacggccagttacccgcatagacctgagatg

SEQ ID NO: 97902 - DNA, 40 bp, Artificial Sequence
  primer
gtaaaacgacggccagttctgaaggtaaccaaacacaaca

SEQ ID NO: 97903 - DNA, 22 bp, Artificial Sequence
  primer
ccagggaatttacatgtagggc

SEQ ID NO: 97904 - DNA, 39 bp, Artificial Sequence
  primer
gtaaaacgacggccagttttgtgaggtgattggagaaac

SEQ ID NO: 97905 - DNA, 44 bp, Artificial Sequence
  primer
gtaaaacgacggccagtaaccctaataaacgtgttataaaccag

SEQ ID NO: 97906 - DNA, 21 bp, Artificial Sequence
  primer
ccgctacactaggcactgatg

SEQ ID NO: 97907 - DNA, 41 bp, Artificial Sequence
  primer
gtaaaacgacggccagttccatcatttacaaatgtaagcac

SEQ ID NO: 97908 - DNA, 27 bp, Artificial Sequence
  primer
tttaaatggtatgcagtaaatagcaca

SEQ ID NO: 97909 - DNA, 39 bp, Artificial Sequence
  primer
gtaaaacgacggccagtccacttcaatcaggttagctcc

SEQ ID NO: 97910 - DNA, 24 bp, Artificial Sequence
  primer
tttcagatcaagtcgttcttcctc

SEQ ID NO: 97911 - DNA, 38 bp, Artificial Sequence
  primer
gtaaaacgacggccagtcaggactgaacccactgacac

SEQ ID NO: 97912 - DNA, 20 bp, Artificial Sequence
  primer
agaagatcgagaccatcccg

SEQ ID NO: 97913 - DNA, 39 bp, Artificial Sequence
  primer
gtaaaacgacggccagtaacagagaatgtgttaacgccc

SEQ ID NO: 97914 - DNA, 23 bp, Artificial Sequence
  primer
agggaaacaatgattcaaatgac

SEQ ID NO: 97915 - DNA, 41 bp, Artificial Sequence
  primer
gtaaaacgacggccagtgcttagaaatgcctaggtatgaga

SEQ ID NO: 97916 - DNA, 39 bp, Artificial Sequence
  primer
gtaaaacgacggccagtctatctgcatgctttggtgatg

SEQ ID NO: 97917 - DNA, 39 bp, Artificial Sequence
  primer
gtaaaacgacggccagtttgcaaaggaagaagaagaagg

SEQ ID NO: 97918 - DNA, 38 bp, Artificial Sequence
  primer
gtaaaacgacggccagtatccgaatccatctgaagagc

SEQ ID NO: 97919 - DNA, 41 bp, Artificial Sequence
  primer
gtaaaacgacggccagtcaggtgatgagcattattgatacc

SEQ ID NO: 97920 - DNA, 22 bp, Artificial Sequence
  primer
tgtgtgtgttatgtgggaacaa

SEQ ID NO: 97921 - DNA, 44 bp, Artificial Sequence
  primer
gtaaaacgacggccagtggttaagtacaggattattcatctgcc

SEQ ID NO: 97922 - DNA, 40 bp, Artificial Sequence
  primer
gtaaaacgacggccagttttcagagatccagacaaaccac

SEQ ID NO: 97923 - DNA, 40 bp, Artificial Sequence
  primer
gtaaaacgacggccagtgcaaatcttgagaggtcacttcc

SEQ ID NO: 97924 - DNA, 38 bp, Artificial Sequence
  primer
gtaaaacgacggccagtgccttgaatgtaccactgcac

SEQ ID NO: 97925 - DNA, 38 bp, Artificial Sequence
  primer
gtaaaacgacggccagtttccagctatgtttgcaccac

SEQ ID NO: 97926 - DNA, 20 bp, Artificial Sequence
  primer
agtctgggcgacagagtgag

SEQ ID NO: 97927 - DNA, 37 bp, Artificial Sequence
  primer
gtaaaacgacggccagtaaagcagttgcagcattgag

SEQ ID NO: 97928 - DNA, 38 bp, Artificial Sequence
  primer
gtaaaacgacggccagttgcattgccctcataaagaaa

SEQ ID NO: 97929 - DNA, 26 bp, Artificial Sequence
  primer
aaatagaatcatttgaaagcaagaaa

SEQ ID NO: 97930 - DNA, 38 bp, Artificial Sequence
  primer
gtaaaacgacggccagtaacagcggtgagctacaggag

SEQ ID NO: 97931 - DNA, 37 bp, Artificial Sequence
  primer
gtaaaacgacggccagtcagtgcctggcatagcaaac

SEQ ID NO: 97932 - DNA, 45 bp, Artificial Sequence
  primer
gtaaaacgacggccagtcaacacggagatttatactaccatcttt

SEQ ID NO: 97933 - DNA, 40 bp, Artificial Sequence
  primer
gtaaaacgacggccagttgtctatgtctagccaccaacag

SEQ ID NO: 97934 - DNA, 38 bp, Artificial Sequence
  primer
gtaaaacgacggccagtgccaggtcatcaaattaaggc

SEQ ID NO: 97935 - DNA, 27 bp, Artificial Sequence
  primer
tgatcatttaaactagaccatttctca

SEQ ID NO: 97936 - DNA, 21 bp, Artificial Sequence
  primer
tgtggcatatgaagaaccagg

SEQ ID NO: 97937 - DNA, 41 bp, Artificial Sequence
  primer
gtaaaacgacggccagtttggccagattaagaaagaagttg

SEQ ID NO: 97938 - DNA, 40 bp, Artificial Sequence
  primer
gtaaaacgacggccagtgtaggccttcaacaaataaatgc

SEQ ID NO: 97939 - DNA, 39 bp, Artificial Sequence
  primer
gtaaaacgacggccagtcactgaaactacagggcacttg

SEQ ID NO: 97940 - DNA, 22 bp, Artificial Sequence
  primer
ataacccttagccttgcctctc

SEQ ID NO: 97941 - DNA, 41 bp, Artificial Sequence
  primer
gtaaaacgacggccagtgcatagaaacacaattcctcaatc

SEQ ID NO: 97942 - DNA, 42 bp, Artificial Sequence
  primer
gtaaaacgacggccagtccaggttatccagaatagtgttgtc

SEQ ID NO: 97943 - DNA, 38 bp, Artificial Sequence
  primer
gtaaaacgacggccagttgcccttcagttagatgggtc

SEQ ID NO: 97944 - DNA, 21 bp, Artificial Sequence
  primer
gcctgttaggcagtaaagtcg

SEQ ID NO: 97945 - DNA, 22 bp, Artificial Sequence
  primer
aagacccaaagcttatcaggaa

SEQ ID NO: 97946 - DNA, 19 bp, Artificial Sequence
  primer
gttgccaatgtgacccaaa

SEQ ID NO: 97947 - DNA, 39 bp, Artificial Sequence
  primer
gtaaaacgacggccagtcggagaactgcttatttccaag

SEQ ID NO: 97948 - DNA, 21 bp, Artificial Sequence
  primer
acagtcgggtgactagcacag

SEQ ID NO: 97949 - DNA, 44 bp, Artificial Sequence
  primer
gtaaaacgacggccagtcttggtatacaaattctttcttcaaca

SEQ ID NO: 97950 - DNA, 42 bp, Artificial Sequence
  primer
gtaaaacgacggccagtctttgatggagtatgtatttcccac

SEQ ID NO: 97951 - DNA, 21 bp, Artificial Sequence
  primer
tatggtggatcaccctctcac

SEQ ID NO: 97952 - DNA, 21 bp, Artificial Sequence
  primer
ttcgtggagagaagctgaaag

SEQ ID NO: 97953 - DNA, 43 bp, Artificial Sequence
  primer
gtaaaacgacggccagtaaagtagggaagaaagtatggattgt

SEQ ID NO: 97954 - DNA, 38 bp, Artificial Sequence
  primer
gtaaaacgacggccagttgggcaacaggagactatctg

SEQ ID NO: 97955 - DNA, 25 bp, Artificial Sequence
  primer
aagaacttaggccatttgtggatac

SEQ ID NO: 97956 - DNA, 40 bp, Artificial Sequence
  primer
gtaaaacgacggccagtcctataatctcccaatccacagc

SEQ ID NO: 97957 - DNA, 24 bp, Artificial Sequence
  primer
tactctcagctcaaagcaggtatc

SEQ ID NO: 97958 - DNA, 37 bp, Artificial Sequence
  primer
gtaaaacgacggccagtctgctgctggagtggagagt

SEQ ID NO: 97959 - DNA, 28 bp, Artificial Sequence
  primer
cttcagaattaaacatagagtcctttga

SEQ ID NO: 97960 - DNA, 28 bp, Artificial Sequence
  primer
gacagggatacctaagaataatgaagag

SEQ ID NO: 97961 - DNA, 21 bp, Artificial Sequence
  primer
ttcagctttcttcaccactgc

SEQ ID NO: 97962 - DNA, 42 bp, Artificial Sequence
  primer
gtaaaacgacggccagtgctgtatactaaatcctccctttgg

SEQ ID NO: 97963 - DNA, 40 bp, Artificial Sequence
  primer
gtaaaacgacggccagttcatcctttgtgatgactgtttg

SEQ ID NO: 97964 - DNA, 38 bp, Artificial Sequence
  primer
gtaaaacgacggccagtagatgctcatcctgcaacaga

SEQ ID NO: 97965 - DNA, 21 bp, Artificial Sequence
  primer
aacaacatggaagtcacctgg

SEQ ID NO: 97966 - DNA, 22 bp, Artificial Sequence
  primer
aaacaatgcagaagaggaggag

SEQ ID NO: 97967 - DNA, 43 bp, Artificial Sequence
  primer
gtaaaacgacggccagttcacagtgacatattaggtggatttc

SEQ ID NO: 97968 - DNA, 43 bp, Artificial Sequence
  primer
gtaaaacgacggccagttgtaatgactgcaacacatttcatag

SEQ ID NO: 97969 - DNA, 20 bp, Artificial Sequence
  primer
agattgcttgagccctggag

SEQ ID NO: 97970 - DNA, 21 bp, Artificial Sequence
  primer
acgttgtgcagatgtaccctt

SEQ ID NO: 97971 - DNA, 39 bp, Artificial Sequence
  primer
gtaaaacgacggccagtatgtcacggaaagacaagacag

SEQ ID NO: 97972 - DNA, 43 bp, Artificial Sequence
  primer
gtaaaacgacggccagtggaggtaaagcttacagtaatgacaa

SEQ ID NO: 97973 - DNA, 38 bp, Artificial Sequence
  primer
gtaaaacgacggccagtaagtgtggcatattgctgtcc

SEQ ID NO: 97974 - DNA, 40 bp, Artificial Sequence
  primer
gtaaaacgacggccagtcaatgaggatgaactatctgcaa

SEQ ID NO: 97975 - DNA, 38 bp, Artificial Sequence
  primer
gtaaaacgacggccagtaagtgatcctcccacatcagc

SEQ ID NO: 97976 - DNA, 38 bp, Artificial Sequence
  primer
gtaaaacgacggccagtagtgaccaaggaacacccttt

SEQ ID NO: 97977 - DNA, 44 bp, Artificial Sequence
  primer
gtaaaacgacggccagttgaagaatgacctaatactaagaaggg

SEQ ID NO: 97978 - DNA, 21 bp, Artificial Sequence
  primer
ggaaccagtgacccgatagac

SEQ ID NO: 97979 - DNA, 21 bp, Artificial Sequence
  primer
acagactccgtttctgctgtg

SEQ ID NO: 97980 - DNA, 21 bp, Artificial Sequence
  primer
atcaagcatgtgacgttgagc

SEQ ID NO: 97981 - DNA, 38 bp, Artificial Sequence
  primer
gtaaaacgacggccagtcacacagtgaatgacgttcgg

SEQ ID NO: 97982 - DNA, 22 bp, Artificial Sequence
  primer
cgaaagcacacaaagacacatc

SEQ ID NO: 97983 - DNA, 18 bp, Artificial Sequence
  primer
ggcaccgtgctcttggac

SEQ ID NO: 97984 - DNA, 37 bp, Artificial Sequence
  primer
gtaaaacgacggccagtcagggagggacacagtcagt

SEQ ID NO: 97985 - DNA, 22 bp, Artificial Sequence
  primer
gggctgagatgactcctaggtc

SEQ ID NO: 97986 - DNA, 21 bp, Artificial Sequence
  primer
cctcgttcctggaagtcagag

SEQ ID NO: 97987 - DNA, 20 bp, Artificial Sequence
  primer
gtctgctgctgctcacttcc

SEQ ID NO: 97988 - DNA, 38 bp, Artificial Sequence
  primer
gtaaaacgacggccagtgccaagactcatgaggagctg

SEQ ID NO: 97989 - DNA, 21 bp, Artificial Sequence
  primer
aagagagaactcttgccagcc

SEQ ID NO: 97990 - DNA, 41 bp, Artificial Sequence
  primer
gtaaaacgacggccagtacaagctttatcacagtgtgtgtg

SEQ ID NO: 97991 - DNA, 47 bp, Artificial Sequence
  primer
gtaaaacgacggccagtttctcatgactaaacatgtattctaacact

SEQ ID NO: 97992 - DNA, 26 bp, Artificial Sequence
  primer
gagggacatatgcagagactattagg

SEQ ID NO: 97993 - DNA, 44 bp, Artificial Sequence
  primer
gtaaaacgacggccagtccctttaactggattatcccatattag

SEQ ID NO: 97994 - DNA, 24 bp, Artificial Sequence
  primer
aagtgtgtttgtgtgtgtgtatgc

SEQ ID NO: 97995 - DNA, 22 bp, Artificial Sequence
  primer
gaagagggcaaactctaggacc

SEQ ID NO: 97996 - DNA, 39 bp, Artificial Sequence
  primer
gtaaaacgacggccagtaacgatctttcatgactgggtc

SEQ ID NO: 97997 - DNA, 21 bp, Artificial Sequence
  primer
tcacacaggatagttagggcg

SEQ ID NO: 97998 - DNA, 21 bp, Artificial Sequence
  primer
gtgggaagggctcactatctg

SEQ ID NO: 97999 - DNA, 38 bp, Artificial Sequence
  primer
gtaaaacgacggccagtctactctccatccatcccagc

SEQ ID NO: 98000 - DNA, 21 bp, Artificial Sequence
  primer
acgtttcaagtcacctttccc

SEQ ID NO: 98001 - DNA, 18 bp, Artificial Sequence
  primer
gctttgtcctcgggttcc

SEQ ID NO: 98002 - DNA, 37 bp, Artificial Sequence
  primer
gtaaaacgacggccagtggttgaactagccgagaccg

SEQ ID NO: 98003 - DNA, 21 bp, Artificial Sequence
  primer
tcagcctgactcatcatgtcc

SEQ ID NO: 98004 - DNA, 22 bp, Artificial Sequence
  primer
ttacagtgacccacaattgcac

SEQ ID NO: 98005 - DNA, 20 bp, Artificial Sequence
  primer
ttacaattggtcgtgggtgg

SEQ ID NO: 98006 - DNA, 20 bp, Artificial Sequence
  primer
gtccgaggtggctacttgtg

SEQ ID NO: 98007 - DNA, 38 bp, Artificial Sequence
  primer
gtaaaacgacggccagtggattccgtgggaaagaactc

SEQ ID NO: 98008 - DNA, 38 bp, Artificial Sequence
  primer
gtaaaacgacggccagtccttagcttcccgtctgtgag

SEQ ID NO: 98009 - DNA, 38 bp, Artificial Sequence
  primer
gtaaaacgacggccagtcattcaccttcctaaccgtcc

SEQ ID NO: 98010 - DNA, 21 bp, Artificial Sequence
  primer
gccctgagagaggacagaaac

SEQ ID NO: 98011 - DNA, 21 bp, Artificial Sequence
  primer
cacataaaccagggactgctg

SEQ ID NO: 98012 - DNA, 24 bp, Artificial Sequence
  primer
tctcattcgatatttgacataggg

SEQ ID NO: 98013 - DNA, 36 bp, Artificial Sequence
  primer
gtaaaacgacggccagtccgcagatgcgtacagaac

SEQ ID NO: 98014 - DNA, 21 bp, Artificial Sequence
  primer
ctgcccatcaccatgtaacac

SEQ ID NO: 98015 - DNA, 21 bp, Artificial Sequence
  primer
cccttgcctgctggtattaag

SEQ ID NO: 98016 - DNA, 36 bp, Artificial Sequence
  primer
gtaaaacgacggccagtctcgtgggtgtaggccttg

SEQ ID NO: 98017 - DNA, 44 bp, Artificial Sequence
  primer
gtaaaacgacggccagtctaggaacagaaggaaactatctcaac

SEQ ID NO: 98018 - DNA, 39 bp, Artificial Sequence
  primer
gtaaaacgacggccagttttcccaagtttgcattaagga

SEQ ID NO: 98019 - DNA, 41 bp, Artificial Sequence
  primer
gtaaaacgacggccagtccagatcctgagagatagatgacc

SEQ ID NO: 98020 - DNA, 21 bp, Artificial Sequence
  primer
tgccagaagtctggatctttc

SEQ ID NO: 98021 - DNA, 22 bp, Artificial Sequence
  primer
tctgatggaaataagatggcct

SEQ ID NO: 98022 - DNA, 23 bp, Artificial Sequence
  primer
tgatatttcacagtcttctgccc

SEQ ID NO: 98023 - DNA, 37 bp, Artificial Sequence
  primer
gtaaaacgacggccagtaggagggagggagagacagg

SEQ ID NO: 98024 - DNA, 38 bp, Artificial Sequence
  primer
gtaaaacgacggccagtcattcaagaactgaccctgga

SEQ ID NO: 98025 - DNA, 24 bp, Artificial Sequence
  primer
tcaacctactgtgatgacaaatcc

SEQ ID NO: 98026 - DNA, 38 bp, Artificial Sequence
  primer
gtaaaacgacggccagtttcgatgtcaattcttgcagc

SEQ ID NO: 98027 - DNA, 22 bp, Artificial Sequence
  primer
aactaaccaactgcctgctttg

SEQ ID NO: 98028 - DNA, 22 bp, Artificial Sequence
  primer
gggatctagagtgccatgttcc

SEQ ID NO: 98029 - DNA, 21 bp, Artificial Sequence
  primer
cctaatatggaagtcgtgccc

SEQ ID NO: 98030 - DNA, 21 bp, Artificial Sequence
  primer
agtccagagcaaaggatcagc

SEQ ID NO: 98031 - DNA, 21 bp, Artificial Sequence
  primer
cttcactcccttccattctgc

SEQ ID NO: 98032 - DNA, 38 bp, Artificial Sequence
  primer
gtaaaacgacggccagtttggatgccttactgtggaac

SEQ ID NO: 98033 - DNA, 21 bp, Artificial Sequence
  primer
ttgacaggtgtccaagaggtc

SEQ ID NO: 98034 - DNA, 21 bp, Artificial Sequence
  primer
tggtgcctcagtgattctagg

SEQ ID NO: 98035 - DNA, 20 bp, Artificial Sequence
  primer
aaactgtccctgggcaagag

SEQ ID NO: 98036 - DNA, 21 bp, Artificial Sequence
  primer
tcagaaacaaacacgcaggag

SEQ ID NO: 98037 - DNA, 38 bp, Artificial Sequence
  primer
gtaaaacgacggccagtctcctggagaagatttccgtg

SEQ ID NO: 98038 - DNA, 38 bp, Artificial Sequence
  primer
gtaaaacgacggccagttgaagtgggaaaggtggaaag

SEQ ID NO: 98039 - DNA, 21 bp, Artificial Sequence
  primer
tccatgtctgtctatgctggg

SEQ ID NO: 98040 - DNA, 38 bp, Artificial Sequence
  primer
gtaaaacgacggccagtgtgttagagtgggaggaagcc

SEQ ID NO: 98041 - DNA, 21 bp, Artificial Sequence
  primer
cacacagcaggtgctcaataa

SEQ ID NO: 98042 - DNA, 38 bp, Artificial Sequence; identical to SEQ ID NO: 98038
  primer

SEQ ID NO: 98043 - DNA, 20 bp, Artificial Sequence
  primer
cactgtcaggttctgcctcc

SEQ ID NO: 98044 - DNA, 38 bp, Artificial Sequence
  primer
gtaaaacgacggccagtgtgggaatccacgaaactcag

SEQ ID NO: 98045 - DNA, 21 bp, Artificial Sequence
  primer
aagcttctcagcatggtccac

SEQ ID NO: 98046 - DNA, 21 bp, Artificial Sequence
  primer
tgagaagtagcagggacaggg

SEQ ID NO: 98047 - DNA, 20 bp, Artificial Sequence
  primer
cccgtttaacagacagaggc

SEQ ID NO: 98048 - DNA, 21 bp, Artificial Sequence
  primer
aatgtgcccagggaatatgac

SEQ ID NO: 98049 - DNA, 21 bp, Artificial Sequence
  primer
agctatgaagccctgaacacc

SEQ ID NO: 98050 - DNA, 21 bp, Artificial Sequence
  primer
gaggcaggttagactggatgc

SEQ ID NO: 98051 - DNA, 21 bp, Artificial Sequence
  primer
tgcaatgatggatgtcaagtg

SEQ ID NO: 98052 - DNA, 21 bp, Artificial Sequence
  primer
atctgggcagtgaggacaatc

SEQ ID NO: 98053 - DNA, 19 bp, Artificial Sequence
  primer
catgtgatgaaggatgcgg

SEQ ID NO: 98054 - DNA, 21 bp, Artificial Sequence
  primer
ggcgaagtgaatgaaggaatc

SEQ ID NO: 98055 - DNA, 21 bp, Artificial Sequence
  primer
atgttcaccctccctgtgtct

SEQ ID NO: 98056 - DNA, 21 bp, Artificial Sequence
  primer
attccagagcaaaggatcagc

SEQ ID NO: 98057 - DNA, 21 bp, Artificial Sequence
  primer
ggtctctgaaacaatcctggc

SEQ ID NO: 98058 - DNA, 38 bp, Artificial Sequence
  primer
gtaaaacgacggccagtgagtggctgggtagtgagagg

SEQ ID NO: 98059 - DNA, 21 bp, Artificial Sequence
  primer
gtgcatagctggattgacagg

SEQ ID NO: 98060 - DNA, 21 bp, Artificial Sequence
  primer
cgctgatcaaggtgtctcctc

SEQ ID NO: 98061 - DNA, 22 bp, Artificial Sequence
  primer
cactattctctgcctgggtttg

SEQ ID NO: 98062 - DNA, 21 bp, Artificial Sequence
  primer
aagctgccgtctagttccttg

SEQ ID NO: 98063 - DNA, 38 bp, Artificial Sequence
  primer
gtaaaacgacggccagtcagcaggactagaaagacggg

SEQ ID NO: 98064 - DNA, 20 bp, Artificial Sequence
  primer
gagaaccacagtgagggcag

SEQ ID NO: 98065 - DNA, 38 bp, Artificial Sequence
  primer
gtaaaacgacggccagtcctgggccacatttattatcc

SEQ ID NO: 98066 - DNA, 38 bp, Artificial Sequence
  primer
gtaaaacgacggccagtggaggtgggtgtttctttgtc

SEQ ID NO: 98067 - DNA, 37 bp, Artificial Sequence
  primer
gtaaaacgacggccagtatcttcccggtctcatcgtc

SEQ ID NO: 98068 - DNA, 38 bp, Artificial Sequence
  primer
gtaaaacgacggccagttttaacctcatgtgctccagg

SEQ ID NO: 98069 - DNA, 38 bp, Artificial Sequence
  primer
gtaaaacgacggccagtcgtctgtaccctactctcccg

SEQ ID NO: 98070 - DNA, 40 bp, Artificial Sequence
  primer
gtaaaacgacggccagtttacttactgcagggagaagagg

SEQ ID NO: 98071 - DNA, 21 bp, Artificial Sequence
  primer
tgctacctggactgctctgtg

SEQ ID NO: 98072 - DNA, 22 bp, Artificial Sequence
  primer
gcagagggacaaagtacactgg

SEQ ID NO: 98073 - DNA, 38 bp, Artificial Sequence
  primer
gtaaaacgacggccagtagtgataaagggaggtccgtg

SEQ ID NO: 98074 - DNA, 21 bp, Artificial Sequence
  primer
gcgctgacagaaataacctcc

SEQ ID NO: 98075 - DNA, 43 bp, Artificial Sequence
  primer
gtaaaacgacggccagttccagtttgaaatcctttaattatga

SEQ ID NO: 98076 - DNA, 24 bp, Artificial Sequence
  primer
aaatctcagagcaaagccatattt

SEQ ID NO: 98077 - DNA, 40 bp, Artificial Sequence
  primer
gtaaaacgacggccagtaagtcttgcaagtcatttggttt

SEQ ID NO: 98078 - DNA, 30 bp, Artificial Sequence
  primer
gtactaacaacacagttcatacaaagaaac

SEQ ID NO: 98079 - DNA, 38 bp, Artificial Sequence
  primer
gtaaaacgacggccagtcctctctctgggctagtgtgg

SEQ ID NO: 98080 - DNA, 21 bp, Artificial Sequence
  primer
gaaggtgtcaggctctggttc

SEQ ID NO: 98081 - DNA, 21 bp, Artificial Sequence
  primer
caatacccagcctggaaagag

SEQ ID NO: 98082 - DNA, 20 bp, Artificial Sequence
  primer
gagacccgacatgacctcag

SEQ ID NO: 98083 - DNA, 21 bp, Artificial Sequence
  primer
actgaaggtattgctgccctc

SEQ ID NO: 98084 - DNA, 37 bp, Artificial Sequence
  primer
gtaaaacgacggccagtacagagcaggtgctttccag

SEQ ID NO: 98085 - DNA, 21 bp, Artificial Sequence
  primer
ccatgggacctagacaggaag

SEQ ID NO: 98086 - DNA, 21 bp, Artificial Sequence
  primer
agcatcaggaatgaggaggag

SEQ ID NO: 98087 - DNA, 21 bp, Artificial Sequence
  primer
accaccaagtttccgagtttc

SEQ ID NO: 98088 - DNA, 21 bp, Artificial Sequence
  primer
accgagtaggagctgtgttcg

SEQ ID NO: 98089 - DNA, 21 bp, Artificial Sequence
  primer
gtggtgagaaggatctggagg

SEQ ID NO: 98090 - DNA, 38 bp, Artificial Sequence
  primer
gtaaaacgacggccagtcttatctccctgcagtcagcc

SEQ ID NO: 98091 - DNA, 38 bp, Artificial Sequence
  primer
gtaaaacgacggccagtagacatggcagggagaagaag

SEQ ID NO: 98092 - DNA, 21 bp, Artificial Sequence
  primer
agacctgcatcctgaaagtgg

SEQ ID NO: 98093 - DNA, 19 bp, Artificial Sequence
  primer
gagggagccaagctggtag

SEQ ID NO: 98094 - DNA, 38 bp, Artificial Sequence
  primer
gtaaaacgacggccagttcctaacccaacttccaccac

SEQ ID NO: 98095 - DNA, 19 bp, Artificial Sequence
  primer
gagcgtccctagcgacaag

SEQ ID NO: 98096 - DNA, 23 bp, Artificial Sequence
  primer
tgagaccaatcttagcaatcagg

SEQ ID NO: 98097 - DNA, 38 bp, Artificial Sequence
  primer
gtaaaacgacggccagtttctcctaccacaggaaatgc

SEQ ID NO: 98098 - DNA, 39 bp, Artificial Sequence
  primer
gtaaaacgacggccagtggacctttctcatactccctgg

SEQ ID NO: 98099 - DNA, 21 bp, Artificial Sequence
  primer
gagtctgatctgcagcgaaag

SEQ ID NO: 98100 - DNA, 21 bp, Artificial Sequence
  primer
ttgcttacagtgggcagtttg

SEQ ID NO: 98101 - DNA, 21 bp, Artificial Sequence
  primer
gtgagcgaggtcgtcatcttc

SEQ ID NO: 98102 - DNA, 26 bp, Artificial Sequence
  primer
aattacaagggaaatgattattccag

SEQ ID NO: 98103 - DNA, 28 bp, Artificial Sequence
  primer
agtgatataattcaggcataattgctac

SEQ ID NO: 98104 - DNA, 46 bp, Artificial Sequence
  primer
gtaaaacgacggccagtcaatgttaaggagataatatggtatccag

SEQ ID NO: 98105 - DNA, 21 bp, Artificial Sequence
  primer
tatcagatcaggctgcattcg

SEQ ID NO: 98106 - DNA, 27 bp, Artificial Sequence
  primer
gaacttagctcaattacaggcagatag

SEQ ID NO: 98107 - DNA, 21 bp, Artificial Sequence
  primer
ttctggccctgtttatgtctg

SEQ ID NO: 98108 - DNA, 22 bp, Artificial Sequence
  primer
tgcttccaacagccttactttg

SEQ ID NO: 98109 - DNA, 21 bp, Artificial Sequence
  primer
tttggtcactttgcttgaaca

SEQ ID NO: 98110 - DNA, 26 bp, Artificial Sequence
  primer
tttgccacaattaatatagatgagtc

SEQ ID NO: 98111 - DNA, 22 bp, Artificial Sequence
  primer
aagcctgaatggaaagacagac

SEQ ID NO: 98112 - DNA, 23 bp, Artificial Sequence
  primer
cccagtttatgtcaaatcaggag

SEQ ID NO: 98113 - DNA, 39 bp, Artificial Sequence
  primer
gtaaaacgacggccagtttagattacaggcaatgggagc

SEQ ID NO: 98114 - DNA, 22 bp, Artificial Sequence
  primer
ctccacaggtactctcctccac

SEQ ID NO: 98115 - DNA, 41 bp, Artificial Sequence
  primer
gtaaaacgacggccagtgattggtctcatattgaagactgg

SEQ ID NO: 98116 - DNA, 23 bp, Artificial Sequence
  primer
cctgccttattcagtagcatttg

SEQ ID NO: 98117 - DNA, 40 bp, Artificial Sequence
  primer
gtaaaacgacggccagtttgtttacacgaagcacaagaga

SEQ ID NO: 98118 - DNA, 41 bp, Artificial Sequence
  primer
gtaaaacgacggccagtccctcactttgataacaagagatt

SEQ ID NO: 98119 - DNA, 38 bp, Artificial Sequence
  primer
gtaaaacgacggccagttaatttcccacagcagtccag

SEQ ID NO: 98120 - DNA, 35 bp, Artificial Sequence
  primer
gtaaaacgacggccagtttacaggcgccagccact

SEQ ID NO: 98121 - DNA, 37 bp, Artificial Sequence
  primer
gtaaaacgacggccagtggtaggcaagcattcagcag

SEQ ID NO: 98122 - DNA, 23 bp, Artificial Sequence
  primer
tgaactggacacaaccgttagtt

SEQ ID NO: 98123 - DNA, 38 bp, Artificial Sequence
  primer
gtaaaacgacggccagtttggtcactgtccctgtgatt

SEQ ID NO: 98124 - DNA, 21 bp, Artificial Sequence
  primer
ccacttggacacaattggaac

SEQ ID NO: 98125 - DNA, 41 bp, Artificial Sequence
  primer
gtaaaacgacggccagttgttctgttcacaggaagaattga

SEQ ID NO: 98126 - DNA, 37 bp, Artificial Sequence
  primer
gtaaaacgacggccagttttggtaggcaggcattcag

SEQ ID NO: 98127 - DNA, 37 bp, Artificial Sequence
  primer
gtaaaacgacggccagtagccaccggtctcagcttat

SEQ ID NO: 98128 - DNA, 21 bp, Artificial Sequence
  primer
ttcctgctaattgcatgttgg

SEQ ID NO: 98129 - DNA, 20 bp, Artificial Sequence
  primer
accttatgatcttgtccggc

SEQ ID NO: 98130 - DNA, 24 bp, Artificial Sequence
  primer
tctacttagacacaattggaaccg

SEQ ID NO: 98131 - DNA, 37 bp, Artificial Sequence
  primer
gtaaaacgacggccagtctgcatcctttctcctttgc

SEQ ID NO: 98132 - DNA, 21 bp, Artificial Sequence
  primer
cggctgaacataaccgtactc

SEQ ID NO: 98133 - DNA, 39 bp, Artificial Sequence
  primer
gtaaaacgacggccagtttggtgaagaaatctgtgcagt

SEQ ID NO: 98134 - DNA, 39 bp, Artificial Sequence
  primer
gtaaaacgacggccagtcatctttaccagaaagccaagg

SEQ ID NO: 98135 - DNA, 39 bp, Artificial Sequence
  primer
gtaaaacgacggccagtcttagcaatttaaggctttggg

SEQ ID NO: 98136 - DNA, 27 bp, Artificial Sequence
  primer
tttgactgaatgaaacttaagtaaggg

SEQ ID NO: 98137 - DNA, 25 bp, Artificial Sequence
  primer
ttaagtgaaacattgttctctcagc

SEQ ID NO: 98138 - DNA, 38 bp, Artificial Sequence
  primer
gtaaaacgacggccagtcatctcccatctttccagctc

SEQ ID NO: 98139 - DNA, 24 bp, Artificial Sequence
  primer
catccacttagacacaattggaac

SEQ ID NO: 98140 - DNA, 37 bp, Artificial Sequence; identical to SEQ ID NO: 98121
  primer

SEQ ID NO: 98141 - DNA, 38 bp, Artificial Sequence
  primer
gtaaaacgacggccagttcctcaccattgtgacacatc

SEQ ID NO: 98142 - DNA, 43 bp, Artificial Sequence
  primer
gtaaaacgacggccagtgcatagtgaataaatcctctttgatt

SEQ ID NO: 98143 - DNA, 39 bp, Artificial Sequence
  primer
gtaaaacgacggccagttcatttcttggccctatttctg

SEQ ID NO: 98144 - DNA, 22 bp, Artificial Sequence
  primer
aaactaaataggtccgttggca

SEQ ID NO: 98145 - DNA, 21 bp, Artificial Sequence
  primer
gatcatcttcccaagtagcca

SEQ ID NO: 98146 - DNA, 40 bp, Artificial Sequence
  primer
gtaaaacgacggccagttttgcaagctttgagaccataag

SEQ ID NO: 98147 - DNA, 39 bp, Artificial Sequence
  primer
gtaaaacgacggccagtggtttacttactgaggcatggg

SEQ ID NO: 98148 - DNA, 24 bp, Artificial Sequence
  primer
tcttcctttggtaccatctctgtc

SEQ ID NO: 98149 - DNA, 21 bp, Artificial Sequence
  primer
tgatcatcttcccaagtagcc

SEQ ID NO: 98150 - DNA, 25 bp, Artificial Sequence
  primer
aattcacactcataggaggactaca

SEQ ID NO: 98151 - DNA, 24 bp, Artificial Sequence
  primer
gaagctatctttgcaagctttgag

SEQ ID NO: 98152 - DNA, 40 bp, Artificial Sequence
  primer
gtaaaacgacggccagtttgctgactatagagtggcattg

SEQ ID NO: 98153 - DNA, 19 bp, Artificial Sequence
  primer
caaaggctggctggattct

SEQ ID NO: 98154 - DNA, 39 bp, Artificial Sequence
  primer
gtaaaacgacggccagtgggttccaagtgttgggtaaac

SEQ ID NO: 98155 - DNA, 38 bp, Artificial Sequence
  primer
gtaaaacgacggccagtcaacgaggcatcaatcatttg

SEQ ID NO: 98156 - DNA, 38 bp, Artificial Sequence
  primer
gtaaaacgacggccagtggcatgctgtgcaaacataag

SEQ ID NO: 98157 - DNA, 21 bp, Artificial Sequence
  primer
catagttctgcaaatgcccac

SEQ ID NO: 98158 - DNA, 38 bp, Artificial Sequence
  primer
gtaaaacgacggccagtgggaagagtccactctggatg

SEQ ID NO: 98159 - DNA, 24 bp, Artificial Sequence
  primer
ttctcaagaatcatttaagcttgc

SEQ ID NO: 98160 - DNA, 38 bp, Artificial Sequence
  primer
gtaaaacgacggccagtaattacatcatcctcctgccc

SEQ ID NO: 98161 - DNA, 38 bp, Artificial Sequence
  primer
gtaaaacgacggccagtaattccagtcgcgaataccag

SEQ ID NO: 98162 - DNA, 45 bp, Artificial Sequence
  primer
gtaaaacgacggccagttgctaggaaattagctcctatacatttc

SEQ ID NO: 98163 - DNA, 21 bp, Artificial Sequence
  primer
aggccaaatggagggaattag

SEQ ID NO: 98164 - DNA, 22 bp, Artificial Sequence
  primer
tggcataaactctgtggagacc

SEQ ID NO: 98165 - DNA, 18 bp, Artificial Sequence
  primer
gtgcgagaccctcatccc

SEQ ID NO: 98166 - DNA, 38 bp, Artificial Sequence
  primer
gtaaaacgacggccagtaccaggagccacagaagttcc

SEQ ID NO: 98167 - DNA, 38 bp, Artificial Sequence
  primer
gtaaaacgacggccagtcagatggaaggaacaagcagg

SEQ ID NO: 98168 - DNA, 19 bp, Artificial Sequence
  primer
ccagaaccgtcaagggatg

SEQ ID NO: 98169 - DNA, 20 bp, Artificial Sequence
  primer
acccaccaagatctgctttg

SEQ ID NO: 98170 - DNA, 18 bp, Artificial Sequence
  primer
agtccgcagaccctctcg

SEQ ID NO: 98171 - DNA, 20 bp, Artificial Sequence
  primer
tgcactttcaggagccctac

SEQ ID NO: 98172 - DNA, 38 bp, Artificial Sequence
  primer
gtaaaacgacggccagtcaagccatttacttgccactc

SEQ ID NO: 98173 - DNA, 18 bp, Artificial Sequence
  primer
gaagggcccagtggaaag

SEQ ID NO: 98174 - DNA, 21 bp, Artificial Sequence
  primer
atcctcgtttctgccattcag

SEQ ID NO: 98175 - DNA, 20 bp, Artificial Sequence
  primer
agactgcctgcttccctctc

SEQ ID NO: 98176 - DNA, 37 bp, Artificial Sequence
  primer
gtaaaacgacggccagtatccaggttccattccatcc

SEQ ID NO: 98177 - DNA, 23 bp, Artificial Sequence
  primer
cagtggttgtctttggatagtgg

SEQ ID NO: 98178 - DNA, 22 bp, Artificial Sequence
  primer
aagctgatggagtacgatggtg

SEQ ID NO: 98179 - DNA, 38 bp, Artificial Sequence
  primer
gtaaaacgacggccagtattcagggttcccttgtatgg

SEQ ID NO: 98180 - DNA, 38 bp, Artificial Sequence
  primer
gtaaaacgacggccagttcttgaactggtttgtcacgg

SEQ ID NO: 98181 - DNA, 39 bp, Artificial Sequence
  primer
gtaaaacgacggccagtagaagaagtcagcttctcggtg

SEQ ID NO: 98182 - DNA, 39 bp, Artificial Sequence
  primer
gtaaaacgacggccagtaaatcatgccgggtctatactg

SEQ ID NO: 98183 - DNA, 20 bp, Artificial Sequence
  primer
aagtgatctgccctccttgg

SEQ ID NO: 98184 - DNA, 37 bp, Artificial Sequence
  primer
gtaaaacgacggccagtaaacccaacccatacacacg

SEQ ID NO: 98185 - DNA, 21 bp, Artificial Sequence
  primer
tcctggtctcaagcaatcctc

SEQ ID NO: 98186 - DNA, 38 bp, Artificial Sequence
  primer
gtaaaacgacggccagtgagattgtaaattgccacccg

SEQ ID NO: 98187 - DNA, 25 bp, Artificial Sequence
  primer
tcccttacttgtaccagctcactac

SEQ ID NO: 98188 - DNA, 39 bp, Artificial Sequence
  primer
gtaaaacgacggccagtggaagctagagctgagcaagac

SEQ ID NO: 98189 - DNA, 21 bp, Artificial Sequence
  primer
cagaagttgcagtgcagtgag

SEQ ID NO: 98190 - DNA, 21 bp, Artificial Sequence
  primer
cagcccatgaaagtgaatttg

SEQ ID NO: 98191 - DNA, 26 bp, Artificial Sequence
  primer
gaacattcctagtattagctggcaac

SEQ ID NO: 98192 - DNA, 40 bp, Artificial Sequence
  primer
gtaaaacgacggccagtttattcgccattaggatgaaatc

SEQ ID NO: 98193 - DNA, 42 bp, Artificial Sequence
  primer
gtaaaacgacggccagtaagacactacacccatacattctcc

SEQ ID NO: 98194 - DNA, 22 bp, Artificial Sequence
  primer
ctaaccgattgaatatggagcc

SEQ ID NO: 98195 - DNA, 21 bp, Artificial Sequence
  primer
cgggcacagattctgagtaac

SEQ ID NO: 98196 - DNA, 38 bp, Artificial Sequence
  primer
gtaaaacgacggccagtgccataccaacaatggtgaac

SEQ ID NO: 98197 - DNA, 23 bp, Artificial Sequence
  primer
tgagaaacggtgtaaggtctcag

SEQ ID NO: 98198 - DNA, 21 bp, Artificial Sequence
  primer
ctcttcgatgccattcatttg

SEQ ID NO: 98199 - DNA, 39 bp, Artificial Sequence
  primer
gtaaaacgacggccagtctactcaattgcattctgtggg

SEQ ID NO: 98200 - DNA, 26 bp, Artificial Sequence
  primer
tcagtagtggttctacttgttgattt

SEQ ID NO: 98201 - DNA, 38 bp, Artificial Sequence
  primer
gtaaaacgacggccagtccataatgcttgggagaaatg

SEQ ID NO: 98202 - DNA, 20 bp, Artificial Sequence
  primer
aaagccagcactgccattag

SEQ ID NO: 98203 - DNA, 39 bp, Artificial Sequence
  primer
gtaaaacgacggccagtcatctaaatgtgggattgcctc

SEQ ID NO: 98204 - DNA, 22 bp, Artificial Sequence
  primer
aaatgaatgtcctgtacaccaa

SEQ ID NO: 98205 - DNA, 24 bp, Artificial Sequence
  primer
tggaaattcaaagaaatcacttgt

SEQ ID NO: 98206 - DNA, 24 bp, Artificial Sequence
  primer
acacagtgaccctcaatttatctg

SEQ ID NO: 98207 - DNA, 38 bp, Artificial Sequence
  primer
gtaaaacgacggccagtcacattgcttcaggctactgg

SEQ ID NO: 98208 - DNA, 26 bp, Artificial Sequence
  primer
gaacatttcaataaccagaatttgag

SEQ ID NO: 98209 - DNA, 22 bp, Artificial Sequence
  primer
tgttgctccaggtatgttaggg

SEQ ID NO: 98210 - DNA, 23 bp, Artificial Sequence
  primer
gggcaattatttcatatcttggg

SEQ ID NO: 98211 - DNA, 39 bp, Artificial Sequence
  primer
gtaaaacgacggccagtgcaatttgcaggaactatcaca

SEQ ID NO: 98212 - DNA, 21 bp, Artificial Sequence
  primer
ggcagaggtaactgttccacg

SEQ ID NO: 98213 - DNA, 21 bp, Artificial Sequence
  primer
ttcagccattgaacagcagag

SEQ ID NO: 98214 - DNA, 21 bp, Artificial Sequence
  primer
ttaaaggaccaagtccaagcc

SEQ ID NO: 98215 - DNA, 40 bp, Artificial Sequence
  primer
gtaaaacgacggccagtgctatttacactggaattggagc

SEQ ID NO: 98216 - DNA, 39 bp, Artificial Sequence
  primer
gtaaaacgacggccagttgcctagatatgaatccagcag

SEQ ID NO: 98217 - DNA, 38 bp, Artificial Sequence
  primer
gtaaaacgacggccagttgtactttctcccaacctgcc

SEQ ID NO: 98218 - DNA, 38 bp, Artificial Sequence
  primer
gtaaaacgacggccagttccttgaagcgtgtcaaagtg

SEQ ID NO: 98219 - DNA, 21 bp, Artificial Sequence
  primer
aacatttcagatccgcacctt

SEQ ID NO: 98220 - DNA, 38 bp, Artificial Sequence
  primer
gtaaaacgacggccagtctgaccagagaggcagaccac

SEQ ID NO: 98221 - DNA, 21 bp, Artificial Sequence
  primer
gacccatcctgtgtgtgtgtg

SEQ ID NO: 98222 - DNA, 38 bp, Artificial Sequence
  primer
gtaaaacgacggccagtcccagaggacctgagataccc

SEQ ID NO: 98223 - DNA, 38 bp, Artificial Sequence; identical to SEQ ID NO: 98220
  primer

SEQ ID NO: 98224 - DNA, 22 bp, Artificial Sequence
  primer
gagaagcctttattgtgggagg

SEQ ID NO: 98225 - DNA, 38 bp, Artificial Sequence
  primer
gtaaaacgacggccagtcttccacagctcacactggtc

SEQ ID NO: 98226 - DNA, 21 bp, Artificial Sequence
  primer
ctgaccagagaggcagaccac

SEQ ID NO: 98227 - DNA, 22 bp, Artificial Sequence
  primer
gagaagcctttattgtgggagg

SEQ ID NO: 98228 - DNA, 38 bp, Artificial Sequence
  primer
gtaaaacgacggccagtctcctattcaggacccaccac

SEQ ID NO: 98229 - DNA, 38 bp, Artificial Sequence; identical to SEQ ID NO: 98220
  primer

SEQ ID NO: 98230 - DNA, 21 bp, Artificial Sequence
  primer
gacccatcctgtgtgtgtgtg

SEQ ID NO: 98231 - DNA, 38 bp, Artificial Sequence; identical to SEQ ID NO: 98228
  primer

SEQ ID NO: 98232 - DNA, 21 bp, Artificial Sequence
  primer
gagtgggagaatgagcatgtg

SEQ ID NO: 98233 - DNA, 20 bp, Artificial Sequence
  primer
acccaccctgtgtgtgtgtg

SEQ ID NO: 98234 - DNA, 21 bp, Artificial Sequence
  primer
agcccagaggacctgagatac

SEQ ID NO: 98235 - DNA, 38 bp, Artificial Sequence; identical to SEQ ID NO: 98220
  primer

SEQ ID NO: 98236 - DNA, 21 bp, Artificial Sequence
  primer
gacccatcctgtgtgtgtgtg

SEQ ID NO: 98237 - DNA, 37 bp, Artificial Sequence
  primer
gtaaaacgacggccagttcaagtgggatgttggcttc

SEQ ID NO: 98238 - DNA, 38 bp, Artificial Sequence
  primer
gtaaaacgacggccagtatccatcaggaagatatgccc

SEQ ID NO: 98239 - DNA, 38 bp, Artificial Sequence
  primer
gtaaaacgacggccagttccatgcacaaacatttcagg

SEQ ID NO: 98240 - DNA, 20 bp, Artificial Sequence
  primer
ctgtggagaaacctggaggg

SEQ ID NO: 98241 - DNA, 38 bp, Artificial Sequence
  primer
gtaaaacgacggccagtcacttgggaattaggtggagg

SEQ ID NO: 98242 - DNA, 25 bp, Artificial Sequence
  primer
caaagttaaatcctgatatgcactg

SEQ ID NO: 98243 - DNA, 22 bp, Artificial Sequence
  primer
gcttcacaacagtaatgatggc

SEQ ID NO: 98244 - DNA, 21 bp, Artificial Sequence
  primer
gattgctttggaggtgacagt

SEQ ID NO: 98245 - DNA, 22 bp, Artificial Sequence
  primer
ccctgaagtaattcaatttggc

SEQ ID NO: 98246 - DNA, 40 bp, Artificial Sequence
  primer
gtaaaacgacggccagtaactgagggactgagattatggg

SEQ ID NO: 98247 - DNA, 21 bp, Artificial Sequence
  primer
aaccctgaaaccagcatcatc

SEQ ID NO: 98248 - DNA, 22 bp, Artificial Sequence
  primer
ttgtgtagcattccaacagagg

SEQ ID NO: 98249 - DNA, 20 bp, Artificial Sequence
  primer
acaggcataagccactgtgc

SEQ ID NO: 98250 - DNA, 24 bp, Artificial Sequence
  primer
tccttcctagaaacgggtacatag

SEQ ID NO: 98251 - DNA, 21 bp, Artificial Sequence
  primer
tggctagcagcaaatgaagtc

SEQ ID NO: 98252 - DNA, 38 bp, Artificial Sequence
  primer
gtaaaacgacggccagtacactgcaagaaacagttcgg

SEQ ID NO: 98253 - DNA, 37 bp, Artificial Sequence
  primer
gtaaaacgacggccagttcacttggctctgagaaggc

SEQ ID NO: 98254 - DNA, 21 bp, Artificial Sequence
  primer
ctatctctaaaggttgcgggc

SEQ ID NO: 98255 - DNA, 28 bp, Artificial Sequence
  primer
tcttacaaatggtatccttataattccc

SEQ ID NO: 98256 - DNA, 38 bp, Artificial Sequence
  primer
gtaaaacgacggccagttgggctagcagaaggtaaaca

SEQ ID NO: 98257 - DNA, 22 bp, Artificial Sequence
  primer
gggaataggatgcaagatcacc

SEQ ID NO: 98258 - DNA, 21 bp, Artificial Sequence
  primer
ctcagtagacccttgtgcagc

SEQ ID NO: 98259 - DNA, 37 bp, Artificial Sequence
  primer
gtaaaacgacggccagtcatctgctgggaacatgaga

SEQ ID NO: 98260 - DNA, 38 bp, Artificial Sequence
  primer
gtaaaacgacggccagttgtgggtatcaatgtctgcaa

SEQ ID NO: 98261 - DNA, 21 bp, Artificial Sequence
  primer
cgccctgcaaattgtaaactc

SEQ ID NO: 98262 - DNA, 21 bp, Artificial Sequence
  primer
atatcagttgagacccgaggc

SEQ ID NO: 98263 - DNA, 38 bp, Artificial Sequence
  primer
gtaaaacgacggccagtcctcctaaagtgctggcatta

SEQ ID NO: 98264 - DNA, 21 bp, Artificial Sequence
  primer
atttagcctccaacccaacac

SEQ ID NO: 98265 - DNA, 38 bp, Artificial Sequence
  primer
gtaaaacgacggccagtctggtgatcaataggcaaacg

SEQ ID NO: 98266 - DNA, 18 bp, Artificial Sequence
  primer
gccatcatgcccagctaa

SEQ ID NO: 98267 - DNA, 19 bp, Artificial Sequence
  primer
cacccacagatcctccctg

SEQ ID NO: 98268 - DNA, 18 bp, Artificial Sequence
  primer
aaatccacctgcagccac

SEQ ID NO: 98269 - DNA, 21 bp, Artificial Sequence
  primer
ctcaggaccatggaatacgtg

SEQ ID NO: 98270 - DNA, 37 bp, Artificial Sequence
  primer
gtaaaacgacggccagtcacccagcccttatcacctg

SEQ ID NO: 98271 - DNA, 35 bp, Artificial Sequence
  primer
gtaaaacgacggccagtacacagcatcctctgccg

SEQ ID NO: 98272 - DNA, 38 bp, Artificial Sequence
  primer
gtaaaacgacggccagtccatctgcaatcatcccatag

SEQ ID NO: 98273 - DNA, 21 bp, Artificial Sequence
  primer
ccacttccacttcctgctgtc

SEQ ID NO: 98274 - DNA, 20 bp, Artificial Sequence
  primer
gcagagcttgggctacagtc

SEQ ID NO: 98275 - DNA, 21 bp, Artificial Sequence
  primer
acctgagaggagggagctagg

SEQ ID NO: 98276 - DNA, 20 bp, Artificial Sequence
  primer
ctgctgggtgcacgtttatc

SEQ ID NO: 98277 - DNA, 21 bp, Artificial Sequence
  primer
ggactgtatcaaagggaaggc

SEQ ID NO: 98278 - DNA, 21 bp, Artificial Sequence
  primer
acatagtacacccggtcgttg

SEQ ID NO: 98279 - DNA, 37 bp, Artificial Sequence
  primer
gtaaaacgacggccagtaatccagagctgtgacgtgc

SEQ ID NO: 98280 - DNA, 21 bp, Artificial Sequence
  primer
acactgtcagggactctgtgg

SEQ ID NO: 98281 - DNA, 40 bp, Artificial Sequence
  primer
gtaaaacgacggccagtcagttctggtctttctgggattc

SEQ ID NO: 98282 - DNA, 21 bp, Artificial Sequence
  primer
tgaagaggccagagtgttgac

SEQ ID NO: 98283 - DNA, 21 bp, Artificial Sequence
  primer
tcttgatgtcctccctggttc

SEQ ID NO: 98284 - DNA, 39 bp, Artificial Sequence
  primer
gtaaaacgacggccagtttctgtttggacagagtttccc

SEQ ID NO: 98285 - DNA, 21 bp, Artificial Sequence
  primer
gaccaggatctcttgctccac

SEQ ID NO: 98286 - DNA, 38 bp, Artificial Sequence
  primer
gtaaaacgacggccagtctccagattctctccctgacg

SEQ ID NO: 98287 - DNA, 21 bp, Artificial Sequence
  primer
gaggcctccagtgaatagtcc

SEQ ID NO: 98288 - DNA, 21 bp, Artificial Sequence
  primer
catgtgaggtaaagggcacac

SEQ ID NO: 98289 - DNA, 21 bp, Artificial Sequence
  primer
aattccacgcttcttgacacc

SEQ ID NO: 98290 - DNA, 38 bp, Artificial Sequence
  primer
gtaaaacgacggccagttgtaatccagcctctgtgctc

SEQ ID NO: 98291 - DNA, 21 bp, Artificial Sequence
  primer
gtcggatgactgtctccagtg

SEQ ID NO: 98292 - DNA, 37 bp, Artificial Sequence
  primer
gtaaaacgacggccagtccaggagacagagcttgcag

SEQ ID NO: 98293 - DNA, 37 bp, Artificial Sequence
  primer
gtaaaacgacggccagtctgggacttggagaaggagc

SEQ ID NO: 98294 - DNA, 20 bp, Artificial Sequence
  primer
gcaggatgctgtttctctgg

SEQ ID NO: 98295 - DNA, 21 bp, Artificial Sequence
  primer
tttagccaagtctcgtccctc

SEQ ID NO: 98296 - DNA, 38 bp, Artificial Sequence
  primer
gtaaaacgacggccagtggcacggaaacaggttaattc

SEQ ID NO: 98297 - DNA, 37 bp, Artificial Sequence
  primer
gtaaaacgacggccagtagggtgctctgtggtttcac

SEQ ID NO: 98298 - DNA, 38 bp, Artificial Sequence
  primer
gtaaaacgacggccagtttcaggttctacacagcaggg

SEQ ID NO: 98299 - DNA, 42 bp, Artificial Sequence
  primer
gtaaaacgacggccagtcagattaaggtaaatgaaatgaccg

SEQ ID NO: 98300 - DNA, 37 bp, Artificial Sequence
  primer
gtaaaacgacggccagtgcagaagtggcagctgattc

SEQ ID NO: 98301 - DNA, 38 bp, Artificial Sequence
  primer
gtaaaacgacggccagtactcggctagagaagaggcac

SEQ ID NO: 98302 - DNA, 38 bp, Artificial Sequence
  primer
gtaaaacgacggccagtagccctgatattggcaaagac

SEQ ID NO: 98303 - DNA, 21 bp, Artificial Sequence
  primer
tgtgcgattactctgtgggac

SEQ ID NO: 98304 - DNA, 38 bp, Artificial Sequence
  primer
gtaaaacgacggccagtcagactacctgcaaatctggc

SEQ ID NO: 98305 - DNA, 27 bp, Artificial Sequence
  primer
agtgtgaggtatacccgatatttagaa

SEQ ID NO: 98306 - DNA, 38 bp, Artificial Sequence
  primer
gtaaaacgacggccagtaattccaccaccgtgaaagag

SEQ ID NO: 98307 - DNA, 20 bp, Artificial Sequence
  primer
cacttgaacccagaaggtgg

SEQ ID NO: 98308 - DNA, 22 bp, Artificial Sequence
  primer
ggaacaataagcacaaagcacc

SEQ ID NO: 98309 - DNA, 21 bp, Artificial Sequence
  primer
agtcaaagaatcgctgaaccg

SEQ ID NO: 98310 - DNA, 21 bp, Artificial Sequence
  primer
ccagttgaagaccgtctgagg

SEQ ID NO: 98311 - DNA, 38 bp, Artificial Sequence
  primer
gtaaaacgacggccagtcttcccatgagaattgaccag

SEQ ID NO: 98312 - DNA, 22 bp, Artificial Sequence
  primer
cagcaccttggtctcttctttg

SEQ ID NO: 98313 - DNA, 27 bp, Artificial Sequence
  primer
tttaaagattatgcctcataacactcc

SEQ ID NO: 98314 - DNA, 43 bp, Artificial Sequence
  primer
gtaaaacgacggccagtcccttcacactatacacaattagctt

SEQ ID NO: 98315 - DNA, 20 bp, Artificial Sequence
  primer
agctgagattccaccactgc

SEQ ID NO: 98316 - DNA, 38 bp, Artificial Sequence
  primer
gtaaaacgacggccagtcaacagcagtgagtgtgctcc

SEQ ID NO: 98317 - DNA, 22 bp, Artificial Sequence
  primer
gcccaaatccattagaggtgta

SEQ ID NO: 98318 - DNA, 22 bp, Artificial Sequence
  primer
ggatgtgctctagctgtccaag

SEQ ID NO: 98319 - DNA, 19 bp, Artificial Sequence
  primer
ggaggaagcgggtctgaag

SEQ ID NO: 98320 - DNA, 35 bp, Artificial Sequence; identical to SEQ ID NO: 79170
  primer

SEQ ID NO: 98321 - DNA, 21 bp, Artificial Sequence
  primer
atccctggaaggccagtaaag

SEQ ID NO: 98322 - DNA, 37 bp, Artificial Sequence
  primer
gtaaaacgacggccagtgcccaatccctttactcctg

SEQ ID NO: 98323 - DNA, 21 bp, Artificial Sequence
  primer
acctagccattcaacagggag

SEQ ID NO: 98324 - DNA, 38 bp, Artificial Sequence
  primer
gtaaaacgacggccagttacatggcatcacctacctgc

SEQ ID NO: 98325 - DNA, 38 bp, Artificial Sequence
  primer
gtaaaacgacggccagtaaagctgggacttggctgtag

SEQ ID NO: 98326 - DNA, 20 bp, Artificial Sequence
  primer
agagggctcagctccacttc

SEQ ID NO: 98327 - DNA, 20 bp, Artificial Sequence
  primer
ctgcaaagagtcccttggtg

SEQ ID NO: 98328 - DNA, 21 bp, Artificial Sequence
  primer
ttgatgatccgaggaaggaag

SEQ ID NO: 98329 - DNA, 20 bp, Artificial Sequence
  primer
gtgtctgaggaagtgctggg

SEQ ID NO: 98330 - DNA, 22 bp, Artificial Sequence
  primer
gatccagataagtcacgccttg

SEQ ID NO: 98331 - DNA, 18 bp, Artificial Sequence
  primer
ttgcaaagcgagacaccg

SEQ ID NO: 98332 - DNA, 22 bp, Artificial Sequence
  primer
tgcctagacaaggaactgcatc

SEQ ID NO: 98333 - DNA, 21 bp, Artificial Sequence
  primer
tcttcttacgctcagtgctgg

SEQ ID NO: 98334 - DNA, 22 bp, Artificial Sequence
  primer
tcaaagagaaattgggatcagc

SEQ ID NO: 98335 - DNA, 25 bp, Artificial Sequence
  primer
tgtcaaaccaggacagtatacaaac

SEQ ID NO: 98336 - DNA, 41 bp, Artificial Sequence
  primer
gtaaaacgacggccagtgcatttagaacaacccaacacttg

SEQ ID NO: 98337 - DNA, 21 bp, Artificial Sequence
  primer
acgccagcgtcattaacatac

SEQ ID NO: 98338 - DNA, 21 bp, Artificial Sequence
  primer
tgttggacactcaggcaattc

SEQ ID NO: 98339 - DNA, 38 bp, Artificial Sequence
  primer
gtaaaacgacggccagttaaggccaacgattcttcctc

SEQ ID NO: 98340 - DNA, 38 bp, Artificial Sequence
  primer
gtaaaacgacggccagtggtctgtctcattcccaaacc

SEQ ID NO: 98341 - DNA, 38 bp, Artificial Sequence
  primer
gtaaaacgacggccagtccttaaggcactgtcggtttc

SEQ ID NO: 98342 - DNA, 22 bp, Artificial Sequence
  primer
cctgggagacagtgagactctg

SEQ ID NO: 98343 - DNA, 21 bp, Artificial Sequence
  primer
acagacactggctcaaaccac

SEQ ID NO: 98344 - DNA, 22 bp, Artificial Sequence
  primer
aaccatgccatttggagtaatg

SEQ ID NO: 98345 - DNA, 21 bp, Artificial Sequence
  primer
gtttgtcctgggtgagagtgt

SEQ ID NO: 98346 - DNA, 21 bp, Artificial Sequence
  primer
tagctgtgtccgtctcaccac

SEQ ID NO: 98347 - DNA, 39 bp, Artificial Sequence
  primer
gtaaaacgacggccagtcagtctcttacaccacacacgg

SEQ ID NO: 98348 - DNA, 21 bp, Artificial Sequence
  primer
ctcaggctaatgactccctgg

SEQ ID NO: 98349 - DNA, 20 bp, Artificial Sequence
  primer
aggatccagcagggaaacag

SEQ ID NO: 98350 - DNA, 37 bp, Artificial Sequence
  primer
gtaaaacgacggccagtactaagtgcacagggaccca

SEQ ID NO: 98351 - DNA, 38 bp, Artificial Sequence
  primer
gtaaaacgacggccagtgcaagaagcaggaaggacaag

SEQ ID NO: 98352 - DNA, 38 bp, Artificial Sequence
  primer
gtaaaacgacggccagtcggagtagctttccattccag

SEQ ID NO: 98353 - DNA, 21 bp, Artificial Sequence
  primer
gtgctagaggtccagtggttg

SEQ ID NO: 98354 - DNA, 23 bp, Artificial Sequence
  primer
tgacatttagaagtcagggaggg

SEQ ID NO: 98355 - DNA, 35 bp, Artificial Sequence
  primer
gtaaaacgacggccagtgaggctcatggctggtgg

SEQ ID NO: 98356 - DNA, 38 bp, Artificial Sequence
  primer
gtaaaacgacggccagtcagggaagatgggaaacaaag

SEQ ID NO: 98357 - DNA, 21 bp, Artificial Sequence
  primer
accttcacctcttcatccagc

SEQ ID NO: 98358 - DNA, 39 bp, Artificial Sequence
  primer
gtaaaacgacggccagtttgcttagaagggtcagctcag

SEQ ID NO: 98359 - DNA, 21 bp, Artificial Sequence
  primer
gacagaggcaaacccaggtag

SEQ ID NO: 98360 - DNA, 38 bp, Artificial Sequence
  primer
gtaaaacgacggccagtggaaaccatggatgagcagac

SEQ ID NO: 98361 - DNA, 21 bp, Artificial Sequence
  primer
gtgtcctttaggaggagaggg

SEQ ID NO: 98362 - DNA, 21 bp, Artificial Sequence
  primer
acaagagcgaaactctgtccc

SEQ ID NO: 98363 - DNA, 21 bp, Artificial Sequence
  primer
aggccctcatggagaggtaag

SEQ ID NO: 98364 - DNA, 21 bp, Artificial Sequence
  primer
taactttccacaccctctggc

SEQ ID NO: 98365 - DNA, 21 bp, Artificial Sequence
  primer
agggcaaagtgaaactgatgg

SEQ ID NO: 98366 - DNA, 22 bp, Artificial Sequence
  primer
tggccataatcatcacacattc

SEQ ID NO: 98367 - DNA, 19 bp, Artificial Sequence
  primer
tggcaggcacctgtagtcc

SEQ ID NO: 98368 - DNA, 19 bp, Artificial Sequence
  primer
catcaactgtgggctgtcg

SEQ ID NO: 98369 - DNA, 21 bp, Artificial Sequence
  primer
tctttccacccaaggaaactg

SEQ ID NO: 98370 - DNA, 20 bp, Artificial Sequence
  primer
agaggctggcactaggcttc

SEQ ID NO: 98371 - DNA, 38 bp, Artificial Sequence
  primer
gtaaaacgacggccagtatctgaggtggaagatggagg

SEQ ID NO: 98372 - DNA, 22 bp, Artificial Sequence
  primer
ctataggagataagggcctccc

SEQ ID NO: 98373 - DNA, 21 bp, Artificial Sequence
  primer
ctcctccttatccagcacagg

SEQ ID NO: 98374 - DNA, 38 bp, Artificial Sequence
  primer
gtaaaacgacggccagtcacccataggaatgcagaacc

SEQ ID NO: 98375 - DNA, 21 bp, Artificial Sequence
  primer
tgttctcctttggcacagaac

SEQ ID NO: 98376 - DNA, 38 bp, Artificial Sequence
  primer
gtaaaacgacggccagtgtttgggaaagcaagtccaag

SEQ ID NO: 98377 - DNA, 20 bp, Artificial Sequence
  primer
ggaagggaagaacatctggc

SEQ ID NO: 98378 - DNA, 21 bp, Artificial Sequence
  primer
gcttcccagaccttcctcttc

SEQ ID NO: 98379 - DNA, 21 bp, Artificial Sequence
  primer
tctgtaacatcagcgtagcgg

SEQ ID NO: 98380 - DNA, 21 bp, Artificial Sequence
  primer
tggatcctgaaacagatcagc

SEQ ID NO: 98381 - DNA, 19 bp, Artificial Sequence
  primer
tttaaccctccaacggctg

SEQ ID NO: 98382 - DNA, 21 bp, Artificial Sequence
  primer
aggcaacttcccacttactgc

SEQ ID NO: 98383 - DNA, 21 bp, Artificial Sequence
  primer
gacagcagcagccaaatacac

SEQ ID NO: 98384 - DNA, 38 bp, Artificial Sequence
  primer
gtaaaacgacggccagttctacatgtgtcgccagcttc

SEQ ID NO: 98385 - DNA, 21 bp, Artificial Sequence
  primer
gtccacaaaccctagccactc

SEQ ID NO: 98386 - DNA, 37 bp, Artificial Sequence
  primer
gtaaaacgacggccagtgatttgcagtggtgtgggag

SEQ ID NO: 98387 - DNA, 22 bp, Artificial Sequence
  primer
tcatgacaataaatcccttccc

SEQ ID NO: 98388 - DNA, 38 bp, Artificial Sequence
  primer
gtaaaacgacggccagtaggacaatctccacacatccc

SEQ ID NO: 98389 - DNA, 21 bp, Artificial Sequence
  primer
gacctactgcaggtttcccag

SEQ ID NO: 98390 - DNA, 21 bp, Artificial Sequence
  primer
cccaagtccctcacagaagac

SEQ ID NO: 98391 - DNA, 38 bp, Artificial Sequence
  primer
gtaaaacgacggccagtaaagaggctgcttctctcgtg

SEQ ID NO: 98392 - DNA, 25 bp, Artificial Sequence
  primer
caagtaatctggtcaaagtctctcc

SEQ ID NO: 98393 - DNA, 21 bp, Artificial Sequence
  primer
ttgggatgccaagtaaaggag

SEQ ID NO: 98394 - DNA, 21 bp, Artificial Sequence
  primer
ggtgtagttgctctgccttcc

SEQ ID NO: 98395 - DNA, 21 bp, Artificial Sequence
  primer
gaatcagcccactcacactcc

SEQ ID NO: 98396 - DNA, 38 bp, Artificial Sequence
  primer
gtaaaacgacggccagtaatgaggagctggcttgagac

SEQ ID NO: 98397 - DNA, 21 bp, Artificial Sequence
  primer
gtctcagtggcagacagatgc

SEQ ID NO: 98398 - DNA, 21 bp, Artificial Sequence
  primer
ggcagggagatacagagatcg

SEQ ID NO: 98399 - DNA, 38 bp, Artificial Sequence
  primer
gtaaaacgacggccagtcagatgctccagttgcacttc

SEQ ID NO: 98400 - DNA, 21 bp, Artificial Sequence
  primer
gttggtggtaggagagttggc

SEQ ID NO: 98401 - DNA, 21 bp, Artificial Sequence
  primer
tccctaacacacccttgcatc

SEQ ID NO: 98402 - DNA, 21 bp, Artificial Sequence
  primer
tgatacctactgggaccaggc

SEQ ID NO: 98403 - DNA, 21 bp, Artificial Sequence
  primer
tcccagagaaagtcggagttc

SEQ ID NO: 98404 - DNA, 22 bp, Artificial Sequence
  primer
acagtacagcacctggaacaac

SEQ ID NO: 98405 - DNA, 22 bp, Artificial Sequence
  primer
tgcttgaggagtgcttattctg

SEQ ID NO: 98406 - DNA, 38 bp, Artificial Sequence
  primer
gtaaaacgacggccagtgttgtaggccaaatgcacatc

SEQ ID NO: 98407 - DNA, 39 bp, Artificial Sequence
  primer
gtaaaacgacggccagtgggtcataagaagcggcttaaa

SEQ ID NO: 98408 - DNA, 40 bp, Artificial Sequence
  primer
gtaaaacgacggccagtttccatgttatgatgaattccaa

SEQ ID NO: 98409 - DNA, 21 bp, Artificial Sequence
  primer
acatcacatgctggtagaggg

SEQ ID NO: 98410 - DNA, 21 bp, Artificial Sequence
  primer
gacgctcatatactgcgttgc

SEQ ID NO: 98411 - DNA, 38 bp, Artificial Sequence
  primer
gtaaaacgacggccagtttcaagtgtgaaaggcacagc

SEQ ID NO: 98412 - DNA, 20 bp, Artificial Sequence
  primer
tctctagggtgtgggtgctg

SEQ ID NO: 98413 - DNA, 44 bp, Artificial Sequence
  primer
gtaaaacgacggccagtaatttagggtagttcaaattgtctgtg

SEQ ID NO: 98414 - DNA, 23 bp, Artificial Sequence
  primer
tctgtttcccttctaaacgttcc

SEQ ID NO: 98415 - DNA, 42 bp, Artificial Sequence
  primer
gtaaaacgacggccagtcaagactgaactgagtccttcactg

SEQ ID NO: 98416 - DNA, 21 bp, Artificial Sequence
  primer
aggtgcaatgacacgaggttc

SEQ ID NO: 98417 - DNA, 38 bp, Artificial Sequence
  primer
gtaaaacgacggccagtttgttgttgagctgcaagatg

SEQ ID NO: 98418 - DNA, 38 bp, Artificial Sequence
  primer
gtaaaacgacggccagtgccagagggtctccaggtatc

SEQ ID NO: 98419 - DNA, 38 bp, Artificial Sequence
  primer
gtaaaacgacggccagtgctcaccttggagatagccag

SEQ ID NO: 98420 - DNA, 21 bp, Artificial Sequence
  primer
caacatgtcttagtgcagggc

SEQ ID NO: 98421 - DNA, 39 bp, Artificial Sequence
  primer
gtaaaacgacggccagttggaagataccagctcacttgc

SEQ ID NO: 98422 - DNA, 23 bp, Artificial Sequence
  primer
caacaataacgtcaacaagggtg

SEQ ID NO: 98423 - DNA, 21 bp, Artificial Sequence
  primer
tagctccaggcttccactgag

SEQ ID NO: 98424 - DNA, 38 bp, Artificial Sequence
  primer
gtaaaacgacggccagtttctgaatggccttcaacaac

SEQ ID NO: 98425 - DNA, 21 bp, Artificial Sequence
  primer
ggaaagattccagcacctcac

SEQ ID NO: 98426 - DNA, 38 bp, Artificial Sequence
  primer
gtaaaacgacggccagtggtgacccagtggagactgac

SEQ ID NO: 98427 - DNA, 38 bp, Artificial Sequence
  primer
gtaaaacgacggccagtgaccaaaggaacttcaaaggg

SEQ ID NO: 98428 - DNA, 20 bp, Artificial Sequence
  primer
ctgcctgtgaagtggaaagg

SEQ ID NO: 98429 - DNA, 38 bp, Artificial Sequence
  primer
gtaaaacgacggccagtagttgcccttgtgggtagaag

SEQ ID NO: 98430 - DNA, 21 bp, Artificial Sequence
  primer
taatgagagaagctggctggg

SEQ ID NO: 98431 - DNA, 38 bp, Artificial Sequence
  primer
gtaaaacgacggccagtaagcaacagaaggacccagag

SEQ ID NO: 98432 - DNA, 21 bp, Artificial Sequence
  primer
gggactcacaactgtctttgg

SEQ ID NO: 98433 - DNA, 39 bp, Artificial Sequence
  primer
gtaaaacgacggccagtcaccagctgtcagtgagtgaac

SEQ ID NO: 98434 - DNA, 35 bp, Artificial Sequence
  primer
gtaaaacgacggccagtccaggtcaggccactgag

SEQ ID NO: 98435 - DNA, 21 bp, Artificial Sequence
  primer
actagcctgtgactcttgccc

SEQ ID NO: 98436 - DNA, 21 bp, Artificial Sequence
  primer
aagtcaggccgcttctcatac

SEQ ID NO: 98437 - DNA, 38 bp, Artificial Sequence
  primer
gtaaaacgacggccagttcttcatgaattgggtgatgc

SEQ ID NO: 98438 - DNA, 37 bp, Artificial Sequence
  primer
gtaaaacgacggccagtcacttgaacccaggagggag

SEQ ID NO: 98439 - DNA, 38 bp, Artificial Sequence
  primer
gtaaaacgacggccagtacctgagactcccagcatagg

SEQ ID NO: 98440 - DNA, 37 bp, Artificial Sequence
  primer
gtaaaacgacggccagtgtccgtgaagcaggacaaag

SEQ ID NO: 98441 - DNA, 21 bp, Artificial Sequence
  primer
ggactcaagcgatcctctcac

SEQ ID NO: 98442 - DNA, 20 bp, Artificial Sequence
  primer
agtcgagtttgcaccactgc

SEQ ID NO: 98443 - DNA, 38 bp, Artificial Sequence
  primer
gtaaaacgacggccagtgggcgacaatgagaccctatc

SEQ ID NO: 98444 - DNA, 21 bp, Artificial Sequence
  primer
agaggttgcagtgaaccaaga

SEQ ID NO: 98445 - DNA, 39 bp, Artificial Sequence
  primer
gtaaaacgacggccagtcaaacttcgtgtaaggcacttg

SEQ ID NO: 98446 - DNA, 38 bp, Artificial Sequence
  primer
gtaaaacgacggccagtagttctggaatcggctctttg

SEQ ID NO: 98447 - DNA, 38 bp, Artificial Sequence
  primer
gtaaaacgacggccagtgttccaatgggcaggtaagtc

SEQ ID NO: 98448 - DNA, 21 bp, Artificial Sequence
  primer
attaactaggagtggtggcgg

SEQ ID NO: 98449 - DNA, 38 bp, Artificial Sequence
  primer
gtaaaacgacggccagtacagaatccaaatctccaccc

SEQ ID NO: 98450 - DNA, 25 bp, Artificial Sequence
  primer
ccatctttagtaatgaaatgctccc

SEQ ID NO: 98451 - DNA, 38 bp, Artificial Sequence
  primer
gtaaaacgacggccagtttgacagcaggagtgatggag

SEQ ID NO: 98452 - DNA, 38 bp, Artificial Sequence
  primer
gtaaaacgacggccagttactggcatgaagcattcacc

SEQ ID NO: 98453 - DNA, 38 bp, Artificial Sequence
  primer
gtaaaacgacggccagtaagatgcatccctgctgtctc

SEQ ID NO: 98454 - DNA, 22 bp, Artificial Sequence
  primer
aatccatttacagtgtgtcccg

SEQ ID NO: 98455 - DNA, 37 bp, Artificial Sequence
  primer
gtaaaacgacggccagtggtgctgtccctggatagag

SEQ ID NO: 98456 - DNA, 21 bp, Artificial Sequence
  primer
cagtcccactcaggactgttc

SEQ ID NO: 98457 - DNA, 21 bp, Artificial Sequence
  primer
tcaccgagatccctctgtctc

SEQ ID NO: 98458 - DNA, 38 bp, Artificial Sequence
  primer
gtaaaacgacggccagtcagccacacctaaccttgctc

SEQ ID NO: 98459 - DNA, 22 bp, Artificial Sequence
  primer
gctaaaggtcatcctgatggtg

SEQ ID NO: 98460 - DNA, 21 bp, Artificial Sequence
  primer
ccctcggagaaggtaatggac

SEQ ID NO: 98461 - DNA, 20 bp, Artificial Sequence
  primer
ctcccacactatggctgatg

SEQ ID NO: 98462 - DNA, 21 bp, Artificial Sequence
  primer
taggcagcagaaaccagtgag

SEQ ID NO: 98463 - DNA, 21 bp, Artificial Sequence
  primer
acgctttccagactgacacag

SEQ ID NO: 98464 - DNA, 38 bp, Artificial Sequence
  primer
gtaaaacgacggccagtggagccttgggagctagtagg

SEQ ID NO: 98465 - DNA, 21 bp, Artificial Sequence
  primer
cctccaggatgcttctagacc

SEQ ID NO: 98466 - DNA, 21 bp, Artificial Sequence
  primer
caaagcatctggtggtcagag

SEQ ID NO: 98467 - DNA, 22 bp, Artificial Sequence
  primer
cgaagaaacaagagaccgagtg

SEQ ID NO: 98468 - DNA, 21 bp, Artificial Sequence
  primer
ccagctagtgggcttgttgtc

SEQ ID NO: 98469 - DNA, 22 bp, Artificial Sequence
  primer
gtatggtctgtgagttggaccc

SEQ ID NO: 98470 - DNA, 21 bp, Artificial Sequence
  primer
cagtcccactcaggactgttc

SEQ ID NO: 98471 - DNA, 38 bp, Artificial Sequence
  primer
gtaaaacgacggccagtcccagagggtaggattcaatg

SEQ ID NO: 98472 - DNA, 21 bp, Artificial Sequence
  primer
actagccagctccatttccac

SEQ ID NO: 98473 - DNA, 20 bp, Artificial Sequence
  primer
gtctgggcctcagctctacc

SEQ ID NO: 98474 - DNA, 21 bp, Artificial Sequence
  primer
agcccaaggtgtagaggtcac

SEQ ID NO: 98475 - DNA, 21 bp, Artificial Sequence
  primer
ctgaccacagcaaatccttcc

SEQ ID NO: 98476 - DNA, 38 bp, Artificial Sequence
  primer
gtaaaacgacggccagtggatgcacaatgaatgagtgg

SEQ ID NO: 98477 - DNA, 21 bp, Artificial Sequence
  primer
tacaacccatggaacagaccc

SEQ ID NO: 98478 - DNA, 38 bp, Artificial Sequence
  primer
gtaaaacgacggccagtgccatcacaaacactgctctc

SEQ ID NO: 98479 - DNA, 36 bp, Artificial Sequence
  primer
gtaaaacgacggccagtgcagctgtcactgcttccc

SEQ ID NO: 98480 - DNA, 21 bp, Artificial Sequence
  primer
tcggtgaccaataggtgcttc

SEQ ID NO: 98481 - DNA, 23 bp, Artificial Sequence
  primer
acatccaaacaggaatcatcttc

SEQ ID NO: 98482 - DNA, 21 bp, Artificial Sequence
  primer
ttcctagattccatctgccac

SEQ ID NO: 98483 - DNA, 21 bp, Artificial Sequence
  primer
taaggctgaatttgagggagg

SEQ ID NO: 98484 - DNA, 22 bp, Artificial Sequence
  primer
cagcaagctgtctgttatgtgg

SEQ ID NO: 98485 - DNA, 21 bp, Artificial Sequence
  primer
tatgtgacagtgccctggaag

SEQ ID NO: 98486 - DNA, 41 bp, Artificial Sequence
  primer
gtaaaacgacggccagtcagtttgcttagaatagctgttgg

SEQ ID NO: 98487 - DNA, 39 bp, Artificial Sequence
  primer
gtaaaacgacggccagtggtgttgatttctgatgctctg

SEQ ID NO: 98488 - DNA, 21 bp, Artificial Sequence
  primer
aaggaacgcctatggtactgg

SEQ ID NO: 98489 - DNA, 21 bp, Artificial Sequence
  primer
aagggaaacgtgtttggattc

SEQ ID NO: 98490 - DNA, 20 bp, Artificial Sequence
  primer
cctttgatgtccatcccaac

SEQ ID NO: 98491 - DNA, 21 bp, Artificial Sequence
  primer
ggcagacaaagaccactcacc

SEQ ID NO: 98492 - DNA, 21 bp, Artificial Sequence
  primer
tcacaagaagacccaccttcc

SEQ ID NO: 98493 - DNA, 21 bp, Artificial Sequence
  primer
acctcccaaatgaatgaaagg

SEQ ID NO: 98494 - DNA, 21 bp, Artificial Sequence
  primer
ggaaggaaagaatttccaggg

SEQ ID NO: 98495 - DNA, 21 bp, Artificial Sequence
  primer
tcccgttgtttggataggaag

SEQ ID NO: 98496 - DNA, 38 bp, Artificial Sequence
  primer
gtaaaacgacggccagttggcctaaggcagtaactcaa

SEQ ID NO: 98497 - DNA, 21 bp, Artificial Sequence
  primer
aaatgactagaaacctccggc

SEQ ID NO: 98498 - DNA, 38 bp, Artificial Sequence
  primer
gtaaaacgacggccagtattctgaagcaaggaagccag

SEQ ID NO: 98499 - DNA, 21 bp, Artificial Sequence
  primer
ctgggcttctggccttaatac

SEQ ID NO: 98500 - DNA, 39 bp, Artificial Sequence
  primer
gtaaaacgacggccagtgaggattcaagagtgggaagag

SEQ ID NO: 98501 - DNA, 21 bp, Artificial Sequence
  primer
acccaaggctctaagaggcac

SEQ ID NO: 98502 - DNA, 39 bp, Artificial Sequence
  primer
gtaaaacgacggccagtcctgcctttaaagtccttgatg

SEQ ID NO: 98503 - DNA, 38 bp, Artificial Sequence
  primer
gtaaaacgacggccagtcttcctggccactttacaacc

SEQ ID NO: 98504 - DNA, 21 bp, Artificial Sequence
  primer
aaatgcctttgtcttggcatc

SEQ ID NO: 98505 - DNA, 38 bp, Artificial Sequence
  primer
gtaaaacgacggccagtacacagtggcccatttagtcc

SEQ ID NO: 98506 - DNA, 22 bp, Artificial Sequence
  primer
tgctgaatccattcttgatgtc

SEQ ID NO: 98507 - DNA, 21 bp, Artificial Sequence
  primer
ctaaagccagagggagtggtg

SEQ ID NO: 98508 - DNA, 21 bp, Artificial Sequence
  primer
ccctcagagatggtctatggc

SEQ ID NO: 98509 - DNA, 37 bp, Artificial Sequence
  primer
gtaaaacgacggccagtttggaaggtgatgacaaggc

SEQ ID NO: 98510 - DNA, 38 bp, Artificial Sequence
  primer
gtaaaacgacggccagtgagggaggctggtcctagttc

SEQ ID NO: 98511 - DNA, 37 bp, Artificial Sequence
  primer
gtaaaacgacggccagtcgaagacactcctcgaaggc

SEQ ID NO: 98512 - DNA, 37 bp, Artificial Sequence
  primer
gtaaaacgacggccagtattctggatgcatggcaaag

SEQ ID NO: 98513 - DNA, 21 bp, Artificial Sequence
  primer
tacggatggcaggaatcaaag

SEQ ID NO: 98514 - DNA, 18 bp, Artificial Sequence
  primer
ctcttcctggcctgagcc

SEQ ID NO: 98515 - DNA, 21 bp, Artificial Sequence
  primer
gcttaacgtcatccagaagcc

SEQ ID NO: 98516 - DNA, 38 bp, Artificial Sequence
  primer
gtaaaacgacggccagtggttgtccttcaatgcaactg

SEQ ID NO: 98517 - DNA, 38 bp, Artificial Sequence
  primer
gtaaaacgacggccagtcagggcttcagactaaccagg

SEQ ID NO: 98518 - DNA, 39 bp, Artificial Sequence
  primer
gtaaaacgacggccagtcccatgacagtgatgtgttctg

SEQ ID NO: 98519 - DNA, 38 bp, Artificial Sequence
  primer
gtaaaacgacggccagtgctgaggaacagatggttgtg

SEQ ID NO: 98520 - DNA, 37 bp, Artificial Sequence
  primer
gtaaaacgacggccagtcaggcagagatctccaatgc

SEQ ID NO: 98521 - DNA, 21 bp, Artificial Sequence
  primer
gtttgccagtgagtcaacgac

SEQ ID NO: 98522 - DNA, 41 bp, Artificial Sequence
  primer
gtaaaacgacggccagtaactttattcaacaactgcagaaa

SEQ ID NO: 98523 - DNA, 38 bp, Artificial Sequence
  primer
gtaaaacgacggccagtatcagtgggaaaggattgtgg

SEQ ID NO: 98524 - DNA, 36 bp, Artificial Sequence
  primer
gtaaaacgacggccagtaggtctgtctgggtgaggg

SEQ ID NO: 98525 - DNA, 27 bp, Artificial Sequence
  primer
tttagtatttggatagctaagaggaaa

SEQ ID NO: 98526 - DNA, 39 bp, Artificial Sequence
  primer
gtaaaacgacggccagtggtgtaccaccatgaatgtgag

SEQ ID NO: 98527 - DNA, 38 bp, Artificial Sequence
  primer
gtaaaacgacggccagtagcaaatgcacacaaatgtcc

SEQ ID NO: 98528 - DNA, 21 bp, Artificial Sequence
  primer
tggcataataccctcaggtgg

SEQ ID NO: 98529 - DNA, 27 bp, Artificial Sequence
  primer
ttgacttagatctaggaaagtgcaaag

SEQ ID NO: 98530 - DNA, 37 bp, Artificial Sequence
  primer
gtaaaacgacggccagtctgtgcccagccctctactc

SEQ ID NO: 98531 - DNA, 38 bp, Artificial Sequence
  primer
gtaaaacgacggccagtgaagctgtggacaaagacagc

SEQ ID NO: 98532 - DNA, 24 bp, Artificial Sequence
  primer
gctgtgagagaatcaggcatttac

SEQ ID NO: 98533 - DNA, 39 bp, Artificial Sequence
  primer
gtaaaacgacggccagttgaaatcaggatccaactcttg

SEQ ID NO: 98534 - DNA, 24 bp, Artificial Sequence
  primer
tcaagttaaactccaactccactg

SEQ ID NO: 98535 - DNA, 37 bp, Artificial Sequence
  primer
gtaaaacgacggccagttgggagacagagtgaaaccc

SEQ ID NO: 98536 - DNA, 43 bp, Artificial Sequence
  primer
gtaaaacgacggccagtacgatttaggctattctctcatcttg

SEQ ID NO: 98537 - DNA, 30 bp, Artificial Sequence
  primer
ttcaaatagtattacaaactacctgacctc

SEQ ID NO: 98538 - DNA, 40 bp, Artificial Sequence
  primer
gtaaaacgacggccagttcgagaattgcaactgctctaag

SEQ ID NO: 98539 - DNA, 41 bp, Artificial Sequence
  primer
gtaaaacgacggccagttccaataagttaaagcattgagcc

SEQ ID NO: 98540 - DNA, 26 bp, Artificial Sequence
  primer
ttgttgcaatatgtaaagtcaagaaa

SEQ ID NO: 98541 - DNA, 21 bp, Artificial Sequence
  primer
caaaggtggctaacaccactc

SEQ ID NO: 98542 - DNA, 21 bp, Artificial Sequence
  primer
tttggtaaaccaagctcctca

SEQ ID NO: 98543 - DNA, 22 bp, Artificial Sequence
  primer
aatctgtagcgatgaaaccagg

SEQ ID NO: 98544 - DNA, 22 bp, Artificial Sequence
  primer
tgaactgggaaagcaattcatc

SEQ ID NO: 98545 - DNA, 22 bp, Artificial Sequence
  primer
tgggtttggtctctttcaaatc

SEQ ID NO: 98546 - DNA, 40 bp, Artificial Sequence
  primer
gtaaaacgacggccagtggcaaacattatcaaatcaaggc

SEQ ID NO: 98547 - DNA, 38 bp, Artificial Sequence
  primer
gtaaaacgacggccagtgcagaaccacccaattcctac

SEQ ID NO: 98548 - DNA, 24 bp, Artificial Sequence
  primer
aggaaagaaatttgagactggaaa

SEQ ID NO: 98549 - DNA, 39 bp, Artificial Sequence
  primer
gtaaaacgacggccagtttctgaccttacctcccagaca

SEQ ID NO: 98550 - DNA, 24 bp, Artificial Sequence
  primer
gggatagtatacctggcatcaaag

SEQ ID NO: 98551 - DNA, 38 bp, Artificial Sequence
  primer
gtaaaacgacggccagtgtgccttggtttccagatttc

SEQ ID NO: 98552 - DNA, 42 bp, Artificial Sequence
  primer
gtaaaacgacggccagttgtttagcatggtgaagtaaacaaa

SEQ ID NO: 98553 - DNA, 38 bp, Artificial Sequence
  primer
gtaaaacgacggccagtacacacacacacagacttcgg

SEQ ID NO: 98554 - DNA, 41 bp, Artificial Sequence
  primer
gtaaaacgacggccagtcccttcaaatttcaaatacattgc

SEQ ID NO: 98555 - DNA, 27 bp, Artificial Sequence
  primer
tcttgttacctaaacttcagaatcagg

SEQ ID NO: 98556 - DNA, 37 bp, Artificial Sequence
  primer
gtaaaacgacggccagtcttctgtgaatctcgcctgc

SEQ ID NO: 98557 - DNA, 38 bp, Artificial Sequence
  primer
gtaaaacgacggccagtgcatgaagattgaattggctg

SEQ ID NO: 98558 - DNA, 39 bp, Artificial Sequence
  primer
gtaaaacgacggccagttgtaaggcaattactgtgttgg

SEQ ID NO: 98559 - DNA, 37 bp, Artificial Sequence
  primer
gtaaaacgacggccagtgacctcattcatctggcgtc

SEQ ID NO: 98560 - DNA, 38 bp, Artificial Sequence
  primer
gtaaaacgacggccagtccagggacatttgtgaaactg

SEQ ID NO: 98561 - DNA, 22 bp, Artificial Sequence
  primer
cgattgctgacctttaaattgc

SEQ ID NO: 98562 - DNA, 21 bp, Artificial Sequence
  primer
atgaaggtagactccctgccc

SEQ ID NO: 98563 - DNA, 38 bp, Artificial Sequence
  primer
gtaaaacgacggccagtacataccagacatgccaggag

SEQ ID NO: 98564 - DNA, 22 bp, Artificial Sequence
  primer
ggacatatgcatgggaaacatc

SEQ ID NO: 98565 - DNA, 21 bp, Artificial Sequence
  primer
ggaaggtgtcctctggtcatc

SEQ ID NO: 98566 - DNA, 39 bp, Artificial Sequence
  primer
gtaaaacgacggccagtaattccatcccatattcttggg

SEQ ID NO: 98567 - DNA, 38 bp, Artificial Sequence
  primer
gtaaaacgacggccagtcagaagggatattaccgggac

SEQ ID NO: 98568 - DNA, 21 bp, Artificial Sequence
  primer
attggcctgaacaactcagtg

SEQ ID NO: 98569 - DNA, 21 bp, Artificial Sequence
  primer
aatgttctcaccctgctttcc

SEQ ID NO: 98570 - DNA, 38 bp, Artificial Sequence
  primer
gtaaaacgacggccagtccatgcttgatgtccagtacc

SEQ ID NO: 98571 - DNA, 20 bp, Artificial Sequence
  primer
agtgtgggactgtcaccagg

SEQ ID NO: 98572 - DNA, 21 bp, Artificial Sequence
  primer
ccaaacagccaagaagtgatg

SEQ ID NO: 98573 - DNA, 21 bp, Artificial Sequence
  primer
ggaagagccacacaaatttcc

SEQ ID NO: 98574 - DNA, 20 bp, Artificial Sequence
  primer
gacaaggctgctttcacctg

SEQ ID NO: 98575 - DNA, 21 bp, Artificial Sequence
  primer
taatggaatgcatcttccctg

SEQ ID NO: 98576 - DNA, 21 bp, Artificial Sequence
  primer
tactacactgggaccaccacc

SEQ ID NO: 98577 - DNA, 23 bp, Artificial Sequence
  primer
ccctcacgatacagtcttaggtg

SEQ ID NO: 98578 - DNA, 21 bp, Artificial Sequence
  primer
aatcctcgggagaaaccaaac

SEQ ID NO: 98579 - DNA, 21 bp, Artificial Sequence
  primer
tgatcacttctgtggtttgcc

SEQ ID NO: 98580 - DNA, 21 bp, Artificial Sequence
  primer
gtggcaggaagaaacttggtc

SEQ ID NO: 98581 - DNA, 36 bp, Artificial Sequence
  primer
gtaaaacgacggccagtgcccaccagatcctgattc

SEQ ID NO: 98582 - DNA, 21 bp, Artificial Sequence
  primer
cagcaatccatgtctgtcaag

SEQ ID NO: 98583 - DNA, 39 bp, Artificial Sequence
  primer
gtaaaacgacggccagtttcatgaacaacaaaggtctgc

SEQ ID NO: 98584 - DNA, 26 bp, Artificial Sequence
  primer
ttaacttcttgccttactgtatctgg

SEQ ID NO: 98585 - DNA, 38 bp, Artificial Sequence
  primer
gtaaaacgacggccagtgaagcagactaagggacctgg

SEQ ID NO: 98586 - DNA, 39 bp, Artificial Sequence
  primer
gtaaaacgacggccagttcatttcagcacgacattatcc

SEQ ID NO: 98587 - DNA, 37 bp, Artificial Sequence
  primer
gtaaaacgacggccagtcccttggctcaataccactc

SEQ ID NO: 98588 - DNA, 21 bp, Artificial Sequence
  primer
tcagctctgaaacactgggtc

SEQ ID NO: 98589 - DNA, 25 bp, Artificial Sequence
  primer
ttctagatagctgtgatctccatgc

SEQ ID NO: 98590 - DNA, 38 bp, Artificial Sequence
  primer
gtaaaacgacggccagtcccacatccaaatttaccagc

SEQ ID NO: 98591 - DNA, 40 bp, Artificial Sequence
  primer
gtaaaacgacggccagtggcttccgactatgagctatttc

SEQ ID NO: 98592 - DNA, 38 bp, Artificial Sequence
  primer
gtaaaacgacggccagtacaagtcagcaaagccatgaa

SEQ ID NO: 98593 - DNA, 22 bp, Artificial Sequence
  primer
ccaggaagcatttctctcaatc

SEQ ID NO: 98594 - DNA, 43 bp, Artificial Sequence
  primer
gtaaaacgacggccagtaaacctcctaatattgagaacacagc

SEQ ID NO: 98595 - DNA, 39 bp, Artificial Sequence
  primer
gtaaaacgacggccagtggcaagtaggaggtacagaccc

SEQ ID NO: 98596 - DNA, 37 bp, Artificial Sequence
  primer
gtaaaacgacggccagtccatttgacgctttgctttc

SEQ ID NO: 98597 - DNA, 18 bp, Artificial Sequence
  primer
gcgcatccctgtaatccc

SEQ ID NO: 98598 - DNA, 41 bp, Artificial Sequence
  primer
gtaaaacgacggccagtcaccaacaaggaaatagagcattc

SEQ ID NO: 98599 - DNA, 21 bp, Artificial Sequence
  primer
aacccagtgtaggaaggttgg

SEQ ID NO: 98600 - DNA, 21 bp, Artificial Sequence
  primer
ctgttgtcaacccagaacagg

SEQ ID NO: 98601 - DNA, 24 bp, Artificial Sequence
  primer
tttattaacatcctgaaagggctg

SEQ ID NO: 98602 - DNA, 39 bp, Artificial Sequence
  primer
gtaaaacgacggccagttggcatcttccaggtaatgaac

SEQ ID NO: 98603 - DNA, 25 bp, Artificial Sequence
  primer
tggtaagagctatgagattcctacg

SEQ ID NO: 98604 - DNA, 21 bp, Artificial Sequence
  primer
cttcgtgcggactgtagaacc

SEQ ID NO: 98605 - DNA, 20 bp, Artificial Sequence
  primer
atgcaaggcctcttctttga

SEQ ID NO: 98606 - DNA, 21 bp, Artificial Sequence
  primer
atgtccaggatccagtcaacc

SEQ ID NO: 98607 - DNA, 20 bp, Artificial Sequence
  primer
acatgaatgaacaggcaccc

SEQ ID NO: 98608 - DNA, 21 bp, Artificial Sequence
  primer
cgccctttagcaacagaaatc

SEQ ID NO: 98609 - DNA, 21 bp, Artificial Sequence
  primer
aatgtgcagctttgacacgac

SEQ ID NO: 98610 - DNA, 39 bp, Artificial Sequence
  primer
gtaaaacgacggccagtacagtgccacaatctgctaaag

SEQ ID NO: 98611 - DNA, 21 bp, Artificial Sequence
  primer
gagggcctctctcttcctacc

SEQ ID NO: 98612 - DNA, 39 bp, Artificial Sequence
  primer
gtaaaacgacggccagtcgctgacagattaagcgaagac

SEQ ID NO: 98613 - DNA, 39 bp, Artificial Sequence
  primer
gtaaaacgacggccagtgggccctcaaatctcattctac

SEQ ID NO: 98614 - DNA, 38 bp, Artificial Sequence
  primer
gtaaaacgacggccagttagctcaactgaagctctggc

SEQ ID NO: 98615 - DNA, 23 bp, Artificial Sequence
  primer
tgctgggagaaagatttcttagg

SEQ ID NO: 98616 - DNA, 39 bp, Artificial Sequence
  primer
gtaaaacgacggccagtcaccagcaataacccatgattc

SEQ ID NO: 98617 - DNA, 22 bp, Artificial Sequence
  primer
gcacagaagtctagccagtgtc

SEQ ID NO: 98618 - DNA, 37 bp, Artificial Sequence
  primer
gtaaaacgacggccagtaagacatgggattcgctgtg

SEQ ID NO: 98619 - DNA, 37 bp, Artificial Sequence
  primer
gtaaaacgacggccagtggcctttcaaacagctaccc

SEQ ID NO: 98620 - DNA, 37 bp, Artificial Sequence
  primer
gtaaaacgacggccagtaggtggacacctgggttctc

SEQ ID NO: 98621 - DNA, 38 bp, Artificial Sequence
  primer
gtaaaacgacggccagtcccacaccagtaatcaggacc

SEQ ID NO: 98622 - DNA, 21 bp, Artificial Sequence
  primer
ctccagtccagtctccattcc

SEQ ID NO: 98623 - DNA, 41 bp, Artificial Sequence
  primer
gtaaaacgacggccagtcatagctttcatcagattccaagg

SEQ ID NO: 98624 - DNA, 20 bp, Artificial Sequence
  primer
ggaaggcgagagttccagac

SEQ ID NO: 98625 - DNA, 21 bp, Artificial Sequence
  primer
aggcagacttcattctacgcc

SEQ ID NO: 98626 - DNA, 22 bp, Artificial Sequence
  primer
gagagggagaagggttgaagag

SEQ ID NO: 98627 - DNA, 38 bp, Artificial Sequence
  primer
gtaaaacgacggccagttaagaagtccagccatctggg

SEQ ID NO: 98628 - DNA, 38 bp, Artificial Sequence
  primer
gtaaaacgacggccagtagaggcagaaagaacccattg

SEQ ID NO: 98629 - DNA, 21 bp, Artificial Sequence
  primer
ggaacccaacaaacagaggag

SEQ ID NO: 98630 - DNA, 37 bp, Artificial Sequence
  primer
gtaaaacgacggccagtaaacaaggccagaaaggctg

SEQ ID NO: 98631 - DNA, 21 bp, Artificial Sequence
  primer
gcctatctcaaacaacccagc

SEQ ID NO: 98632 - DNA, 21 bp, Artificial Sequence
  primer
actggatgctgaaggaagagc

SEQ ID NO: 98633 - DNA, 21 bp, Artificial Sequence
  primer
ccctagtcctctgccagctac

SEQ ID NO: 98634 - DNA, 38 bp, Artificial Sequence
  primer
gtaaaacgacggccagttggtagtgcagagacaggagg

SEQ ID NO: 98635 - DNA, 21 bp, Artificial Sequence
  primer
ctggacgtcctcccagactac

SEQ ID NO: 98636 - DNA, 21 bp, Artificial Sequence
  primer
attaacaggtcggcaagttcc

SEQ ID NO: 98637 - DNA, 21 bp, Artificial Sequence
  primer
tttcctaaaggccaggaaagg

SEQ ID NO: 98638 - DNA, 21 bp, Artificial Sequence
  primer
ctgtggctcaatacccacctc

SEQ ID NO: 98639 - DNA, 21 bp, Artificial Sequence
  primer
tgggcaataagagcgaaactc

SEQ ID NO: 98640 - DNA, 22 bp, Artificial Sequence
  primer
aagcctaagtttccaatgtccc

SEQ ID NO: 98641 - DNA, 21 bp, Artificial Sequence
  primer
caggaaagaaggctgctgaag

SEQ ID NO: 98642 - DNA, 20 bp, Artificial Sequence
  primer
ctccttccttcaaaggctgc

SEQ ID NO: 98643 - DNA, 21 bp, Artificial Sequence
  primer
gaccctcctacttcaaggctg

SEQ ID NO: 98644 - DNA, 21 bp, Artificial Sequence
  primer
atagctccagccttcaagtcc

SEQ ID NO: 98645 - DNA, 21 bp, Artificial Sequence
  primer
ctttctgctcatctgcaatcg

SEQ ID NO: 98646 - DNA, 21 bp, Artificial Sequence
  primer
aatggcgacaaatgtctaggg

SEQ ID NO: 98647 - DNA, 21 bp, Artificial Sequence
  primer
taaggtcacatcatatggcgg

SEQ ID NO: 98648 - DNA, 21 bp, Artificial Sequence
  primer
acaactcagggacagaggcag

SEQ ID NO: 98649 - DNA, 21 bp, Artificial Sequence
  primer
aaagacagagattctcccgcc

SEQ ID NO: 98650 - DNA, 21 bp, Artificial Sequence
  primer
agaggaatcttccttggctcc

SEQ ID NO: 98651 - DNA, 21 bp, Artificial Sequence
  primer
taggaagggaggatgttaccc

SEQ ID NO: 98652 - DNA, 21 bp, Artificial Sequence
  primer
aaaggtagcaggaagcctcag

SEQ ID NO: 98653 - DNA, 21 bp, Artificial Sequence
  primer
aagtgtggcactagccctgtc

SEQ ID NO: 98654 - DNA, 21 bp, Artificial Sequence
  primer
gatcacactcccaagcacaag

SEQ ID NO: 98655 - DNA, 38 bp, Artificial Sequence
  primer
gtaaaacgacggccagttggcttgcacaagtcctagag

SEQ ID NO: 98656 - DNA, 21 bp, Artificial Sequence
  primer
aggcagggagactcactcaag

SEQ ID NO: 98657 - DNA, 38 bp, Artificial Sequence
  primer
gtaaaacgacggccagtagcagttaaagggcagctgag

SEQ ID NO: 98658 - DNA, 21 bp, Artificial Sequence
  primer
aagagaggagctgcagagagg

SEQ ID NO: 98659 - DNA, 20 bp, Artificial Sequence
  primer
cttcggataccctccacctc

SEQ ID NO: 98660 - DNA, 20 bp, Artificial Sequence
  primer
agcccttcaacccttctcag

SEQ ID NO: 98661 - DNA, 38 bp, Artificial Sequence
  primer
gtaaaacgacggccagtagtacctgccacctagtgccc

SEQ ID NO: 98662 - DNA, 21 bp, Artificial Sequence
  primer
gaaatgcacaagagcagaggg

SEQ ID NO: 98663 - DNA, 38 bp, Artificial Sequence
  primer
gtaaaacgacggccagtagcattcccatgctgtctttg

SEQ ID NO: 98664 - DNA, 38 bp, Artificial Sequence
  primer
gtaaaacgacggccagtatcttgttctgtgggaaacgc

SEQ ID NO: 98665 - DNA, 22 bp, Artificial Sequence
  primer
aagagggaaagcccagttattg

SEQ ID NO: 98666 - DNA, 38 bp, Artificial Sequence
  primer
gtaaaacgacggccagtaccagcatttccatttccatc

SEQ ID NO: 98667 - DNA, 21 bp, Artificial Sequence
  primer
cccagcctcacaatagcctac

SEQ ID NO: 98668 - DNA, 38 bp, Artificial Sequence
  primer
gtaaaacgacggccagtccaagaagctgtgttcattcc

SEQ ID NO: 98669 - DNA, 20 bp, Artificial Sequence
  primer
cacttgaatctgggaggcag

SEQ ID NO: 98670 - DNA, 21 bp, Artificial Sequence
  primer
acagcttggtgacagagcaag

SEQ ID NO: 98671 - DNA, 37 bp, Artificial Sequence
  primer
gtaaaacgacggccagtgggaagccgactttgtgaag

SEQ ID NO: 98672 - DNA, 23 bp, Artificial Sequence
  primer
cacagtgttcttgaaggtcagag

SEQ ID NO: 98673 - DNA, 38 bp, Artificial Sequence
  primer
gtaaaacgacggccagtcagggaccagatcacaaggag

SEQ ID NO: 98674 - DNA, 21 bp, Artificial Sequence
  primer
caagggctgtcacatacaagg

SEQ ID NO: 98675 - DNA, 21 bp, Artificial Sequence
  primer
gatacaggaaatgggcaacag

SEQ ID NO: 98676 - DNA, 37 bp, Artificial Sequence
  primer
gtaaaacgacggccagtgatgccttgaagctgagtgg

SEQ ID NO: 98677 - DNA, 21 bp, Artificial Sequence
  primer
ccatcatacatgccattaggc

SEQ ID NO: 98678 - DNA, 38 bp, Artificial Sequence
  primer
gtaaaacgacggccagtcatgttcccagtgattccacc

SEQ ID NO: 98679 - DNA, 21 bp, Artificial Sequence
  primer
ctttgcttgccctcgagatac

SEQ ID NO: 98680 - DNA, 38 bp, Artificial Sequence
  primer
gtaaaacgacggccagtctaattccagatggtggagcc

SEQ ID NO: 98681 - DNA, 21 bp, Artificial Sequence
  primer
tcccacaagacccttggtatc

SEQ ID NO: 98682 - DNA, 39 bp, Artificial Sequence
  primer
gtaaaacgacggccagtaataccaccttggtctcaatgc

SEQ ID NO: 98683 - DNA, 20 bp, Artificial Sequence
  primer
caatctggagggagagaggg

SEQ ID NO: 98684 - DNA, 38 bp, Artificial Sequence
  primer
gtaaaacgacggccagtttcaatattcccaccaacacg

SEQ ID NO: 98685 - DNA, 38 bp, Artificial Sequence
  primer
gtaaaacgacggccagtggtctcttacaagccactggg

SEQ ID NO: 98686 - DNA, 21 bp, Artificial Sequence
  primer
ggcctagaaccatggaatgac

SEQ ID NO: 98687 - DNA, 38 bp, Artificial Sequence
  primer
gtaaaacgacggccagttcctattggccttccagtctc

SEQ ID NO: 98688 - DNA, 22 bp, Artificial Sequence
  primer
cctgttagaactgagcacaggg

SEQ ID NO: 98689 - DNA, 38 bp, Artificial Sequence
  primer
gtaaaacgacggccagtaaacagatgaagcagacaggc

SEQ ID NO: 98690 - DNA, 35 bp, Artificial Sequence
  primer
gtaaaacgacggccagtctcgaacctgggaggtgg

SEQ ID NO: 98691 - DNA, 21 bp, Artificial Sequence
  primer
gcagggcagatacagtccttg

SEQ ID NO: 98692 - DNA, 38 bp, Artificial Sequence
  primer
gtaaaacgacggccagtaagtccctgtaccgtggtttc

SEQ ID NO: 98693 - DNA, 38 bp, Artificial Sequence
  primer
gtaaaacgacggccagtggctcattgaggatggcatag

SEQ ID NO: 98694 - DNA, 21 bp, Artificial Sequence
  primer
atggacagactccctctgctg

SEQ ID NO: 98695 - DNA, 21 bp, Artificial Sequence
  primer
ctcccagacaaaggagctctg

SEQ ID NO: 98696 - DNA, 21 bp, Artificial Sequence
  primer
attcactgataggccacccac

SEQ ID NO: 98697 - DNA, 21 bp, Artificial Sequence
  primer
tacaacatggaagatgggcag

SEQ ID NO: 98698 - DNA, 21 bp, Artificial Sequence
  primer
aaccctcaaactccaaggtcc

SEQ ID NO: 98699 - DNA, 22 bp, Artificial Sequence
  primer
aacatacaggcaagaggctcag

SEQ ID NO: 98700 - DNA, 19 bp, Artificial Sequence
  primer
ccaggttgctcagtcggtc

SEQ ID NO: 98701 - DNA, 20 bp, Artificial Sequence
  primer
ggcacagagccctccattag

SEQ ID NO: 98702 - DNA, 21 bp, Artificial Sequence
  primer
tttgtaatgaactgaaggccc

SEQ ID NO: 98703 - DNA, 21 bp, Artificial Sequence
  primer
ccagacagtagaaaccagggc

SEQ ID NO: 98704 - DNA, 18 bp, Artificial Sequence
  primer
ccaaatgagggcacaggg

SEQ ID NO: 98705 - DNA, 18 bp, Artificial Sequence
  primer
ctttgcgggatcggctac

SEQ ID NO: 98706 - DNA, 18 bp, Artificial Sequence
  primer
aggacaatcctcccgctc

SEQ ID NO: 98707 - DNA, 19 bp, Artificial Sequence
  primer
cacatgtggttctgcacgg

SEQ ID NO: 98708 - DNA, 21 bp, Artificial Sequence
  primer
gtcttctcccagcatcagctc

SEQ ID NO: 98709 - DNA, 21 bp, Artificial Sequence
  primer
ctgtctgcataagccatgagg

SEQ ID NO: 98710 - DNA, 21 bp, Artificial Sequence
  primer
ctaaccaggtagggccctttg

SEQ ID NO: 98711 - DNA, 39 bp, Artificial Sequence
  primer
gtaaaacgacggccagtgacatggctgtaactcagcctc

SEQ ID NO: 98712 - DNA, 21 bp, Artificial Sequence
  primer
gggctattgatccgtcttcac

SEQ ID NO: 98713 - DNA, 21 bp, Artificial Sequence
  primer
gggctattgatccgtcttcac

SEQ ID NO: 98714 - DNA, 21 bp, Artificial Sequence
  primer
atgcaaagcattagccgagac

SEQ ID NO: 98715 - DNA, 38 bp, Artificial Sequence
  primer
gtaaaacgacggccagtcaatggccaggagaacctatc

SEQ ID NO: 98716 - DNA, 22 bp, Artificial Sequence
  primer
gcaaatgtgttctgagctcctc

SEQ ID NO: 98717 - DNA, 20 bp, Artificial Sequence
  primer
gggtgacctggctaagaacc

SEQ ID NO: 98718 - DNA, 38 bp, Artificial Sequence
  primer
gtaaaacgacggccagtatgaaggacagaacctgcctg

SEQ ID NO: 98719 - DNA, 21 bp, Artificial Sequence
  primer
agagaggctgtgtgttggagc

SEQ ID NO: 98720 - DNA, 37 bp, Artificial Sequence
  primer
gtaaaacgacggccagtaccagacagaggaaactgcg

SEQ ID NO: 98721 - DNA, 18 bp, Artificial Sequence
  primer
aaggcgtggacacagtgg

SEQ ID NO: 98722 - DNA, 20 bp, Artificial Sequence
  primer
gtatgggacacccatccctc

SEQ ID NO: 98723 - DNA, 38 bp, Artificial Sequence
  primer
gtaaaacgacggccagtgagcccagagattcctgatcc

SEQ ID NO: 98724 - DNA, 21 bp, Artificial Sequence
  primer
accaagttctgtccaagctcc

SEQ ID NO: 98725 - DNA, 38 bp, Artificial Sequence
  primer
gtaaaacgacggccagtcaggactctagccacccaaag

SEQ ID NO: 98726 - DNA, 38 bp, Artificial Sequence
  primer
gtaaaacgacggccagtctctgaccactgacccacaag

SEQ ID NO: 98727 - DNA, 22 bp, Artificial Sequence
  primer
tctgtgggattgtgggttagac

SEQ ID NO: 98728 - DNA, 19 bp, Artificial Sequence
  primer
gtcgcttgctcctagcctg

SEQ ID NO: 98729 - DNA, 21 bp, Artificial Sequence
  primer
tgcagagggttggagtctacc

SEQ ID NO: 98730 - DNA, 20 bp, Artificial Sequence
  primer
aggctgaacagggtccagag

SEQ ID NO: 98731 - DNA, 38 bp, Artificial Sequence
  primer
gtaaaacgacggccagtggacttccatcaaccagtcac

SEQ ID NO: 98732 - DNA, 21 bp, Artificial Sequence
  primer
attgaggaagaacgaggaagg

SEQ ID NO: 98733 - DNA, 21 bp, Artificial Sequence
  primer
taattcctttgcctttgcgag

SEQ ID NO: 98734 - DNA, 21 bp, Artificial Sequence
  primer
gccctcatctacagccaagag

SEQ ID NO: 98735 - DNA, 20 bp, Artificial Sequence
  primer
cttcacaggtggtctcaggc

SEQ ID NO: 98736 - DNA, 38 bp, Artificial Sequence
  primer
gtaaaacgacggccagtcttagggacgggagtcaagtg

SEQ ID NO: 98737 - DNA, 38 bp, Artificial Sequence; identical to SEQ ID NO: 98736
  primer

SEQ ID NO: 98738 - DNA, 38 bp, Artificial Sequence
  primer
gtaaaacgacggccagtaggcaacagggaaagtaccag

SEQ ID NO: 98739 - DNA, 37 bp, Artificial Sequence
  primer
gtaaaacgacggccagttttctgggttcctttggctc

SEQ ID NO: 98740 - DNA, 37 bp, Artificial Sequence
  primer
gtaaaacgacggccagtaggagtgcagcagggttatg

SEQ ID NO: 98741 - DNA, 21 bp, Artificial Sequence
  primer
aacacgatcagtgtcagccag

SEQ ID NO: 98742 - DNA, 38 bp, Artificial Sequence
  primer
gtaaaacgacggccagtaaaggccaagaaacacgtctg

SEQ ID NO: 98743 - DNA, 38 bp, Artificial Sequence
  primer
gtaaaacgacggccagtttgcctagctctcactccagc

SEQ ID NO: 98744 - DNA, 21 bp, Artificial Sequence
  primer
gacctgtgggtcatgccttag

SEQ ID NO: 98745 - DNA, 23 bp, Artificial Sequence
  primer
ggtttgatccttaactttggtgg

SEQ ID NO: 98746 - DNA, 21 bp, Artificial Sequence
  primer
ggtagtgagcaccacttcacc

SEQ ID NO: 98747 - DNA, 21 bp, Artificial Sequence
  primer
tggacttccatgattgcaaag

SEQ ID NO: 98748 - DNA, 21 bp, Artificial Sequence
  primer
tgcgactctaggtgttccagg

SEQ ID NO: 98749 - DNA, 42 bp, Artificial Sequence
  primer
gtaaaacgacggccagttggaacttctgaagataagtgacag

SEQ ID NO: 98750 - DNA, 23 bp, Artificial Sequence
  primer
gcagaatggctaaagagtgtttc

SEQ ID NO: 98751 - DNA, 21 bp, Artificial Sequence
  primer
gctaataatcagcgtacccgc

SEQ ID NO: 98752 - DNA, 22 bp, Artificial Sequence
  primer
aaaggtgagaatgcgtacatcc

SEQ ID NO: 98753 - DNA, 20 bp, Artificial Sequence
  primer
aaggagattcctttcctccg

SEQ ID NO: 98754 - DNA, 21 bp, Artificial Sequence
  primer
gatgctctgtagccaagccag

SEQ ID NO: 98755 - DNA, 21 bp, Artificial Sequence
  primer
acctgactcttaacgatgccc

SEQ ID NO: 98756 - DNA, 21 bp, Artificial Sequence
  primer
ccctgctaatgggtttcagag

SEQ ID NO: 98757 - DNA, 21 bp, Artificial Sequence
  primer
tcatctaatttcccaggtgcc

SEQ ID NO: 98758 - DNA, 21 bp, Artificial Sequence
  primer
tctcttgctccaacagatccc

SEQ ID NO: 98759 - DNA, 22 bp, Artificial Sequence
  primer
aacacccgagaaagagaagtcc

SEQ ID NO: 98760 - DNA, 38 bp, Artificial Sequence
  primer
gtaaaacgacggccagtaagagcatgaagtgctctccc

SEQ ID NO: 98761 - DNA, 22 bp, Artificial Sequence
  primer
tctacttgcctgttctcccatc

SEQ ID NO: 98762 - DNA, 21 bp, Artificial Sequence
  primer
acatgccgagcttagttggag

SEQ ID NO: 98763 - DNA, 38 bp, Artificial Sequence
  primer
gtaaaacgacggccagtgtgctgggtttatgaggaagg

SEQ ID NO: 98764 - DNA, 38 bp, Artificial Sequence
  primer
gtaaaacgacggccagtatactgcaagacgccactacg

SEQ ID NO: 98765 - DNA, 21 bp, Artificial Sequence
  primer
taatgccaggtagaggaagcc

SEQ ID NO: 98766 - DNA, 21 bp, Artificial Sequence
  primer
ctccaagctaccggctttacc

SEQ ID NO: 98767 - DNA, 43 bp, Artificial Sequence
  primer
gtaaaacgacggccagtaaagccactcatctttacctaaattc

SEQ ID NO: 98768 - DNA, 21 bp, Artificial Sequence
  primer
aaggcaacagagatttcctgg

SEQ ID NO: 98769 - DNA, 21 bp, Artificial Sequence
  primer
agagcttggttcttggctgag

SEQ ID NO: 98770 - DNA, 39 bp, Artificial Sequence
  primer
gtaaaacgacggccagttgtttgcttgagctactcctcc

SEQ ID NO: 98771 - DNA, 38 bp, Artificial Sequence
  primer
gtaaaacgacggccagtgctaaacacttggcttccagc

SEQ ID NO: 98772 - DNA, 38 bp, Artificial Sequence
  primer
gtaaaacgacggccagtgtagcccaggagtctggtttg

SEQ ID NO: 98773 - DNA, 21 bp, Artificial Sequence
  primer
cactttaaacggctgtgatgg

SEQ ID NO: 98774 - DNA, 21 bp, Artificial Sequence
  primer
gggtaggcaggtctgtttcag

SEQ ID NO: 98775 - DNA, 24 bp, Artificial Sequence
  primer
tcgaattagttaagcgcatgtatc

SEQ ID NO: 98776 - DNA, 22 bp, Artificial Sequence
  primer
ccaatcaacactaatggcttgg

SEQ ID NO: 98777 - DNA, 21 bp, Artificial Sequence
  primer
cgtctgaggaagaagggtttg

SEQ ID NO: 98778 - DNA, 37 bp, Artificial Sequence
  primer
gtaaaacgacggccagtagctcccaacttcctggttg

SEQ ID NO: 98779 - DNA, 21 bp, Artificial Sequence
  primer
ctcaagtatgtaaggcacggc

SEQ ID NO: 98780 - DNA, 21 bp, Artificial Sequence
  primer
acctcttcacctgttggcatc

SEQ ID NO: 98781 - DNA, 38 bp, Artificial Sequence
  primer
gtaaaacgacggccagtggatgggtaaatgagtccagg

SEQ ID NO: 98782 - DNA, 21 bp, Artificial Sequence
  primer
atggaggtgaagtgagggaag

SEQ ID NO: 98783 - DNA, 21 bp, Artificial Sequence
  primer
attctgcatgccagggtagac

SEQ ID NO: 98784 - DNA, 38 bp, Artificial Sequence
  primer
gtaaaacgacggccagtaaggatttccctgattgaggc

SEQ ID NO: 98785 - DNA, 38 bp, Artificial Sequence
  primer
gtaaaacgacggccagtgttaagggtttgcggcctaac

SEQ ID NO: 98786 - DNA, 20 bp, Artificial Sequence
  primer
tggttaagtgagccactggg

SEQ ID NO: 98787 - DNA, 38 bp, Artificial Sequence
  primer
gtaaaacgacggccagtcaacaccaggacaaccatttg

SEQ ID NO: 98788 - DNA, 38 bp, Artificial Sequence
  primer
gtaaaacgacggccagttgcagaggtaggctctgtgtc

SEQ ID NO: 98789 - DNA, 38 bp, Artificial Sequence
  primer
gtaaaacgacggccagttcagcagggacccagtcttag

SEQ ID NO: 98790 - DNA, 40 bp, Artificial Sequence
  primer
gtaaaacgacggccagttcataggctgtaactatttggcg

SEQ ID NO: 98791 - DNA, 24 bp, Artificial Sequence
  primer
ccctacatcgctatggagataatg

SEQ ID NO: 98792 - DNA, 21 bp, Artificial Sequence
  primer
aaagtccaatgcttccactgc

SEQ ID NO: 98793 - DNA, 43 bp, Artificial Sequence
  primer
gtaaaacgacggccagttctgaatggtgtaataaagcactgac

SEQ ID NO: 98794 - DNA, 21 bp, Artificial Sequence
  primer
cccaggccatgatgactaaag

SEQ ID NO: 98795 - DNA, 39 bp, Artificial Sequence
  primer
gtaaaacgacggccagtccaatatgcaagttgacagcac

SEQ ID NO: 98796 - DNA, 38 bp, Artificial Sequence
  primer
gtaaaacgacggccagtgtccaaggctctgaccaagac

SEQ ID NO: 98797 - DNA, 22 bp, Artificial Sequence
  primer
cccaaaggctttagatgttctc

SEQ ID NO: 98798 - DNA, 21 bp, Artificial Sequence
  primer
agaccttcccaagtcaccaag

SEQ ID NO: 98799 - DNA, 21 bp, Artificial Sequence
  primer
ctgagcaacgggactatcaag

SEQ ID NO: 98800 - DNA, 21 bp, Artificial Sequence
  primer
cctggaaagtccaaggaaagg

SEQ ID NO: 98801 - DNA, 37 bp, Artificial Sequence
  primer
gtaaaacgacggccagtgaaacccatgctgagtggac

SEQ ID NO: 98802 - DNA, 38 bp, Artificial Sequence
  primer
gtaaaacgacggccagttttaggtggactgcttggacc

SEQ ID NO: 98803 - DNA, 37 bp, Artificial Sequence
  primer
gtaaaacgacggccagtgacacagcctgagtgacgac

SEQ ID NO: 98804 - DNA, 23 bp, Artificial Sequence
  primer
ttggaaagctgttgtacctgttt

SEQ ID NO: 98805 - DNA, 38 bp, Artificial Sequence
  primer
gtaaaacgacggccagtttcccaatgcatcttgtaagc

SEQ ID NO: 98806 - DNA, 38 bp, Artificial Sequence
  primer
gtaaaacgacggccagttcactgcactgtagagcctgg

SEQ ID NO: 98807 - DNA, 23 bp, Artificial Sequence
  primer
gggtgtcacacaaattcaaacac

SEQ ID NO: 98808 - DNA, 20 bp, Artificial Sequence
  primer
cacgaggcagggaaatatgg

SEQ ID NO: 98809 - DNA, 21 bp, Artificial Sequence
  primer
caaatctgcgagttctgcatc

SEQ ID NO: 98810 - DNA, 39 bp, Artificial Sequence
  primer
gtaaaacgacggccagtacaaacataaatgcaaacagcc

SEQ ID NO: 98811 - DNA, 38 bp, Artificial Sequence
  primer
gtaaaacgacggccagtacgccaagagtcctttggaac

SEQ ID NO: 98812 - DNA, 40 bp, Artificial Sequence
  primer
gtaaaacgacggccagttgtgtactgcagggtaagaactg

SEQ ID NO: 98813 - DNA, 39 bp, Artificial Sequence
  primer
gtaaaacgacggccagtttgaaagcaaagcaagaaacag

SEQ ID NO: 98814 - DNA, 21 bp, Artificial Sequence
  primer
aagcaggacagtccctaccac

SEQ ID NO: 98815 - DNA, 21 bp, Artificial Sequence
  primer
atgagtcctgtctcttgtggg

SEQ ID NO: 98816 - DNA, 38 bp, Artificial Sequence
  primer
gtaaaacgacggccagtcaattatggaggagaggtcgg

SEQ ID NO: 98817 - DNA, 38 bp, Artificial Sequence
  primer
gtaaaacgacggccagtgtctggacaaatccaactgcc

SEQ ID NO: 98818 - DNA, 21 bp, Artificial Sequence
  primer
tccgacttatcgtcatcctcc

SEQ ID NO: 98819 - DNA, 38 bp, Artificial Sequence
  primer
gtaaaacgacggccagtggtgctataaggtgcgagagc

SEQ ID NO: 98820 - DNA, 20 bp, Artificial Sequence
  primer
tcacatcacatttcccatcc

SEQ ID NO: 98821 - DNA, 22 bp, Artificial Sequence
  primer
gcaaggccagtgaaatataagc

SEQ ID NO: 98822 - DNA, 21 bp, Artificial Sequence
  primer
agagaaacacagcccagcatc

SEQ ID NO: 98823 - DNA, 37 bp, Artificial Sequence
  primer
gtaaaacgacggccagtgaccagctgtcagggatttc

SEQ ID NO: 98824 - DNA, 36 bp, Artificial Sequence
  primer
gtaaaacgacggccagtattcgggcagacaggattc

SEQ ID NO: 98825 - DNA, 42 bp, Artificial Sequence
  primer
gtaaaacgacggccagtcaactgaataattaatggccaacag

SEQ ID NO: 98826 - DNA, 18 bp, Artificial Sequence
  primer
gccagtcctggagggaag

SEQ ID NO: 98827 - DNA, 38 bp, Artificial Sequence
  primer
gtaaaacgacggccagtgacaggaggaaagggttgaag

SEQ ID NO: 98828 - DNA, 38 bp, Artificial Sequence
  primer
gtaaaacgacggccagttcttcaccctgtgctatttcg

SEQ ID NO: 98829 - DNA, 43 bp, Artificial Sequence
  primer
gtaaaacgacggccagtttgacacacctgtataacatgacttg

SEQ ID NO: 98830 - DNA, 20 bp, Artificial Sequence
  primer
aaggtctagggagggaaggg

SEQ ID NO: 98831 - DNA, 38 bp, Artificial Sequence
  primer
gtaaaacgacggccagtctgaaagtctttgtcctgggc

SEQ ID NO: 98832 - DNA, 38 bp, Artificial Sequence
  primer
gtaaaacgacggccagtgaataagtggttgctgagggc

SEQ ID NO: 98833 - DNA, 18 bp, Artificial Sequence
  primer
gctgggcaactcgtcctc

SEQ ID NO: 98834 - DNA, 38 bp, Artificial Sequence
  primer
gtaaaacgacggccagtctgccctcaaatgtaccatcc

SEQ ID NO: 98835 - DNA, 38 bp, Artificial Sequence
  primer
gtaaaacgacggccagtctcaatatctgcttggcttgg

SEQ ID NO: 98836 - DNA, 38 bp, Artificial Sequence
  primer
gtaaaacgacggccagtcacaatccgcatagaaagcac

SEQ ID NO: 98837 - DNA, 21 bp, Artificial Sequence
  primer
gcagaagaatagctcaagccc

SEQ ID NO: 98838 - DNA, 38 bp, Artificial Sequence
  primer
gtaaaacgacggccagtaacagcaacctgggctacaag

SEQ ID NO: 98839 - DNA, 21 bp, Artificial Sequence
  primer
gcaagggcagttaagtaaggg

SEQ ID NO: 98840 - DNA, 21 bp, Artificial Sequence
  primer
ataaaggattggcaaacccac

SEQ ID NO: 98841 - DNA, 26 bp, Artificial Sequence
  primer
gatgggtacattataccatttcttcg

SEQ ID NO: 98842 - DNA, 21 bp, Artificial Sequence
  primer
agttctgcctgcagattcacc

SEQ ID NO: 98843 - DNA, 42 bp, Artificial Sequence
  primer
gtaaaacgacggccagtttgcataggcatattgaagactttc

SEQ ID NO: 98844 - DNA, 39 bp, Artificial Sequence
  primer
gtaaaacgacggccagtccactgttcaataccacgattc

SEQ ID NO: 98845 - DNA, 38 bp, Artificial Sequence
  primer
gtaaaacgacggccagttgacaacagatgtctgccttg

SEQ ID NO: 98846 - DNA, 38 bp, Artificial Sequence
  primer
gtaaaacgacggccagtgttggttgagtcaatgcatcc

SEQ ID NO: 98847 - DNA, 39 bp, Artificial Sequence
  primer
gtaaaacgacggccagttctaattaaatccaggccctcc

SEQ ID NO: 98848 - DNA, 38 bp, Artificial Sequence
  primer
gtaaaacgacggccagtattccctgacctaactgccac

SEQ ID NO: 98849 - DNA, 25 bp, Artificial Sequence
  primer
agtcaaatccctgtgtacaaatagc

SEQ ID NO: 98850 - DNA, 22 bp, Artificial Sequence
  primer
aatataggcatgagccaccatc

SEQ ID NO: 98851 - DNA, 40 bp, Artificial Sequence
  primer
gtaaaacgacggccagtggtagaaagtatccacaacagcc

SEQ ID NO: 98852 - DNA, 21 bp, Artificial Sequence
  primer
cagaacaaactccctccaagg

SEQ ID NO: 98853 - DNA, 39 bp, Artificial Sequence
  primer
gtaaaacgacggccagtcacgaggcacagggatagatag

SEQ ID NO: 98854 - DNA, 38 bp, Artificial Sequence
  primer
gtaaaacgacggccagttggtctccaataacctcctgc

SEQ ID NO: 98855 - DNA, 23 bp, Artificial Sequence
  primer
catgcatctaccctatttcctcc

SEQ ID NO: 98856 - DNA, 22 bp, Artificial Sequence
  primer
ggaactaactgctctgctctgg

SEQ ID NO: 98857 - DNA, 20 bp, Artificial Sequence
  primer
tcccattgggttcagtcaag

SEQ ID NO: 98858 - DNA, 20 bp, Artificial Sequence
  primer
tttcagtgtccagctcctcc

SEQ ID NO: 98859 - DNA, 38 bp, Artificial Sequence
  primer
gtaaaacgacggccagtgaataaatggcctggctgttg

SEQ ID NO: 98860 - DNA, 22 bp, Artificial Sequence
  primer
aatccttcctgagatggctttc

SEQ ID NO: 98861 - DNA, 38 bp, Artificial Sequence
  primer
gtaaaacgacggccagtcaatgaacaggttagggtcgg

SEQ ID NO: 98862 - DNA, 21 bp, Artificial Sequence
  primer
aaagagaagtctgggtcctgc

SEQ ID NO: 98863 - DNA, 21 bp, Artificial Sequence
  primer
tgacagcttgctcaagtccag

SEQ ID NO: 98864 - DNA, 38 bp, Artificial Sequence
  primer
gtaaaacgacggccagtgctttgaataaaggcccaaag

SEQ ID NO: 98865 - DNA, 25 bp, Artificial Sequence
  primer
tgatcctgtgatactcaatagtgcc

SEQ ID NO: 98866 - DNA, 25 bp, Artificial Sequence
  primer
cctaaatggatctttgtaagctctg

SEQ ID NO: 98867 - DNA, 21 bp, Artificial Sequence
  primer
ggtgattaggctcttccatgc

SEQ ID NO: 98868 - DNA, 22 bp, Artificial Sequence
  primer
aattgtgaggttggaagactgg

SEQ ID NO: 98869 - DNA, 21 bp, Artificial Sequence
  primer
ctccggtttccttattggtga

SEQ ID NO: 98870 - DNA, 38 bp, Artificial Sequence
  primer
gtaaaacgacggccagtgcaaccgcaaggtagtaccag

SEQ ID NO: 98871 - DNA, 38 bp, Artificial Sequence
  primer
gtaaaacgacggccagtcacgtttccatagtccaaggg

SEQ ID NO: 98872 - DNA, 38 bp, Artificial Sequence
  primer
gtaaaacgacggccagtggcctgaaataaggcaaagtc

SEQ ID NO: 98873 - DNA, 38 bp, Artificial Sequence
  primer
gtaaaacgacggccagttgcaagaactgcagaggactg

SEQ ID NO: 98874 - DNA, 38 bp, Artificial Sequence
  primer
gtaaaacgacggccagtgtgaggaagaagaccctcctg

SEQ ID NO: 98875 - DNA, 21 bp, Artificial Sequence
  primer
acccaatgactaacagtccgc

SEQ ID NO: 98876 - DNA, 40 bp, Artificial Sequence
  primer
gtaaaacgacggccagtaaagtagatggttggacagtttg

SEQ ID NO: 98877 - DNA, 25 bp, Artificial Sequence
  primer
tggagaggatatgttagtttcctcc

SEQ ID NO: 98878 - DNA, 40 bp, Artificial Sequence
  primer
gtaaaacgacggccagttggaatccggaaggataagttag

SEQ ID NO: 98879 - DNA, 40 bp, Artificial Sequence
  primer
gtaaaacgacggccagttgtatcaatcatcactccaggtg

SEQ ID NO: 98880 - DNA, 19 bp, Artificial Sequence
  primer
acctcgtgatatgaccgcc

SEQ ID NO: 98881 - DNA, 21 bp, Artificial Sequence
  primer
tgtttcaaatggtttccaagc

SEQ ID NO: 98882 - DNA, 21 bp, Artificial Sequence
  primer
tcatatggcaatgagcaccat

SEQ ID NO: 98883 - DNA, 37 bp, Artificial Sequence
  primer
gtaaaacgacggccagtcctcttaagctttggctccc

SEQ ID NO: 98884 - DNA, 24 bp, Artificial Sequence
  primer
ggtttcttaggactcttggaaagg

SEQ ID NO: 98885 - DNA, 39 bp, Artificial Sequence
  primer
gtaaaacgacggccagtcttcagctgctcaaatttactg

SEQ ID NO: 98886 - DNA, 25 bp, Artificial Sequence
  primer
aaatttgaagtcgtaggaaacagaa

SEQ ID NO: 98887 - DNA, 42 bp, Artificial Sequence
  primer
gtaaaacgacggccagtcaggatagcctgaagtttctgtacc

SEQ ID NO: 98888 - DNA, 23 bp, Artificial Sequence
  primer
cacagtggagagtcataacagcc

SEQ ID NO: 98889 - DNA, 22 bp, Artificial Sequence
  primer
attgcaacatatgcaggttagg

SEQ ID NO: 98890 - DNA, 27 bp, Artificial Sequence
  primer
tttatttggcacagatatttcatagag

SEQ ID NO: 98891 - DNA, 24 bp, Artificial Sequence
  primer
tgtttagtattctgcatggaccaa

SEQ ID NO: 98892 - DNA, 40 bp, Artificial Sequence
  primer
gtaaaacgacggccagttgcatcttggctaattcagtatg

SEQ ID NO: 98893 - DNA, 23 bp, Artificial Sequence
  primer
tcactcagttcattctgctaccc

SEQ ID NO: 98894 - DNA, 24 bp, Artificial Sequence
  primer
ttgaggataatctcatcattctgc

SEQ ID NO: 98895 - DNA, 39 bp, Artificial Sequence
  primer
gtaaaacgacggccagtgaattgggagtgaaggttaagg

SEQ ID NO: 98896 - DNA, 21 bp, Artificial Sequence
  primer
ccctagaccatgctgtctctg

SEQ ID NO: 98897 - DNA, 36 bp, Artificial Sequence
  primer
gtaaaacgacggccagtgcttgaacccaggagcttg

SEQ ID NO: 98898 - DNA, 20 bp, Artificial Sequence
  primer
tcccacgaggtaatgtggtg

SEQ ID NO: 98899 - DNA, 24 bp, Artificial Sequence
  primer
tgtaaactccaattcccttactgc

SEQ ID NO: 98900 - DNA, 18 bp, Artificial Sequence
  primer
cacatgtccaagccagcc

SEQ ID NO: 98901 - DNA, 40 bp, Artificial Sequence
  primer
gtaaaacgacggccagtcactgcctgaagattcataacca

SEQ ID NO: 98902 - DNA, 40 bp, Artificial Sequence
  primer
gtaaaacgacggccagtttgtacccagacaggctttagaa

SEQ ID NO: 98903 - DNA, 38 bp, Artificial Sequence
  primer
gtaaaacgacggccagtgcaggattaacaaatacgcga

SEQ ID NO: 98904 - DNA, 21 bp, Artificial Sequence
  primer
gtgtttggcagcaccaataag

SEQ ID NO: 98905 - DNA, 21 bp, Artificial Sequence
  primer
ccatgcgtctgtctgtttcac

SEQ ID NO: 98906 - DNA, 21 bp, Artificial Sequence
  primer
tagagcctgatcgagagtggg

SEQ ID NO: 98907 - DNA, 39 bp, Artificial Sequence
  primer
gtaaaacgacggccagtgggcttcttcttcatcactgtc

SEQ ID NO: 98908 - DNA, 35 bp, Artificial Sequence
  primer
gtaaaacgacggccagtgctgagattgcgccattg

SEQ ID NO: 98909 - DNA, 47 bp, Artificial Sequence
  primer
gtaaaacgacggccagtccacatagtaagaatatctaccattgaagc

SEQ ID NO: 98910 - DNA, 18 bp, Artificial Sequence
  primer
agagcaggcagccatttg

SEQ ID NO: 98911 - DNA, 39 bp, Artificial Sequence
  primer
gtaaaacgacggccagtgcttaagaggttccaacaaagg

SEQ ID NO: 98912 - DNA, 43 bp, Artificial Sequence
  primer
gtaaaacgacggccagtcactcttggacagtgctaagattcta

SEQ ID NO: 98913 - DNA, 43 bp, Artificial Sequence
  primer
gtaaaacgacggccagtgcataagtggatgagaatttatgctt

SEQ ID NO: 98914 - DNA, 39 bp, Artificial Sequence
  primer
gtaaaacgacggccagttgcatgtcttccctcagaaatc

SEQ ID NO: 98915 - DNA, 39 bp, Artificial Sequence
  primer
gtaaaacgacggccagtaaatgctgtcacaaattcatgg

SEQ ID NO: 98916 - DNA, 21 bp, Artificial Sequence
  primer
ttaaggcctggagtgagaagc

SEQ ID NO: 98917 - DNA, 38 bp, Artificial Sequence
  primer
gtaaaacgacggccagtattgatgcactcaacactggg

SEQ ID NO: 98918 - DNA, 21 bp, Artificial Sequence
  primer
tctgtgtggtagcaccagttg

SEQ ID NO: 98919 - DNA, 20 bp, Artificial Sequence
  primer
ccattcatgtcctcggtgag

SEQ ID NO: 98920 - DNA, 38 bp, Artificial Sequence
  primer
gtaaaacgacggccagtactaagccagatctcttcccg

SEQ ID NO: 98921 - DNA, 20 bp, Artificial Sequence
  primer
cccactgccatcagctactc

SEQ ID NO: 98922 - DNA, 21 bp, Artificial Sequence
  primer
gatgacagtgtccagtgaggc

SEQ ID NO: 98923 - DNA, 38 bp, Artificial Sequence
  primer
gtaaaacgacggccagtatagttccgcatcaaacccag

SEQ ID NO: 98924 - DNA, 19 bp, Artificial Sequence
  primer
ctgccttggaagatgggag

SEQ ID NO: 98925 - DNA, 21 bp, Artificial Sequence
  primer
ttcagggataaacaggaaccc

SEQ ID NO: 98926 - DNA, 38 bp, Artificial Sequence
  primer
gtaaaacgacggccagtaatgtcagctgccttctctgc

SEQ ID NO: 98927 - DNA, 38 bp, Artificial Sequence
  primer
gtaaaacgacggccagtagatagtttcaggcaggagcc

SEQ ID NO: 98928 - DNA, 21 bp, Artificial Sequence
  primer
taacttcgtgtcccttccagc

SEQ ID NO: 98929 - DNA, 22 bp, Artificial Sequence
  primer
gaaaggacaacgaccaaatagc

SEQ ID NO: 98930 - DNA, 21 bp, Artificial Sequence
  primer
gggatgcagagagaaacacac

SEQ ID NO: 98931 - DNA, 38 bp, Artificial Sequence
  primer
gtaaaacgacggccagttctctacctgatccgcacttg

SEQ ID NO: 98932 - DNA, 38 bp, Artificial Sequence
  primer
gtaaaacgacggccagtagtctggccaagagtgagacc

SEQ ID NO: 98933 - DNA, 26 bp, Artificial Sequence
  primer
ttcaagttgctctgaatatacactcc

SEQ ID NO: 98934 - DNA, 21 bp, Artificial Sequence
  primer
ccctgtcccttagacttggtc

SEQ ID NO: 98935 - DNA, 25 bp, Artificial Sequence
  primer
cacacacaagttctcatgcttacag

SEQ ID NO: 98936 - DNA, 23 bp, Artificial Sequence
  primer
cctcctctctttcttccttgacc

SEQ ID NO: 98937 - DNA, 20 bp, Artificial Sequence
  primer
gattacagccatgcaccacc

SEQ ID NO: 98938 - DNA, 19 bp, Artificial Sequence
  primer
ctcgagatccacccgtctc

SEQ ID NO: 98939 - DNA, 38 bp, Artificial Sequence
  primer
gtaaaacgacggccagtatttgcagtttgcaggacagg

SEQ ID NO: 98940 - DNA, 21 bp, Artificial Sequence
  primer
tccaatcagaaccttccacct

SEQ ID NO: 98941 - DNA, 38 bp, Artificial Sequence
  primer
gtaaaacgacggccagttccattgccactgtgatcttc

SEQ ID NO: 98942 - DNA, 21 bp, Artificial Sequence
  primer
acgcccagcaacttactcatc

SEQ ID NO: 98943 - DNA, 23 bp, Artificial Sequence
  primer
tcagaaatgagaaaccaccaatc

SEQ ID NO: 98944 - DNA, 25 bp, Artificial Sequence
  primer
tttgatactcacaaattcatccatc

SEQ ID NO: 98945 - DNA, 35 bp, Artificial Sequence
  primer
gtaaaacgacggccagtatcagccaccacacctgg

SEQ ID NO: 98946 - DNA, 37 bp, Artificial Sequence
  primer
gtaaaacgacggccagtcccaggatgagaaaggcaag

SEQ ID NO: 98947 - DNA, 19 bp, Artificial Sequence
  primer
tttaatccacggtccctcg

SEQ ID NO: 98948 - DNA, 20 bp, Artificial Sequence
  primer
cagcccactcgtccatttag

SEQ ID NO: 98949 - DNA, 38 bp, Artificial Sequence
  primer
gtaaaacgacggccagtgtgtgcatctgtagtcccagc

SEQ ID NO: 98950 - DNA, 38 bp, Artificial Sequence
  primer
gtaaaacgacggccagtgtgcctctcaaatggtgtgaa

SEQ ID NO: 98951 - DNA, 21 bp, Artificial Sequence
  primer
aacccatcctccaagataccc

SEQ ID NO: 98952 - DNA, 21 bp, Artificial Sequence
  primer
ccctagctgtgcttatcggtc

SEQ ID NO: 98953 - DNA, 37 bp, Artificial Sequence
  primer
gtaaaacgacggccagtctgcaccactgcacttcatt

SEQ ID NO: 98954 - DNA, 20 bp, Artificial Sequence
  primer
tctccattacagtggcaccc

SEQ ID NO: 98955 - DNA, 20 bp, Artificial Sequence
  primer
cctgtcctcactgacacctg

SEQ ID NO: 98956 - DNA, 21 bp, Artificial Sequence
  primer
cattgtaacagcccttagccc

SEQ ID NO: 98957 - DNA, 21 bp, Artificial Sequence
  primer
gacacctagacctcgcagtcc

SEQ ID NO: 98958 - DNA, 21 bp, Artificial Sequence
  primer
tgctgaatgatggagtcatcg

SEQ ID NO: 98959 - DNA, 38 bp, Artificial Sequence
  primer
gtaaaacgacggccagtctactcctagcacaggcaggg

SEQ ID NO: 98960 - DNA, 38 bp, Artificial Sequence
  primer
gtaaaacgacggccagttttctgactacactcggtgcc

SEQ ID NO: 98961 - DNA, 21 bp, Artificial Sequence
  primer
agctctgccacagaatatccc

SEQ ID NO: 98962 - DNA, 18 bp, Artificial Sequence
  primer
ccgtacactcaccggcag

SEQ ID NO: 98963 - DNA, 35 bp, Artificial Sequence
  primer
gtaaaacgacggccagtactcaggagcatggcagg

SEQ ID NO: 98964 - DNA, 19 bp, Artificial Sequence
  primer
ccactgacggatcagggtc

SEQ ID NO: 98965 - DNA, 21 bp, Artificial Sequence
  primer
ctagcctggacagaaggtgtg

SEQ ID NO: 98966 - DNA, 21 bp, Artificial Sequence
  primer
tcctaaatagtgtggccgagc

SEQ ID NO: 98967 - DNA, 20 bp, Artificial Sequence
  primer
gacttctgcagggaagggtg

SEQ ID NO: 98968 - DNA, 22 bp, Artificial Sequence
  primer
tcctaaccaccaatgtttccac

SEQ ID NO: 98969 - DNA, 21 bp, Artificial Sequence
  primer
aagagaaagcgctggtgactc

SEQ ID NO: 98970 - DNA, 38 bp, Artificial Sequence
  primer
gtaaaacgacggccagtgctgtcactgcaatcttcctc

SEQ ID NO: 98971 - DNA, 21 bp, Artificial Sequence
  primer
agatatccttcactggcaggc

SEQ ID NO: 98972 - DNA, 39 bp, Artificial Sequence
  primer
gtaaaacgacggccagtggaaaccctatcagtgggaaac

SEQ ID NO: 98973 - DNA, 20 bp, Artificial Sequence
  primer
aattaatttccgcgcaggtc

SEQ ID NO: 98974 - DNA, 38 bp, Artificial Sequence
  primer
gtaaaacgacggccagtttgacaccaagcacaaaggag

SEQ ID NO: 98975 - DNA, 38 bp, Artificial Sequence
  primer
gtaaaacgacggccagttctctgtctccagaagggacc

SEQ ID NO: 98976 - DNA, 38 bp, Artificial Sequence
  primer
gtaaaacgacggccagtatccctgctaagtgcaggagg

SEQ ID NO: 98977 - DNA, 22 bp, Artificial Sequence
  primer
aatctcctgacatgctgaaacc

SEQ ID NO: 98978 - DNA, 19 bp, Artificial Sequence
  primer
aaatctggagcgcacactg

SEQ ID NO: 98979 - DNA, 38 bp, Artificial Sequence
  primer
gtaaaacgacggccagtatccctgttgctaagggacac

SEQ ID NO: 98980 - DNA, 38 bp, Artificial Sequence
  primer
gtaaaacgacggccagtacactattcacggcaggaacc

SEQ ID NO: 98981 - DNA, 20 bp, Artificial Sequence
  primer
actccaggctgagcaacaag

SEQ ID NO: 98982 - DNA, 37 bp, Artificial Sequence
  primer
gtaaaacgacggccagttcaagaggctgaggcagaaa

SEQ ID NO: 98983 - DNA, 21 bp, Artificial Sequence
  primer
ggtgttacaggcatcaacctg

SEQ ID NO: 98984 - DNA, 22 bp, Artificial Sequence
  primer
cccacttatctgggtgacagag

SEQ ID NO: 98985 - DNA, 21 bp, Artificial Sequence
  primer
cccagtagtgagctctcggtc

SEQ ID NO: 98986 - DNA, 38 bp, Artificial Sequence
  primer
gtaaaacgacggccagtcaactgtgagtgcagggagac

SEQ ID NO: 98987 - DNA, 38 bp, Artificial Sequence
  primer
gtaaaacgacggccagtaacaccgctttgaaacctgac

SEQ ID NO: 98988 - DNA, 38 bp, Artificial Sequence
  primer
gtaaaacgacggccagttttgacacacctctgcagtcc

SEQ ID NO: 98989 - DNA, 20 bp, Artificial Sequence
  primer
accaatggcatgcagagaac

SEQ ID NO: 98990 - DNA, 38 bp, Artificial Sequence
  primer
gtaaaacgacggccagttgaaggtcggagttgtcactg

SEQ ID NO: 98991 - DNA, 20 bp, Artificial Sequence
  primer
attgctcgaactcaggaggc

SEQ ID NO: 98992 - DNA, 22 bp, Artificial Sequence
  primer
gacacagaagtggaagacggag

SEQ ID NO: 98993 - DNA, 38 bp, Artificial Sequence
  primer
gtaaaacgacggccagtaccttgacgtgcttgtctctg

SEQ ID NO: 98994 - DNA, 18 bp, Artificial Sequence
  primer
ccacactgcagggtcagg

SEQ ID NO: 98995 - DNA, 38 bp, Artificial Sequence
  primer
gtaaaacgacggccagtagggaaagcaagcaatctttg

SEQ ID NO: 98996 - DNA, 21 bp, Artificial Sequence
  primer
ctgccagtctgtaagcacctg

SEQ ID NO: 98997 - DNA, 21 bp, Artificial Sequence
  primer
gtcccagagaggaacttgctg

SEQ ID NO: 98998 - DNA, 37 bp, Artificial Sequence
  primer
gtaaaacgacggccagtaaccctgggtccatcatagc

SEQ ID NO: 98999 - DNA, 38 bp, Artificial Sequence
  primer
gtaaaacgacggccagtactcaggcccttctctctgtc

SEQ ID NO: 99000 - DNA, 39 bp, Artificial Sequence
  primer
gtaaaacgacggccagttgaaggtggaatgaggttatgg

SEQ ID NO: 99001 - DNA, 36 bp, Artificial Sequence
  primer
gtaaaacgacggccagtcggaaggagagcttcatgg

SEQ ID NO: 99002 - DNA, 38 bp, Artificial Sequence
  primer
gtaaaacgacggccagtgtctgagcatctctccatccc

SEQ ID NO: 99003 - DNA, 38 bp, Artificial Sequence
  primer
gtaaaacgacggccagtagggcaggtaggagtcaggag

SEQ ID NO: 99004 - DNA, 22 bp, Artificial Sequence
  primer
cgaagcaagaggtaaaccttcc

SEQ ID NO: 99005 - DNA, 38 bp, Artificial Sequence
  primer
gtaaaacgacggccagtttatgtcatgcgtgtgtttgg

SEQ ID NO: 99006 - DNA, 38 bp, Artificial Sequence
  primer
gtaaaacgacggccagtcacagctgcgaagtggtaaag

SEQ ID NO: 99007 - DNA, 21 bp, Artificial Sequence
  primer
agctgaagcctgctttctttc

SEQ ID NO: 99008 - DNA, 21 bp, Artificial Sequence
  primer
gactccctccttgagaggacc

SEQ ID NO: 99009 - DNA, 21 bp, Artificial Sequence
  primer
tcttcaccatatccatgtgcc

SEQ ID NO: 99010 - DNA, 38 bp, Artificial Sequence
  primer
gtaaaacgacggccagttggagagggtcgtagtatggg

SEQ ID NO: 99011 - DNA, 21 bp, Artificial Sequence
  primer
gaagccctagaccatacctcg

SEQ ID NO: 99012 - DNA, 38 bp, Artificial Sequence
  primer
gtaaaacgacggccagttaattcccaccaatttctccc

SEQ ID NO: 99013 - DNA, 38 bp, Artificial Sequence
  primer
gtaaaacgacggccagttgcccttgggtagataaatgg

SEQ ID NO: 99014 - DNA, 38 bp, Artificial Sequence
  primer
gtaaaacgacggccagtaaggcactgctgcatactctg

SEQ ID NO: 99015 - DNA, 38 bp, Artificial Sequence
  primer
gtaaaacgacggccagtgaaatcagaggccgtgtaagg

SEQ ID NO: 99016 - DNA, 38 bp, Artificial Sequence
  primer
gtaaaacgacggccagtaatgaccgtggtttccatgag

SEQ ID NO: 99017 - DNA, 21 bp, Artificial Sequence
  primer
tgaaggagatgacgggaaatg

SEQ ID NO: 99018 - DNA, 21 bp, Artificial Sequence
  primer
aagcagaagtttcagccttgg

SEQ ID NO: 99019 - DNA, 22 bp, Artificial Sequence
  primer
aggacatcagagtgactgaccc

SEQ ID NO: 99020 - DNA, 37 bp, Artificial Sequence
  primer
gtaaaacgacggccagtcacctttgctcatggtcagg

SEQ ID NO: 99021 - DNA, 38 bp, Artificial Sequence
  primer
gtaaaacgacggccagtgtaccaccttcccaaccagac

SEQ ID NO: 99022 - DNA, 21 bp, Artificial Sequence
  primer
ttctctgttgcagccactttc

SEQ ID NO: 99023 - DNA, 38 bp, Artificial Sequence
  primer
gtaaaacgacggccagtccactcccttagtccctcacc

SEQ ID NO: 99024 - DNA, 21 bp, Artificial Sequence
  primer
tggagctaagacctcctccac

SEQ ID NO: 99025 - DNA, 21 bp, Artificial Sequence
  primer
aaacataggtgagcagggtgg

SEQ ID NO: 99026 - DNA, 38 bp, Artificial Sequence
  primer
gtaaaacgacggccagtaggcccttgacaaacaggtag

SEQ ID NO: 99027 - DNA, 21 bp, Artificial Sequence
  primer
tgtgagatcttcagggcacag

SEQ ID NO: 99028 - DNA, 38 bp, Artificial Sequence
  primer
gtaaaacgacggccagtctttggaagaactgggactgg

SEQ ID NO: 99029 - DNA, 21 bp, Artificial Sequence
  primer
agatcaccttcccagagcaac

SEQ ID NO: 99030 - DNA, 19 bp, Artificial Sequence
  primer
aaagcaagaacgtggtggg

SEQ ID NO: 99031 - DNA, 21 bp, Artificial Sequence
  primer
tgacccagagtgtgtacaggg

SEQ ID NO: 99032 - DNA, 21 bp, Artificial Sequence
  primer
ctgtgtgttgtggacctctgc

SEQ ID NO: 99033 - DNA, 21 bp, Artificial Sequence
  primer
cagtgaagggatgaagcactg

SEQ ID NO: 99034 - DNA, 21 bp, Artificial Sequence
  primer
aggaaagatcaggtggttccc

SEQ ID NO: 99035 - DNA, 21 bp, Artificial Sequence
  primer
cacacacatattgaggccagc

SEQ ID NO: 99036 - DNA, 21 bp, Artificial Sequence
  primer
cagtgaagggatgaagcactg

SEQ ID NO: 99037 - DNA, 21 bp, Artificial Sequence
  primer
gttcatggcccactttctctc

SEQ ID NO: 99038 - DNA, 20 bp, Artificial Sequence
  primer
caatgtggccatggattctg

SEQ ID NO: 99039 - DNA, 21 bp, Artificial Sequence
  primer
caatgaccttccctctcttcc

SEQ ID NO: 99040 - DNA, 38 bp, Artificial Sequence
  primer
gtaaaacgacggccagtttgggctcatagctcttcctc

SEQ ID NO: 99041 - DNA, 39 bp, Artificial Sequence
  primer
gtaaaacgacggccagttctgctgtcaaattgaagatgg

SEQ ID NO: 99042 - DNA, 21 bp, Artificial Sequence
  primer
ttgagctataaaggctgctgg

SEQ ID NO: 99043 - DNA, 21 bp, Artificial Sequence
  primer
aacatggcagaagagccaaag

SEQ ID NO: 99044 - DNA, 21 bp, Artificial Sequence
  primer
tagagccacccaattctcctc

SEQ ID NO: 99045 - DNA, 38 bp, Artificial Sequence
  primer
gtaaaacgacggccagtgaatagcaagccagaccaagg

SEQ ID NO: 99046 - DNA, 20 bp, Artificial Sequence
  primer
ttatggcagcctaatttccc

SEQ ID NO: 99047 - DNA, 39 bp, Artificial Sequence
  primer
gtaaaacgacggccagtagatttcagcagattctagccc

SEQ ID NO: 99048 - DNA, 21 bp, Artificial Sequence
  primer
gtgcttaagccattgagcctg

SEQ ID NO: 99049 - DNA, 21 bp, Artificial Sequence
  primer
aagtggaaagaggatccctgg

SEQ ID NO: 99050 - DNA, 21 bp, Artificial Sequence
  primer
atctggaagaggtttccaccc

SEQ ID NO: 99051 - DNA, 21 bp, Artificial Sequence
  primer
ccctcgatcacttctcattcc

SEQ ID NO: 99052 - DNA, 39 bp, Artificial Sequence
  primer
gtaaaacgacggccagtcacagcttccaactactgaggc

SEQ ID NO: 99053 - DNA, 43 bp, Artificial Sequence
  primer
gtaaaacgacggccagtgggaacccatattaaatggtaaagtg

SEQ ID NO: 99054 - DNA, 21 bp, Artificial Sequence
  primer
tccagtgcaaagcaagctaag

SEQ ID NO: 99055 - DNA, 24 bp, Artificial Sequence
  primer
ccaaatgattgttagctttcaaga

SEQ ID NO: 99056 - DNA, 40 bp, Artificial Sequence
  primer
gtaaaacgacggccagtggagaccatcttcattccaaatc

SEQ ID NO: 99057 - DNA, 21 bp, Artificial Sequence
  primer
agccaagttctcacttcctgg

SEQ ID NO: 99058 - DNA, 22 bp, Artificial Sequence
  primer
tggctttaaattcttcaggagc

SEQ ID NO: 99059 - DNA, 24 bp, Artificial Sequence
  primer
tggctatttaataacagcacttgg

SEQ ID NO: 99060 - DNA, 40 bp, Artificial Sequence
  primer
gtaaaacgacggccagtcacagactaacccatttgtccac

SEQ ID NO: 99061 - DNA, 38 bp, Artificial Sequence
  primer
gtaaaacgacggccagtaagctcctgacacctttgctg

SEQ ID NO: 99062 - DNA, 40 bp, Artificial Sequence
  primer
gtaaaacgacggccagtcaatgttatgtcaccaccaggag

SEQ ID NO: 99063 - DNA, 38 bp, Artificial Sequence
  primer
gtaaaacgacggccagtcttgcaaatggtagcaagtgg

SEQ ID NO: 99064 - DNA, 38 bp, Artificial Sequence
  primer
gtaaaacgacggccagtctgaaatctggagctcttggg

SEQ ID NO: 99065 - DNA, 20 bp, Artificial Sequence
  primer
tggagaggtgtctggctctg

SEQ ID NO: 99066 - DNA, 21 bp, Artificial Sequence
  primer
aacccagaaggaaattcagcc

SEQ ID NO: 99067 - DNA, 21 bp, Artificial Sequence
  primer
gatctgtgccatgcagatacg

SEQ ID NO: 99068 - DNA, 20 bp, Artificial Sequence
  primer
catgggaaagctcagtctgc

SEQ ID NO: 99069 - DNA, 21 bp, Artificial Sequence
  primer
tgtttctcagtgccctgtgtc

SEQ ID NO: 99070 - DNA, 21 bp, Artificial Sequence
  primer
actcagaaacggtgggagaag

SEQ ID NO: 99071 - DNA, 21 bp, Artificial Sequence
  primer
cccttgaggtcctgaactgtc

SEQ ID NO: 99072 - DNA, 21 bp, Artificial Sequence
  primer
acagtttccttagctcctgcg

SEQ ID NO: 99073 - DNA, 35 bp, Artificial Sequence
  primer
gtaaaacgacggccagtctgcaggagccagattgc

SEQ ID NO: 99074 - DNA, 25 bp, Artificial Sequence
  primer
aaatctctttccaaggtatctcagc

SEQ ID NO: 99075 - DNA, 21 bp, Artificial Sequence
  primer
agataagaggcactgccaagc

SEQ ID NO: 99076 - DNA, 38 bp, Artificial Sequence
  primer
gtaaaacgacggccagtacacagcattgcaggttcttg

SEQ ID NO: 99077 - DNA, 38 bp, Artificial Sequence
  primer
gtaaaacgacggccagtctgtggcaaacaaatgctcac

SEQ ID NO: 99078 - DNA, 38 bp, Artificial Sequence
  primer
gtaaaacgacggccagtaatgccagacataaggcaagc

SEQ ID NO: 99079 - DNA, 22 bp, Artificial Sequence
  primer
gacatgagacattgtgactggc

SEQ ID NO: 99080 - DNA, 38 bp, Artificial Sequence
  primer
gtaaaacgacggccagtagaagccactgattccaggtg

SEQ ID NO: 99081 - DNA, 21 bp, Artificial Sequence
  primer
aacagagtgagaccctgcctc

SEQ ID NO: 99082 - DNA, 38 bp, Artificial Sequence
  primer
gtaaaacgacggccagtaattgcaagtcagcatctccc

SEQ ID NO: 99083 - DNA, 21 bp, Artificial Sequence
  primer
gaacagtcatttgctgccaac

SEQ ID NO: 99084 - DNA, 21 bp, Artificial Sequence
  primer
cacaggagcagtagtcgaagc

SEQ ID NO: 99085 - DNA, 19 bp, Artificial Sequence
  primer
acatggagcatcctgaggg

SEQ ID NO: 99086 - DNA, 38 bp, Artificial Sequence
  primer
gtaaaacgacggccagtgggaacaatactacccgcatc

SEQ ID NO: 99087 - DNA, 21 bp, Artificial Sequence
  primer
aagctatcagggtggtgatgg

SEQ ID NO: 99088 - DNA, 21 bp, Artificial Sequence
  primer
ctcaagtggagggctggatag

SEQ ID NO: 99089 - DNA, 21 bp, Artificial Sequence
  primer
cattgtggcagaagacgactg

SEQ ID NO: 99090 - DNA, 21 bp, Artificial Sequence
  primer
gctgtactcgaagtccaccag

SEQ ID NO: 99091 - DNA, 21 bp, Artificial Sequence
  primer
ccctgggagaataaggtggac

SEQ ID NO: 99092 - DNA, 22 bp, Artificial Sequence
  primer
gggagactgtggagtatttccc

SEQ ID NO: 99093 - DNA, 22 bp, Artificial Sequence
  primer
tcctaactccactctccacagc

SEQ ID NO: 99094 - DNA, 20 bp, Artificial Sequence
  primer
ctcctggaagagtgtggctg

SEQ ID NO: 99095 - DNA, 37 bp, Artificial Sequence
  primer
gtaaaacgacggccagtcttctgctcgttgttcctcc

SEQ ID NO: 99096 - DNA, 38 bp, Artificial Sequence
  primer
gtaaaacgacggccagtagcagtcatgtatcagccacc

SEQ ID NO: 99097 - DNA, 40 bp, Artificial Sequence
  primer
gtaaaacgacggccagtcaacaggcttgtgatggtaagag

SEQ ID NO: 99098 - DNA, 39 bp, Artificial Sequence
  primer
gtaaaacgacggccagtcattggaacccaatctaactcc

SEQ ID NO: 99099 - DNA, 39 bp, Artificial Sequence
  primer
gtaaaacgacggccagtccaaaggtaagtgcactgtttg

SEQ ID NO: 99100 - DNA, 21 bp, Artificial Sequence
  primer
cccagctttaaatggcttcag

SEQ ID NO: 99101 - DNA, 40 bp, Artificial Sequence
  primer
gtaaaacgacggccagtgggcaatagaaccctctaagttc

SEQ ID NO: 99102 - DNA, 38 bp, Artificial Sequence
  primer
gtaaaacgacggccagtagcagaatatctgcagtgccc

SEQ ID NO: 99103 - DNA, 37 bp, Artificial Sequence
  primer
gtaaaacgacggccagtggcgtaaatgacaaacctgc

SEQ ID NO: 99104 - DNA, 21 bp, Artificial Sequence
  primer
tgctggttgtatctgtcctgc

SEQ ID NO: 99105 - DNA, 44 bp, Artificial Sequence
  primer
gtaaaacgacggccagtgttaatacacttctgaacatgaccttg

SEQ ID NO: 99106 - DNA, 21 bp, Artificial Sequence
  primer
cctgtcaaatgacggatgaag

SEQ ID NO: 99107 - DNA, 25 bp, Artificial Sequence
  primer
aaacggttcaaagaactttatctgg

SEQ ID NO: 99108 - DNA, 18 bp, Artificial Sequence
  primer
gatccactcgcctcggtc

SEQ ID NO: 99109 - DNA, 38 bp, Artificial Sequence
  primer
gtaaaacgacggccagtctttattggccaggaacgatg

SEQ ID NO: 99110 - DNA, 20 bp, Artificial Sequence
  primer
ggtcagttcctcccaccttc

SEQ ID NO: 99111 - DNA, 23 bp, Artificial Sequence
  primer
ttctgaaacttgtgtgctttgaa

SEQ ID NO: 99112 - DNA, 26 bp, Artificial Sequence
  primer
tgactcacaagttaatttcatttcca

SEQ ID NO: 99113 - DNA, 23 bp, Artificial Sequence
  primer
ctttgcatgcagtagttgttcac

SEQ ID NO: 99114 - DNA, 21 bp, Artificial Sequence
  primer
tgtggtcgcagattctctttg

SEQ ID NO: 99115 - DNA, 19 bp, Artificial Sequence
  primer
gtgcctggccataaggaag

SEQ ID NO: 99116 - DNA, 38 bp, Artificial Sequence
  primer
gtaaaacgacggccagtcaaggaagaacggcagcttac

SEQ ID NO: 99117 - DNA, 38 bp, Artificial Sequence
  primer
gtaaaacgacggccagtggtgctttcctttcagtgcag

SEQ ID NO: 99118 - DNA, 43 bp, Artificial Sequence
  primer
gtaaaacgacggccagttgtttaatataggacacaggcaacac

SEQ ID NO: 99119 - DNA, 42 bp, Artificial Sequence
  primer
gtaaaacgacggccagtcctgtcagtgcattgtacatctaac

SEQ ID NO: 99120 - DNA, 22 bp, Artificial Sequence
  primer
tgtcctacctgacatttctgcc

SEQ ID NO: 99121 - DNA, 21 bp, Artificial Sequence
  primer
tcggccagcatgtttctattc

SEQ ID NO: 99122 - DNA, 21 bp, Artificial Sequence
  primer
ctccctgtaactgccaactcc

SEQ ID NO: 99123 - DNA, 42 bp, Artificial Sequence
  primer
gtaaaacgacggccagttgatgcatttggtttattctcaaag

SEQ ID NO: 99124 - DNA, 40 bp, Artificial Sequence
  primer
gtaaaacgacggccagtcaatcctgtgttacaggtgaagc

SEQ ID NO: 99125 - DNA, 21 bp, Artificial Sequence
  primer
acttgtagcaaccaatgccac

SEQ ID NO: 99126 - DNA, 22 bp, Artificial Sequence
  primer
tctttggttgctctgtggtatc

SEQ ID NO: 99127 - DNA, 43 bp, Artificial Sequence
  primer
gtaaaacgacggccagttcctgccttctttaataatttgtgag

SEQ ID NO: 99128 - DNA, 44 bp, Artificial Sequence
  primer
gtaaaacgacggccagtttaaatgaattacaaacatctggctac

SEQ ID NO: 99129 - DNA, 38 bp, Artificial Sequence
  primer
gtaaaacgacggccagtcggaggactggaatttactgc

SEQ ID NO: 99130 - DNA, 22 bp, Artificial Sequence
  primer
gctatgggagcccttgaaatac

SEQ ID NO: 99131 - DNA, 27 bp, Artificial Sequence
  primer
cacactgaatatatcacttaggtgggt

SEQ ID NO: 99132 - DNA, 23 bp, Artificial Sequence
  primer
cacttgtgtttgggatatgtgtg

SEQ ID NO: 99133 - DNA, 21 bp, Artificial Sequence
  primer
tggtttggcatttatttgcat

SEQ ID NO: 99134 - DNA, 18 bp, Artificial Sequence
  primer
gcttgccaggagctaggc

SEQ ID NO: 99135 - DNA, 21 bp, Artificial Sequence
  primer
gggatggtgtgaaatgactta

SEQ ID NO: 99136 - DNA, 38 bp, Artificial Sequence
  primer
gtaaaacgacggccagtccatttcagttcaggttgcag

SEQ ID NO: 99137 - DNA, 21 bp, Artificial Sequence
  primer
tctatcgtcattcccacgatg

SEQ ID NO: 99138 - DNA, 27 bp, Artificial Sequence
  primer
aagtcaatgtgctttataagtgttgtg

SEQ ID NO: 99139 - DNA, 21 bp, Artificial Sequence
  primer
tttctgcagagcaccaatctc

SEQ ID NO: 99140 - DNA, 21 bp, Artificial Sequence
  primer
tggttcatcggccttatcttc

SEQ ID NO: 99141 - DNA, 38 bp, Artificial Sequence
  primer
gtaaaacgacggccagttcaaccatggtgagttccttg

SEQ ID NO: 99142 - DNA, 42 bp, Artificial Sequence
  primer
gtaaaacgacggccagttgtagtgcaagatgattctgatgtc

SEQ ID NO: 99143 - DNA, 21 bp, Artificial Sequence
  primer
catcgtccagattctttgtcg

SEQ ID NO: 99144 - DNA, 24 bp, Artificial Sequence
  primer
ggaggaactatcagaatggaagtc

SEQ ID NO: 99145 - DNA, 21 bp, Artificial Sequence
  primer
agggcagaattcttcagttgg

SEQ ID NO: 99146 - DNA, 21 bp, Artificial Sequence
  primer
attctgatgccatgaaggagg

SEQ ID NO: 99147 - DNA, 21 bp, Artificial Sequence
  primer
ctggagcagcatatccacttg

SEQ ID NO: 99148 - DNA, 39 bp, Artificial Sequence
  primer
gtaaaacgacggccagttggcgtgttcagagtttctagg

SEQ ID NO: 99149 - DNA, 18 bp, Artificial Sequence
  primer
ctcccagccgagaattgg

SEQ ID NO: 99150 - DNA, 41 bp, Artificial Sequence
  primer
gtaaaacgacggccagttttctatgctactcccaaaccttg

SEQ ID NO: 99151 - DNA, 38 bp, Artificial Sequence
  primer
gtaaaacgacggccagttctcacaaacaaccaagccac

SEQ ID NO: 99152 - DNA, 39 bp, Artificial Sequence
  primer
gtaaaacgacggccagtttgtacggtttgcatccttaac

SEQ ID NO: 99153 - DNA, 22 bp, Artificial Sequence
  primer
ctgagtgttaccattcacgagg

SEQ ID NO: 99154 - DNA, 39 bp, Artificial Sequence
  primer
gtaaaacgacggccagttcttctggcaataatggctttc

SEQ ID NO: 99155 - DNA, 24 bp, Artificial Sequence
  primer
aacagggttggatttctattagcc

SEQ ID NO: 99156 - DNA, 38 bp, Artificial Sequence
  primer
gtaaaacgacggccagttgtgcataagaccaaaccagg

SEQ ID NO: 99157 - DNA, 23 bp, Artificial Sequence
  primer
ctccaaattacagaagacaaccg

SEQ ID NO: 99158 - DNA, 21 bp, Artificial Sequence
  primer
acatggaccagccttggatac

SEQ ID NO: 99159 - DNA, 22 bp, Artificial Sequence
  primer
aaccatagagagaggcaaaggg

SEQ ID NO: 99160 - DNA, 22 bp, Artificial Sequence
  primer
tttgtcctttctttcacccttc

SEQ ID NO: 99161 - DNA, 21 bp, Artificial Sequence
  primer
aagacagctgagcggtgctac

SEQ ID NO: 99162 - DNA, 38 bp, Artificial Sequence
  primer
gtaaaacgacggccagtcacaggtaggctctgtccatc

SEQ ID NO: 99163 - DNA, 38 bp, Artificial Sequence
  primer
gtaaaacgacggccagtctacatcgctggcaagaattg

SEQ ID NO: 99164 - DNA, 39 bp, Artificial Sequence
  primer
gtaaaacgacggccagtcatctgagtccaagttggtttg

SEQ ID NO: 99165 - DNA, 38 bp, Artificial Sequence
  primer
gtaaaacgacggccagtcctcccacattaatggaaacc

SEQ ID NO: 99166 - DNA, 21 bp, Artificial Sequence
  primer
ctgcagtgagccatgattgtg

SEQ ID NO: 99167 - DNA, 21 bp, Artificial Sequence
  primer
tcgcacctatagttaacccgc

SEQ ID NO: 99168 - DNA, 20 bp, Artificial Sequence
  primer
gaactgacagaaagcgcagg

SEQ ID NO: 99169 - DNA, 20 bp, Artificial Sequence
  primer
ctgagcacatttcccagctc

SEQ ID NO: 99170 - DNA, 23 bp, Artificial Sequence
  primer
agcaactctgtttccttgacaac

SEQ ID NO: 99171 - DNA, 39 bp, Artificial Sequence
  primer
gtaaaacgacggccagttttgtaagccattattcctccg

SEQ ID NO: 99172 - DNA, 38 bp, Artificial Sequence
  primer
gtaaaacgacggccagttgtgccctcacttgacaagac

SEQ ID NO: 99173 - DNA, 21 bp, Artificial Sequence
  primer
tgaaactccagcagttatggc

SEQ ID NO: 99174 - DNA, 21 bp, Artificial Sequence
  primer
tcaccttcacccttgttctca

SEQ ID NO: 99175 - DNA, 38 bp, Artificial Sequence
  primer
gtaaaacgacggccagtccttacaccatgcaggtttcc

SEQ ID NO: 99176 - DNA, 42 bp, Artificial Sequence
  primer
gtaaaacgacggccagttctacaggtaacagagtcctccctc

SEQ ID NO: 99177 - DNA, 38 bp, Artificial Sequence
  primer
gtaaaacgacggccagtagctcattggacagtttgctc

SEQ ID NO: 99178 - DNA, 36 bp, Artificial Sequence
  primer
gtaaaacgacggccagtggtcaacatgaagcagcgt

SEQ ID NO: 99179 - DNA, 21 bp, Artificial Sequence
  primer
ccaaggcagactaggtaaccc

SEQ ID NO: 99180 - DNA, 38 bp, Artificial Sequence
  primer
gtaaaacgacggccagttcaagccattccaagctattg

SEQ ID NO: 99181 - DNA, 20 bp, Artificial Sequence
  primer
agtggcagaggacagtcagg

SEQ ID NO: 99182 - DNA, 38 bp, Artificial Sequence
  primer
gtaaaacgacggccagtcccgcaaaggtcattaagaag

SEQ ID NO: 99183 - DNA, 22 bp, Artificial Sequence
  primer
tgcaagttgatgaagaccaatc

SEQ ID NO: 99184 - DNA, 21 bp, Artificial Sequence
  primer
aaatggttcaaagcttggtgg

SEQ ID NO: 99185 - DNA, 26 bp, Artificial Sequence
  primer
aaagtttcttaactacaatgtgcgac

SEQ ID NO: 99186 - DNA, 39 bp, Artificial Sequence
  primer
gtaaaacgacggccagttccatgattgtagccctagtcc

SEQ ID NO: 99187 - DNA, 38 bp, Artificial Sequence
  primer
gtaaaacgacggccagttgcctaataacactgcatggc

SEQ ID NO: 99188 - DNA, 21 bp, Artificial Sequence
  primer
gcagtacactggcagcttgac

SEQ ID NO: 99189 - DNA, 22 bp, Artificial Sequence
  primer
tccagaatggttcagcagtaag

SEQ ID NO: 99190 - DNA, 22 bp, Artificial Sequence
  primer
cccaaatccaagcttctaaagg

SEQ ID NO: 99191 - DNA, 21 bp, Artificial Sequence
  primer
agattacagcagcaagccacc

SEQ ID NO: 99192 - DNA, 21 bp, Artificial Sequence
  primer
gaacaggtcttccagctctcg

SEQ ID NO: 99193 - DNA, 22 bp, Artificial Sequence
  primer
tggatcaatgatgctcaaagac

SEQ ID NO: 99194 - DNA, 23 bp, Artificial Sequence
  primer
ggcacaaccaatatcattattcc

SEQ ID NO: 99195 - DNA, 38 bp, Artificial Sequence
  primer
gtaaaacgacggccagtaatcttggccagtttagctcc

SEQ ID NO: 99196 - DNA, 38 bp, Artificial Sequence
  primer
gtaaaacgacggccagtcaggactctgcacatagcagg

SEQ ID NO: 99197 - DNA, 18 bp, Artificial Sequence
  primer
ccttggcctcctgggttc

SEQ ID NO: 99198 - DNA, 21 bp, Artificial Sequence
  primer
tacaccaaaggcaggtttgtg

SEQ ID NO: 99199 - DNA, 21 bp, Artificial Sequence
  primer
agaaccagtcaaagtcgtcgc

SEQ ID NO: 99200 - DNA, 38 bp, Artificial Sequence
  primer
gtaaaacgacggccagtagcttatcatcccacctcgtg

SEQ ID NO: 99201 - DNA, 38 bp, Artificial Sequence
  primer
gtaaaacgacggccagttatctccaacatccctttgcc

SEQ ID NO: 99202 - DNA, 22 bp, Artificial Sequence
  primer
aacttgtcatttctctgggctc

SEQ ID NO: 99203 - DNA, 21 bp, Artificial Sequence
  primer
agcagcacagtgagacgtgag

SEQ ID NO: 99204 - DNA, 38 bp, Artificial Sequence
  primer
gtaaaacgacggccagtcgggtgcttcttggagagtag

SEQ ID NO: 99205 - DNA, 36 bp, Artificial Sequence
  primer
gtaaaacgacggccagtgatcaaagcggccagtgtc

SEQ ID NO: 99206 - DNA, 38 bp, Artificial Sequence
  primer
gtaaaacgacggccagtggtacaggtcctcactgagcc

SEQ ID NO: 99207 - DNA, 19 bp, Artificial Sequence
  primer
gccctgctcctgttcaaag

SEQ ID NO: 99208 - DNA, 38 bp, Artificial Sequence
  primer
gtaaaacgacggccagtgatgagaagtgggtggctctg

SEQ ID NO: 99209 - DNA, 27 bp, Artificial Sequence
  primer
cttaatggtcacatgaatactggtaag

SEQ ID NO: 99210 - DNA, 23 bp, Artificial Sequence
  primer
tctcaatcacgtcacagagaaac

SEQ ID NO: 99211 - DNA, 21 bp, Artificial Sequence
  primer
gcagtgaagcaagatcacacc

SEQ ID NO: 99212 - DNA, 20 bp, Artificial Sequence
  primer
ccaccgtacctggatgacac

SEQ ID NO: 99213 - DNA, 23 bp, Artificial Sequence
  primer
ttcctcaagaagcctggtacttt

SEQ ID NO: 99214 - DNA, 21 bp, Artificial Sequence
  primer
tcctgtatcacctccctttgg

SEQ ID NO: 99215 - DNA, 38 bp, Artificial Sequence
  primer
gtaaaacgacggccagtagagcaccaaagctgaccatc

SEQ ID NO: 99216 - DNA, 18 bp, Artificial Sequence
  primer
gtgacagtctccaggcgg

SEQ ID NO: 99217 - DNA, 21 bp, Artificial Sequence
  primer
caactccatacatttgctccc

SEQ ID NO: 99218 - DNA, 23 bp, Artificial Sequence
  primer
ttgggctaatgattaagttggag

SEQ ID NO: 99219 - DNA, 26 bp, Artificial Sequence
  primer
ggaggaaatgccataaggtatatagg

SEQ ID NO: 99220 - DNA, 40 bp, Artificial Sequence
  primer
gtaaaacgacggccagtgcagagcaagcttgtagaaagag

SEQ ID NO: 99221 - DNA, 26 bp, Artificial Sequence
  primer
tgggtagcttattaaagtttccagtg

SEQ ID NO: 99222 - DNA, 43 bp, Artificial Sequence
  primer
gtaaaacgacggccagtgcctagactagatcttgaggctactg

SEQ ID NO: 99223 - DNA, 41 bp, Artificial Sequence
  primer
gtaaaacgacggccagtgatttccttcactcatagattccc

SEQ ID NO: 99224 - DNA, 27 bp, Artificial Sequence
  primer
tgatggaaactgtaagtgatcatattg

SEQ ID NO: 99225 - DNA, 18 bp, Artificial Sequence
  primer
gctgaccgcaagttcctc

SEQ ID NO: 99226 - DNA, 21 bp, Artificial Sequence
  primer
agaagagggaaagggagcatc

SEQ ID NO: 99227 - DNA, 21 bp, Artificial Sequence
  primer
tcatatgactgacctgggtgg

SEQ ID NO: 99228 - DNA, 20 bp, Artificial Sequence
  primer
tggaacccagagtatgccag

SEQ ID NO: 99229 - DNA, 38 bp, Artificial Sequence
  primer
gtaaaacgacggccagttagtgttgccaccaccttctg

SEQ ID NO: 99230 - DNA, 21 bp, Artificial Sequence
  primer
ctcaaacccaatgtctagggc

SEQ ID NO: 99231 - DNA, 38 bp, Artificial Sequence
  primer
gtaaaacgacggccagtattgcacagctcctgtcactg

SEQ ID NO: 99232 - DNA, 19 bp, Artificial Sequence
  primer
gggcgatggtgtttgtacc

SEQ ID NO: 99233 - DNA, 20 bp, Artificial Sequence
  primer
cactccctgcctagtgttgc

SEQ ID NO: 99234 - DNA, 21 bp, Artificial Sequence
  primer
ggagacatctgggaaggtttg

SEQ ID NO: 99235 - DNA, 21 bp, Artificial Sequence
  primer
acagcataggaatagctgggc

SEQ ID NO: 99236 - DNA, 21 bp, Artificial Sequence
  primer
atgctcagaggacatttgctg

SEQ ID NO: 99237 - DNA, 21 bp, Artificial Sequence
  primer
ctctgcagcacaggaataacg

SEQ ID NO: 99238 - DNA, 21 bp, Artificial Sequence
  primer
ctccacaatcagcacctcttg

SEQ ID NO: 99239 - DNA, 22 bp, Artificial Sequence
  primer
ccaagcttgaaccctagttctg

SEQ ID NO: 99240 - DNA, 21 bp, Artificial Sequence
  primer
ttgtatactggatttggccgc

SEQ ID NO: 99241 - DNA, 38 bp, Artificial Sequence
  primer
gtaaaacgacggccagtcaatggcgacttggtagaaac

SEQ ID NO: 99242 - DNA, 19 bp, Artificial Sequence
  primer
agacgcgcgagaaagtgtg

SEQ ID NO: 99243 - DNA, 20 bp, Artificial Sequence
  primer
gagagcagaagggaggcaag

SEQ ID NO: 99244 - DNA, 40 bp, Artificial Sequence
  primer
gtaaaacgacggccagtctcgaaagaataccacacactgg

SEQ ID NO: 99245 - DNA, 19 bp, Artificial Sequence
  primer
ctccttctcagcagctccg

SEQ ID NO: 99246 - DNA, 37 bp, Artificial Sequence
  primer
gtaaaacgacggccagtggtaagaacacgggcttcag

SEQ ID NO: 99247 - DNA, 38 bp, Artificial Sequence
  primer
gtaaaacgacggccagtgaagatggcctgagcactgtc

SEQ ID NO: 99248 - DNA, 21 bp, Artificial Sequence
  primer
ctgagaagcggatcctggtag

SEQ ID NO: 99249 - DNA, 21 bp, Artificial Sequence
  primer
taatgtcagtgccttcctccc

SEQ ID NO: 99250 - DNA, 21 bp, Artificial Sequence
  primer
gatggcactgaaggtctctgg

SEQ ID NO: 99251 - DNA, 38 bp, Artificial Sequence
  primer
gtaaaacgacggccagtcctggtgtagaatctggagcc

SEQ ID NO: 99252 - DNA, 37 bp, Artificial Sequence
  primer
gtaaaacgacggccagtacctcagcaaagcctggttc

SEQ ID NO: 99253 - DNA, 20 bp, Artificial Sequence
  primer
aggatctctcccacacccac

SEQ ID NO: 99254 - DNA, 38 bp, Artificial Sequence
  primer
gtaaaacgacggccagtacctcactgcttgtccctacc

SEQ ID NO: 99255 - DNA, 21 bp, Artificial Sequence
  primer
aatgaacatccctgctcatcc

SEQ ID NO: 99256 - DNA, 39 bp, Artificial Sequence
  primer
gtaaaacgacggccagtcaaagaaagacacaccaggctc

SEQ ID NO: 99257 - DNA, 21 bp, Artificial Sequence
  primer
tgccagctcttctataccagg

SEQ ID NO: 99258 - DNA, 21 bp, Artificial Sequence
  primer
ccaggactcagagacagcaag

SEQ ID NO: 99259 - DNA, 21 bp, Artificial Sequence
  primer
gagaggagcagaggcattgac

SEQ ID NO: 99260 - DNA, 38 bp, Artificial Sequence
  primer
gtaaaacgacggccagtgagagtgaccaccctcattcc

SEQ ID NO: 99261 - DNA, 21 bp, Artificial Sequence
  primer
tgtcaggcatcacttggaatc

SEQ ID NO: 99262 - DNA, 20 bp, Artificial Sequence
  primer
cacaggaagccgactctcag

SEQ ID NO: 99263 - DNA, 38 bp, Artificial Sequence
  primer
gtaaaacgacggccagtggaaccagaacccatcatacc

SEQ ID NO: 99264 - DNA, 21 bp, Artificial Sequence
  primer
cctgggaaggtctccctactc

SEQ ID NO: 99265 - DNA, 21 bp, Artificial Sequence
  primer
cacacagtgagtgctcccttc

SEQ ID NO: 99266 - DNA, 38 bp, Artificial Sequence
  primer
gtaaaacgacggccagtgagaatgcaagaaggtcctcg

SEQ ID NO: 99267 - DNA, 20 bp, Artificial Sequence
  primer
tggtttgatgttcttgcagc

SEQ ID NO: 99268 - DNA, 39 bp, Artificial Sequence
  primer
gtaaaacgacggccagttctcttagaataatggcacggc

SEQ ID NO: 99269 - DNA, 20 bp, Artificial Sequence
  primer
atttgggcactgaaagcctc

SEQ ID NO: 99270 - DNA, 38 bp, Artificial Sequence
  primer
gtaaaacgacggccagtgccagtttggactgcctaaag

SEQ ID NO: 99271 - DNA, 21 bp, Artificial Sequence
  primer
caaacaccttacagtgcaggc

SEQ ID NO: 99272 - DNA, 21 bp, Artificial Sequence
  primer
gcacagcactccatcctgtag

SEQ ID NO: 99273 - DNA, 22 bp, Artificial Sequence
  primer
aaatggtttccagttggtgatg

SEQ ID NO: 99274 - DNA, 38 bp, Artificial Sequence
  primer
gtaaaacgacggccagttattcctgggagaaagggtcc

SEQ ID NO: 99275 - DNA, 24 bp, Artificial Sequence
  primer
ggtagacacaagcatatttctggg

SEQ ID NO: 99276 - DNA, 20 bp, Artificial Sequence
  primer
ccaaatgagggaacaggttg

SEQ ID NO: 99277 - DNA, 38 bp, Artificial Sequence
  primer
gtaaaacgacggccagtgagattgcggagggactttag

SEQ ID NO: 99278 - DNA, 38 bp, Artificial Sequence
  primer
gtaaaacgacggccagtagcaaattatgctgtgcatgg

SEQ ID NO: 99279 - DNA, 21 bp, Artificial Sequence
  primer
tcagttctgagttgtgccgag

SEQ ID NO: 99280 - DNA, 21 bp, Artificial Sequence
  primer
tagaaggcctggtcctccttc

SEQ ID NO: 99281 - DNA, 21 bp, Artificial Sequence
  primer
gggatatttcctcccttgagc

SEQ ID NO: 99282 - DNA, 21 bp, Artificial Sequence
  primer
ccagctagggacaggacattc

SEQ ID NO: 99283 - DNA, 21 bp, Artificial Sequence
  primer
gtctgctacatgctgggtgtc

SEQ ID NO: 99284 - DNA, 21 bp, Artificial Sequence
  primer
aataactggtattgcctgccc

SEQ ID NO: 99285 - DNA, 21 bp, Artificial Sequence
  primer
actgctgaggagagggttcag

SEQ ID NO: 99286 - DNA, 21 bp, Artificial Sequence
  primer
agatgctccaagtgtctgtgg

SEQ ID NO: 99287 - DNA, 38 bp, Artificial Sequence
  primer
gtaaaacgacggccagttcaggctcactatcttcctgc

SEQ ID NO: 99288 - DNA, 38 bp, Artificial Sequence
  primer
gtaaaacgacggccagttgaacagctccactttcttcg

SEQ ID NO: 99289 - DNA, 21 bp, Artificial Sequence
  primer
gaactgacgtctgtggctgac

SEQ ID NO: 99290 - DNA, 21 bp, Artificial Sequence
  primer
ggctgagggtaatgcaacttc

SEQ ID NO: 99291 - DNA, 38 bp, Artificial Sequence
  primer
gtaaaacgacggccagtggaaagcatggcatatcctaa

SEQ ID NO: 99292 - DNA, 38 bp, Artificial Sequence
  primer
gtaaaacgacggccagtcagtgcagccgtatttcttct

SEQ ID NO: 99293 - DNA, 22 bp, Artificial Sequence
  primer
gctatttctttaggaatgcccg

SEQ ID NO: 99294 - DNA, 37 bp, Artificial Sequence
  primer
gtaaaacgacggccagttgctgtcctggattagcacc

SEQ ID NO: 99295 - DNA, 21 bp, Artificial Sequence
  primer
atggagtggatctgcataacg

SEQ ID NO: 99296 - DNA, 38 bp, Artificial Sequence
  primer
gtaaaacgacggccagtagtcacggagaagtagcggtc

SEQ ID NO: 99297 - DNA, 38 bp, Artificial Sequence
  primer
gtaaaacgacggccagtgcacatgactgtgacagggag

SEQ ID NO: 99298 - DNA, 21 bp, Artificial Sequence
  primer
tggcatcttgatcaccacttc

SEQ ID NO: 99299 - DNA, 21 bp, Artificial Sequence
  primer
cgatcacgccctttcttagtc

SEQ ID NO: 99300 - DNA, 21 bp, Artificial Sequence
  primer
gctttgttgcagagtgcgtag

SEQ ID NO: 99301 - DNA, 38 bp, Artificial Sequence
  primer
gtaaaacgacggccagtgaagtctggaaagttggcagg

SEQ ID NO: 99302 - DNA, 21 bp, Artificial Sequence
  primer
ttgctgaccacatagtccagg

SEQ ID NO: 99303 - DNA, 21 bp, Artificial Sequence
  primer
taccagacttggagaaacggg

SEQ ID NO: 99304 - DNA, 21 bp, Artificial Sequence
  primer
gccaattctgatgcatgtttg

SEQ ID NO: 99305 - DNA, 21 bp, Artificial Sequence
  primer
agccaagattgtcctggtgac

SEQ ID NO: 99306 - DNA, 21 bp, Artificial Sequence
  primer
ataagtgtgtcactgctgggc

SEQ ID NO: 99307 - DNA, 21 bp, Artificial Sequence
  primer
cccgttaagaaagcgatgaag

SEQ ID NO: 99308 - DNA, 37 bp, Artificial Sequence
  primer
gtaaaacgacggccagtcagaacaagatggcaggagc

SEQ ID NO: 99309 - DNA, 38 bp, Artificial Sequence
  primer
gtaaaacgacggccagtatacttcctcctgttggagcg

SEQ ID NO: 99310 - DNA, 21 bp, Artificial Sequence
  primer
ttgtccgatgagggtaacttg

SEQ ID NO: 99311 - DNA, 38 bp, Artificial Sequence
  primer
gtaaaacgacggccagtgggtccaagtgatgatgaagg

SEQ ID NO: 99312 - DNA, 21 bp, Artificial Sequence
  primer
tcctcctcctaaggtctgtgg

SEQ ID NO: 99313 - DNA, 21 bp, Artificial Sequence
  primer
tagaggttcatggagaaggcg

SEQ ID NO: 99314 - DNA, 21 bp, Artificial Sequence
  primer
atgtggatgtacagcaccgtc

SEQ ID NO: 99315 - DNA, 38 bp, Artificial Sequence
  primer
gtaaaacgacggccagtttagtgggctcttgaggaagg

SEQ ID NO: 99316 - DNA, 21 bp, Artificial Sequence
  primer
ctgtcacacactcattgcctg

SEQ ID NO: 99317 - DNA, 21 bp, Artificial Sequence
  primer
ggtgaggatgaaggctagcag

SEQ ID NO: 99318 - DNA, 38 bp, Artificial Sequence
  primer
gtaaaacgacggccagtacttcctcctcagcaaacgtg

SEQ ID NO: 99319 - DNA, 38 bp, Artificial Sequence
  primer
gtaaaacgacggccagtaggatgaaggagatcagccag

SEQ ID NO: 99320 - DNA, 21 bp, Artificial Sequence
  primer
cacagagtcagaaccctggag

SEQ ID NO: 99321 - DNA, 38 bp, Artificial Sequence
  primer
gtaaaacgacggccagttagaccacttggaggacaggg

SEQ ID NO: 99322 - DNA, 38 bp, Artificial Sequence
  primer
gtaaaacgacggccagtgattgaggcctttcgttgaag

SEQ ID NO: 99323 - DNA, 21 bp, Artificial Sequence
  primer
ttcctgaaggttctgttgcag

SEQ ID NO: 99324 - DNA, 21 bp, Artificial Sequence
  primer
ttcagggtagcttgctgttcc

SEQ ID NO: 99325 - DNA, 38 bp, Artificial Sequence
  primer
gtaaaacgacggccagtgccatgagcctatccctttac

SEQ ID NO: 99326 - DNA, 39 bp, Artificial Sequence
  primer
gtaaaacgacggccagtaagtctttgaccaggcagtttc

SEQ ID NO: 99327 - DNA, 20 bp, Artificial Sequence
  primer
tttcagacgcacattggttg

SEQ ID NO: 99328 - DNA, 38 bp, Artificial Sequence
  primer
gtaaaacgacggccagtaggatccatgctttcaccatc

SEQ ID NO: 99329 - DNA, 21 bp, Artificial Sequence
  primer
agcagtggtgagaagcattcc

SEQ ID NO: 99330 - DNA, 21 bp, Artificial Sequence
  primer
ccttcccaatcaacttgaacc

SEQ ID NO: 99331 - DNA, 21 bp, Artificial Sequence
  primer
tcgatctgcctgtttgttagc

SEQ ID NO: 99332 - DNA, 38 bp, Artificial Sequence
  primer
gtaaaacgacggccagtagctagaaacccactggctcc

SEQ ID NO: 99333 - DNA, 38 bp, Artificial Sequence
  primer
gtaaaacgacggccagttcagactcaccacctgtgctc

SEQ ID NO: 99334 - DNA, 38 bp, Artificial Sequence
  primer
gtaaaacgacggccagtgacaaatcttcctctcctgcc

SEQ ID NO: 99335 - DNA, 21 bp, Artificial Sequence
  primer
tagccaggcaagtctcctctc

SEQ ID NO: 99336 - DNA, 22 bp, Artificial Sequence
  primer
cccaacagtcagtacccaacag

SEQ ID NO: 99337 - DNA, 20 bp, Artificial Sequence
  primer
gtggcaaccaggttatgtgg

SEQ ID NO: 99338 - DNA, 35 bp, Artificial Sequence
  primer
gtaaaacgacggccagtagcagcgtgaaggtgacg

SEQ ID NO: 99339 - DNA, 20 bp, Artificial Sequence
  primer
gacaccttctcgcctgagtc

SEQ ID NO: 99340 - DNA, 38 bp, Artificial Sequence
  primer
gtaaaacgacggccagtcctctcactttctgcagtggg

SEQ ID NO: 99341 - DNA, 38 bp, Artificial Sequence
  primer
gtaaaacgacggccagtgagaagaagatggccaggaag

SEQ ID NO: 99342 - DNA, 38 bp, Artificial Sequence
  primer
gtaaaacgacggccagtcaggatcttaggagcagtggg

SEQ ID NO: 99343 - DNA, 21 bp, Artificial Sequence
  primer
aacacatccacctgcagactc

SEQ ID NO: 99344 - DNA, 20 bp, Artificial Sequence
  primer
aagtcactgctgtgcgtgag

SEQ ID NO: 99345 - DNA, 38 bp, Artificial Sequence
  primer
gtaaaacgacggccagttgctgttccttggtctttcac

SEQ ID NO: 99346 - DNA, 38 bp, Artificial Sequence
  primer
gtaaaacgacggccagtctcagcacagcagtcgagaag

SEQ ID NO: 99347 - DNA, 38 bp, Artificial Sequence
  primer
gtaaaacgacggccagtgacgggatgatctcagtgatg

SEQ ID NO: 99348 - DNA, 38 bp, Artificial Sequence
  primer
gtaaaacgacggccagttgctctccagccagtgataag

SEQ ID NO: 99349 - DNA, 38 bp, Artificial Sequence
  primer
gtaaaacgacggccagtctcacactctgcggtaaggtg

SEQ ID NO: 99350 - DNA, 38 bp, Artificial Sequence
  primer
gtaaaacgacggccagtggacaccagaggcagctgtag

SEQ ID NO: 99351 - DNA, 38 bp, Artificial Sequence
  primer
gtaaaacgacggccagtctcagtgactcccaggtttgg

SEQ ID NO: 99352 - DNA, 38 bp, Artificial Sequence
  primer
gtaaaacgacggccagtcttacttgcttgagccacagg

SEQ ID NO: 99353 - DNA, 21 bp, Artificial Sequence
  primer
agcctggtctttaggcctttc

SEQ ID NO: 99354 - DNA, 21 bp, Artificial Sequence
  primer
actcagcacactgctgctctc

SEQ ID NO: 99355 - DNA, 21 bp, Artificial Sequence
  primer
ggaggtactctccaatcaggg

SEQ ID NO: 99356 - DNA, 38 bp, Artificial Sequence
  primer
gtaaaacgacggccagttggtggcagtaaccacacatc

SEQ ID NO: 99357 - DNA, 39 bp, Artificial Sequence
  primer
gtaaaacgacggccagtgccatatccttacctctttggc

SEQ ID NO: 99358 - DNA, 38 bp, Artificial Sequence
  primer
gtaaaacgacggccagtccagagggcaatttcttaacc

SEQ ID NO: 99359 - DNA, 39 bp, Artificial Sequence
  primer
gtaaaacgacggccagttgcatgattccaagataagtgg

SEQ ID NO: 99360 - DNA, 18 bp, Artificial Sequence
  primer
caactccctcctcgcctg

SEQ ID NO: 99361 - DNA, 20 bp, Artificial Sequence
  primer
agtgttgatggctgtgtccc

SEQ ID NO: 99362 - DNA, 38 bp, Artificial Sequence
  primer
gtaaaacgacggccagtgcataggtgatgtccgggtag

SEQ ID NO: 99363 - DNA, 20 bp, Artificial Sequence
  primer
agaccgtgatgacgatggac

SEQ ID NO: 99364 - DNA, 20 bp, Artificial Sequence
  primer
tatgcatggactcgatgagc

SEQ ID NO: 99365 - DNA, 38 bp, Artificial Sequence
  primer
gtaaaacgacggccagtaagtctgtgtcttcggccttc

SEQ ID NO: 99366 - DNA, 35 bp, Artificial Sequence
  primer
gtaaaacgacggccagtcttgggaagaggctgctg

SEQ ID NO: 99367 - DNA, 21 bp, Artificial Sequence
  primer
aggccgtcttacagcagacac

SEQ ID NO: 99368 - DNA, 38 bp, Artificial Sequence
  primer
gtaaaacgacggccagtactgaaacctcactccaagcc

SEQ ID NO: 99369 - DNA, 21 bp, Artificial Sequence
  primer
aatccttggtgcctagcacag
